United States Patent Application Publication US 2005/0255487 A1 - sequence listing, part 91

SEQ ID NO: 2502696 - RNA, 19 nt, Homo sapiens
  misc_RNA (1)...(19): siRNA sense strand
ccaggaaacagcaaaacaa

SEQ ID NO: 2502697 - RNA, 19 nt, Homo sapiens
  misc_RNA (1)...(19): siRNA sense strand
ccaaagagcugcaaggagu

SEQ ID NO: 2502698 - RNA, 19 nt, Homo sapiens
  misc_RNA (1)...(19): siRNA sense strand
caggaagauacgauggaaa

SEQ ID NO: 2502699 - RNA, 19 nt, Homo sapiens
  misc_RNA (1)...(19): siRNA sense strand
cuguaggugugaaggcaaa

SEQ ID NO: 2502700 - RNA, 19 nt, Homo sapiens
  misc_RNA (1)...(19): siRNA sense strand
ccuucagaccugugacaaa

SEQ ID NO: 2502701 - RNA, 19 nt, Homo sapiens
  misc_RNA (1)...(19): siRNA sense strand
caucagucuugcugggaau

SEQ ID NO: 2502702 - RNA, 19 nt, Homo sapiens
  misc_RNA (1)...(19): siRNA sense strand
uggaauacgcagacucaaa

SEQ ID NO: 2502703 - RNA, 19 nt, Homo sapiens
  misc_RNA (1)...(19): siRNA sense strand
uuuaaaggucuaagggaga

SEQ ID NO: 2502704 - RNA, 19 nt, Homo sapiens
  misc_RNA (1)...(19): siRNA sense strand
augcgaaggcacaggaaaa

SEQ ID NO: 2502705 - RNA, 19 nt, Homo sapiens
  misc_RNA (1)...(19): siRNA sense strand
gcugggaauauaugggaau

SEQ ID NO: 2502706 - RNA, 19 nt, Homo sapiens
  misc_RNA (1)...(19): siRNA sense strand
cagcaauauugacgaaaau

SEQ ID NO: 2502707 - RNA, 19 nt, Homo sapiens
  misc_RNA (1)...(19): siRNA sense strand
ugaucgaugcagugaagaa

SEQ ID NO: 2502708 - RNA, 19 nt, Homo sapiens
  misc_RNA (1)...(19): siRNA sense strand
cuuuacuugcaguggaaua

SEQ ID NO: 2502709 - RNA, 19 nt, Homo sapiens
  misc_RNA (1)...(19): siRNA sense strand
ggucaagagauuuuggauu

SEQ ID NO: 2502710 - RNA, 19 nt, Homo sapiens
  misc_RNA (1)...(19): siRNA sense strand
uggcaugaucagacucaaa

SEQ ID NO: 2502711 - RNA, 19 nt, Homo sapiens
  misc_RNA (1)...(19): siRNA sense strand
cggucuaacucccugagaa

SEQ ID NO: 2502712 - RNA, 19 nt, Homo sapiens
  misc_RNA (1)...(19): siRNA sense strand
gugacaaauuuacggaacu

SEQ ID NO: 2502713 - RNA, 19 nt, Homo sapiens
  misc_RNA (1)...(19): siRNA sense strand
cagugaagaacuacagcau

SEQ ID NO: 2502714 - RNA, 19 nt, Homo sapiens
  misc_RNA (1)...(19): siRNA sense strand
ggcaaaaguacuacagaga

SEQ ID NO: 2502715 - RNA, 19 nt, Homo sapiens
  misc_RNA (1)...(19): siRNA sense strand
cucagaaauuacaggagau

SEQ ID NO: 2502716 - RNA, 19 nt, Homo sapiens
  misc_RNA (1)...(19): siRNA sense strand
ggucuaacucccugagaac

SEQ ID NO: 2502717 - RNA, 19 nt, Homo sapiens
  misc_RNA (1)...(19): siRNA sense strand
gcaugaagcagcugcagca

SEQ ID NO: 2502718 - RNA, 19 nt, Homo sapiens
  misc_RNA (1)...(19): siRNA sense strand
gcuguaggugugaaggcaa

SEQ ID NO: 2502719 - RNA, 19 nt, Homo sapiens
  misc_RNA (1)...(19): siRNA sense strand
aagaaaagacagucccuaa

SEQ ID NO: 2502720 - RNA, 19 nt, Homo sapiens
  misc_RNA (1)...(19): siRNA sense strand
cuuguaaacuggcugaaaa

SEQ ID NO: 2502721 - RNA, 19 nt, Homo sapiens
  misc_RNA (1)...(19): siRNA sense strand
cucccaaagccgacguuua

SEQ ID NO: 2502722 - RNA, 19 nt, Homo sapiens
  misc_RNA (1)...(19): siRNA sense strand
ucagcaauauugacgaaaa

SEQ ID NO: 2502723 - RNA, 19 nt, Homo sapiens
  misc_RNA (1)...(19): siRNA sense strand
aggaagauacgauggaaac

SEQ ID NO: 2502724 - RNA, 19 nt, Homo sapiens
  misc_RNA (1)...(19): siRNA sense strand
gcccagagaccgaugcuga

SEQ ID NO: 2502725 - RNA, 19 nt, Homo sapiens
  misc_RNA (1)...(19): siRNA sense strand
ggaagauacgauggaaaca

SEQ ID NO: 2502726 - RNA, 19 nt, Homo sapiens
  misc_RNA (1)...(19): siRNA sense strand
aagacagucccuaaagcaa

SEQ ID NO: 2502727 - RNA, 19 nt, Homo sapiens
  misc_RNA (1)...(19): siRNA sense strand
ucaaagaacuucaccugga

SEQ ID NO: 2502728 - RNA, 19 nt, Homo sapiens
  misc_RNA (1)...(19): siRNA sense strand
acgaaugcacaggaagaua

SEQ ID NO: 2502729 - RNA, 19 nt, Homo sapiens
  misc_RNA (1)...(19): siRNA sense strand
gaguuuacauuuacggucu

SEQ ID NO: 2502730 - RNA, 19 nt, Homo sapiens
  misc_RNA (1)...(19): siRNA sense strand
uggaauaaaaucaguguca

SEQ ID NO: 2502731 - RNA, 19 nt, Homo sapiens
  misc_RNA (1)...(19): siRNA sense strand
agcgaaaggcugugacaaa

SEQ ID NO: 2502732 - RNA, 19 nt, Homo sapiens
  misc_RNA (1)...(19): siRNA sense strand
agggagagacggagaaaca

SEQ ID NO: 2502733 - RNA, 19 nt, Homo sapiens
  misc_RNA (1)...(19): siRNA sense strand
auaaaggagaaguggagaa

SEQ ID NO: 2502734 - RNA, 19 nt, Homo sapiens
  misc_RNA (1)...(19): siRNA sense strand
aggaagaggagaaggcaca

SEQ ID NO: 2502735 - RNA, 19 nt, Homo sapiens
  misc_RNA (1)...(19): siRNA sense strand
gagaaggauaaaugggaca

SEQ ID NO: 2502736 - RNA, 19 nt, Homo sapiens
  misc_RNA (1)...(19): siRNA sense strand
uggcugaggagaagaggaa

SEQ ID NO: 2502737 - RNA, 19 nt, Homo sapiens
  misc_RNA (1)...(19): siRNA sense strand
aguccauggcugaggagaa

SEQ ID NO: 2502738 - RNA, 19 nt, Homo sapiens
  misc_RNA (1)...(19): siRNA sense strand
gaguagaaagagaccgaau

SEQ ID NO: 2502739 - RNA, 19 nt, Homo sapiens
  misc_RNA (1)...(19): siRNA sense strand
gagauuaugccaagggcuu

SEQ ID NO: 2502740 - RNA, 19 nt, Homo sapiens
  misc_RNA (1)...(19): siRNA sense strand
ggaacaaaguaucagagga

SEQ ID NO: 2502741 - RNA, 19 nt, Homo sapiens
  misc_RNA (1)...(19): siRNA sense strand
gauaugacuacaagggaga

SEQ ID NO: 2502742 - RNA, 19 nt, Homo sapiens
  misc_RNA (1)...(19): siRNA sense strand
aagcagagccugagccuga

SEQ ID NO: 2502743 - RNA, 19 nt, Homo sapiens
  misc_RNA (1)...(19): siRNA sense strand
acauugagaugguggacga

SEQ ID NO: 2502744 - RNA, 19 nt, Homo sapiens
  misc_RNA (1)...(19): siRNA sense strand
gaacaaaguaucagaggag

SEQ ID NO: 2502745 - RNA, 19 nt, Homo sapiens
  misc_RNA (1)...(19): siRNA sense strand
agcgagaggaagaggagaa

SEQ ID NO: 2502746 - RNA, 19 nt, Homo sapiens
  misc_RNA (1)...(19): siRNA sense strand
gaaagagaccgaauggaca

SEQ ID NO: 2502747 - RNA, 19 nt, Homo sapiens
  misc_RNA (1)...(19): siRNA sense strand
aggcgaaauuugaguccau

SEQ ID NO: 2502748 - RNA, 19 nt, Homo sapiens
  misc_RNA (1)...(19): siRNA sense strand
ggacaaagcagcucuggga

SEQ ID NO: 2502749 - RNA, 19 nt, Homo sapiens
  misc_RNA (1)...(19): siRNA sense strand
acaaaguaucagaggagca

SEQ ID NO: 2502750 - RNA, 19 nt, Homo sapiens
  misc_RNA (1)...(19): siRNA sense strand
aggagaagaggaagcgaga

SEQ ID NO: 2502751 - RNA, 19 nt, Homo sapiens
  misc_RNA (1)...(19): siRNA sense strand
augaggacguugaggagau

SEQ ID NO: 2502752 - RNA, 19 nt, Homo sapiens
  misc_RNA (1)...(19): siRNA sense strand
cagugauagcuauggaaga

SEQ ID NO: 2502753 - RNA, 19 nt, Homo sapiens
  misc_RNA (1)...(19): siRNA sense strand
aguacggaguugagaggga

SEQ ID NO: 2502754 - RNA, 19 nt, Homo sapiens
  misc_RNA (1)...(19): siRNA sense strand
cggagaaacacgaguccca

SEQ ID NO: 2502755 - RNA, 19 nt, Homo sapiens
  misc_RNA (1)...(19): siRNA sense strand
ggaagucuguagugggcca

SEQ ID NO: 2502756 - RNA, 19 nt, Homo sapiens
  misc_RNA (1)...(19): siRNA sense strand
ggaagaaagagauggaguc

SEQ ID NO: 2502757 - RNA, 19 nt, Homo sapiens
  misc_RNA (1)...(19): siRNA sense strand
ccaaagcaucccauggcua

SEQ ID NO: 2502758 - RNA, 19 nt, Homo sapiens
  misc_RNA (1)...(19): siRNA sense strand
agucugagccugugagaac

SEQ ID NO: 2502759 - RNA, 19 nt, Homo sapiens
  misc_RNA (1)...(19): siRNA sense strand
aggaagaaagagauggagu

SEQ ID NO: 2502760 - RNA, 19 nt, Homo sapiens
  misc_RNA (1)...(19): siRNA sense strand
ugugagaaccagcagggaa

SEQ ID NO: 2502761 - RNA, 19 nt, Homo sapiens
  misc_RNA (1)...(19): siRNA sense strand
aggaggugcucgagccuga

SEQ ID NO: 2502762 - RNA, 19 nt, Homo sapiens
  misc_RNA (1)...(19): siRNA sense strand
uugccgagguggagaagca

SEQ ID NO: 2502763 - RNA, 19 nt, Homo sapiens
  misc_RNA (1)...(19): siRNA sense strand
gugagaaccagcagggaac

SEQ ID NO: 2502764 - RNA, 19 nt, Homo sapiens
  misc_RNA (1)...(19): siRNA sense strand
agcccgagccugagaauga

SEQ ID NO: 2502765 - RNA, 19 nt, Homo sapiens
  misc_RNA (1)...(19): siRNA sense strand
ggauaugacuacaagggag

SEQ ID NO: 2502766 - RNA, 19 nt, Homo sapiens
  misc_RNA (1)...(19): siRNA sense strand
caugauguucucaggaaga

SEQ ID NO: 2502767 - RNA, 19 nt, Homo sapiens
  misc_RNA (1)...(19): siRNA sense strand
uggaguagaaagagaccga

SEQ ID NO: 2502768 - RNA, 19 nt, Homo sapiens
  misc_RNA (1)...(19): siRNA sense strand
cacgagucccagagagauu

SEQ ID NO: 2502769 - RNA, 19 nt, Homo sapiens
  misc_RNA (1)...(19): siRNA sense strand
gggaacacccagugcccuu

SEQ ID NO: 2502770 - RNA, 19 nt, Homo sapiens
  misc_RNA (1)...(19): siRNA sense strand
gugcagugggccaugagua

SEQ ID NO: 2502771 - RNA, 19 nt, Homo sapiens
  misc_RNA (1)...(19): siRNA sense strand
gguacgggguggagaagga

SEQ ID NO: 2502772 - RNA, 19 nt, Homo sapiens
  misc_RNA (1)...(19): siRNA sense strand
aaguaucagaggagcauga

SEQ ID NO: 2502773 - RNA, 19 nt, Homo sapiens
  misc_RNA (1)...(19): siRNA sense strand
gagaagaggaagcgagagg

SEQ ID NO: 2502774 - RNA, 19 nt, Homo sapiens
  misc_RNA (1)...(19): siRNA sense strand
gggugaugauugggacaca

SEQ ID NO: 2502775 - RNA, 19 nt, Homo sapiens
  misc_RNA (1)...(19): siRNA sense strand
uggcuauggaggucgguuu

SEQ ID NO: 2502776 - RNA, 19 nt, Homo sapiens
  misc_RNA (1)...(19): siRNA sense strand
ccagagagauuaugccaag

SEQ ID NO: 2502777 - RNA, 19 nt, Homo sapiens
  misc_RNA (1)...(19): siRNA sense strand
cgaagaaaccauacagcga

SEQ ID NO: 2502778 - RNA, 19 nt, Homo sapiens
  misc_RNA (1)...(19): siRNA sense strand
cggcuaaauacaucaggaa

SEQ ID NO: 2502779 - RNA, 19 nt, Homo sapiens
  misc_RNA (1)...(19): siRNA sense strand
agaaagaaacugagaaaag

SEQ ID NO: 2502780 - RNA, 19 nt, Homo sapiens
  misc_RNA (1)...(19): siRNA sense strand
cagucgaccuacaggcaga

SEQ ID NO: 2502781 - RNA, 19 nt, Homo sapiens
  misc_RNA (1)...(19): siRNA sense strand
gcuauuuguuggaggcauc

SEQ ID NO: 2502782 - RNA, 19 nt, Homo sapiens
  misc_RNA (1)...(19): siRNA sense strand
aggcauuugcucuguacaa

SEQ ID NO: 2502783 - RNA, 19 nt, Homo sapiens
  misc_RNA (1)...(19): siRNA sense strand
acaguaucaaagagaaaga

SEQ ID NO: 2502784 - RNA, 19 nt, Homo sapiens
  misc_RNA (1)...(19): siRNA sense strand
ugggaaugcagucgaccua

SEQ ID NO: 2502785 - RNA, 19 nt, Homo sapiens
  misc_RNA (1)...(19): siRNA sense strand
gugugaagacgcuggccau

SEQ ID NO: 2502786 - RNA, 19 nt, Homo sapiens
  misc_RNA (1)...(19): siRNA sense strand
gcuaaauacaucaggaacc

SEQ ID NO: 2502787 - RNA, 19 nt, Homo sapiens
  misc_RNA (1)...(19): siRNA sense strand
gagaaagaaacugagaaaa

SEQ ID NO: 2502788 - RNA, 19 nt, Homo sapiens
  misc_RNA (1)...(19): siRNA sense strand
aagagaaagugaaugggua

SEQ ID NO: 2502789 - RNA, 19 nt, Homo sapiens
  misc_RNA (1)...(19): siRNA sense strand
cuggaacaaacgugggaua

SEQ ID NO: 2502790 - RNA, 19 nt, Homo sapiens
  misc_RNA (1)...(19): siRNA sense strand
agugcaaaguggugaagau

SEQ ID NO: 2502791 - RNA, 19 nt, Homo sapiens
  misc_RNA (1)...(19): siRNA sense strand
aguuggagauauaagguau

SEQ ID NO: 2502792 - RNA, 19 nt, Homo sapiens
  misc_RNA (1)...(19): siRNA sense strand
ggccacagucagaggaaaa

SEQ ID NO: 2502793 - RNA, 19 nt, Homo sapiens
  misc_RNA (1)...(19): siRNA sense strand
augaguuucaggagaguaa

SEQ ID NO: 2502794 - RNA, 19 nt, Homo sapiens
  misc_RNA (1)...(19): siRNA sense strand
uggaaaagagaaagugaau

SEQ ID NO: 2502795 - RNA, 19 nt, Homo sapiens
  misc_RNA (1)...(19): siRNA sense strand
gugcuauugauguggauuu

SEQ ID NO: 2502796 - RNA, 19 nt, Homo sapiens
  misc_RNA (1)...(19): siRNA sense strand
ugaagaugggacugaguau

SEQ ID NO: 2502797 - RNA, 19 nt, Homo sapiens
  misc_RNA (1)...(19): siRNA sense strand
gguacagccuugaggacgu

SEQ ID NO: 2502798 - RNA, 19 nt, Homo sapiens
  misc_RNA (1)...(19): siRNA sense strand
aggaaaugcccggauguaa

SEQ ID NO: 2502799 - RNA, 19 nt, Homo sapiens
  misc_RNA (1)...(19): siRNA sense strand
caauuuaaggggaaaacaa

SEQ ID NO: 2502800 - RNA, 19 nt, Homo sapiens
  misc_RNA (1)...(19): siRNA sense strand
gcgacacuguggaagaaaa

SEQ ID NO: 2502801 - RNA, 19 nt, Homo sapiens
  misc_RNA (1)...(19): siRNA sense strand
uugaaguggagaaggugaa

SEQ ID NO: 2502802 - RNA, 19 nt, Homo sapiens
  misc_RNA (1)...(19): siRNA sense strand
cugauggcuuccugggcua

SEQ ID NO: 2502803 - RNA, 19 nt, Homo sapiens
  misc_RNA (1)...(19): siRNA sense strand
cuuucaaccauuacugaua

SEQ ID NO: 2502804 - RNA, 19 nt, Homo sapiens
  misc_RNA (1)...(19): siRNA sense strand
gaggaaaagaggucugcua

SEQ ID NO: 2502805 - RNA, 19 nt, Homo sapiens
  misc_RNA (1)...(19): siRNA sense strand
uguuugaaguggagaaggu

SEQ ID NO: 2502806 - RNA, 19 nt, Homo sapiens
  misc_RNA (1)...(19): siRNA sense strand
gguuucggaaugagccaaa

SEQ ID NO: 2502807 - RNA, 19 nt, Homo sapiens
  misc_RNA (1)...(19): siRNA sense strand
ccaucggacaugugcaaga

SEQ ID NO: 2502808 - RNA, 19 nt, Homo sapiens
  misc_RNA (1)...(19): siRNA sense strand
agagaaagugaauggguac

SEQ ID NO: 2502809 - RNA, 19 nt, Homo sapiens
  misc_RNA (1)...(19): siRNA sense strand
aaauguuugaaguggagaa

SEQ ID NO: 2502810 - RNA, 19 nt, Homo sapiens
  misc_RNA (1)...(19): siRNA sense strand
cucgaaacaauaugagauu

SEQ ID NO: 2502811 - RNA, 19 nt, Homo sapiens
  misc_RNA (1)...(19): siRNA sense strand
cuucuguacacaaaugaaa

SEQ ID NO: 2502812 - RNA, 19 nt, Homo sapiens
  misc_RNA (1)...(19): siRNA sense strand
gagaguaaguguuucccuu

SEQ ID NO: 2502813 - RNA, 19 nt, Homo sapiens
  misc_RNA (1)...(19): siRNA sense strand
gugaauggguacaucagga

SEQ ID NO: 2502814 - RNA, 19 nt, Homo sapiens
  misc_RNA (1)...(19): siRNA sense strand
auggaauaugggaaggaau

SEQ ID NO: 2502815 - RNA, 19 nt, Homo sapiens
  misc_RNA (1)...(19): siRNA sense strand
gggaaggaauugguggcuu

SEQ ID NO: 2502816 - RNA, 19 nt, Homo sapiens
  misc_RNA (1)...(19): siRNA sense strand
acuaaucacuggcacggaa

SEQ ID NO: 2502817 - RNA, 19 nt, Homo sapiens
  misc_RNA (1)...(19): siRNA sense strand
ggccaucggacaugugcaa

SEQ ID NO: 2502818 - RNA, 19 nt, Homo sapiens
  misc_RNA (1)...(19): siRNA sense strand
ggaaugugcuggucggaga

SEQ ID NO: 2502819 - RNA, 19 nt, Homo sapiens
  misc_RNA (1)...(19): siRNA sense strand
uuaaugaaccugaggccaa

SEQ ID NO: 2502820 - RNA, 19 nt, Homo sapiens
  misc_RNA (1)...(19): siRNA sense strand
cugaagagggccuggauca

SEQ ID NO: 2502821 - RNA, 19 nt, Homo sapiens
  misc_RNA (1)...(19): siRNA sense strand
ccaucaaaaugcugaaaga

SEQ ID NO: 2502822 - RNA, 19 nt, Homo sapiens
  misc_RNA (1)...(19): siRNA sense strand
uggagaaggacgaccguau

SEQ ID NO: 2502823 - RNA, 19 nt, Homo sapiens
  misc_RNA (1)...(19): siRNA sense strand
ccaaguacguuguggaggu

SEQ ID NO: 2502824 - RNA, 19 nt, Homo sapiens
  misc_RNA (1)...(19): siRNA sense strand
augcaguaccugagugaga

SEQ ID NO: 2502825 - RNA, 19 nt, Homo sapiens
  misc_RNA (1)...(19): siRNA sense strand
uguacgagcugaugcguca

SEQ ID NO: 2502826 - RNA, 19 nt, Homo sapiens
  misc_RNA (1)...(19): siRNA sense strand
cuggaaguucugugcaaau

SEQ ID NO: 2502827 - RNA, 19 nt, Homo sapiens
  misc_RNA (1)...(19): siRNA sense strand
gugagaagucagaccggau

SEQ ID NO: 2502828 - RNA, 19 nt, Homo sapiens
  misc_RNA (1)...(19): siRNA sense strand
gcgucaucuacgugcacaa

SEQ ID NO: 2502829 - RNA, 19 nt, Homo sapiens
  misc_RNA (1)...(19): siRNA sense strand
caaaaugcugaaagaguau

SEQ ID NO: 2502830 - RNA, 19 nt, Homo sapiens
  misc_RNA (1)...(19): siRNA sense strand
gguuacuuguauaucgcua

SEQ ID NO: 2502831 - RNA, 19 nt, Homo sapiens
  misc_RNA (1)...(19): siRNA sense strand
aguccuucuuugggagaua

SEQ ID NO: 2502832 - RNA, 19 nt, Homo sapiens
  misc_RNA (1)...(19): siRNA sense strand
gugcacaaggagaagcaga

SEQ ID NO: 2502833 - RNA, 19 nt, Homo sapiens
  misc_RNA (1)...(19): siRNA sense strand
aggccauuguggagccaga

SEQ ID NO: 2502834 - RNA, 19 nt, Homo sapiens
  misc_RNA (1)...(19): siRNA sense strand
aggagguuuaugugaagaa

SEQ ID NO: 2502835 - RNA, 19 nt, Homo sapiens
  misc_RNA (1)...(19): siRNA sense strand
ggacaucaccuuugaggac

SEQ ID NO: 2502836 - RNA, 19 nt, Homo sapiens
  misc_RNA (1)...(19): siRNA sense strand
cugaaaggcacaagaaauu

SEQ ID NO: 2502837 - RNA, 19 nt, Homo sapiens
  misc_RNA (1)...(19): siRNA sense strand
uguuaaagauggagauugu

SEQ ID NO: 2502838 - RNA, 19 nt, Homo sapiens
  misc_RNA (1)...(19): siRNA sense strand
agggacugauauagggaua

SEQ ID NO: 2502839 - RNA, 19 nt, Homo sapiens
  misc_RNA (1)...(19): siRNA sense strand
ccuuaaagacuuaccgaau

SEQ ID NO: 2502840 - RNA, 19 nt, Homo sapiens
  misc_RNA (1)...(19): siRNA sense strand
ccacauaagccucagaaaa

SEQ ID NO: 2502841 - RNA, 19 nt, Homo sapiens
  misc_RNA (1)...(19): siRNA sense strand
gagugaagucaguagaaau

SEQ ID NO: 2502842 - RNA, 19 nt, Homo sapiens
  misc_RNA (1)...(19): siRNA sense strand
gcucauaauagaaacacua

SEQ ID NO: 2502843 - RNA, 19 nt, Homo sapiens
  misc_RNA (1)...(19): siRNA sense strand
gguauaaaccagaaggcca

SEQ ID NO: 2502844 - RNA, 19 nt, Homo sapiens
  misc_RNA (1)...(19): siRNA sense strand
gugaaucaauagaggacuu

SEQ ID NO: 2502845 - RNA, 19 nt, Homo sapiens
  misc_RNA (1)...(19): siRNA sense strand
cagcaaaccaugaagacuu

SEQ ID NO: 2502846 - RNA, 19 nt, Homo sapiens
  misc_RNA (1)...(19): siRNA sense strand
cggaagaguuaaagaacac

SEQ ID NO: 2502847 - RNA, 19 nt, Homo sapiens
  misc_RNA (1)...(19): siRNA sense strand
cuuguagagagaagggaaa

SEQ ID NO: 2502848 - RNA, 19 nt, Homo sapiens
  misc_RNA (1)...(19): siRNA sense strand
ugaagaaauuuuagcggaa

SEQ ID NO: 2502849 - RNA, 19 nt, Homo sapiens
  misc_RNA (1)...(19): siRNA sense strand
agagagaagggaaaguuaa

SEQ ID NO: 2502850 - RNA, 19 nt, Homo sapiens
  misc_RNA (1)...(19): siRNA sense strand
ccucagaaauauuugcaga

SEQ ID NO: 2502851 - RNA, 19 nt, Homo sapiens
  misc_RNA (1)...(19): siRNA sense strand
agaaggacgcucaguuaaa

SEQ ID NO: 2502852 - RNA, 19 nt, Homo sapiens
  misc_RNA (1)...(19): siRNA sense strand
ucugaaaggcacaagaaau

SEQ ID NO: 2502853 - RNA, 19 nt, Homo sapiens
  misc_RNA (1)...(19): siRNA sense strand
gcuuguagagagaagggaa

SEQ ID NO: 2502854 - RNA, 19 nt, Homo sapiens
  misc_RNA (1)...(19): siRNA sense strand
ccauguaacaauugcaaca

SEQ ID NO: 2502855 - RNA, 19 nt, Homo sapiens
  misc_RNA (1)...(19): siRNA sense strand
uaguaguggucaacagaau

SEQ ID NO: 2502856 - RNA, 19 nt, Homo sapiens
  misc_RNA (1)...(19): siRNA sense strand
guaacaauugcaacaguaa

SEQ ID NO: 2502857 - RNA, 19 nt, Homo sapiens
  misc_RNA (1)...(19): siRNA sense strand
agugaagucaguagaaauu

SEQ ID NO: 2502858 - RNA, 19 nt, Homo sapiens
  misc_RNA (1)...(19): siRNA sense strand
aggcagaaaagaagaaauu

SEQ ID NO: 2502859 - RNA, 19 nt, Homo sapiens
  misc_RNA (1)...(19): siRNA sense strand
cagaaauauuugcagagau

SEQ ID NO: 2502860 - RNA, 19 nt, Homo sapiens
  misc_RNA (1)...(19): siRNA sense strand
aguuccugcuucagagaua

SEQ ID NO: 2502861 - RNA, 19 nt, Homo sapiens
  misc_RNA (1)...(19): siRNA sense strand
ggacuuguuaaaugagcua

SEQ ID NO: 2502862 - RNA, 19 nt, Homo sapiens
  misc_RNA (1)...(19): siRNA sense strand
gguauuugggaaugggaga

SEQ ID NO: 2502863 - RNA, 19 nt, Homo sapiens
  misc_RNA (1)...(19): siRNA sense strand
ccgaauuaguuuucaagaa

SEQ ID NO: 2502864 - RNA, 19 nt, Homo sapiens
  misc_RNA (1)...(19): siRNA sense strand
agucaaacucaugaagaaa

SEQ ID NO: 2502865 - RNA, 19 nt, Homo sapiens
  misc_RNA (1)...(19): siRNA sense strand
gggaaggugacuuuaggua

SEQ ID NO: 2502866 - RNA, 19 nt, Homo sapiens
  misc_RNA (1)...(19): siRNA sense strand
ucggaagaguuaaagaaca

SEQ ID NO: 2502867 - RNA, 19 nt, Homo sapiens
  misc_RNA (1)...(19): siRNA sense strand
ccauauucauguugcacuu

SEQ ID NO: 2502868 - RNA, 19 nt, Homo sapiens
  misc_RNA (1)...(19): siRNA sense strand
uggagaaguauaugacgaa

SEQ ID NO: 2502869 - RNA, 19 nt, Homo sapiens
  misc_RNA (1)...(19): siRNA sense strand
uagagagaagggaaaguua

SEQ ID NO: 2502870 - RNA, 19 nt, Homo sapiens
  misc_RNA (1)...(19): siRNA sense strand
gcucgaaggaggaaucuau

SEQ ID NO: 2502871 - RNA, 19 nt, Homo sapiens
  misc_RNA (1)...(19): siRNA sense strand
uugaaaagcucuuccuaua

SEQ ID NO: 2502872 - RNA, 19 nt, Homo sapiens
  misc_RNA (1)...(19): siRNA sense strand
aaguuggguuaaaggcuua

SEQ ID NO: 2502873 - RNA, 19 nt, Homo sapiens
  misc_RNA (1)...(19): siRNA sense strand
caguuaaagggguaaauaa

SEQ ID NO: 2502874 - RNA, 19 nt, Homo sapiens
  misc_RNA (1)...(19): siRNA sense strand
gacuuuagguauuugggaa

SEQ ID NO: 2502875 - RNA, 19 nt, Homo sapiens
  misc_RNA (1)...(19): siRNA sense strand
acauuaggugauauggaaa

SEQ ID NO: 2502876 - RNA, 19 nt, Homo sapiens
  misc_RNA (1)...(19): siRNA sense strand
cgucuaaaacuucguaaaa

SEQ ID NO: 2502877 - RNA, 19 nt, Homo sapiens
  misc_RNA (1)...(19): siRNA sense strand
ccucaguuucacaguuaaa

SEQ ID NO: 2502878 - RNA, 19 nt, Homo sapiens
  misc_RNA (1)...(19): siRNA sense strand
agaccaauuuguggacaua

SEQ ID NO: 2502879 - RNA, 19 nt, Homo sapiens
  misc_RNA (1)...(19): siRNA sense strand
caucuaagucauuacagaa

SEQ ID NO: 2502880 - RNA, 19 nt, Homo sapiens
  misc_RNA (1)...(19): siRNA sense strand
cauuaaacuuggagagucc

SEQ ID NO: 2502881 - RNA, 19 nt, Homo sapiens
  misc_RNA (1)...(19): siRNA sense strand
ucucaaaccacaacaucua

SEQ ID NO: 2502882 - RNA, 19 nt, Homo sapiens
  misc_RNA (1)...(19): siRNA sense strand
aagacuugguggaagguca

SEQ ID NO: 2502883 - RNA, 19 nt, Homo sapiens
  misc_RNA (1)...(19): siRNA sense strand
ccacaacaucuaagucauu

SEQ ID NO: 2502884 - RNA, 19 nt, Homo sapiens
  misc_RNA (1)...(19): siRNA sense strand
guggaaggucagauucaua

SEQ ID NO: 2502885 - RNA, 19 nt, Homo sapiens
  misc_RNA (1)...(19): siRNA sense strand
acuuuagguauuugggaau

SEQ ID NO: 2502886 - RNA, 19 nt, Homo sapiens
  misc_RNA (1)...(19): siRNA sense strand
gggaaugggagauagucau

SEQ ID NO: 2502887 - RNA, 19 nt, Homo sapiens
  misc_RNA (1)...(19): siRNA sense strand
uggaaugugaugacuuaaa

SEQ ID NO: 2502888 - RNA, 19 nt, Homo sapiens
  misc_RNA (1)...(19): siRNA sense strand
gaaguuggguuaaaggcuu

SEQ ID NO: 2502889 - RNA, 19 nt, Homo sapiens
  misc_RNA (1)...(19): siRNA sense strand
cagaaaauggggaagguga

SEQ ID NO: 2502890 - RNA, 19 nt, Homo sapiens
  misc_RNA (1)...(19): siRNA sense strand
aaacaauuccuuacaccaa

SEQ ID NO: 2502891 - RNA, 19 nt, Homo sapiens
  misc_RNA (1)...(19): siRNA sense strand
ucgucaaacuuaccugaua

SEQ ID NO: 2502892 - RNA, 19 nt, Homo sapiens
  misc_RNA (1)...(19): siRNA sense strand
gggagugaagucaguagaa

SEQ ID NO: 2502893 - RNA, 19 nt, Homo sapiens
  misc_RNA (1)...(19): siRNA sense strand
guacaguagucaaacucau

SEQ ID NO: 2502894 - RNA, 19 nt, Homo sapiens
  misc_RNA (1)...(19): siRNA sense strand
gggaaaguuaaaagccuua

SEQ ID NO: 2502895 - RNA, 19 nt, Homo sapiens
  misc_RNA (1)...(19): siRNA sense strand
gaguuaaagaacaccguga

SEQ ID NO: 2502896 - RNA, 19 nt, Homo sapiens
  misc_RNA (1)...(19): siRNA sense strand
uggcaaagcgguugaggga

SEQ ID NO: 2502897 - RNA, 19 nt, Homo sapiens
  misc_RNA (1)...(19): siRNA sense strand
acacauuggccgagggcac

SEQ ID NO: 2502898 - RNA, 19 nt, Homo sapiens
  misc_RNA (1)...(19): siRNA sense strand
cggaggacaauguggucau

SEQ ID NO: 2502899 - RNA, 19 nt, Homo sapiens
  misc_RNA (1)...(19): siRNA sense strand
aggacaauguggucaucau

SEQ ID NO: 2502900 - RNA, 19 nt, Homo sapiens
  misc_RNA (1)...(19): siRNA sense strand
uggcaaagcgguugaggga

SEQ ID NO: 2502901 - RNA, 19 nt, Homo sapiens
  misc_RNA (1)...(19): siRNA sense strand
acacauuggccgagggcac

SEQ ID NO: 2502902 - RNA, 19 nt, Homo sapiens
  misc_RNA (1)...(19): siRNA sense strand
cggaggacaauguggucau

SEQ ID NO: 2502903 - RNA, 19 nt, Homo sapiens
  misc_RNA (1)...(19): siRNA sense strand
aggacaauguggucaucau

SEQ ID NO: 2502904 - RNA, 19 nt, Homo sapiens
  misc_RNA (1)...(19): siRNA sense strand
agaugaacccagagggcua

SEQ ID NO: 2502905 - RNA, 19 nt, Homo sapiens
  misc_RNA (1)...(19): siRNA sense strand
cagcggaaauagagcccaa

SEQ ID NO: 2502906 - RNA, 19 nt, Homo sapiens
  misc_RNA (1)...(19): siRNA sense strand
aaauagagcccaaggcaga

SEQ ID NO: 2502907 - RNA, 19 nt, Homo sapiens
  misc_RNA (1)...(19): siRNA sense strand
agcuaaagacagcggaaau

SEQ ID NO: 2502908 - RNA, 19 nt, Homo sapiens
  misc_RNA (1)...(19): siRNA sense strand
aggaugagcaggaggaagu

SEQ ID NO: 2502909 - RNA, 19 nt, Homo sapiens
  misc_RNA (1)...(19): siRNA sense strand
ccguagagaugaacccaga

SEQ ID NO: 2502910 - RNA, 19 nt, Homo sapiens
  misc_RNA (1)...(19): siRNA sense strand
augugaaucucgaggggaa

SEQ ID NO: 2502911 - RNA, 19 nt, Homo sapiens
  misc_RNA (1)...(19): siRNA sense strand
ggaaauagagcccaaggca

SEQ ID NO: 2502912 - RNA, 19 nt, Homo sapiens
  misc_RNA (1)...(19): siRNA sense strand
cuggagggaaggagacgaa

SEQ ID NO: 2502913 - RNA, 19 nt, Homo sapiens
  misc_RNA (1)...(19): siRNA sense strand
guggaggugaugcgaggaa

SEQ ID NO: 2502914 - RNA, 19 nt, Homo sapiens
  misc_RNA (1)...(19): siRNA sense strand
gauggcagcuggagggaag

SEQ ID NO: 2502915 - RNA, 19 nt, Homo sapiens
  misc_RNA (1)...(19): siRNA sense strand
gcaacagccggaacgggaa

SEQ ID NO: 2502916 - RNA, 19 nt, Homo sapiens
  misc_RNA (1)...(19): siRNA sense strand
ccagagggcuacaugacca

SEQ ID NO: 2502917 - RNA, 19 nt, Homo sapiens
  misc_RNA (1)...(19): siRNA sense strand
aggauuacgacgcggcaga

SEQ ID NO: 2502918 - RNA, 19 nt, Homo sapiens
  misc_RNA (1)...(19): siRNA sense strand
gaggaaaagcaaaggaaaa

SEQ ID NO: 2502919 - RNA, 19 nt, Homo sapiens
  misc_RNA (1)...(19): siRNA sense strand
acacagucgugcagagcaa

SEQ ID NO: 2502920 - RNA, 19 nt, Homo sapiens
  misc_RNA (1)...(19): siRNA sense strand
cgaacaaugcuaagagaca

SEQ ID NO: 2502921 - RNA, 19 nt, Homo sapiens
  misc_RNA (1)...(19): siRNA sense strand
agauaaagaaggaaguaga

SEQ ID NO: 2502922 - RNA, 19 nt, Homo sapiens
  misc_RNA (1)...(19): siRNA sense strand
agcuaaacuucaagaacua

SEQ ID NO: 2502923 - RNA, 19 nt, Homo sapiens
  misc_RNA (1)...(19): siRNA sense strand
aagugaaagaggaggaaga

SEQ ID NO: 2502924 - RNA, 19 nt, Homo sapiens
  misc_RNA (1)...(19): siRNA sense strand
cagaagaagaaguaguuau

SEQ ID NO: 2502925 - RNA, 19 nt, Homo sapiens
  misc_RNA (1)...(19): siRNA sense strand
agaaugaugaagugaggaa

SEQ ID NO: 2502926 - RNA, 19 nt, Homo sapiens
  misc_RNA (1)...(19): siRNA sense strand
acaagaaccaagugaccua

SEQ ID NO: 2502927 - RNA, 19 nt, Homo sapiens
  misc_RNA (1)...(19): siRNA sense strand
aagaggaggaagagguuau

SEQ ID NO: 2502928 - RNA, 19 nt, Homo sapiens
  misc_RNA (1)...(19): siRNA sense strand
cuaugauuauggucggaua

SEQ ID NO: 2502929 - RNA, 19 nt, Homo sapiens
  misc_RNA (1)...(19): siRNA sense strand
guugagaagucgagaggcu

SEQ ID NO: 2502930 - RNA, 19 nt, Homo sapiens
  misc_RNA (1)...(19): siRNA sense strand
cugcagaguacaccaguaa

SEQ ID NO: 2502931 - RNA, 19 nt, Homo sapiens
  misc_RNA (1)...(19): siRNA sense strand
ucagaagaaugcagcaaaa

SEQ ID NO: 2502932 - RNA, 19 nt, Homo sapiens
  misc_RNA (1)...(19): siRNA sense strand
cagcaaaagccauuacuaa

SEQ ID NO: 2502933 - RNA, 19 nt, Homo sapiens
  misc_RNA (1)...(19): siRNA sense strand
aaauaaauucagugaggca

SEQ ID NO: 2502934 - RNA, 19 nt, Homo sapiens
  misc_RNA (1)...(19): siRNA sense strand
uggcaaaguauguagcaga

SEQ ID NO: 2502935 - RNA, 19 nt, Homo sapiens
  misc_RNA (1)...(19): siRNA sense strand
caaugaagagguacgggaa

SEQ ID NO: 2502936 - RNA, 19 nt, Homo sapiens
  misc_RNA (1)...(19): siRNA sense strand
cugcugaagcugaugguau

SEQ ID NO: 2502937 - RNA, 19 nt, Homo sapiens
  misc_RNA (1)...(19): siRNA sense strand
ccuuaagaagaucaaguaa

SEQ ID NO: 2502938 - RNA, 19 nt, Homo sapiens
  misc_RNA (1)...(19): siRNA sense strand
ggaggaaaagcaaaggaaa

SEQ ID NO: 2502939 - RNA, 19 nt, Homo sapiens
  misc_RNA (1)...(19): siRNA sense strand
ccuuagguguuauugcaaa

SEQ ID NO: 2502940 - RNA, 19 nt, Homo sapiens
  misc_RNA (1)...(19): siRNA sense strand
cguaucaggaacucggaaa

SEQ ID NO: 2502941 - RNA, 19 nt, Homo sapiens
  misc_RNA (1)...(19): siRNA sense strand
gcuauuugucaucaaguaa

SEQ ID NO: 2502942 - RNA, 19 nt, Homo sapiens
  misc_RNA (1)...(19): siRNA sense strand
aagaagaaguaguuaucca

SEQ ID NO: 2502943 - RNA, 19 nt, Homo sapiens
  misc_RNA (1)...(19): siRNA sense strand
aagaggaaauuuuggcuaa

SEQ ID NO: 2502944 - RNA, 19 nt, Homo sapiens
  misc_RNA (1)...(19): siRNA sense strand
cuucaagaacuaaaugcaa

SEQ ID NO: 2502945 - RNA, 19 nt, Homo sapiens
  misc_RNA (1)...(19): siRNA sense strand
ggaagauaaaucagauguu

SEQ ID NO: 2502946 - RNA, 19 nt, Homo sapiens
  misc_RNA (1)...(19): siRNA sense strand
ccauagaagacaaaucaga

SEQ ID NO: 2502947 - RNA, 19 nt, Homo sapiens
  misc_RNA (1)...(19): siRNA sense strand
cuguggaaccuuuaacuaa

SEQ ID NO: 2502948 - RNA, 19 nt, Homo sapiens
  misc_RNA (1)...(19): siRNA sense strand
cugcuacaguauuaacaaa

SEQ ID NO: 2502949 - RNA, 19 nt, Homo sapiens
  misc_RNA (1)...(19): siRNA sense strand
aggaagagguuaugguggu

SEQ ID NO: 2502950 - RNA, 19 nt, Homo sapiens
  misc_RNA (1)...(19): siRNA sense strand
auacuauggugcagauuca

SEQ ID NO: 2502951 - RNA, 19 nt, Homo sapiens
  misc_RNA (1)...(19): siRNA sense strand
cagcaaugugugagaauuc

SEQ ID NO: 2502952 - RNA, 19 nt, Homo sapiens
  misc_RNA (1)...(19): siRNA sense strand
gccugaacauacagaauca

SEQ ID NO: 2502953 - RNA, 19 nt, Homo sapiens
  misc_RNA (1)...(19): siRNA sense strand
gggaguuagaugucaugaa

SEQ ID NO: 2502954 - RNA, 19 nt, Homo sapiens
  misc_RNA (1)...(19): siRNA sense strand
cuuagguguuauugcaaau

SEQ ID NO: 2502955 - RNA, 19 nt, Homo sapiens
  misc_RNA (1)...(19): siRNA sense strand
caguuaauucaguugcuaa

SEQ ID NO: 2502956 - RNA, 19 nt, Homo sapiens
  misc_RNA (1)...(19): siRNA sense strand
aguuagaugucaugaauuc

SEQ ID NO: 2502957 - RNA, 19 nt, Homo sapiens
  misc_RNA (1)...(19): siRNA sense strand
aagugacaaugaagaggua

SEQ ID NO: 2502958 - RNA, 19 nt, Homo sapiens
  misc_RNA (1)...(19): siRNA sense strand
gcgccugaacauacagaau

SEQ ID NO: 2502959 - RNA, 19 nt, Homo sapiens
  misc_RNA (1)...(19): siRNA sense strand
guguaugaggugaccaaau

SEQ ID NO: 2502960 - RNA, 19 nt, Homo sapiens
  misc_RNA (1)...(19): siRNA sense strand
gguaagauuccaaaagaga

SEQ ID NO: 2502961 - RNA, 19 nt, Homo sapiens
  misc_RNA (1)...(19): siRNA sense strand
cugaugaaguugagaaguc

SEQ ID NO: 2502962 - RNA, 19 nt, Homo sapiens
  misc_RNA (1)...(19): siRNA sense strand
aguaguuauccaugaguuu

SEQ ID NO: 2502963 - RNA, 19 nt, Homo sapiens
  misc_RNA (1)...(19): siRNA sense strand
ugcugaagcugaugguauu

SEQ ID NO: 2502964 - RNA, 19 nt, Homo sapiens
  misc_RNA (1)...(19): siRNA sense strand
cgauggauucuaugauuau

SEQ ID NO: 2502965 - RNA, 19 nt, Homo sapiens
  misc_RNA (1)...(19): siRNA sense strand
uguuauaccgauuggacau

SEQ ID NO: 2502966 - RNA, 19 nt, Homo sapiens
  misc_RNA (1)...(19): siRNA sense strand
gcccugacccggauguaaa

SEQ ID NO: 2502967 - RNA, 19 nt, Homo sapiens
  misc_RNA (1)...(19): siRNA sense strand
gcuccaagaaugaugaagu

SEQ ID NO: 2502968 - RNA, 19 nt, Homo sapiens
  misc_RNA (1)...(19): siRNA sense strand
cuuuagauauccuugaaga

SEQ ID NO: 2502969 - RNA, 19 nt, Homo sapiens
  misc_RNA (1)...(19): siRNA sense strand
ugaaagaggaggaagaggu

SEQ ID NO: 2502970 - RNA, 19 nt, Homo sapiens
  misc_RNA (1)...(19): siRNA sense strand
gcaaaguauguagcagaaa

SEQ ID NO: 2502971 - RNA, 19 nt, Homo sapiens
  misc_RNA (1)...(19): siRNA sense strand
cuacaauuccugauauuca

SEQ ID NO: 2502972 - RNA, 19 nt, Homo sapiens
  misc_RNA (1)...(19): siRNA sense strand
acccggauguaaagaagaa

SEQ ID NO: 2502973 - RNA, 19 nt, Homo sapiens
  misc_RNA (1)...(19): siRNA sense strand
agauauccuugaagaaguu

SEQ ID NO: 2502974 - RNA, 19 nt, Homo sapiens
  misc_RNA (1)...(19): siRNA sense strand
ccuugaagaaguuaacgua

SEQ ID NO: 2502975 - RNA, 19 nt, Homo sapiens
  misc_RNA (1)...(19): siRNA sense strand
cugagauguacgugauuga

SEQ ID NO: 2502976 - RNA, 19 nt, Homo sapiens
  misc_RNA (1)...(19): siRNA sense strand
caaacaugucugcagagua

SEQ ID NO: 2502977 - RNA, 19 nt, Homo sapiens
  misc_RNA (1)...(19): siRNA sense strand
ggagaguacgguagagcgu

SEQ ID NO: 2502978 - RNA, 19 nt, Homo sapiens
  misc_RNA (1)...(19): siRNA sense strand
ugacauaagaggaggaaga

SEQ ID NO: 2502979 - RNA, 19 nt, Homo sapiens
  misc_RNA (1)...(19): siRNA sense strand
gaguaaagcaacuggagaa

SEQ ID NO: 2502980 - RNA, 19 nt, Homo sapiens
  misc_RNA (1)...(19): siRNA sense strand
ccucuagaauguauggaaa

SEQ ID NO: 2502981 - RNA, 19 nt, Homo sapiens
  misc_RNA (1)...(19): siRNA sense strand
gagcaaaggcaauggaucu

SEQ ID NO: 2502982 - RNA, 19 nt, Homo sapiens
  misc_RNA (1)...(19): siRNA sense strand
gcagagacuuguaacgcaa

SEQ ID NO: 2502983 - RNA, 19 nt, Homo sapiens
  misc_RNA (1)...(19): siRNA sense strand
gguugaaaucauuaagcua

SEQ ID NO: 2502984 - RNA, 19 nt, Homo sapiens
  misc_RNA (1)...(19): siRNA sense strand
ugguaaugguugugaugau

SEQ ID NO: 2502985 - RNA, 19 nt, Homo sapiens
  misc_RNA (1)...(19): siRNA sense strand
cgaaaggggaagaggauga

SEQ ID NO: 2502986 - RNA, 19 nt, Homo sapiens
  misc_RNA (1)...(19): siRNA sense strand
cugaagaaacagugaaugu

SEQ ID NO: 2502987 - RNA, 19 nt, Homo sapiens
  misc_RNA (1)...(19): siRNA sense strand
gcuugaaggaggcgugaau

SEQ ID NO: 2502988 - RNA, 19 nt, Homo sapiens
  misc_RNA (1)...(19): siRNA sense strand
guuauuagcaacaggauca

SEQ ID NO: 2502989 - RNA, 19 nt, Homo sapiens
  misc_RNA (1)...(19): siRNA sense strand
uuuacaugcucuagaagaa

SEQ ID NO: 2502990 - RNA, 19 nt, Homo sapiens
  misc_RNA (1)...(19): siRNA sense strand
gcagugaaaucuugggcca

SEQ ID NO: 2502991 - RNA, 19 nt, Homo sapiens
  misc_RNA (1)...(19): siRNA sense strand
aagauaagacuguuggauu

SEQ ID NO: 2502992 - RNA, 19 nt, Homo sapiens
  misc_RNA (1)...(19): siRNA sense strand
caacaggaucaaaugacaa

SEQ ID NO: 2502993 - RNA, 19 nt, Homo sapiens
  misc_RNA (1)...(19): siRNA sense strand
aggaaaguggagucauaaa

SEQ ID NO: 2502994 - RNA, 19 nt, Homo sapiens
  misc_RNA (1)...(19): siRNA sense strand
ccagaaagcggaggagcua

SEQ ID NO: 2502995 - RNA, 19 nt, Homo sapiens
  misc_RNA (1)...(19): siRNA sense strand
uggccuugguaaugaggua

SEQ ID NO: 2502996 - RNA, 19 nt, Homo sapiens
  misc_RNA (1)...(19): siRNA sense strand
agaaauuacagaaagcgaa

SEQ ID NO: 2502997 - RNA, 19 nt, Homo sapiens
  misc_RNA (1)...(19): siRNA sense strand
gcacagaggccuaucggca

SEQ ID NO: 2502998 - RNA, 19 nt, Homo sapiens
  misc_RNA (1)...(19): siRNA sense strand
caauuagagacuuggcauu

SEQ ID NO: 2502999 - RNA, 19 nt, Homo sapiens
  misc_RNA (1)...(19): siRNA sense strand
ucucuuagccacaggucaa

SEQ ID NO: 2503000 - RNA, 19 nt, Homo sapiens
  misc_RNA (1)...(19): siRNA sense strand
gaauccaggaccagcuaaa

SEQ ID NO: 2503001 - RNA, 19 nt, Homo sapiens
  misc_RNA (1)...(19): siRNA sense strand
agaaagcggaggagcuauu

SEQ ID NO: 2503002 - RNA, 19 nt, Homo sapiens
  misc_RNA (1)...(19): siRNA sense strand
aggccuaucggcagugaaa

SEQ ID NO: 2503003 - RNA, 19 nt, Homo sapiens
  misc_RNA (1)...(19): siRNA sense strand
gggccagaguucaguuuca

SEQ ID NO: 2503004 - RNA, 19 nt, Homo sapiens
  misc_RNA (1)...(19): siRNA sense strand
gaggaaucaccuuguggaa

SEQ ID NO: 2503005 - RNA, 19 nt, Homo sapiens
  misc_RNA (1)...(19): siRNA sense strand
gaguggacauacugggcau

SEQ ID NO: 2503006 - RNA, 19 nt, Homo sapiens
  misc_RNA (1)...(19): siRNA sense strand
cagaacauucggucauuaa

SEQ ID NO: 2503007 - RNA, 19 nt, Homo sapiens
  misc_RNA (1)...(19): siRNA sense strand
agcuaauacuugaugguca

SEQ ID NO: 2503008 - RNA, 19 nt, Homo sapiens
  misc_RNA (1)...(19): siRNA sense strand
gcuugagaauacagaaugu

SEQ ID NO: 2503009 - RNA, 19 nt, Homo sapiens
  misc_RNA (1)...(19): siRNA sense strand
ggcugaagaaacagugaau

SEQ ID NO: 2503010 - RNA, 19 nt, Homo sapiens
  misc_RNA (1)...(19): siRNA sense strand
uagaacagaaggagcaaca

SEQ ID NO: 2503011 - RNA, 19 nt, Homo sapiens
  misc_RNA (1)...(19): siRNA sense strand
caguagaagucucaugcuu

SEQ ID NO: 2503012 - RNA, 19 nt, Homo sapiens
  misc_RNA (1)...(19): siRNA sense strand
ggaccagcuaaacaagaaa

SEQ ID NO: 2503013 - RNA, 19 nt, Homo sapiens
  misc_RNA (1)...(19): siRNA sense strand
agcaacagcggcagauaua

SEQ ID NO: 2503014 - RNA, 19 nt, Homo sapiens
  misc_RNA (1)...(19): siRNA sense strand
uaguaugcaugauggaaca

SEQ ID NO: 2503015 - RNA, 19 nt, Homo sapiens
  misc_RNA (1)...(19): siRNA sense strand
gagcacaaggacaaaguga

SEQ ID NO: 2503016 - RNA, 19 nt, Homo sapiens
  misc_RNA (1)...(19): siRNA sense strand
gugucaugguugcagaauu

SEQ ID NO: 2503017 - RNA, 19 nt, Homo sapiens
  misc_RNA (1)...(19): siRNA sense strand
ggaucugaguuuacuguca

SEQ ID NO: 2503018 - RNA, 19 nt, Homo sapiens
  misc_RNA (1)...(19): siRNA sense strand
acagaaugucacaguauuu

SEQ ID NO: 2503019 - RNA, 19 nt, Homo sapiens
  misc_RNA (1)...(19): siRNA sense strand
aaaugagcuucgagauuca

SEQ ID NO: 2503020 - RNA, 19 nt, Homo sapiens
  misc_RNA (1)...(19): siRNA sense strand
guugaugcacagaggccua

SEQ ID NO: 2503021 - RNA, 19 nt, Homo sapiens
  misc_RNA (1)...(19): siRNA sense strand
agccacaggucaagaagau

SEQ ID NO: 2503022 - RNA, 19 nt, Homo sapiens
  misc_RNA (1)...(19): siRNA sense strand
aagaggaggaagaauggua

SEQ ID NO: 2503023 - RNA, 19 nt, Homo sapiens
  misc_RNA (1)...(19): siRNA sense strand
auauuauccugaagcagaa

SEQ ID NO: 2503024 - RNA, 19 nt, Homo sapiens
  misc_RNA (1)...(19): siRNA sense strand
gcuaguaacaaucguuuau

SEQ ID NO: 2503025 - RNA, 19 nt, Homo sapiens
  misc_RNA (1)...(19): siRNA sense strand
agaagaaauuacagaaagc

SEQ ID NO: 2503026 - RNA, 19 nt, Homo sapiens
  misc_RNA (1)...(19): siRNA sense strand
aggaccagcuaaacaagaa

SEQ ID NO: 2503027 - RNA, 19 nt, Homo sapiens
  misc_RNA (1)...(19): siRNA sense strand
gcacaacauuucauggaac

SEQ ID NO: 2503028 - RNA, 19 nt, Homo sapiens
  misc_RNA (1)...(19): siRNA sense strand
uuaugaaugcuguguagaa

SEQ ID NO: 2503029 - RNA, 19 nt, Homo sapiens
  misc_RNA (1)...(19): siRNA sense strand
uggagaagaaauuacagaa

SEQ ID NO: 2503030 - RNA, 19 nt, Homo sapiens
  misc_RNA (1)...(19): siRNA sense strand
gagaauacagaaugucaca

SEQ ID NO: 2503031 - RNA, 19 nt, Homo sapiens
  misc_RNA (1)...(19): siRNA sense strand
ucgagauucaacagaacaa

SEQ ID NO: 2503032 - RNA, 19 nt, Homo sapiens
  misc_RNA (1)...(19): siRNA sense strand
uugaaggaggcgugaauca

SEQ ID NO: 2503033 - RNA, 19 nt, Homo sapiens
  misc_RNA (1)...(19): siRNA sense strand
cuucagaacauucggucau

SEQ ID NO: 2503034 - RNA, 19 nt, Homo sapiens
  misc_RNA (1)...(19): siRNA sense strand
cuguuagagcaguggcuuu

SEQ ID NO: 2503035 - RNA, 19 nt, Homo sapiens
  misc_RNA (1)...(19): siRNA sense strand
augcaugauggaacaauua

SEQ ID NO: 2503036 - RNA, 19 nt, Homo sapiens
  misc_RNA (1)...(19): siRNA sense strand
ugaaaauaaaggugacaga

SEQ ID NO: 2503037 - RNA, 19 nt, Homo sapiens
  misc_RNA (1)...(19): siRNA sense strand
aggugaagauguagagaaa

SEQ ID NO: 2503038 - RNA, 19 nt, Homo sapiens
  misc_RNA (1)...(19): siRNA sense strand
gugaagauguagagaaaca

SEQ ID NO: 2503039 - RNA, 19 nt, Homo sapiens
  misc_RNA (1)...(19): siRNA sense strand
agggaaaaguggugaauua

SEQ ID NO: 2503040 - RNA, 19 nt, Homo sapiens
  misc_RNA (1)...(19): siRNA sense strand
uauuauaaguccaggagaa

SEQ ID NO: 2503041 - RNA, 19 nt, Homo sapiens
  misc_RNA (1)...(19): siRNA sense strand
augcaaagugugugaauua

SEQ ID NO: 2503042 - RNA, 19 nt, Homo sapiens
  misc_RNA (1)...(19): siRNA sense strand
cuacaaaagaagagaagaa

SEQ ID NO: 2503043 - RNA, 19 nt, Homo sapiens
  misc_RNA (1)...(19): siRNA sense strand
cggaggaacacaaaggaaa

SEQ ID NO: 2503044 - RNA, 19 nt, Homo sapiens
  misc_RNA (1)...(19): siRNA sense strand
gauaagaagagguguucaa

SEQ ID NO: 2503045 - RNA, 19 nt, Homo sapiens
  misc_RNA (1)...(19): siRNA sense strand
guguauauguggugaacuu

SEQ ID NO: 2503046 - RNA, 19 nt, Homo sapiens
  misc_RNA (1)...(19): siRNA sense strand
aagcauggaagaaggaaua

SEQ ID NO: 2503047 - RNA, 19 nt, Homo sapiens
  misc_RNA (1)...(19): siRNA sense strand
guucaaaaguggugagcuu

SEQ ID NO: 2503048 - RNA, 19 nt, Homo sapiens
  misc_RNA (1)...(19): siRNA sense strand
cugcaauauuugaggagau

SEQ ID NO: 2503049 - RNA, 19 nt, Homo sapiens
  misc_RNA (1)...(19): siRNA sense strand
cgcaguaaauugaggaaaa

SEQ ID NO: 2503050 - RNA, 19 nt, Homo sapiens
  misc_RNA (1)...(19): siRNA sense strand
gaagaaagaaugcaggcaa

SEQ ID NO: 2503051 - RNA, 19 nt, Homo sapiens
  misc_RNA (1)...(19): siRNA sense strand
ggaaagaauuacaaggaag

SEQ ID NO: 2503052 - RNA, 19 nt, Homo sapiens
  misc_RNA (1)...(19): siRNA sense strand
cagaaauggcccagcguuu

SEQ ID NO: 2503053 - RNA, 19 nt, Homo sapiens
  misc_RNA (1)...(19): siRNA sense strand
gggcaauaagugagacaga

SEQ ID NO: 2503054 - RNA, 19 nt, Homo sapiens
  misc_RNA (1)...(19): siRNA sense strand
aagaaagaaugcaggcaau

SEQ ID NO: 2503055 - RNA, 19 nt, Homo sapiens
  misc_RNA (1)...(19): siRNA sense strand
gcugaaaacugcugagaga

SEQ ID NO: 2503056 - RNA, 19 nt, Homo sapiens
  misc_RNA (1)...(19): siRNA sense strand
gcaccgaauuggacagaca

SEQ ID NO: 2503057 - RNA, 19 nt, Homo sapiens
  misc_RNA (1)...(19): siRNA sense strand
gccaggauguggugguaaa

SEQ ID NO: 2503058 - RNA, 19 nt, Homo sapiens
  misc_RNA (1)...(19): siRNA sense strand
ucagaaaccagaaggaaau

SEQ ID NO: 2503059 - RNA, 19 nt, Homo sapiens
  misc_RNA (1)...(19): siRNA sense strand
cacaaauggaagagcuaaa

SEQ ID NO: 2503060 - RNA, 19 nt, Homo sapiens
  misc_RNA (1)...(19): siRNA sense strand
uggaagaggaugaagauga

SEQ ID NO: 2503061 - RNA, 19 nt, Homo sapiens
  misc_RNA (1)...(19): siRNA sense strand
ugucuuuaccucagagaaa

SEQ ID NO: 2503062 - RNA, 19 nt, Homo sapiens
  misc_RNA (1)...(19): siRNA sense strand
aguagggaguccaaggaaa

SEQ ID NO: 2503063 - RNA, 19 nt, Homo sapiens
  misc_RNA (1)...(19): siRNA sense strand
caacauggaauuugcacaa

SEQ ID NO: 2503064 - RNA, 19 nt, Homo sapiens
  misc_RNA (1)...(19): siRNA sense strand
gggauuaaucgauggugua

SEQ ID NO: 2503065 - RNA, 19 nt, Homo sapiens
  misc_RNA (1)...(19): siRNA sense strand
accacaaaccgaagaaaua

SEQ ID NO: 2503066 - RNA, 19 nt, Homo sapiens
  misc_RNA (1)...(19): siRNA sense strand
gcgagugcgaaaugaaaua

SEQ ID NO: 2503067 - RNA, 19 nt, Homo sapiens
  misc_RNA (1)...(19): siRNA sense strand
gcaugaggacagaaggaau

SEQ ID NO: 2503068 - RNA, 19 nt, Homo sapiens
  misc_RNA (1)...(19): siRNA sense strand
auuacaaggaagaggauau

SEQ ID NO: 2503069 - RNA, 19 nt, Homo sapiens
  misc_RNA (1)...(19): siRNA sense strand
ggagaugauagaagaugaa

SEQ ID NO: 2503070 - RNA, 19 nt, Homo sapiens
  misc_RNA (1)...(19): siRNA sense strand
caaccaagaacaugaaaca

SEQ ID NO: 2503071 - RNA, 19 nt, Homo sapiens
  misc_RNA (1)...(19): siRNA sense strand
agagugagccagagggaca

SEQ ID NO: 2503072 - RNA, 19 nt, Homo sapiens
  misc_RNA (1)...(19): siRNA sense strand
ucacagaguaugaaucaaa

SEQ ID NO: 2503073 - RNA, 19 nt, Homo sapiens
  misc_RNA (1)...(19): siRNA sense strand
gugauagucuaaaggaaga

SEQ ID NO: 2503074 - RNA, 19 nt, Homo sapiens
  misc_RNA (1)...(19): siRNA sense strand
aagaagagacuguugguau

SEQ ID NO: 2503075 - RNA, 19 nt, Homo sapiens
  misc_RNA (1)...(19): siRNA sense strand
acagagaggauuagaggau

SEQ ID NO: 2503076 - RNA, 19 nt, Homo sapiens
  misc_RNA (1)...(19): siRNA sense strand
ggaggaacacaaaggaaaa

SEQ ID NO: 2503077 - RNA, 19 nt, Homo sapiens
  misc_RNA (1)...(19): siRNA sense strand
gugaaagaaaugaauggaa

SEQ ID NO: 2503078 - RNA, 19 nt, Homo sapiens
  misc_RNA (1)...(19): siRNA sense strand
cagaagcgcuauauggcua

SEQ ID NO: 2503079 - RNA, 19 nt, Homo sapiens
  misc_RNA (1)...(19): siRNA sense strand
agagauaagaagagguguu

SEQ ID NO: 2503080 - RNA, 19 nt, Homo sapiens
  misc_RNA (1)...(19): siRNA sense strand
gaucaaaggccaugguuuu

SEQ ID NO: 2503081 - RNA, 19 nt, Homo sapiens
  misc_RNA (1)...(19): siRNA sense strand
aagcaaaccaggaggagga

SEQ ID NO: 2503082 - RNA, 19 nt, Homo sapiens
  misc_RNA (1)...(19): siRNA sense strand
aggagaaaucgcaguaaau

SEQ ID NO: 2503083 - RNA, 19 nt, Homo sapiens
  misc_RNA (1)...(19): siRNA sense strand
uggugaacuugaucagaua

SEQ ID NO: 2503084 - RNA, 19 nt, Homo sapiens
  misc_RNA (1)...(19): siRNA sense strand
aucagaaaccagaaggaaa

SEQ ID NO: 2503085 - RNA, 19 nt, Homo sapiens
  misc_RNA (1)...(19): siRNA sense strand
gauacugacagcugugaaa

SEQ ID NO: 2503086 - RNA, 19 nt, Homo sapiens
  misc_RNA (1)...(19): siRNA sense strand
gggaacaaggacacagauu

SEQ ID NO: 2503087 - RNA, 19 nt, Homo sapiens
  misc_RNA (1)...(19): siRNA sense strand
cuucuuauggcgagagauu

SEQ ID NO: 2503088 - RNA, 19 nt, Homo sapiens
  misc_RNA (1)...(19): siRNA sense strand
cauugaaccacaugaggua

SEQ ID NO: 2503089 - RNA, 19 nt, Homo sapiens
  misc_RNA (1)...(19): siRNA sense strand
aagugauagucuaaaggaa

SEQ ID NO: 2503090 - RNA, 19 nt, Homo sapiens
  misc_RNA (1)...(19): siRNA sense strand
gcagaagaaauguggaacu

SEQ ID NO: 2503091 - RNA, 19 nt, Homo sapiens
  misc_RNA (1)...(19): siRNA sense strand
aggagaugauagaagauga

SEQ ID NO: 2503092 - RNA, 19 nt, Homo sapiens
  misc_RNA (1)...(19): siRNA sense strand
guuaagacauuucaggaga

SEQ ID NO: 2503093 - RNA, 19 nt, Homo sapiens
  misc_RNA (1)...(19): siRNA sense strand
aagaugauccggagaguga

SEQ ID NO: 2503094 - RNA, 19 nt, Homo sapiens
  misc_RNA (1)...(19): siRNA sense strand
gaaguggcucacagagaua

SEQ ID NO: 2503095 - RNA, 19 nt, Homo sapiens
  misc_RNA (1)...(19): siRNA sense strand
ccaaagagaggcugucaau

SEQ ID NO: 2503096 - RNA, 19 nt, Homo sapiens
  misc_RNA (1)...(19): siRNA sense strand
uugaaggucucgugaaaca

SEQ ID NO: 2503097 - RNA, 19 nt, Homo sapiens
  misc_RNA (1)...(19): siRNA sense strand
gcagaauuguacagagaag

SEQ ID NO: 2503098 - RNA, 19 nt, Homo sapiens
  misc_RNA (1)...(19): siRNA sense strand
uggcaagauguauuagaua

SEQ ID NO: 2503099 - RNA, 19 nt, Homo sapiens
  misc_RNA (1)...(19): siRNA sense strand
caaggaaaauucagaaaga

SEQ ID NO: 2503100 - RNA, 19 nt, Homo sapiens
  misc_RNA (1)...(19): siRNA sense strand
ucguaagccucguguucaa

SEQ ID NO: 2503101 - RNA, 19 nt, Homo sapiens
  misc_RNA (1)...(19): siRNA sense strand
aguaaaagcugcagaaaug

SEQ ID NO: 2503102 - RNA, 19 nt, Homo sapiens
  misc_RNA (1)...(19): siRNA sense strand
agaguuaacuugucccaua

SEQ ID NO: 2503103 - RNA, 19 nt, Homo sapiens
  misc_RNA (1)...(19): siRNA sense strand
auguacagaucuugaaaca

SEQ ID NO: 2503104 - RNA, 19 nt, Homo sapiens
  misc_RNA (1)...(19): siRNA sense strand
gaaugaaggaaauacgaga

SEQ ID NO: 2503105 - RNA, 19 nt, Homo sapiens
  misc_RNA (1)...(19): siRNA sense strand
aauuaauggcacugacaau

SEQ ID NO: 2503106 - RNA, 19 nt, Homo sapiens
  misc_RNA (1)...(19): siRNA sense strand
ggacaaauuaagaacguuc

SEQ ID NO: 2503107 - RNA, 19 nt, Homo sapiens
  misc_RNA (1)...(19): siRNA sense strand
aggaaauacgagagcagca

SEQ ID NO: 2503108 - RNA, 19 nt, Homo sapiens
  misc_RNA (1)...(19): siRNA sense strand
gugccuauuugaaagaaaa

SEQ ID NO: 2503109 - RNA, 19 nt, Homo sapiens
  misc_RNA (1)...(19): siRNA sense strand
ugguaaggaugaaaaggaa

SEQ ID NO: 2503110 - RNA, 19 nt, Homo sapiens
  misc_RNA (1)...(19): siRNA sense strand
agaauggagcagaacagaa

SEQ ID NO: 2503111 - RNA, 19 nt, Homo sapiens
  misc_RNA (1)...(19): siRNA sense strand
caauuuugaggaagaguua

SEQ ID NO: 2503112 - RNA, 19 nt, Homo sapiens
  misc_RNA (1)...(19): siRNA sense strand
ugaaaagcugaaagaacaa

SEQ ID NO: 2503113 - RNA, 19 nt, Homo sapiens
  misc_RNA (1)...(19): siRNA sense strand
agaaaaugauccaaggcga

SEQ ID NO: 2503114 - RNA, 19 nt, Homo sapiens
  misc_RNA (1)...(19): siRNA sense strand
gaaggaaauacgagagcag

SEQ ID NO: 2503115 - RNA, 19 nt, Homo sapiens
  misc_RNA (1)...(19): siRNA sense strand
agugccuauuugaaagaaa

SEQ ID NO: 2503116 - RNA, 19 nt, Homo sapiens
  misc_RNA (1)...(19): siRNA sense strand
aggucaacaucauggucau

SEQ ID NO: 2503117 - RNA, 19 nt, Homo sapiens
  misc_RNA (1)...(19): siRNA sense strand
ucucugugauguuggcaau

SEQ ID NO: 2503118 - RNA, 19 nt, Homo sapiens
  misc_RNA (1)...(19): siRNA sense strand
gcagaacagaaauuggaca

SEQ ID NO: 2503119 - RNA, 19 nt, Homo sapiens
  misc_RNA (1)...(19): siRNA sense strand
gggagaacgacaagcccaa

SEQ ID NO: 2503120 - RNA, 19 nt, Homo sapiens
  misc_RNA (1)...(19): siRNA sense strand
ggacagugggagaacgaca

SEQ ID NO: 2503121 - RNA, 19 nt, Homo sapiens
  misc_RNA (1)...(19): siRNA sense strand
aggaguauuaugaggguga

SEQ ID NO: 2503122 - RNA, 19 nt, Homo sapiens
  misc_RNA (1)...(19): siRNA sense strand
uggaaaggugauaagaaau

SEQ ID NO: 2503123 - RNA, 19 nt, Homo sapiens
  misc_RNA (1)...(19): siRNA sense strand
gcgacaucuacgagggaca

SEQ ID NO: 2503124 - RNA, 19 nt, Homo sapiens
  misc_RNA (1)...(19): siRNA sense strand
gcgacuacuaugugggcga

SEQ ID NO: 2503125 - RNA, 19 nt, Homo sapiens
  misc_RNA (1)...(19): siRNA sense strand
ggugauaagaaaucggguu

SEQ ID NO: 2503126 - RNA, 19 nt, Homo sapiens
  misc_RNA (1)...(19): siRNA sense strand
ggaaguuugggaagcgaga

SEQ ID NO: 2503127 - RNA, 19 nt, Homo sapiens
  misc_RNA (1)...(19): siRNA sense strand
gggacuggaaguuugggaa

SEQ ID NO: 2503128 - RNA, 19 nt, Homo sapiens
  misc_RNA (1)...(19): siRNA sense strand
agucggagucccuguggaa

SEQ ID NO: 2503129 - RNA, 19 nt, Homo sapiens
  misc_RNA (1)...(19): siRNA sense strand
accggaaggcccagaggaa

SEQ ID NO: 2503130 - RNA, 19 nt, Homo sapiens
  misc_RNA (1)...(19): siRNA sense strand
acuaugugggcgaguggaa

SEQ ID NO: 2503131 - RNA, 19 nt, Homo sapiens
  misc_RNA (1)...(19): siRNA sense strand
cugaacaagcugagggugu

SEQ ID NO: 2503132 - RNA, 19 nt, Homo sapiens
  misc_RNA (1)...(19): siRNA sense strand
gcagcaacuucaagcccua

SEQ ID NO: 2503133 - RNA, 19 nt, Homo sapiens
  misc_RNA (1)...(19): siRNA sense strand
cuagaaagguaucggguug

SEQ ID NO: 2503134 - RNA, 19 nt, Homo sapiens
  misc_RNA (1)...(19): siRNA sense strand
aagaaaaugcagcuagaaa

SEQ ID NO: 2503135 - RNA, 19 nt, Homo sapiens
  misc_RNA (1)...(19): siRNA sense strand
agcugaaggaagagugcaa

SEQ ID NO: 2503136 - RNA, 19 nt, Homo sapiens
  misc_RNA (1)...(19): siRNA sense strand
uugcaaaagaagcagaaaa

SEQ ID NO: 2503137 - RNA, 19 nt, Homo sapiens
  misc_RNA (1)...(19): siRNA sense strand
augaaaagaugaagagucu

SEQ ID NO: 2503138 - RNA, 19 nt, Homo sapiens
  misc_RNA (1)...(19): siRNA sense strand
aggaagagugcaaagacuu

SEQ ID NO: 2503139 - RNA, 19 nt, Homo sapiens
  misc_RNA (1)...(19): siRNA sense strand
ugcaaaagaagcagaaaau

SEQ ID NO: 2503140 - RNA, 19 nt, Homo sapiens
  misc_RNA (1)...(19): siRNA sense strand
cuauagcaaagcagagaga

SEQ ID NO: 2503141 - RNA, 19 nt, Homo sapiens
  misc_RNA (1)...(19): siRNA sense strand
gagagaagcucaacagcag

SEQ ID NO: 2503142 - RNA, 19 nt, Homo sapiens
  misc_RNA (1)...(19): siRNA sense strand
acuuugaugaacugaacaa

SEQ ID NO: 2503143 - RNA, 19 nt, Homo sapiens
  misc_RNA (1)...(19): siRNA sense strand
aaggaagagugcaaagacu

SEQ ID NO: 2503144 - RNA, 19 nt, Homo sapiens
  misc_RNA (1)...(19): siRNA sense strand
gcuagaaagguaucggguu

SEQ ID NO: 2503145 - RNA, 19 nt, Homo sapiens
  misc_RNA (1)...(19): siRNA sense strand
auagcaaagcagagagaag

SEQ ID NO: 2503146 - RNA, 19 nt, Homo sapiens
  misc_RNA (1)...(19): siRNA sense strand
agggcaacgccaagagaaa

SEQ ID NO: 2503147 - RNA, 19 nt, Homo sapiens
  misc_RNA (1)...(19): siRNA sense strand
augacaaggaggaggagaa

SEQ ID NO: 2503148 - RNA, 19 nt, Homo sapiens
  misc_RNA (1)...(19): siRNA sense strand
aaugugugcaugagagaaa

SEQ ID NO: 2503149 - RNA, 19 nt, Homo sapiens
  misc_RNA (1)...(19): siRNA sense strand
ccuggauaauuguggucaa

SEQ ID NO: 2503150 - RNA, 19 nt, Homo sapiens
  misc_RNA (1)...(19): siRNA sense strand
gcgcaaaguugacagccau

SEQ ID NO: 2503151 - RNA, 19 nt, Homo sapiens
  misc_RNA (1)...(19): siRNA sense strand
acgagaagucacuggauga

SEQ ID NO: 2503152 - RNA, 19 nt, Homo sapiens
  misc_RNA (1)...(19): siRNA sense strand
ccacaaugcucuacguccu

SEQ ID NO: 2503153 - RNA, 19 nt, Homo sapiens
  misc_RNA (1)...(19): siRNA sense strand
gaggagaagcaggaggaga

SEQ ID NO: 2503154 - RNA, 19 nt, Homo sapiens
  misc_RNA (1)...(19): siRNA sense strand
cugaguaugacaauggauu

SEQ ID NO: 2503155 - RNA, 19 nt, Homo sapiens
  misc_RNA (1)...(19): siRNA sense strand
uuuacaggauagacgagaa

SEQ ID NO: 2503156 - RNA, 19 nt, Homo sapiens
  misc_RNA (1)...(19): siRNA sense strand
ccaauggaaaugugugcau

SEQ ID NO: 2503157 - RNA, 19 nt, Homo sapiens
  misc_RNA (1)...(19): siRNA sense strand
ggcgcaaaguugacagcca

SEQ ID NO: 2503158 - RNA, 19 nt, Homo sapiens
  misc_RNA (1)...(19): siRNA sense strand
aggagaagcaggaggagag

SEQ ID NO: 2503159 - RNA, 19 nt, Homo sapiens
  misc_RNA (1)...(19): siRNA sense strand
aggaggagaagcaggagga

SEQ ID NO: 2503160 - RNA, 19 nt, Homo sapiens
  misc_RNA (1)...(19): siRNA sense strand
cgccagcgucccacagaaa

SEQ ID NO: 2503161 - RNA, 19 nt, Homo sapiens
  misc_RNA (1)...(19): siRNA sense strand
uggcgaaggcauuggacaa

SEQ ID NO: 2503162 - RNA, 19 nt, Homo sapiens
  misc_RNA (1)...(19): siRNA sense strand
gcaccaagacugugaggca

SEQ ID NO: 2503163 - RNA, 19 nt, Homo sapiens
  misc_RNA (1)...(19): siRNA sense strand
gcaucaucgcugaggucaa

SEQ ID NO: 2503164 - RNA, 19 nt, Homo sapiens
  misc_RNA (1)...(19): siRNA sense strand
ucaaggaugcuaagaacaa

SEQ ID NO: 2503165 - RNA, 19 nt, Homo sapiens
  misc_RNA (1)...(19): siRNA sense strand
ggaagagcuacaagcacua

SEQ ID NO: 2503166 - RNA, 19 nt, Homo sapiens
  misc_RNA (1)...(19): siRNA sense strand
aggagauugcugagaucaa

SEQ ID NO: 2503167 - RNA, 19 nt, Homo sapiens
  misc_RNA (1)...(19): siRNA sense strand
uccuagagcagcagaacaa

SEQ ID NO: 2503168 - RNA, 19 nt, Homo sapiens
  misc_RNA (1)...(19): siRNA sense strand
aggaagagcuacaagcacu

SEQ ID NO: 2503169 - RNA, 19 nt, Homo sapiens
  misc_RNA (1)...(19): siRNA sense strand
agaacaagcuggaagggcu

SEQ ID NO: 2503170 - RNA, 19 nt, Homo sapiens
  misc_RNA (1)...(19): siRNA sense strand
agaucaagacccucaacaa

SEQ ID NO: 2503171 - RNA, 19 nt, Homo sapiens
  misc_RNA (1)...(19): siRNA sense strand
ggaggcagcuggacaacau

SEQ ID NO: 2503172 - RNA, 19 nt, Homo sapiens
  misc_RNA (1)...(19): siRNA sense strand
ggcagaaccuggagccguu

SEQ ID NO: 2503173 - RNA, 19 nt, Homo sapiens
  misc_RNA (1)...(19): siRNA sense strand
ggucacagcaggcagacau

SEQ ID NO: 2503174 - RNA, 19 nt, Homo sapiens
  misc_RNA (1)...(19): siRNA sense strand
caacaagcgcacagcagca

SEQ ID NO: 2503175 - RNA, 19 nt, Homo sapiens
  misc_RNA (1)...(19): siRNA sense strand
gucaagaagcagugugcca

SEQ ID NO: 2503176 - RNA, 19 nt, Homo sapiens
  misc_RNA (1)...(19): siRNA sense strand
gcuaagaacaagcuggaag

SEQ ID NO: 2503177 - RNA, 19 nt, Homo sapiens
  misc_RNA (1)...(19): siRNA sense strand
ggguggugcauguggagga

SEQ ID NO: 2503178 - RNA, 19 nt, Homo sapiens
  misc_RNA (1)...(19): siRNA sense strand
ucaggaggcagcuggacaa

SEQ ID NO: 2503179 - RNA, 19 nt, Homo sapiens
  misc_RNA (1)...(19): siRNA sense strand
ucgcugaggucaaggccca

SEQ ID NO: 2503180 - RNA, 19 nt, Homo sapiens
  misc_RNA (1)...(19): siRNA sense strand
ccuccagcaggaagagcua

SEQ ID NO: 2503181 - RNA, 19 nt, Homo sapiens
  misc_RNA (1)...(19): siRNA sense strand
acaagguucuggacaccaa

SEQ ID NO: 2503182 - RNA, 19 nt, Homo sapiens
  misc_RNA (1)...(19): siRNA sense strand
agaccaaguacgaggagcu

SEQ ID NO: 2503183 - RNA, 19 nt, Homo sapiens
  misc_RNA (1)...(19): siRNA sense strand
agaucgaccaugucaagaa

SEQ ID NO: 2503184 - RNA, 19 nt, Homo sapiens
  misc_RNA (1)...(19): siRNA sense strand
uggaagggcuggaggaugc

SEQ ID NO: 2503185 - RNA, 19 nt, Homo sapiens
  misc_RNA (1)...(19): siRNA sense strand
gagcagaucaagacccuca

SEQ ID NO: 2503186 - RNA, 19 nt, Homo sapiens
  misc_RNA (1)...(19): siRNA sense strand
agccguuguucgagcagua

SEQ ID NO: 2503187 - RNA, 19 nt, Homo sapiens
  misc_RNA (1)...(19): siRNA sense strand
gagacggaguggagagcga

SEQ ID NO: 2503188 - RNA, 19 nt, Homo sapiens
  misc_RNA (1)...(19): siRNA sense strand
auccagagguggugggaca

SEQ ID NO: 2503189 - RNA, 19 nt, Homo sapiens
  misc_RNA (1)...(19): siRNA sense strand
ggaaagaaggcaucgcaca

SEQ ID NO: 2503190 - RNA, 19 nt, Homo sapiens
  misc_RNA (1)...(19): siRNA sense strand
acaacaaggacauggacau

SEQ ID NO: 2503191 - RNA, 19 nt, Homo sapiens
  misc_RNA (1)...(19): siRNA sense strand
ggaacuacgaccaggaugu

SEQ ID NO: 2503192 - RNA, 19 nt, Homo sapiens
  misc_RNA (1)...(19): siRNA sense strand
gcuuugacaacaaggacau

SEQ ID NO: 2503193 - RNA, 19 nt, Homo sapiens
  misc_RNA (1)...(19): siRNA sense strand
cagaggaggaccuggaucu

SEQ ID NO: 2503194 - RNA, 19 nt, Homo sapiens
  misc_RNA (1)...(19): siRNA sense strand
ucuacaagaaggaggcguu

SEQ ID NO: 2503195 - RNA, 19 nt, Homo sapiens
  misc_RNA (1)...(19): siRNA sense strand
agccaagacuggagaaaca

SEQ ID NO: 2503196 - RNA, 19 nt, Homo sapiens
  misc_RNA (1)...(19): siRNA sense strand
cuauacaggaacagacaaa

SEQ ID NO: 2503197 - RNA, 19 nt, Homo sapiens
  misc_RNA (1)...(19): siRNA sense strand
aggugaagucagagaaaca

SEQ ID NO: 2503198 - RNA, 19 nt, Homo sapiens
  misc_RNA (1)...(19): siRNA sense strand
aggaugaagaagaggauga

SEQ ID NO: 2503199 - RNA, 19 nt, Homo sapiens
  misc_RNA (1)...(19): siRNA sense strand
augaagaggaagaagaaga

SEQ ID NO: 2503200 - RNA, 19 nt, Homo sapiens
  misc_RNA (1)...(19): siRNA sense strand
aguuaugguaggagaaaca

SEQ ID NO: 2503201 - RNA, 19 nt, Homo sapiens
  misc_RNA (1)...(19): siRNA sense strand
cagaagaauuaguaggauc

SEQ ID NO: 2503202 - RNA, 19 nt, Homo sapiens
  misc_RNA (1)...(19): siRNA sense strand
ccgaugaaccaauggaaca

SEQ ID NO: 2503203 - RNA, 19 nt, Homo sapiens
  misc_RNA (1)...(19): siRNA sense strand
guuaacagauccaaggaga

SEQ ID NO: 2503204 - RNA, 19 nt, Homo sapiens
  misc_RNA (1)...(19): siRNA sense strand
aaaugaucccagaaagaaa

SEQ ID NO: 2503205 - RNA, 19 nt, Homo sapiens
  misc_RNA (1)...(19): siRNA sense strand
caaauuucucagaggagua

SEQ ID NO: 2503206 - RNA, 19 nt, Homo sapiens
  misc_RNA (1)...(19): siRNA sense strand
cagacagcaaagaggcaaa

SEQ ID NO: 2503207 - RNA, 19 nt, Homo sapiens
  misc_RNA (1)...(19): siRNA sense strand
augaagaagaggaugaaga

SEQ ID NO: 2503208 - RNA, 19 nt, Homo sapiens
  misc_RNA (1)...(19): siRNA sense strand
aggaugaagaggaagaaga

SEQ ID NO: 2503209 - RNA, 19 nt, Homo sapiens
  misc_RNA (1)...(19): siRNA sense strand
aggagaaacagaagcauca

SEQ ID NO: 2503210 - RNA, 19 nt, Homo sapiens
  misc_RNA (1)...(19): siRNA sense strand
ggucccaauuuaaaggcua

SEQ ID NO: 2503211 - RNA, 19 nt, Homo sapiens
  misc_RNA (1)...(19): siRNA sense strand
aagaagaggaugaagagga

SEQ ID NO: 2503212 - RNA, 19 nt, Homo sapiens
  misc_RNA (1)...(19): siRNA sense strand
aagaggaugaagaggaaga

SEQ ID NO: 2503213 - RNA, 19 nt, Homo sapiens
  misc_RNA (1)...(19): siRNA sense strand
ggauccaauuccaguaaaa

SEQ ID NO: 2503214 - RNA, 19 nt, Homo sapiens
  misc_RNA (1)...(19): siRNA sense strand
cagaaucauccauggaaaa

SEQ ID NO: 2503215 - RNA, 19 nt, Homo sapiens
  misc_RNA (1)...(19): siRNA sense strand
uauaaaugggccugggaca

SEQ ID NO: 2503216 - RNA, 19 nt, Homo sapiens
  misc_RNA (1)...(19): siRNA sense strand
auacaggaacagacaaauu

SEQ ID NO: 2503217 - RNA, 19 nt, Homo sapiens
  misc_RNA (1)...(19): siRNA sense strand
caggaggcgcugaaagauu

SEQ ID NO: 2503218 - RNA, 19 nt, Homo sapiens
  misc_RNA (1)...(19): siRNA sense strand
gcagcaaaaugaggagaaa

SEQ ID NO: 2503219 - RNA, 19 nt, Homo sapiens
  misc_RNA (1)...(19): siRNA sense strand
gguaggagaaacagaagca

SEQ ID NO: 2503220 - RNA, 19 nt, Homo sapiens
  misc_RNA (1)...(19): siRNA sense strand
cgaugaaccaauggaacaa

SEQ ID NO: 2503221 - RNA, 19 nt, Homo sapiens
  misc_RNA (1)...(19): siRNA sense strand
accaauggaacaagacuaa

SEQ ID NO: 2503222 - RNA, 19 nt, Homo sapiens
  misc_RNA (1)...(19): siRNA sense strand
cugagaggucuaauauaaa

SEQ ID NO: 2503223 - RNA, 19 nt, Homo sapiens
  misc_RNA (1)...(19): siRNA sense strand
cugagaaagauuugcuaca

SEQ ID NO: 2503224 - RNA, 19 nt, Homo sapiens
  misc_RNA (1)...(19): siRNA sense strand
cauucugaagguagugaaa

SEQ ID NO: 2503225 - RNA, 19 nt, Homo sapiens
  misc_RNA (1)...(19): siRNA sense strand
cuucaguuaugguaggaga

SEQ ID NO: 2503226 - RNA, 19 nt, Homo sapiens
  misc_RNA (1)...(19): siRNA sense strand
agacaaauuucucagagga

SEQ ID NO: 2503227 - RNA, 19 nt, Homo sapiens
  misc_RNA (1)...(19): siRNA sense strand
uuaacagauccaaggagaa

SEQ ID NO: 2503228 - RNA, 19 nt, Homo sapiens
  misc_RNA (1)...(19): siRNA sense strand
gguuguuagcuguguuuau

SEQ ID NO: 2503229 - RNA, 19 nt, Homo sapiens
  misc_RNA (1)...(19): siRNA sense strand
cugaggggcaugagguaaa

SEQ ID NO: 2503230 - RNA, 19 nt, Homo sapiens
  misc_RNA (1)...(19): siRNA sense strand
agaauuaguaggauccaau

SEQ ID NO: 2503231 - RNA, 19 nt, Homo sapiens
  misc_RNA (1)...(19): siRNA sense strand
auggaugauuucagaacuu

SEQ ID NO: 2503232 - RNA, 19 nt, Homo sapiens
  misc_RNA (1)...(19): siRNA sense strand
cgacuaugugaauuguuaa

SEQ ID NO: 2503233 - RNA, 19 nt, Homo sapiens
  misc_RNA (1)...(19): siRNA sense strand
cuggagaaacaaugauuca

SEQ ID NO: 2503234 - RNA, 19 nt, Homo sapiens
  misc_RNA (1)...(19): siRNA sense strand
caagagaaaugaucccaga

SEQ ID NO: 2503235 - RNA, 19 nt, Homo sapiens
  misc_RNA (1)...(19): siRNA sense strand
ucagaggaguagaaaagaa

SEQ ID NO: 2503236 - RNA, 19 nt, Homo sapiens
  misc_RNA (1)...(19): siRNA sense strand
cugagagcacagacagcaa

SEQ ID NO: 2503237 - RNA, 19 nt, Homo sapiens
  misc_RNA (1)...(19): siRNA sense strand
cagagaaacagccagucaa

SEQ ID NO: 2503238 - RNA, 19 nt, Homo sapiens
  misc_RNA (1)...(19): siRNA sense strand
cagcaaaaugaggagaaaa

SEQ ID NO: 2503239 - RNA, 19 nt, Homo sapiens
  misc_RNA (1)...(19): siRNA sense strand
caucucaggauaaagacaa

SEQ ID NO: 2503240 - RNA, 19 nt, Homo sapiens
  misc_RNA (1)...(19): siRNA sense strand
agcuauacugagaggucua

SEQ ID NO: 2503241 - RNA, 19 nt, Homo sapiens
  misc_RNA (1)...(19): siRNA sense strand
agaggaagaagaagagucu

SEQ ID NO: 2503242 - RNA, 19 nt, Homo sapiens
  misc_RNA (1)...(19): siRNA sense strand
cuuaaucgaccaaagguuu

SEQ ID NO: 2503243 - RNA, 19 nt, Homo sapiens
  misc_RNA (1)...(19): siRNA sense strand
ucuucugacugccgugaaa

SEQ ID NO: 2503244 - RNA, 19 nt, Homo sapiens
  misc_RNA (1)...(19): siRNA sense strand
gcgaaauuucuucaguuau

SEQ ID NO: 2503245 - RNA, 19 nt, Homo sapiens
  misc_RNA (1)...(19): siRNA sense strand
gucaaaacaacuaggguaa

SEQ ID NO: 2503246 - RNA, 19 nt, Homo sapiens
  misc_RNA (1)...(19): siRNA sense strand
agccaugucuagagggaga

SEQ ID NO: 2503247 - RNA, 19 nt, Homo sapiens
  misc_RNA (1)...(19): siRNA sense strand
caagauagaagaacgguca

SEQ ID NO: 2503248 - RNA, 19 nt, Homo sapiens
  misc_RNA (1)...(19): siRNA sense strand
augucuagagggagaagaa

SEQ ID NO: 2503249 - RNA, 19 nt, Homo sapiens
  misc_RNA (1)...(19): siRNA sense strand
agucaaaacaacuagggua

SEQ ID NO: 2503250 - RNA, 19 nt, Homo sapiens
  misc_RNA (1)...(19): siRNA sense strand
uucaauaguggaacagaaa

SEQ ID NO: 2503251 - RNA, 19 nt, Homo sapiens
  misc_RNA (1)...(19): siRNA sense strand
auguaaaguucuuccggau

SEQ ID NO: 2503252 - RNA, 19 nt, Homo sapiens
  misc_RNA (1)...(19): siRNA sense strand
agaaagcaacaaaaggaaa

SEQ ID NO: 2503253 - RNA, 19 nt, Homo sapiens
  misc_RNA (1)...(19): siRNA sense strand
agauacuuacagaaagcaa

SEQ ID NO: 2503254 - RNA, 19 nt, Homo sapiens
  misc_RNA (1)...(19): siRNA sense strand
cggagaacgugaagggaga

SEQ ID NO: 2503255 - RNA, 19 nt, Homo sapiens
  misc_RNA (1)...(19): siRNA sense strand
ucauggagcacgugcgaaa

SEQ ID NO: 2503256 - RNA, 19 nt, Homo sapiens
  misc_RNA (1)...(19): siRNA sense strand
agaagaaggacaaggcgaa

SEQ ID NO: 2503257 - RNA, 19 nt, Homo sapiens
  misc_RNA (1)...(19): siRNA sense strand
ggaagaugcuuucuggaga

SEQ ID NO: 2503258 - RNA, 19 nt, Homo sapiens
  misc_RNA (1)...(19): siRNA sense strand
uggccagcuucgaggagaa

SEQ ID NO: 2503259 - RNA, 19 nt, Homo sapiens
  misc_RNA (1)...(19): siRNA sense strand
agaaguacugucagaacaa

SEQ ID NO: 2503260 - RNA, 19 nt, Homo sapiens
  misc_RNA (1)...(19): siRNA sense strand
gagaagaaggacaaggcga

SEQ ID NO: 2503261 - RNA, 19 nt, Homo sapiens
  misc_RNA (1)...(19): siRNA sense strand
aggacaaggcgaaggagga

SEQ ID NO: 2503262 - RNA, 19 nt, Homo sapiens
  misc_RNA (1)...(19): siRNA sense strand
guggugugaugaagggauu

SEQ ID NO: 2503263 - RNA, 19 nt, Homo sapiens
  misc_RNA (1)...(19): siRNA sense strand
acgcgauuuacaaggaaua

SEQ ID NO: 2503264 - RNA, 19 nt, Homo sapiens
  misc_RNA (1)...(19): siRNA sense strand
cugaaauacagcaggaacu

SEQ ID NO: 2503265 - RNA, 19 nt, Homo sapiens
  misc_RNA (1)...(19): siRNA sense strand
cggacaaggaguuccagaa

SEQ ID NO: 2503266 - RNA, 19 nt, Homo sapiens
  misc_RNA (1)...(19): siRNA sense strand
gaacaagcacuacgcggua

SEQ ID NO: 2503267 - RNA, 19 nt, Homo sapiens
  misc_RNA (1)...(19): siRNA sense strand
acaucaagaagcuggaaga

SEQ ID NO: 2503268 - RNA, 19 nt, Homo sapiens
  misc_RNA (1)...(19): siRNA sense strand
acgugaagggagaugcuaa

SEQ ID NO: 2503269 - RNA, 19 nt, Homo sapiens
  misc_RNA (1)...(19): siRNA sense strand
cggcaaaccugcagcucgu

SEQ ID NO: 2503270 - RNA, 19 nt, Homo sapiens
  misc_RNA (1)...(19): siRNA sense strand
gacccgaggcacuggcaaa

SEQ ID NO: 2503271 - RNA, 19 nt, Homo sapiens
  misc_RNA (1)...(19): siRNA sense strand
ucgaugaguucugggcaaa

SEQ ID NO: 2503272 - RNA, 19 nt, Homo sapiens
  misc_RNA (1)...(19): siRNA sense strand
aaggaaaugcugaaauaca

SEQ ID NO: 2503273 - RNA, 19 nt, Homo sapiens
  misc_RNA (1)...(19): siRNA sense strand
auuaaagccgcguggguga

SEQ ID NO: 2503274 - RNA, 19 nt, Homo sapiens
  misc_RNA (1)...(19): siRNA sense strand
gugcgcacacagagaagaa

SEQ ID NO: 2503275 - RNA, 19 nt, Homo sapiens
  misc_RNA (1)...(19): siRNA sense strand
aggcaagcauggaggaggu

SEQ ID NO: 2503276 - RNA, 19 nt, Homo sapiens
  misc_RNA (1)...(19): siRNA sense strand
aagagugagaugagugaga

SEQ ID NO: 2503277 - RNA, 19 nt, Homo sapiens
  misc_RNA (1)...(19): siRNA sense strand
uccaggaaugccagagaaa

SEQ ID NO: 2503278 - RNA, 19 nt, Homo sapiens
  misc_RNA (1)...(19): siRNA sense strand
agggagaugcuaagaaguu

SEQ ID NO: 2503279 - RNA, 19 nt, Homo sapiens
  misc_RNA (1)...(19): siRNA sense strand
caugaaguggugugaugaa

SEQ ID NO: 2503280 - RNA, 19 nt, Homo sapiens
  misc_RNA (1)...(19): siRNA sense strand
acgagaaggcagugcucuu

SEQ ID NO: 2503281 - RNA, 19 nt, Homo sapiens
  misc_RNA (1)...(19): siRNA sense strand
acucaaggaacaucaagaa

SEQ ID NO: 2503282 - RNA, 19 nt, Homo sapiens
  misc_RNA (1)...(19): siRNA sense strand
cgaaggaggauuugaggcu

SEQ ID NO: 2503283 - RNA, 19 nt, Homo sapiens
  misc_RNA (1)...(19): siRNA sense strand
cggagggccaagagugaga

SEQ ID NO: 2503284 - RNA, 19 nt, Homo sapiens
  misc_RNA (1)...(19): siRNA sense strand
ggacaaggcgaaggaggau

SEQ ID NO: 2503285 - RNA, 19 nt, Homo sapiens
  misc_RNA (1)...(19): siRNA sense strand
aggagaauggggaggggua

SEQ ID NO: 2503286 - RNA, 19 nt, Homo sapiens
  misc_RNA (1)...(19): siRNA sense strand
ugugcguccuggagggcua

SEQ ID NO: 2503287 - RNA, 19 nt, Homo sapiens
  misc_RNA (1)...(19): siRNA sense strand
gggaggaggaggaaagccu

SEQ ID NO: 2503288 - RNA, 19 nt, Homo sapiens
  misc_RNA (1)...(19): siRNA sense strand
cugcaggcuuguagagaag

SEQ ID NO: 2503289 - RNA, 19 nt, Homo sapiens
  misc_RNA (1)...(19): siRNA sense strand
gcggagaucgcaaggagga

SEQ ID NO: 2503290 - RNA, 19 nt, Homo sapiens
  misc_RNA (1)...(19): siRNA sense strand
gcucaaggaaaugcugaaa

SEQ ID NO: 2503291 - RNA, 19 nt, Homo sapiens
  misc_RNA (1)...(19): siRNA sense strand
caagaagagggaggagaau

SEQ ID NO: 2503292 - RNA, 19 nt, Homo sapiens
  misc_RNA (1)...(19): siRNA sense strand
caucaagaagcuggaagaa

SEQ ID NO: 2503293 - RNA, 19 nt, Homo sapiens
  misc_RNA (1)...(19): siRNA sense strand
acauccaggaccagcuaaa

SEQ ID NO: 2503294 - RNA, 19 nt, Homo sapiens
  misc_RNA (1)...(19): siRNA sense strand
aggcugcccuccaggaaau

SEQ ID NO: 2503295 - RNA, 19 nt, Homo sapiens
  misc_RNA (1)...(19): siRNA sense strand
aucaagaagcuggaagaaa

SEQ ID NO: 2503296 - RNA, 19 nt, Homo sapiens
  misc_RNA (1)...(19): siRNA sense strand
agaagcuggaagaaaggaa

SEQ ID NO: 2503297 - RNA, 19 nt, Homo sapiens
  misc_RNA (1)...(19): siRNA sense strand
cgucauaaggggugaguuu

SEQ ID NO: 2503298 - RNA, 19 nt, Homo sapiens
  misc_RNA (1)...(19): siRNA sense strand
caacugaagaaacgggcaa

SEQ ID NO: 2503299 - RNA, 19 nt, Homo sapiens
  misc_RNA (1)...(19): siRNA sense strand
gguucauacuggagagaag

SEQ ID NO: 2503300 - RNA, 19 nt, Homo sapiens
  misc_RNA (1)...(19): siRNA sense strand
cuugaauguucuuuggaau

SEQ ID NO: 2503301 - RNA, 19 nt, Homo sapiens
  misc_RNA (1)...(19): siRNA sense strand
caagaaugaacaagaggga

SEQ ID NO: 2503302 - RNA, 19 nt, Homo sapiens
  misc_RNA (1)...(19): siRNA sense strand
agaaaggaucagaacaaca

SEQ ID NO: 2503303 - RNA, 19 nt, Homo sapiens
  misc_RNA (1)...(19): siRNA sense strand
cacaaaagauaguuggaga

SEQ ID NO: 2503304 - RNA, 19 nt, Homo sapiens
  misc_RNA (1)...(19): siRNA sense strand
ggcugcaacaggagguuua

SEQ ID NO: 2503305 - RNA, 19 nt, Homo sapiens
  misc_RNA (1)...(19): siRNA sense strand
caaauaaccugaaagccca

SEQ ID NO: 2503306 - RNA, 19 nt, Homo sapiens
  misc_RNA (1)...(19): siRNA sense strand
uaugacagucugagcgcaa

SEQ ID NO: 2503307 - RNA, 19 nt, Homo sapiens
  misc_RNA (1)...(19): siRNA sense strand
gggccuuaugugauggcua

SEQ ID NO: 2503308 - RNA, 19 nt, Homo sapiens
  misc_RNA (1)...(19): siRNA sense strand
aagaaacgggcaaagacaa

SEQ ID NO: 2503309 - RNA, 19 nt, Homo sapiens
  misc_RNA (1)...(19): siRNA sense strand
cugugcggaaugugggaaa

SEQ ID NO: 2503310 - RNA, 19 nt, Homo sapiens
  misc_RNA (1)...(19): siRNA sense strand
cugaguacaugacaggcaa

SEQ ID NO: 2503311 - RNA, 19 nt, Homo sapiens
  misc_RNA (1)...(19): siRNA sense strand
ccuuggaauaccuaaagaa

SEQ ID NO: 2503312 - RNA, 19 nt, Homo sapiens
  misc_RNA (1)...(19): siRNA sense strand
uggaggaauaccuggcauu

SEQ ID NO: 2503313 - RNA, 19 nt, Homo sapiens
  misc_RNA (1)...(19): siRNA sense strand
auagagcugcccugagaaa

SEQ ID NO: 2503314 - RNA, 19 nt, Homo sapiens
  misc_RNA (1)...(19): siRNA sense strand
gggaugaggaugaagaaga

SEQ ID NO: 2503315 - RNA, 19 nt, Homo sapiens
  misc_RNA (1)...(19): siRNA sense strand
gguuuggguucuauaaaua

SEQ ID NO: 2503316 - RNA, 19 nt, Homo sapiens
  misc_RNA (1)...(19): siRNA sense strand
gcugaggacuccagugaga

SEQ ID NO: 2503317 - RNA, 19 nt, Homo sapiens
  misc_RNA (1)...(19): siRNA sense strand
cggugaagaagauccguaa

SEQ ID NO: 2503318 - RNA, 19 nt, Homo sapiens
  misc_RNA (1)...(19): siRNA sense strand
gccugaaguucgaggucau

SEQ ID NO: 2503319 - RNA, 19 nt, Homo sapiens
  misc_RNA (1)...(19): siRNA sense strand
gcaucgugaacguggagaa

SEQ ID NO: 2503320 - RNA, 19 nt, Homo sapiens
  misc_RNA (1)...(19): siRNA sense strand
gugagaagcugaccaguga

SEQ ID NO: 2503321 - RNA, 19 nt, Homo sapiens
  misc_RNA (1)...(19): siRNA sense strand
acauggagacggacaacaa

SEQ ID NO: 2503322 - RNA, 19 nt, Homo sapiens
  misc_RNA (1)...(19): siRNA sense strand
gcgaagaggaggaggaagg

SEQ ID NO: 2503323 - RNA, 19 nt, Homo sapiens
  misc_RNA (1)...(19): siRNA sense strand
ccuacguggucaaggacuu

SEQ ID NO: 2503324 - RNA, 19 nt, Homo sapiens
  misc_RNA (1)...(19): siRNA sense strand
acaugaagauggacaagga

SEQ ID NO: 2503325 - RNA, 19 nt, Homo sapiens
  misc_RNA (1)...(19): siRNA sense strand
acuuugaguugcugcacaa

SEQ ID NO: 2503326 - RNA, 19 nt, Homo sapiens
  misc_RNA (1)...(19): siRNA sense strand
ccaacauccuggacggcau

SEQ ID NO: 2503327 - RNA, 19 nt, Homo sapiens
  misc_RNA (1)...(19): siRNA sense strand
augaagaagacgaggugca

SEQ ID NO: 2503328 - RNA, 19 nt, Homo sapiens
  misc_RNA (1)...(19): siRNA sense strand
cgcuguaucuggagagguu

SEQ ID NO: 2503329 - RNA, 19 nt, Homo sapiens
  misc_RNA (1)...(19): siRNA sense strand
gaagugggcuggcgagcuu

SEQ ID NO: 2503330 - RNA, 19 nt, Homo sapiens
  misc_RNA (1)...(19): siRNA sense strand
ugguggauuucgagagcga

SEQ ID NO: 2503331 - RNA, 19 nt, Homo sapiens
  misc_RNA (1)...(19): siRNA sense strand
cgggcgagauggugagaag

SEQ ID NO: 2503332 - RNA, 19 nt, Homo sapiens
  misc_RNA (1)...(19): siRNA sense strand
gcucggaccacguggaagu

SEQ ID NO: 2503333 - RNA, 19 nt, Homo sapiens
  misc_RNA (1)...(19): siRNA sense strand
aagaagauccguaagcaga

SEQ ID NO: 2503334 - RNA, 19 nt, Homo sapiens
  misc_RNA (1)...(19): siRNA sense strand
cggacgacuuccuggacga

SEQ ID NO: 2503335 - RNA, 19 nt, Homo sapiens
  misc_RNA (1)...(19): siRNA sense strand
gggcgaagaggaggaggaa

SEQ ID NO: 2503336 - RNA, 19 nt, Homo sapiens
  misc_RNA (1)...(19): siRNA sense strand
gcaccaccgugaagaaguu

SEQ ID NO: 2503337 - RNA, 19 nt, Homo sapiens
  misc_RNA (1)...(19): siRNA sense strand
aauacaugaagauggacaa

SEQ ID NO: 2503338 - RNA, 19 nt, Homo sapiens
  misc_RNA (1)...(19): siRNA sense strand
gggcugaggacuccaguga

SEQ ID NO: 2503339 - RNA, 19 nt, Homo sapiens
  misc_RNA (1)...(19): siRNA sense strand
guggacagcgccuggagaa

SEQ ID NO: 2503340 - RNA, 19 nt, Homo sapiens
  misc_RNA (1)...(19): siRNA sense strand
ggaugaggaugaagaagac

SEQ ID NO: 2503341 - RNA, 19 nt, Homo sapiens
  misc_RNA (1)...(19): siRNA sense strand
ugaagauggacaaggagga

SEQ ID NO: 2503342 - RNA, 19 nt, Homo sapiens
  misc_RNA (1)...(19): siRNA sense strand
auuucgagagcgaggauau

SEQ ID NO: 2503343 - RNA, 19 nt, Homo sapiens
  misc_RNA (1)...(19): siRNA sense strand
ggagaauucaccaaguuca

SEQ ID NO: 2503344 - RNA, 19 nt, Homo sapiens
  misc_RNA (1)...(19): siRNA sense strand
gagaagcugaccagugaga

SEQ ID NO: 2503345 - RNA, 19 nt, Homo sapiens
  misc_RNA (1)...(19): siRNA sense strand
ggugaacggcuuuggccuu

SEQ ID NO: 2503346 - RNA, 19 nt, Homo sapiens
  misc_RNA (1)...(19): siRNA sense strand
ucagcaaagucaaggccaa

SEQ ID NO: 2503347 - RNA, 19 nt, Homo sapiens
  misc_RNA (1)...(19): siRNA sense strand
augaaguccuggagaacau

SEQ ID NO: 2503348 - RNA, 19 nt, Homo sapiens
  misc_RNA (1)...(19): siRNA sense strand
gugcaaagacuguggcauc

SEQ ID NO: 2503349 - RNA, 19 nt, Homo sapiens
  misc_RNA (1)...(19): siRNA sense strand
cgggaagagaugacugaca

SEQ ID NO: 2503350 - RNA, 19 nt, Homo sapiens
  misc_RNA (1)...(19): siRNA sense strand
uggacaucguguucagcaa

SEQ ID NO: 2503351 - RNA, 19 nt, Homo sapiens
  misc_RNA (1)...(19): siRNA sense strand
guggcaagggcaagggcau

SEQ ID NO: 2503352 - RNA, 19 nt, Homo sapiens
  misc_RNA (1)...(19): siRNA sense strand
ccuacgauaagaagaccaa

SEQ ID NO: 2503353 - RNA, 19 nt, Homo sapiens
  misc_RNA (1)...(19): siRNA sense strand
auggacucauggagggcaa

SEQ ID NO: 2503354 - RNA, 19 nt, Homo sapiens
  misc_RNA (1)...(19): siRNA sense strand
uggagaacauuuauggacu

SEQ ID NO: 2503355 - RNA, 19 nt, Homo sapiens
  misc_RNA (1)...(19): siRNA sense strand
gcgccauggaugagaguca

SEQ ID NO: 2503356 - RNA, 19 nt, Homo sapiens
  misc_RNA (1)...(19): siRNA sense strand
gugaacaggaaguggacca

SEQ ID NO: 2503357 - RNA, 19 nt, Homo sapiens
  misc_RNA (1)...(19): siRNA sense strand
acucagugcacgagaacca

SEQ ID NO: 2503358 - RNA, 19 nt, Homo sapiens
  misc_RNA (1)...(19): siRNA sense strand
cuucaaugagagggaauua

SEQ ID NO: 2503359 - RNA, 19 nt, Homo sapiens
  misc_RNA (1)...(19): siRNA sense strand
auuugaaggugaaggaugu

SEQ ID NO: 2503360 - RNA, 19 nt, Homo sapiens
  misc_RNA (1)...(19): siRNA sense strand
gggcaaaaccaucaagcuu

SEQ ID NO: 2503361 - RNA, 19 nt, Homo sapiens
  misc_RNA (1)...(19): siRNA sense strand
gcaagaaacagccagggau

SEQ ID NO: 2503362 - RNA, 19 nt, Homo sapiens
  misc_RNA (1)...(19): siRNA sense strand
cagccagggaugaaaccua

SEQ ID NO: 2503363 - RNA, 19 nt, Homo sapiens
  misc_RNA (1)...(19): siRNA sense strand
uggacagauuacugagcuu

SEQ ID NO: 2503364 - RNA, 19 nt, Homo sapiens
  misc_RNA (1)...(19): siRNA sense strand
gcuggacauaguagagaau

SEQ ID NO: 2503365 - RNA, 19 nt, Homo sapiens
  misc_RNA (1)...(19): siRNA sense strand
gcaacuucaaugagaggga

SEQ ID NO: 2503366 - RNA, 19 nt, Homo sapiens
  misc_RNA (1)...(19): siRNA sense strand
gugaggucauccuggucaa

SEQ ID NO: 2503367 - RNA, 19 nt, Homo sapiens
  misc_RNA (1)...(19): siRNA sense strand
caagaaacagccagggaug

SEQ ID NO: 2503368 - RNA, 19 nt, Homo sapiens
  misc_RNA (1)...(19): siRNA sense strand
acuucuggauacagcuuua

SEQ ID NO: 2503369 - RNA, 19 nt, Homo sapiens
  misc_RNA (1)...(19): siRNA sense strand
ccguagaauuggaaggaau

SEQ ID NO: 2503370 - RNA, 19 nt, Homo sapiens
  misc_RNA (1)...(19): siRNA sense strand
uuagagaagaagagagaaa

SEQ ID NO: 2503371 - RNA, 19 nt, Homo sapiens
  misc_RNA (1)...(19): siRNA sense strand
guuuggagguugaggacaa

SEQ ID NO: 2503372 - RNA, 19 nt, Homo sapiens
  misc_RNA (1)...(19): siRNA sense strand
gcacagagcugguggguug

SEQ ID NO: 2503373 - RNA, 19 nt, Homo sapiens
  misc_RNA (1)...(19): siRNA sense strand
aguuagagaagaagagaga

SEQ ID NO: 2503374 - RNA, 19 nt, Homo sapiens
  misc_RNA (1)...(19): siRNA sense strand
agaagaagagagaaagcaa

SEQ ID NO: 2503375 - RNA, 19 nt, Homo sapiens
  misc_RNA (1)...(19): siRNA sense strand
ggacauaaucacuugguca

SEQ ID NO: 2503376 - RNA, 19 nt, Homo sapiens
  misc_RNA (1)...(19): siRNA sense strand
acuuuaaggaccagggauu

SEQ ID NO: 2503377 - RNA, 19 nt, Homo sapiens
  misc_RNA (1)...(19): siRNA sense strand
auagcaagaauuugggaaa

SEQ ID NO: 2503378 - RNA, 19 nt, Homo sapiens
  misc_RNA (1)...(19): siRNA sense strand
cuguaacgcagaagcgaaa

SEQ ID NO: 2503379 - RNA, 19 nt, Homo sapiens
  misc_RNA (1)...(19): siRNA sense strand
ugaaacauucuuugagcaa

SEQ ID NO: 2503380 - RNA, 19 nt, Homo sapiens
  misc_RNA (1)...(19): siRNA sense strand
ucaaagggaaccuggaaau

SEQ ID NO: 2503381 - RNA, 19 nt, Homo sapiens
  misc_RNA (1)...(19): siRNA sense strand
gggacagaagaauaaguaa

SEQ ID NO: 2503382 - RNA, 19 nt, Homo sapiens
  misc_RNA (1)...(19): siRNA sense strand
ggacagaagaauaaguaac

SEQ ID NO: 2503383 - RNA, 19 nt, Homo sapiens
  misc_RNA (1)...(19): siRNA sense strand
cagcagagccugaggagcu

SEQ ID NO: 2503384 - RNA, 19 nt, Homo sapiens
  misc_RNA (1)...(19): siRNA sense strand
ccaaagaagauaagaggac

SEQ ID NO: 2503385 - RNA, 19 nt, Homo sapiens
  misc_RNA (1)...(19): siRNA sense strand
aagaagagagaaagcaaaa

SEQ ID NO: 2503386 - RNA, 19 nt, Homo sapiens
  misc_RNA (1)...(19): siRNA sense strand
gcagaaagaguaaggugga

SEQ ID NO: 2503387 - RNA, 19 nt, Homo sapiens
  misc_RNA (1)...(19): siRNA sense strand
agaauuugguugagcucuu

SEQ ID NO: 2503388 - RNA, 19 nt, Homo sapiens
  misc_RNA (1)...(19): siRNA sense strand
ccgacgaaguccagccaca

SEQ ID NO: 2503389 - RNA, 19 nt, Homo sapiens
  misc_RNA (1)...(19): siRNA sense strand
aagggaaggcuuaggcaau

SEQ ID NO: 2503390 - RNA, 19 nt, Homo sapiens
  misc_RNA (1)...(19): siRNA sense strand
acugagaaccaaagaagau

SEQ ID NO: 2503391 - RNA, 19 nt, Homo sapiens
  misc_RNA (1)...(19): siRNA sense strand
agacuaaguucuuucccaa

SEQ ID NO: 2503392 - RNA, 19 nt, Homo sapiens
  misc_RNA (1)...(19): siRNA sense strand
uucccaaguuagagaagaa

SEQ ID NO: 2503393 - RNA, 19 nt, Homo sapiens
  misc_RNA (1)...(19): siRNA sense strand
gagauuagggucaggucau

SEQ ID NO: 2503394 - RNA, 19 nt, Homo sapiens
  misc_RNA (1)...(19): siRNA sense strand
cugacagagcccagccaaa

SEQ ID NO: 2503395 - RNA, 19 nt, Homo sapiens
  misc_RNA (1)...(19): siRNA sense strand
gcaucuacuucaagccaga

SEQ ID NO: 2503396 - RNA, 19 nt, Homo sapiens
  misc_RNA (1)...(19): siRNA sense strand
cugaaucacuggcgauaca

SEQ ID NO: 2503397 - RNA, 19 nt, Homo sapiens
  misc_RNA (1)...(19): siRNA sense strand
aagccagugguaagggaaa

SEQ ID NO: 2503398 - RNA, 19 nt, Homo sapiens
  misc_RNA (1)...(19): siRNA sense strand
aagcaguacaaguagguuu

SEQ ID NO: 2503399 - RNA, 19 nt, Homo sapiens
  misc_RNA (1)...(19): siRNA sense strand
guggcugucuggugaggaa

SEQ ID NO: 2503400 - RNA, 19 nt, Homo sapiens
  misc_RNA (1)...(19): siRNA sense strand
uggaaugcccggagagaac

SEQ ID NO: 2503401 - RNA, 19 nt, Homo sapiens
  misc_RNA (1)...(19): siRNA sense strand
ggucauggguauguggaga

SEQ ID NO: 2503402 - RNA, 19 nt, Homo sapiens
  misc_RNA (1)...(19): siRNA sense strand
aagcauggucugaaacauu

SEQ ID NO: 2503403 - RNA, 19 nt, Homo sapiens
  misc_RNA (1)...(19): siRNA sense strand
gggauuuggauguaggcuu

SEQ ID NO: 2503404 - RNA, 19 nt, Homo sapiens
  misc_RNA (1)...(19): siRNA sense strand
agggauuugaagagguauu

SEQ ID NO: 2503405 - RNA, 19 nt, Homo sapiens
  misc_RNA (1)...(19): siRNA sense strand
ccugagauaagcaguacaa

SEQ ID NO: 2503406 - RNA, 19 nt, Homo sapiens
  misc_RNA (1)...(19): siRNA sense strand
agggucaggucauggguau

SEQ ID NO: 2503407 - RNA, 19 nt, Homo sapiens
  misc_RNA (1)...(19): siRNA sense strand
ugagaaccaaagaagauaa

SEQ ID NO: 2503408 - RNA, 19 nt, Homo sapiens
  misc_RNA (1)...(19): siRNA sense strand
caaagaagauaagaggaca

SEQ ID NO: 2503409 - RNA, 19 nt, Homo sapiens
  misc_RNA (1)...(19): siRNA sense strand
agaacgggagccagagcaa

SEQ ID NO: 2503410 - RNA, 19 nt, Homo sapiens
  misc_RNA (1)...(19): siRNA sense strand
ggaucaacccagacaaugu

SEQ ID NO: 2503411 - RNA, 19 nt, Homo sapiens
  misc_RNA (1)...(19): siRNA sense strand
gcuguaacgcagaagcgaa

SEQ ID NO: 2503412 - RNA, 19 nt, Homo sapiens
  misc_RNA (1)...(19): siRNA sense strand
agcaagaauuugggaaaca

SEQ ID NO: 2503413 - RNA, 19 nt, Homo sapiens
  misc_RNA (1)...(19): siRNA sense strand
ggacaugggguuuggcuuu

SEQ ID NO: 2503414 - RNA, 19 nt, Homo sapiens
  misc_RNA (1)...(19): siRNA sense strand
gguauguggagaaugguuu

SEQ ID NO: 2503415 - RNA, 19 nt, Homo sapiens
  misc_RNA (1)...(19): siRNA sense strand
caagggaaggcuuaggcaa

SEQ ID NO: 2503416 - RNA, 19 nt, Homo sapiens
  misc_RNA (1)...(19): siRNA sense strand
agccaaguuuguauagcaa

SEQ ID NO: 2503417 - RNA, 19 nt, Homo sapiens
  misc_RNA (1)...(19): siRNA sense strand
cugauaagccagugguaag

SEQ ID NO: 2503418 - RNA, 19 nt, Homo sapiens
  misc_RNA (1)...(19): siRNA sense strand
guggagagccgugggaaga

SEQ ID NO: 2503419 - RNA, 19 nt, Homo sapiens
  misc_RNA (1)...(19): siRNA sense strand
gugauugagucucgggcca

SEQ ID NO: 2503420 - RNA, 19 nt, Homo sapiens
  misc_RNA (1)...(19): siRNA sense strand
agaguaagguggacugacu

SEQ ID NO: 2503421 - RNA, 19 nt, Homo sapiens
  misc_RNA (1)...(19): siRNA sense strand
gaacuagcaggguggacau

SEQ ID NO: 2503422 - RNA, 19 nt, Homo sapiens
  misc_RNA (1)...(19): siRNA sense strand
ggaggacugucgaggagga

SEQ ID NO: 2503423 - RNA, 19 nt, Homo sapiens
  misc_RNA (1)...(19): siRNA sense strand
gaacugaaucacuggcgau

SEQ ID NO: 2503424 - RNA, 19 nt, Homo sapiens
  misc_RNA (1)...(19): siRNA sense strand
cagaagaauaaguaacacu

SEQ ID NO: 2503425 - RNA, 19 nt, Homo sapiens
  misc_RNA (1)...(19): siRNA sense strand
cagacauacuuuuguagaa

SEQ ID NO: 2503426 - RNA, 19 nt, Homo sapiens
  misc_RNA (1)...(19): siRNA sense strand
cagguuggguuuugagauu

SEQ ID NO: 2503427 - RNA, 19 nt, Homo sapiens
  misc_RNA (1)...(19): siRNA sense strand
ucuuggcccuaaugagaaa

SEQ ID NO: 2503428 - RNA, 19 nt, Homo sapiens
  misc_RNA (1)...(19): siRNA sense strand
aaacacagcucuaaccuca

SEQ ID NO: 2503429 - RNA, 19 nt, Homo sapiens
  misc_RNA (1)...(19): siRNA sense strand
agauaagaggacagauacu

SEQ ID NO: 2503430 - RNA, 19 nt, Homo sapiens
  misc_RNA (1)...(19): siRNA sense strand
cgaggaggagugaugagaa

SEQ ID NO: 2503431 - RNA, 19 nt, Homo sapiens
  misc_RNA (1)...(19): siRNA sense strand
cuggcaugguguuggacau

SEQ ID NO: 2503432 - RNA, 19 nt, Homo sapiens
  misc_RNA (1)...(19): siRNA sense strand
ccaaggagcucuggcggau

SEQ ID NO: 2503433 - RNA, 19 nt, Homo sapiens
  misc_RNA (1)...(19): siRNA sense strand
agaaggugacagaggucuu

SEQ ID NO: 2503434 - RNA, 19 nt, Homo sapiens
  misc_RNA (1)...(19): siRNA sense strand
ugagauaagcaguacaagu

SEQ ID NO: 2503435 - RNA, 19 nt, Homo sapiens
  misc_RNA (1)...(19): siRNA sense strand
gggaggaaguuucuggaag

SEQ ID NO: 2503436 - RNA, 19 nt, Homo sapiens
  misc_RNA (1)...(19): siRNA sense strand
acucccaaacacagacaua

SEQ ID NO: 2503437 - RNA, 19 nt, Homo sapiens
  misc_RNA (1)...(19): siRNA sense strand
ccugaggagcugugggaag

SEQ ID NO: 2503438 - RNA, 19 nt, Homo sapiens
  misc_RNA (1)...(19): siRNA sense strand
gugaacagccugaugcaga

SEQ ID NO: 2503439 - RNA, 19 nt, Homo sapiens
  misc_RNA (1)...(19): siRNA sense strand
ccacacagcagcagcagca

SEQ ID NO: 2503440 - RNA, 19 nt, Homo sapiens
  misc_RNA (1)...(19): siRNA sense strand
cggaguacaccguagccaa

SEQ ID NO: 2503441 - RNA, 19 nt, Homo sapiens
  misc_RNA (1)...(19): siRNA sense strand
aggaaaugacagagcucga

SEQ ID NO: 2503442 - RNA, 19 nt, Homo sapiens
  misc_RNA (1)...(19): siRNA sense strand
aauguaaaaggcaggaaaa

SEQ ID NO: 2503443 - RNA, 19 nt, Homo sapiens
  misc_RNA (1)...(19): siRNA sense strand
aggggcagcuagaggaaau

SEQ ID NO: 2503444 - RNA, 19 nt, Homo sapiens
  misc_RNA (1)...(19): siRNA sense strand
agcuagaggaaaugacaga

SEQ ID NO: 2503445 - RNA, 19 nt, Homo sapiens
  misc_RNA (1)...(19): siRNA sense strand
gcuuggauuagaagaacaa

SEQ ID NO: 2503446 - RNA, 19 nt, Homo sapiens
  misc_RNA (1)...(19): siRNA sense strand
ugucaagggaagugaagga

SEQ ID NO: 2503447 - RNA, 19 nt, Homo sapiens
  misc_RNA (1)...(19): siRNA sense strand
caagggaagugaaggagca

SEQ ID NO: 2503448 - RNA, 19 nt, Homo sapiens
  misc_RNA (1)...(19): siRNA sense strand
gcacggaccaauucgggaa

SEQ ID NO: 2503449 - RNA, 19 nt, Homo sapiens
  misc_RNA (1)...(19): siRNA sense strand
cggaccaauucgggaacaa

SEQ ID NO: 2503450 - RNA, 19 nt, Homo sapiens
  misc_RNA (1)...(19): siRNA sense strand
gaauuguagaagcagcaaa

SEQ ID NO: 2503451 - RNA, 19 nt, Homo sapiens
  misc_RNA (1)...(19): siRNA sense strand
aauuguagaagcagcaaau

SEQ ID NO: 2503452 - RNA, 19 nt, Homo sapiens
  misc_RNA (1)...(19): siRNA sense strand
cuauggaggaaauacuaaa

SEQ ID NO: 2503453 - RNA, 19 nt, Homo sapiens
  misc_RNA (1)...(19): siRNA sense strand
gggaagugaaggagcacgu

SEQ ID NO: 2503454 - RNA, 19 nt, Homo sapiens
  misc_RNA (1)...(19): siRNA sense strand
ccaccuacuauggaggaaa

SEQ ID NO: 2503455 - RNA, 19 nt, Homo sapiens
  misc_RNA (1)...(19): siRNA sense strand
uacaagaacuggagaggac

SEQ ID NO: 2503456 - RNA, 19 nt, Homo sapiens
  misc_RNA (1)...(19): siRNA sense strand
cagccaaggucacaggcaa

SEQ ID NO: 2503457 - RNA, 19 nt, Homo sapiens
  misc_RNA (1)...(19): siRNA sense strand
gcaugauggugguggguac

SEQ ID NO: 2503458 - RNA, 19 nt, Homo sapiens
  misc_RNA (1)...(19): siRNA sense strand
cuucaauaaucuggagaau

SEQ ID NO: 2503459 - RNA, 19 nt, Homo sapiens
  misc_RNA (1)...(19): siRNA sense strand
aagcaaagaucuucccuga

SEQ ID NO: 2503460 - RNA, 19 nt, Homo sapiens
  misc_RNA (1)...(19): siRNA sense strand
ccuucaauaaucuggagaa

SEQ ID NO: 2503461 - RNA, 19 nt, Homo sapiens
  misc_RNA (1)...(19): siRNA sense strand
gaagauaauagcugggaga

SEQ ID NO: 2503462 - RNA, 19 nt, Homo sapiens
  misc_RNA (1)...(19): siRNA sense strand
gcuuagaaggugcgugcaa

SEQ ID NO: 2503463 - RNA, 19 nt, Homo sapiens
  misc_RNA (1)...(19): siRNA sense strand
agggaaaagcguaggagaa

SEQ ID NO: 2503464 - RNA, 19 nt, Homo sapiens
  misc_RNA (1)...(19): siRNA sense strand
cuacauaauucucugguga

SEQ ID NO: 2503465 - RNA, 19 nt, Homo sapiens
  misc_RNA (1)...(19): siRNA sense strand
agauaauagcugggagaau

SEQ ID NO: 2503466 - RNA, 19 nt, Homo sapiens
  misc_RNA (1)...(19): siRNA sense strand
guguuggaaugaauggaaa

SEQ ID NO: 2503467 - RNA, 19 nt, Homo sapiens
  misc_RNA (1)...(19): siRNA sense strand
gagaagaccuccugcagca

SEQ ID NO: 2503468 - RNA, 19 nt, Homo sapiens
  misc_RNA (1)...(19): siRNA sense strand
aguugauucacuugggaaa

SEQ ID NO: 2503469 - RNA, 19 nt, Homo sapiens
  misc_RNA (1)...(19): siRNA sense strand
gguuaaugcaccaaagcuu

SEQ ID NO: 2503470 - RNA, 19 nt, Homo sapiens
  misc_RNA (1)...(19): siRNA sense strand
auaauagcugggagaauaa

SEQ ID NO: 2503471 - RNA, 19 nt, Homo sapiens
  misc_RNA (1)...(19): siRNA sense strand
uaaugcagcagcagggaaa

SEQ ID NO: 2503472 - RNA, 19 nt, Homo sapiens
  misc_RNA (1)...(19): siRNA sense strand
acauaauucucuggugaaa

SEQ ID NO: 2503473 - RNA, 19 nt, Homo sapiens
  misc_RNA (1)...(19): siRNA sense strand
ugguauaccgagaaggaga

SEQ ID NO: 2503474 - RNA, 19 nt, Homo sapiens
  misc_RNA (1)...(19): siRNA sense strand
acucacuaaugcugacaaa

SEQ ID NO: 2503475 - RNA, 19 nt, Homo sapiens
  misc_RNA (1)...(19): siRNA sense strand
ggaaaagaucugauguuau

SEQ ID NO: 2503476 - RNA, 19 nt, Homo sapiens
  misc_RNA (1)...(19): siRNA sense strand
cagauacagaugaggauga

SEQ ID NO: 2503477 - RNA, 19 nt, Homo sapiens
  misc_RNA (1)...(19): siRNA sense strand
agaagaauguguaaccgaa

SEQ ID NO: 2503478 - RNA, 19 nt, Homo sapiens
  misc_RNA (1)...(19): siRNA sense strand
cagacaaagaagaaaacaa

SEQ ID NO: 2503479 - RNA, 19 nt, Homo sapiens
  misc_RNA (1)...(19): siRNA sense strand
auaccgagaaggagaucaa

SEQ ID NO: 2503480 - RNA, 19 nt, Homo sapiens
  misc_RNA (1)...(19): siRNA sense strand
ugaacagagcagcggcuua

SEQ ID NO: 2503481 - RNA, 19 nt, Homo sapiens
  misc_RNA (1)...(19): siRNA sense strand
gggaaaagcguaggagaau

SEQ ID NO: 2503482 - RNA, 19 nt, Homo sapiens
  misc_RNA (1)...(19): siRNA sense strand
uggugaauuucuuaaggaa

SEQ ID NO: 2503483 - RNA, 19 nt, Homo sapiens
  misc_RNA (1)...(19): siRNA sense strand
gcucgggauaucacagaaa

SEQ ID NO: 2503484 - RNA, 19 nt, Homo sapiens
  misc_RNA (1)...(19): siRNA sense strand
agaaauagauuacagagca

SEQ ID NO: 2503485 - RNA, 19 nt, Homo sapiens
  misc_RNA (1)...(19): siRNA sense strand
ccaugguguuggaaugaau

SEQ ID NO: 2503486 - RNA, 19 nt, Homo sapiens
  misc_RNA (1)...(19): siRNA sense strand
aagaaagcugucaagauaa

SEQ ID NO: 2503487 - RNA, 19 nt, Homo sapiens
  misc_RNA (1)...(19): siRNA sense strand
auacagaugaggaugaaga

SEQ ID NO: 2503488 - RNA, 19 nt, Homo sapiens
  misc_RNA (1)...(19): siRNA sense strand
aaggaaaugcugaugaaca

SEQ ID NO: 2503489 - RNA, 19 nt, Homo sapiens
  misc_RNA (1)...(19): siRNA sense strand
agaugaggaugaagaaacu

SEQ ID NO: 2503490 - RNA, 19 nt, Homo sapiens
  misc_RNA (1)...(19): siRNA sense strand
uggaaauaaugcagcagca

SEQ ID NO: 2503491 - RNA, 19 nt, Homo sapiens
  misc_RNA (1)...(19): siRNA sense strand
gaaauagauuacagagcac

SEQ ID NO: 2503492 - RNA, 19 nt, Homo sapiens
  misc_RNA (1)...(19): siRNA sense strand
gggaaaugaccaggagcuu

SEQ ID NO: 2503493 - RNA, 19 nt, Homo sapiens
  misc_RNA (1)...(19): siRNA sense strand
aggaaaugcugaugaacag

SEQ ID NO: 2503494 - RNA, 19 nt, Homo sapiens
  misc_RNA (1)...(19): siRNA sense strand
gccuguugguuguguaaau

SEQ ID NO: 2503495 - RNA, 19 nt, Homo sapiens
  misc_RNA (1)...(19): siRNA sense strand
caacauuucagaagggugu

SEQ ID NO: 2503496 - RNA, 19 nt, Homo sapiens
  misc_RNA (1)...(19): siRNA sense strand
ggaauuucaaguuuggcaa

SEQ ID NO: 2503497 - RNA, 19 nt, Homo sapiens
  misc_RNA (1)...(19): siRNA sense strand
gaauggaaauaaugcagca

SEQ ID NO: 2503498 - RNA, 19 nt, Homo sapiens
  misc_RNA (1)...(19): siRNA sense strand
ucgaagauuggaagguauu

SEQ ID NO: 2503499 - RNA, 19 nt, Homo sapiens
  misc_RNA (1)...(19): siRNA sense strand
ggcaacagauaauugaaaa

SEQ ID NO: 2503500 - RNA, 19 nt, Homo sapiens
  misc_RNA (1)...(19): siRNA sense strand
ucuucuuucucuaggacua

SEQ ID NO: 2503501 - RNA, 19 nt, Homo sapiens
  misc_RNA (1)...(19): siRNA sense strand
ggaugaagaaacugagccu

SEQ ID NO: 2503502 - RNA, 19 nt, Homo sapiens
  misc_RNA (1)...(19): siRNA sense strand
ucguaugaguggugguucu

SEQ ID NO: 2503503 - RNA, 19 nt, Homo sapiens
  misc_RNA (1)...(19): siRNA sense strand
cagaugaggaugaagaaac

SEQ ID NO: 2503504 - RNA, 19 nt, Homo sapiens
  misc_RNA (1)...(19): siRNA sense strand
aguggugguucuauguaua

SEQ ID NO: 2503505 - RNA, 19 nt, Homo sapiens
  misc_RNA (1)...(19): siRNA sense strand
aggaagaaaacuuuaggaa

SEQ ID NO: 2503506 - RNA, 19 nt, Homo sapiens
  misc_RNA (1)...(19): siRNA sense strand
gcuugaaugauuacaacau

SEQ ID NO: 2503507 - RNA, 19 nt, Homo sapiens
  misc_RNA (1)...(19): siRNA sense strand
uggcagaguacuuggauuc

SEQ ID NO: 2503508 - RNA, 19 nt, Homo sapiens
  misc_RNA (1)...(19): siRNA sense strand
cuucaguagcaacgucaaa

SEQ ID NO: 2503509 - RNA, 19 nt, Homo sapiens
  misc_RNA (1)...(19): siRNA sense strand
aaaguugaggcucgggaua

SEQ ID NO: 2503510 - RNA, 19 nt, Homo sapiens
  misc_RNA (1)...(19): siRNA sense strand
cgaguugaggucugggaga

SEQ ID NO: 2503511 - RNA, 19 nt, Homo sapiens
  misc_RNA (1)...(19): siRNA sense strand
ugaaacauuaacuggaaca

SEQ ID NO: 2503512 - RNA, 19 nt, Homo sapiens
  misc_RNA (1)...(19): siRNA sense strand
ugcugaaggcuaagaugaa

SEQ ID NO: 2503513 - RNA, 19 nt, Homo sapiens
  misc_RNA (1)...(19): siRNA sense strand
cuuagaaggugcgugcaaa

SEQ ID NO: 2503514 - RNA, 19 nt, Homo sapiens
  misc_RNA (1)...(19): siRNA sense strand
acaaggaaguacaagccaa

SEQ ID NO: 2503515 - RNA, 19 nt, Homo sapiens
  misc_RNA (1)...(19): siRNA sense strand
agaaauugcuaaagcccuu

SEQ ID NO: 2503516 - RNA, 19 nt, Homo sapiens
  misc_RNA (1)...(19): siRNA sense strand
ucggagagaaauugcuaaa

SEQ ID NO: 2503517 - RNA, 19 nt, Homo sapiens
  misc_RNA (1)...(19): siRNA sense strand
ucauggaaggugugccaaa

SEQ ID NO: 2503518 - RNA, 19 nt, Homo sapiens
  misc_RNA (1)...(19): siRNA sense strand
ucagaguaucagugugcua

SEQ ID NO: 2503519 - RNA, 19 nt, Homo sapiens
  misc_RNA (1)...(19): siRNA sense strand
ucacuaucuuaaaggacuu

SEQ ID NO: 2503520 - RNA, 19 nt, Homo sapiens
  misc_RNA (1)...(19): siRNA sense strand
gagagagaccagaggagcu

SEQ ID NO: 2503521 - RNA, 19 nt, Homo sapiens
  misc_RNA (1)...(19): siRNA sense strand
acgccuaugccaaguggaa

SEQ ID NO: 2503522 - RNA, 19 nt, Homo sapiens
  misc_RNA (1)...(19): siRNA sense strand
cagccaagugguucggaga

SEQ ID NO: 2503523 - RNA, 19 nt, Homo sapiens
  misc_RNA (1)...(19): siRNA sense strand
ucaaagagccugaaggacu

SEQ ID NO: 2503524 - RNA, 19 nt, Homo sapiens
  misc_RNA (1)...(19): siRNA sense strand
gagaaguaucccaaggcua

SEQ ID NO: 2503525 - RNA, 19 nt, Homo sapiens
  misc_RNA (1)...(19): siRNA sense strand
cguccagggcagcgguaaa

SEQ ID NO: 2503526 - RNA, 19 nt, Homo sapiens
  misc_RNA (1)...(19): siRNA sense strand
cuugaaugccacacggaaa

SEQ ID NO: 2503527 - RNA, 19 nt, Homo sapiens
  misc_RNA (1)...(19): siRNA sense strand
ucacaguccuggaggcuga

SEQ ID NO: 2503528 - RNA, 19 nt, Homo sapiens
  misc_RNA (1)...(19): siRNA sense strand
aagccaugguggagaagau

SEQ ID NO: 2503529 - RNA, 19 nt, Homo sapiens
  misc_RNA (1)...(19): siRNA sense strand
ccgucacaguggagcacaa

SEQ ID NO: 2503530 - RNA, 19 nt, Homo sapiens
  misc_RNA (1)...(19): siRNA sense strand
gggcaguggcuacagggaa

SEQ ID NO: 2503531 - RNA, 19 nt, Homo sapiens
  misc_RNA (1)...(19): siRNA sense strand
ccauauggaucaacgcuga

SEQ ID NO: 2503532 - RNA, 19 nt, Homo sapiens
  misc_RNA (1)...(19): siRNA sense strand
cggcauuaccugugugucu

SEQ ID NO: 2503533 - RNA, 19 nt, Homo sapiens
  misc_RNA (1)...(19): siRNA sense strand
ucugagagguacagccuga

SEQ ID NO: 2503534 - RNA, 19 nt, Homo sapiens
  misc_RNA (1)...(19): siRNA sense strand
cgguggaagaucugcucua

SEQ ID NO: 2503535 - RNA, 19 nt, Homo sapiens
  misc_RNA (1)...(19): siRNA sense strand
ucaagaacaucaaggcagu

SEQ ID NO: 2503536 - RNA, 19 nt, Homo sapiens
  misc_RNA (1)...(19): siRNA sense strand
augccgacaugcuggacua

SEQ ID NO: 2503537 - RNA, 19 nt, Homo sapiens
  misc_RNA (1)...(19): siRNA sense strand
ugagccaaucugagaggua

SEQ ID NO: 2503538 - RNA, 19 nt, Homo sapiens
  misc_RNA (1)...(19): siRNA sense strand
acacuggccucgagggaac

SEQ ID NO: 2503539 - RNA, 19 nt, Homo sapiens
  misc_RNA (1)...(19): siRNA sense strand
guucauacuccaaguggca

SEQ ID NO: 2503540 - RNA, 19 nt, Homo sapiens
  misc_RNA (1)...(19): siRNA sense strand
gcucauguugguagaaacu

SEQ ID NO: 2503541 - RNA, 19 nt, Homo sapiens
  misc_RNA (1)...(19): siRNA sense strand
cgucaauguagaagggcuc

SEQ ID NO: 2503542 - RNA, 19 nt, Homo sapiens
  misc_RNA (1)...(19): siRNA sense strand
ggcaguggcuacagggaac

SEQ ID NO: 2503543 - RNA, 19 nt, Homo sapiens
  misc_RNA (1)...(19): siRNA sense strand
aggauaaaggugugggcaa

SEQ ID NO: 2503544 - RNA, 19 nt, Homo sapiens
  misc_RNA (1)...(19): siRNA sense strand
aggaaucagcucugggcaa

SEQ ID NO: 2503545 - RNA, 19 nt, Homo sapiens
  misc_RNA (1)...(19): siRNA sense strand
ggauaaaggugugggcaag

SEQ ID NO: 2503546 - RNA, 19 nt, Homo sapiens
  misc_RNA (1)...(19): siRNA sense strand
gggcaagggugaugaccac

SEQ ID NO: 2503547 - RNA, 19 nt, Homo sapiens
  misc_RNA (1)...(19): siRNA sense strand
gcgccuaucaugugcccaa

SEQ ID NO: 2503548 - RNA, 19 nt, Homo sapiens
  misc_RNA (1)...(19): siRNA sense strand
agaauaaucuggaagcugu

SEQ ID NO: 2503549 - RNA, 19 nt, Homo sapiens
  misc_RNA (1)...(19): siRNA sense strand
gcaucgaagcggacgacga

SEQ ID NO: 2503550 - RNA, 19 nt, Homo sapiens
  misc_RNA (1)...(19): siRNA sense strand
ccgggauauuuggaggaua

SEQ ID NO: 2503551 - RNA, 19 nt, Homo sapiens
  misc_RNA (1)...(19): siRNA sense strand
ugcacugagcagagaggaa

SEQ ID NO: 2503552 - RNA, 19 nt, Homo sapiens
  misc_RNA (1)...(19): siRNA sense strand
gggagaucacucaacacaa

SEQ ID NO: 2503553 - RNA, 19 nt, Homo sapiens
  misc_RNA (1)...(19): siRNA sense strand
ggauucaacacccggguca

SEQ ID NO: 2503554 - RNA, 19 nt, Homo sapiens
  misc_RNA (1)...(19): siRNA sense strand
gaagauaacccaagagccu

SEQ ID NO: 2503555 - RNA, 19 nt, Homo sapiens
  misc_RNA (1)...(19): siRNA sense strand
cccaagagccucagggucu

SEQ ID NO: 2503556 - RNA, 19 nt, Homo sapiens
  misc_RNA (1)...(19): siRNA sense strand
acgcagcugcuuuggacua

SEQ ID NO: 2503557 - RNA, 19 nt, Homo sapiens
  misc_RNA (1)...(19): siRNA sense strand
acuaugaggaagaagaaau

SEQ ID NO: 2503558 - RNA, 19 nt, Homo sapiens
  misc_RNA (1)...(19): siRNA sense strand
ugaaggaccugcugcggaa

SEQ ID NO: 2503559 - RNA, 19 nt, Homo sapiens
  misc_RNA (1)...(19): siRNA sense strand
cugagauuauccugagcaa

SEQ ID NO: 2503560 - RNA, 19 nt, Homo sapiens
  misc_RNA (1)...(19): siRNA sense strand
ucauugaccagcagggcua

SEQ ID NO: 2503561 - RNA, 19 nt, Homo sapiens
  misc_RNA (1)...(19): siRNA sense strand
ccuucauaccaaaguuuaa

SEQ ID NO: 2503562 - RNA, 19 nt, Homo sapiens
  misc_RNA (1)...(19): siRNA sense strand
gggucaacgauaucaagaa

SEQ ID NO: 2503563 - RNA, 19 nt, Homo sapiens
  misc_RNA (1)...(19): siRNA sense strand
guuuaaaggcccuggggau

SEQ ID NO: 2503564 - RNA, 19 nt, Homo sapiens
  misc_RNA (1)...(19): siRNA sense strand
augaaauggccgcuggcua

SEQ ID NO: 2503565 - RNA, 19 nt, Homo sapiens
  misc_RNA (1)...(19): siRNA sense strand
cgagcaggagagcgugaaa

SEQ ID NO: 2503566 - RNA, 19 nt, Homo sapiens
  misc_RNA (1)...(19): siRNA sense strand
ugagcaaaggcuacaacaa

SEQ ID NO: 2503567 - RNA, 19 nt, Homo sapiens
  misc_RNA (1)...(19): siRNA sense strand
gcuacauucaggugacaga

SEQ ID NO: 2503568 - RNA, 19 nt, Homo sapiens
  misc_RNA (1)...(19): siRNA sense strand
acgacuaugaggaagaaga

SEQ ID NO: 2503569 - RNA, 19 nt, Homo sapiens
  misc_RNA (1)...(19): siRNA sense strand
agaagaucgucucugggaa

SEQ ID NO: 2503570 - RNA, 19 nt, Homo sapiens
  misc_RNA (1)...(19): siRNA sense strand
gguaauaggaagaggaagu

SEQ ID NO: 2503571 - RNA, 19 nt, Homo sapiens
  misc_RNA (1)...(19): siRNA sense strand
cgaaauguugauugggaua

SEQ ID NO: 2503572 - RNA, 19 nt, Homo sapiens
  misc_RNA (1)...(19): siRNA sense strand
gggauaugauggagcaaaa

SEQ ID NO: 2503573 - RNA, 19 nt, Homo sapiens
  misc_RNA (1)...(19): siRNA sense strand
ggauagaugaggaaggaga

SEQ ID NO: 2503574 - RNA, 19 nt, Homo sapiens
  misc_RNA (1)...(19): siRNA sense strand
cuuuagacuuuaugagcua

SEQ ID NO: 2503575 - RNA, 19 nt, Homo sapiens
  misc_RNA (1)...(19): siRNA sense strand
uguaaauggaggagaccua

SEQ ID NO: 2503576 - RNA, 19 nt, Homo sapiens
  misc_RNA (1)...(19): siRNA sense strand
gggaauuugguuuggacaa

SEQ ID NO: 2503577 - RNA, 19 nt, Homo sapiens
  misc_RNA (1)...(19): siRNA sense strand
cuucaagucaugagaguuu

SEQ ID NO: 2503578 - RNA, 19 nt, Homo sapiens
  misc_RNA (1)...(19): siRNA sense strand
cugaagaacaugccagauu

SEQ ID NO: 2503579 - RNA, 19 nt, Homo sapiens
  misc_RNA (1)...(19): siRNA sense strand
uguuaaugaugaugaggau

SEQ ID NO: 2503580 - RNA, 19 nt, Homo sapiens
  misc_RNA (1)...(19): siRNA sense strand
ggguacagacagagaagca

SEQ ID NO: 2503581 - RNA, 19 nt, Homo sapiens
  misc_RNA (1)...(19): siRNA sense strand
accagaacacagaggauua

SEQ ID NO: 2503582 - RNA, 19 nt, Homo sapiens
  misc_RNA (1)...(19): siRNA sense strand
gcaaacucuugguucauaa

SEQ ID NO: 2503583 - RNA, 19 nt, Homo sapiens
  misc_RNA (1)...(19): siRNA sense strand
uuucauaugcagcgacaaa

SEQ ID NO: 2503584 - RNA, 19 nt, Homo sapiens
  misc_RNA (1)...(19): siRNA sense strand
gagauuugaaacuggacaa

SEQ ID NO: 2503585 - RNA, 19 nt, Homo sapiens
  misc_RNA (1)...(19): siRNA sense strand
ucuucaugagcgagggaua

SEQ ID NO: 2503586 - RNA, 19 nt, Homo sapiens
  misc_RNA (1)...(19): siRNA sense strand
ccgaaauguugauugggau

SEQ ID NO: 2503587 - RNA, 19 nt, Homo sapiens
  misc_RNA (1)...(19): siRNA sense strand
ugaaauggauagaugagga

SEQ ID NO: 2503588 - RNA, 19 nt, Homo sapiens
  misc_RNA (1)...(19): siRNA sense strand
caccagggaaaguggcaaa

SEQ ID NO: 2503589 - RNA, 19 nt, Homo sapiens
  misc_RNA (1)...(19): siRNA sense strand
cggguaauaggaagaggaa

SEQ ID NO: 2503590 - RNA, 19 nt, Homo sapiens
  misc_RNA (1)...(19): siRNA sense strand
ugcaaugaaaguugugaaa

SEQ ID NO: 2503591 - RNA, 19 nt, Homo sapiens
  misc_RNA (1)...(19): siRNA sense strand
ccaaauauuucuggggaau

SEQ ID NO: 2503592 - RNA, 19 nt, Homo sapiens
  misc_RNA (1)...(19): siRNA sense strand
cuucaugagcgagggauaa

SEQ ID NO: 2503593 - RNA, 19 nt, Homo sapiens
  misc_RNA (1)...(19): siRNA sense strand
guauguaaauggaggagac

SEQ ID NO: 2503594 - RNA, 19 nt, Homo sapiens
  misc_RNA (1)...(19): siRNA sense strand
cagucuaggucuucaggau

SEQ ID NO: 2503595 - RNA, 19 nt, Homo sapiens
  misc_RNA (1)...(19): siRNA sense strand
acugcaaacucuugguuca

SEQ ID NO: 2503596 - RNA, 19 nt, Homo sapiens
  misc_RNA (1)...(19): siRNA sense strand
cugacuacggcauguguaa

SEQ ID NO: 2503597 - RNA, 19 nt, Homo sapiens
  misc_RNA (1)...(19): siRNA sense strand
gcuccggguaauaggaaga

SEQ ID NO: 2503598 - RNA, 19 nt, Homo sapiens
  misc_RNA (1)...(19): siRNA sense strand
gcauguguaaggaaggauu

SEQ ID NO: 2503599 - RNA, 19 nt, Homo sapiens
  misc_RNA (1)...(19): siRNA sense strand
aauaggaagaggaaguuau

SEQ ID NO: 2503600 - RNA, 19 nt, Homo sapiens
  misc_RNA (1)...(19): siRNA sense strand
ucauaagaagugccauaaa

SEQ ID NO: 2503601 - RNA, 19 nt, Homo sapiens
  misc_RNA (1)...(19): siRNA sense strand
gaugacauugugaggaaga

SEQ ID NO: 2503602 - RNA, 19 nt, Homo sapiens
  misc_RNA (1)...(19): siRNA sense strand
uagaagaagccuuuagacu

SEQ ID NO: 2503603 - RNA, 19 nt, Homo sapiens
  misc_RNA (1)...(19): siRNA sense strand
ggagaaagcuuuauugugc

SEQ ID NO: 2503604 - RNA, 19 nt, Homo sapiens
  misc_RNA (1)...(19): siRNA sense strand
uggcaaagcuucauccagu

SEQ ID NO: 2503605 - RNA, 19 nt, Homo sapiens
  misc_RNA (1)...(19): siRNA sense strand
cauguguaaggaaggauua

SEQ ID NO: 2503606 - RNA, 19 nt, Homo sapiens
  misc_RNA (1)...(19): siRNA sense strand
agggaaaguggcaaagcuu

SEQ ID NO: 2503607 - RNA, 19 nt, Homo sapiens
  misc_RNA (1)...(19): siRNA sense strand
uugauuggguacagacaga

SEQ ID NO: 2503608 - RNA, 19 nt, Homo sapiens
  misc_RNA (1)...(19): siRNA sense strand
auuugaaacuggacaaugu

SEQ ID NO: 2503609 - RNA, 19 nt, Homo sapiens
  misc_RNA (1)...(19): siRNA sense strand
acucugaaggccacauuaa

SEQ ID NO: 2503610 - RNA, 19 nt, Homo sapiens
  misc_RNA (1)...(19): siRNA sense strand
guuaaugaugaugaggaua

SEQ ID NO: 2503611 - RNA, 19 nt, Homo sapiens
  misc_RNA (1)...(19): siRNA sense strand
acgaacagcucuucaccau

SEQ ID NO: 2503612 - RNA, 19 nt, Homo sapiens
  misc_RNA (1)...(19): siRNA sense strand
gaucaaguuggugaagaaa

SEQ ID NO: 2503613 - RNA, 19 nt, Homo sapiens
  misc_RNA (1)...(19): siRNA sense strand
aggauuacggccaggagau

SEQ ID NO: 2503614 - RNA, 19 nt, Homo sapiens
  misc_RNA (1)...(19): siRNA sense strand
gaugauggcaggaaggucu

SEQ ID NO: 2503615 - RNA, 19 nt, Homo sapiens
  misc_RNA (1)...(19): siRNA sense strand
ugaccagaacacagaggau

SEQ ID NO: 2503616 - RNA, 19 nt, Homo sapiens
  misc_RNA (1)...(19): siRNA sense strand
ucacagagauccagccaca

SEQ ID NO: 2503617 - RNA, 19 nt, Homo sapiens
  misc_RNA (1)...(19): siRNA sense strand
ggucaggagcacucggaau

SEQ ID NO: 2503618 - RNA, 19 nt, Homo sapiens
  misc_RNA (1)...(19): siRNA sense strand
agaacaaacugguugcuga

SEQ ID NO: 2503619 - RNA, 19 nt, Homo sapiens
  misc_RNA (1)...(19): siRNA sense strand
aaugaagagauaagagaga

SEQ ID NO: 2503620 - RNA, 19 nt, Homo sapiens
  misc_RNA (1)...(19): siRNA sense strand
cgaaauagacaauggacuc

SEQ ID NO: 2503621 - RNA, 19 nt, Homo sapiens
  misc_RNA (1)...(19): siRNA sense strand
ucacauuguuccugaggga

SEQ ID NO: 2503622 - RNA, 19 nt, Homo sapiens
  misc_RNA (1)...(19): siRNA sense strand
gugaauuuggacaacgaaa

SEQ ID NO: 2503623 - RNA, 19 nt, Homo sapiens
  misc_RNA (1)...(19): siRNA sense strand
gggugguggcuuugaugaa

SEQ ID NO: 2503624 - RNA, 19 nt, Homo sapiens
  misc_RNA (1)...(19): siRNA sense strand
cggaaugggacaagcucuu

SEQ ID NO: 2503625 - RNA, 19 nt, Homo sapiens
  misc_RNA (1)...(19): siRNA sense strand
cugugugggugguggcuuu

SEQ ID NO: 2503626 - RNA, 19 nt, Homo sapiens
  misc_RNA (1)...(19): siRNA sense strand
cugcaguguuggccgagaa

SEQ ID NO: 2503627 - RNA, 19 nt, Homo sapiens
  misc_RNA (1)...(19): siRNA sense strand
ccuauggcacaaagaggaa

SEQ ID NO: 2503628 - RNA, 19 nt, Homo sapiens
  misc_RNA (1)...(19): siRNA sense strand
uggguggagaggagaacaa

SEQ ID NO: 2503629 - RNA, 19 nt, Homo sapiens
  misc_RNA (1)...(19): siRNA sense strand
uguaugugaauuuggacaa

SEQ ID NO: 2503630 - RNA, 19 nt, Homo sapiens
  misc_RNA (1)...(19): siRNA sense strand
ccuuguggguaaaugguga

SEQ ID NO: 2503631 - RNA, 19 nt, Homo sapiens
  misc_RNA (1)...(19): siRNA sense strand
cugcagauuggccaagaaa

SEQ ID NO: 2503632 - RNA, 19 nt, Homo sapiens
  misc_RNA (1)...(19): siRNA sense strand
uggacaacgaaauagacaa

SEQ ID NO: 2503633 - RNA, 19 nt, Homo sapiens
  misc_RNA (1)...(19): siRNA sense strand
aagagagaccggaggagca

SEQ ID NO: 2503634 - RNA, 19 nt, Homo sapiens
  misc_RNA (1)...(19): siRNA sense strand
gauaagagagaccggagga

SEQ ID NO: 2503635 - RNA, 19 nt, Homo sapiens
  misc_RNA (1)...(19): siRNA sense strand
gugcauccagugagaccaa

SEQ ID NO: 2503636 - RNA, 19 nt, Homo sapiens
  misc_RNA (1)...(19): siRNA sense strand
acgaaauagacaauggacu

SEQ ID NO: 2503637 - RNA, 19 nt, Homo sapiens
  misc_RNA (1)...(19): siRNA sense strand
acauggaggagcucaguau

SEQ ID NO: 2503638 - RNA, 19 nt, Homo sapiens
  misc_RNA (1)...(19): siRNA sense strand
caaacaagcagaaagggaa

SEQ ID NO: 2503639 - RNA, 19 nt, Homo sapiens
  misc_RNA (1)...(19): siRNA sense strand
ccaaacaagcagaaaggga

SEQ ID NO: 2503640 - RNA, 19 nt, Homo sapiens
  misc_RNA (1)...(19): siRNA sense strand
gauuacaggaugaggugca

SEQ ID NO: 2503641 - RNA, 19 nt, Homo sapiens
  misc_RNA (1)...(19): siRNA sense strand
ugguauugcucgaguucca

SEQ ID NO: 2503642 - RNA, 19 nt, Homo sapiens
  misc_RNA (1)...(19): siRNA sense strand
caaacaagcagaaagggaa

SEQ ID NO: 2503643 - RNA, 19 nt, Homo sapiens
  misc_RNA (1)...(19): siRNA sense strand
ccaaacaagcagaaaggga

SEQ ID NO: 2503644 - RNA, 19 nt, Homo sapiens
  misc_RNA (1)...(19): siRNA sense strand
gauuacaggaugaggugca

SEQ ID NO: 2503645 - RNA, 19 nt, Homo sapiens
  misc_RNA (1)...(19): siRNA sense strand
ugguauugcucgaguucca

SEQ ID NO: 2503646 - RNA, 19 nt, Homo sapiens
  misc_RNA (1)...(19): siRNA sense strand
gaccaaagcagcagcagca

SEQ ID NO: 2503647 - RNA, 19 nt, Homo sapiens
  misc_RNA (1)...(19): siRNA sense strand
ucuauaucaccuugaagaa

SEQ ID NO: 2503648 - RNA, 19 nt, Homo sapiens
  misc_RNA (1)...(19): siRNA sense strand
ccgaugggaagaagaagau

SEQ ID NO: 2503649 - RNA, 19 nt, Homo sapiens
  misc_RNA (1)...(19): siRNA sense strand
gggaaguacuagaaggaga

SEQ ID NO: 2503650 - RNA, 19 nt, Homo sapiens
  misc_RNA (1)...(19): siRNA sense strand
gaucagaccuguagagaag

SEQ ID NO: 2503651 - RNA, 19 nt, Homo sapiens
  misc_RNA (1)...(19): siRNA sense strand
ggguaaagccaaagaugca

SEQ ID NO: 2503652 - RNA, 19 nt, Homo sapiens
  misc_RNA (1)...(19): siRNA sense strand
gguuagaagauaaagguca

SEQ ID NO: 2503653 - RNA, 19 nt, Homo sapiens
  misc_RNA (1)...(19): siRNA sense strand
aaguacaguuucagggcaa

SEQ ID NO: 2503654 - RNA, 19 nt, Homo sapiens
  misc_RNA (1)...(19): siRNA sense strand
ugaagugacugaugaguau

SEQ ID NO: 2503655 - RNA, 19 nt, Homo sapiens
  misc_RNA (1)...(19): siRNA sense strand
uggaaaucagugaagauaa

SEQ ID NO: 2503656 - RNA, 19 nt, Homo sapiens
  misc_RNA (1)...(19): siRNA sense strand
aaggaaaaggaaaggguaa

SEQ ID NO: 2503657 - RNA, 19 nt, Homo sapiens
  misc_RNA (1)...(19): siRNA sense strand
uagaaggagagguggaaaa

SEQ ID NO: 2503658 - RNA, 19 nt, Homo sapiens
  misc_RNA (1)...(19): siRNA sense strand
cugaagugacugaugagua

SEQ ID NO: 2503659 - RNA, 19 nt, Homo sapiens
  misc_RNA (1)...(19): siRNA sense strand
guuucuaaaggaacagaua

SEQ ID NO: 2503660 - RNA, 19 nt, Homo sapiens
  misc_RNA (1)...(19): siRNA sense strand
uuguggaagcauugagcaa

SEQ ID NO: 2503661 - RNA, 19 nt, Homo sapiens
  misc_RNA (1)...(19): siRNA sense strand
cauggaaaucagugaagau

SEQ ID NO: 2503662 - RNA, 19 nt, Homo sapiens
  misc_RNA (1)...(19): siRNA sense strand
cuggguaccuuuggagaua

SEQ ID NO: 2503663 - RNA, 19 nt, Homo sapiens
  misc_RNA (1)...(19): siRNA sense strand
ggcugaaaauggugauaau

SEQ ID NO: 2503664 - RNA, 19 nt, Homo sapiens
  misc_RNA (1)...(19): siRNA sense strand
gagcaaaagaggggauaau

SEQ ID NO: 2503665 - RNA, 19 nt, Homo sapiens
  misc_RNA (1)...(19): siRNA sense strand
auguaauuguggaagcauu

SEQ ID NO: 2503666 - RNA, 19 nt, Homo sapiens
  misc_RNA (1)...(19): siRNA sense strand
aguuagaagaagaugcuga

SEQ ID NO: 2503667 - RNA, 19 nt, Homo sapiens
  misc_RNA (1)...(19): siRNA sense strand
ggguaccuuuggagauaau

SEQ ID NO: 2503668 - RNA, 19 nt, Homo sapiens
  misc_RNA (1)...(19): siRNA sense strand
agaagauaaaggucaagua

SEQ ID NO: 2503669 - RNA, 19 nt, Homo sapiens
  misc_RNA (1)...(19): siRNA sense strand
ccuuuggagauaaugauaa

SEQ ID NO: 2503670 - RNA, 19 nt, Homo sapiens
  misc_RNA (1)...(19): siRNA sense strand
gagcaagaagcaaaacaaa

SEQ ID NO: 2503671 - RNA, 19 nt, Homo sapiens
  misc_RNA (1)...(19): siRNA sense strand
auucagaugagaagaacau

SEQ ID NO: 2503672 - RNA, 19 nt, Homo sapiens
  misc_RNA (1)...(19): siRNA sense strand
gucguagauuuaaaggaaa

SEQ ID NO: 2503673 - RNA, 19 nt, Homo sapiens
  misc_RNA (1)...(19): siRNA sense strand
ugaucagaccuguagagaa

SEQ ID NO: 2503674 - RNA, 19 nt, Homo sapiens
  misc_RNA (1)...(19): siRNA sense strand
aaagaagcacugaagaaaa

SEQ ID NO: 2503675 - RNA, 19 nt, Homo sapiens
  misc_RNA (1)...(19): siRNA sense strand
aagaaacagacaaagaaga

SEQ ID NO: 2503676 - RNA, 19 nt, Homo sapiens
  misc_RNA (1)...(19): siRNA sense strand
gagaagauuuacacauacu

SEQ ID NO: 2503677 - RNA, 19 nt, Homo sapiens
  misc_RNA (1)...(19): siRNA sense strand
augagaagaacauugcaua

SEQ ID NO: 2503678 - RNA, 19 nt, Homo sapiens
  misc_RNA (1)...(19): siRNA sense strand
agaaguacaaagaaacaga

SEQ ID NO: 2503679 - RNA, 19 nt, Homo sapiens
  misc_RNA (1)...(19): siRNA sense strand
gaccuguagagaagauuua

SEQ ID NO: 2503680 - RNA, 19 nt, Homo sapiens
  misc_RNA (1)...(19): siRNA sense strand
guagagaagauuuacacau

SEQ ID NO: 2503681 - RNA, 19 nt, Homo sapiens
  misc_RNA (1)...(19): siRNA sense strand
ugagcaaauccaaggcaga

SEQ ID NO: 2503682 - RNA, 19 nt, Homo sapiens
  misc_RNA (1)...(19): siRNA sense strand
aacaggagcaagaagcaaa

SEQ ID NO: 2503683 - RNA, 19 nt, Homo sapiens
  misc_RNA (1)...(19): siRNA sense strand
augaugaacaugaugaaca

SEQ ID NO: 2503684 - RNA, 19 nt, Homo sapiens
  misc_RNA (1)...(19): siRNA sense strand
caauuaaggaacaaagaag

SEQ ID NO: 2503685 - RNA, 19 nt, Homo sapiens
  misc_RNA (1)...(19): siRNA sense strand
aacaagaaucccuaaacaa

SEQ ID NO: 2503686 - RNA, 19 nt, Homo sapiens
  misc_RNA (1)...(19): siRNA sense strand
aagagcaagagaagaaaca

SEQ ID NO: 2503687 - RNA, 19 nt, Homo sapiens
  misc_RNA (1)...(19): siRNA sense strand
ggccaaaaucugucaucaa

SEQ ID NO: 2503688 - RNA, 19 nt, Homo sapiens
  misc_RNA (1)...(19): siRNA sense strand
gugaaaagagcaagagaag

SEQ ID NO: 2503689 - RNA, 19 nt, Homo sapiens
  misc_RNA (1)...(19): siRNA sense strand
ggagcaagaagcaaaacaa

SEQ ID NO: 2503690 - RNA, 19 nt, Homo sapiens
  misc_RNA (1)...(19): siRNA sense strand
ugaugaugaacaugaugaa

SEQ ID NO: 2503691 - RNA, 19 nt, Homo sapiens
  misc_RNA (1)...(19): siRNA sense strand
ggaccugugaaaagagcaa

SEQ ID NO: 2503692 - RNA, 19 nt, Homo sapiens
  misc_RNA (1)...(19): siRNA sense strand
guacaaagaaacagaccug

SEQ ID NO: 2503693 - RNA, 19 nt, Homo sapiens
  misc_RNA (1)...(19): siRNA sense strand
augauaaagcaguggaaau

SEQ ID NO: 2503694 - RNA, 19 nt, Homo sapiens
  misc_RNA (1)...(19): siRNA sense strand
caaucuuggcaaagcgcaa

SEQ ID NO: 2503695 - RNA, 19 nt, Homo sapiens
  misc_RNA (1)...(19): siRNA sense strand
cagagaaccugaagcagca

SEQ ID NO: 2503696 - RNA, 19 nt, Homo sapiens
  misc_RNA (1)...(19): siRNA sense strand
gguuaaggaacaggaggaa

SEQ ID NO: 2503697 - RNA, 19 nt, Homo sapiens
  misc_RNA (1)...(19): siRNA sense strand
ucaucaaacaggacaucaa

SEQ ID NO: 2503698 - RNA, 19 nt, Homo sapiens
  misc_RNA (1)...(19): siRNA sense strand
cacacaugguuaaggaaca

SEQ ID NO: 2503699 - RNA, 19 nt, Homo sapiens
  misc_RNA (1)...(19): siRNA sense strand
guuaaggaacaggaggaaa

SEQ ID NO: 2503700 - RNA, 19 nt, Homo sapiens
  misc_RNA (1)...(19): siRNA sense strand
gcgcauugggaaagaccuu

SEQ ID NO: 2503701 - RNA, 19 nt, Homo sapiens
  misc_RNA (1)...(19): siRNA sense strand
gcuccaggauuucgugaga

SEQ ID NO: 2503702 - RNA, 19 nt, Homo sapiens
  misc_RNA (1)...(19): siRNA sense strand
gcugcagacccgucagaau

SEQ ID NO: 2503703 - RNA, 19 nt, Homo sapiens
  misc_RNA (1)...(19): siRNA sense strand
ccgacaacgcagugaauuc

SEQ ID NO: 2503704 - RNA, 19 nt, Homo sapiens
  misc_RNA (1)...(19): siRNA sense strand
ugguuaaggaacaggagga

SEQ ID NO: 2503705 - RNA, 19 nt, Homo sapiens
  misc_RNA (1)...(19): siRNA sense strand
uuaaggaacaggaggaaac

SEQ ID NO: 2503706 - RNA, 19 nt, Homo sapiens
  misc_RNA (1)...(19): siRNA sense strand
aggaacaggaggaaaccau

SEQ ID NO: 2503707 - RNA, 19 nt, Homo sapiens
  misc_RNA (1)...(19): siRNA sense strand
ugaugauaaagcaguggaa

SEQ ID NO: 2503708 - RNA, 19 nt, Homo sapiens
  misc_RNA (1)...(19): siRNA sense strand
caugaaagguggaucgaga

SEQ ID NO: 2503709 - RNA, 19 nt, Homo sapiens
  misc_RNA (1)...(19): siRNA sense strand
aagaauuaacccagaucaa

SEQ ID NO: 2503710 - RNA, 19 nt, Homo sapiens
  misc_RNA (1)...(19): siRNA sense strand
ggagaaaaugccagaguca

SEQ ID NO: 2503711 - RNA, 19 nt, Homo sapiens
  misc_RNA (1)...(19): siRNA sense strand
ccuggagaagauugagaaa

SEQ ID NO: 2503712 - RNA, 19 nt, Homo sapiens
  misc_RNA (1)...(19): siRNA sense strand
ggccagaugccgauggaga

SEQ ID NO: 2503713 - RNA, 19 nt, Homo sapiens
  misc_RNA (1)...(19): siRNA sense strand
cagaugggauagaggagga

SEQ ID NO: 2503714 - RNA, 19 nt, Homo sapiens
  misc_RNA (1)...(19): siRNA sense strand
agauugagaaacagcagaa

SEQ ID NO: 2503715 - RNA, 19 nt, Homo sapiens
  misc_RNA (1)...(19): siRNA sense strand
agcagaaggcggaggcaga

SEQ ID NO: 2503716 - RNA, 19 nt, Homo sapiens
  misc_RNA (1)...(19): siRNA sense strand
cgguuaugucuuugacuau

SEQ ID NO: 2503717 - RNA, 19 nt, Homo sapiens
  misc_RNA (1)...(19): siRNA sense strand
ggaagagagucuagugcug

SEQ ID NO: 2503718 - RNA, 19 nt, Homo sapiens
  misc_RNA (1)...(19): siRNA sense strand
aagaaagaauuaacccaga

SEQ ID NO: 2503719 - RNA, 19 nt, Homo sapiens
  misc_RNA (1)...(19): siRNA sense strand
cagaagaagcaauuggaag

SEQ ID NO: 2503720 - RNA, 19 nt, Homo sapiens
  misc_RNA (1)...(19): siRNA sense strand
agaaacagcagaaggcgga

SEQ ID NO: 2503721 - RNA, 19 nt, Homo sapiens
  misc_RNA (1)...(19): siRNA sense strand
acacagaccagcaacguca

SEQ ID NO: 2503722 - RNA, 19 nt, Homo sapiens
  misc_RNA (1)...(19): siRNA sense strand
auggagaagagaugacaga

SEQ ID NO: 2503723 - RNA, 19 nt, Homo sapiens
  misc_RNA (1)...(19): siRNA sense strand
aguacaugagugagcgaca

SEQ ID NO: 2503724 - RNA, 19 nt, Homo sapiens
  misc_RNA (1)...(19): siRNA sense strand
cagaccaucaagaaagaau

SEQ ID NO: 2503725 - RNA, 19 nt, Homo sapiens
  misc_RNA (1)...(19): siRNA sense strand
agcaauuggaagagagucu

SEQ ID NO: 2503726 - RNA, 19 nt, Homo sapiens
  misc_RNA (1)...(19): siRNA sense strand
aggcggaggcagaagcuca

SEQ ID NO: 2503727 - RNA, 19 nt, Homo sapiens
  misc_RNA (1)...(19): siRNA sense strand
agaaaauaucgaagggaga

SEQ ID NO: 2503728 - RNA, 19 nt, Homo sapiens
  misc_RNA (1)...(19): siRNA sense strand
ucucagaagaaaagagcaa

SEQ ID NO: 2503729 - RNA, 19 nt, Homo sapiens
  misc_RNA (1)...(19): siRNA sense strand
aggcagaagauguggcagu

SEQ ID NO: 2503730 - RNA, 19 nt, Homo sapiens
  misc_RNA (1)...(19): siRNA sense strand
ggauaauggcagagugcuc

SEQ ID NO: 2503731 - RNA, 19 nt, Homo sapiens
  misc_RNA (1)...(19): siRNA sense strand
aagcagauguccaggguag

SEQ ID NO: 2503732 - RNA, 19 nt, Homo sapiens
  misc_RNA (1)...(19): siRNA sense strand
guauguggauaauggcaga

SEQ ID NO: 2503733 - RNA, 19 nt, Homo sapiens
  misc_RNA (1)...(19): siRNA sense strand
agacaugaucguggaagaa

SEQ ID NO: 2503734 - RNA, 19 nt, Homo sapiens
  misc_RNA (1)...(19): siRNA sense strand
caacugugucggaagguca

SEQ ID NO: 2503735 - RNA, 19 nt, Homo sapiens
  misc_RNA (1)...(19): siRNA sense strand
cagaagauguggcagugga

SEQ ID NO: 2503736 - RNA, 19 nt, Homo sapiens
  misc_RNA (1)...(19): siRNA sense strand
uggaaauggcucagaagca

SEQ ID NO: 2503737 - RNA, 19 nt, Homo sapiens
  misc_RNA (1)...(19): siRNA sense strand
ggaaagauuguuaacccua

SEQ ID NO: 2503738 - RNA, 19 nt, Homo sapiens
  misc_RNA (1)...(19): siRNA sense strand
uguuaacccuauuggaaaa

SEQ ID NO: 2503739 - RNA, 19 nt, Homo sapiens
  misc_RNA (1)...(19): siRNA sense strand
auuauaaagcuuugagcga

SEQ ID NO: 2503740 - RNA, 19 nt, Homo sapiens
  misc_RNA (1)...(19): siRNA sense strand
ccguaguggcauauaccaa

SEQ ID NO: 2503741 - RNA, 19 nt, Homo sapiens
  misc_RNA (1)...(19): siRNA sense strand
gcacccuggacgagaucaa

SEQ ID NO: 2503742 - RNA, 19 nt, Homo sapiens
  misc_RNA (1)...(19): siRNA sense strand
agcugaagcacuuggagaa

SEQ ID NO: 2503743 - RNA, 19 nt, Homo sapiens
  misc_RNA (1)...(19): siRNA sense strand
cggugaaaggucuucuaaa

SEQ ID NO: 2503744 - RNA, 19 nt, Homo sapiens
  misc_RNA (1)...(19): siRNA sense strand
cgucgucaagauagacaaa

SEQ ID NO: 2503745 - RNA, 19 nt, Homo sapiens
  misc_RNA (1)...(19): siRNA sense strand
uuguuaacccuauuggaaa

SEQ ID NO: 2503746 - RNA, 19 nt, Homo sapiens
  misc_RNA (1)...(19): siRNA sense strand
ugggcgaggcugugcacaa

SEQ ID NO: 2503747 - RNA, 19 nt, Homo sapiens
  misc_RNA (1)...(19): siRNA sense strand
cugaugagggcaagcugaa

SEQ ID NO: 2503748 - RNA, 19 nt, Homo sapiens
  misc_RNA (1)...(19): siRNA sense strand
gggaaagauuguuaacccu

SEQ ID NO: 2503749 - RNA, 19 nt, Homo sapiens
  misc_RNA (1)...(19): siRNA sense strand
ugcacaaggcugagcugaa

SEQ ID NO: 2503750 - RNA, 19 nt, Homo sapiens
  misc_RNA (1)...(19): siRNA sense strand
caaacugagcauugggaac

SEQ ID NO: 2503751 - RNA, 19 nt, Homo sapiens
  misc_RNA (1)...(19): siRNA sense strand
ugaaagugggcgaggcugu

SEQ ID NO: 2503752 - RNA, 19 nt, Homo sapiens
  misc_RNA (1)...(19): siRNA sense strand
cauccaaggcccagagucu

SEQ ID NO: 2503753 - RNA, 19 nt, Homo sapiens
  misc_RNA (1)...(19): siRNA sense strand
gauugaaagaagaggaccu

SEQ ID NO: 2503754 - RNA, 19 nt, Homo sapiens
  misc_RNA (1)...(19): siRNA sense strand
agcaaggagagaagaguga

SEQ ID NO: 2503755 - RNA, 19 nt, Homo sapiens
  misc_RNA (1)...(19): siRNA sense strand
gcagaaggugcaagccaga

SEQ ID NO: 2503756 - RNA, 19 nt, Homo sapiens
  misc_RNA (1)...(19): siRNA sense strand
gugugggauugaaagaaga

SEQ ID NO: 2503757 - RNA, 19 nt, Homo sapiens
  misc_RNA (1)...(19): siRNA sense strand
ugaaaguccugcaggccca

SEQ ID NO: 2503758 - RNA, 19 nt, Homo sapiens
  misc_RNA (1)...(19): siRNA sense strand
cugaaauagacaugccaua

SEQ ID NO: 2503759 - RNA, 19 nt, Homo sapiens
  misc_RNA (1)...(19): siRNA sense strand
gaugcaaaccauuggccaa

SEQ ID NO: 2503760 - RNA, 19 nt, Homo sapiens
  misc_RNA (1)...(19): siRNA sense strand
ggacuagcauggugcagga

SEQ ID NO: 2503761 - RNA, 19 nt, Homo sapiens
  misc_RNA (1)...(19): siRNA sense strand
ucaaagaaauccagaggag

SEQ ID NO: 2503762 - RNA, 19 nt, Homo sapiens
  misc_RNA (1)...(19): siRNA sense strand
caacaugggcgauaggacu

SEQ ID NO: 2503763 - RNA, 19 nt, Homo sapiens
  misc_RNA (1)...(19): siRNA sense strand
aaagaaauccagaggaggu

SEQ ID NO: 2503764 - RNA, 19 nt, Homo sapiens
  misc_RNA (1)...(19): siRNA sense strand
gguugcugcccuuggauau

SEQ ID NO: 2503765 - RNA, 19 nt, Homo sapiens
  misc_RNA (1)...(19): siRNA sense strand
augaccuacaaguggaaua

SEQ ID NO: 2503766 - RNA, 19 nt, Homo sapiens
  misc_RNA (1)...(19): siRNA sense strand
accuacaaguggaauacaa

SEQ ID NO: 2503767 - RNA, 19 nt, Homo sapiens
  misc_RNA (1)...(19): siRNA sense strand
cucagagaaugcagcacaa

SEQ ID NO: 2503768 - RNA, 19 nt, Homo sapiens
  misc_RNA (1)...(19): siRNA sense strand
agaaagaugaggaaggaga

SEQ ID NO: 2503769 - RNA, 19 nt, Homo sapiens
  misc_RNA (1)...(19): siRNA sense strand
guggcaacaagaugggaaa

SEQ ID NO: 2503770 - RNA, 19 nt, Homo sapiens
  misc_RNA (1)...(19): siRNA sense strand
cagagacaaaggagggaga

SEQ ID NO: 2503771 - RNA, 19 nt, Homo sapiens
  misc_RNA (1)...(19): siRNA sense strand
ggaaauggagcuugcagga

SEQ ID NO: 2503772 - RNA, 19 nt, Homo sapiens
  misc_RNA (1)...(19): siRNA sense strand
aggaccaguuggagguuca

SEQ ID NO: 2503773 - RNA, 19 nt, Homo sapiens
  misc_RNA (1)...(19): siRNA sense strand
caacaaaagagguggcaac

SEQ ID NO: 2503774 - RNA, 19 nt, Homo sapiens
  misc_RNA (1)...(19): siRNA sense strand
gcuagaagauauugcagcu

SEQ ID NO: 2503775 - RNA, 19 nt, Homo sapiens
  misc_RNA (1)...(19): siRNA sense strand
uccaguaagucaugagcau

SEQ ID NO: 2503776 - RNA, 19 nt, Homo sapiens
  misc_RNA (1)...(19): siRNA sense strand
uggagaaaaggaagaacaa

SEQ ID NO: 2503777 - RNA, 19 nt, Homo sapiens
  misc_RNA (1)...(19): siRNA sense strand
augagcaugaggaaagaaa

SEQ ID NO: 2503778 - RNA, 19 nt, Homo sapiens
  misc_RNA (1)...(19): siRNA sense strand
aggaacugaaagagauuga

SEQ ID NO: 2503779 - RNA, 19 nt, Homo sapiens
  misc_RNA (1)...(19): siRNA sense strand
gguugauaccaaggagcua

SEQ ID NO: 2503780 - RNA, 19 nt, Homo sapiens
  misc_RNA (1)...(19): siRNA sense strand
gguggcaacaagaugggaa

SEQ ID NO: 2503781 - RNA, 19 nt, Homo sapiens
  misc_RNA (1)...(19): siRNA sense strand
auaccaaggagcuagaaga

SEQ ID NO: 2503782 - RNA, 19 nt, Homo sapiens
  misc_RNA (1)...(19): siRNA sense strand
gagcauggggaaagaggau

SEQ ID NO: 2503783 - RNA, 19 nt, Homo sapiens
  misc_RNA (1)...(19): siRNA sense strand
ugucauaagcagagaucac

SEQ ID NO: 2503784 - RNA, 19 nt, Homo sapiens
  misc_RNA (1)...(19): siRNA sense strand
gugucaggaaccagcuuaa

SEQ ID NO: 2503785 - RNA, 19 nt, Homo sapiens
  misc_RNA (1)...(19): siRNA sense strand
ucucaaacucuccaggaau

SEQ ID NO: 2503786 - RNA, 19 nt, Homo sapiens
  misc_RNA (1)...(19): siRNA sense strand
cagucgaguccaaaucaaa

SEQ ID NO: 2503787 - RNA, 19 nt, Homo sapiens
  misc_RNA (1)...(19): siRNA sense strand
ggauggagaaaguggacac

SEQ ID NO: 2503788 - RNA, 19 nt, Homo sapiens
  misc_RNA (1)...(19): siRNA sense strand
cagccagggcacugaagaa

SEQ ID NO: 2503789 - RNA, 19 nt, Homo sapiens
  misc_RNA (1)...(19): siRNA sense strand
ucgacaagagugaugagaa

SEQ ID NO: 2503790 - RNA, 19 nt, Homo sapiens
  misc_RNA (1)...(19): siRNA sense strand
gcaauggguuugaggacug

SEQ ID NO: 2503791 - RNA, 19 nt, Homo sapiens
  misc_RNA (1)...(19): siRNA sense strand
ggaacaaccucaugacgcu

SEQ ID NO: 2503792 - RNA, 19 nt, Homo sapiens
  misc_RNA (1)...(19): siRNA sense strand
acaagagugaugagaagga

SEQ ID NO: 2503793 - RNA, 19 nt, Homo sapiens
  misc_RNA (1)...(19): siRNA sense strand
gagcagaaugcgucggaag

SEQ ID NO: 2503794 - RNA, 19 nt, Homo sapiens
  misc_RNA (1)...(19): siRNA sense strand
caaaugagguacuggguga

SEQ ID NO: 2503795 - RNA, 19 nt, Homo sapiens
  misc_RNA (1)...(19): siRNA sense strand
gguacugggugaaaggaga

SEQ ID NO: 2503796 - RNA, 19 nt, Homo sapiens
  misc_RNA (1)...(19): siRNA sense strand
gcuucauagcacugguaaa

SEQ ID NO: 2503797 - RNA, 19 nt, Homo sapiens
  misc_RNA (1)...(19): siRNA sense strand
ggggaaacaagaagcuaaa

SEQ ID NO: 2503798 - RNA, 19 nt, Homo sapiens
  misc_RNA (1)...(19): siRNA sense strand
gagucguucaagagacaaa

SEQ ID NO: 2503799 - RNA, 19 nt, Homo sapiens
  misc_RNA (1)...(19): siRNA sense strand
gugaaaggagagaagacuu

SEQ ID NO: 2503800 - RNA, 19 nt, Homo sapiens
  misc_RNA (1)...(19): siRNA sense strand
gaugcagcuccgugguaaa

SEQ ID NO: 2503801 - RNA, 19 nt, Homo sapiens
  misc_RNA (1)...(19): siRNA sense strand
ugaucaaccauuucagcaa

SEQ ID NO: 2503802 - RNA, 19 nt, Homo sapiens
  misc_RNA (1)...(19): siRNA sense strand
gggugaaaggagagaagac

SEQ ID NO: 2503803 - RNA, 19 nt, Homo sapiens
  misc_RNA (1)...(19): siRNA sense strand
gcuccgugguaaaggaucu

SEQ ID NO: 2503804 - RNA, 19 nt, Homo sapiens
  misc_RNA (1)...(19): siRNA sense strand
acaagaagcuaaagcagac

SEQ ID NO: 2503805 - RNA, 19 nt, Homo sapiens
  misc_RNA (1)...(19): siRNA sense strand
auaucugggcagugaucaa

SEQ ID NO: 2503806 - RNA, 19 nt, Homo sapiens
  misc_RNA (1)...(19): siRNA sense strand
gcuuauaauaucugggcag

SEQ ID NO: 2503807 - RNA, 19 nt, Homo sapiens
  misc_RNA (1)...(19): siRNA sense strand
aguguagaaguaagaacua

SEQ ID NO: 2503808 - RNA, 19 nt, Homo sapiens
  misc_RNA (1)...(19): siRNA sense strand
ccacauaaaagcuuugcaa

SEQ ID NO: 2503809 - RNA, 19 nt, Homo sapiens
  misc_RNA (1)...(19): siRNA sense strand
ggcaagaggacuuuggcaa

SEQ ID NO: 2503810 - RNA, 19 nt, Homo sapiens
  misc_RNA (1)...(19): siRNA sense strand
gggcaguggcaauggcaga

SEQ ID NO: 2503811 - RNA, 19 nt, Homo sapiens
  misc_RNA (1)...(19): siRNA sense strand
ggcagaaguggaugggaga

SEQ ID NO: 2503812 - RNA, 19 nt, Homo sapiens
  misc_RNA (1)...(19): siRNA sense strand
cagaaguggaugggagaga

SEQ ID NO: 2503813 - RNA, 19 nt, Homo sapiens
  misc_RNA (1)...(19): siRNA sense strand
gcagcugcuaugugggcaa

SEQ ID NO: 2503814 - RNA, 19 nt, Homo sapiens
  misc_RNA (1)...(19): siRNA sense strand
gggagagacuugccaggga

SEQ ID NO: 2503815 - RNA, 19 nt, Homo sapiens
  misc_RNA (1)...(19): siRNA sense strand
cagggaggcaagaggacuu

SEQ ID NO: 2503816 - RNA, 19 nt, Homo sapiens
  misc_RNA (1)...(19): siRNA sense strand
uggcagaaguggaugggag

SEQ ID NO: 2503817 - RNA, 19 nt, Homo sapiens
  misc_RNA (1)...(19): siRNA sense strand
uggcaauggcagaagugga

SEQ ID NO: 2503818 - RNA, 19 nt, Homo sapiens
  misc_RNA (1)...(19): siRNA sense strand
ccgagaacuaccagaugaa

SEQ ID NO: 2503819 - RNA, 19 nt, Homo sapiens
  misc_RNA (1)...(19): siRNA sense strand
ucagugaaguggagcccaa

SEQ ID NO: 2503820 - RNA, 19 nt, Homo sapiens
  misc_RNA (1)...(19): siRNA sense strand
gguggagagcaaaggcaau

SEQ ID NO: 2503821 - RNA, 19 nt, Homo sapiens
  misc_RNA (1)...(19): siRNA sense strand
augggaagauuguggggua

SEQ ID NO: 2503822 - RNA, 19 nt, Homo sapiens
  misc_RNA (1)...(19): siRNA sense strand
uagagaacuucaaugccaa

SEQ ID NO: 2503823 - RNA, 19 nt, Homo sapiens
  misc_RNA (1)...(19): siRNA sense strand
agguggagagcaaaggcaa

SEQ ID NO: 2503824 - RNA, 19 nt, Homo sapiens
  misc_RNA (1)...(19): siRNA sense strand
aggccugucgcgaggagaa

SEQ ID NO: 2503825 - RNA, 19 nt, Homo sapiens
  misc_RNA (1)...(19): siRNA sense strand
caucgaacguucagcggaa

SEQ ID NO: 2503826 - RNA, 19 nt, Homo sapiens
  misc_RNA (1)...(19): siRNA sense strand
gagaaaucaucuuuggaca

SEQ ID NO: 2503827 - RNA, 19 nt, Homo sapiens
  misc_RNA (1)...(19): siRNA sense strand
cagaaaacugcaagaagaa

SEQ ID NO: 2503828 - RNA, 19 nt, Homo sapiens
  misc_RNA (1)...(19): siRNA sense strand
cugugaaauugcucaggaa

SEQ ID NO: 2503829 - RNA, 19 nt, Homo sapiens
  misc_RNA (1)...(19): siRNA sense strand
aggaguuacaggaagagaa

SEQ ID NO: 2503830 - RNA, 19 nt, Homo sapiens
  misc_RNA (1)...(19): siRNA sense strand
ggcuauugaggcagagaga

SEQ ID NO: 2503831 - RNA, 19 nt, Homo sapiens
  misc_RNA (1)...(19): siRNA sense strand
auggugaagaugcggauua

SEQ ID NO: 2503832 - RNA, 19 nt, Homo sapiens
  misc_RNA (1)...(19): siRNA sense strand
ccugcaggaacaagagauu

SEQ ID NO: 2503833 - RNA, 19 nt, Homo sapiens
  misc_RNA (1)...(19): siRNA sense strand
gaagcuggcuauugaggca

SEQ ID NO: 2503834 - RNA, 19 nt, Homo sapiens
  misc_RNA (1)...(19): siRNA sense strand
ugugaaauugcucaggaaa

SEQ ID NO: 2503835 - RNA, 19 nt, Homo sapiens
  misc_RNA (1)...(19): siRNA sense strand
cugaagaaaagaaagcuua

SEQ ID NO: 2503836 - RNA, 19 nt, Homo sapiens
  misc_RNA (1)...(19): siRNA sense strand
gcucaggaaauucaggaga

SEQ ID NO: 2503837 - RNA, 19 nt, Homo sapiens
  misc_RNA (1)...(19): siRNA sense strand
gagaagaaggaugaggaca

SEQ ID NO: 2503838 - RNA, 19 nt, Homo sapiens
  misc_RNA (1)...(19): siRNA sense strand
agaaaaggaguuacaggaa

SEQ ID NO: 2503839 - RNA, 19 nt, Homo sapiens
  misc_RNA (1)...(19): siRNA sense strand
aggagaagaaggaugagga

SEQ ID NO: 2503840 - RNA, 19 nt, Homo sapiens
  misc_RNA (1)...(19): siRNA sense strand
aggaaugguaugaugcuga

SEQ ID NO: 2503841 - RNA, 19 nt, Homo sapiens
  misc_RNA (1)...(19): siRNA sense strand
agccaaggagcgggagaaa

SEQ ID NO: 2503842 - RNA, 19 nt, Homo sapiens
  misc_RNA (1)...(19): siRNA sense strand
gaagaagaacuuuuggcua

SEQ ID NO: 2503843 - RNA, 19 nt, Homo sapiens
  misc_RNA (1)...(19): siRNA sense strand
aggaagaucugaaagcgca

SEQ ID NO: 2503844 - RNA, 19 nt, Homo sapiens
  misc_RNA (1)...(19): siRNA sense strand
gucaaaagagagugaugaa

SEQ ID NO: 2503845 - RNA, 19 nt, Homo sapiens
  misc_RNA (1)...(19): siRNA sense strand
caucgaacguucagcggaa

SEQ ID NO: 2503846 - RNA, 19 nt, Homo sapiens
  misc_RNA (1)...(19): siRNA sense strand
gagaaaucaucuuuggaca

SEQ ID NO: 2503847 - RNA, 19 nt, Homo sapiens
  misc_RNA (1)...(19): siRNA sense strand
cagaaaacugcaagaagaa

SEQ ID NO: 2503848 - RNA, 19 nt, Homo sapiens
  misc_RNA (1)...(19): siRNA sense strand
cugugaaauugcucaggaa

SEQ ID NO: 2503849 - RNA, 19 nt, Homo sapiens
  misc_RNA (1)...(19): siRNA sense strand
aggaguuacaggaagagaa

SEQ ID NO: 2503850 - RNA, 19 nt, Homo sapiens
  misc_RNA (1)...(19): siRNA sense strand
ggcuauugaggcagagaga

SEQ ID NO: 2503851 - RNA, 19 nt, Homo sapiens
  misc_RNA (1)...(19): siRNA sense strand
auggugaagaugcggauua

SEQ ID NO: 2503852 - RNA, 19 nt, Homo sapiens
  misc_RNA (1)...(19): siRNA sense strand
ccugcaggaacaagagauu

SEQ ID NO: 2503853 - RNA, 19 nt, Homo sapiens
  misc_RNA (1)...(19): siRNA sense strand
gaagcuggcuauugaggca

SEQ ID NO: 2503854 - RNA, 19 nt, Homo sapiens
  misc_RNA (1)...(19): siRNA sense strand
ugugaaauugcucaggaaa

SEQ ID NO: 2503855 - RNA, 19 nt, Homo sapiens
  misc_RNA (1)...(19): siRNA sense strand
cugaagaaaagaaagcuua

SEQ ID NO: 2503856 - RNA, 19 nt, Homo sapiens
  misc_RNA (1)...(19): siRNA sense strand
gcucaggaaauucaggaga

SEQ ID NO: 2503857 - RNA, 19 nt, Homo sapiens
  misc_RNA (1)...(19): siRNA sense strand
gagaagaaggaugaggaca

SEQ ID NO: 2503858 - RNA, 19 nt, Homo sapiens
  misc_RNA (1)...(19): siRNA sense strand
agaaaaggaguuacaggaa

SEQ ID NO: 2503859 - RNA, 19 nt, Homo sapiens
  misc_RNA (1)...(19): siRNA sense strand
aggagaagaaggaugagga

SEQ ID NO: 2503860 - RNA, 19 nt, Homo sapiens
  misc_RNA (1)...(19): siRNA sense strand
aggaaugguaugaugcuga

SEQ ID NO: 2503861 - RNA, 19 nt, Homo sapiens
  misc_RNA (1)...(19): siRNA sense strand
agccaaggagcgggagaaa

SEQ ID NO: 2503862 - RNA, 19 nt, Homo sapiens
  misc_RNA (1)...(19): siRNA sense strand
gaagaagaacuuuuggcua

SEQ ID NO: 2503863 - RNA, 19 nt, Homo sapiens
  misc_RNA (1)...(19): siRNA sense strand
aggaagaucugaaagcgca

SEQ ID NO: 2503864 - RNA, 19 nt, Homo sapiens
  misc_RNA (1)...(19): siRNA sense strand
gucaaaagagagugaugaa

SEQ ID NO: 2503865 - RNA, 19 nt, Homo sapiens
  misc_RNA (1)...(19): siRNA sense strand
aggagaucgaggagagaaa

SEQ ID NO: 2503866 - RNA, 19 nt, Homo sapiens
  misc_RNA (1)...(19): siRNA sense strand
ucgaggagagaaagggaaa

SEQ ID NO: 2503867 - RNA, 19 nt, Homo sapiens
  misc_RNA (1)...(19): siRNA sense strand
auggaaaaguugaagcaaa

SEQ ID NO: 2503868 - RNA, 19 nt, Homo sapiens
  misc_RNA (1)...(19): siRNA sense strand
ugacaaaggcgaugcagga

SEQ ID NO: 2503869 - RNA, 19 nt, Homo sapiens
  misc_RNA (1)...(19): siRNA sense strand
gggaaauucacgugccaca

SEQ ID NO: 2503870 - RNA, 19 nt, Homo sapiens
  misc_RNA (1)...(19): siRNA sense strand
gaaaggagaucgaggagag

SEQ ID NO: 2503871 - RNA, 19 nt, Homo sapiens
  misc_RNA (1)...(19): siRNA sense strand
ugacaggaggagagagguu

SEQ ID NO: 2503872 - RNA, 19 nt, Homo sapiens
  misc_RNA (1)...(19): siRNA sense strand
gagacggagcgaaggguga

SEQ ID NO: 2503873 - RNA, 19 nt, Homo sapiens
  misc_RNA (1)...(19): siRNA sense strand
caaaggugaucaaggcuca

SEQ ID NO: 2503874 - RNA, 19 nt, Homo sapiens
  misc_RNA (1)...(19): siRNA sense strand
cgaguggagagaagggaga

SEQ ID NO: 2503875 - RNA, 19 nt, Homo sapiens
  misc_RNA (1)...(19): siRNA sense strand
gagagagguucaauggcuu

SEQ ID NO: 2503876 - RNA, 19 nt, Homo sapiens
  misc_RNA (1)...(19): siRNA sense strand
aagaggauccccaggaaaa

SEQ ID NO: 2503877 - RNA, 19 nt, Homo sapiens
  misc_RNA (1)...(19): siRNA sense strand
uugcagggcccaugggaga

SEQ ID NO: 2503878 - RNA, 19 nt, Homo sapiens
  misc_RNA (1)...(19): siRNA sense strand
aggcgaugcaggagaacca

SEQ ID NO: 2503879 - RNA, 19 nt, Homo sapiens
  misc_RNA (1)...(19): siRNA sense strand
guucaggugucuuugguca

SEQ ID NO: 2503880 - RNA, 19 nt, Homo sapiens
  misc_RNA (1)...(19): siRNA sense strand
cggagcgaagggugacaaa

SEQ ID NO: 2503881 - RNA, 19 nt, Homo sapiens
  misc_RNA (1)...(19): siRNA sense strand
ggagagagguucaauggcu

SEQ ID NO: 2503882 - RNA, 19 nt, Homo sapiens
  misc_RNA (1)...(19): siRNA sense strand
gaacauaaacucacaggac

SEQ ID NO: 2503883 - RNA, 19 nt, Homo sapiens
  misc_RNA (1)...(19): siRNA sense strand
uggaagagauggacgagac

SEQ ID NO: 2503884 - RNA, 19 nt, Homo sapiens
  misc_RNA (1)...(19): siRNA sense strand
ggaaaggagaucgaggaga

SEQ ID NO: 2503885 - RNA, 19 nt, Homo sapiens
  misc_RNA (1)...(19): siRNA sense strand
caaaaggcaucaaagguga

SEQ ID NO: 2503886 - RNA, 19 nt, Homo sapiens
  misc_RNA (1)...(19): siRNA sense strand
gaauaagggugacgugggu

SEQ ID NO: 2503887 - RNA, 19 nt, Homo sapiens
  misc_RNA (1)...(19): siRNA sense strand
agggaaaaucggugagacu

SEQ ID NO: 2503888 - RNA, 19 nt, Homo sapiens
  misc_RNA (1)...(19): siRNA sense strand
ccuccuggacagaaauaaa

SEQ ID NO: 2503889 - RNA, 19 nt, Homo sapiens
  misc_RNA (1)...(19): siRNA sense strand
cagaauuggugaacggaag

SEQ ID NO: 2503890 - RNA, 19 nt, Homo sapiens
  misc_RNA (1)...(19): siRNA sense strand
ccagaauuggugaacggaa

SEQ ID NO: 2503891 - RNA, 19 nt, Homo sapiens
  misc_RNA (1)...(19): siRNA sense strand
cuguaaucuugcugcuuau

SEQ ID NO: 2503892 - RNA, 19 nt, Homo sapiens
  misc_RNA (1)...(19): siRNA sense strand
gcuguauaguaauggccuu

SEQ ID NO: 2503893 - RNA, 19 nt, Homo sapiens
  misc_RNA (1)...(19): siRNA sense strand
uaguaauggccuucagcau

SEQ ID NO: 2503894 - RNA, 19 nt, Homo sapiens
  misc_RNA (1)...(19): siRNA sense strand
gaucagauauggaggacga

SEQ ID NO: 2503895 - RNA, 19 nt, Homo sapiens
  misc_RNA (1)...(19): siRNA sense strand
auagagaauuggagcgaau

SEQ ID NO: 2503896 - RNA, 19 nt, Homo sapiens
  misc_RNA (1)...(19): siRNA sense strand
cuaucgaguuggugaguau

SEQ ID NO: 2503897 - RNA, 19 nt, Homo sapiens
  misc_RNA (1)...(19): siRNA sense strand
aggcagucaccaagggaaa

SEQ ID NO: 2503898 - RNA, 19 nt, Homo sapiens
  misc_RNA (1)...(19): siRNA sense strand
ggucagcaggauagaagaa

SEQ ID NO: 2503899 - RNA, 19 nt, Homo sapiens
  misc_RNA (1)...(19): siRNA sense strand
uggaaaugcagcagaacau

SEQ ID NO: 2503900 - RNA, 19 nt, Homo sapiens
  misc_RNA (1)...(19): siRNA sense strand
gaaucaugcuuguugguga

SEQ ID NO: 2503901 - RNA, 19 nt, Homo sapiens
  misc_RNA (1)...(19): siRNA sense strand
gcagcagaacauugagaau

SEQ ID NO: 2503902 - RNA, 19 nt, Homo sapiens
  misc_RNA (1)...(19): siRNA sense strand
ugacuuugaaggaggagaa

SEQ ID NO: 2503903 - RNA, 19 nt, Homo sapiens
  misc_RNA (1)...(19): siRNA sense strand
acccuaaagaugagcuaua

SEQ ID NO: 2503904 - RNA, 19 nt, Homo sapiens
  misc_RNA (1)...(19): siRNA sense strand
cauugaggccagagaggau

SEQ ID NO: 2503905 - RNA, 19 nt, Homo sapiens
  misc_RNA (1)...(19): siRNA sense strand
ccgaauuauuggaucagau

SEQ ID NO: 2503906 - RNA, 19 nt, Homo sapiens
  misc_RNA (1)...(19): siRNA sense strand
aagcauugcaguugguaga

SEQ ID NO: 2503907 - RNA, 19 nt, Homo sapiens
  misc_RNA (1)...(19): siRNA sense strand
uccuagacaauguggauua

SEQ ID NO: 2503908 - RNA, 19 nt, Homo sapiens
  misc_RNA (1)...(19): siRNA sense strand
ugauggauacagaggaaaa

SEQ ID NO: 2503909 - RNA, 19 nt, Homo sapiens
  misc_RNA (1)...(19): siRNA sense strand
agaucgagaccuaagagaa

SEQ ID NO: 2503910 - RNA, 19 nt, Homo sapiens
  misc_RNA (1)...(19): siRNA sense strand
cguagagggagcagaaguu

SEQ ID NO: 2503911 - RNA, 19 nt, Homo sapiens
  misc_RNA (1)...(19): siRNA sense strand
ugaugaagugauugcaauu

SEQ ID NO: 2503912 - RNA, 19 nt, Homo sapiens
  misc_RNA (1)...(19): siRNA sense strand
uggcuaacccugagcacau

SEQ ID NO: 2503913 - RNA, 19 nt, Homo sapiens
  misc_RNA (1)...(19): siRNA sense strand
ucgaacaagccuuaagaga

SEQ ID NO: 2503914 - RNA, 19 nt, Homo sapiens
  misc_RNA (1)...(19): siRNA sense strand
auggauucucaaugggaaa

SEQ ID NO: 2503915 - RNA, 19 nt, Homo sapiens
  misc_RNA (1)...(19): siRNA sense strand
auugagaauuacagggcga

SEQ ID NO: 2503916 - RNA, 19 nt, Homo sapiens
  misc_RNA (1)...(19): siRNA sense strand
acagagaagccaagccaca

SEQ ID NO: 2503917 - RNA, 19 nt, Homo sapiens
  misc_RNA (1)...(19): siRNA sense strand
gcaugaaugugugagggaa

SEQ ID NO: 2503918 - RNA, 19 nt, Homo sapiens
  misc_RNA (1)...(19): siRNA sense strand
ucagcaggauagaagaaau

SEQ ID NO: 2503919 - RNA, 19 nt, Homo sapiens
  misc_RNA (1)...(19): siRNA sense strand
gagugaacguagagggagc

SEQ ID NO: 2503920 - RNA, 19 nt, Homo sapiens
  misc_RNA (1)...(19): siRNA sense strand
aguuaaacauuaugaggcu

SEQ ID NO: 2503921 - RNA, 19 nt, Homo sapiens
  misc_RNA (1)...(19): siRNA sense strand
cuuugaaggaggagaauuc

SEQ ID NO: 2503922 - RNA, 19 nt, Homo sapiens
  misc_RNA (1)...(19): siRNA sense strand
ccuaagagaaggugguccu

SEQ ID NO: 2503923 - RNA, 19 nt, Homo sapiens
  misc_RNA (1)...(19): siRNA sense strand
ggauagaagaaaugaccuc

SEQ ID NO: 2503924 - RNA, 19 nt, Homo sapiens
  misc_RNA (1)...(19): siRNA sense strand
caugaaugugugagggaac

SEQ ID NO: 2503925 - RNA, 19 nt, Homo sapiens
  misc_RNA (1)...(19): siRNA sense strand
aggacgacaggaugagaau

SEQ ID NO: 2503926 - RNA, 19 nt, Homo sapiens
  misc_RNA (1)...(19): siRNA sense strand
cacccaagauagaucgaga

SEQ ID NO: 2503927 - RNA, 19 nt, Homo sapiens
  misc_RNA (1)...(19): siRNA sense strand
gcugaugaagugauugcaa

SEQ ID NO: 2503928 - RNA, 19 nt, Homo sapiens
  misc_RNA (1)...(19): siRNA sense strand
gccucagagauuugaagaa

SEQ ID NO: 2503929 - RNA, 19 nt, Homo sapiens
  misc_RNA (1)...(19): siRNA sense strand
uuaugaaggucgaguccca

SEQ ID NO: 2503930 - RNA, 19 nt, Homo sapiens
  misc_RNA (1)...(19): siRNA sense strand
gcucgaaggauuguagaau

SEQ ID NO: 2503931 - RNA, 19 nt, Homo sapiens
  misc_RNA (1)...(19): siRNA sense strand
gaucaagaacagcaaggga

SEQ ID NO: 2503932 - RNA, 19 nt, Homo sapiens
  misc_RNA (1)...(19): siRNA sense strand
ccacacauggagaguuaca

SEQ ID NO: 2503933 - RNA, 19 nt, Homo sapiens
  misc_RNA (1)...(19): siRNA sense strand
uggauuacuaugagagucu

SEQ ID NO: 2503934 - RNA, 19 nt, Homo sapiens
  misc_RNA (1)...(19): siRNA sense strand
gcuuacacauuucgagacu

SEQ ID NO: 2503935 - RNA, 19 nt, Homo sapiens
  misc_RNA (1)...(19): siRNA sense strand
gaacugaauaucaacccua

SEQ ID NO: 2503936 - RNA, 19 nt, Homo sapiens
  misc_RNA (1)...(19): siRNA sense strand
ugguagacagagaagccaa

SEQ ID NO: 2503937 - RNA, 19 nt, Homo sapiens
  misc_RNA (1)...(19): siRNA sense strand
gcuuguuggugauggauac

SEQ ID NO: 2503938 - RNA, 19 nt, Homo sapiens
  misc_RNA (1)...(19): siRNA sense strand
aucaagaacagcaagggaa

SEQ ID NO: 2503939 - RNA, 19 nt, Homo sapiens
  misc_RNA (1)...(19): siRNA sense strand
agggaagcaugaacugaau

SEQ ID NO: 2503940 - RNA, 19 nt, Homo sapiens
  misc_RNA (1)...(19): siRNA sense strand
guguugaagcauugcaguu

SEQ ID NO: 2503941 - RNA, 19 nt, Homo sapiens
  misc_RNA (1)...(19): siRNA sense strand
acacauggagaguuacaau

SEQ ID NO: 2503942 - RNA, 19 nt, Homo sapiens
  misc_RNA (1)...(19): siRNA sense strand
gaggacgacaggaugagaa

SEQ ID NO: 2503943 - RNA, 19 nt, Homo sapiens
  misc_RNA (1)...(19): siRNA sense strand
aggagugaacguagaggga

SEQ ID NO: 2503944 - RNA, 19 nt, Homo sapiens
  misc_RNA (1)...(19): siRNA sense strand
aggaaagaaaggaggccua

SEQ ID NO: 2503945 - RNA, 19 nt, Homo sapiens
  misc_RNA (1)...(19): siRNA sense strand
uguucgagaaggaggcaua

SEQ ID NO: 2503946 - RNA, 19 nt, Homo sapiens
  misc_RNA (1)...(19): siRNA sense strand
cagcuaaacacgaagcaga

SEQ ID NO: 2503947 - RNA, 19 nt, Homo sapiens
  misc_RNA (1)...(19): siRNA sense strand
ugaagaaauuccaagcuca

SEQ ID NO: 2503948 - RNA, 19 nt, Homo sapiens
  misc_RNA (1)...(19): siRNA sense strand
gguaaagaauggaagagug

SEQ ID NO: 2503949 - RNA, 19 nt, Homo sapiens
  misc_RNA (1)...(19): siRNA sense strand
agcuaaacacgaagcagaa

SEQ ID NO: 2503950 - RNA, 19 nt, Homo sapiens
  misc_RNA (1)...(19): siRNA sense strand
cuagcauguucgagaagga

SEQ ID NO: 2503951 - RNA, 19 nt, Homo sapiens
  misc_RNA (1)...(19): siRNA sense strand
uuuaagagaaagacugaga

SEQ ID NO: 2503952 - RNA, 19 nt, Homo sapiens
  misc_RNA (1)...(19): siRNA sense strand
caguagaaacuaaagucca

SEQ ID NO: 2503953 - RNA, 19 nt, Homo sapiens
  misc_RNA (1)...(19): siRNA sense strand
caacagaauuggaaggucc

SEQ ID NO: 2503954 - RNA, 19 nt, Homo sapiens
  misc_RNA (1)...(19): siRNA sense strand
agccaaggacacacagcaa

SEQ ID NO: 2503955 - RNA, 19 nt, Homo sapiens
  misc_RNA (1)...(19): siRNA sense strand
cgauggagcuggagccuga

SEQ ID NO: 2503956 - RNA, 19 nt, Homo sapiens
  misc_RNA (1)...(19): siRNA sense strand
agagaaaccuggaggcauc

SEQ ID NO: 2503957 - RNA, 19 nt, Homo sapiens
  misc_RNA (1)...(19): siRNA sense strand
ccauugaacaggagaccau

SEQ ID NO: 2503958 - RNA, 19 nt, Homo sapiens
  misc_RNA (1)...(19): siRNA sense strand
caguaauaaugaaggugga

SEQ ID NO: 2503959 - RNA, 19 nt, Homo sapiens
  misc_RNA (1)...(19): siRNA sense strand
cagccagacagaagagaca

SEQ ID NO: 2503960 - RNA, 19 nt, Homo sapiens
  misc_RNA (1)...(19): siRNA sense strand
aguacagauagaagaacua

SEQ ID NO: 2503961 - RNA, 19 nt, Homo sapiens
  misc_RNA (1)...(19): siRNA sense strand
agacaagggauguucucaa

SEQ ID NO: 2503962 - RNA, 19 nt, Homo sapiens
  misc_RNA (1)...(19): siRNA sense strand
ccagauaggucauuccaca

SEQ ID NO: 2503963 - RNA, 19 nt, Homo sapiens
  misc_RNA (1)...(19): siRNA sense strand
uggugugggagaagagaau

SEQ ID NO: 2503964 - RNA, 19 nt, Homo sapiens
  misc_RNA (1)...(19): siRNA sense strand
caguacagauagaagaacu

SEQ ID NO: 2503965 - RNA, 19 nt, Homo sapiens
  misc_RNA (1)...(19): siRNA sense strand
gugugggagaagagaauga

SEQ ID NO: 2503966 - RNA, 19 nt, Homo sapiens
  misc_RNA (1)...(19): siRNA sense strand
gggaucaagcugugugcau

SEQ ID NO: 2503967 - RNA, 19 nt, Homo sapiens
  misc_RNA (1)...(19): siRNA sense strand
ugggagaagagaaugagaa

SEQ ID NO: 2503968 - RNA, 19 nt, Homo sapiens
  misc_RNA (1)...(19): siRNA sense strand
auggaaaguguuaguguuu

SEQ ID NO: 2503969 - RNA, 19 nt, Homo sapiens
  misc_RNA (1)...(19): siRNA sense strand
cuucaagcuucgaguaacu

SEQ ID NO: 2503970 - RNA, 19 nt, Homo sapiens
  misc_RNA (1)...(19): siRNA sense strand
gaaauauagcacuucggaa

SEQ ID NO: 2503971 - RNA, 19 nt, Homo sapiens
  misc_RNA (1)...(19): siRNA sense strand
cuguggagcuuuaccaaaa

SEQ ID NO: 2503972 - RNA, 19 nt, Homo sapiens
  misc_RNA (1)...(19): siRNA sense strand
aaauauagcacuucggaac

SEQ ID NO: 2503973 - RNA, 19 nt, Homo sapiens
  misc_RNA (1)...(19): siRNA sense strand
augagaaacuguggagcuu

SEQ ID NO: 2503974 - RNA, 19 nt, Homo sapiens
  misc_RNA (1)...(19): siRNA sense strand
gcuugguggugugggagaa

SEQ ID NO: 2503975 - RNA, 19 nt, Homo sapiens
  misc_RNA (1)...(19): siRNA sense strand
cguaaauguacuucaaauc

SEQ ID NO: 2503976 - RNA, 19 nt, Homo sapiens
  misc_RNA (1)...(19): siRNA sense strand
ccucaugaguggacagcug

SEQ ID NO: 2503977 - RNA, 19 nt, Homo sapiens
  misc_RNA (1)...(19): siRNA sense strand
agacauuaacauucagagu

SEQ ID NO: 2503978 - RNA, 19 nt, Homo sapiens
  misc_RNA (1)...(19): siRNA sense strand
ugaaggagcuggagcagga

SEQ ID NO: 2503979 - RNA, 19 nt, Homo sapiens
  misc_RNA (1)...(19): siRNA sense strand
ccgagaagagugagcgcau

SEQ ID NO: 2503980 - RNA, 19 nt, Homo sapiens
  misc_RNA (1)...(19): siRNA sense strand
agaugaaggagcuggagca

SEQ ID NO: 2503981 - RNA, 19 nt, Homo sapiens
  misc_RNA (1)...(19): siRNA sense strand
cggcccugccugagagaaa

SEQ ID NO: 2503982 - RNA, 19 nt, Homo sapiens
  misc_RNA (1)...(19): siRNA sense strand
ccugagagaaacagcacaa

SEQ ID NO: 2503983 - RNA, 19 nt, Homo sapiens
  misc_RNA (1)...(19): siRNA sense strand
gaacagggccaaaccggaa

SEQ ID NO: 2503984 - RNA, 19 nt, Homo sapiens
  misc_RNA (1)...(19): siRNA sense strand
gaguaaaagagauuggaga

SEQ ID NO: 2503985 - RNA, 19 nt, Homo sapiens
  misc_RNA (1)...(19): siRNA sense strand
gcacaaacuauuucgucca

SEQ ID NO: 2503986 - RNA, 19 nt, Homo sapiens
  misc_RNA (1)...(19): siRNA sense strand
cauaaaaggaagagcuauc

SEQ ID NO: 2503987 - RNA, 19 nt, Homo sapiens
  misc_RNA (1)...(19): siRNA sense strand
cgaaagaagaagaagagca

SEQ ID NO: 2503988 - RNA, 19 nt, Homo sapiens
  misc_RNA (1)...(19): siRNA sense strand
agacgaaagaagaagaaga

SEQ ID NO: 2503989 - RNA, 19 nt, Homo sapiens
  misc_RNA (1)...(19): siRNA sense strand
gagaacuacaagugaagaa

SEQ ID NO: 2503990 - RNA, 19 nt, Homo sapiens
  misc_RNA (1)...(19): siRNA sense strand
caagaauggaggaaggaga

SEQ ID NO: 2503991 - RNA, 19 nt, Homo sapiens
  misc_RNA (1)...(19): siRNA sense strand
gcgaacagcugcuuggaga

SEQ ID NO: 2503992 - RNA, 19 nt, Homo sapiens
  misc_RNA (1)...(19): siRNA sense strand
cagcauuggaagauaaaga

SEQ ID NO: 2503993 - RNA, 19 nt, Homo sapiens
  misc_RNA (1)...(19): siRNA sense strand
aagaaagagaugaagauga

SEQ ID NO: 2503994 - RNA, 19 nt, Homo sapiens
  misc_RNA (1)...(19): siRNA sense strand
gcauuggaagauaaagaaa

SEQ ID NO: 2503995 - RNA, 19 nt, Homo sapiens
  misc_RNA (1)...(19): siRNA sense strand
uggaagauaaagaaagaga

SEQ ID NO: 2503996 - RNA, 19 nt, Homo sapiens
  misc_RNA (1)...(19): siRNA sense strand
aaguugaaauagaugggaa

SEQ ID NO: 2503997 - RNA, 19 nt, Homo sapiens
  misc_RNA (1)...(19): siRNA sense strand
aagaauggaggaaggagaa

SEQ ID NO: 2503998 - RNA, 19 nt, Homo sapiens
  misc_RNA (1)...(19): siRNA sense strand
uggaggaaggagaaguaua

SEQ ID NO: 2503999 - RNA, 19 nt, Homo sapiens
  misc_RNA (1)...(19): siRNA sense strand
gcagauggcuggaucgcuu

SEQ ID NO: 2504000 - RNA, 19 nt, Homo sapiens
  misc_RNA (1)...(19): siRNA sense strand
aggagaaguauaugcaauu

SEQ ID NO: 2504001 - RNA, 19 nt, Homo sapiens
  misc_RNA (1)...(19): siRNA sense strand
aaggagaaguauaugcaau

SEQ ID NO: 2504002 - RNA, 19 nt, Homo sapiens
  misc_RNA (1)...(19): siRNA sense strand
gaagaagaagagaggacca

SEQ ID NO: 2504003 - RNA, 19 nt, Homo sapiens
  misc_RNA (1)...(19): siRNA sense strand
gaagaagagaggaccaaaa

SEQ ID NO: 2504004 - RNA, 19 nt, Homo sapiens
  misc_RNA (1)...(19): siRNA sense strand
caacaagaauggaggaagg

SEQ ID NO: 2504005 - RNA, 19 nt, Homo sapiens
  misc_RNA (1)...(19): siRNA sense strand
guaaauacuugauggcucu

SEQ ID NO: 2504006 - RNA, 19 nt, Homo sapiens
  misc_RNA (1)...(19): siRNA sense strand
guaaagaaguugucagcag

SEQ ID NO: 2504007 - RNA, 19 nt, Homo sapiens
  misc_RNA (1)...(19): siRNA sense strand
uggaugaaguagcaagaca

SEQ ID NO: 2504008 - RNA, 19 nt, Homo sapiens
  misc_RNA (1)...(19): siRNA sense strand
aggaaaagguguuguucau

SEQ ID NO: 2504009 - RNA, 19 nt, Homo sapiens
  misc_RNA (1)...(19): siRNA sense strand
guccuaugaaguugaaaua

SEQ ID NO: 2504010 - RNA, 19 nt, Homo sapiens
  misc_RNA (1)...(19): siRNA sense strand
auagaauacaugcuggaaa

SEQ ID NO: 2504011 - RNA, 19 nt, Homo sapiens
  misc_RNA (1)...(19): siRNA sense strand
cugaagaaucugugugacu

SEQ ID NO: 2504012 - RNA, 19 nt, Homo sapiens
  misc_RNA (1)...(19): siRNA sense strand
aagaagaagaagagcaaag

SEQ ID NO: 2504013 - RNA, 19 nt, Homo sapiens
  misc_RNA (1)...(19): siRNA sense strand
caguauuacaguaugauga

SEQ ID NO: 2504014 - RNA, 19 nt, Homo sapiens
  misc_RNA (1)...(19): siRNA sense strand
aagugaaaccaauccguaa

SEQ ID NO: 2504015 - RNA, 19 nt, Homo sapiens
  misc_RNA (1)...(19): siRNA sense strand
aagaagaagaagagaggac

SEQ ID NO: 2504016 - RNA, 19 nt, Homo sapiens
  misc_RNA (1)...(19): siRNA sense strand
acagcugcuuggagaacua

SEQ ID NO: 2504017 - RNA, 19 nt, Homo sapiens
  misc_RNA (1)...(19): siRNA sense strand
gagauggagcaacuggaaa

SEQ ID NO: 2504018 - RNA, 19 nt, Homo sapiens
  misc_RNA (1)...(19): siRNA sense strand
cgaacagcugcuuggagaa

SEQ ID NO: 2504019 - RNA, 19 nt, Homo sapiens
  misc_RNA (1)...(19): siRNA sense strand
cuuugguaguacaggaaaa

SEQ ID NO: 2504020 - RNA, 19 nt, Homo sapiens
  misc_RNA (1)...(19): siRNA sense strand
cggugacacaacaguauua

SEQ ID NO: 2504021 - RNA, 19 nt, Homo sapiens
  misc_RNA (1)...(19): siRNA sense strand
agacuuuggaacacauaua

SEQ ID NO: 2504022 - RNA, 19 nt, Homo sapiens
  misc_RNA (1)...(19): siRNA sense strand
gaaauagaugggaagacau

SEQ ID NO: 2504023 - RNA, 19 nt, Homo sapiens
  misc_RNA (1)...(19): siRNA sense strand
ggaagauaaagaaagagau

SEQ ID NO: 2504024 - RNA, 19 nt, Homo sapiens
  misc_RNA (1)...(19): siRNA sense strand
gaagaagagcaaagggccu

SEQ ID NO: 2504025 - RNA, 19 nt, Homo sapiens
  misc_RNA (1)...(19): siRNA sense strand
ccaaaggacaagaaugcga

SEQ ID NO: 2504026 - RNA, 19 nt, Homo sapiens
  misc_RNA (1)...(19): siRNA sense strand
cugcagaagcacaucgaca

SEQ ID NO: 2504027 - RNA, 19 nt, Homo sapiens
  misc_RNA (1)...(19): siRNA sense strand
acuggaaagaagaagaaaa

SEQ ID NO: 2504028 - RNA, 19 nt, Homo sapiens
  misc_RNA (1)...(19): siRNA sense strand
uguauuucccaaaggacaa

SEQ ID NO: 2504029 - RNA, 19 nt, Homo sapiens
  misc_RNA (1)...(19): siRNA sense strand
uuggagaacuacaagugaa

SEQ ID NO: 2504030 - RNA, 19 nt, Homo sapiens
  misc_RNA (1)...(19): siRNA sense strand
acuugauggcucugaagaa

SEQ ID NO: 2504031 - RNA, 19 nt, Homo sapiens
  misc_RNA (1)...(19): siRNA sense strand
gggcauuguagauccauau

SEQ ID NO: 2504032 - RNA, 19 nt, Homo sapiens
  misc_RNA (1)...(19): siRNA sense strand
ccguaaucuaaauggacau

SEQ ID NO: 2504033 - RNA, 19 nt, Homo sapiens
  misc_RNA (1)...(19): siRNA sense strand
uggacauucaauugggcaa

SEQ ID NO: 2504034 - RNA, 19 nt, Homo sapiens
  misc_RNA (1)...(19): siRNA sense strand
aaagaucagcauuggaaga

SEQ ID NO: 2504035 - RNA, 19 nt, Homo sapiens
  misc_RNA (1)...(19): siRNA sense strand
guguauuucccaaaggaca

SEQ ID NO: 2504036 - RNA, 19 nt, Homo sapiens
  misc_RNA (1)...(19): siRNA sense strand
aauggaggaaggagaagua

SEQ ID NO: 2504037 - RNA, 19 nt, Homo sapiens
  misc_RNA (1)...(19): siRNA sense strand
aggaucauauacagcgcaa

SEQ ID NO: 2504038 - RNA, 19 nt, Homo sapiens
  misc_RNA (1)...(19): siRNA sense strand
cauagauaacgaagcgcua

SEQ ID NO: 2504039 - RNA, 19 nt, Homo sapiens
  misc_RNA (1)...(19): siRNA sense strand
gaaaggaggcugagagcug

SEQ ID NO: 2504040 - RNA, 19 nt, Homo sapiens
  misc_RNA (1)...(19): siRNA sense strand
gggccuugacuguggcuga

SEQ ID NO: 2504041 - RNA, 19 nt, Homo sapiens
  misc_RNA (1)...(19): siRNA sense strand
cgucacggcugcuaccuaa

SEQ ID NO: 2504042 - RNA, 19 nt, Homo sapiens
  misc_RNA (1)...(19): siRNA sense strand
gcuaagaacaugauggcug

SEQ ID NO: 2504043 - RNA, 19 nt, Homo sapiens
  misc_RNA (1)...(19): siRNA sense strand
aggaguacccagacaggau

SEQ ID NO: 2504044 - RNA, 19 nt, Homo sapiens
  misc_RNA (1)...(19): siRNA sense strand
cgggaggaguacccagaca

SEQ ID NO: 2504045 - RNA, 19 nt, Homo sapiens
  misc_RNA (1)...(19): siRNA sense strand
cagcaacguucaggcgcaa

SEQ ID NO: 2504046 - RNA, 19 nt, Homo sapiens
  misc_RNA (1)...(19): siRNA sense strand
gagaaaugccugaaggaga

SEQ ID NO: 2504047 - RNA, 19 nt, Homo sapiens
  misc_RNA (1)...(19): siRNA sense strand
gggaagagccuaauggaca

SEQ ID NO: 2504048 - RNA, 19 nt, Homo sapiens
  misc_RNA (1)...(19): siRNA sense strand
ccgagauguuccagggcau

SEQ ID NO: 2504049 - RNA, 19 nt, Homo sapiens
  misc_RNA (1)...(19): siRNA sense strand
ccuaauggacagugaugau

SEQ ID NO: 2504050 - RNA, 19 nt, Homo sapiens
  misc_RNA (1)...(19): siRNA sense strand
guccaugggaagagccuaa

SEQ ID NO: 2504051 - RNA, 19 nt, Homo sapiens
  misc_RNA (1)...(19): siRNA sense strand
agaaaugccugaaggagac

SEQ ID NO: 2504052 - RNA, 19 nt, Homo sapiens
  misc_RNA (1)...(19): siRNA sense strand
ccgaaguauuucaggccua

SEQ ID NO: 2504053 - RNA, 19 nt, Homo sapiens
  misc_RNA (1)...(19): siRNA sense strand
agagcuagggagagguaaa

SEQ ID NO: 2504054 - RNA, 19 nt, Homo sapiens
  misc_RNA (1)...(19): siRNA sense strand
ggaauaugcugcaggugga

SEQ ID NO: 2504055 - RNA, 19 nt, Homo sapiens
  misc_RNA (1)...(19): siRNA sense strand
gcgugugaacuucgggaaa

SEQ ID NO: 2504056 - RNA, 19 nt, Homo sapiens
  misc_RNA (1)...(19): siRNA sense strand
uggugauagagaagacaaa

SEQ ID NO: 2504057 - RNA, 19 nt, Homo sapiens
  misc_RNA (1)...(19): siRNA sense strand
gugauagagaagacaaaga

SEQ ID NO: 2504058 - RNA, 19 nt, Homo sapiens
  misc_RNA (1)...(19): siRNA sense strand
auagagaagacaaagagaa

SEQ ID NO: 2504059 - RNA, 19 nt, Homo sapiens
  misc_RNA (1)...(19): siRNA sense strand
agguaaauuugcugugguu

SEQ ID NO: 2504060 - RNA, 19 nt, Homo sapiens
  misc_RNA (1)...(19): siRNA sense strand
cauuugugggagaagauaa

SEQ ID NO: 2504061 - RNA, 19 nt, Homo sapiens
  misc_RNA (1)...(19): siRNA sense strand
caucaccauuugugggaga

SEQ ID NO: 2504062 - RNA, 19 nt, Homo sapiens
  misc_RNA (1)...(19): siRNA sense strand
aucuaaagagcuagggaga

SEQ ID NO: 2504063 - RNA, 19 nt, Homo sapiens
  misc_RNA (1)...(19): siRNA sense strand
auucagagccuuuuaguaa

SEQ ID NO: 2504064 - RNA, 19 nt, Homo sapiens
  misc_RNA (1)...(19): siRNA sense strand
aacaaauacuugaaggagu

SEQ ID NO: 2504065 - RNA, 19 nt, Homo sapiens
  misc_RNA (1)...(19): siRNA sense strand
cagcagugggacuuugaaa

SEQ ID NO: 2504066 - RNA, 19 nt, Homo sapiens
  misc_RNA (1)...(19): siRNA sense strand
ugcugcagguggagaaauu

SEQ ID NO: 2504067 - RNA, 19 nt, Homo sapiens
  misc_RNA (1)...(19): siRNA sense strand
ugauuuaaagccacagaau

SEQ ID NO: 2504068 - RNA, 19 nt, Homo sapiens
  misc_RNA (1)...(19): siRNA sense strand
acucaggaucauucuguaa

SEQ ID NO: 2504069 - RNA, 19 nt, Homo sapiens
  misc_RNA (1)...(19): siRNA sense strand
cagaauauuuagcuccaga

SEQ ID NO: 2504070 - RNA, 19 nt, Homo sapiens
  misc_RNA (1)...(19): siRNA sense strand
ccucucaaacucaggauca

SEQ ID NO: 2504071 - RNA, 19 nt, Homo sapiens
  misc_RNA (1)...(19): siRNA sense strand
ccaagaaggacgagcccaa

SEQ ID NO: 2504072 - RNA, 19 nt, Homo sapiens
  misc_RNA (1)...(19): siRNA sense strand
acaagaaacuuacagccua

SEQ ID NO: 2504073 - RNA, 19 nt, Homo sapiens
  misc_RNA (1)...(19): siRNA sense strand
uugaagaagaagaaguuga

SEQ ID NO: 2504074 - RNA, 19 nt, Homo sapiens
  misc_RNA (1)...(19): siRNA sense strand
cugcaaggacccagaugau

SEQ ID NO: 2504075 - RNA, 19 nt, Homo sapiens
  misc_RNA (1)...(19): siRNA sense strand
cuuugaagaagaagaaguu

SEQ ID NO: 2504076 - RNA, 19 nt, Homo sapiens
  misc_RNA (1)...(19): siRNA sense strand
acaaauuugccguggaaac

SEQ ID NO: 2504077 - RNA, 19 nt, Homo sapiens
  misc_RNA (1)...(19): siRNA sense strand
guggaauaaaguacaucaa

SEQ ID NO: 2504078 - RNA, 19 nt, Homo sapiens
  misc_RNA (1)...(19): siRNA sense strand
agguguuauucuaggagga

SEQ ID NO: 2504079 - RNA, 19 nt, Homo sapiens
  misc_RNA (1)...(19): siRNA sense strand
gugaacagaauaaggaaaa

SEQ ID NO: 2504080 - RNA, 19 nt, Homo sapiens
  misc_RNA (1)...(19): siRNA sense strand
uuaucaagcagaugagaau

SEQ ID NO: 2504081 - RNA, 19 nt, Homo sapiens
  misc_RNA (1)...(19): siRNA sense strand
aggaaaaugcccagauaau

SEQ ID NO: 2504082 - RNA, 19 nt, Homo sapiens
  misc_RNA (1)...(19): siRNA sense strand
cggaaagacggaaguggau

SEQ ID NO: 2504083 - RNA, 19 nt, Homo sapiens
  misc_RNA (1)...(19): siRNA sense strand
ugugaacagaauaaggaaa

SEQ ID NO: 2504084 - RNA, 19 nt, Homo sapiens
  misc_RNA (1)...(19): siRNA sense strand
gagaauuauccaugggucu

SEQ ID NO: 2504085 - RNA, 19 nt, Homo sapiens
  misc_RNA (1)...(19): siRNA sense strand
acagcgacgaagacagaaa

SEQ ID NO: 2504086 - RNA, 19 nt, Homo sapiens
  misc_RNA (1)...(19): siRNA sense strand
ucagagaaguggaagugga

SEQ ID NO: 2504087 - RNA, 19 nt, Homo sapiens
  misc_RNA (1)...(19): siRNA sense strand
caggcauccaggaguguua

SEQ ID NO: 2504088 - RNA, 19 nt, Homo sapiens
  misc_RNA (1)...(19): siRNA sense strand
agaaggagucgcagcgcau

SEQ ID NO: 2504089 - RNA, 19 nt, Homo sapiens
  misc_RNA (1)...(19): siRNA sense strand
acgagaaucgcauggaaga

SEQ ID NO: 2504090 - RNA, 19 nt, Homo sapiens
  misc_RNA (1)...(19): siRNA sense strand
acagcuaaaccuaagggaa

SEQ ID NO: 2504091 - RNA, 19 nt, Homo sapiens
  misc_RNA (1)...(19): siRNA sense strand
gcaucagcgcggagaucga

SEQ ID NO: 2504092 - RNA, 19 nt, Homo sapiens
  misc_RNA (1)...(19): siRNA sense strand
agcuaaaccuaagggaauu

SEQ ID NO: 2504093 - RNA, 19 nt, Homo sapiens
  misc_RNA (1)...(19): siRNA sense strand
augugugugaacagaauaa

SEQ ID NO: 2504094 - RNA, 19 nt, Homo sapiens
  misc_RNA (1)...(19): siRNA sense strand
ggaaauguuugguccggaa

SEQ ID NO: 2504095 - RNA, 19 nt, Homo sapiens
  misc_RNA (1)...(19): siRNA sense strand
cggaaggagcacugaaaca

SEQ ID NO: 2504096 - RNA, 19 nt, Homo sapiens
  misc_RNA (1)...(19): siRNA sense strand
aguuuaugccgauggaaua

SEQ ID NO: 2504097 - RNA, 19 nt, Homo sapiens
  misc_RNA (1)...(19): siRNA sense strand
ugaacgagaaugagcgcua

SEQ ID NO: 2504098 - RNA, 19 nt, Homo sapiens
  misc_RNA (1)...(19): siRNA sense strand
cggugaugaacgagaauga

SEQ ID NO: 2504099 - RNA, 19 nt, Homo sapiens
  misc_RNA (1)...(19): siRNA sense strand
aaugcaaggaagaggagaa

SEQ ID NO: 2504100 - RNA, 19 nt, Homo sapiens
  misc_RNA (1)...(19): siRNA sense strand
gcuuuaucaacgagaagaa

SEQ ID NO: 2504101 - RNA, 19 nt, Homo sapiens
  misc_RNA (1)...(19): siRNA sense strand
gcaaaucucuccaggcaca

SEQ ID NO: 2504102 - RNA, 19 nt, Homo sapiens
  misc_RNA (1)...(19): siRNA sense strand
uucagaagguggaggaaaa

SEQ ID NO: 2504103 - RNA, 19 nt, Homo sapiens
  misc_RNA (1)...(19): siRNA sense strand
ggaagaagccagcagagga

SEQ ID NO: 2504104 - RNA, 19 nt, Homo sapiens
  misc_RNA (1)...(19): siRNA sense strand
agaaauaccacuugcagga

SEQ ID NO: 2504105 - RNA, 19 nt, Homo sapiens
  misc_RNA (1)...(19): siRNA sense strand
gugaaagauguggaggaaa

SEQ ID NO: 2504106 - RNA, 19 nt, Homo sapiens
  misc_RNA (1)...(19): siRNA sense strand
augcaaggaagaggagaaa

SEQ ID NO: 2504107 - RNA, 19 nt, Homo sapiens
  misc_RNA (1)...(19): siRNA sense strand
aagugaaagauguggagga

SEQ ID NO: 2504108 - RNA, 19 nt, Homo sapiens
  misc_RNA (1)...(19): siRNA sense strand
cagcaaaucucuccaggca

SEQ ID NO: 2504109 - RNA, 19 nt, Homo sapiens
  misc_RNA (1)...(19): siRNA sense strand
ccgagaauucauuggaagu

SEQ ID NO: 2504110 - RNA, 19 nt, Homo sapiens
  misc_RNA (1)...(19): siRNA sense strand
gcacugaaacauaugcuga

SEQ ID NO: 2504111 - RNA, 19 nt, Homo sapiens
  misc_RNA (1)...(19): siRNA sense strand
cuaugauaucagugaggau

SEQ ID NO: 2504112 - RNA, 19 nt, Homo sapiens
  misc_RNA (1)...(19): siRNA sense strand
auucagaagugggaggaga

SEQ ID NO: 2504113 - RNA, 19 nt, Homo sapiens
  misc_RNA (1)...(19): siRNA sense strand
gcaaggaagaggagaaaag

SEQ ID NO: 2504114 - RNA, 19 nt, Homo sapiens
  misc_RNA (1)...(19): siRNA sense strand
acacagcaaaggagcucaa

SEQ ID NO: 2504115 - RNA, 19 nt, Homo sapiens
  misc_RNA (1)...(19): siRNA sense strand
auggaaagccagugaagaa

SEQ ID NO: 2504116 - RNA, 19 nt, Homo sapiens
  misc_RNA (1)...(19): siRNA sense strand
ccugauaaagaaagaaaga

SEQ ID NO: 2504117 - RNA, 19 nt, Homo sapiens
  misc_RNA (1)...(19): siRNA sense strand
cggcaaagagcaaaagaau

SEQ ID NO: 2504118 - RNA, 19 nt, Homo sapiens
  misc_RNA (1)...(19): siRNA sense strand
uguagaacacagagauaga

SEQ ID NO: 2504119 - RNA, 19 nt, Homo sapiens
  misc_RNA (1)...(19): siRNA sense strand
cguugguuguacagacuua

SEQ ID NO: 2504120 - RNA, 19 nt, Homo sapiens
  misc_RNA (1)...(19): siRNA sense strand
aauuaaagggagacauaga

SEQ ID NO: 2504121 - RNA, 19 nt, Homo sapiens
  misc_RNA (1)...(19): siRNA sense strand
aacaagaggaggagacaca

SEQ ID NO: 2504122 - RNA, 19 nt, Homo sapiens
  misc_RNA (1)...(19): siRNA sense strand
cauaaauccuguugcccau

SEQ ID NO: 2504123 - RNA, 19 nt, Homo sapiens
  misc_RNA (1)...(19): siRNA sense strand
cacacuggcuuaugggcaa

SEQ ID NO: 2504124 - RNA, 19 nt, Homo sapiens
  misc_RNA (1)...(19): siRNA sense strand
acaaaagcauuuaggacuu

SEQ ID NO: 2504125 - RNA, 19 nt, Homo sapiens
  misc_RNA (1)...(19): siRNA sense strand
cagucugauucuugacauu

SEQ ID NO: 2504126 - RNA, 19 nt, Homo sapiens
  misc_RNA (1)...(19): siRNA sense strand
ugcucaaauuaaagggaga

SEQ ID NO: 2504127 - RNA, 19 nt, Homo sapiens
  misc_RNA (1)...(19): siRNA sense strand
ccuuagaacccugaaacaa

SEQ ID NO: 2504128 - RNA, 19 nt, Homo sapiens
  misc_RNA (1)...(19): siRNA sense strand
caccugauaaagaaagaaa

SEQ ID NO: 2504129 - RNA, 19 nt, Homo sapiens
  misc_RNA (1)...(19): siRNA sense strand
caggaauagagaaauacaa

SEQ ID NO: 2504130 - RNA, 19 nt, Homo sapiens
  misc_RNA (1)...(19): siRNA sense strand
uuagugaagaucagagauu

SEQ ID NO: 2504131 - RNA, 19 nt, Homo sapiens
  misc_RNA (1)...(19): siRNA sense strand
cagguacggcaaagagcaa

SEQ ID NO: 2504132 - RNA, 19 nt, Homo sapiens
  misc_RNA (1)...(19): siRNA sense strand
ggauguuuccacuggguga

SEQ ID NO: 2504133 - RNA, 19 nt, Homo sapiens
  misc_RNA (1)...(19): siRNA sense strand
uugaaggagaugaugagaa

SEQ ID NO: 2504134 - RNA, 19 nt, Homo sapiens
  misc_RNA (1)...(19): siRNA sense strand
cugcuugauugaaggagau

SEQ ID NO: 2504135 - RNA, 19 nt, Homo sapiens
  misc_RNA (1)...(19): siRNA sense strand
gggaccaacauuaacacaa

SEQ ID NO: 2504136 - RNA, 19 nt, Homo sapiens
  misc_RNA (1)...(19): siRNA sense strand
ccaaauugcaugugcuuuu

SEQ ID NO: 2504137 - RNA, 19 nt, Homo sapiens
  misc_RNA (1)...(19): siRNA sense strand
cuuacuauuucaaggacca

SEQ ID NO: 2504138 - RNA, 19 nt, Homo sapiens
  misc_RNA (1)...(19): siRNA sense strand
gaaaugagcagguacggca

SEQ ID NO: 2504139 - RNA, 19 nt, Homo sapiens
  misc_RNA (1)...(19): siRNA sense strand
cccugaaacaagaggagga

SEQ ID NO: 2504140 - RNA, 19 nt, Homo sapiens
  misc_RNA (1)...(19): siRNA sense strand
ugauugaaggagaugauga

SEQ ID NO: 2504141 - RNA, 19 nt, Homo sapiens
  misc_RNA (1)...(19): siRNA sense strand
gguacggcaaagagcaaaa

SEQ ID NO: 2504142 - RNA, 19 nt, Homo sapiens
  misc_RNA (1)...(19): siRNA sense strand
uggaacaacugaaggacuc

SEQ ID NO: 2504143 - RNA, 19 nt, Homo sapiens
  misc_RNA (1)...(19): siRNA sense strand
cuuggaacacacuggcuua

SEQ ID NO: 2504144 - RNA, 19 nt, Homo sapiens
  misc_RNA (1)...(19): siRNA sense strand
aggagacacauauacgaaa

SEQ ID NO: 2504145 - RNA, 19 nt, Homo sapiens
  misc_RNA (1)...(19): siRNA sense strand
ggaguaucuuugagggacu

SEQ ID NO: 2504146 - RNA, 19 nt, Homo sapiens
  misc_RNA (1)...(19): siRNA sense strand
ccucacugcucguggucau

SEQ ID NO: 2504147 - RNA, 19 nt, Homo sapiens
  misc_RNA (1)...(19): siRNA sense strand
aaggaaagcucaagccaug

SEQ ID NO: 2504148 - RNA, 19 nt, Homo sapiens
  misc_RNA (1)...(19): siRNA sense strand
uggucaugcacguggccua

SEQ ID NO: 2504149 - RNA, 19 nt, Homo sapiens
  misc_RNA (1)...(19): siRNA sense strand
ccaugaaggagguggacga

SEQ ID NO: 2504150 - RNA, 19 nt, Homo sapiens
  misc_RNA (1)...(19): siRNA sense strand
auuugcagcuggagagaau

SEQ ID NO: 2504151 - RNA, 19 nt, Homo sapiens
  misc_RNA (1)...(19): siRNA sense strand
acacggugguggagcccua

SEQ ID NO: 2504152 - RNA, 19 nt, Homo sapiens
  misc_RNA (1)...(19): siRNA sense strand
ggaaggagucagagagcug

SEQ ID NO: 2504153 - RNA, 19 nt, Homo sapiens
  misc_RNA (1)...(19): siRNA sense strand
ccagaguggagccgggaau

SEQ ID NO: 2504154 - RNA, 19 nt, Homo sapiens
  misc_RNA (1)...(19): siRNA sense strand
ugaaggagguggacgagca

SEQ ID NO: 2504155 - RNA, 19 nt, Homo sapiens
  misc_RNA (1)...(19): siRNA sense strand
ugcucaacgugcagaacaa

SEQ ID NO: 2504156 - RNA, 19 nt, Homo sapiens
  misc_RNA (1)...(19): siRNA sense strand
gcuacuucguggaguggau

SEQ ID NO: 2504157 - RNA, 19 nt, Homo sapiens
  misc_RNA (1)...(19): siRNA sense strand
gugaggaaggagucagaga

SEQ ID NO: 2504158 - RNA, 19 nt, Homo sapiens
  misc_RNA (1)...(19): siRNA sense strand
cggugaacauggugcccuu

SEQ ID NO: 2504159 - RNA, 19 nt, Homo sapiens
  misc_RNA (1)...(19): siRNA sense strand
gugcagaacaagaacagca

SEQ ID NO: 2504160 - RNA, 19 nt, Homo sapiens
  misc_RNA (1)...(19): siRNA sense strand
gggaguucgaggaggagga

SEQ ID NO: 2504161 - RNA, 19 nt, Homo sapiens
  misc_RNA (1)...(19): siRNA sense strand
cagugaugagcaugggauu

SEQ ID NO: 2504162 - RNA, 19 nt, Homo sapiens
  misc_RNA (1)...(19): siRNA sense strand
gugacugucuccagggcuu

SEQ ID NO: 2504163 - RNA, 19 nt, Homo sapiens
  misc_RNA (1)...(19): siRNA sense strand
gaugaaaccuacugcauug

SEQ ID NO: 2504164 - RNA, 19 nt, Homo sapiens
  misc_RNA (1)...(19): siRNA sense strand
acaacgaggcccuguauga

SEQ ID NO: 2504165 - RNA, 19 nt, Homo sapiens
  misc_RNA (1)...(19): siRNA sense strand
gguggaaaacacagaugaa

SEQ ID NO: 2504166 - RNA, 19 nt, Homo sapiens
  misc_RNA (1)...(19): siRNA sense strand
ccacaaacguacugggaga

SEQ ID NO: 2504167 - RNA, 19 nt, Homo sapiens
  misc_RNA (1)...(19): siRNA sense strand
agaacaauggcguggacaa

SEQ ID NO: 2504168 - RNA, 19 nt, Homo sapiens
  misc_RNA (1)...(19): siRNA sense strand
gagauguugaaauggguaa

SEQ ID NO: 2504169 - RNA, 19 nt, Homo sapiens
  misc_RNA (1)...(19): siRNA sense strand
gcaauggagaagagcccaa

SEQ ID NO: 2504170 - RNA, 19 nt, Homo sapiens
  misc_RNA (1)...(19): siRNA sense strand
ggggcaggauggagagauu

SEQ ID NO: 2504171 - RNA, 19 nt, Homo sapiens
  misc_RNA (1)...(19): siRNA sense strand
ggaagggcacaaaggaaaa

SEQ ID NO: 2504172 - RNA, 19 nt, Homo sapiens
  misc_RNA (1)...(19): siRNA sense strand
aggaaaacaugcacagaga

SEQ ID NO: 2504173 - RNA, 19 nt, Homo sapiens
  misc_RNA (1)...(19): siRNA sense strand
gugauugaagagaaugaaa

SEQ ID NO: 2504174 - RNA, 19 nt, Homo sapiens
  misc_RNA (1)...(19): siRNA sense strand
gacuaaaagcaauggagaa

SEQ ID NO: 2504175 - RNA, 19 nt, Homo sapiens
  misc_RNA (1)...(19): siRNA sense strand
ugggaagggcacaaaggaa

SEQ ID NO: 2504176 - RNA, 19 nt, Homo sapiens
  misc_RNA (1)...(19): siRNA sense strand
caaaauuguacgagugaca

SEQ ID NO: 2504177 - RNA, 19 nt, Homo sapiens
  misc_RNA (1)...(19): siRNA sense strand
gagcugggauuguggagca

SEQ ID NO: 2504178 - RNA, 19 nt, Homo sapiens
  misc_RNA (1)...(19): siRNA sense strand
cagugauugaagagaauga

SEQ ID NO: 2504179 - RNA, 19 nt, Homo sapiens
  misc_RNA (1)...(19): siRNA sense strand
cagaaugagcuaccgggaa

SEQ ID NO: 2504180 - RNA, 19 nt, Homo sapiens
  misc_RNA (1)...(19): siRNA sense strand
cucagugauugaagagaau

SEQ ID NO: 2504181 - RNA, 19 nt, Homo sapiens
  misc_RNA (1)...(19): siRNA sense strand
agaaugagcuaccgggaag

SEQ ID NO: 2504182 - RNA, 19 nt, Homo sapiens
  misc_RNA (1)...(19): siRNA sense strand
cuucuugguaacacggaaa

SEQ ID NO: 2504183 - RNA, 19 nt, Homo sapiens
  misc_RNA (1)...(19): siRNA sense strand
gcgcuagauaguaaggcau

SEQ ID NO: 2504184 - RNA, 19 nt, Homo sapiens
  misc_RNA (1)...(19): siRNA sense strand
agauuguggagauggaaga

SEQ ID NO: 2504185 - RNA, 19 nt, Homo sapiens
  misc_RNA (1)...(19): siRNA sense strand
ccguaggagccaccauuaa

SEQ ID NO: 2504186 - RNA, 19 nt, Homo sapiens
  misc_RNA (1)...(19): siRNA sense strand
aagaagaaagugcagaaca

SEQ ID NO: 2504187 - RNA, 19 nt, Homo sapiens
  misc_RNA (1)...(19): siRNA sense strand
ccaacuaugagaagagaag

SEQ ID NO: 2504188 - RNA, 19 nt, Homo sapiens
  misc_RNA (1)...(19): siRNA sense strand
ugaacugaacuucggacaa

SEQ ID NO: 2504189 - RNA, 19 nt, Homo sapiens
  misc_RNA (1)...(19): siRNA sense strand
agucaaugcccugggucua

SEQ ID NO: 2504190 - RNA, 19 nt, Homo sapiens
  misc_RNA (1)...(19): siRNA sense strand
cggacaaauuauuacaauc

SEQ ID NO: 2504191 - RNA, 19 nt, Homo sapiens
  misc_RNA (1)...(19): siRNA sense strand
agauggaagacaugggugu

SEQ ID NO: 2504192 - RNA, 19 nt, Homo sapiens
  misc_RNA (1)...(19): siRNA sense strand
ggucccaguuccaggaucu

SEQ ID NO: 2504193 - RNA, 19 nt, Homo sapiens
  misc_RNA (1)...(19): siRNA sense strand
aggaaguggucgaagcuca

SEQ ID NO: 2504194 - RNA, 19 nt, Homo sapiens
  misc_RNA (1)...(19): siRNA sense strand
gcgugaaggaaguggucga

SEQ ID NO: 2504195 - RNA, 19 nt, Homo sapiens
  misc_RNA (1)...(19): siRNA sense strand
aggaaguggucgaagcuca

SEQ ID NO: 2504196 - RNA, 19 nt, Homo sapiens
  misc_RNA (1)...(19): siRNA sense strand
gcgugaaggaaguggucga

SEQ ID NO: 2504197 - RNA, 19 nt, Homo sapiens
  misc_RNA (1)...(19): siRNA sense strand
gauucggaugggugggaaa

SEQ ID NO: 2504198 - RNA, 19 nt, Homo sapiens
  misc_RNA (1)...(19): siRNA sense strand
ggauuaacagcuacggcua

SEQ ID NO: 2504199 - RNA, 19 nt, Homo sapiens
  misc_RNA (1)...(19): siRNA sense strand
cagcagagccugauccuga

SEQ ID NO: 2504200 - RNA, 19 nt, Homo sapiens
  misc_RNA (1)...(19): siRNA sense strand
acgccgaggacgagacaga

SEQ ID NO: 2504201 - RNA, 19 nt, Homo sapiens
  misc_RNA (1)...(19): siRNA sense strand
cagcauagcuacuggaagg

SEQ ID NO: 2504202 - RNA, 19 nt, Homo sapiens
  misc_RNA (1)...(19): siRNA sense strand
aggugaagaggaagcagua

SEQ ID NO: 2504203 - RNA, 19 nt, Homo sapiens
  misc_RNA (1)...(19): siRNA sense strand
caggaauacuucauggagu

SEQ ID NO: 2504204 - RNA, 19 nt, Homo sapiens
  misc_RNA (1)...(19): siRNA sense strand
ggaagcaguacgaugccua

SEQ ID NO: 2504205 - RNA, 19 nt, Homo sapiens
  misc_RNA (1)...(19): siRNA sense strand
gaggauggccagaccguga

SEQ ID NO: 2504206 - RNA, 19 nt, Homo sapiens
  misc_RNA (1)...(19): siRNA sense strand
aggacaagccaagcagaaa

SEQ ID NO: 2504207 - RNA, 19 nt, Homo sapiens
  misc_RNA (1)...(19): siRNA sense strand
ccagccagaaagagaucaa

SEQ ID NO: 2504208 - RNA, 19 nt, Homo sapiens
  misc_RNA (1)...(19): siRNA sense strand
caucaagauacgaguucca

SEQ ID NO: 2504209 - RNA, 19 nt, Homo sapiens
  misc_RNA (1)...(19): siRNA sense strand
aucccaaagccaaggagaa

SEQ ID NO: 2504210 - RNA, 19 nt, Homo sapiens
  misc_RNA (1)...(19): siRNA sense strand
cguuccacguguaggagau

SEQ ID NO: 2504211 - RNA, 19 nt, Homo sapiens
  misc_RNA (1)...(19): siRNA sense strand
cgaguuccaaagaggcuaa

SEQ ID NO: 2504212 - RNA, 19 nt, Homo sapiens
  misc_RNA (1)...(19): siRNA sense strand
agaagggugccgagggaaa

SEQ ID NO: 2504213 - RNA, 19 nt, Homo sapiens
  misc_RNA (1)...(19): siRNA sense strand
caaggaagccugaggagga

SEQ ID NO: 2504214 - RNA, 19 nt, Homo sapiens
  misc_RNA (1)...(19): siRNA sense strand
cugcagaaguugguggcaa

SEQ ID NO: 2504215 - RNA, 19 nt, Homo sapiens
  misc_RNA (1)...(19): siRNA sense strand
aggaggaggaggaggagga

SEQ ID NO: 2504216 - RNA, 19 nt, Homo sapiens
  misc_RNA (1)...(19): siRNA sense strand
caagaagggugccgaggga

SEQ ID NO: 2504217 - RNA, 19 nt, Homo sapiens
  misc_RNA (1)...(19): siRNA sense strand
cugaggaggaggaggagga

SEQ ID NO: 2504218 - RNA, 19 nt, Homo sapiens
  misc_RNA (1)...(19): siRNA sense strand
aggaaacugcacaggaaaa

SEQ ID NO: 2504219 - RNA, 19 nt, Homo sapiens
  misc_RNA (1)...(19): siRNA sense strand
gugcauuugaggaggacca

SEQ ID NO: 2504220 - RNA, 19 nt, Homo sapiens
  misc_RNA (1)...(19): siRNA sense strand
gaaucaaagaggcucggaa

SEQ ID NO: 2504221 - RNA, 19 nt, Homo sapiens
  misc_RNA (1)...(19): siRNA sense strand
aagaggaggagaaggcuga

SEQ ID NO: 2504222 - RNA, 19 nt, Homo sapiens
  misc_RNA (1)...(19): siRNA sense strand
gcuccgugaagguguggaa

SEQ ID NO: 2504223 - RNA, 19 nt, Homo sapiens
  misc_RNA (1)...(19): siRNA sense strand
gucagcaagaggaggagaa

SEQ ID NO: 2504224 - RNA, 19 nt, Homo sapiens
  misc_RNA (1)...(19): siRNA sense strand
gcggcaagaugaaugagga

SEQ ID NO: 2504225 - RNA, 19 nt, Homo sapiens
  misc_RNA (1)...(19): siRNA sense strand
ucgauaaggccaagcugaa

SEQ ID NO: 2504226 - RNA, 19 nt, Homo sapiens
  misc_RNA (1)...(19): siRNA sense strand
ccaaagagaccauugagca

SEQ ID NO: 2504227 - RNA, 19 nt, Homo sapiens
  misc_RNA (1)...(19): siRNA sense strand
aggccaagcugaagaaaac

SEQ ID NO: 2504228 - RNA, 19 nt, Homo sapiens
  misc_RNA (1)...(19): siRNA sense strand
caguauggaaggaggcaaa

SEQ ID NO: 2504229 - RNA, 19 nt, Homo sapiens
  misc_RNA (1)...(19): siRNA sense strand
guaagaggcugcaagguga

SEQ ID NO: 2504230 - RNA, 19 nt, Homo sapiens
  misc_RNA (1)...(19): siRNA sense strand
agguuauggaagaauguaa

SEQ ID NO: 2504231 - RNA, 19 nt, Homo sapiens
  misc_RNA (1)...(19): siRNA sense strand
uuaugaucccaaugagaaa

SEQ ID NO: 2504232 - RNA, 19 nt, Homo sapiens
  misc_RNA (1)...(19): siRNA sense strand
ggcuacgggaggagaacaa

SEQ ID NO: 2504233 - RNA, 19 nt, Homo sapiens
  misc_RNA (1)...(19): siRNA sense strand
ccgaaguuaagaagguuau

SEQ ID NO: 2504234 - RNA, 19 nt, Homo sapiens
  misc_RNA (1)...(19): siRNA sense strand
aguuuaugguucagucuau

SEQ ID NO: 2504235 - RNA, 19 nt, Homo sapiens
  misc_RNA (1)...(19): siRNA sense strand
ugguguaauuauugggaag

SEQ ID NO: 2504236 - RNA, 19 nt, Homo sapiens
  misc_RNA (1)...(19): siRNA sense strand
guuaagaagguuauggaag

SEQ ID NO: 2504237 - RNA, 19 nt, Homo sapiens
  misc_RNA (1)...(19): siRNA sense strand
guucuuuaucguuggugua

SEQ ID NO: 2504238 - RNA, 19 nt, Homo sapiens
  misc_RNA (1)...(19): siRNA sense strand
uugaauugccagcagagaa

SEQ ID NO: 2504239 - RNA, 19 nt, Homo sapiens
  misc_RNA (1)...(19): siRNA sense strand
agugagaacuggaagccuu

SEQ ID NO: 2504240 - RNA, 19 nt, Homo sapiens
  misc_RNA (1)...(19): siRNA sense strand
guucagaaagaaugccgaa

SEQ ID NO: 2504241 - RNA, 19 nt, Homo sapiens
  misc_RNA (1)...(19): siRNA sense strand
caucaucagcagugagaac

SEQ ID NO: 2504242 - RNA, 19 nt, Homo sapiens
  misc_RNA (1)...(19): siRNA sense strand
ggagcuguucagaaagaau

SEQ ID NO: 2504243 - RNA, 19 nt, Homo sapiens
  misc_RNA (1)...(19): siRNA sense strand
agugagaacuggaagccuu

SEQ ID NO: 2504244 - RNA, 19 nt, Homo sapiens
  misc_RNA (1)...(19): siRNA sense strand
guucagaaagaaugccgaa

SEQ ID NO: 2504245 - RNA, 19 nt, Homo sapiens
  misc_RNA (1)...(19): siRNA sense strand
caucaucagcagugagaac

SEQ ID NO: 2504246 - RNA, 19 nt, Homo sapiens
  misc_RNA (1)...(19): siRNA sense strand
ggagcuguucagaaagaau

SEQ ID NO: 2504247 - RNA, 19 nt, Homo sapiens
  misc_RNA (1)...(19): siRNA sense strand
cagauauagcaaugagaaa

SEQ ID NO: 2504248 - RNA, 19 nt, Homo sapiens
  misc_RNA (1)...(19): siRNA sense strand
ggaacaugauggaggcuca

SEQ ID NO: 2504249 - RNA, 19 nt, Homo sapiens
  misc_RNA (1)...(19): siRNA sense strand
aguuuaaggcaguggaaga

SEQ ID NO: 2504250 - RNA, 19 nt, Homo sapiens
  misc_RNA (1)...(19): siRNA sense strand
cguaaagagcugguggaua

SEQ ID NO: 2504251 - RNA, 19 nt, Homo sapiens
  misc_RNA (1)...(19): siRNA sense strand
gcauauuguagguggaagu

SEQ ID NO: 2504252 - RNA, 19 nt, Homo sapiens
  misc_RNA (1)...(19): siRNA sense strand
ggcucaugcuguagaucaa

SEQ ID NO: 2504253 - RNA, 19 nt, Homo sapiens
  misc_RNA (1)...(19): siRNA sense strand
ugggaaggaaccugugaaa

SEQ ID NO: 2504254 - RNA, 19 nt, Homo sapiens
  misc_RNA (1)...(19): siRNA sense strand
uugcagagaagcaggaaga

SEQ ID NO: 2504255 - RNA, 19 nt, Homo sapiens
  misc_RNA (1)...(19): siRNA sense strand
ugguaugaauccaguaaca

SEQ ID NO: 2504256 - RNA, 19 nt, Homo sapiens
  misc_RNA (1)...(19): siRNA sense strand
caaagggacaugaugggaa

SEQ ID NO: 2504257 - RNA, 19 nt, Homo sapiens
  misc_RNA (1)...(19): siRNA sense strand
cgacagagaaaggugaaau

SEQ ID NO: 2504258 - RNA, 19 nt, Homo sapiens
  misc_RNA (1)...(19): siRNA sense strand
ggauaugcuaggugaugau

SEQ ID NO: 2504259 - RNA, 19 nt, Homo sapiens
  misc_RNA (1)...(19): siRNA sense strand
cccaaugaucaauggaauu

SEQ ID NO: 2504260 - RNA, 19 nt, Homo sapiens
  misc_RNA (1)...(19): siRNA sense strand
ggacaugaugggaaggaac

SEQ ID NO: 2504261 - RNA, 19 nt, Homo sapiens
  misc_RNA (1)...(19): siRNA sense strand
uggcuuuguuggaagaaaa

SEQ ID NO: 2504262 - RNA, 19 nt, Homo sapiens
  misc_RNA (1)...(19): siRNA sense strand
uggaagaaaagcucagaua

SEQ ID NO: 2504263 - RNA, 19 nt, Homo sapiens
  misc_RNA (1)...(19): siRNA sense strand
acgugaacccaaugaucaa

SEQ ID NO: 2504264 - RNA, 19 nt, Homo sapiens
  misc_RNA (1)...(19): siRNA sense strand
acccaaugaucaauggaau

SEQ ID NO: 2504265 - RNA, 19 nt, Homo sapiens
  misc_RNA (1)...(19): siRNA sense strand
gggacaugaugggaaggaa

SEQ ID NO: 2504266 - RNA, 19 nt, Homo sapiens
  misc_RNA (1)...(19): siRNA sense strand
guuuaaggcaguggaagaa

SEQ ID NO: 2504267 - RNA, 19 nt, Homo sapiens
  misc_RNA (1)...(19): siRNA sense strand
aggcuuucucauaggcuua

SEQ ID NO: 2504268 - RNA, 19 nt, Homo sapiens
  misc_RNA (1)...(19): siRNA sense strand
ucgugaugccauugccaaa

SEQ ID NO: 2504269 - RNA, 19 nt, Homo sapiens
  misc_RNA (1)...(19): siRNA sense strand
uggccaagcugauccgaca

SEQ ID NO: 2504270 - RNA, 19 nt, Homo sapiens
  misc_RNA (1)...(19): siRNA sense strand
ccucaguucaacauguuaa

SEQ ID NO: 2504271 - RNA, 19 nt, Homo sapiens
  misc_RNA (1)...(19): siRNA sense strand
agagaagcaggaagaugaa

SEQ ID NO: 2504272 - RNA, 19 nt, Homo sapiens
  misc_RNA (1)...(19): siRNA sense strand
ccaaaguggaccaagaucu

SEQ ID NO: 2504273 - RNA, 19 nt, Homo sapiens
  misc_RNA (1)...(19): siRNA sense strand
cugugggaguugaucaaau

SEQ ID NO: 2504274 - RNA, 19 nt, Homo sapiens
  misc_RNA (1)...(19): siRNA sense strand
aagcaggcggagugaggaa

SEQ ID NO: 2504275 - RNA, 19 nt, Homo sapiens
  misc_RNA (1)...(19): siRNA sense strand
gcugaaacacaacggacau

SEQ ID NO: 2504276 - RNA, 19 nt, Homo sapiens
  misc_RNA (1)...(19): siRNA sense strand
cgcuuugcauggaggaaga

SEQ ID NO: 2504277 - RNA, 19 nt, Homo sapiens
  misc_RNA (1)...(19): siRNA sense strand
aggaacggcagcugaaaca

SEQ ID NO: 2504278 - RNA, 19 nt, Homo sapiens
  misc_RNA (1)...(19): siRNA sense strand
cuuucugccaccugaauaa

SEQ ID NO: 2504279 - RNA, 19 nt, Homo sapiens
  misc_RNA (1)...(19): siRNA sense strand
gcuucauagcacugguaaa

SEQ ID NO: 2504280 - RNA, 19 nt, Homo sapiens
  misc_RNA (1)...(19): siRNA sense strand
ccauggagaaggaucgcaa

SEQ ID NO: 2504281 - RNA, 19 nt, Homo sapiens
  misc_RNA (1)...(19): siRNA sense strand
ucaagaagaugcagcucca

SEQ ID NO: 2504282 - RNA, 19 nt, Homo sapiens
  misc_RNA (1)...(19): siRNA sense strand
gggaagaugaaauugagga

SEQ ID NO: 2504283 - RNA, 19 nt, Homo sapiens
  misc_RNA (1)...(19): siRNA sense strand
aaggaaacaugacugggaa

SEQ ID NO: 2504284 - RNA, 19 nt, Homo sapiens
  misc_RNA (1)...(19): siRNA sense strand
caguugucaugguuagcaa

SEQ ID NO: 2504285 - RNA, 19 nt, Homo sapiens
  misc_RNA (1)...(19): siRNA sense strand
ccacauaaaagcuuugcaa

SEQ ID NO: 2504286 - RNA, 19 nt, Homo sapiens
  misc_RNA (1)...(19): siRNA sense strand
guuuaaaggaggacgagga

SEQ ID NO: 2504287 - RNA, 19 nt, Homo sapiens
  misc_RNA (1)...(19): siRNA sense strand
caagauagcaagccggaca

SEQ ID NO: 2504288 - RNA, 19 nt, Homo sapiens
  misc_RNA (1)...(19): siRNA sense strand
uaaaggaggacgaggagga

SEQ ID NO: 2504289 - RNA, 19 nt, Homo sapiens
  misc_RNA (1)...(19): siRNA sense strand
aaacuggagcacagagaca

SEQ ID NO: 2504290 - RNA, 19 nt, Homo sapiens
  misc_RNA (1)...(19): siRNA sense strand
acgaggaggagguugguga

SEQ ID NO: 2504291 - RNA, 19 nt, Homo sapiens
  misc_RNA (1)...(19): siRNA sense strand
ugaacaaccugauggccca

SEQ ID NO: 2504292 - RNA, 19 nt, Homo sapiens
  misc_RNA (1)...(19): siRNA sense strand
ggacaaggauauggaggcu

SEQ ID NO: 2504293 - RNA, 19 nt, Homo sapiens
  misc_RNA (1)...(19): siRNA sense strand
gaaagaugaaacugcgguu

SEQ ID NO: 2504294 - RNA, 19 nt, Homo sapiens
  misc_RNA (1)...(19): siRNA sense strand
agcugaaggucgacuaaaa

SEQ ID NO: 2504295 - RNA, 19 nt, Homo sapiens
  misc_RNA (1)...(19): siRNA sense strand
gagaaagaguugaagggaa

SEQ ID NO: 2504296 - RNA, 19 nt, Homo sapiens
  misc_RNA (1)...(19): siRNA sense strand
aauuggaagaagagaagaa

SEQ ID NO: 2504297 - RNA, 19 nt, Homo sapiens
  misc_RNA (1)...(19): siRNA sense strand
gggccugucugaaggguca

SEQ ID NO: 2504298 - RNA, 19 nt, Homo sapiens
  misc_RNA (1)...(19): siRNA sense strand
gcgcgagacuugcuggaca

SEQ ID NO: 2504299 - RNA, 19 nt, Homo sapiens
  misc_RNA (1)...(19): siRNA sense strand
agcugaaauuggaagaaga

SEQ ID NO: 2504300 - RNA, 19 nt, Homo sapiens
  misc_RNA (1)...(19): siRNA sense strand
gcuacaaagccaugaagcu

SEQ ID NO: 2504301 - RNA, 19 nt, Homo sapiens
  misc_RNA (1)...(19): siRNA sense strand
aaguggagaaagaguugaa

SEQ ID NO: 2504302 - RNA, 19 nt, Homo sapiens
  misc_RNA (1)...(19): siRNA sense strand
agugguagacagagaaaua

SEQ ID NO: 2504303 - RNA, 19 nt, Homo sapiens
  misc_RNA (1)...(19): siRNA sense strand
gcuuaguaucggaguuaaa

SEQ ID NO: 2504304 - RNA, 19 nt, Homo sapiens
  misc_RNA (1)...(19): siRNA sense strand
gagucaaaguuauggacau

SEQ ID NO: 2504305 - RNA, 19 nt, Homo sapiens
  misc_RNA (1)...(19): siRNA sense strand
ccacagaugcagaugaaga

SEQ ID NO: 2504306 - RNA, 19 nt, Homo sapiens
  misc_RNA (1)...(19): siRNA sense strand
gcaugaugguucugggcau

SEQ ID NO: 2504307 - RNA, 19 nt, Homo sapiens
  misc_RNA (1)...(19): siRNA sense strand
cuucagugguagacagaga

SEQ ID NO: 2504308 - RNA, 19 nt, Homo sapiens
  misc_RNA (1)...(19): siRNA sense strand
uugucaagaugcuggauua

SEQ ID NO: 2504309 - RNA, 19 nt, Homo sapiens
  misc_RNA (1)...(19): siRNA sense strand
gugccugacaugagcaaua

SEQ ID NO: 2504310 - RNA, 19 nt, Homo sapiens
  misc_RNA (1)...(19): siRNA sense strand
cugcaacagaugucagaua

SEQ ID NO: 2504311 - RNA, 19 nt, Homo sapiens
  misc_RNA (1)...(19): siRNA sense strand
cugcuuaaacacagaaauu

SEQ ID NO: 2504312 - RNA, 19 nt, Homo sapiens
  misc_RNA (1)...(19): siRNA sense strand
gcuuaaacacagaaauuga

SEQ ID NO: 2504313 - RNA, 19 nt, Homo sapiens
  misc_RNA (1)...(19): siRNA sense strand
gaguaacacgauacaguaa

SEQ ID NO: 2504314 - RNA, 19 nt, Homo sapiens
  misc_RNA (1)...(19): siRNA sense strand
uuguugaggugaaggaauu

SEQ ID NO: 2504315 - RNA, 19 nt, Homo sapiens
  misc_RNA (1)...(19): siRNA sense strand
aggacaacucgaagaggaa

SEQ ID NO: 2504316 - RNA, 19 nt, Homo sapiens
  misc_RNA (1)...(19): siRNA sense strand
ggacauaacuggugacacg

SEQ ID NO: 2504317 - RNA, 19 nt, Homo sapiens
  misc_RNA (1)...(19): siRNA sense strand
agccaguauugaagagaau

SEQ ID NO: 2504318 - RNA, 19 nt, Homo sapiens
  misc_RNA (1)...(19): siRNA sense strand
gcaucuacacagaggacau

SEQ ID NO: 2504319 - RNA, 19 nt, Homo sapiens
  misc_RNA (1)...(19): siRNA sense strand
agaugaagaugaaggucga

SEQ ID NO: 2504320 - RNA, 19 nt, Homo sapiens
  misc_RNA (1)...(19): siRNA sense strand
ccucugaaaucuacaccaa

SEQ ID NO: 2504321 - RNA, 19 nt, Homo sapiens
  misc_RNA (1)...(19): siRNA sense strand
ggaaggagguguaucggga

SEQ ID NO: 2504322 - RNA, 19 nt, Homo sapiens
  misc_RNA (1)...(19): siRNA sense strand
gucgagaaggagaggacaa

SEQ ID NO: 2504323 - RNA, 19 nt, Homo sapiens
  misc_RNA (1)...(19): siRNA sense strand
gaauagguacacuggagaa

SEQ ID NO: 2504324 - RNA, 19 nt, Homo sapiens
  misc_RNA (1)...(19): siRNA sense strand
cagauauaucauagggcau

SEQ ID NO: 2504325 - RNA, 19 nt, Homo sapiens
  misc_RNA (1)...(19): siRNA sense strand
agcaauugaucuugaugaa

SEQ ID NO: 2504326 - RNA, 19 nt, Homo sapiens
  misc_RNA (1)...(19): siRNA sense strand
gugaugcagucuuggagaa

SEQ ID NO: 2504327 - RNA, 19 nt, Homo sapiens
  misc_RNA (1)...(19): siRNA sense strand
aguugaauuccaagaagaa

SEQ ID NO: 2504328 - RNA, 19 nt, Homo sapiens
  misc_RNA (1)...(19): siRNA sense strand
ugauggaaguaaacaguga

SEQ ID NO: 2504329 - RNA, 19 nt, Homo sapiens
  misc_RNA (1)...(19): siRNA sense strand
gguuuuaucuccaggauuu

SEQ ID NO: 2504330 - RNA, 19 nt, Homo sapiens
  misc_RNA (1)...(19): siRNA sense strand
cggauggauuccucugaaa

SEQ ID NO: 2504331 - RNA, 19 nt, Homo sapiens
  misc_RNA (1)...(19): siRNA sense strand
ugguggugauggaaguaaa

SEQ ID NO: 2504332 - RNA, 19 nt, Homo sapiens
  misc_RNA (1)...(19): siRNA sense strand
ccucagaaguugaauucca

SEQ ID NO: 2504333 - RNA, 19 nt, Homo sapiens
  misc_RNA (1)...(19): siRNA sense strand
acagagagcaacacaguau

SEQ ID NO: 2504334 - RNA, 19 nt, Homo sapiens
  misc_RNA (1)...(19): siRNA sense strand
agaaaauagugaugccaau

SEQ ID NO: 2504335 - RNA, 19 nt, Homo sapiens
  misc_RNA (1)...(19): siRNA sense strand
gaggacaacucgaagagga

SEQ ID NO: 2504336 - RNA, 19 nt, Homo sapiens
  misc_RNA (1)...(19): siRNA sense strand
ggauauacacagcagagau

SEQ ID NO: 2504337 - RNA, 19 nt, Homo sapiens
  misc_RNA (1)...(19): siRNA sense strand
guaguaaaguuaugugcca

SEQ ID NO: 2504338 - RNA, 19 nt, Homo sapiens
  misc_RNA (1)...(19): siRNA sense strand
cagccaguauugaagagaa

SEQ ID NO: 2504339 - RNA, 19 nt, Homo sapiens
  misc_RNA (1)...(19): siRNA sense strand
agaugauggcucuggaaaa

SEQ ID NO: 2504340 - RNA, 19 nt, Homo sapiens
  misc_RNA (1)...(19): siRNA sense strand
gcgaaucgaaccagaagau

SEQ ID NO: 2504341 - RNA, 19 nt, Homo sapiens
  misc_RNA (1)...(19): siRNA sense strand
ggaacugauacgauuacaa

SEQ ID NO: 2504342 - RNA, 19 nt, Homo sapiens
  misc_RNA (1)...(19): siRNA sense strand
cagcuuaguaucggaguua

SEQ ID NO: 2504343 - RNA, 19 nt, Homo sapiens
  misc_RNA (1)...(19): siRNA sense strand
uuucuuggacagagagcaa

SEQ ID NO: 2504344 - RNA, 19 nt, Homo sapiens
  misc_RNA (1)...(19): siRNA sense strand
gggacuacgcugacgcaga

SEQ ID NO: 2504345 - RNA, 19 nt, Homo sapiens
  misc_RNA (1)...(19): siRNA sense strand
ugaaaauggcacuacaaaa

SEQ ID NO: 2504346 - RNA, 19 nt, Homo sapiens
  misc_RNA (1)...(19): siRNA sense strand
uuuaguagggccagaaauu

SEQ ID NO: 2504347 - RNA, 19 nt, Homo sapiens
  misc_RNA (1)...(19): siRNA sense strand
ggacauaaaugauaacgcu

SEQ ID NO: 2504348 - RNA, 19 nt, Homo sapiens
  misc_RNA (1)...(19): siRNA sense strand
acauauacagccauagauu

SEQ ID NO: 2504349 - RNA, 19 nt, Homo sapiens
  misc_RNA (1)...(19): siRNA sense strand
gaugcaggcagcugguuaa

SEQ ID NO: 2504350 - RNA, 19 nt, Homo sapiens
  misc_RNA (1)...(19): siRNA sense strand
aaguugaauuccaagaaga

SEQ ID NO: 2504351 - RNA, 19 nt, Homo sapiens
  misc_RNA (1)...(19): siRNA sense strand
gagcaauaguagcacgacu

SEQ ID NO: 2504352 - RNA, 19 nt, Homo sapiens
  misc_RNA (1)...(19): siRNA sense strand
augaagaaggcacugauaa

SEQ ID NO: 2504353 - RNA, 19 nt, Homo sapiens
  misc_RNA (1)...(19): siRNA sense strand
gcaaacagagacagccaga

SEQ ID NO: 2504354 - RNA, 19 nt, Homo sapiens
  misc_RNA (1)...(19): siRNA sense strand
agaugaaagcugcauggaa

SEQ ID NO: 2504355 - RNA, 19 nt, Homo sapiens
  misc_RNA (1)...(19): siRNA sense strand
ggagaggacaacucgaaga

SEQ ID NO: 2504356 - RNA, 19 nt, Homo sapiens
  misc_RNA (1)...(19): siRNA sense strand
gauacgauuacaagcaauu

SEQ ID NO: 2504357 - RNA, 19 nt, Homo sapiens
  misc_RNA (1)...(19): siRNA sense strand
cucuggaaaugaugggaau

SEQ ID NO: 2504358 - RNA, 19 nt, Homo sapiens
  misc_RNA (1)...(19): siRNA sense strand
gcggagaaggagugaugca

SEQ ID NO: 2504359 - RNA, 19 nt, Homo sapiens
  misc_RNA (1)...(19): siRNA sense strand
uuauugugacugagacuua

SEQ ID NO: 2504360 - RNA, 19 nt, Homo sapiens
  misc_RNA (1)...(19): siRNA sense strand
ggcaagagccggaaggaga

SEQ ID NO: 2504361 - RNA, 19 nt, Homo sapiens
  misc_RNA (1)...(19): siRNA sense strand
gggcacuggugaagcgcaa

SEQ ID NO: 2504362 - RNA, 19 nt, Homo sapiens
  misc_RNA (1)...(19): siRNA sense strand
gauaagaagacucgccgaa

SEQ ID NO: 2504363 - RNA, 19 nt, Homo sapiens
  misc_RNA (1)...(19): siRNA sense strand
cugccgagaaggagcgcaa

SEQ ID NO: 2504364 - RNA, 19 nt, Homo sapiens
  misc_RNA (1)...(19): siRNA sense strand
gaagcaaacuaaagagccu

SEQ ID NO: 2504365 - RNA, 19 nt, Homo sapiens
  misc_RNA (1)...(19): siRNA sense strand
ggagaaaggcagcaaccga

SEQ ID NO: 2504366 - RNA, 19 nt, Homo sapiens
  misc_RNA (1)...(19): siRNA sense strand
cacaggaggcacugagcaa

SEQ ID NO: 2504367 - RNA, 19 nt, Homo sapiens
  misc_RNA (1)...(19): siRNA sense strand
aagcgcaaguugaaggaga

SEQ ID NO: 2504368 - RNA, 19 nt, Homo sapiens
  misc_RNA (1)...(19): siRNA sense strand
uggugaagcgcaaguugaa

SEQ ID NO: 2504369 - RNA, 19 nt, Homo sapiens
  misc_RNA (1)...(19): siRNA sense strand
cgcuuaaagaggagaguua

SEQ ID NO: 2504370 - RNA, 19 nt, Homo sapiens
  misc_RNA (1)...(19): siRNA sense strand
gcuucauagcguugguaaa

SEQ ID NO: 2504371 - RNA, 19 nt, Homo sapiens
  misc_RNA (1)...(19): siRNA sense strand
gagugggugaagagacaaa

SEQ ID NO: 2504372 - RNA, 19 nt, Homo sapiens
  misc_RNA (1)...(19): siRNA sense strand
ggggaaacaagaagcuaaa

SEQ ID NO: 2504373 - RNA, 19 nt, Homo sapiens
  misc_RNA (1)...(19): siRNA sense strand
agaugcagcuccauggcaa

SEQ ID NO: 2504374 - RNA, 19 nt, Homo sapiens
  misc_RNA (1)...(19): siRNA sense strand
ucaagaagaugcagcucca

SEQ ID NO: 2504375 - RNA, 19 nt, Homo sapiens
  misc_RNA (1)...(19): siRNA sense strand
acaagaagcuaaagcagac

SEQ ID NO: 2504376 - RNA, 19 nt, Homo sapiens
  misc_RNA (1)...(19): siRNA sense strand
gcuuauaauaucugggcag

SEQ ID NO: 2504377 - RNA, 19 nt, Homo sapiens
  misc_RNA (1)...(19): siRNA sense strand
gcuccauggcaaaggaucu

SEQ ID NO: 2504378 - RNA, 19 nt, Homo sapiens
  misc_RNA (1)...(19): siRNA sense strand
gaugcagcuccauggcaaa

SEQ ID NO: 2504379 - RNA, 19 nt, Homo sapiens
  misc_RNA (1)...(19): siRNA sense strand
ucacagauguuaaggcuca

SEQ ID NO: 2504380 - RNA, 19 nt, Homo sapiens
  misc_RNA (1)...(19): siRNA sense strand
ggaagagcacacagagcga

SEQ ID NO: 2504381 - RNA, 19 nt, Homo sapiens
  misc_RNA (1)...(19): siRNA sense strand
ccaacaacagugacggaau

SEQ ID NO: 2504382 - RNA, 19 nt, Homo sapiens
  misc_RNA (1)...(19): siRNA sense strand
uuuacgaaauaaugggcaa

SEQ ID NO: 2504383 - RNA, 19 nt, Homo sapiens
  misc_RNA (1)...(19): siRNA sense strand
augaagaaggugaugaaaa

SEQ ID NO: 2504384 - RNA, 19 nt, Homo sapiens
  misc_RNA (1)...(19): siRNA sense strand
aaguagaugaagaagguga

SEQ ID NO: 2504385 - RNA, 19 nt, Homo sapiens
  misc_RNA (1)...(19): siRNA sense strand
accaaguucaugagacaaa

SEQ ID NO: 2504386 - RNA, 19 nt, Homo sapiens
  misc_RNA (1)...(19): siRNA sense strand
aguuggaugugcugugcaa

SEQ ID NO: 2504387 - RNA, 19 nt, Homo sapiens
  misc_RNA (1)...(19): siRNA sense strand
cuacaugacaagauggcga

SEQ ID NO: 2504388 - RNA, 19 nt, Homo sapiens
  misc_RNA (1)...(19): siRNA sense strand
cugacaaaccgaaaguaga

SEQ ID NO: 2504389 - RNA, 19 nt, Homo sapiens
  misc_RNA (1)...(19): siRNA sense strand
accgaaaguagaugaagaa

SEQ ID NO: 2504390 - RNA, 19 nt, Homo sapiens
  misc_RNA (1)...(19): siRNA sense strand
ggacaauguaguaaagggu

SEQ ID NO: 2504391 - RNA, 19 nt, Homo sapiens
  misc_RNA (1)...(19): siRNA sense strand
caaaggaaacacuugguga

SEQ ID NO: 2504392 - RNA, 19 nt, Homo sapiens
  misc_RNA (1)...(19): siRNA sense strand
cccuggacuacgagaacaa

SEQ ID NO: 2504393 - RNA, 19 nt, Homo sapiens
  misc_RNA (1)...(19): siRNA sense strand
acuacgagaacaagaacuu

SEQ ID NO: 2504394 - RNA, 19 nt, Homo sapiens
  misc_RNA (1)...(19): siRNA sense strand
aaauguugagguuggacaa

SEQ ID NO: 2504395 - RNA, 19 nt, Homo sapiens
  misc_RNA (1)...(19): siRNA sense strand
agaaaauggacaagaugau

SEQ ID NO: 2504396 - RNA, 19 nt, Homo sapiens
  misc_RNA (1)...(19): siRNA sense strand
ccuuacauuaccugcuaua

SEQ ID NO: 2504397 - RNA, 19 nt, Homo sapiens
  misc_RNA (1)...(19): siRNA sense strand
aggcagagaaagagcugaa

SEQ ID NO: 2504398 - RNA, 19 nt, Homo sapiens
  misc_RNA (1)...(19): siRNA sense strand
cagaagagcaggagagcac

SEQ ID NO: 2504399 - RNA, 19 nt, Homo sapiens
  misc_RNA (1)...(19): siRNA sense strand
caagaggagcugagagcga

SEQ ID NO: 2504400 - RNA, 19 nt, Homo sapiens
  misc_RNA (1)...(19): siRNA sense strand
ugaagaaagcucagaggca

SEQ ID NO: 2504401 - RNA, 19 nt, Homo sapiens
  misc_RNA (1)...(19): siRNA sense strand
gagcugagagcgaagggua

SEQ ID NO: 2504402 - RNA, 19 nt, Homo sapiens
  misc_RNA (1)...(19): siRNA sense strand
gggaggaggcagaagagca

SEQ ID NO: 2504403 - RNA, 19 nt, Homo sapiens
  misc_RNA (1)...(19): siRNA sense strand
guccaugaccacagggaga

SEQ ID NO: 2504404 - RNA, 19 nt, Homo sapiens
  misc_RNA (1)...(19): siRNA sense strand
gcaacaaggugcugacccu

SEQ ID NO: 2504405 - RNA, 19 nt, Homo sapiens
  misc_RNA (1)...(19): siRNA sense strand
augggcagcuggugggcaa

SEQ ID NO: 2504406 - RNA, 19 nt, Homo sapiens
  misc_RNA (1)...(19): siRNA sense strand
ugugggacuuccugagcaa

SEQ ID NO: 2504407 - RNA, 19 nt, Homo sapiens
  misc_RNA (1)...(19): siRNA sense strand
ccacaagaccagcugcaca

SEQ ID NO: 2504408 - RNA, 19 nt, Homo sapiens
  misc_RNA (1)...(19): siRNA sense strand
cugcaagaacaaagugacu

SEQ ID NO: 2504409 - RNA, 19 nt, Homo sapiens
  misc_RNA (1)...(19): siRNA sense strand
uguccaagcccguguggga

SEQ ID NO: 2504410 - RNA, 19 nt, Homo sapiens
  misc_RNA (1)...(19): siRNA sense strand
uaaagaagcucaaggcaga

SEQ ID NO: 2504411 - RNA, 19 nt, Homo sapiens
  misc_RNA (1)...(19): siRNA sense strand
ccggaaaucuucaaggaga

SEQ ID NO: 2504412 - RNA, 19 nt, Homo sapiens
  misc_RNA (1)...(19): siRNA sense strand
ccagaaaggugaaggagac

SEQ ID NO: 2504413 - RNA, 19 nt, Homo sapiens
  misc_RNA (1)...(19): siRNA sense strand
gguccgaguagaagccaaa

SEQ ID NO: 2504414 - RNA, 19 nt, Homo sapiens
  misc_RNA (1)...(19): siRNA sense strand
gugggaagcugcugggcau

SEQ ID NO: 2504415 - RNA, 19 nt, Homo sapiens
  misc_RNA (1)...(19): siRNA sense strand
agaaaggauaucauggauu

SEQ ID NO: 2504416 - RNA, 19 nt, Homo sapiens
  misc_RNA (1)...(19): siRNA sense strand
gccagaaaggugaaggaga

SEQ ID NO: 2504417 - RNA, 19 nt, Homo sapiens
  misc_RNA (1)...(19): siRNA sense strand
aacaaaucauggaagacaa

SEQ ID NO: 2504418 - RNA, 19 nt, Homo sapiens
  misc_RNA (1)...(19): siRNA sense strand
auggaagacaagagauaca

SEQ ID NO: 2504419 - RNA, 19 nt, Homo sapiens
  misc_RNA (1)...(19): siRNA sense strand
cgacgcaccucaagcccua

SEQ ID NO: 2504420 - RNA, 19 nt, Homo sapiens
  misc_RNA (1)...(19): siRNA sense strand
agcucaaggcagagacauu

SEQ ID NO: 2504421 - RNA, 19 nt, Homo sapiens
  misc_RNA (1)...(19): siRNA sense strand
gggccagaaaggugaagga

SEQ ID NO: 2504422 - RNA, 19 nt, Homo sapiens
  misc_RNA (1)...(19): siRNA sense strand
ggaagaaacuuuagguggc

SEQ ID NO: 2504423 - RNA, 19 nt, Homo sapiens
  misc_RNA (1)...(19): siRNA sense strand
gcagaggaaaauuugaaaa

SEQ ID NO: 2504424 - RNA, 19 nt, Homo sapiens
  misc_RNA (1)...(19): siRNA sense strand
uuuagguggcagaggaaaa

SEQ ID NO: 2504425 - RNA, 19 nt, Homo sapiens
  misc_RNA (1)...(19): siRNA sense strand
uggagaacuucauugccaa

SEQ ID NO: 2504426 - RNA, 19 nt, Homo sapiens
  misc_RNA (1)...(19): siRNA sense strand
cugccaaaauccugacaau

SEQ ID NO: 2504427 - RNA, 19 nt, Homo sapiens
  misc_RNA (1)...(19): siRNA sense strand
acuuuagguggcagaggaa

SEQ ID NO: 2504428 - RNA, 19 nt, Homo sapiens
  misc_RNA (1)...(19): siRNA sense strand
cuauuaaaccaguaccaca

SEQ ID NO: 2504429 - RNA, 19 nt, Homo sapiens
  misc_RNA (1)...(19): siRNA sense strand
agaaugagaacuucgacau

SEQ ID NO: 2504430 - RNA, 19 nt, Homo sapiens
  misc_RNA (1)...(19): siRNA sense strand
acacagaggaaguggucuu

SEQ ID NO: 2504431 - RNA, 19 nt, Homo sapiens
  misc_RNA (1)...(19): siRNA sense strand
caucaagacuggaggcuac

SEQ ID NO: 2504432 - RNA, 19 nt, Homo sapiens
  misc_RNA (1)...(19): siRNA sense strand
ggaagaacaucacgggcca

SEQ ID NO: 2504433 - RNA, 19 nt, Homo sapiens
  misc_RNA (1)...(19): siRNA sense strand
gggcauggaccaaagacga

SEQ ID NO: 2504434 - RNA, 19 nt, Homo sapiens
  misc_RNA (1)...(19): siRNA sense strand
gugcuggagaaguggaaga

SEQ ID NO: 2504435 - RNA, 19 nt, Homo sapiens
  misc_RNA (1)...(19): siRNA sense strand
ccugcgagacacagaggaa

SEQ ID NO: 2504436 - RNA, 19 nt, Homo sapiens
  misc_RNA (1)...(19): siRNA sense strand
uggagaaguggaagaacau

SEQ ID NO: 2504437 - RNA, 19 nt, Homo sapiens
  misc_RNA (1)...(19): siRNA sense strand
ccauccacgcagagggaga

SEQ ID NO: 2504438 - RNA, 19 nt, Homo sapiens
  misc_RNA (1)...(19): siRNA sense strand
caguagaggaaccggcaga

SEQ ID NO: 2504439 - RNA, 19 nt, Homo sapiens
  misc_RNA (1)...(19): siRNA sense strand
cagaaaacccacagaggga

SEQ ID NO: 2504440 - RNA, 19 nt, Homo sapiens
  misc_RNA (1)...(19): siRNA sense strand
ccaaagacgacgugauccu

SEQ ID NO: 2504441 - RNA, 19 nt, Homo sapiens
  misc_RNA (1)...(19): siRNA sense strand
acacccugcuggagcggua

SEQ ID NO: 2504442 - RNA, 19 nt, Homo sapiens
  misc_RNA (1)...(19): siRNA sense strand
ccucaguggacaucaucaa

SEQ ID NO: 2504443 - RNA, 19 nt, Homo sapiens
  misc_RNA (1)...(19): siRNA sense strand
cagaagaaacuaagagugc

SEQ ID NO: 2504444 - RNA, 19 nt, Homo sapiens
  misc_RNA (1)...(19): siRNA sense strand
gcucaaagagugggccaga

SEQ ID NO: 2504445 - RNA, 19 nt, Homo sapiens
  misc_RNA (1)...(19): siRNA sense strand
caggagaucugcaggcucu

SEQ ID NO: 2504446 - RNA, 19 nt, Homo sapiens
  misc_RNA (1)...(19): siRNA sense strand
cgcggaaccagaugggcaa

SEQ ID NO: 2504447 - RNA, 19 nt, Homo sapiens
  misc_RNA (1)...(19): siRNA sense strand
gaaaauaccguaagggcaa

SEQ ID NO: 2504448 - RNA, 19 nt, Homo sapiens
  misc_RNA (1)...(19): siRNA sense strand
ccguaagggcaaccugaaa

SEQ ID NO: 2504449 - RNA, 19 nt, Homo sapiens
  misc_RNA (1)...(19): siRNA sense strand
gccgcaaauuaaagaguca

SEQ ID NO: 2504450 - RNA, 19 nt, Homo sapiens
  misc_RNA (1)...(19): siRNA sense strand
aauuaaagagucauggcau

SEQ ID NO: 2504451 - RNA, 19 nt, Homo sapiens
  misc_RNA (1)...(19): siRNA sense strand
caaccugaaaaguaggaaa

SEQ ID NO: 2504452 - RNA, 19 nt, Homo sapiens
  misc_RNA (1)...(19): siRNA sense strand
cugcagaugaugagcgaaa

SEQ ID NO: 2504453 - RNA, 19 nt, Homo sapiens
  misc_RNA (1)...(19): siRNA sense strand
agaaaugacuauaugggaa

SEQ ID NO: 2504454 - RNA, 19 nt, Homo sapiens
  misc_RNA (1)...(19): siRNA sense strand
gaacauaugcagaagaaaa

SEQ ID NO: 2504455 - RNA, 19 nt, Homo sapiens
  misc_RNA (1)...(19): siRNA sense strand
cuuggaaaguggagaauau

SEQ ID NO: 2504456 - RNA, 19 nt, Homo sapiens
  misc_RNA (1)...(19): siRNA sense strand
aagaagaacaggaggugaa

SEQ ID NO: 2504457 - RNA, 19 nt, Homo sapiens
  misc_RNA (1)...(19): siRNA sense strand
gcuuagagaaugucauaaa

SEQ ID NO: 2504458 - RNA, 19 nt, Homo sapiens
  misc_RNA (1)...(19): siRNA sense strand
gguccugguugaagguaaa

SEQ ID NO: 2504459 - RNA, 19 nt, Homo sapiens
  misc_RNA (1)...(19): siRNA sense strand
aggaagauauaaagaguca

SEQ ID NO: 2504460 - RNA, 19 nt, Homo sapiens
  misc_RNA (1)...(19): siRNA sense strand
cuauggaauuugugaagua

SEQ ID NO: 2504461 - RNA, 19 nt, Homo sapiens
  misc_RNA (1)...(19): siRNA sense strand
uagagguacuaguggaaua

SEQ ID NO: 2504462 - RNA, 19 nt, Homo sapiens
  misc_RNA (1)...(19): siRNA sense strand
ggagaaaacaagaaaacaa

SEQ ID NO: 2504463 - RNA, 19 nt, Homo sapiens
  misc_RNA (1)...(19): siRNA sense strand
acaaaguccuacagaguau

SEQ ID NO: 2504464 - RNA, 19 nt, Homo sapiens
  misc_RNA (1)...(19): siRNA sense strand
cuauaugggaagaggaaaa

SEQ ID NO: 2504465 - RNA, 19 nt, Homo sapiens
  misc_RNA (1)...(19): siRNA sense strand
gguacugagaggauggaaa

SEQ ID NO: 2504466 - RNA, 19 nt, Homo sapiens
  misc_RNA (1)...(19): siRNA sense strand
caauauggacagaaagauu

SEQ ID NO: 2504467 - RNA, 19 nt, Homo sapiens
  misc_RNA (1)...(19): siRNA sense strand
ccaaagaagaggucacaau

SEQ ID NO: 2504468 - RNA, 19 nt, Homo sapiens
  misc_RNA (1)...(19): siRNA sense strand
uuucaaaaguggagagaca

SEQ ID NO: 2504469 - RNA, 19 nt, Homo sapiens
  misc_RNA (1)...(19): siRNA sense strand
aauucaacuuccaggguua

SEQ ID NO: 2504470 - RNA, 19 nt, Homo sapiens
  misc_RNA (1)...(19): siRNA sense strand
ccgaagacagguugggcaa

SEQ ID NO: 2504471 - RNA, 19 nt, Homo sapiens
  misc_RNA (1)...(19): siRNA sense strand
gguugaagguaaagccaga

SEQ ID NO: 2504472 - RNA, 19 nt, Homo sapiens
  misc_RNA (1)...(19): siRNA sense strand
uggaagagcagguacuaua

SEQ ID NO: 2504473 - RNA, 19 nt, Homo sapiens
  misc_RNA (1)...(19): siRNA sense strand
cuacaaaagaccaggauuu

SEQ ID NO: 2504474 - RNA, 19 nt, Homo sapiens
  misc_RNA (1)...(19): siRNA sense strand
uguuaagugcagagaagaa

SEQ ID NO: 2504475 - RNA, 19 nt, Homo sapiens
  misc_RNA (1)...(19): siRNA sense strand
ugaaacuggcuuagagaau

SEQ ID NO: 2504476 - RNA, 19 nt, Homo sapiens
  misc_RNA (1)...(19): siRNA sense strand
aagacaugcuaaaggagaa

SEQ ID NO: 2504477 - RNA, 19 nt, Homo sapiens
  misc_RNA (1)...(19): siRNA sense strand
cguugaaugaagagguaau

SEQ ID NO: 2504478 - RNA, 19 nt, Homo sapiens
  misc_RNA (1)...(19): siRNA sense strand
cccacaauauggacagaaa

SEQ ID NO: 2504479 - RNA, 19 nt, Homo sapiens
  misc_RNA (1)...(19): siRNA sense strand
gcaucaaggaaaugguuau

SEQ ID NO: 2504480 - RNA, 19 nt, Homo sapiens
  misc_RNA (1)...(19): siRNA sense strand
gaauauugggauacuguaa

SEQ ID NO: 2504481 - RNA, 19 nt, Homo sapiens
  misc_RNA (1)...(19): siRNA sense strand
cugcauuauagaagagauu

SEQ ID NO: 2504482 - RNA, 19 nt, Homo sapiens
  misc_RNA (1)...(19): siRNA sense strand
gaagaaaaggagaaaacaa

SEQ ID NO: 2504483 - RNA, 19 nt, Homo sapiens
  misc_RNA (1)...(19): siRNA sense strand
acacagugccauugccaaa

SEQ ID NO: 2504484 - RNA, 19 nt, Homo sapiens
  misc_RNA (1)...(19): siRNA sense strand
cugaacauaugcagaagaa

SEQ ID NO: 2504485 - RNA, 19 nt, Homo sapiens
  misc_RNA (1)...(19): siRNA sense strand
caaauugggaagaguauau

SEQ ID NO: 2504486 - RNA, 19 nt, Homo sapiens
  misc_RNA (1)...(19): siRNA sense strand
uagcaagacaguaguacaa

SEQ ID NO: 2504487 - RNA, 19 nt, Homo sapiens
  misc_RNA (1)...(19): siRNA sense strand
cugaagaagaaguaacauu

SEQ ID NO: 2504488 - RNA, 19 nt, Homo sapiens
  misc_RNA (1)...(19): siRNA sense strand
gcguugagucuucgauuaa

SEQ ID NO: 2504489 - RNA, 19 nt, Homo sapiens
  misc_RNA (1)...(19): siRNA sense strand
ggccagaaggacaugauaa

SEQ ID NO: 2504490 - RNA, 19 nt, Homo sapiens
  misc_RNA (1)...(19): siRNA sense strand
gcagcauaauggucugaaa

SEQ ID NO: 2504491 - RNA, 19 nt, Homo sapiens
  misc_RNA (1)...(19): siRNA sense strand
cugaguacuuggacaggaa

SEQ ID NO: 2504492 - RNA, 19 nt, Homo sapiens
  misc_RNA (1)...(19): siRNA sense strand
gaggucacaaugagagaaa

SEQ ID NO: 2504493 - RNA, 19 nt, Homo sapiens
  misc_RNA (1)...(19): siRNA sense strand
aguauuacacucagagauu

SEQ ID NO: 2504494 - RNA, 19 nt, Homo sapiens
  misc_RNA (1)...(19): siRNA sense strand
acucagagauuauggcuca

SEQ ID NO: 2504495 - RNA, 19 nt, Homo sapiens
  misc_RNA (1)...(19): siRNA sense strand
aaacaaaguccuacagagu

SEQ ID NO: 2504496 - RNA, 19 nt, Homo sapiens
  misc_RNA (1)...(19): siRNA sense strand
cagaaaugccugggaaaga

SEQ ID NO: 2504497 - RNA, 19 nt, Homo sapiens
  misc_RNA (1)...(19): siRNA sense strand
cauaauggucugaaagcau

SEQ ID NO: 2504498 - RNA, 19 nt, Homo sapiens
  misc_RNA (1)...(19): siRNA sense strand
agacacagaggcauggaaa

SEQ ID NO: 2504499 - RNA, 19 nt, Homo sapiens
  misc_RNA (1)...(19): siRNA sense strand
guacugagaggauggaaau

SEQ ID NO: 2504500 - RNA, 19 nt, Homo sapiens
  misc_RNA (1)...(19): siRNA sense strand
caucagaaaugccugggaa

SEQ ID NO: 2504501 - RNA, 19 nt, Homo sapiens
  misc_RNA (1)...(19): siRNA sense strand
ggccagaauaucagguuau

SEQ ID NO: 2504502 - RNA, 19 nt, Homo sapiens
  misc_RNA (1)...(19): siRNA sense strand
uugaaaaucuauugggaga

SEQ ID NO: 2504503 - RNA, 19 nt, Homo sapiens
  misc_RNA (1)...(19): siRNA sense strand
gacuauaugggaagaggaa

SEQ ID NO: 2504504 - RNA, 19 nt, Homo sapiens
  misc_RNA (1)...(19): siRNA sense strand
cgucuugguuccuggauga

SEQ ID NO: 2504505 - RNA, 19 nt, Homo sapiens
  misc_RNA (1)...(19): siRNA sense strand
ccaauaaguucuuguuacu

SEQ ID NO: 2504506 - RNA, 19 nt, Homo sapiens
  misc_RNA (1)...(19): siRNA sense strand
caguaauaugugaccuaaa

SEQ ID NO: 2504507 - RNA, 19 nt, Homo sapiens
  misc_RNA (1)...(19): siRNA sense strand
gugcagagaagaaauguau

SEQ ID NO: 2504508 - RNA, 19 nt, Homo sapiens
  misc_RNA (1)...(19): siRNA sense strand
ucaucuauauuguggguga

SEQ ID NO: 2504509 - RNA, 19 nt, Homo sapiens
  misc_RNA (1)...(19): siRNA sense strand
gccaggaagcaaaggaaga

SEQ ID NO: 2504510 - RNA, 19 nt, Homo sapiens
  misc_RNA (1)...(19): siRNA sense strand
gcgcauucauguugaccuu

SEQ ID NO: 2504511 - RNA, 19 nt, Homo sapiens
  misc_RNA (1)...(19): siRNA sense strand
gagacuaaucagauguuau

SEQ ID NO: 2504512 - RNA, 19 nt, Homo sapiens
  misc_RNA (1)...(19): siRNA sense strand
aaacaacugcagaaagaau

SEQ ID NO: 2504513 - RNA, 19 nt, Homo sapiens
  misc_RNA (1)...(19): siRNA sense strand
cgaggaggcuggagguacu

SEQ ID NO: 2504514 - RNA, 19 nt, Homo sapiens
  misc_RNA (1)...(19): siRNA sense strand
agaaauaguuugauagagc

SEQ ID NO: 2504515 - RNA, 19 nt, Homo sapiens
  misc_RNA (1)...(19): siRNA sense strand
gcaggaggaaaguguacaa

SEQ ID NO: 2504516 - RNA, 19 nt, Homo sapiens
  misc_RNA (1)...(19): siRNA sense strand
ggaaaguguacaaauguca

SEQ ID NO: 2504517 - RNA, 19 nt, Homo sapiens
  misc_RNA (1)...(19): siRNA sense strand
cagcuuugugggaggguuu

SEQ ID NO: 2504518 - RNA, 19 nt, Homo sapiens
  misc_RNA (1)...(19): siRNA sense strand
gguuauagccaggacaaau

SEQ ID NO: 2504519 - RNA, 19 nt, Homo sapiens
  misc_RNA (1)...(19): siRNA sense strand
ccgaagggaugcuccaaau

SEQ ID NO: 2504520 - RNA, 19 nt, Homo sapiens
  misc_RNA (1)...(19): siRNA sense strand
auguaaagaaugugggaaa

SEQ ID NO: 2504521 - RNA, 19 nt, Homo sapiens
  misc_RNA (1)...(19): siRNA sense strand
guguaaggaaugugggaaa

SEQ ID NO: 2504522 - RNA, 19 nt, Homo sapiens
  misc_RNA (1)...(19): siRNA sense strand
cuguaaagaaugugggaau

SEQ ID NO: 2504523 - RNA, 19 nt, Homo sapiens
  misc_RNA (1)...(19): siRNA sense strand
aauucaugcuagagagaaa

SEQ ID NO: 2504524 - RNA, 19 nt, Homo sapiens
  misc_RNA (1)...(19): siRNA sense strand
acuucauacuggugagaaa

SEQ ID NO: 2504525 - RNA, 19 nt, Homo sapiens
  misc_RNA (1)...(19): siRNA sense strand
aauucauacuggugagaaa

SEQ ID NO: 2504526 - RNA, 19 nt, Homo sapiens
  misc_RNA (1)...(19): siRNA sense strand
aauucauacuggugagaaa

SEQ ID NO: 2504527 - RNA, 19 nt, Homo sapiens
  misc_RNA (1)...(19): siRNA sense strand
aauucauacuggugagaaa

SEQ ID NO: 2504528 - RNA, 19 nt, Homo sapiens
  misc_RNA (1)...(19): siRNA sense strand
auguaaugaaugugggaaa

SEQ ID NO: 2504529 - RNA, 19 nt, Homo sapiens
  misc_RNA (1)...(19): siRNA sense strand
aggaauugguucacagauu

SEQ ID NO: 2504530 - RNA, 19 nt, Homo sapiens
  misc_RNA (1)...(19): siRNA sense strand
cccuaugaauguagagaau

SEQ ID NO: 2504531 - RNA, 19 nt, Homo sapiens
  misc_RNA (1)...(19): siRNA sense strand
cccuauaaauguauggaau

SEQ ID NO: 2504532 - RNA, 19 nt, Homo sapiens
  misc_RNA (1)...(19): siRNA sense strand
cccuauaaauguacggaau

SEQ ID NO: 2504533 - RNA, 19 nt, Homo sapiens
  misc_RNA (1)...(19): siRNA sense strand
gggacaaggaauugguuca

SEQ ID NO: 2504534 - RNA, 19 nt, Homo sapiens
  misc_RNA (1)...(19): siRNA sense strand
aauucaugcuggagagaga

SEQ ID NO: 2504535 - RNA, 19 nt, Homo sapiens
  misc_RNA (1)...(19): siRNA sense strand
cuuuauucguagugaucaa

SEQ ID NO: 2504536 - RNA, 19 nt, Homo sapiens
  misc_RNA (1)...(19): siRNA sense strand
agggaagggacaaggaauu

SEQ ID NO: 2504537 - RNA, 19 nt, Homo sapiens
  misc_RNA (1)...(19): siRNA sense strand
aauacauucuggugugaaa

SEQ ID NO: 2504538 - RNA, 19 nt, Homo sapiens
  misc_RNA (1)...(19): siRNA sense strand
gguucacagauuuggaaua

SEQ ID NO: 2504539 - RNA, 19 nt, Homo sapiens
  misc_RNA (1)...(19): siRNA sense strand
auguaaugaaugugggaau

SEQ ID NO: 2504540 - RNA, 19 nt, Homo sapiens
  misc_RNA (1)...(19): siRNA sense strand
augugauguuggagaacua

SEQ ID NO: 2504541 - RNA, 19 nt, Homo sapiens
  misc_RNA (1)...(19): siRNA sense strand
cuaugaauguagagaaugu

SEQ ID NO: 2504542 - RNA, 19 nt, Homo sapiens
  misc_RNA (1)...(19): siRNA sense strand
auguagagaauguggaaaa

SEQ ID NO: 2504543 - RNA, 19 nt, Homo sapiens
  misc_RNA (1)...(19): siRNA sense strand
aggaugugauguuggagaa

SEQ ID NO: 2504544 - RNA, 19 nt, Homo sapiens
  misc_RNA (1)...(19): siRNA sense strand
aguaaugagggaagggaca

SEQ ID NO: 2504545 - RNA, 19 nt, Homo sapiens
  misc_RNA (1)...(19): siRNA sense strand
ggcaagaccuuuaggguac

SEQ ID NO: 2504546 - RNA, 19 nt, Homo sapiens
  misc_RNA (1)...(19): siRNA sense strand
uggcaagaccuuuagggua

SEQ ID NO: 2504547 - RNA, 19 nt, Homo sapiens
  misc_RNA (1)...(19): siRNA sense strand
agucaaaugcuaauccaaa

SEQ ID NO: 2504548 - RNA, 19 nt, Homo sapiens
  misc_RNA (1)...(19): siRNA sense strand
aacaugaauuugagagaca

SEQ ID NO: 2504549 - RNA, 19 nt, Homo sapiens
  misc_RNA (1)...(19): siRNA sense strand
cccuaugaauguaaagaau

SEQ ID NO: 2504550 - RNA, 19 nt, Homo sapiens
  misc_RNA (1)...(19): siRNA sense strand
aauucauacuggugucaaa

SEQ ID NO: 2504551 - RNA, 19 nt, Homo sapiens
  misc_RNA (1)...(19): siRNA sense strand
uauuggagcaagagaaaga

SEQ ID NO: 2504552 - RNA, 19 nt, Homo sapiens
  misc_RNA (1)...(19): siRNA sense strand
agagaaagagcccuggaua

SEQ ID NO: 2504553 - RNA, 19 nt, Homo sapiens
  misc_RNA (1)...(19): siRNA sense strand
cccuaugaauguaaggaau

SEQ ID NO: 2504554 - RNA, 19 nt, Homo sapiens
  misc_RNA (1)...(19): siRNA sense strand
cccuaugaauguaaggaau

SEQ ID NO: 2504555 - RNA, 19 nt, Homo sapiens
  misc_RNA (1)...(19): siRNA sense strand
auguaaggaauguggaaaa

SEQ ID NO: 2504556 - RNA, 19 nt, Homo sapiens
  misc_RNA (1)...(19): siRNA sense strand
cccuaugaauguaaggaau

SEQ ID NO: 2504557 - RNA, 19 nt, Homo sapiens
  misc_RNA (1)...(19): siRNA sense strand
uguuagagaccuuagagua

SEQ ID NO: 2504558 - RNA, 19 nt, Homo sapiens
  misc_RNA (1)...(19): siRNA sense strand
gagaaagagcccuggauag

SEQ ID NO: 2504559 - RNA, 19 nt, Homo sapiens
  misc_RNA (1)...(19): siRNA sense strand
gagggaagggacaaggaau

SEQ ID NO: 2504560 - RNA, 19 nt, Homo sapiens
  misc_RNA (1)...(19): siRNA sense strand
cagaaaagaauguuugcaa

SEQ ID NO: 2504561 - RNA, 19 nt, Homo sapiens
  misc_RNA (1)...(19): siRNA sense strand
ccuuagaguacaucagaca

SEQ ID NO: 2504562 - RNA, 19 nt, Homo sapiens
  misc_RNA (1)...(19): siRNA sense strand
uuuauuggagcaagagaaa

SEQ ID NO: 2504563 - RNA, 19 nt, Homo sapiens
  misc_RNA (1)...(19): siRNA sense strand
uugagagacaagagagaca

SEQ ID NO: 2504564 - RNA, 19 nt, Homo sapiens
  misc_RNA (1)...(19): siRNA sense strand
ccuuuagacaacagucaua

SEQ ID NO: 2504565 - RNA, 19 nt, Homo sapiens
  misc_RNA (1)...(19): siRNA sense strand
auguaaagaaugugggaag

SEQ ID NO: 2504566 - RNA, 19 nt, Homo sapiens
  misc_RNA (1)...(19): siRNA sense strand
auguaaagaaugugggaag

SEQ ID NO: 2504567 - RNA, 19 nt, Homo sapiens
  misc_RNA (1)...(19): siRNA sense strand
auguaaagaaugugggaag

SEQ ID NO: 2504568 - RNA, 19 nt, Homo sapiens
  misc_RNA (1)...(19): siRNA sense strand
ggccuuuauuugugguuau

SEQ ID NO: 2504569 - RNA, 19 nt, Homo sapiens
  misc_RNA (1)...(19): siRNA sense strand
caguguuaauucagaacuu

SEQ ID NO: 2504570 - RNA, 19 nt, Homo sapiens
  misc_RNA (1)...(19): siRNA sense strand
uuacuuuauuggagcaaga

SEQ ID NO: 2504571 - RNA, 19 nt, Homo sapiens
  misc_RNA (1)...(19): siRNA sense strand
caauguaaagaauguggaa

SEQ ID NO: 2504572 - RNA, 19 nt, Homo sapiens
  misc_RNA (1)...(19): siRNA sense strand
cuuuauuggagcaagagaa

SEQ ID NO: 2504573 - RNA, 19 nt, Homo sapiens
  misc_RNA (1)...(19): siRNA sense strand
cagauuuggaauacaagua

SEQ ID NO: 2504574 - RNA, 19 nt, Homo sapiens
  misc_RNA (1)...(19): siRNA sense strand
aguccuaugcauaauguaa

SEQ ID NO: 2504575 - RNA, 19 nt, Homo sapiens
  misc_RNA (1)...(19): siRNA sense strand
uguacaaggaugugauguu

SEQ ID NO: 2504576 - RNA, 19 nt, Homo sapiens
  misc_RNA (1)...(19): siRNA sense strand
aggccauacuggugagaag

SEQ ID NO: 2504577 - RNA, 19 nt, Homo sapiens
  misc_RNA (1)...(19): siRNA sense strand
aaagaaugugggaagauuu

SEQ ID NO: 2504578 - RNA, 19 nt, Homo sapiens
  misc_RNA (1)...(19): siRNA sense strand
augcagaacuugcucgaca

SEQ ID NO: 2504579 - RNA, 19 nt, Homo sapiens
  misc_RNA (1)...(19): siRNA sense strand
ccuaaaugaacuacagaaa

SEQ ID NO: 2504580 - RNA, 19 nt, Homo sapiens
  misc_RNA (1)...(19): siRNA sense strand
ucuuaaaagugcugagaaa

SEQ ID NO: 2504581 - RNA, 19 nt, Homo sapiens
  misc_RNA (1)...(19): siRNA sense strand
auauaugaauggcgagaaa

SEQ ID NO: 2504582 - RNA, 19 nt, Homo sapiens
  misc_RNA (1)...(19): siRNA sense strand
gaggaaaucugucgggcaa

SEQ ID NO: 2504583 - RNA, 19 nt, Homo sapiens
  misc_RNA (1)...(19): siRNA sense strand
gagaaaucuaugacaguaa

SEQ ID NO: 2504584 - RNA, 19 nt, Homo sapiens
  misc_RNA (1)...(19): siRNA sense strand
guguaauuauggaggaaga

SEQ ID NO: 2504585 - RNA, 19 nt, Homo sapiens
  misc_RNA (1)...(19): siRNA sense strand
agaaaauguuggugaagaa

SEQ ID NO: 2504586 - RNA, 19 nt, Homo sapiens
  misc_RNA (1)...(19): siRNA sense strand
aauuagaagaggaacgaaa

SEQ ID NO: 2504587 - RNA, 19 nt, Homo sapiens
  misc_RNA (1)...(19): siRNA sense strand
gccaauaaguggaucaaaa

SEQ ID NO: 2504588 - RNA, 19 nt, Homo sapiens
  misc_RNA (1)...(19): siRNA sense strand
ggacaaaagcugggaggaa

SEQ ID NO: 2504589 - RNA, 19 nt, Homo sapiens
  misc_RNA (1)...(19): siRNA sense strand
aggaguucuuguugaguaa

SEQ ID NO: 2504590 - RNA, 19 nt, Homo sapiens
  misc_RNA (1)...(19): siRNA sense strand
gugcaagagagaaagaaau

SEQ ID NO: 2504591 - RNA, 19 nt, Homo sapiens
  misc_RNA (1)...(19): siRNA sense strand
cgagaaggcuauagaccca

SEQ ID NO: 2504592 - RNA, 19 nt, Homo sapiens
  misc_RNA (1)...(19): siRNA sense strand
aggaaguacugaucagauu

SEQ ID NO: 2504593 - RNA, 19 nt, Homo sapiens
  misc_RNA (1)...(19): siRNA sense strand
ccgagaaaguggauugcuu

SEQ ID NO: 2504594 - RNA, 19 nt, Homo sapiens
  misc_RNA (1)...(19): siRNA sense strand
ggauaaaaccaacucaaaa

SEQ ID NO: 2504595 - RNA, 19 nt, Homo sapiens
  misc_RNA (1)...(19): siRNA sense strand
uggcaaggaaagagauuga

SEQ ID NO: 2504596 - RNA, 19 nt, Homo sapiens
  misc_RNA (1)...(19): siRNA sense strand
guuaacaacuguaggcguu

SEQ ID NO: 2504597 - RNA, 19 nt, Homo sapiens
  misc_RNA (1)...(19): siRNA sense strand
gauucagacuauaugagaa

SEQ ID NO: 2504598 - RNA, 19 nt, Homo sapiens
  misc_RNA (1)...(19): siRNA sense strand
uaucaucaucagaaggaaa

SEQ ID NO: 2504599 - RNA, 19 nt, Homo sapiens
  misc_RNA (1)...(19): siRNA sense strand
gacaaaagcugggaggaaa

SEQ ID NO: 2504600 - RNA, 19 nt, Homo sapiens
  misc_RNA (1)...(19): siRNA sense strand
gaguguaauuauggaggaa

SEQ ID NO: 2504601 - RNA, 19 nt, Homo sapiens
  misc_RNA (1)...(19): siRNA sense strand
uaacaaagaaacagcagau

SEQ ID NO: 2504602 - RNA, 19 nt, Homo sapiens
  misc_RNA (1)...(19): siRNA sense strand
cuauagacccaucgccaaa

SEQ ID NO: 2504603 - RNA, 19 nt, Homo sapiens
  misc_RNA (1)...(19): siRNA sense strand
caguaaagagccacauaau

SEQ ID NO: 2504604 - RNA, 19 nt, Homo sapiens
  misc_RNA (1)...(19): siRNA sense strand
ugugcaagagagaaagaaa

SEQ ID NO: 2504605 - RNA, 19 nt, Homo sapiens
  misc_RNA (1)...(19): siRNA sense strand
gcaaaggagagaccagaau

SEQ ID NO: 2504606 - RNA, 19 nt, Homo sapiens
  misc_RNA (1)...(19): siRNA sense strand
gaaacagcugaaagacaua

SEQ ID NO: 2504607 - RNA, 19 nt, Homo sapiens
  misc_RNA (1)...(19): siRNA sense strand
agaagaugaaagugcaauu

SEQ ID NO: 2504608 - RNA, 19 nt, Homo sapiens
  misc_RNA (1)...(19): siRNA sense strand
gaucacuauuugagaagga

SEQ ID NO: 2504609 - RNA, 19 nt, Homo sapiens
  misc_RNA (1)...(19): siRNA sense strand
ucuuuuaacuggaggagua

SEQ ID NO: 2504610 - RNA, 19 nt, Homo sapiens
  misc_RNA (1)...(19): siRNA sense strand
cuucagaggacucaggcaa

SEQ ID NO: 2504611 - RNA, 19 nt, Homo sapiens
  misc_RNA (1)...(19): siRNA sense strand
uuauaaagucggaugccua

SEQ ID NO: 2504612 - RNA, 19 nt, Homo sapiens
  misc_RNA (1)...(19): siRNA sense strand
aagaaacagcugaaagaca

SEQ ID NO: 2504613 - RNA, 19 nt, Homo sapiens
  misc_RNA (1)...(19): siRNA sense strand
uuggaauauugcugguuua

SEQ ID NO: 2504614 - RNA, 19 nt, Homo sapiens
  misc_RNA (1)...(19): siRNA sense strand
gcaaggaaagagauugaau

SEQ ID NO: 2504615 - RNA, 19 nt, Homo sapiens
  misc_RNA (1)...(19): siRNA sense strand
ggaaaagcgccuacgauau

SEQ ID NO: 2504616 - RNA, 19 nt, Homo sapiens
  misc_RNA (1)...(19): siRNA sense strand
gaccagaauuagaagagga

SEQ ID NO: 2504617 - RNA, 19 nt, Homo sapiens
  misc_RNA (1)...(19): siRNA sense strand
guuuaagaccugauaagau

SEQ ID NO: 2504618 - RNA, 19 nt, Homo sapiens
  misc_RNA (1)...(19): siRNA sense strand
gaagaaggaacuugggugu

SEQ ID NO: 2504619 - RNA, 19 nt, Homo sapiens
  misc_RNA (1)...(19): siRNA sense strand
gcgcaucaguauccgacaa

SEQ ID NO: 2504620 - RNA, 19 nt, Homo sapiens
  misc_RNA (1)...(19): siRNA sense strand
cugagaaacccgcacuaua

SEQ ID NO: 2504621 - RNA, 19 nt, Homo sapiens
  misc_RNA (1)...(19): siRNA sense strand
acggagugaucguuaacaa

SEQ ID NO: 2504622 - RNA, 19 nt, Homo sapiens
  misc_RNA (1)...(19): siRNA sense strand
ugcaagagagaaagaaauu

SEQ ID NO: 2504623 - RNA, 19 nt, Homo sapiens
  misc_RNA (1)...(19): siRNA sense strand
cguucauacccaagccuua

SEQ ID NO: 2504624 - RNA, 19 nt, Homo sapiens
  misc_RNA (1)...(19): siRNA sense strand
cuaacaagaaacagcugaa

SEQ ID NO: 2504625 - RNA, 19 nt, Homo sapiens
  misc_RNA (1)...(19): siRNA sense strand
ucuacagaauggaguaaaa

SEQ ID NO: 2504626 - RNA, 19 nt, Homo sapiens
  misc_RNA (1)...(19): siRNA sense strand
uggaaaagcgccuacgaua

SEQ ID NO: 2504627 - RNA, 19 nt, Homo sapiens
  misc_RNA (1)...(19): siRNA sense strand
ugagauaugaagaaagcau

SEQ ID NO: 2504628 - RNA, 19 nt, Homo sapiens
  misc_RNA (1)...(19): siRNA sense strand
acucuauucaugacaguaa

SEQ ID NO: 2504629 - RNA, 19 nt, Homo sapiens
  misc_RNA (1)...(19): siRNA sense strand
gcgagaaaucuaugacagu

SEQ ID NO: 2504630 - RNA, 19 nt, Homo sapiens
  misc_RNA (1)...(19): siRNA sense strand
cugguauaauucaggaaaa

SEQ ID NO: 2504631 - RNA, 19 nt, Homo sapiens
  misc_RNA (1)...(19): siRNA sense strand
uggauugcuugcugaacaa

SEQ ID NO: 2504632 - RNA, 19 nt, Homo sapiens
  misc_RNA (1)...(19): siRNA sense strand
cuacaagacaagugaacgu

SEQ ID NO: 2504633 - RNA, 19 nt, Homo sapiens
  misc_RNA (1)...(19): siRNA sense strand
uaagauaaccccagcuaua

SEQ ID NO: 2504634 - RNA, 19 nt, Homo sapiens
  misc_RNA (1)...(19): siRNA sense strand
cuccaaggaucuucaacaa

SEQ ID NO: 2504635 - RNA, 19 nt, Homo sapiens
  misc_RNA (1)...(19): siRNA sense strand
acaagugaacguaaaggaa

SEQ ID NO: 2504636 - RNA, 19 nt, Homo sapiens
  misc_RNA (1)...(19): siRNA sense strand
gauaaaucuaugucuggaa

SEQ ID NO: 2504637 - RNA, 19 nt, Homo sapiens
  misc_RNA (1)...(19): siRNA sense strand
cuguguuaguacaagaaau

SEQ ID NO: 2504638 - RNA, 19 nt, Homo sapiens
  misc_RNA (1)...(19): siRNA sense strand
aagugaacguaaaggaacu

SEQ ID NO: 2504639 - RNA, 19 nt, Homo sapiens
  misc_RNA (1)...(19): siRNA sense strand
acaaaagcugggaggaaau

SEQ ID NO: 2504640 - RNA, 19 nt, Homo sapiens
  misc_RNA (1)...(19): siRNA sense strand
gugacagacgauugggaca

SEQ ID NO: 2504641 - RNA, 19 nt, Homo sapiens
  misc_RNA (1)...(19): siRNA sense strand
cagaauuaugccagaaaau

SEQ ID NO: 2504642 - RNA, 19 nt, Homo sapiens
  misc_RNA (1)...(19): siRNA sense strand
gugaagaacuggauccauc

SEQ ID NO: 2504643 - RNA, 19 nt, Homo sapiens
  misc_RNA (1)...(19): siRNA sense strand
caucagacuuggugagguc

SEQ ID NO: 2504644 - RNA, 19 nt, Homo sapiens
  misc_RNA (1)...(19): siRNA sense strand
ugaaagagcaaaaggaaaa

SEQ ID NO: 2504645 - RNA, 19 nt, Homo sapiens
  misc_RNA (1)...(19): siRNA sense strand
ggcuaaggcacgagaauau

SEQ ID NO: 2504646 - RNA, 19 nt, Homo sapiens
  misc_RNA (1)...(19): siRNA sense strand
auguaacaccagaggauua

SEQ ID NO: 2504647 - RNA, 19 nt, Homo sapiens
  misc_RNA (1)...(19): siRNA sense strand
aguauaacucuuuggcaua

SEQ ID NO: 2504648 - RNA, 19 nt, Homo sapiens
  misc_RNA (1)...(19): siRNA sense strand
gagcgaacucgaugggcua

SEQ ID NO: 2504649 - RNA, 19 nt, Homo sapiens
  misc_RNA (1)...(19): siRNA sense strand
gaaggaagauggaaggguu

SEQ ID NO: 2504650 - RNA, 19 nt, Homo sapiens
  misc_RNA (1)...(19): siRNA sense strand
aaguauaacucuuuggcau

SEQ ID NO: 2504651 - RNA, 19 nt, Homo sapiens
  misc_RNA (1)...(19): siRNA sense strand
ggcuaaaucaacugaagaa

SEQ ID NO: 2504652 - RNA, 19 nt, Homo sapiens
  misc_RNA (1)...(19): siRNA sense strand
aagcggaggagguggaaau

SEQ ID NO: 2504653 - RNA, 19 nt, Homo sapiens
  misc_RNA (1)...(19): siRNA sense strand
cagugaaaccauuugcaaa

SEQ ID NO: 2504654 - RNA, 19 nt, Homo sapiens
  misc_RNA (1)...(19): siRNA sense strand
augcaaugauuauggugaa

SEQ ID NO: 2504655 - RNA, 19 nt, Homo sapiens
  misc_RNA (1)...(19): siRNA sense strand
acucauagcaaaagaggaa

SEQ ID NO: 2504656 - RNA, 19 nt, Homo sapiens
  misc_RNA (1)...(19): siRNA sense strand
cuggaagagugguggcuga

SEQ ID NO: 2504657 - RNA, 19 nt, Homo sapiens
  misc_RNA (1)...(19): siRNA sense strand
ucaaagugggauuggagaa

SEQ ID NO: 2504658 - RNA, 19 nt, Homo sapiens
  misc_RNA (1)...(19): siRNA sense strand
guucagagaagguacgaga

SEQ ID NO: 2504659 - RNA, 19 nt, Homo sapiens
  misc_RNA (1)...(19): siRNA sense strand
ucaauuagaaagaggaagu

SEQ ID NO: 2504660 - RNA, 19 nt, Homo sapiens
  misc_RNA (1)...(19): siRNA sense strand
gagaauaucugauuggucu

SEQ ID NO: 2504661 - RNA, 19 nt, Homo sapiens
  misc_RNA (1)...(19): siRNA sense strand
caaugauuauggugaacau

SEQ ID NO: 2504662 - RNA, 19 nt, Homo sapiens
  misc_RNA (1)...(19): siRNA sense strand
acauguaacaccagaggau

SEQ ID NO: 2504663 - RNA, 19 nt, Homo sapiens
  misc_RNA (1)...(19): siRNA sense strand
uugaaagagcaaaaggaaa

SEQ ID NO: 2504664 - RNA, 19 nt, Homo sapiens
  misc_RNA (1)...(19): siRNA sense strand
acucaauuagaaagaggaa

SEQ ID NO: 2504665 - RNA, 19 nt, Homo sapiens
  misc_RNA (1)...(19): siRNA sense strand
caugaaggauguuugguca

SEQ ID NO: 2504666 - RNA, 19 nt, Homo sapiens
  misc_RNA (1)...(19): siRNA sense strand
agauauaccacuuccagaa

SEQ ID NO: 2504667 - RNA, 19 nt, Homo sapiens
  misc_RNA (1)...(19): siRNA sense strand
gaaugaaggaagauggaag

SEQ ID NO: 2504668 - RNA, 19 nt, Homo sapiens
  misc_RNA (1)...(19): siRNA sense strand
guacagagacuaugcgauc

SEQ ID NO: 2504669 - RNA, 19 nt, Homo sapiens
  misc_RNA (1)...(19): siRNA sense strand
agaaagaggaaguauaacu

SEQ ID NO: 2504670 - RNA, 19 nt, Homo sapiens
  misc_RNA (1)...(19): siRNA sense strand
agaaauugcuugaaagagc

SEQ ID NO: 2504671 - RNA, 19 nt, Homo sapiens
  misc_RNA (1)...(19): siRNA sense strand
aaagaaauuggcuggaaga

SEQ ID NO: 2504672 - RNA, 19 nt, Homo sapiens
  misc_RNA (1)...(19): siRNA sense strand
guauauuccauggaggaua

SEQ ID NO: 2504673 - RNA, 19 nt, Homo sapiens
  misc_RNA (1)...(19): siRNA sense strand
gugacaaauccuauaacuu

SEQ ID NO: 2504674 - RNA, 19 nt, Homo sapiens
  misc_RNA (1)...(19): siRNA sense strand
gcagugagguggugccagu

SEQ ID NO: 2504675 - RNA, 19 nt, Homo sapiens
  misc_RNA (1)...(19): siRNA sense strand
gaaaaggauuugaucguca

SEQ ID NO: 2504676 - RNA, 19 nt, Homo sapiens
  misc_RNA (1)...(19): siRNA sense strand
auaccuugaaucagugaaa

SEQ ID NO: 2504677 - RNA, 19 nt, Homo sapiens
  misc_RNA (1)...(19): siRNA sense strand
auggaaggguucagagaag

SEQ ID NO: 2504678 - RNA, 19 nt, Homo sapiens
  misc_RNA (1)...(19): siRNA sense strand
ccaggaauuacuagagacu

SEQ ID NO: 2504679 - RNA, 19 nt, Homo sapiens
  misc_RNA (1)...(19): siRNA sense strand
ccugguuguugcuaugaaa

SEQ ID NO: 2504680 - RNA, 19 nt, Homo sapiens
  misc_RNA (1)...(19): siRNA sense strand
acauauauccacaagaagu

SEQ ID NO: 2504681 - RNA, 19 nt, Homo sapiens
  misc_RNA (1)...(19): siRNA sense strand
aagcuaaccaagaacaaga

SEQ ID NO: 2504682 - RNA, 19 nt, Homo sapiens
  misc_RNA (1)...(19): siRNA sense strand
ccaaaggaagggacucaau

SEQ ID NO: 2504683 - RNA, 19 nt, Homo sapiens
  misc_RNA (1)...(19): siRNA sense strand
uggcuguaauugugaucau

SEQ ID NO: 2504684 - RNA, 19 nt, Homo sapiens
  misc_RNA (1)...(19): siRNA sense strand
agauggaaggguucagaga

SEQ ID NO: 2504685 - RNA, 19 nt, Homo sapiens
  misc_RNA (1)...(19): siRNA sense strand
ccaagaacaagaugcuuca

SEQ ID NO: 2504686 - RNA, 19 nt, Homo sapiens
  misc_RNA (1)...(19): siRNA sense strand
ugguauauuccauggagga

SEQ ID NO: 2504687 - RNA, 19 nt, Homo sapiens
  misc_RNA (1)...(19): siRNA sense strand
cagaaugaaggaagaugga

SEQ ID NO: 2504688 - RNA, 19 nt, Homo sapiens
  misc_RNA (1)...(19): siRNA sense strand
uaugaaacagcuaugacaa

SEQ ID NO: 2504689 - RNA, 19 nt, Homo sapiens
  misc_RNA (1)...(19): siRNA sense strand
ggaagaagcuggugcugga

SEQ ID NO: 2504690 - RNA, 19 nt, Homo sapiens
  misc_RNA (1)...(19): siRNA sense strand
ccagggaagaggagggaga

SEQ ID NO: 2504691 - RNA, 19 nt, Homo sapiens
  misc_RNA (1)...(19): siRNA sense strand
aggaagaagcgguuggagu

SEQ ID NO: 2504692 - RNA, 19 nt, Homo sapiens
  misc_RNA (1)...(19): siRNA sense strand
aagaggagggagacagaga

SEQ ID NO: 2504693 - RNA, 19 nt, Homo sapiens
  misc_RNA (1)...(19): siRNA sense strand
uggagaaccuggaggacuc

SEQ ID NO: 2504694 - RNA, 19 nt, Homo sapiens
  misc_RNA (1)...(19): siRNA sense strand
cccuacaggcacugaguau

SEQ ID NO: 2504695 - RNA, 19 nt, Homo sapiens
  misc_RNA (1)...(19): siRNA sense strand
caacuuagauaccgagcgu

SEQ ID NO: 2504696 - RNA, 19 nt, Homo sapiens
  misc_RNA (1)...(19): siRNA sense strand
uuggaugacaacuuagaua

SEQ ID NO: 2504697 - RNA, 19 nt, Homo sapiens
  misc_RNA (1)...(19): siRNA sense strand
acauguuaucagugaagaa

SEQ ID NO: 2504698 - RNA, 19 nt, Homo sapiens
  misc_RNA (1)...(19): siRNA sense strand
aggauguggucguggaacu

SEQ ID NO: 2504699 - RNA, 19 nt, Homo sapiens
  misc_RNA (1)...(19): siRNA sense strand
ggaaggaagcccugcagca

SEQ ID NO: 2504700 - RNA, 19 nt, Homo sapiens
  misc_RNA (1)...(19): siRNA sense strand
gcaaggauguggucgugga

SEQ ID NO: 2504701 - RNA, 19 nt, Homo sapiens
  misc_RNA (1)...(19): siRNA sense strand
ugguuaagcauaagagaau

SEQ ID NO: 2504702 - RNA, 19 nt, Homo sapiens
  misc_RNA (1)...(19): siRNA sense strand
auguagugaaugugggaaa

SEQ ID NO: 2504703 - RNA, 19 nt, Homo sapiens
  misc_RNA (1)...(19): siRNA sense strand
aauucauacaggugagaaa

SEQ ID NO: 2504704 - RNA, 19 nt, Homo sapiens
  misc_RNA (1)...(19): siRNA sense strand
aaugcauacaggagagaaa

SEQ ID NO: 2504705 - RNA, 19 nt, Homo sapiens
  misc_RNA (1)...(19): siRNA sense strand
gugcagugaauguggaaaa

SEQ ID NO: 2504706 - RNA, 19 nt, Homo sapiens
  misc_RNA (1)...(19): siRNA sense strand
ggucagaugugcagccuca

SEQ ID NO: 2504707 - RNA, 19 nt, Homo sapiens
  misc_RNA (1)...(19): siRNA sense strand
aggagauaacagaggauuu

SEQ ID NO: 2504708 - RNA, 19 nt, Homo sapiens
  misc_RNA (1)...(19): siRNA sense strand
aacacauaccggagagaaa

SEQ ID NO: 2504709 - RNA, 19 nt, Homo sapiens
  misc_RNA (1)...(19): siRNA sense strand
gcgaacucauacaggagaa

SEQ ID NO: 2504710 - RNA, 19 nt, Homo sapiens
  misc_RNA (1)...(19): siRNA sense strand
guuggaacaaggagaacaa

SEQ ID NO: 2504711 - RNA, 19 nt, Homo sapiens
  misc_RNA (1)...(19): siRNA sense strand
augcaaugaauguggaaaa

SEQ ID NO: 2504712 - RNA, 19 nt, Homo sapiens
  misc_RNA (1)...(19): siRNA sense strand
aauucacacaggagagaaa

SEQ ID NO: 2504713 - RNA, 19 nt, Homo sapiens
  misc_RNA (1)...(19): siRNA sense strand
ugggaaagcguuugcguau

SEQ ID NO: 2504714 - RNA, 19 nt, Homo sapiens
  misc_RNA (1)...(19): siRNA sense strand
cuauauaugcagugaaugu

SEQ ID NO: 2504715 - RNA, 19 nt, Homo sapiens
  misc_RNA (1)...(19): siRNA sense strand
gcauaagagaauacacaca

SEQ ID NO: 2504716 - RNA, 19 nt, Homo sapiens
  misc_RNA (1)...(19): siRNA sense strand
ccuggugaacagaaggaaa

SEQ ID NO: 2504717 - RNA, 19 nt, Homo sapiens
  misc_RNA (1)...(19): siRNA sense strand
cccuauauaugcagugaau

SEQ ID NO: 2504718 - RNA, 19 nt, Homo sapiens
  misc_RNA (1)...(19): siRNA sense strand
gcagagaggcacagcucau

SEQ ID NO: 2504719 - RNA, 19 nt, Homo sapiens
  misc_RNA (1)...(19): siRNA sense strand
gcuucauccagaaaggaaa

SEQ ID NO: 2504720 - RNA, 19 nt, Homo sapiens
  misc_RNA (1)...(19): siRNA sense strand
cuguugaguuuacuggaaa

SEQ ID NO: 2504721 - RNA, 19 nt, Homo sapiens
  misc_RNA (1)...(19): siRNA sense strand
gugaugucaugcaggagaa

SEQ ID NO: 2504722 - RNA, 19 nt, Homo sapiens
  misc_RNA (1)...(19): siRNA sense strand
ccuugugaaugcagugaau

SEQ ID NO: 2504723 - RNA, 19 nt, Homo sapiens
  misc_RNA (1)...(19): siRNA sense strand
agaauacacacaagggaga

SEQ ID NO: 2504724 - RNA, 19 nt, Homo sapiens
  misc_RNA (1)...(19): siRNA sense strand
agggcaaaaucaugauaua

SEQ ID NO: 2504725 - RNA, 19 nt, Homo sapiens
  misc_RNA (1)...(19): siRNA sense strand
augcagugaauguggaaaa

SEQ ID NO: 2504726 - RNA, 19 nt, Homo sapiens
  misc_RNA (1)...(19): siRNA sense strand
gaaaauuagagaagcauca

SEQ ID NO: 2504727 - RNA, 19 nt, Homo sapiens
  misc_RNA (1)...(19): siRNA sense strand
cugguuaagcauaagagaa

SEQ ID NO: 2504728 - RNA, 19 nt, Homo sapiens
  misc_RNA (1)...(19): siRNA sense strand
gaacguaguccuuguggga

SEQ ID NO: 2504729 - RNA, 19 nt, Homo sapiens
  misc_RNA (1)...(19): siRNA sense strand
gagcgcuugcagagugaaa

SEQ ID NO: 2504730 - RNA, 19 nt, Homo sapiens
  misc_RNA (1)...(19): siRNA sense strand
cuuuaguuaaccagagcaa

SEQ ID NO: 2504731 - RNA, 19 nt, Homo sapiens
  misc_RNA (1)...(19): siRNA sense strand
ggaaaaggcuucauccaga

SEQ ID NO: 2504732 - RNA, 19 nt, Homo sapiens
  misc_RNA (1)...(19): siRNA sense strand
aagcauaagagaauacaca

SEQ ID NO: 2504733 - RNA, 19 nt, Homo sapiens
  misc_RNA (1)...(19): siRNA sense strand
gacucauacaggagagaga

SEQ ID NO: 2504734 - RNA, 19 nt, Homo sapiens
  misc_RNA (1)...(19): siRNA sense strand
cuguucagacauauggaaa

SEQ ID NO: 2504735 - RNA, 19 nt, Homo sapiens
  misc_RNA (1)...(19): siRNA sense strand
agagcaaaggcuaugaaau

SEQ ID NO: 2504736 - RNA, 19 nt, Homo sapiens
  misc_RNA (1)...(19): siRNA sense strand
caucagaaaacacgaaaau

SEQ ID NO: 2504737 - RNA, 19 nt, Homo sapiens
  misc_RNA (1)...(19): siRNA sense strand
aggauguggcuguggacuu

SEQ ID NO: 2504738 - RNA, 19 nt, Homo sapiens
  misc_RNA (1)...(19): siRNA sense strand
gugggaaagccuucaucaa

SEQ ID NO: 2504739 - RNA, 19 nt, Homo sapiens
  misc_RNA (1)...(19): siRNA sense strand
agaaacaagaagcagccaa

SEQ ID NO: 2504740 - RNA, 19 nt, Homo sapiens
  misc_RNA (1)...(19): siRNA sense strand
uguugaguuuacuggaaau

SEQ ID NO: 2504741 - RNA, 19 nt, Homo sapiens
  misc_RNA (1)...(19): siRNA sense strand
acauauggaaaguugauca

SEQ ID NO: 2504742 - RNA, 19 nt, Homo sapiens
  misc_RNA (1)...(19): siRNA sense strand
agguaaugcauacaggaga

SEQ ID NO: 2504743 - RNA, 19 nt, Homo sapiens
  misc_RNA (1)...(19): siRNA sense strand
uaaccagagcaaaggcuau

SEQ ID NO: 2504744 - RNA, 19 nt, Homo sapiens
  misc_RNA (1)...(19): siRNA sense strand
gugaacagaaggaaaccau

SEQ ID NO: 2504745 - RNA, 19 nt, Homo sapiens
  misc_RNA (1)...(19): siRNA sense strand
gguaaugcauacaggagag

SEQ ID NO: 2504746 - RNA, 19 nt, Homo sapiens
  misc_RNA (1)...(19): siRNA sense strand
gggaggaggugcuaggaga

SEQ ID NO: 2504747 - RNA, 19 nt, Homo sapiens
  misc_RNA (1)...(19): siRNA sense strand
uggaagaucaacuggacaa

SEQ ID NO: 2504748 - RNA, 19 nt, Homo sapiens
  misc_RNA (1)...(19): siRNA sense strand
agacaggaucgcagcucaa

SEQ ID NO: 2504749 - RNA, 19 nt, Homo sapiens
  misc_RNA (1)...(19): siRNA sense strand
agacguuacaggaaggaga

SEQ ID NO: 2504750 - RNA, 19 nt, Homo sapiens
  misc_RNA (1)...(19): siRNA sense strand
cagcaaagcaucaggacug

SEQ ID NO: 2504751 - RNA, 19 nt, Homo sapiens
  misc_RNA (1)...(19): siRNA sense strand
gggccaacaggcaguggaa

SEQ ID NO: 2504752 - RNA, 19 nt, Homo sapiens
  misc_RNA (1)...(19): siRNA sense strand
gcagaagggagcugggaag

SEQ ID NO: 2504753 - RNA, 19 nt, Homo sapiens
  misc_RNA (1)...(19): siRNA sense strand
caggacaggaagcugguaa

SEQ ID NO: 2504754 - RNA, 19 nt, Homo sapiens
  misc_RNA (1)...(19): siRNA sense strand
agccaaagcaagccaggaa

SEQ ID NO: 2504755 - RNA, 19 nt, Homo sapiens
  misc_RNA (1)...(19): siRNA sense strand
cuucacagcucaaaggcca

SEQ ID NO: 2504756 - RNA, 19 nt, Homo sapiens
  misc_RNA (1)...(19): siRNA sense strand
ucuugaagggacaucgaaa

SEQ ID NO: 2504757 - RNA, 19 nt, Homo sapiens
  misc_RNA (1)...(19): siRNA sense strand
cagucuacgucuaugacau

SEQ ID NO: 2504758 - RNA, 19 nt, Homo sapiens
  misc_RNA (1)...(19): siRNA sense strand
caccagaauuugaggacag

SEQ ID NO: 2504759 - RNA, 19 nt, Homo sapiens
  misc_RNA (1)...(19): siRNA sense strand
cagaauuugaggacagcga

SEQ ID NO: 2504760 - RNA, 19 nt, Homo sapiens
  misc_RNA (1)...(19): siRNA sense strand
ugucaaauguggagcaagc

SEQ ID NO: 2504761 - RNA, 19 nt, Homo sapiens
  misc_RNA (1)...(19): siRNA sense strand
uggagugagcuacgaggaa

SEQ ID NO: 2504762 - RNA, 19 nt, Homo sapiens
  misc_RNA (1)...(19): siRNA sense strand
aagcaagccaggaagcaga

SEQ ID NO: 2504763 - RNA, 19 nt, Homo sapiens
  misc_RNA (1)...(19): siRNA sense strand
cugaucaggaggagguuca

SEQ ID NO: 2504764 - RNA, 19 nt, Homo sapiens
  misc_RNA (1)...(19): siRNA sense strand
acugauuagucgucgagau

SEQ ID NO: 2504765 - RNA, 19 nt, Homo sapiens
  misc_RNA (1)...(19): siRNA sense strand
cuucaaucuuucucguauu

SEQ ID NO: 2504766 - RNA, 19 nt, Homo sapiens
  misc_RNA (1)...(19): siRNA sense strand
ggugagaaacucugcgaga

SEQ ID NO: 2504767 - RNA, 19 nt, Homo sapiens
  misc_RNA (1)...(19): siRNA sense strand
gggcagauguccuuggagu

SEQ ID NO: 2504768 - RNA, 19 nt, Homo sapiens
  misc_RNA (1)...(19): siRNA sense strand
gcgcaacucugguggcgau

SEQ ID NO: 2504769 - RNA, 19 nt, Homo sapiens
  misc_RNA (1)...(19): siRNA sense strand
gggaaguguggacggucaa

SEQ ID NO: 2504770 - RNA, 19 nt, Homo sapiens
  misc_RNA (1)...(19): siRNA sense strand
ugggaaguguggacgguca

SEQ ID NO: 2504771 - RNA, 19 nt, Homo sapiens
  misc_RNA (1)...(19): siRNA sense strand
ucaacaucguggaggugau

SEQ ID NO: 2504772 - RNA, 19 nt, Homo sapiens
  misc_RNA (1)...(19): siRNA sense strand
ucaaggaugcacugcgcaa

SEQ ID NO: 2504773 - RNA, 19 nt, Homo sapiens
  misc_RNA (1)...(19): siRNA sense strand
agaaggugggugagaaacu

SEQ ID NO: 2504774 - RNA, 19 nt, Homo sapiens
  misc_RNA (1)...(19): siRNA sense strand
augaagaaucugugcgaau

SEQ ID NO: 2504775 - RNA, 19 nt, Homo sapiens
  misc_RNA (1)...(19): siRNA sense strand
aggaggagcaggagcgcua

SEQ ID NO: 2504776 - RNA, 19 nt, Homo sapiens
  misc_RNA (1)...(19): siRNA sense strand
aggaggagaaggagcggaa

SEQ ID NO: 2504777 - RNA, 19 nt, Homo sapiens
  misc_RNA (1)...(19): siRNA sense strand
agauggagcugaaggagga

SEQ ID NO: 2504778 - RNA, 19 nt, Homo sapiens
  misc_RNA (1)...(19): siRNA sense strand
ggagauaagcguccgguca

SEQ ID NO: 2504779 - RNA, 19 nt, Homo sapiens
  misc_RNA (1)...(19): siRNA sense strand
gggcagauagcaacgggaa

SEQ ID NO: 2504780 - RNA, 19 nt, Homo sapiens
  misc_RNA (1)...(19): siRNA sense strand
gcaucaaggagcuggagga

SEQ ID NO: 2504781 - RNA, 19 nt, Homo sapiens
  misc_RNA (1)...(19): siRNA sense strand
gaagagaagcugaagcagu

SEQ ID NO: 2504782 - RNA, 19 nt, Homo sapiens
  misc_RNA (1)...(19): siRNA sense strand
cguggagaagaguggcaaa

SEQ ID NO: 2504783 - RNA, 19 nt, Homo sapiens
  misc_RNA (1)...(19): siRNA sense strand
aggaagagaagcugaagca

SEQ ID NO: 2504784 - RNA, 19 nt, Homo sapiens
  misc_RNA (1)...(19): siRNA sense strand
ugccagaccgcgacggaaa

SEQ ID NO: 2504785 - RNA, 19 nt, Homo sapiens
  misc_RNA (1)...(19): siRNA sense strand
aggaggaagagaagcugaa

SEQ ID NO: 2504786 - RNA, 19 nt, Homo sapiens
  misc_RNA (1)...(19): siRNA sense strand
cggccaaggaagaggagcu

SEQ ID NO: 2504787 - RNA, 19 nt, Homo sapiens
  misc_RNA (1)...(19): siRNA sense strand
gagcugugcuggacgcuga

SEQ ID NO: 2504788 - RNA, 19 nt, Homo sapiens
  misc_RNA (1)...(19): siRNA sense strand
uggaggcugcccagagaaa

SEQ ID NO: 2504789 - RNA, 19 nt, Homo sapiens
  misc_RNA (1)...(19): siRNA sense strand
cccugcaacuagaggugaa

SEQ ID NO: 2504790 - RNA, 19 nt, Homo sapiens
  misc_RNA (1)...(19): siRNA sense strand
aggagaaggaagagcugca

SEQ ID NO: 2504791 - RNA, 19 nt, Homo sapiens
  misc_RNA (1)...(19): siRNA sense strand
aagaagaacuaucgggcag

SEQ ID NO: 2504792 - RNA, 19 nt, Homo sapiens
  misc_RNA (1)...(19): siRNA sense strand
uggccauccacgaggucua

SEQ ID NO: 2504793 - RNA, 19 nt, Homo sapiens
  misc_RNA (1)...(19): siRNA sense strand
ucuccaagucccagcucaa

SEQ ID NO: 2504794 - RNA, 19 nt, Homo sapiens
  misc_RNA (1)...(19): siRNA sense strand
ugcuggaagaggaggaaga

SEQ ID NO: 2504795 - RNA, 19 nt, Homo sapiens
  misc_RNA (1)...(19): siRNA sense strand
ggauccagcaccagaaaau

SEQ ID NO: 2504796 - RNA, 19 nt, Homo sapiens
  misc_RNA (1)...(19): siRNA sense strand
guggaauaccugcugaaaa

SEQ ID NO: 2504797 - RNA, 19 nt, Homo sapiens
  misc_RNA (1)...(19): siRNA sense strand
ugaugcagcugaaggagga

SEQ ID NO: 2504798 - RNA, 19 nt, Homo sapiens
  misc_RNA (1)...(19): siRNA sense strand
uggaggagcuucuggccca

SEQ ID NO: 2504799 - RNA, 19 nt, Homo sapiens
  misc_RNA (1)...(19): siRNA sense strand
aagcaaaaucagaggggaa

SEQ ID NO: 2504800 - RNA, 19 nt, Homo sapiens
  misc_RNA (1)...(19): siRNA sense strand
uggaauacaguaagggaga

SEQ ID NO: 2504801 - RNA, 19 nt, Homo sapiens
  misc_RNA (1)...(19): siRNA sense strand
agaugugaucagugaaauu

SEQ ID NO: 2504802 - RNA, 19 nt, Homo sapiens
  misc_RNA (1)...(19): siRNA sense strand
aggauaagucaaaggagga

SEQ ID NO: 2504803 - RNA, 19 nt, Homo sapiens
  misc_RNA (1)...(19): siRNA sense strand
uugaagaaaucauggagca

SEQ ID NO: 2504804 - RNA, 19 nt, Homo sapiens
  misc_RNA (1)...(19): siRNA sense strand
cugagauugagguggcuaa

SEQ ID NO: 2504805 - RNA, 19 nt, Homo sapiens
  misc_RNA (1)...(19): siRNA sense strand
cugaauuggauggcagaaa

SEQ ID NO: 2504806 - RNA, 19 nt, Homo sapiens
  misc_RNA (1)...(19): siRNA sense strand
auuuacauuugaagggcua

SEQ ID NO: 2504807 - RNA, 19 nt, Homo sapiens
  misc_RNA (1)...(19): siRNA sense strand
caguguuggcucuggaauu

SEQ ID NO: 2504808 - RNA, 19 nt, Homo sapiens
  misc_RNA (1)...(19): siRNA sense strand
agauagagcuguuaagguc

SEQ ID NO: 2504809 - RNA, 19 nt, Homo sapiens
  misc_RNA (1)...(19): siRNA sense strand
cugaaauguuugacaaggu

SEQ ID NO: 2504810 - RNA, 19 nt, Homo sapiens
  misc_RNA (1)...(19): siRNA sense strand
aaguguuaccuuagcagaa

SEQ ID NO: 2504811 - RNA, 19 nt, Homo sapiens
  misc_RNA (1)...(19): siRNA sense strand
gcucuggaauuaagggaug

SEQ ID NO: 2504812 - RNA, 19 nt, Homo sapiens
  misc_RNA (1)...(19): siRNA sense strand
gcccaauguauguagccaa

SEQ ID NO: 2504813 - RNA, 19 nt, Homo sapiens
  misc_RNA (1)...(19): siRNA sense strand
auaagucaaaggaggaauu

SEQ ID NO: 2504814 - RNA, 19 nt, Homo sapiens
  misc_RNA (1)...(19): siRNA sense strand
cuucagaaagacaccaaau

SEQ ID NO: 2504815 - RNA, 19 nt, Homo sapiens
  misc_RNA (1)...(19): siRNA sense strand
cuguuaacauccaggacuu

SEQ ID NO: 2504816 - RNA, 19 nt, Homo sapiens
  misc_RNA (1)...(19): siRNA sense strand
aaucaggguuacagagcca

SEQ ID NO: 2504817 - RNA, 19 nt, Homo sapiens
  misc_RNA (1)...(19): siRNA sense strand
uggcaggugucgugggugu

SEQ ID NO: 2504818 - RNA, 19 nt, Homo sapiens
  misc_RNA (1)...(19): siRNA sense strand
ggagacggcucuuccggaa

SEQ ID NO: 2504819 - RNA, 19 nt, Homo sapiens
  misc_RNA (1)...(19): siRNA sense strand
gagccaucacggugcggaa

SEQ ID NO: 2504820 - RNA, 19 nt, Homo sapiens
  misc_RNA (1)...(19): siRNA sense strand
agguaccugcugagugaaa

SEQ ID NO: 2504821 - RNA, 19 nt, Homo sapiens
  misc_RNA (1)...(19): siRNA sense strand
cagucuauucagcggguuu

SEQ ID NO: 2504822 - RNA, 19 nt, Homo sapiens
  misc_RNA (1)...(19): siRNA sense strand
cagaaggcacacagggaca

SEQ ID NO: 2504823 - RNA, 19 nt, Homo sapiens
  misc_RNA (1)...(19): siRNA sense strand
cagaagguguugauggagu

SEQ ID NO: 2504824 - RNA, 19 nt, Homo sapiens
  misc_RNA (1)...(19): siRNA sense strand
cgcucaagcuggaagcaga

SEQ ID NO: 2504825 - RNA, 19 nt, Homo sapiens
  misc_RNA (1)...(19): siRNA sense strand
aguggagcguggagagcau

SEQ ID NO: 2504826 - RNA, 19 nt, Homo sapiens
  misc_RNA (1)...(19): siRNA sense strand
agucagagaaguuggugga

SEQ ID NO: 2504827 - RNA, 19 nt, Homo sapiens
  misc_RNA (1)...(19): siRNA sense strand
agguguugauggaguggau

SEQ ID NO: 2504828 - RNA, 19 nt, Homo sapiens
  misc_RNA (1)...(19): siRNA sense strand
gugaaagaggccaucguga

SEQ ID NO: 2504829 - RNA, 19 nt, Homo sapiens
  misc_RNA (1)...(19): siRNA sense strand
cugaauacagcacagacaa

SEQ ID NO: 2504830 - RNA, 19 nt, Homo sapiens
  misc_RNA (1)...(19): siRNA sense strand
aauuugaagaacugcagaa

SEQ ID NO: 2504831 - RNA, 19 nt, Homo sapiens
  misc_RNA (1)...(19): siRNA sense strand
aggacgucuuugaugaauu

SEQ ID NO: 2504832 - RNA, 19 nt, Homo sapiens
  misc_RNA (1)...(19): siRNA sense strand
auuuaaaggaggugacuaa

SEQ ID NO: 2504833 - RNA, 19 nt, Homo sapiens
  misc_RNA (1)...(19): siRNA sense strand
gcguggaggaggaggaaga

SEQ ID NO: 2504834 - RNA, 19 nt, Homo sapiens
  misc_RNA (1)...(19): siRNA sense strand
gacaaagaaucuauggcaa

SEQ ID NO: 2504835 - RNA, 19 nt, Homo sapiens
  misc_RNA (1)...(19): siRNA sense strand
auagaaacacagagggaca

SEQ ID NO: 2504836 - RNA, 19 nt, Homo sapiens
  misc_RNA (1)...(19): siRNA sense strand
gguuaaaggaagauggaag

SEQ ID NO: 2504837 - RNA, 19 nt, Homo sapiens
  misc_RNA (1)...(19): siRNA sense strand
ggaagauggaaguggaagu

SEQ ID NO: 2504838 - RNA, 19 nt, Homo sapiens
  misc_RNA (1)...(19): siRNA sense strand
aaauagaaacacagaggga

SEQ ID NO: 2504839 - RNA, 19 nt, Homo sapiens
  misc_RNA (1)...(19): siRNA sense strand
ccuugcagaugcugggcua

SEQ ID NO: 2504840 - RNA, 19 nt, Homo sapiens
  misc_RNA (1)...(19): siRNA sense strand
augacuacauggaggcuuu

SEQ ID NO: 2504841 - RNA, 19 nt, Homo sapiens
  misc_RNA (1)...(19): siRNA sense strand
ggucugcauucuaagggaa

SEQ ID NO: 2504842 - RNA, 19 nt, Homo sapiens
  misc_RNA (1)...(19): siRNA sense strand
ccuacaaaguuaacccaga

SEQ ID NO: 2504843 - RNA, 19 nt, Homo sapiens
  misc_RNA (1)...(19): siRNA sense strand
uggaaguggaagugcuuau

SEQ ID NO: 2504844 - RNA, 19 nt, Homo sapiens
  misc_RNA (1)...(19): siRNA sense strand
ucuuugauguugucagcaa

SEQ ID NO: 2504845 - RNA, 19 nt, Homo sapiens
  misc_RNA (1)...(19): siRNA sense strand
guggaagugcuuaugacaa

SEQ ID NO: 2504846 - RNA, 19 nt, Homo sapiens
  misc_RNA (1)...(19): siRNA sense strand
cugaaagcgcugacacaca

SEQ ID NO: 2504847 - RNA, 19 nt, Homo sapiens
  misc_RNA (1)...(19): siRNA sense strand
agggaagaaagcuuugaaa

SEQ ID NO: 2504848 - RNA, 19 nt, Homo sapiens
  misc_RNA (1)...(19): siRNA sense strand
cuacauugcaacagacagu

SEQ ID NO: 2504849 - RNA, 19 nt, Homo sapiens
  misc_RNA (1)...(19): siRNA sense strand
aaguuaacccagacaugaa

SEQ ID NO: 2504850 - RNA, 19 nt, Homo sapiens
  misc_RNA (1)...(19): siRNA sense strand
ucacaaaguugauggucug

SEQ ID NO: 2504851 - RNA, 19 nt, Homo sapiens
  misc_RNA (1)...(19): siRNA sense strand
ggauucugcucaugggacu

SEQ ID NO: 2504852 - RNA, 19 nt, Homo sapiens
  misc_RNA (1)...(19): siRNA sense strand
uuccaaaggacuucggcua

SEQ ID NO: 2504853 - RNA, 19 nt, Homo sapiens
  misc_RNA (1)...(19): siRNA sense strand
auauauggguuaaaggaag

SEQ ID NO: 2504854 - RNA, 19 nt, Homo sapiens
  misc_RNA (1)...(19): siRNA sense strand
aaggaagauggaaguggaa

SEQ ID NO: 2504855 - RNA, 19 nt, Homo sapiens
  misc_RNA (1)...(19): siRNA sense strand
gggagaaguugaaggagga

SEQ ID NO: 2504856 - RNA, 19 nt, Homo sapiens
  misc_RNA (1)...(19): siRNA sense strand
aguugaaggaggaggagaa

SEQ ID NO: 2504857 - RNA, 19 nt, Homo sapiens
  misc_RNA (1)...(19): siRNA sense strand
auuugaagaugaagagcuu

SEQ ID NO: 2504858 - RNA, 19 nt, Homo sapiens
  misc_RNA (1)...(19): siRNA sense strand
gaaacguggcugaggacga

SEQ ID NO: 2504859 - RNA, 19 nt, Homo sapiens
  misc_RNA (1)...(19): siRNA sense strand
aaccagaagcucagggaga

SEQ ID NO: 2504860 - RNA, 19 nt, Homo sapiens
  misc_RNA (1)...(19): siRNA sense strand
cgggaaacguggcugagga

SEQ ID NO: 2504861 - RNA, 19 nt, Homo sapiens
  misc_RNA (1)...(19): siRNA sense strand
augaagagcuugagcaguc

SEQ ID NO: 2504862 - RNA, 19 nt, Homo sapiens
  misc_RNA (1)...(19): siRNA sense strand
agaaguugaaggaggagga

SEQ ID NO: 2504863 - RNA, 19 nt, Homo sapiens
  misc_RNA (1)...(19): siRNA sense strand
gugaaugaguggcaggaug

SEQ ID NO: 2504864 - RNA, 19 nt, Homo sapiens
  misc_RNA (1)...(19): siRNA sense strand
uugaagaugaagagcuuga

SEQ ID NO: 2504865 - RNA, 19 nt, Homo sapiens
  misc_RNA (1)...(19): siRNA sense strand
ggucgggaaacguggcuga

SEQ ID NO: 2504866 - RNA, 19 nt, Homo sapiens
  misc_RNA (1)...(19): siRNA sense strand
caguguucgucaaagucaa

SEQ ID NO: 2504867 - RNA, 19 nt, Homo sapiens
  misc_RNA (1)...(19): siRNA sense strand
ugaaggaggaggagaacac

SEQ ID NO: 2504868 - RNA, 19 nt, Homo sapiens
  misc_RNA (1)...(19): siRNA sense strand
uggcaaucgccuugauguu

SEQ ID NO: 2504869 - RNA, 19 nt, Homo sapiens
  misc_RNA (1)...(19): siRNA sense strand
agaagagacuggugcgcaa

SEQ ID NO: 2504870 - RNA, 19 nt, Homo sapiens
  misc_RNA (1)...(19): siRNA sense strand
cuaugaagacaaagaucaa

SEQ ID NO: 2504871 - RNA, 19 nt, Homo sapiens
  misc_RNA (1)...(19): siRNA sense strand
aagaagagcuaaagagccu

SEQ ID NO: 2504872 - RNA, 19 nt, Homo sapiens
  misc_RNA (1)...(19): siRNA sense strand
uggagaaggaagugguaca

SEQ ID NO: 2504873 - RNA, 19 nt, Homo sapiens
  misc_RNA (1)...(19): siRNA sense strand
agacaaagaucaaaggccu

SEQ ID NO: 2504874 - RNA, 19 nt, Homo sapiens
  misc_RNA (1)...(19): siRNA sense strand
gaacugagcugcugccaca

SEQ ID NO: 2504875 - RNA, 19 nt, Homo sapiens
  misc_RNA (1)...(19): siRNA sense strand
agaauuagguccagcagca

SEQ ID NO: 2504876 - RNA, 19 nt, Homo sapiens
  misc_RNA (1)...(19): siRNA sense strand
gcuaaagagccuaggagcu

SEQ ID NO: 2504877 - RNA, 19 nt, Homo sapiens
  misc_RNA (1)...(19): siRNA sense strand
cguacaaaccacaggugau

SEQ ID NO: 2504878 - RNA, 19 nt, Homo sapiens
  misc_RNA (1)...(19): siRNA sense strand
gaaaaguacuauuggagga

SEQ ID NO: 2504879 - RNA, 19 nt, Homo sapiens
  misc_RNA (1)...(19): siRNA sense strand
caaacuacuugaagggucu

SEQ ID NO: 2504880 - RNA, 19 nt, Homo sapiens
  misc_RNA (1)...(19): siRNA sense strand
aaguacuauuggaggauga

SEQ ID NO: 2504881 - RNA, 19 nt, Homo sapiens
  misc_RNA (1)...(19): siRNA sense strand
cugcuuugguccagggcuu

SEQ ID NO: 2504882 - RNA, 19 nt, Homo sapiens
  misc_RNA (1)...(19): siRNA sense strand
cagaaggaacugaaggacu

SEQ ID NO: 2504883 - RNA, 19 nt, Homo sapiens
  misc_RNA (1)...(19): siRNA sense strand
uggaaaucccucagcugaa

SEQ ID NO: 2504884 - RNA, 19 nt, Homo sapiens
  misc_RNA (1)...(19): siRNA sense strand
caaauuugacuaacggaga

SEQ ID NO: 2504885 - RNA, 19 nt, Homo sapiens
  misc_RNA (1)...(19): siRNA sense strand
agggaauaugguugcacaa

SEQ ID NO: 2504886 - RNA, 19 nt, Homo sapiens
  misc_RNA (1)...(19): siRNA sense strand
cgagcagauuccagccauu

SEQ ID NO: 2504887 - RNA, 19 nt, Homo sapiens
  misc_RNA (1)...(19): siRNA sense strand
cccgggaagaagagcuaaa

SEQ ID NO: 2504888 - RNA, 19 nt, Homo sapiens
  misc_RNA (1)...(19): siRNA sense strand
cgccuuuacugcuggaaca

SEQ ID NO: 2504889 - RNA, 19 nt, Homo sapiens
  misc_RNA (1)...(19): siRNA sense strand
gugaaaucuggcaacuaua

SEQ ID NO: 2504890 - RNA, 19 nt, Homo sapiens
  misc_RNA (1)...(19): siRNA sense strand
gggcugaugcugaggaccu

SEQ ID NO: 2504891 - RNA, 19 nt, Homo sapiens
  misc_RNA (1)...(19): siRNA sense strand
guguauggacagaaggaac

SEQ ID NO: 2504892 - RNA, 19 nt, Homo sapiens
  misc_RNA (1)...(19): siRNA sense strand
uggcaagugaacagaggga

SEQ ID NO: 2504893 - RNA, 19 nt, Homo sapiens
  misc_RNA (1)...(19): siRNA sense strand
cggagauuguggagaccau

SEQ ID NO: 2504894 - RNA, 19 nt, Homo sapiens
  misc_RNA (1)...(19): siRNA sense strand
aagaaauuacgauggaaca

SEQ ID NO: 2504895 - RNA, 19 nt, Homo sapiens
  misc_RNA (1)...(19): siRNA sense strand
uguauaaagaagagacacu

SEQ ID NO: 2504896 - RNA, 19 nt, Homo sapiens
  misc_RNA (1)...(19): siRNA sense strand
gcuuagagugggaccugaa

SEQ ID NO: 2504897 - RNA, 19 nt, Homo sapiens
  misc_RNA (1)...(19): siRNA sense strand
gaagaaauuacgauggaac

SEQ ID NO: 2504898 - RNA, 19 nt, Homo sapiens
  misc_RNA (1)...(19): siRNA sense strand
cgauauaaucaaugaggug

SEQ ID NO: 2504899 - RNA, 19 nt, Homo sapiens
  misc_RNA (1)...(19): siRNA sense strand
augaaauagcccagaugau

SEQ ID NO: 2504900 - RNA, 19 nt, Homo sapiens
  misc_RNA (1)...(19): siRNA sense strand
ccuguauaaagaagagaca

SEQ ID NO: 2504901 - RNA, 19 nt, Homo sapiens
  misc_RNA (1)...(19): siRNA sense strand
aggagcagcugaugagcca

SEQ ID NO: 2504902 - RNA, 19 nt, Homo sapiens
  misc_RNA (1)...(19): siRNA sense strand
ccaacaacuuuacaggcuu

SEQ ID NO: 2504903 - RNA, 19 nt, Homo sapiens
  misc_RNA (1)...(19): siRNA sense strand
gcucaaggcuggauggucc

SEQ ID NO: 2504904 - RNA, 19 nt, Homo sapiens
  misc_RNA (1)...(19): siRNA sense strand
uguggagaccauagacaau

SEQ ID NO: 2504905 - RNA, 19 nt, Homo sapiens
  misc_RNA (1)...(19): siRNA sense strand
gcuucauagcauugguaaa

SEQ ID NO: 2504906 - RNA, 19 nt, Homo sapiens
  misc_RNA (1)...(19): siRNA sense strand
gaaagagauuguacggaca

SEQ ID NO: 2504907 - RNA, 19 nt, Homo sapiens
  misc_RNA (1)...(19): siRNA sense strand
caagugagguacuggguga

SEQ ID NO: 2504908 - RNA, 19 nt, Homo sapiens
  misc_RNA (1)...(19): siRNA sense strand
gguacugggugaaaggaga

SEQ ID NO: 2504909 - RNA, 19 nt, Homo sapiens
  misc_RNA (1)...(19): siRNA sense strand
ggggaaacaagaagcuaaa

SEQ ID NO: 2504910 - RNA, 19 nt, Homo sapiens
  misc_RNA (1)...(19): siRNA sense strand
gcuccaugguaaaggaucu

SEQ ID NO: 2504911 - RNA, 19 nt, Homo sapiens
  misc_RNA (1)...(19): siRNA sense strand
ucaagaagaugcagcucca

SEQ ID NO: 2504912 - RNA, 19 nt, Homo sapiens
  misc_RNA (1)...(19): siRNA sense strand
cuguaaccacgcuaggaaa

SEQ ID NO: 2504913 - RNA, 19 nt, Homo sapiens
  misc_RNA (1)...(19): siRNA sense strand
gaugcagcuccaugguaaa

SEQ ID NO: 2504914 - RNA, 19 nt, Homo sapiens
  misc_RNA (1)...(19): siRNA sense strand
acaagaagcuaaagcagac

SEQ ID NO: 2504915 - RNA, 19 nt, Homo sapiens
  misc_RNA (1)...(19): siRNA sense strand
aguguagaaguaagaacua

SEQ ID NO: 2504916 - RNA, 19 nt, Homo sapiens
  misc_RNA (1)...(19): siRNA sense strand
uaggaaacuuagugcccuu

SEQ ID NO: 2504917 - RNA, 19 nt, Homo sapiens
  misc_RNA (1)...(19): siRNA sense strand
ccacauaaaagcuuugcaa

SEQ ID NO: 2504918 - RNA, 19 nt, Homo sapiens
  misc_RNA (1)...(19): siRNA sense strand
ccaaggagcugcugggcuu

SEQ ID NO: 2504919 - RNA, 19 nt, Homo sapiens
  misc_RNA (1)...(19): siRNA sense strand
gcaccagccuucagggaca

SEQ ID NO: 2504920 - RNA, 19 nt, Homo sapiens
  misc_RNA (1)...(19): siRNA sense strand
aagcaugcgaagagagaca

SEQ ID NO: 2504921 - RNA, 19 nt, Homo sapiens
  misc_RNA (1)...(19): siRNA sense strand
cgacauuagcaggcauaaa

SEQ ID NO: 2504922 - RNA, 19 nt, Homo sapiens
  misc_RNA (1)...(19): siRNA sense strand
ccuucagggacaagaaaca

SEQ ID NO: 2504923 - RNA, 19 nt, Homo sapiens
  misc_RNA (1)...(19): siRNA sense strand
acccagacuaugagaauau

SEQ ID NO: 2504924 - RNA, 19 nt, Homo sapiens
  misc_RNA (1)...(19): siRNA sense strand
ucuacaagcaccaggaagu

SEQ ID NO: 2504925 - RNA, 19 nt, Homo sapiens
  misc_RNA (1)...(19): siRNA sense strand
uggaggugcugcagaaaau

SEQ ID NO: 2504926 - RNA, 19 nt, Homo sapiens
  misc_RNA (1)...(19): siRNA sense strand
ucaccauggucaggagcaa

SEQ ID NO: 2504927 - RNA, 19 nt, Homo sapiens
  misc_RNA (1)...(19): siRNA sense strand
gggucucagccaagaauca

SEQ ID NO: 2504928 - RNA, 19 nt, Homo sapiens
  misc_RNA (1)...(19): siRNA sense strand
cagccuaccuggaaagcca

SEQ ID NO: 2504929 - RNA, 19 nt, Homo sapiens
  misc_RNA (1)...(19): siRNA sense strand
caaugagaagacugaucaa

SEQ ID NO: 2504930 - RNA, 19 nt, Homo sapiens
  misc_RNA (1)...(19): siRNA sense strand
gcuucauagcauugguaaa

SEQ ID NO: 2504931 - RNA, 19 nt, Homo sapiens
  misc_RNA (1)...(19): siRNA sense strand
ggggaaacaagaagcuaaa

SEQ ID NO: 2504932 - RNA, 19 nt, Homo sapiens
  misc_RNA (1)...(19): siRNA sense strand
cuuucaaauacaacgguaa

SEQ ID NO: 2504933 - RNA, 19 nt, Homo sapiens
  misc_RNA (1)...(19): siRNA sense strand
gagugguuuaagagacaaa

SEQ ID NO: 2504934 - RNA, 19 nt, Homo sapiens
  misc_RNA (1)...(19): siRNA sense strand
agaugcagcuccauggcaa

SEQ ID NO: 2504935 - RNA, 19 nt, Homo sapiens
  misc_RNA (1)...(19): siRNA sense strand
uugagugguuuaagagaca

SEQ ID NO: 2504936 - RNA, 19 nt, Homo sapiens
  misc_RNA (1)...(19): siRNA sense strand
ucucaagaucccagcauga

SEQ ID NO: 2504937 - RNA, 19 nt, Homo sapiens
  misc_RNA (1)...(19): siRNA sense strand
acaagaagcuaaagcagac

SEQ ID NO: 2504938 - RNA, 19 nt, Homo sapiens
  misc_RNA (1)...(19): siRNA sense strand
gcuccauggcaaaggaucu

SEQ ID NO: 2504939 - RNA, 19 nt, Homo sapiens
  misc_RNA (1)...(19): siRNA sense strand
gaugcagcuccauggcaaa

SEQ ID NO: 2504940 - RNA, 19 nt, Homo sapiens
  misc_RNA (1)...(19): siRNA sense strand
acgacaaauuagccagaaa

SEQ ID NO: 2504941 - RNA, 19 nt, Homo sapiens
  misc_RNA (1)...(19): siRNA sense strand
agauugaggaugaggauga

SEQ ID NO: 2504942 - RNA, 19 nt, Homo sapiens
  misc_RNA (1)...(19): siRNA sense strand
cuguggagaucaugggcaa

SEQ ID NO: 2504943 - RNA, 19 nt, Homo sapiens
  misc_RNA (1)...(19): siRNA sense strand
ccaacaaacaggaacucaa

SEQ ID NO: 2504944 - RNA, 19 nt, Homo sapiens
  misc_RNA (1)...(19): siRNA sense strand
caucaaaggaauuccaaaa

SEQ ID NO: 2504945 - RNA, 19 nt, Homo sapiens
  misc_RNA (1)...(19): siRNA sense strand
uggugguggugguggcuaa

SEQ ID NO: 2504946 - RNA, 19 nt, Homo sapiens
  misc_RNA (1)...(19): siRNA sense strand
uggaagagcccgcugggaa

SEQ ID NO: 2504947 - RNA, 19 nt, Homo sapiens
  misc_RNA (1)...(19): siRNA sense strand
gugcaaaagaagaaaccaa

SEQ ID NO: 2504948 - RNA, 19 nt, Homo sapiens
  misc_RNA (1)...(19): siRNA sense strand
cgaauacaacacugagaau

SEQ ID NO: 2504949 - RNA, 19 nt, Homo sapiens
  misc_RNA (1)...(19): siRNA sense strand
ccaaaagcuccgagucaua

SEQ ID NO: 2504950 - RNA, 19 nt, Homo sapiens
  misc_RNA (1)...(19): siRNA sense strand
uaugaugaggaaaggguua

SEQ ID NO: 2504951 - RNA, 19 nt, Homo sapiens
  misc_RNA (1)...(19): siRNA sense strand
uggcggaagagcugggcaa

SEQ ID NO: 2504952 - RNA, 19 nt, Homo sapiens
  misc_RNA (1)...(19): siRNA sense strand
ugaagugauagaagaggaa

SEQ ID NO: 2504953 - RNA, 19 nt, Homo sapiens
  misc_RNA (1)...(19): siRNA sense strand
ggaagugcuagcugaggaa

SEQ ID NO: 2504954 - RNA, 19 nt, Homo sapiens
  misc_RNA (1)...(19): siRNA sense strand
aaccaaaagucaaggaaga

SEQ ID NO: 2504955 - RNA, 19 nt, Homo sapiens
  misc_RNA (1)...(19): siRNA sense strand
gaucgaugucacagcaaau

SEQ ID NO: 2504956 - RNA, 19 nt, Homo sapiens
  misc_RNA (1)...(19): siRNA sense strand
aggaaaaggaggugccuau

SEQ ID NO: 2504957 - RNA, 19 nt, Homo sapiens
  misc_RNA (1)...(19): siRNA sense strand
gcaaaagaagaaaccaaaa

SEQ ID NO: 2504958 - RNA, 19 nt, Homo sapiens
  misc_RNA (1)...(19): siRNA sense strand
gcuccgagucauaugguau

SEQ ID NO: 2504959 - RNA, 19 nt, Homo sapiens
  misc_RNA (1)...(19): siRNA sense strand
uggaggaauugggcagaaa

SEQ ID NO: 2504960 - RNA, 19 nt, Homo sapiens
  misc_RNA (1)...(19): siRNA sense strand
ccuuguggaugcagacgaa

SEQ ID NO: 2504961 - RNA, 19 nt, Homo sapiens
  misc_RNA (1)...(19): siRNA sense strand
gcaucaaaggaauuccaaa

SEQ ID NO: 2504962 - RNA, 19 nt, Homo sapiens
  misc_RNA (1)...(19): siRNA sense strand
acguagucgucuuugacaa

SEQ ID NO: 2504963 - RNA, 19 nt, Homo sapiens
  misc_RNA (1)...(19): siRNA sense strand
gcugcaaaggagugguuga

SEQ ID NO: 2504964 - RNA, 19 nt, Homo sapiens
  misc_RNA (1)...(19): siRNA sense strand
cuggaaagccacaucaaaa

SEQ ID NO: 2504965 - RNA, 19 nt, Homo sapiens
  misc_RNA (1)...(19): siRNA sense strand
acgcagucuccuagugcua

SEQ ID NO: 2504966 - RNA, 19 nt, Homo sapiens
  misc_RNA (1)...(19): siRNA sense strand
ugggcaaagcuguggagau

SEQ ID NO: 2504967 - RNA, 19 nt, Homo sapiens
  misc_RNA (1)...(19): siRNA sense strand
gcaacaggucagagcccau

SEQ ID NO: 2504968 - RNA, 19 nt, Homo sapiens
  misc_RNA (1)...(19): siRNA sense strand
augcagacgaacccagaaa

SEQ ID NO: 2504969 - RNA, 19 nt, Homo sapiens
  misc_RNA (1)...(19): siRNA sense strand
cgagcagguggcagaguuu

SEQ ID NO: 2504970 - RNA, 19 nt, Homo sapiens
  misc_RNA (1)...(19): siRNA sense strand
acaaagaaaaggacguauu

SEQ ID NO: 2504971 - RNA, 19 nt, Homo sapiens
  misc_RNA (1)...(19): siRNA sense strand
acguauuugugauguucua

SEQ ID NO: 2504972 - RNA, 19 nt, Homo sapiens
  misc_RNA (1)...(19): siRNA sense strand
agaagaaaccaaaagucaa

SEQ ID NO: 2504973 - RNA, 19 nt, Homo sapiens
  misc_RNA (1)...(19): siRNA sense strand
cauuauaagcuggcaucaa

SEQ ID NO: 2504974 - RNA, 19 nt, Homo sapiens
  misc_RNA (1)...(19): siRNA sense strand
augaagugauagaagagga

SEQ ID NO: 2504975 - RNA, 19 nt, Homo sapiens
  misc_RNA (1)...(19): siRNA sense strand
agaucaugggcaaaggcaa

SEQ ID NO: 2504976 - RNA, 19 nt, Homo sapiens
  misc_RNA (1)...(19): siRNA sense strand
gaucaugggcaaaggcaag

SEQ ID NO: 2504977 - RNA, 19 nt, Homo sapiens
  misc_RNA (1)...(19): siRNA sense strand
guuuggagucauaacgauu

SEQ ID NO: 2504978 - RNA, 19 nt, Homo sapiens
  misc_RNA (1)...(19): siRNA sense strand
gccgcagcuuccugaguaa

SEQ ID NO: 2504979 - RNA, 19 nt, Homo sapiens
  misc_RNA (1)...(19): siRNA sense strand
agaucgaugucacagcaaa

SEQ ID NO: 2504980 - RNA, 19 nt, Homo sapiens
  misc_RNA (1)...(19): siRNA sense strand
aggaugaggaugagcuguu

SEQ ID NO: 2504981 - RNA, 19 nt, Homo sapiens
  misc_RNA (1)...(19): siRNA sense strand
uccaggauuuagaggaaga

SEQ ID NO: 2504982 - RNA, 19 nt, Homo sapiens
  misc_RNA (1)...(19): siRNA sense strand
acagcucaccagagguuaa

SEQ ID NO: 2504983 - RNA, 19 nt, Homo sapiens
  misc_RNA (1)...(19): siRNA sense strand
caagaaugggaucggcuuu

SEQ ID NO: 2504984 - RNA, 19 nt, Homo sapiens
  misc_RNA (1)...(19): siRNA sense strand
cugcaaaggagugguugaa

SEQ ID NO: 2504985 - RNA, 19 nt, Homo sapiens
  misc_RNA (1)...(19): siRNA sense strand
ucccacuguuggaggaauu

SEQ ID NO: 2504986 - RNA, 19 nt, Homo sapiens
  misc_RNA (1)...(19): siRNA sense strand
gcaaaggcaagaaugggau

SEQ ID NO: 2504987 - RNA, 19 nt, Homo sapiens
  misc_RNA (1)...(19): siRNA sense strand
gagucauaacgauuggcaa

SEQ ID NO: 2504988 - RNA, 19 nt, Homo sapiens
  misc_RNA (1)...(19): siRNA sense strand
guaccaacaaacaggaacu

SEQ ID NO: 2504989 - RNA, 19 nt, Homo sapiens
  misc_RNA (1)...(19): siRNA sense strand
cuucagaugacauaaccua

SEQ ID NO: 2504990 - RNA, 19 nt, Homo sapiens
  misc_RNA (1)...(19): siRNA sense strand
uuaagcagcucguggggaa

SEQ ID NO: 2504991 - RNA, 19 nt, Homo sapiens
  misc_RNA (1)...(19): siRNA sense strand
gcaagaaugggaucggcuu

SEQ ID NO: 2504992 - RNA, 19 nt, Homo sapiens
  misc_RNA (1)...(19): siRNA sense strand
aagaaguagcagaguuguu

SEQ ID NO: 2504993 - RNA, 19 nt, Homo sapiens
  misc_RNA (1)...(19): siRNA sense strand
aagugauagaagaggaagu

SEQ ID NO: 2504994 - RNA, 19 nt, Homo sapiens
  misc_RNA (1)...(19): siRNA sense strand
uuguaaucuugcugugaua

SEQ ID NO: 2504995 - RNA, 19 nt, Homo sapiens
  misc_RNA (1)...(19): siRNA sense strand
gcuucauagcccuaguaaa

SEQ ID NO: 2504996 - RNA, 19 nt, Homo sapiens
  misc_RNA (1)...(19): siRNA sense strand
uaaccauggaugagagagu

SEQ ID NO: 2504997 - RNA, 19 nt, Homo sapiens
  misc_RNA (1)...(19): siRNA sense strand
augagagaguguggacaaa

SEQ ID NO: 2504998 - RNA, 19 nt, Homo sapiens
  misc_RNA (1)...(19): siRNA sense strand
augggaaguaggaagcuaa

SEQ ID NO: 2504999 - RNA, 19 nt, Homo sapiens
  misc_RNA (1)...(19): siRNA sense strand
gcuccauagcaaaggaucu

SEQ ID NO: 2505000 - RNA, 19 nt, Homo sapiens
  misc_RNA (1)...(19): siRNA sense strand
gauuaugggaaguaggaag

SEQ ID NO: 2505001 - RNA, 19 nt, Homo sapiens
  misc_RNA (1)...(19): siRNA sense strand
cccuuuacucugagccuaa

SEQ ID NO: 2505002 - RNA, 19 nt, Homo sapiens
  misc_RNA (1)...(19): siRNA sense strand
caguugaaggcgagacaga

SEQ ID NO: 2505003 - RNA, 19 nt, Homo sapiens
  misc_RNA (1)...(19): siRNA sense strand
agcuaaugauguaaggcau

SEQ ID NO: 2505004 - RNA, 19 nt, Homo sapiens
  misc_RNA (1)...(19): siRNA sense strand
gggcaaaaggacagaacca

SEQ ID NO: 2505005 - RNA, 19 nt, Homo sapiens
  misc_RNA (1)...(19): siRNA sense strand
guauauaaauguguggaca

SEQ ID NO: 2505006 - RNA, 19 nt, Homo sapiens
  misc_RNA (1)...(19): siRNA sense strand
agaugcagcuccauggcaa

SEQ ID NO: 2505007 - RNA, 19 nt, Homo sapiens
  misc_RNA (1)...(19): siRNA sense strand
ugaagaagaugcagcucca

SEQ ID NO: 2505008 - RNA, 19 nt, Homo sapiens
  misc_RNA (1)...(19): siRNA sense strand
uugccugggucaagagaca

SEQ ID NO: 2505009 - RNA, 19 nt, Homo sapiens
  misc_RNA (1)...(19): siRNA sense strand
guugguuugcucuggguaa

SEQ ID NO: 2505010 - RNA, 19 nt, Homo sapiens
  misc_RNA (1)...(19): siRNA sense strand
gcuccauggcaaaggaucu

SEQ ID NO: 2505011 - RNA, 19 nt, Homo sapiens
  misc_RNA (1)...(19): siRNA sense strand
gaugcagcuccauggcaaa

SEQ ID NO: 2505012 - RNA, 19 nt, Homo sapiens
  misc_RNA (1)...(19): siRNA sense strand
ccacauaaaagcucugcaa

SEQ ID NO: 2505013 - RNA, 19 nt, Homo sapiens
  misc_RNA (1)...(19): siRNA sense strand
cagcgagagccgaggagaa

SEQ ID NO: 2505014 - RNA, 19 nt, Homo sapiens
  misc_RNA (1)...(19): siRNA sense strand
ggaagauguuugagcccuu

SEQ ID NO: 2505015 - RNA, 19 nt, Homo sapiens
  misc_RNA (1)...(19): siRNA sense strand
cagaugaggacguccggaa

SEQ ID NO: 2505016 - RNA, 19 nt, Homo sapiens
  misc_RNA (1)...(19): siRNA sense strand
gagaaggaccugaagccca

SEQ ID NO: 2505017 - RNA, 19 nt, Homo sapiens
  misc_RNA (1)...(19): siRNA sense strand
ggagaagaccggaagcucu

SEQ ID NO: 2505018 - RNA, 19 nt, Homo sapiens
  misc_RNA (1)...(19): siRNA sense strand
agaaggaccugaagcccau

SEQ ID NO: 2505019 - RNA, 19 nt, Homo sapiens
  misc_RNA (1)...(19): siRNA sense strand
ucgugaaguuccagaccca

SEQ ID NO: 2505020 - RNA, 19 nt, Homo sapiens
  misc_RNA (1)...(19): siRNA sense strand
gcucugaguugguggcuga

SEQ ID NO: 2505021 - RNA, 19 nt, Homo sapiens
  misc_RNA (1)...(19): siRNA sense strand
agacagcagguuaaggaaa

SEQ ID NO: 2505022 - RNA, 19 nt, Homo sapiens
  misc_RNA (1)...(19): siRNA sense strand
aagaagaugcagacagaga

SEQ ID NO: 2505023 - RNA, 19 nt, Homo sapiens
  misc_RNA (1)...(19): siRNA sense strand
cauggauggagauggaaua

SEQ ID NO: 2505024 - RNA, 19 nt, Homo sapiens
  misc_RNA (1)...(19): siRNA sense strand
cuuaaauaacgaccagaaa

SEQ ID NO: 2505025 - RNA, 19 nt, Homo sapiens
  misc_RNA (1)...(19): siRNA sense strand
cggaaagaaacugcagaaa

SEQ ID NO: 2505026 - RNA, 19 nt, Homo sapiens
  misc_RNA (1)...(19): siRNA sense strand
gugaugaugaugaugacaa

SEQ ID NO: 2505027 - RNA, 19 nt, Homo sapiens
  misc_RNA (1)...(19): siRNA sense strand
ugaugaugaugaugacaau

SEQ ID NO: 2505028 - RNA, 19 nt, Homo sapiens
  misc_RNA (1)...(19): siRNA sense strand
gaugggacgcuuaaacaaa

SEQ ID NO: 2505029 - RNA, 19 nt, Homo sapiens
  misc_RNA (1)...(19): siRNA sense strand
gagcagacauauuggcaag

SEQ ID NO: 2505030 - RNA, 19 nt, Homo sapiens
  misc_RNA (1)...(19): siRNA sense strand
cccagaaaccugagaccau

SEQ ID NO: 2505031 - RNA, 19 nt, Homo sapiens
  misc_RNA (1)...(19): siRNA sense strand
uggaauuggugacgagugu

SEQ ID NO: 2505032 - RNA, 19 nt, Homo sapiens
  misc_RNA (1)...(19): siRNA sense strand
aggucaggcugcuguggaa

SEQ ID NO: 2505033 - RNA, 19 nt, Homo sapiens
  misc_RNA (1)...(19): siRNA sense strand
acugcaaauaugugccaaa

SEQ ID NO: 2505034 - RNA, 19 nt, Homo sapiens
  misc_RNA (1)...(19): siRNA sense strand
augaugacauggauggaga

SEQ ID NO: 2505035 - RNA, 19 nt, Homo sapiens
  misc_RNA (1)...(19): siRNA sense strand
acaccaaucaggacaguga

SEQ ID NO: 2505036 - RNA, 19 nt, Homo sapiens
  misc_RNA (1)...(19): siRNA sense strand
ucuuaaauaacgaccagaa

SEQ ID NO: 2505037 - RNA, 19 nt, Homo sapiens
  misc_RNA (1)...(19): siRNA sense strand
ggagaugggcaccaggaca

SEQ ID NO: 2505038 - RNA, 19 nt, Homo sapiens
  misc_RNA (1)...(19): siRNA sense strand
ggagcagacauauuggcaa

SEQ ID NO: 2505039 - RNA, 19 nt, Homo sapiens
  misc_RNA (1)...(19): siRNA sense strand
cuccugaggcugagcaauu

SEQ ID NO: 2505040 - RNA, 19 nt, Homo sapiens
  misc_RNA (1)...(19): siRNA sense strand
ggugcaggguguugggauc

SEQ ID NO: 2505041 - RNA, 19 nt, Homo sapiens
  misc_RNA (1)...(19): siRNA sense strand
cgaaauggagcgugcguuc

SEQ ID NO: 2505042 - RNA, 19 nt, Homo sapiens
  misc_RNA (1)...(19): siRNA sense strand
aggagaugccugugaugau

SEQ ID NO: 2505043 - RNA, 19 nt, Homo sapiens
  misc_RNA (1)...(19): siRNA sense strand
cagcccaggaggauagcaa

SEQ ID NO: 2505044 - RNA, 19 nt, Homo sapiens
  misc_RNA (1)...(19): siRNA sense strand
gcguuaauacuuugggauc

SEQ ID NO: 2505045 - RNA, 19 nt, Homo sapiens
  misc_RNA (1)...(19): siRNA sense strand
cuauaucuguggaaaggau

SEQ ID NO: 2505046 - RNA, 19 nt, Homo sapiens
  misc_RNA (1)...(19): siRNA sense strand
acgaggaugcugacggaga

SEQ ID NO: 2505047 - RNA, 19 nt, Homo sapiens
  misc_RNA (1)...(19): siRNA sense strand
acaccaucccugaggacuu

SEQ ID NO: 2505048 - RNA, 19 nt, Homo sapiens
  misc_RNA (1)...(19): siRNA sense strand
cguuaauacuuugggaucu

SEQ ID NO: 2505049 - RNA, 19 nt, Homo sapiens
  misc_RNA (1)...(19): siRNA sense strand
aauaacgaccagaaagaca

SEQ ID NO: 2505050 - RNA, 19 nt, Homo sapiens
  misc_RNA (1)...(19): siRNA sense strand
ucagauaaggggaugcaaa

SEQ ID NO: 2505051 - RNA, 19 nt, Homo sapiens
  misc_RNA (1)...(19): siRNA sense strand
cacaaugcguggaggccga

SEQ ID NO: 2505052 - RNA, 19 nt, Homo sapiens
  misc_RNA (1)...(19): siRNA sense strand
acaccgauaaggauggaau

SEQ ID NO: 2505053 - RNA, 19 nt, Homo sapiens
  misc_RNA (1)...(19): siRNA sense strand
ucuacguggucauguggaa

SEQ ID NO: 2505054 - RNA, 19 nt, Homo sapiens
  misc_RNA (1)...(19): siRNA sense strand
ucuuccagucagaggcuaa

SEQ ID NO: 2505055 - RNA, 19 nt, Homo sapiens
  misc_RNA (1)...(19): siRNA sense strand
gcaugaaccuuguggguca

SEQ ID NO: 2505056 - RNA, 19 nt, Homo sapiens
  misc_RNA (1)...(19): siRNA sense strand
caggaugagaucuggaaau

SEQ ID NO: 2505057 - RNA, 19 nt, Homo sapiens
  misc_RNA (1)...(19): siRNA sense strand
ugaucaagugugaagaaga

SEQ ID NO: 2505058 - RNA, 19 nt, Homo sapiens
  misc_RNA (1)...(19): siRNA sense strand
gaacaagugccuagagcuc

SEQ ID NO: 2505059 - RNA, 19 nt, Homo sapiens
  misc_RNA (1)...(19): siRNA sense strand
ucugaaggcugaaucggaa

SEQ ID NO: 2505060 - RNA, 19 nt, Homo sapiens
  misc_RNA (1)...(19): siRNA sense strand
caguggagaaguacaucaa

SEQ ID NO: 2505061 - RNA, 19 nt, Homo sapiens
  misc_RNA (1)...(19): siRNA sense strand
gagaaguacaucaaggucu

SEQ ID NO: 2505062 - RNA, 19 nt, Homo sapiens
  misc_RNA (1)...(19): siRNA sense strand
cuggagaucugcagugcca

SEQ ID NO: 2505063 - RNA, 19 nt, Homo sapiens
  misc_RNA (1)...(19): siRNA sense strand
gcccaaaauccauggcaaa

SEQ ID NO: 2505064 - RNA, 19 nt, Homo sapiens
  misc_RNA (1)...(19): siRNA sense strand
caaugaacgaacacggcua

SEQ ID NO: 2505065 - RNA, 19 nt, Homo sapiens
  misc_RNA (1)...(19): siRNA sense strand
agccaauuuacauggauua

SEQ ID NO: 2505066 - RNA, 19 nt, Homo sapiens
  misc_RNA (1)...(19): siRNA sense strand
cuuuacggguggaagccaa

SEQ ID NO: 2505067 - RNA, 19 nt, Homo sapiens
  misc_RNA (1)...(19): siRNA sense strand
ccuaccaaaugcagcccaa

SEQ ID NO: 2505068 - RNA, 19 nt, Homo sapiens
  misc_RNA (1)...(19): siRNA sense strand
acuuagaagacgagcugua

SEQ ID NO: 2505069 - RNA, 19 nt, Homo sapiens
  misc_RNA (1)...(19): siRNA sense strand
cugaagaugccgaccgcaa

SEQ ID NO: 2505070 - RNA, 19 nt, Homo sapiens
  misc_RNA (1)...(19): siRNA sense strand
gaggauaaguacucgcaga

SEQ ID NO: 2505071 - RNA, 19 nt, Homo sapiens
  misc_RNA (1)...(19): siRNA sense strand
aggcagcagaugagaguga

SEQ ID NO: 2505072 - RNA, 19 nt, Homo sapiens
  misc_RNA (1)...(19): siRNA sense strand
gaugagagugagagaggca

SEQ ID NO: 2505073 - RNA, 19 nt, Homo sapiens
  misc_RNA (1)...(19): siRNA sense strand
aagacagauaugaggaaga

SEQ ID NO: 2505074 - RNA, 19 nt, Homo sapiens
  misc_RNA (1)...(19): siRNA sense strand
gcuggagcuggcagagaaa

SEQ ID NO: 2505075 - RNA, 19 nt, Homo sapiens
  misc_RNA (1)...(19): siRNA sense strand
ccgcaaauaugaagaggug

SEQ ID NO: 2505076 - RNA, 19 nt, Homo sapiens
  misc_RNA (1)...(19): siRNA sense strand
aggauaaguacucgcagaa

SEQ ID NO: 2505077 - RNA, 19 nt, Homo sapiens
  misc_RNA (1)...(19): siRNA sense strand
aaacugaaguacaaagcca

SEQ ID NO: 2505078 - RNA, 19 nt, Homo sapiens
  misc_RNA (1)...(19): siRNA sense strand
cggcggaagacaggagcaa

SEQ ID NO: 2505079 - RNA, 19 nt, Homo sapiens
  misc_RNA (1)...(19): siRNA sense strand
caguaacuaaauuggagaa

SEQ ID NO: 2505080 - RNA, 19 nt, Homo sapiens
  misc_RNA (1)...(19): siRNA sense strand
ccgacagcuggaagaacaa

SEQ ID NO: 2505081 - RNA, 19 nt, Homo sapiens
  misc_RNA (1)...(19): siRNA sense strand
aagaagaugcagaugcuga

SEQ ID NO: 2505082 - RNA, 19 nt, Homo sapiens
  misc_RNA (1)...(19): siRNA sense strand
gcagcagaugagagugaga

SEQ ID NO: 2505083 - RNA, 19 nt, Homo sapiens
  misc_RNA (1)...(19): siRNA sense strand
aggagauccaacugaaaga

SEQ ID NO: 2505084 - RNA, 19 nt, Homo sapiens
  misc_RNA (1)...(19): siRNA sense strand
uggucaucauugagagcga

SEQ ID NO: 2505085 - RNA, 19 nt, Homo sapiens
  misc_RNA (1)...(19): siRNA sense strand
acucaagggcaccgaagau

SEQ ID NO: 2505086 - RNA, 19 nt, Homo sapiens
  misc_RNA (1)...(19): siRNA sense strand
cuggaagaacaauuaagaa

SEQ ID NO: 2505087 - RNA, 19 nt, Homo sapiens
  misc_RNA (1)...(19): siRNA sense strand
gcguacaaguggaaggaga

SEQ ID NO: 2505088 - RNA, 19 nt, Homo sapiens
  misc_RNA (1)...(19): siRNA sense strand
cagccgagaacgugaacaa

SEQ ID NO: 2505089 - RNA, 19 nt, Homo sapiens
  misc_RNA (1)...(19): siRNA sense strand
agaauaagaccaaggcuca

SEQ ID NO: 2505090 - RNA, 19 nt, Homo sapiens
  misc_RNA (1)...(19): siRNA sense strand
cuccaugaguggcaggaaa

SEQ ID NO: 2505091 - RNA, 19 nt, Homo sapiens
  misc_RNA (1)...(19): siRNA sense strand
ugaagaugaccauggacaa

SEQ ID NO: 2505092 - RNA, 19 nt, Homo sapiens
  misc_RNA (1)...(19): siRNA sense strand
cgaaaguagaaacaggaau

SEQ ID NO: 2505093 - RNA, 19 nt, Homo sapiens
  misc_RNA (1)...(19): siRNA sense strand
cagaauaacgugcgggaag

SEQ ID NO: 2505094 - RNA, 19 nt, Homo sapiens
  misc_RNA (1)...(19): siRNA sense strand
ggccaguaugagagggaga

SEQ ID NO: 2505095 - RNA, 19 nt, Homo sapiens
  misc_RNA (1)...(19): siRNA sense strand
gcaacucaguggaggccau

SEQ ID NO: 2505096 - RNA, 19 nt, Homo sapiens
  misc_RNA (1)...(19): siRNA sense strand
ccgaagaagcucugcguac

SEQ ID NO: 2505097 - RNA, 19 nt, Homo sapiens
  misc_RNA (1)...(19): siRNA sense strand
cugaagaugaccauggaca

SEQ ID NO: 2505098 - RNA, 19 nt, Homo sapiens
  misc_RNA (1)...(19): siRNA sense strand
cuucaagggcucagagaug

SEQ ID NO: 2505099 - RNA, 19 nt, Homo sapiens
  misc_RNA (1)...(19): siRNA sense strand
ucaucaaggagaaggcuga

SEQ ID NO: 2505100 - RNA, 19 nt, Homo sapiens
  misc_RNA (1)...(19): siRNA sense strand
aggaggucacucagaacaa

SEQ ID NO: 2505101 - RNA, 19 nt, Homo sapiens
  misc_RNA (1)...(19): siRNA sense strand
caagcaaugccguggagga

SEQ ID NO: 2505102 - RNA, 19 nt, Homo sapiens
  misc_RNA (1)...(19): siRNA sense strand
cagaauaagaccaaggcuc

SEQ ID NO: 2505103 - RNA, 19 nt, Homo sapiens
  misc_RNA (1)...(19): siRNA sense strand
agauggugguggcugggaa

SEQ ID NO: 2505104 - RNA, 19 nt, Homo sapiens
  misc_RNA (1)...(19): siRNA sense strand
ucaccaaacccgaugacca

SEQ ID NO: 2505105 - RNA, 19 nt, Homo sapiens
  misc_RNA (1)...(19): siRNA sense strand
augcaaugcugauggcugu

SEQ ID NO: 2505106 - RNA, 19 nt, Homo sapiens
  misc_RNA (1)...(19): siRNA sense strand
agaagcuggcacuggacaa

SEQ ID NO: 2505107 - RNA, 19 nt, Homo sapiens
  misc_RNA (1)...(19): siRNA sense strand
ggaaagaguggguuggcua

SEQ ID NO: 2505108 - RNA, 19 nt, Homo sapiens
  misc_RNA (1)...(19): siRNA sense strand
guuuauaaggcgagagcau

SEQ ID NO: 2505109 - RNA, 19 nt, Homo sapiens
  misc_RNA (1)...(19): siRNA sense strand
aaacuaaaggagaggaaca

SEQ ID NO: 2505110 - RNA, 19 nt, Homo sapiens
  misc_RNA (1)...(19): siRNA sense strand
gggaaagguucacaggaca

SEQ ID NO: 2505111 - RNA, 19 nt, Homo sapiens
  misc_RNA (1)...(19): siRNA sense strand
acaaacuaaaggagaggaa

SEQ ID NO: 2505112 - RNA, 19 nt, Homo sapiens
  misc_RNA (1)...(19): siRNA sense strand
ggaaagguucacaggacau

SEQ ID NO: 2505113 - RNA, 19 nt, Homo sapiens
  misc_RNA (1)...(19): siRNA sense strand
aguuacaaggcaugguuua

SEQ ID NO: 2505114 - RNA, 19 nt, Homo sapiens
  misc_RNA (1)...(19): siRNA sense strand
augcaugaccgguggacuu

SEQ ID NO: 2505115 - RNA, 19 nt, Homo sapiens
  misc_RNA (1)...(19): siRNA sense strand
ggaaguugggaaagguuca

SEQ ID NO: 2505116 - RNA, 19 nt, Homo sapiens
  misc_RNA (1)...(19): siRNA sense strand
ccucaaugaacaacaauca

SEQ ID NO: 2505117 - RNA, 19 nt, Homo sapiens
  misc_RNA (1)...(19): siRNA sense strand
ccacggaaagugugaaaau

SEQ ID NO: 2505118 - RNA, 19 nt, Homo sapiens
  misc_RNA (1)...(19): siRNA sense strand
acuauaaccccuagaggua

SEQ ID NO: 2505119 - RNA, 19 nt, Homo sapiens
  misc_RNA (1)...(19): siRNA sense strand
cuuuaagaggggagaauuu

SEQ ID NO: 2505120 - RNA, 19 nt, Homo sapiens
  misc_RNA (1)...(19): siRNA sense strand
aagaauggguugcaggcca

SEQ ID NO: 2505121 - RNA, 19 nt, Homo sapiens
  misc_RNA (1)...(19): siRNA sense strand
gggccaugguguggacauu

SEQ ID NO: 2505122 - RNA, 19 nt, Homo sapiens
  misc_RNA (1)...(19): siRNA sense strand
cgugaaaaguuuauugcuu

SEQ ID NO: 2505123 - RNA, 19 nt, Homo sapiens
  misc_RNA (1)...(19): siRNA sense strand
uugucuacguauugaauga

SEQ ID NO: 2505124 - RNA, 19 nt, Homo sapiens
  misc_RNA (1)...(19): siRNA sense strand
aaacuguaucccuuggaaa

SEQ ID NO: 2505125 - RNA, 19 nt, Homo sapiens
  misc_RNA (1)...(19): siRNA sense strand
ucaacaaacuaaaggagag

SEQ ID NO: 2505126 - RNA, 19 nt, Homo sapiens
  misc_RNA (1)...(19): siRNA sense strand
ggagaggaacagagagcug

SEQ ID NO: 2505127 - RNA, 19 nt, Homo sapiens
  misc_RNA (1)...(19): siRNA sense strand
ccacauuugccaaccguga

SEQ ID NO: 2505128 - RNA, 19 nt, Homo sapiens
  misc_RNA (1)...(19): siRNA sense strand
aggagaaggugcuggacaa

SEQ ID NO: 2505129 - RNA, 19 nt, Homo sapiens
  misc_RNA (1)...(19): siRNA sense strand
aggccaaagaggagagaau

SEQ ID NO: 2505130 - RNA, 19 nt, Homo sapiens
  misc_RNA (1)...(19): siRNA sense strand
cggcacugguggaggagaa

SEQ ID NO: 2505131 - RNA, 19 nt, Homo sapiens
  misc_RNA (1)...(19): siRNA sense strand
gggagaagcaggaggagga

SEQ ID NO: 2505132 - RNA, 19 nt, Homo sapiens
  misc_RNA (1)...(19): siRNA sense strand
uggagaaggcggaggucaa

SEQ ID NO: 2505133 - RNA, 19 nt, Homo sapiens
  misc_RNA (1)...(19): siRNA sense strand
cagagaaagagguggugaa

SEQ ID NO: 2505134 - RNA, 19 nt, Homo sapiens
  misc_RNA (1)...(19): siRNA sense strand
ucucagaggagcagaagaa

SEQ ID NO: 2505135 - RNA, 19 nt, Homo sapiens
  misc_RNA (1)...(19): siRNA sense strand
ggaaggaacuggaugagga

SEQ ID NO: 2505136 - RNA, 19 nt, Homo sapiens
  misc_RNA (1)...(19): siRNA sense strand
gggccuuggaggaggagaa

SEQ ID NO: 2505137 - RNA, 19 nt, Homo sapiens
  misc_RNA (1)...(19): siRNA sense strand
uggcagaggagcagcacaa

SEQ ID NO: 2505138 - RNA, 19 nt, Homo sapiens
  misc_RNA (1)...(19): siRNA sense strand
ggaagagaaacaaaggcaa

SEQ ID NO: 2505139 - RNA, 19 nt, Homo sapiens
  misc_RNA (1)...(19): siRNA sense strand
ccaaagugguggugcagga

SEQ ID NO: 2505140 - RNA, 19 nt, Homo sapiens
  misc_RNA (1)...(19): siRNA sense strand
cggaaagugaaguggcgaa

SEQ ID NO: 2505141 - RNA, 19 nt, Homo sapiens
  misc_RNA (1)...(19): siRNA sense strand
ccaaagaggugguccagga

SEQ ID NO: 2505142 - RNA, 19 nt, Homo sapiens
  misc_RNA (1)...(19): siRNA sense strand
aggaaaggguggugcagca

SEQ ID NO: 2505143 - RNA, 19 nt, Homo sapiens
  misc_RNA (1)...(19): siRNA sense strand
ugggugagguggagcagaa

SEQ ID NO: 2505144 - RNA, 19 nt, Homo sapiens
  misc_RNA (1)...(19): siRNA sense strand
uuguggagcaggagcgaaa

SEQ ID NO: 2505145 - RNA, 19 nt, Homo sapiens
  misc_RNA (1)...(19): siRNA sense strand
gccaaagaggagagaauca

SEQ ID NO: 2505146 - RNA, 19 nt, Homo sapiens
  misc_RNA (1)...(19): siRNA sense strand
aggaagucauuaaguacaa

SEQ ID NO: 2505147 - RNA, 19 nt, Homo sapiens
  misc_RNA (1)...(19): siRNA sense strand
acaaugaggucaaggccau

SEQ ID NO: 2505148 - RNA, 19 nt, Homo sapiens
  misc_RNA (1)...(19): siRNA sense strand
ggagcagccacgugagcaa

SEQ ID NO: 2505149 - RNA, 19 nt, Homo sapiens
  misc_RNA (1)...(19): siRNA sense strand
gggccaaggaccucaagaa

SEQ ID NO: 2505150 - RNA, 19 nt, Homo sapiens
  misc_RNA (1)...(19): siRNA sense strand
agaagaaacaaguggaucu

SEQ ID NO: 2505151 - RNA, 19 nt, Homo sapiens
  misc_RNA (1)...(19): siRNA sense strand
uggaggagcuagagcgcga

SEQ ID NO: 2505152 - RNA, 19 nt, Homo sapiens
  misc_RNA (1)...(19): siRNA sense strand
ccgucaaggaggugcucaa

SEQ ID NO: 2505153 - RNA, 19 nt, Homo sapiens
  misc_RNA (1)...(19): siRNA sense strand
aauuacagcuggagaggca

SEQ ID NO: 2505154 - RNA, 19 nt, Homo sapiens
  misc_RNA (1)...(19): siRNA sense strand
accaaguggaggagcauaa

SEQ ID NO: 2505155 - RNA, 19 nt, Homo sapiens
  misc_RNA (1)...(19): siRNA sense strand
ccaacgagcuacugcggau

SEQ ID NO: 2505156 - RNA, 19 nt, Homo sapiens
  misc_RNA (1)...(19): siRNA sense strand
gcucaagaggcuagagaag

SEQ ID NO: 2505157 - RNA, 19 nt, Homo sapiens
  misc_RNA (1)...(19): siRNA sense strand
caggagaaggugcgggaga

SEQ ID NO: 2505158 - RNA, 19 nt, Homo sapiens
  misc_RNA (1)...(19): siRNA sense strand
caagagauccagaggcuca

SEQ ID NO: 2505159 - RNA, 19 nt, Homo sapiens
  misc_RNA (1)...(19): siRNA sense strand
guggaucuggagagggaaa

SEQ ID NO: 2505160 - RNA, 19 nt, Homo sapiens
  misc_RNA (1)...(19): siRNA sense strand
gggccaaguaccagaaacu

SEQ ID NO: 2505161 - RNA, 19 nt, Homo sapiens
  misc_RNA (1)...(19): siRNA sense strand
cggagaugccucugaccua

SEQ ID NO: 2505162 - RNA, 19 nt, Homo sapiens
  misc_RNA (1)...(19): siRNA sense strand
ggucaagagcacccaggaa

SEQ ID NO: 2505163 - RNA, 19 nt, Homo sapiens
  misc_RNA (1)...(19): siRNA sense strand
aggaggagcuggaggcacu

SEQ ID NO: 2505164 - RNA, 19 nt, Homo sapiens
  misc_RNA (1)...(19): siRNA sense strand
acacagaggccaagaugca

SEQ ID NO: 2505165 - RNA, 19 nt, Homo sapiens
  misc_RNA (1)...(19): siRNA sense strand
ggacaugaucgccgaggau

SEQ ID NO: 2505166 - RNA, 19 nt, Homo sapiens
  misc_RNA (1)...(19): siRNA sense strand
acaugaucgccgaggauau

SEQ ID NO: 2505167 - RNA, 19 nt, Homo sapiens
  misc_RNA (1)...(19): siRNA sense strand
cuguaaaggacuaugaguu

SEQ ID NO: 2505168 - RNA, 19 nt, Homo sapiens
  misc_RNA (1)...(19): siRNA sense strand
uggaggagaagcuggacaa

SEQ ID NO: 2505169 - RNA, 19 nt, Homo sapiens
  misc_RNA (1)...(19): siRNA sense strand
acgcagacuggaaggagua

SEQ ID NO: 2505170 - RNA, 19 nt, Homo sapiens
  misc_RNA (1)...(19): siRNA sense strand
agagaaagagguggugaaa

SEQ ID NO: 2505171 - RNA, 19 nt, Homo sapiens
  misc_RNA (1)...(19): siRNA sense strand
agauaugggccuuggagga

SEQ ID NO: 2505172 - RNA, 19 nt, Homo sapiens
  misc_RNA (1)...(19): siRNA sense strand
ggcaggaguacguggucaa

SEQ ID NO: 2505173 - RNA, 19 nt, Homo sapiens
  misc_RNA (1)...(19): siRNA sense strand
aagugguggugcaggagaa

SEQ ID NO: 2505174 - RNA, 19 nt, Homo sapiens
  misc_RNA (1)...(19): siRNA sense strand
cagugauacacgacaggaa

SEQ ID NO: 2505175 - RNA, 19 nt, Homo sapiens
  misc_RNA (1)...(19): siRNA sense strand
acuaugaguuagaagcaga

SEQ ID NO: 2505176 - RNA, 19 nt, Homo sapiens
  misc_RNA (1)...(19): siRNA sense strand
aggacaagcucaagaggcu

SEQ ID NO: 2505177 - RNA, 19 nt, Homo sapiens
  misc_RNA (1)...(19): siRNA sense strand
gcagaagaaacaaguggau

SEQ ID NO: 2505178 - RNA, 19 nt, Homo sapiens
  misc_RNA (1)...(19): siRNA sense strand
gaguggaggaggcguggaa

SEQ ID NO: 2505179 - RNA, 19 nt, Homo sapiens
  misc_RNA (1)...(19): siRNA sense strand
guggaggaggcguggaaga

SEQ ID NO: 2505180 - RNA, 19 nt, Homo sapiens
  misc_RNA (1)...(19): siRNA sense strand
ucaacaaacugcacagcga

SEQ ID NO: 2505181 - RNA, 19 nt, Homo sapiens
  misc_RNA (1)...(19): siRNA sense strand
cggaaguagaagugaccca

SEQ ID NO: 2505182 - RNA, 19 nt, Homo sapiens
  misc_RNA (1)...(19): siRNA sense strand
agaaggucacagagaaaga

SEQ ID NO: 2505183 - RNA, 19 nt, Homo sapiens
  misc_RNA (1)...(19): siRNA sense strand
acgccaaagugguggugca

SEQ ID NO: 2505184 - RNA, 19 nt, Homo sapiens
  misc_RNA (1)...(19): siRNA sense strand
cuggagagggaaagagcuu

SEQ ID NO: 2505185 - RNA, 19 nt, Homo sapiens
  misc_RNA (1)...(19): siRNA sense strand
gugcagacccggagcaucu

SEQ ID NO: 2505186 - RNA, 19 nt, Homo sapiens
  misc_RNA (1)...(19): siRNA sense strand
ggacuaugaguuagaagca

SEQ ID NO: 2505187 - RNA, 19 nt, Homo sapiens
  misc_RNA (1)...(19): siRNA sense strand
ccaaagugaaggaagagga

SEQ ID NO: 2505188 - RNA, 19 nt, Homo sapiens
  misc_RNA (1)...(19): siRNA sense strand
cugcaaaacuuguggccaa

SEQ ID NO: 2505189 - RNA, 19 nt, Homo sapiens
  misc_RNA (1)...(19): siRNA sense strand
cugcaguggauucgggaaa

SEQ ID NO: 2505190 - RNA, 19 nt, Homo sapiens
  misc_RNA (1)...(19): siRNA sense strand
cgaaugaaguggaccggau

SEQ ID NO: 2505191 - RNA, 19 nt, Homo sapiens
  misc_RNA (1)...(19): siRNA sense strand
cgaagcaauccgaaggaca

SEQ ID NO: 2505192 - RNA, 19 nt, Homo sapiens
  misc_RNA (1)...(19): siRNA sense strand
ggacaagagucgugcccca

SEQ ID NO: 2505193 - RNA, 19 nt, Homo sapiens
  misc_RNA (1)...(19): siRNA sense strand
aaagagaggaagaaggcga

SEQ ID NO: 2505194 - RNA, 19 nt, Homo sapiens
  misc_RNA (1)...(19): siRNA sense strand
acgacaaccugauggaacu

SEQ ID NO: 2505195 - RNA, 19 nt, Homo sapiens
  misc_RNA (1)...(19): siRNA sense strand
caucaauugcagacagguu

SEQ ID NO: 2505196 - RNA, 19 nt, Homo sapiens
  misc_RNA (1)...(19): siRNA sense strand
acagguugaauguggaauu

SEQ ID NO: 2505197 - RNA, 19 nt, Homo sapiens
  misc_RNA (1)...(19): siRNA sense strand
aagagaggaagaaggcgaa

SEQ ID NO: 2505198 - RNA, 19 nt, Homo sapiens
  misc_RNA (1)...(19): siRNA sense strand
gagauuggugaaagcguga

SEQ ID NO: 2505199 - RNA, 19 nt, Homo sapiens
  misc_RNA (1)...(19): siRNA sense strand
ugauccacaaagagaggaa

SEQ ID NO: 2505200 - RNA, 19 nt, Homo sapiens
  misc_RNA (1)...(19): siRNA sense strand
ccuucagauuccugggaua

SEQ ID NO: 2505201 - RNA, 19 nt, Homo sapiens
  misc_RNA (1)...(19): siRNA sense strand
agaugaaguauuuggaaca

SEQ ID NO: 2505202 - RNA, 19 nt, Homo sapiens
  misc_RNA (1)...(19): siRNA sense strand
cucagaaugcccagggaua

SEQ ID NO: 2505203 - RNA, 19 nt, Homo sapiens
  misc_RNA (1)...(19): siRNA sense strand
guaauuagaaagaucgaga

SEQ ID NO: 2505204 - RNA, 19 nt, Homo sapiens
  misc_RNA (1)...(19): siRNA sense strand
cugcaagagccgucugcua

SEQ ID NO: 2505205 - RNA, 19 nt, Homo sapiens
  misc_RNA (1)...(19): siRNA sense strand
gugcaguuggaaauagaua

SEQ ID NO: 2505206 - RNA, 19 nt, Homo sapiens
  misc_RNA (1)...(19): siRNA sense strand
augaagaaguacaucccaa

SEQ ID NO: 2505207 - RNA, 19 nt, Homo sapiens
  misc_RNA (1)...(19): siRNA sense strand
cuucagauuccugggauaa

SEQ ID NO: 2505208 - RNA, 19 nt, Homo sapiens
  misc_RNA (1)...(19): siRNA sense strand
caguaaaggaagauguauc

SEQ ID NO: 2505209 - RNA, 19 nt, Homo sapiens
  misc_RNA (1)...(19): siRNA sense strand
acuaugugcaguuggaaau

SEQ ID NO: 2505210 - RNA, 19 nt, Homo sapiens
  misc_RNA (1)...(19): siRNA sense strand
gaucuuugccagagccaga

SEQ ID NO: 2505211 - RNA, 19 nt, Homo sapiens
  misc_RNA (1)...(19): siRNA sense strand
uuggaacaguaaaggaaga

SEQ ID NO: 2505212 - RNA, 19 nt, Homo sapiens
  misc_RNA (1)...(19): siRNA sense strand
aagaacuacgacagauuaa

SEQ ID NO: 2505213 - RNA, 19 nt, Homo sapiens
  misc_RNA (1)...(19): siRNA sense strand
cgagauagacaauggggau

SEQ ID NO: 2505214 - RNA, 19 nt, Homo sapiens
  misc_RNA (1)...(19): siRNA sense strand
agugaagauguuaaagaga

SEQ ID NO: 2505215 - RNA, 19 nt, Homo sapiens
  misc_RNA (1)...(19): siRNA sense strand
gggaugaguugacugcaga

SEQ ID NO: 2505216 - RNA, 19 nt, Homo sapiens
  misc_RNA (1)...(19): siRNA sense strand
gcaacucugaagaaggaau

SEQ ID NO: 2505217 - RNA, 19 nt, Homo sapiens
  misc_RNA (1)...(19): siRNA sense strand
auuuggaacaguaaaggaa

SEQ ID NO: 2505218 - RNA, 19 nt, Homo sapiens
  misc_RNA (1)...(19): siRNA sense strand
gaacugaaagauuugccaa

SEQ ID NO: 2505219 - RNA, 19 nt, Homo sapiens
  misc_RNA (1)...(19): siRNA sense strand
ugaauaauagacagcucaa

SEQ ID NO: 2505220 - RNA, 19 nt, Homo sapiens
  misc_RNA (1)...(19): siRNA sense strand
agaugaaguauuuggaaca

SEQ ID NO: 2505221 - RNA, 19 nt, Homo sapiens
  misc_RNA (1)...(19): siRNA sense strand
guaauuagaaagaucgaga

SEQ ID NO: 2505222 - RNA, 19 nt, Homo sapiens
  misc_RNA (1)...(19): siRNA sense strand
cugcaagagccgucugcua

SEQ ID NO: 2505223 - RNA, 19 nt, Homo sapiens
  misc_RNA (1)...(19): siRNA sense strand
gugcaguuggaaauagaua

SEQ ID NO: 2505224 - RNA, 19 nt, Homo sapiens
  misc_RNA (1)...(19): siRNA sense strand
augaagaaguacaucccaa

SEQ ID NO: 2505225 - RNA, 19 nt, Homo sapiens
  misc_RNA (1)...(19): siRNA sense strand
caguaaaggaagauguauc

SEQ ID NO: 2505226 - RNA, 19 nt, Homo sapiens
  misc_RNA (1)...(19): siRNA sense strand
acuaugugcaguuggaaau

SEQ ID NO: 2505227 - RNA, 19 nt, Homo sapiens
  misc_RNA (1)...(19): siRNA sense strand
uuggaacaguaaaggaaga

SEQ ID NO: 2505228 - RNA, 19 nt, Homo sapiens
  misc_RNA (1)...(19): siRNA sense strand
aagaacuacgacagauuaa

SEQ ID NO: 2505229 - RNA, 19 nt, Homo sapiens
  misc_RNA (1)...(19): siRNA sense strand
cgagauagacaauggggau

SEQ ID NO: 2505230 - RNA, 19 nt, Homo sapiens
  misc_RNA (1)...(19): siRNA sense strand
gggaugaguugacugcaga

SEQ ID NO: 2505231 - RNA, 19 nt, Homo sapiens
  misc_RNA (1)...(19): siRNA sense strand
auuuggaacaguaaaggaa

SEQ ID NO: 2505232 - RNA, 19 nt, Homo sapiens
  misc_RNA (1)...(19): siRNA sense strand
gcaacucugaagaaggaau

SEQ ID NO: 2505233 - RNA, 19 nt, Homo sapiens
  misc_RNA (1)...(19): siRNA sense strand
gaacugaaagauuugccaa

SEQ ID NO: 2505234 - RNA, 19 nt, Homo sapiens
  misc_RNA (1)...(19): siRNA sense strand
ugaauaauagacagcucaa

SEQ ID NO: 2505235 - RNA, 19 nt, Homo sapiens
  misc_RNA (1)...(19): siRNA sense strand
ggaaaugccaccauggaga

SEQ ID NO: 2505236 - RNA, 19 nt, Homo sapiens
  misc_RNA (1)...(19): siRNA sense strand
gagggaagguggcugguga

SEQ ID NO: 2505237 - RNA, 19 nt, Homo sapiens
  misc_RNA (1)...(19): siRNA sense strand
uguccagagcagaggccaa

SEQ ID NO: 2505238 - RNA, 19 nt, Homo sapiens
  misc_RNA (1)...(19): siRNA sense strand
cagcauugccacuggugau

SEQ ID NO: 2505239 - RNA, 19 nt, Homo sapiens
  misc_RNA (1)...(19): siRNA sense strand
ccaccauggagaaaugcaa

SEQ ID NO: 2505240 - RNA, 19 nt, Homo sapiens
  misc_RNA (1)...(19): siRNA sense strand
ucuucaacaucucggguau

SEQ ID NO: 2505241 - RNA, 19 nt, Homo sapiens
  misc_RNA (1)...(19): siRNA sense strand
cccuggaggaggagcagaa

SEQ ID NO: 2505242 - RNA, 19 nt, Homo sapiens
  misc_RNA (1)...(19): siRNA sense strand
aggaggagcagaagccaga

SEQ ID NO: 2505243 - RNA, 19 nt, Homo sapiens
  misc_RNA (1)...(19): siRNA sense strand
gagccaagcuagaaggaca

SEQ ID NO: 2505244 - RNA, 19 nt, Homo sapiens
  misc_RNA (1)...(19): siRNA sense strand
guuuaaagaaggagagguu

SEQ ID NO: 2505245 - RNA, 19 nt, Homo sapiens
  misc_RNA (1)...(19): siRNA sense strand
ccaaaagggacgagaagaa

SEQ ID NO: 2505246 - RNA, 19 nt, Homo sapiens
  misc_RNA (1)...(19): siRNA sense strand
caccaaagcucuagggagu

SEQ ID NO: 2505247 - RNA, 19 nt, Homo sapiens
  misc_RNA (1)...(19): siRNA sense strand
ggaaagacuuaucacgcaa

SEQ ID NO: 2505248 - RNA, 19 nt, Homo sapiens
  misc_RNA (1)...(19): siRNA sense strand
acgcauaagcuguugaauu

SEQ ID NO: 2505249 - RNA, 19 nt, Homo sapiens
  misc_RNA (1)...(19): siRNA sense strand
gauuagagauccagccaga

SEQ ID NO: 2505250 - RNA, 19 nt, Homo sapiens
  misc_RNA (1)...(19): siRNA sense strand
uggacaagaaugaaguaaa

SEQ ID NO: 2505251 - RNA, 19 nt, Homo sapiens
  misc_RNA (1)...(19): siRNA sense strand
ucaaaugauuagagaucca

SEQ ID NO: 2505252 - RNA, 19 nt, Homo sapiens
  misc_RNA (1)...(19): siRNA sense strand
augaaaagggagagagaga

SEQ ID NO: 2505253 - RNA, 19 nt, Homo sapiens
  misc_RNA (1)...(19): siRNA sense strand
uguugaauuuggagggcuu

SEQ ID NO: 2505254 - RNA, 19 nt, Homo sapiens
  misc_RNA (1)...(19): siRNA sense strand
agagagagaacuagaacca

SEQ ID NO: 2505255 - RNA, 19 nt, Homo sapiens
  misc_RNA (1)...(19): siRNA sense strand
aauuugagcauaaggagaa

SEQ ID NO: 2505256 - RNA, 19 nt, Homo sapiens
  misc_RNA (1)...(19): siRNA sense strand
cuuaaagagccaagcuaga

SEQ ID NO: 2505257 - RNA, 19 nt, Homo sapiens
  misc_RNA (1)...(19): siRNA sense strand
gggacgagaagaaagaaga

SEQ ID NO: 2505258 - RNA, 19 nt, Homo sapiens
  misc_RNA (1)...(19): siRNA sense strand
cgagaagaaagaagaagga

SEQ ID NO: 2505259 - RNA, 19 nt, Homo sapiens
  misc_RNA (1)...(19): siRNA sense strand
ggaccaugcacuagaaucu

SEQ ID NO: 2505260 - RNA, 19 nt, Homo sapiens
  misc_RNA (1)...(19): siRNA sense strand
gauugaaauucggggauua

SEQ ID NO: 2505261 - RNA, 19 nt, Homo sapiens
  misc_RNA (1)...(19): siRNA sense strand
cuuauaaagcccaguauca

SEQ ID NO: 2505262 - RNA, 19 nt, Homo sapiens
  misc_RNA (1)...(19): siRNA sense strand
caaugaaaagggagagaga

SEQ ID NO: 2505263 - RNA, 19 nt, Homo sapiens
  misc_RNA (1)...(19): siRNA sense strand
agaagaaagaagaaggaac

SEQ ID NO: 2505264 - RNA, 19 nt, Homo sapiens
  misc_RNA (1)...(19): siRNA sense strand
gaaagaagaaggaaccuga

SEQ ID NO: 2505265 - RNA, 19 nt, Homo sapiens
  misc_RNA (1)...(19): siRNA sense strand
gugugacaguucagccaaa

SEQ ID NO: 2505266 - RNA, 19 nt, Homo sapiens
  misc_RNA (1)...(19): siRNA sense strand
aguucagccaaaugggaaa

SEQ ID NO: 2505267 - RNA, 19 nt, Homo sapiens
  misc_RNA (1)...(19): siRNA sense strand
aguggagguucgagacuau

SEQ ID NO: 2505268 - RNA, 19 nt, Homo sapiens
  misc_RNA (1)...(19): siRNA sense strand
ggugacaggugaagagcgu

SEQ ID NO: 2505269 - RNA, 19 nt, Homo sapiens
  misc_RNA (1)...(19): siRNA sense strand
acugaacacaacaaagaaa

SEQ ID NO: 2505270 - RNA, 19 nt, Homo sapiens
  misc_RNA (1)...(19): siRNA sense strand
uggcuguaauugaugaaau

SEQ ID NO: 2505271 - RNA, 19 nt, Homo sapiens
  misc_RNA (1)...(19): siRNA sense strand
agauugaaauguuugccua

SEQ ID NO: 2505272 - RNA, 19 nt, Homo sapiens
  misc_RNA (1)...(19): siRNA sense strand
ggacuguaaggaugaucua

SEQ ID NO: 2505273 - RNA, 19 nt, Homo sapiens
  misc_RNA (1)...(19): siRNA sense strand
aggugaagagcgugugaca

SEQ ID NO: 2505274 - RNA, 19 nt, Homo sapiens
  misc_RNA (1)...(19): siRNA sense strand
ccagaaagaacuagauggu

SEQ ID NO: 2505275 - RNA, 19 nt, Homo sapiens
  misc_RNA (1)...(19): siRNA sense strand
cuccagacaugcugaaaca

SEQ ID NO: 2505276 - RNA, 19 nt, Homo sapiens
  misc_RNA (1)...(19): siRNA sense strand
cuuaugaaguggcuguaau

SEQ ID NO: 2505277 - RNA, 19 nt, Homo sapiens
  misc_RNA (1)...(19): siRNA sense strand
gggagagagagaacuagaa

SEQ ID NO: 2505278 - RNA, 19 nt, Homo sapiens
  misc_RNA (1)...(19): siRNA sense strand
ccucauggaucuugaagcu

SEQ ID NO: 2505279 - RNA, 19 nt, Homo sapiens
  misc_RNA (1)...(19): siRNA sense strand
cagcaaagucuggagugua

SEQ ID NO: 2505280 - RNA, 19 nt, Homo sapiens
  misc_RNA (1)...(19): siRNA sense strand
gugagucggcagauugaaa

SEQ ID NO: 2505281 - RNA, 19 nt, Homo sapiens
  misc_RNA (1)...(19): siRNA sense strand
gcuaccgauuuauggauau

SEQ ID NO: 2505282 - RNA, 19 nt, Homo sapiens
  misc_RNA (1)...(19): siRNA sense strand
ccaugcagcggaagauaau

SEQ ID NO: 2505283 - RNA, 19 nt, Homo sapiens
  misc_RNA (1)...(19): siRNA sense strand
gguucauuuguguggagaa

SEQ ID NO: 2505284 - RNA, 19 nt, Homo sapiens
  misc_RNA (1)...(19): siRNA sense strand
aggaaguggagguucgaga

SEQ ID NO: 2505285 - RNA, 19 nt, Homo sapiens
  misc_RNA (1)...(19): siRNA sense strand
gaagaaagaagaaggaacc

SEQ ID NO: 2505286 - RNA, 19 nt, Homo sapiens
  misc_RNA (1)...(19): siRNA sense strand
ccaaaugggaaacaggcuu

SEQ ID NO: 2505287 - RNA, 19 nt, Homo sapiens
  misc_RNA (1)...(19): siRNA sense strand
cccaaugacccaugcaaaa

SEQ ID NO: 2505288 - RNA, 19 nt, Homo sapiens
  misc_RNA (1)...(19): siRNA sense strand
uugagcauaaggagaauua

SEQ ID NO: 2505289 - RNA, 19 nt, Homo sapiens
  misc_RNA (1)...(19): siRNA sense strand
caugaagaucucaguuuau

SEQ ID NO: 2505290 - RNA, 19 nt, Homo sapiens
  misc_RNA (1)...(19): siRNA sense strand
uuaaagaaggagagguuac

SEQ ID NO: 2505291 - RNA, 19 nt, Homo sapiens
  misc_RNA (1)...(19): siRNA sense strand
aaagggacgagaagaaaga

SEQ ID NO: 2505292 - RNA, 19 nt, Homo sapiens
  misc_RNA (1)...(19): siRNA sense strand
gagaagaaagaagaaggaa

SEQ ID NO: 2505293 - RNA, 19 nt, Homo sapiens
  misc_RNA (1)...(19): siRNA sense strand
cacaaacaguggaaagacu

SEQ ID NO: 2505294 - RNA, 19 nt, Homo sapiens
  misc_RNA (1)...(19): siRNA sense strand
gggaggaaguggagguucg

SEQ ID NO: 2505295 - RNA, 19 nt, Homo sapiens
  misc_RNA (1)...(19): siRNA sense strand
cagucacgauugucaggaa

SEQ ID NO: 2505296 - RNA, 19 nt, Homo sapiens
  misc_RNA (1)...(19): siRNA sense strand
cggugcagcucaugcggau

SEQ ID NO: 2505297 - RNA, 19 nt, Homo sapiens
  misc_RNA (1)...(19): siRNA sense strand
gccaugcagcggaagauaa

SEQ ID NO: 2505298 - RNA, 19 nt, Homo sapiens
  misc_RNA (1)...(19): siRNA sense strand
cacaugagaucuucgaaaa

SEQ ID NO: 2505299 - RNA, 19 nt, Homo sapiens
  misc_RNA (1)...(19): siRNA sense strand
ucggaaagguguagggcuu

SEQ ID NO: 2505300 - RNA, 19 nt, Homo sapiens
  misc_RNA (1)...(19): siRNA sense strand
gugagaugacagaggacau

SEQ ID NO: 2505301 - RNA, 19 nt, Homo sapiens
  misc_RNA (1)...(19): siRNA sense strand
ccaauaaccaguucggaca

SEQ ID NO: 2505302 - RNA, 19 nt, Homo sapiens
  misc_RNA (1)...(19): siRNA sense strand
cagaggacaucaugcgaga

SEQ ID NO: 2505303 - RNA, 19 nt, Homo sapiens
  misc_RNA (1)...(19): siRNA sense strand
gaauagagcaggugagacg

SEQ ID NO: 2505304 - RNA, 19 nt, Homo sapiens
  misc_RNA (1)...(19): siRNA sense strand
aagucugauuuguuggcaa

SEQ ID NO: 2505305 - RNA, 19 nt, Homo sapiens
  misc_RNA (1)...(19): siRNA sense strand
cggaggaaugucucagaaa

SEQ ID NO: 2505306 - RNA, 19 nt, Homo sapiens
  misc_RNA (1)...(19): siRNA sense strand
uggacuuacccgaaagaau

SEQ ID NO: 2505307 - RNA, 19 nt, Homo sapiens
  misc_RNA (1)...(19): siRNA sense strand
ccgaaagaauugcugcaca

SEQ ID NO: 2505308 - RNA, 19 nt, Homo sapiens
  misc_RNA (1)...(19): siRNA sense strand
ccagaaacucagagagcug

SEQ ID NO: 2505309 - RNA, 19 nt, Homo sapiens
  misc_RNA (1)...(19): siRNA sense strand
uguaggagaagguggcaga

SEQ ID NO: 2505310 - RNA, 19 nt, Homo sapiens
  misc_RNA (1)...(19): siRNA sense strand
cccuaguguuuaccagaaa

SEQ ID NO: 2505311 - RNA, 19 nt, Homo sapiens
  misc_RNA (1)...(19): siRNA sense strand
uggaagaacaggcagcaga

SEQ ID NO: 2505312 - RNA, 19 nt, Homo sapiens
  misc_RNA (1)...(19): siRNA sense strand
gugauuuggaagaugauga

SEQ ID NO: 2505313 - RNA, 19 nt, Homo sapiens
  misc_RNA (1)...(19): siRNA sense strand
aauagaagagaauuggcaa

SEQ ID NO: 2505314 - RNA, 19 nt, Homo sapiens
  misc_RNA (1)...(19): siRNA sense strand
agccaggcgaggaugauaa

SEQ ID NO: 2505315 - RNA, 19 nt, Homo sapiens
  misc_RNA (1)...(19): siRNA sense strand
ccagcaaagacaagugaau

SEQ ID NO: 2505316 - RNA, 19 nt, Homo sapiens
  misc_RNA (1)...(19): siRNA sense strand
agcaaagacaagugaauca

SEQ ID NO: 2505317 - RNA, 19 nt, Homo sapiens
  misc_RNA (1)...(19): siRNA sense strand
ggaagacccuugaacgaca

SEQ ID NO: 2505318 - RNA, 19 nt, Homo sapiens
  misc_RNA (1)...(19): siRNA sense strand
cuggaugguugggaggaaa

SEQ ID NO: 2505319 - RNA, 19 nt, Homo sapiens
  misc_RNA (1)...(19): siRNA sense strand
gaggaaaaccacacggaga

SEQ ID NO: 2505320 - RNA, 19 nt, Homo sapiens
  misc_RNA (1)...(19): siRNA sense strand
uagaauaccuagaagcacu

SEQ ID NO: 2505321 - RNA, 19 nt, Homo sapiens
  misc_RNA (1)...(19): siRNA sense strand
guguucagucucacagaaa

SEQ ID NO: 2505322 - RNA, 19 nt, Homo sapiens
  misc_RNA (1)...(19): siRNA sense strand
gcaaauauuucucuggaug

SEQ ID NO: 2505323 - RNA, 19 nt, Homo sapiens
  misc_RNA (1)...(19): siRNA sense strand
aggaaaaccacacggagaa

SEQ ID NO: 2505324 - RNA, 19 nt, Homo sapiens
  misc_RNA (1)...(19): siRNA sense strand
cagcagaucuucagccucu

SEQ ID NO: 2505325 - RNA, 19 nt, Homo sapiens
  misc_RNA (1)...(19): siRNA sense strand
ccauuguccaaguagaaau

SEQ ID NO: 2505326 - RNA, 19 nt, Homo sapiens
  misc_RNA (1)...(19): siRNA sense strand
aggaagagacauuuagaaa

SEQ ID NO: 2505327 - RNA, 19 nt, Homo sapiens
  misc_RNA (1)...(19): siRNA sense strand
aaggaaagaggaugggaaa

SEQ ID NO: 2505328 - RNA, 19 nt, Homo sapiens
  misc_RNA (1)...(19): siRNA sense strand
uugaagacuuugaggaaga

SEQ ID NO: 2505329 - RNA, 19 nt, Homo sapiens
  misc_RNA (1)...(19): siRNA sense strand
auucaaggguggaaaguau

SEQ ID NO: 2505330 - RNA, 19 nt, Homo sapiens
  misc_RNA (1)...(19): siRNA sense strand
gaagaugaguguaggggaa

SEQ ID NO: 2505331 - RNA, 19 nt, Homo sapiens
  misc_RNA (1)...(19): siRNA sense strand
ggacagaauugaugagccu

SEQ ID NO: 2505332 - RNA, 19 nt, Homo sapiens
  misc_RNA (1)...(19): siRNA sense strand
augcagaagccaugaacaa

SEQ ID NO: 2505333 - RNA, 19 nt, Homo sapiens
  misc_RNA (1)...(19): siRNA sense strand
ggauuaggacccaggagaa

SEQ ID NO: 2505334 - RNA, 19 nt, Homo sapiens
  misc_RNA (1)...(19): siRNA sense strand
aggcagaacagauggaaaa

SEQ ID NO: 2505335 - RNA, 19 nt, Homo sapiens
  misc_RNA (1)...(19): siRNA sense strand
gaugauauggauagaggaa

SEQ ID NO: 2505336 - RNA, 19 nt, Homo sapiens
  misc_RNA (1)...(19): siRNA sense strand
cggaaaggaaagaagucua

SEQ ID NO: 2505337 - RNA, 19 nt, Homo sapiens
  misc_RNA (1)...(19): siRNA sense strand
ugggaaggauucugagcaa

SEQ ID NO: 2505338 - RNA, 19 nt, Homo sapiens
  misc_RNA (1)...(19): siRNA sense strand
guucagaaaggaagagaca

SEQ ID NO: 2505339 - RNA, 19 nt, Homo sapiens
  misc_RNA (1)...(19): siRNA sense strand
ccuuagacgaggacagaau

SEQ ID NO: 2505340 - RNA, 19 nt, Homo sapiens
  misc_RNA (1)...(19): siRNA sense strand
ggagaaguucagaaaggaa

SEQ ID NO: 2505341 - RNA, 19 nt, Homo sapiens
  misc_RNA (1)...(19): siRNA sense strand
ggaaaauaaucggggacaa

SEQ ID NO: 2505342 - RNA, 19 nt, Homo sapiens
  misc_RNA (1)...(19): siRNA sense strand
agaagcaacaugaggaauu

SEQ ID NO: 2505343 - RNA, 19 nt, Homo sapiens
  misc_RNA (1)...(19): siRNA sense strand
gcuaaagaauaucgaggca

SEQ ID NO: 2505344 - RNA, 19 nt, Homo sapiens
  misc_RNA (1)...(19): siRNA sense strand
ugaacaaccaagagcagaa

SEQ ID NO: 2505345 - RNA, 19 nt, Homo sapiens
  misc_RNA (1)...(19): siRNA sense strand
agagaaaacaugaaggaau

SEQ ID NO: 2505346 - RNA, 19 nt, Homo sapiens
  misc_RNA (1)...(19): siRNA sense strand
cuauagacccggaaaauaa

SEQ ID NO: 2505347 - RNA, 19 nt, Homo sapiens
  misc_RNA (1)...(19): siRNA sense strand
caggauaggaccaaggaga

SEQ ID NO: 2505348 - RNA, 19 nt, Homo sapiens
  misc_RNA (1)...(19): siRNA sense strand
cugagaagcaggaguccaa

SEQ ID NO: 2505349 - RNA, 19 nt, Homo sapiens
  misc_RNA (1)...(19): siRNA sense strand
gggucguggucguggcauu

SEQ ID NO: 2505350 - RNA, 19 nt, Homo sapiens
  misc_RNA (1)...(19): siRNA sense strand
ccgaggagguagagcagca

SEQ ID NO: 2505351 - RNA, 19 nt, Homo sapiens
  misc_RNA (1)...(19): siRNA sense strand
acaacugagaguagaggaa

SEQ ID NO: 2505352 - RNA, 19 nt, Homo sapiens
  misc_RNA (1)...(19): siRNA sense strand
ugauauggauagaggaaag

SEQ ID NO: 2505353 - RNA, 19 nt, Homo sapiens
  misc_RNA (1)...(19): siRNA sense strand
uugaagagaccaagcggaa

SEQ ID NO: 2505354 - RNA, 19 nt, Homo sapiens
  misc_RNA (1)...(19): siRNA sense strand
gcucugugauccaggaaca

SEQ ID NO: 2505355 - RNA, 19 nt, Homo sapiens
  misc_RNA (1)...(19): siRNA sense strand
gcaaaggcucugagaagca

SEQ ID NO: 2505356 - RNA, 19 nt, Homo sapiens
  misc_RNA (1)...(19): siRNA sense strand
cggagggccuggagaagau

SEQ ID NO: 2505357 - RNA, 19 nt, Homo sapiens
  misc_RNA (1)...(19): siRNA sense strand
gggucacagugcugaagua

SEQ ID NO: 2505358 - RNA, 19 nt, Homo sapiens
  misc_RNA (1)...(19): siRNA sense strand
ccagcaaagaggagccaau

SEQ ID NO: 2505359 - RNA, 19 nt, Homo sapiens
  misc_RNA (1)...(19): siRNA sense strand
aagacaaggcuaaggacuu

SEQ ID NO: 2505360 - RNA, 19 nt, Homo sapiens
  misc_RNA (1)...(19): siRNA sense strand
gcagcaagccauuacgcaa

SEQ ID NO: 2505361 - RNA, 19 nt, Homo sapiens
  misc_RNA (1)...(19): siRNA sense strand
uggaagaugaggaggagga

SEQ ID NO: 2505362 - RNA, 19 nt, Homo sapiens
  misc_RNA (1)...(19): siRNA sense strand
ggaacaagcccaaaaucaa

SEQ ID NO: 2505363 - RNA, 19 nt, Homo sapiens
  misc_RNA (1)...(19): siRNA sense strand
ccguuaaagaugucugcaa

SEQ ID NO: 2505364 - RNA, 19 nt, Homo sapiens
  misc_RNA (1)...(19): siRNA sense strand
acugcaaagacaaggcuaa

SEQ ID NO: 2505365 - RNA, 19 nt, Homo sapiens
  misc_RNA (1)...(19): siRNA sense strand
agguagaacaacugagagu

SEQ ID NO: 2505366 - RNA, 19 nt, Homo sapiens
  misc_RNA (1)...(19): siRNA sense strand
cgaaggaggaaguugcgaa

SEQ ID NO: 2505367 - RNA, 19 nt, Homo sapiens
  misc_RNA (1)...(19): siRNA sense strand
aaaggaaagaggaugggaa

SEQ ID NO: 2505368 - RNA, 19 nt, Homo sapiens
  misc_RNA (1)...(19): siRNA sense strand
ccuauaaccaguuggcuuu

SEQ ID NO: 2505369 - RNA, 19 nt, Homo sapiens
  misc_RNA (1)...(19): siRNA sense strand
gaccaguggcggaaaggaa

SEQ ID NO: 2505370 - RNA, 19 nt, Homo sapiens
  misc_RNA (1)...(19): siRNA sense strand
caucaauauguuugcagua

SEQ ID NO: 2505371 - RNA, 19 nt, Homo sapiens
  misc_RNA (1)...(19): siRNA sense strand
caugauaugccaaggagau

SEQ ID NO: 2505372 - RNA, 19 nt, Homo sapiens
  misc_RNA (1)...(19): siRNA sense strand
gagaguaggggcugcaaaa

SEQ ID NO: 2505373 - RNA, 19 nt, Homo sapiens
  misc_RNA (1)...(19): siRNA sense strand
ggaggaagcuugacgcugu

SEQ ID NO: 2505374 - RNA, 19 nt, Homo sapiens
  misc_RNA (1)...(19): siRNA sense strand
agaccaagcggaaggcaga

SEQ ID NO: 2505375 - RNA, 19 nt, Homo sapiens
  misc_RNA (1)...(19): siRNA sense strand
ugaaauuguuaaugaccga

SEQ ID NO: 2505376 - RNA, 19 nt, Homo sapiens
  misc_RNA (1)...(19): siRNA sense strand
ccucaaccagguagaacaa

SEQ ID NO: 2505377 - RNA, 19 nt, Homo sapiens
  misc_RNA (1)...(19): siRNA sense strand
acaccaugggaaaggaaau

SEQ ID NO: 2505378 - RNA, 19 nt, Homo sapiens
  misc_RNA (1)...(19): siRNA sense strand
cgacguuugcagacuguua

SEQ ID NO: 2505379 - RNA, 19 nt, Homo sapiens
  misc_RNA (1)...(19): siRNA sense strand
ggguggaggaggaagaagu

SEQ ID NO: 2505380 - RNA, 19 nt, Homo sapiens
  misc_RNA (1)...(19): siRNA sense strand
gaaggaggaaguugcgaau

SEQ ID NO: 2505381 - RNA, 19 nt, Homo sapiens
  misc_RNA (1)...(19): siRNA sense strand
aaagaagcaacaugaggaa

SEQ ID NO: 2505382 - RNA, 19 nt, Homo sapiens
  misc_RNA (1)...(19): siRNA sense strand
cagauuggaugcucggcua

SEQ ID NO: 2505383 - RNA, 19 nt, Homo sapiens
  misc_RNA (1)...(19): siRNA sense strand
uggagaaaaccucggauaa

SEQ ID NO: 2505384 - RNA, 19 nt, Homo sapiens
  misc_RNA (1)...(19): siRNA sense strand
uugaugagccugauggauu

SEQ ID NO: 2505385 - RNA, 19 nt, Homo sapiens
  misc_RNA (1)...(19): siRNA sense strand
gcgcaaagauaacaggcgu

SEQ ID NO: 2505386 - RNA, 19 nt, Homo sapiens
  misc_RNA (1)...(19): siRNA sense strand
aagaugaggaggaggaugu

SEQ ID NO: 2505387 - RNA, 19 nt, Homo sapiens
  misc_RNA (1)...(19): siRNA sense strand
aacugagaguagaggaaga

SEQ ID NO: 2505388 - RNA, 19 nt, Homo sapiens
  misc_RNA (1)...(19): siRNA sense strand
caacaacagcgcugaggga

SEQ ID NO: 2505389 - RNA, 19 nt, Homo sapiens
  misc_RNA (1)...(19): siRNA sense strand
cccaggagaaguucagaaa

SEQ ID NO: 2505390 - RNA, 19 nt, Homo sapiens
  misc_RNA (1)...(19): siRNA sense strand
guuugaucacgaugggaaa

SEQ ID NO: 2505391 - RNA, 19 nt, Homo sapiens
  misc_RNA (1)...(19): siRNA sense strand
ggguagaagaagaaaacuu

SEQ ID NO: 2505392 - RNA, 19 nt, Homo sapiens
  misc_RNA (1)...(19): siRNA sense strand
aagaaaacuucgaaggcuu

SEQ ID NO: 2505393 - RNA, 19 nt, Homo sapiens
  misc_RNA (1)...(19): siRNA sense strand
ugggaaaaucauccagaaa

SEQ ID NO: 2505394 - RNA, 19 nt, Homo sapiens
  misc_RNA (1)...(19): siRNA sense strand
cgccauaaggaauuucaaa

SEQ ID NO: 2505395 - RNA, 19 nt, Homo sapiens
  misc_RNA (1)...(19): siRNA sense strand
ccuacagcuccgugcagua

SEQ ID NO: 2505396 - RNA, 19 nt, Homo sapiens
  misc_RNA (1)...(19): siRNA sense strand
gcccagagaggaaggacca

SEQ ID NO: 2505397 - RNA, 19 nt, Homo sapiens
  misc_RNA (1)...(19): siRNA sense strand
acgaugaagcugucaagau

SEQ ID NO: 2505398 - RNA, 19 nt, Homo sapiens
  misc_RNA (1)...(19): siRNA sense strand
aaagagugaugaacggcua

SEQ ID NO: 2505399 - RNA, 19 nt, Homo sapiens
  misc_RNA (1)...(19): siRNA sense strand
gggauuugucauuggaugu

SEQ ID NO: 2505400 - RNA, 19 nt, Homo sapiens
  misc_RNA (1)...(19): siRNA sense strand
auugcaacccagugaagaa

SEQ ID NO: 2505401 - RNA, 19 nt, Homo sapiens
  misc_RNA (1)...(19): siRNA sense strand
auuuagacagaaagaguga

SEQ ID NO: 2505402 - RNA, 19 nt, Homo sapiens
  misc_RNA (1)...(19): siRNA sense strand
cauuaagauuugugcucua

SEQ ID NO: 2505403 - RNA, 19 nt, Homo sapiens
  misc_RNA (1)...(19): siRNA sense strand
cggacgaggaugaggagga

SEQ ID NO: 2505404 - RNA, 19 nt, Homo sapiens
  misc_RNA (1)...(19): siRNA sense strand
cagcaugaggugugguaga

SEQ ID NO: 2505405 - RNA, 19 nt, Homo sapiens
  misc_RNA (1)...(19): siRNA sense strand
ugguagaaagcuugccaaa

SEQ ID NO: 2505406 - RNA, 19 nt, Homo sapiens
  misc_RNA (1)...(19): siRNA sense strand
cggagacggacgaggauga

SEQ ID NO: 2505407 - RNA, 19 nt, Homo sapiens
  misc_RNA (1)...(19): siRNA sense strand
uaaagaagaacuagaggga

SEQ ID NO: 2505408 - RNA, 19 nt, Homo sapiens
  misc_RNA (1)...(19): siRNA sense strand
ggugaauacugcuggcguu

SEQ ID NO: 2505409 - RNA, 19 nt, Homo sapiens
  misc_RNA (1)...(19): siRNA sense strand
ucgaaggagcauagcauuu

SEQ ID NO: 2505410 - RNA, 19 nt, Homo sapiens
  misc_RNA (1)...(19): siRNA sense strand
ucuaaacagaggaaagauu

SEQ ID NO: 2505411 - RNA, 19 nt, Homo sapiens
  misc_RNA (1)...(19): siRNA sense strand
aggaaacaguuaaugugaa

SEQ ID NO: 2505412 - RNA, 19 nt, Homo sapiens
  misc_RNA (1)...(19): siRNA sense strand
augcaaguggagauggaua

SEQ ID NO: 2505413 - RNA, 19 nt, Homo sapiens
  misc_RNA (1)...(19): siRNA sense strand
gugaaaacagugacauuaa

SEQ ID NO: 2505414 - RNA, 19 nt, Homo sapiens
  misc_RNA (1)...(19): siRNA sense strand
uugaaaaggaucaggaaca

SEQ ID NO: 2505415 - RNA, 19 nt, Homo sapiens
  misc_RNA (1)...(19): siRNA sense strand
uaguagaacaacuggcuau

SEQ ID NO: 2505416 - RNA, 19 nt, Homo sapiens
  misc_RNA (1)...(19): siRNA sense strand
ggagcauagcauuuagauu

SEQ ID NO: 2505417 - RNA, 19 nt, Homo sapiens
  misc_RNA (1)...(19): siRNA sense strand
cagucgaguuguugccauu

SEQ ID NO: 2505418 - RNA, 19 nt, Homo sapiens
  misc_RNA (1)...(19): siRNA sense strand
acagcaguguggugagaca

SEQ ID NO: 2505419 - RNA, 19 nt, Homo sapiens
  misc_RNA (1)...(19): siRNA sense strand
ugaaacugaacaaggaaaa

SEQ ID NO: 2505420 - RNA, 19 nt, Homo sapiens
  misc_RNA (1)...(19): siRNA sense strand
ccucgaaggagcauagcau

SEQ ID NO: 2505421 - RNA, 19 nt, Homo sapiens
  misc_RNA (1)...(19): siRNA sense strand
gaggugugguagaaagcuu

SEQ ID NO: 2505422 - RNA, 19 nt, Homo sapiens
  misc_RNA (1)...(19): siRNA sense strand
uguauaaacagcagugguu

SEQ ID NO: 2505423 - RNA, 19 nt, Homo sapiens
  misc_RNA (1)...(19): siRNA sense strand
agacaaugaaggaaacagu

SEQ ID NO: 2505424 - RNA, 19 nt, Homo sapiens
  misc_RNA (1)...(19): siRNA sense strand
uugaaacugaacaaggaaa

SEQ ID NO: 2505425 - RNA, 19 nt, Homo sapiens
  misc_RNA (1)...(19): siRNA sense strand
aggaaaaccauuuguguca

SEQ ID NO: 2505426 - RNA, 19 nt, Homo sapiens
  misc_RNA (1)...(19): siRNA sense strand
ggaaacagcaugaggugug

SEQ ID NO: 2505427 - RNA, 19 nt, Homo sapiens
  misc_RNA (1)...(19): siRNA sense strand
ugaaaaggaucaggaacaa

SEQ ID NO: 2505428 - RNA, 19 nt, Homo sapiens
  misc_RNA (1)...(19): siRNA sense strand
agcagggaccuauggauua

SEQ ID NO: 2505429 - RNA, 19 nt, Homo sapiens
  misc_RNA (1)...(19): siRNA sense strand
ugaugcaaguggagaugga

SEQ ID NO: 2505430 - RNA, 19 nt, Homo sapiens
  misc_RNA (1)...(19): siRNA sense strand
gaaacagcucauugguuca

SEQ ID NO: 2505431 - RNA, 19 nt, Homo sapiens
  misc_RNA (1)...(19): siRNA sense strand
ugcaaguggagauggauau

SEQ ID NO: 2505432 - RNA, 19 nt, Homo sapiens
  misc_RNA (1)...(19): siRNA sense strand
ggaagaagggcuacgcuga

SEQ ID NO: 2505433 - RNA, 19 nt, Homo sapiens
  misc_RNA (1)...(19): siRNA sense strand
cuacacagcuggugcggga

SEQ ID NO: 2505434 - RNA, 19 nt, Homo sapiens
  misc_RNA (1)...(19): siRNA sense strand
cauuugagcccgagggugu

SEQ ID NO: 2505435 - RNA, 19 nt, Homo sapiens
  misc_RNA (1)...(19): siRNA sense strand
agacgcugacggagggaga

SEQ ID NO: 2505436 - RNA, 19 nt, Homo sapiens
  misc_RNA (1)...(19): siRNA sense strand
acgcugacggagggagaua

SEQ ID NO: 2505437 - RNA, 19 nt, Homo sapiens
  misc_RNA (1)...(19): siRNA sense strand
auguggaaguggaagauga

SEQ ID NO: 2505438 - RNA, 19 nt, Homo sapiens
  misc_RNA (1)...(19): siRNA sense strand
cagaggaggugccuggaga

SEQ ID NO: 2505439 - RNA, 19 nt, Homo sapiens
  misc_RNA (1)...(19): siRNA sense strand
ucuauguggaaguggaaga

SEQ ID NO: 2505440 - RNA, 19 nt, Homo sapiens
  misc_RNA (1)...(19): siRNA sense strand
ggugcuacuuggugcgguu

SEQ ID NO: 2505441 - RNA, 19 nt, Homo sapiens
  misc_RNA (1)...(19): siRNA sense strand
caucuauguggaaguggaa

SEQ ID NO: 2505442 - RNA, 19 nt, Homo sapiens
  misc_RNA (1)...(19): siRNA sense strand
gaacucugugauugggcaa

SEQ ID NO: 2505443 - RNA, 19 nt, Homo sapiens
  misc_RNA (1)...(19): siRNA sense strand
aaacagauacugaugggaa

SEQ ID NO: 2505444 - RNA, 19 nt, Homo sapiens
  misc_RNA (1)...(19): siRNA sense strand
cugaagaagaucauggaca

SEQ ID NO: 2505445 - RNA, 19 nt, Homo sapiens
  misc_RNA (1)...(19): siRNA sense strand
gcuuaugagaaaacagaua

SEQ ID NO: 2505446 - RNA, 19 nt, Homo sapiens
  misc_RNA (1)...(19): siRNA sense strand
cugaagucaccaagaaaga

SEQ ID NO: 2505447 - RNA, 19 nt, Homo sapiens
  misc_RNA (1)...(19): siRNA sense strand
acauccaagugcaggaaaa

SEQ ID NO: 2505448 - RNA, 19 nt, Homo sapiens
  misc_RNA (1)...(19): siRNA sense strand
gcugcaugggcaacgguaa

SEQ ID NO: 2505449 - RNA, 19 nt, Homo sapiens
  misc_RNA (1)...(19): siRNA sense strand
ugaagaagaucauggacag

SEQ ID NO: 2505450 - RNA, 19 nt, Homo sapiens
  misc_RNA (1)...(19): siRNA sense strand
augaggagcugcugcgcuu

SEQ ID NO: 2505451 - RNA, 19 nt, Homo sapiens
  misc_RNA (1)...(19): siRNA sense strand
cccaagaagaggaaggauc

SEQ ID NO: 2505452 - RNA, 19 nt, Homo sapiens
  misc_RNA (1)...(19): siRNA sense strand
uggugaaggcccuggagua

SEQ ID NO: 2505453 - RNA, 19 nt, Homo sapiens
  misc_RNA (1)...(19): siRNA sense strand
agauccgaaucgaggccaa

SEQ ID NO: 2505454 - RNA, 19 nt, Homo sapiens
  misc_RNA (1)...(19): siRNA sense strand
agaaagagauggaggagga

SEQ ID NO: 2505455 - RNA, 19 nt, Homo sapiens
  misc_RNA (1)...(19): siRNA sense strand
gcgcaucaucggagggcaa

SEQ ID NO: 2505456 - RNA, 19 nt, Homo sapiens
  misc_RNA (1)...(19): siRNA sense strand
agaaugaacagaagggaga

SEQ ID NO: 2505457 - RNA, 19 nt, Homo sapiens
  misc_RNA (1)...(19): siRNA sense strand
ggaaagaauaggauggaug

SEQ ID NO: 2505458 - RNA, 19 nt, Homo sapiens
  misc_RNA (1)...(19): siRNA sense strand
ggaucaagaaagagaugga

SEQ ID NO: 2505459 - RNA, 19 nt, Homo sapiens
  misc_RNA (1)...(19): siRNA sense strand
gggucauggaggagaagau

SEQ ID NO: 2505460 - RNA, 19 nt, Homo sapiens
  misc_RNA (1)...(19): siRNA sense strand
caaggaacacgaagcgcaa

SEQ ID NO: 2505461 - RNA, 19 nt, Homo sapiens
  misc_RNA (1)...(19): siRNA sense strand
ccauauuacaagaugcaga

SEQ ID NO: 2505462 - RNA, 19 nt, Homo sapiens
  misc_RNA (1)...(19): siRNA sense strand
ucaagaaagagauggagga

SEQ ID NO: 2505463 - RNA, 19 nt, Homo sapiens
  misc_RNA (1)...(19): siRNA sense strand
ccacaaugggagugaacac

SEQ ID NO: 2505464 - RNA, 19 nt, Homo sapiens
  misc_RNA (1)...(19): siRNA sense strand
gaucaaggacugugggcag

SEQ ID NO: 2505465 - RNA, 19 nt, Homo sapiens
  misc_RNA (1)...(19): siRNA sense strand
acacggaggcaucaggcua

SEQ ID NO: 2505466 - RNA, 19 nt, Homo sapiens
  misc_RNA (1)...(19): siRNA sense strand
gggaagaacauuggcgagu

SEQ ID NO: 2505467 - RNA, 19 nt, Homo sapiens
  misc_RNA (1)...(19): siRNA sense strand
aagagauggaggaggagga

SEQ ID NO: 2505468 - RNA, 19 nt, Homo sapiens
  misc_RNA (1)...(19): siRNA sense strand
augaccagcuacagaucua

SEQ ID NO: 2505469 - RNA, 19 nt, Homo sapiens
  misc_RNA (1)...(19): siRNA sense strand
ccgugaaccccguggaaca

SEQ ID NO: 2505470 - RNA, 19 nt, Homo sapiens
  misc_RNA (1)...(19): siRNA sense strand
agaucuaugccaacgggaa

SEQ ID NO: 2505471 - RNA, 19 nt, Homo sapiens
  misc_RNA (1)...(19): siRNA sense strand
ggggagguucugugggcaa

SEQ ID NO: 2505472 - RNA, 19 nt, Homo sapiens
  misc_RNA (1)...(19): siRNA sense strand
acuacugccaugagccaua

SEQ ID NO: 2505473 - RNA, 19 nt, Homo sapiens
  misc_RNA (1)...(19): siRNA sense strand
caaauguggaagagcucau

SEQ ID NO: 2505474 - RNA, 19 nt, Homo sapiens
  misc_RNA (1)...(19): siRNA sense strand
gcuucuaugauuaugucaa

SEQ ID NO: 2505475 - RNA, 19 nt, Homo sapiens
  misc_RNA (1)...(19): siRNA sense strand
aacagaagggagagaagau

SEQ ID NO: 2505476 - RNA, 19 nt, Homo sapiens
  misc_RNA (1)...(19): siRNA sense strand
uggacaauuuaaugggaaa

SEQ ID NO: 2505477 - RNA, 19 nt, Homo sapiens
  misc_RNA (1)...(19): siRNA sense strand
cauaagagguggaaccaga

SEQ ID NO: 2505478 - RNA, 19 nt, Homo sapiens
  misc_RNA (1)...(19): siRNA sense strand
gcauugaggucuuuggaca

SEQ ID NO: 2505479 - RNA, 19 nt, Homo sapiens
  misc_RNA (1)...(19): siRNA sense strand
caguacaggcagaugcaua

SEQ ID NO: 2505480 - RNA, 19 nt, Homo sapiens
  misc_RNA (1)...(19): siRNA sense strand
cgaacauuacgaagaacaa

SEQ ID NO: 2505481 - RNA, 19 nt, Homo sapiens
  misc_RNA (1)...(19): siRNA sense strand
caguuaugacccagagcua

SEQ ID NO: 2505482 - RNA, 19 nt, Homo sapiens
  misc_RNA (1)...(19): siRNA sense strand
cugugaaaucaguaaacaa

SEQ ID NO: 2505483 - RNA, 19 nt, Homo sapiens
  misc_RNA (1)...(19): siRNA sense strand
gaugaggaugauugugaaa

SEQ ID NO: 2505484 - RNA, 19 nt, Homo sapiens
  misc_RNA (1)...(19): siRNA sense strand
ggaaaguguuugugugccu

SEQ ID NO: 2505485 - RNA, 19 nt, Homo sapiens
  misc_RNA (1)...(19): siRNA sense strand
cauugaggucuuuggacaa

SEQ ID NO: 2505486 - RNA, 19 nt, Homo sapiens
  misc_RNA (1)...(19): siRNA sense strand
auggaaacacucugacaua

SEQ ID NO: 2505487 - RNA, 19 nt, Homo sapiens
  misc_RNA (1)...(19): siRNA sense strand
ggagaaauucaucugggaa

SEQ ID NO: 2505488 - RNA, 19 nt, Homo sapiens
  misc_RNA (1)...(19): siRNA sense strand
aguacaggcagaugcauaa

SEQ ID NO: 2505489 - RNA, 19 nt, Homo sapiens
  misc_RNA (1)...(19): siRNA sense strand
augcacaccuaaagaaaca

SEQ ID NO: 2505490 - RNA, 19 nt, Homo sapiens
  misc_RNA (1)...(19): siRNA sense strand
cgaagaacaaauugaagca

SEQ ID NO: 2505491 - RNA, 19 nt, Homo sapiens
  misc_RNA (1)...(19): siRNA sense strand
aggaggacucuaugaacua

SEQ ID NO: 2505492 - RNA, 19 nt, Homo sapiens
  misc_RNA (1)...(19): siRNA sense strand
uggaaagagccauugaaga

SEQ ID NO: 2505493 - RNA, 19 nt, Homo sapiens
  misc_RNA (1)...(19): siRNA sense strand
ugauucuaauggauggaaa

SEQ ID NO: 2505494 - RNA, 19 nt, Homo sapiens
  misc_RNA (1)...(19): siRNA sense strand
ugaaaccaaaggcgagaaa

SEQ ID NO: 2505495 - RNA, 19 nt, Homo sapiens
  misc_RNA (1)...(19): siRNA sense strand
gacccagagcuaacagaaa

SEQ ID NO: 2505496 - RNA, 19 nt, Homo sapiens
  misc_RNA (1)...(19): siRNA sense strand
agaaauucaucugggaaga

SEQ ID NO: 2505497 - RNA, 19 nt, Homo sapiens
  misc_RNA (1)...(19): siRNA sense strand
cuaugaaaagggagaauau

SEQ ID NO: 2505498 - RNA, 19 nt, Homo sapiens
  misc_RNA (1)...(19): siRNA sense strand
ccgaacauuacgaagaaca

SEQ ID NO: 2505499 - RNA, 19 nt, Homo sapiens
  misc_RNA (1)...(19): siRNA sense strand
ggacaauuuaaugggaaaa

SEQ ID NO: 2505500 - RNA, 19 nt, Homo sapiens
  misc_RNA (1)...(19): siRNA sense strand
agacauaaagagaugccuu

SEQ ID NO: 2505501 - RNA, 19 nt, Homo sapiens
  misc_RNA (1)...(19): siRNA sense strand
cugcaugugaaaggagaaa

SEQ ID NO: 2505502 - RNA, 19 nt, Homo sapiens
  misc_RNA (1)...(19): siRNA sense strand
gagaaauucaucugggaag

SEQ ID NO: 2505503 - RNA, 19 nt, Homo sapiens
  misc_RNA (1)...(19): siRNA sense strand
aaaugcacaccuaaagaaa

SEQ ID NO: 2505504 - RNA, 19 nt, Homo sapiens
  misc_RNA (1)...(19): siRNA sense strand
cugugaggaugcugaggau

SEQ ID NO: 2505505 - RNA, 19 nt, Homo sapiens
  misc_RNA (1)...(19): siRNA sense strand
ggcacgaacagcaggcuau

SEQ ID NO: 2505506 - RNA, 19 nt, Homo sapiens
  misc_RNA (1)...(19): siRNA sense strand
ugaggaugacugcggaaau

SEQ ID NO: 2505507 - RNA, 19 nt, Homo sapiens
  misc_RNA (1)...(19): siRNA sense strand
ccaugaagcggaaaggugu

SEQ ID NO: 2505508 - RNA, 19 nt, Homo sapiens
  misc_RNA (1)...(19): siRNA sense strand
augccaaaauggagguaca

SEQ ID NO: 2505509 - RNA, 19 nt, Homo sapiens
  misc_RNA (1)...(19): siRNA sense strand
cggaaagguguugaacuaa

SEQ ID NO: 2505510 - RNA, 19 nt, Homo sapiens
  misc_RNA (1)...(19): siRNA sense strand
aggaagaagagaaggaaga

SEQ ID NO: 2505511 - RNA, 19 nt, Homo sapiens
  misc_RNA (1)...(19): siRNA sense strand
aggaagaggaagaagagaa

SEQ ID NO: 2505512 - RNA, 19 nt, Homo sapiens
  misc_RNA (1)...(19): siRNA sense strand
aggaaaugaaggagucaaa

SEQ ID NO: 2505513 - RNA, 19 nt, Homo sapiens
  misc_RNA (1)...(19): siRNA sense strand
agugggagguagaggaaau

SEQ ID NO: 2505514 - RNA, 19 nt, Homo sapiens
  misc_RNA (1)...(19): siRNA sense strand
aagagaaggaagaggaaaa

SEQ ID NO: 2505515 - RNA, 19 nt, Homo sapiens
  misc_RNA (1)...(19): siRNA sense strand
aagaggaggaagacagaaa

SEQ ID NO: 2505516 - RNA, 19 nt, Homo sapiens
  misc_RNA (1)...(19): siRNA sense strand
aggaaaaggacaagggaga

SEQ ID NO: 2505517 - RNA, 19 nt, Homo sapiens
  misc_RNA (1)...(19): siRNA sense strand
aagcagaggaggaugaaau

SEQ ID NO: 2505518 - RNA, 19 nt, Homo sapiens
  misc_RNA (1)...(19): siRNA sense strand
agucaaagcuuccagguga

SEQ ID NO: 2505519 - RNA, 19 nt, Homo sapiens
  misc_RNA (1)...(19): siRNA sense strand
agauaaauguggagaggac

SEQ ID NO: 2505520 - RNA, 19 nt, Homo sapiens
  misc_RNA (1)...(19): siRNA sense strand
gguauggaguauaagaaaa

SEQ ID NO: 2505521 - RNA, 19 nt, Homo sapiens
  misc_RNA (1)...(19): siRNA sense strand
aggaagaggaaaaggacaa

SEQ ID NO: 2505522 - RNA, 19 nt, Homo sapiens
  misc_RNA (1)...(19): siRNA sense strand
augugaaggaagaggaaga

SEQ ID NO: 2505523 - RNA, 19 nt, Homo sapiens
  misc_RNA (1)...(19): siRNA sense strand
augaagacauggauggaga

SEQ ID NO: 2505524 - RNA, 19 nt, Homo sapiens
  misc_RNA (1)...(19): siRNA sense strand
ggaugugaaggaagaggaa

SEQ ID NO: 2505525 - RNA, 19 nt, Homo sapiens
  misc_RNA (1)...(19): siRNA sense strand
uauccaaagccaagaaaga

SEQ ID NO: 2505526 - RNA, 19 nt, Homo sapiens
  misc_RNA (1)...(19): siRNA sense strand
auaaauguggagaggacua

SEQ ID NO: 2505527 - RNA, 19 nt, Homo sapiens
  misc_RNA (1)...(19): siRNA sense strand
cuaaagcagaggaggauga

SEQ ID NO: 2505528 - RNA, 19 nt, Homo sapiens
  misc_RNA (1)...(19): siRNA sense strand
cgaugaugaaauugccaaa

SEQ ID NO: 2505529 - RNA, 19 nt, Homo sapiens
  misc_RNA (1)...(19): siRNA sense strand
uugccaaauaugauggaaa

SEQ ID NO: 2505530 - RNA, 19 nt, Homo sapiens
  misc_RNA (1)...(19): siRNA sense strand
gguuagaugaugagccuga

SEQ ID NO: 2505531 - RNA, 19 nt, Homo sapiens
  misc_RNA (1)...(19): siRNA sense strand
ugauccagacgcagagaaa

SEQ ID NO: 2505532 - RNA, 19 nt, Homo sapiens
  misc_RNA (1)...(19): siRNA sense strand
agaagagaaggaagaggaa

SEQ ID NO: 2505533 - RNA, 19 nt, Homo sapiens
  misc_RNA (1)...(19): siRNA sense strand
ugaagaagaugguggcacu

SEQ ID NO: 2505534 - RNA, 19 nt, Homo sapiens
  misc_RNA (1)...(19): siRNA sense strand
aggaaggagaagagaaacu

SEQ ID NO: 2505535 - RNA, 19 nt, Homo sapiens
  misc_RNA (1)...(19): siRNA sense strand
acuugaagagaaacagaaa

SEQ ID NO: 2505536 - RNA, 19 nt, Homo sapiens
  misc_RNA (1)...(19): siRNA sense strand
ugguauggaguauaagaaa

SEQ ID NO: 2505537 - RNA, 19 nt, Homo sapiens
  misc_RNA (1)...(19): siRNA sense strand
aggaggaaggagaagagaa

SEQ ID NO: 2505538 - RNA, 19 nt, Homo sapiens
  misc_RNA (1)...(19): siRNA sense strand
agguagaggaaaugaagga

SEQ ID NO: 2505539 - RNA, 19 nt, Homo sapiens
  misc_RNA (1)...(19): siRNA sense strand
cagaugaagaggccacaaa

SEQ ID NO: 2505540 - RNA, 19 nt, Homo sapiens
  misc_RNA (1)...(19): siRNA sense strand
agacgauaccgaugaugaa

SEQ ID NO: 2505541 - RNA, 19 nt, Homo sapiens
  misc_RNA (1)...(19): siRNA sense strand
auggaaagugggagguaga

SEQ ID NO: 2505542 - RNA, 19 nt, Homo sapiens
  misc_RNA (1)...(19): siRNA sense strand
gggagguagaggaaaugaa

SEQ ID NO: 2505543 - RNA, 19 nt, Homo sapiens
  misc_RNA (1)...(19): siRNA sense strand
uguggugaauaguggaaau

SEQ ID NO: 2505544 - RNA, 19 nt, Homo sapiens
  misc_RNA (1)...(19): siRNA sense strand
agaaacuugaagagaaaca

SEQ ID NO: 2505545 - RNA, 19 nt, Homo sapiens
  misc_RNA (1)...(19): siRNA sense strand
acagaaaagugaugcugaa

SEQ ID NO: 2505546 - RNA, 19 nt, Homo sapiens
  misc_RNA (1)...(19): siRNA sense strand
ugugauugauauugaggau

SEQ ID NO: 2505547 - RNA, 19 nt, Homo sapiens
  misc_RNA (1)...(19): siRNA sense strand
ccaaaauggaauagaaugu

SEQ ID NO: 2505548 - RNA, 19 nt, Homo sapiens
  misc_RNA (1)...(19): siRNA sense strand
aagaggaagaagagaagga

SEQ ID NO: 2505549 - RNA, 19 nt, Homo sapiens
  misc_RNA (1)...(19): siRNA sense strand
aagugaugcugaagaagau

SEQ ID NO: 2505550 - RNA, 19 nt, Homo sapiens
  misc_RNA (1)...(19): siRNA sense strand
ccaagaaagacgauaccga

SEQ ID NO: 2505551 - RNA, 19 nt, Homo sapiens
  misc_RNA (1)...(19): siRNA sense strand
aagaagagaaggaagagga

SEQ ID NO: 2505552 - RNA, 19 nt, Homo sapiens
  misc_RNA (1)...(19): siRNA sense strand
ugcuaagauuccagaugaa

SEQ ID NO: 2505553 - RNA, 19 nt, Homo sapiens
  misc_RNA (1)...(19): siRNA sense strand
ucgaagaauaguugaugau

SEQ ID NO: 2505554 - RNA, 19 nt, Homo sapiens
  misc_RNA (1)...(19): siRNA sense strand
ggacaagggagaugaggag

SEQ ID NO: 2505555 - RNA, 19 nt, Homo sapiens
  misc_RNA (1)...(19): siRNA sense strand
augaggaggaggaaggaga

SEQ ID NO: 2505556 - RNA, 19 nt, Homo sapiens
  misc_RNA (1)...(19): siRNA sense strand
ugguggugccuaugugaaa

SEQ ID NO: 2505557 - RNA, 19 nt, Homo sapiens
  misc_RNA (1)...(19): siRNA sense strand
ucauugaagagguagaaga

SEQ ID NO: 2505558 - RNA, 19 nt, Homo sapiens
  misc_RNA (1)...(19): siRNA sense strand
agggagaugaggaggagga

SEQ ID NO: 2505559 - RNA, 19 nt, Homo sapiens
  misc_RNA (1)...(19): siRNA sense strand
ugaacagaucaccaagaaa

SEQ ID NO: 2505560 - RNA, 19 nt, Homo sapiens
  misc_RNA (1)...(19): siRNA sense strand
ggauugggaugaaagacca

SEQ ID NO: 2505561 - RNA, 19 nt, Homo sapiens
  misc_RNA (1)...(19): siRNA sense strand
ccccaauuauaaaggcaaa

SEQ ID NO: 2505562 - RNA, 19 nt, Homo sapiens
  misc_RNA (1)...(19): siRNA sense strand
aaagcuuccaggugauaaa

SEQ ID NO: 2505563 - RNA, 19 nt, Homo sapiens
  misc_RNA (1)...(19): siRNA sense strand
cuaagaggccagaugcaga

SEQ ID NO: 2505564 - RNA, 19 nt, Homo sapiens
  misc_RNA (1)...(19): siRNA sense strand
cuaagauuccagaugaaga

SEQ ID NO: 2505565 - RNA, 19 nt, Homo sapiens
  misc_RNA (1)...(19): siRNA sense strand
acaagggagaugaggagga

SEQ ID NO: 2505566 - RNA, 19 nt, Homo sapiens
  misc_RNA (1)...(19): siRNA sense strand
guggagaggacuauaaacu

SEQ ID NO: 2505567 - RNA, 19 nt, Homo sapiens
  misc_RNA (1)...(19): siRNA sense strand
aggauugggaugaagacau

SEQ ID NO: 2505568 - RNA, 19 nt, Homo sapiens
  misc_RNA (1)...(19): siRNA sense strand
cuggaaccuuucagaauga

SEQ ID NO: 2505569 - RNA, 19 nt, Homo sapiens
  misc_RNA (1)...(19): siRNA sense strand
ucagucaagaggaggaaga

SEQ ID NO: 2505570 - RNA, 19 nt, Homo sapiens
  misc_RNA (1)...(19): siRNA sense strand
ucccaagguuacuuacaaa

SEQ ID NO: 2505571 - RNA, 19 nt, Homo sapiens
  misc_RNA (1)...(19): siRNA sense strand
gaaagugggagguagagga

SEQ ID NO: 2505572 - RNA, 19 nt, Homo sapiens
  misc_RNA (1)...(19): siRNA sense strand
uuguucaguaugagguuaa

SEQ ID NO: 2505573 - RNA, 19 nt, Homo sapiens
  misc_RNA (1)...(19): siRNA sense strand
uggaauagaaugugguggu

SEQ ID NO: 2505574 - RNA, 19 nt, Homo sapiens
  misc_RNA (1)...(19): siRNA sense strand
ggagaaaugaugaggagcu

SEQ ID NO: 2505575 - RNA, 19 nt, Homo sapiens
  misc_RNA (1)...(19): siRNA sense strand
ccuguaucaagaugggaaa

SEQ ID NO: 2505576 - RNA, 19 nt, Homo sapiens
  misc_RNA (1)...(19): siRNA sense strand
agacaagagcccacagagu

SEQ ID NO: 2505577 - RNA, 19 nt, Homo sapiens
  misc_RNA (1)...(19): siRNA sense strand
cagaaaagagaaagagacu

SEQ ID NO: 2505578 - RNA, 19 nt, Homo sapiens
  misc_RNA (1)...(19): siRNA sense strand
ccgaauuaaaccuguauca

SEQ ID NO: 2505579 - RNA, 19 nt, Homo sapiens
  misc_RNA (1)...(19): siRNA sense strand
gcacacaaguucaccagca

SEQ ID NO: 2505580 - RNA, 19 nt, Homo sapiens
  misc_RNA (1)...(19): siRNA sense strand
cuauaucaccaaaaggaaa

SEQ ID NO: 2505581 - RNA, 19 nt, Homo sapiens
  misc_RNA (1)...(19): siRNA sense strand
cagggaacaaagucagcaa

SEQ ID NO: 2505582 - RNA, 19 nt, Homo sapiens
  misc_RNA (1)...(19): siRNA sense strand
aaacuuucucagaggguca

SEQ ID NO: 2505583 - RNA, 19 nt, Homo sapiens
  misc_RNA (1)...(19): siRNA sense strand
gaaaugaugaggagcugga

SEQ ID NO: 2505584 - RNA, 19 nt, Homo sapiens
  misc_RNA (1)...(19): siRNA sense strand
gacgauauaaaaugggaaa

SEQ ID NO: 2505585 - RNA, 19 nt, Homo sapiens
  misc_RNA (1)...(19): siRNA sense strand
aaaugaagcuagaaggaga

SEQ ID NO: 2505586 - RNA, 19 nt, Homo sapiens
  misc_RNA (1)...(19): siRNA sense strand
gagugaagauuuaagcgua

SEQ ID NO: 2505587 - RNA, 19 nt, Homo sapiens
  misc_RNA (1)...(19): siRNA sense strand
uggcauuggucaugaggca

SEQ ID NO: 2505588 - RNA, 19 nt, Homo sapiens
  misc_RNA (1)...(19): siRNA sense strand
gguugaggcuugaagagga

SEQ ID NO: 2505589 - RNA, 19 nt, Homo sapiens
  misc_RNA (1)...(19): siRNA sense strand
auuuaagcguacuggaaaa

SEQ ID NO: 2505590 - RNA, 19 nt, Homo sapiens
  misc_RNA (1)...(19): siRNA sense strand
aauuggaaagcuacagaaa

SEQ ID NO: 2505591 - RNA, 19 nt, Homo sapiens
  misc_RNA (1)...(19): siRNA sense strand
ggcuugaagaggagacuga

SEQ ID NO: 2505592 - RNA, 19 nt, Homo sapiens
  misc_RNA (1)...(19): siRNA sense strand
gaaaaguggcauuggucau

SEQ ID NO: 2505593 - RNA, 19 nt, Homo sapiens
  misc_RNA (1)...(19): siRNA sense strand
agaagaagccagcgagccu

SEQ ID NO: 2505594 - RNA, 19 nt, Homo sapiens
  misc_RNA (1)...(19): siRNA sense strand
aacggaaagcagaggaaaa

SEQ ID NO: 2505595 - RNA, 19 nt, Homo sapiens
  misc_RNA (1)...(19): siRNA sense strand
aaaaccaagcugaagaaaa

SEQ ID NO: 2505596 - RNA, 19 nt, Homo sapiens
  misc_RNA (1)...(19): siRNA sense strand
gaugaauauaagagugaag

SEQ ID NO: 2505597 - RNA, 19 nt, Homo sapiens
  misc_RNA (1)...(19): siRNA sense strand
aagugaagucaaagcgcua

SEQ ID NO: 2505598 - RNA, 19 nt, Homo sapiens
  misc_RNA (1)...(19): siRNA sense strand
aaugaagaugauugagcaa

SEQ ID NO: 2505599 - RNA, 19 nt, Homo sapiens
  misc_RNA (1)...(19): siRNA sense strand
gaaugaagaugauugagca

SEQ ID NO: 2505600 - RNA, 19 nt, Homo sapiens
  misc_RNA (1)...(19): siRNA sense strand
gugaagucaaagcgcuaaa

SEQ ID NO: 2505601 - RNA, 19 nt, Homo sapiens
  misc_RNA (1)...(19): siRNA sense strand
gaucauggccacagagccu

SEQ ID NO: 2505602 - RNA, 19 nt, Homo sapiens
  misc_RNA (1)...(19): siRNA sense strand
caaucuacaaccaggcaau

SEQ ID NO: 2505603 - RNA, 19 nt, Homo sapiens
  misc_RNA (1)...(19): siRNA sense strand
ccucaaagcagcagccaag

SEQ ID NO: 2505604 - RNA, 19 nt, Homo sapiens
  misc_RNA (1)...(19): siRNA sense strand
cgaccugaaguaugaaaca

SEQ ID NO: 2505605 - RNA, 19 nt, Homo sapiens
  misc_RNA (1)...(19): siRNA sense strand
ucaaagcgcuaaaugccaa

SEQ ID NO: 2505606 - RNA, 19 nt, Homo sapiens
  misc_RNA (1)...(19): siRNA sense strand
cauuggaaucgccgaguau

SEQ ID NO: 2505607 - RNA, 19 nt, Homo sapiens
  misc_RNA (1)...(19): siRNA sense strand
gcaauuucacccuggacau

SEQ ID NO: 2505608 - RNA, 19 nt, Homo sapiens
  misc_RNA (1)...(19): siRNA sense strand
agugggaaucaaagcgcua

SEQ ID NO: 2505609 - RNA, 19 nt, Homo sapiens
  misc_RNA (1)...(19): siRNA sense strand
ggucuugagguuugaaaau

SEQ ID NO: 2505610 - RNA, 19 nt, Homo sapiens
  misc_RNA (1)...(19): siRNA sense strand
agaaagaagaagaggagga

SEQ ID NO: 2505611 - RNA, 19 nt, Homo sapiens
  misc_RNA (1)...(19): siRNA sense strand
aagacagggaagaggaaga

SEQ ID NO: 2505612 - RNA, 19 nt, Homo sapiens
  misc_RNA (1)...(19): siRNA sense strand
ccgagaaagaagaagagga

SEQ ID NO: 2505613 - RNA, 19 nt, Homo sapiens
  misc_RNA (1)...(19): siRNA sense strand
gggucaaguucaggagaca

SEQ ID NO: 2505614 - RNA, 19 nt, Homo sapiens
  misc_RNA (1)...(19): siRNA sense strand
ggaguuuccugauggguca

SEQ ID NO: 2505615 - RNA, 19 nt, Homo sapiens
  misc_RNA (1)...(19): siRNA sense strand
cuagagaaugcgaggacca

SEQ ID NO: 2505616 - RNA, 19 nt, Homo sapiens
  misc_RNA (1)...(19): siRNA sense strand
cgagaaagaagaagaggag

SEQ ID NO: 2505617 - RNA, 19 nt, Homo sapiens
  misc_RNA (1)...(19): siRNA sense strand
aaggaggggucuuaggaaa

SEQ ID NO: 2505618 - RNA, 19 nt, Homo sapiens
  misc_RNA (1)...(19): siRNA sense strand
aggaggggucuuaggaaaa

SEQ ID NO: 2505619 - RNA, 19 nt, Homo sapiens
  misc_RNA (1)...(19): siRNA sense strand
uguccaaaauagagacuuu

SEQ ID NO: 2505620 - RNA, 19 nt, Homo sapiens
  misc_RNA (1)...(19): siRNA sense strand
cguccaaaacuuaugcaaa

SEQ ID NO: 2505621 - RNA, 19 nt, Homo sapiens
  misc_RNA (1)...(19): siRNA sense strand
cgaggaaagagcaucaaaa

SEQ ID NO: 2505622 - RNA, 19 nt, Homo sapiens
  misc_RNA (1)...(19): siRNA sense strand
agacaaaggacgagaugga

SEQ ID NO: 2505623 - RNA, 19 nt, Homo sapiens
  misc_RNA (1)...(19): siRNA sense strand
uagagugggaugagggaaa

SEQ ID NO: 2505624 - RNA, 19 nt, Homo sapiens
  misc_RNA (1)...(19): siRNA sense strand
acaaaggacgagauggaaa

SEQ ID NO: 2505625 - RNA, 19 nt, Homo sapiens
  misc_RNA (1)...(19): siRNA sense strand
ucugaaugauggaggguau

SEQ ID NO: 2505626 - RNA, 19 nt, Homo sapiens
  misc_RNA (1)...(19): siRNA sense strand
ugggaagagccgugcaaua

SEQ ID NO: 2505627 - RNA, 19 nt, Homo sapiens
  misc_RNA (1)...(19): siRNA sense strand
gauaauuuacaguggagaa

SEQ ID NO: 2505628 - RNA, 19 nt, Homo sapiens
  misc_RNA (1)...(19): siRNA sense strand
ccuacaagguccagagacu

SEQ ID NO: 2505629 - RNA, 19 nt, Homo sapiens
  misc_RNA (1)...(19): siRNA sense strand
cgguaguggucccggaauu

SEQ ID NO: 2505630 - RNA, 19 nt, Homo sapiens
  misc_RNA (1)...(19): siRNA sense strand
gggccauagugguggaagu

SEQ ID NO: 2505631 - RNA, 19 nt, Homo sapiens
  misc_RNA (1)...(19): siRNA sense strand
uggaaauucaggaggauga

SEQ ID NO: 2505632 - RNA, 19 nt, Homo sapiens
  misc_RNA (1)...(19): siRNA sense strand
aaguaaagagggugcaaga

SEQ ID NO: 2505633 - RNA, 19 nt, Homo sapiens
  misc_RNA (1)...(19): siRNA sense strand
ugucaaaggcccaguuaca

SEQ ID NO: 2505634 - RNA, 19 nt, Homo sapiens
  misc_RNA (1)...(19): siRNA sense strand
aauuuacaguggagaagaa

SEQ ID NO: 2505635 - RNA, 19 nt, Homo sapiens
  misc_RNA (1)...(19): siRNA sense strand
ccugaaagaucuuagacca

SEQ ID NO: 2505636 - RNA, 19 nt, Homo sapiens
  misc_RNA (1)...(19): siRNA sense strand
cacaauaagagcagaggau

SEQ ID NO: 2505637 - RNA, 19 nt, Homo sapiens
  misc_RNA (1)...(19): siRNA sense strand
aagcauugcaccaggucaa

SEQ ID NO: 2505638 - RNA, 19 nt, Homo sapiens
  misc_RNA (1)...(19): siRNA sense strand
gggugagggcucugaauga

SEQ ID NO: 2505639 - RNA, 19 nt, Homo sapiens
  misc_RNA (1)...(19): siRNA sense strand
caacaguauacaauggcua

SEQ ID NO: 2505640 - RNA, 19 nt, Homo sapiens
  misc_RNA (1)...(19): siRNA sense strand
caaaggacgagauggaaaa

SEQ ID NO: 2505641 - RNA, 19 nt, Homo sapiens
  misc_RNA (1)...(19): siRNA sense strand
caaaagaagcacacaguau

SEQ ID NO: 2505642 - RNA, 19 nt, Homo sapiens
  misc_RNA (1)...(19): siRNA sense strand
guccagagacugacggaau

SEQ ID NO: 2505643 - RNA, 19 nt, Homo sapiens
  misc_RNA (1)...(19): siRNA sense strand
ggaaaguggcugugagguc

SEQ ID NO: 2505644 - RNA, 19 nt, Homo sapiens
  misc_RNA (1)...(19): siRNA sense strand
acucauuuaucaugggaca

SEQ ID NO: 2505645 - RNA, 19 nt, Homo sapiens
  misc_RNA (1)...(19): siRNA sense strand
accuauaccuucagcacaa

SEQ ID NO: 2505646 - RNA, 19 nt, Homo sapiens
  misc_RNA (1)...(19): siRNA sense strand
gugcuacacauuaggaaau

SEQ ID NO: 2505647 - RNA, 19 nt, Homo sapiens
  misc_RNA (1)...(19): siRNA sense strand
aagaauaugaguuggaagu

SEQ ID NO: 2505648 - RNA, 19 nt, Homo sapiens
  misc_RNA (1)...(19): siRNA sense strand
gacaauggugguucagaaa

SEQ ID NO: 2505649 - RNA, 19 nt, Homo sapiens
  misc_RNA (1)...(19): siRNA sense strand
ucucaggccuccagaccaa

SEQ ID NO: 2505650 - RNA, 19 nt, Homo sapiens
  misc_RNA (1)...(19): siRNA sense strand
uggagaagaauuagaaugu

SEQ ID NO: 2505651 - RNA, 19 nt, Homo sapiens
  misc_RNA (1)...(19): siRNA sense strand
ucaccuacaccuuggaaau

SEQ ID NO: 2505652 - RNA, 19 nt, Homo sapiens
  misc_RNA (1)...(19): siRNA sense strand
ccuuggaaauucaggagga

SEQ ID NO: 2505653 - RNA, 19 nt, Homo sapiens
  misc_RNA (1)...(19): siRNA sense strand
uaaaauggggagacaguaa

SEQ ID NO: 2505654 - RNA, 19 nt, Homo sapiens
  misc_RNA (1)...(19): siRNA sense strand
ucacaaugaugaugaccga

SEQ ID NO: 2505655 - RNA, 19 nt, Homo sapiens
  misc_RNA (1)...(19): siRNA sense strand
agcccaaagucgaaugauu

SEQ ID NO: 2505656 - RNA, 19 nt, Homo sapiens
  misc_RNA (1)...(19): siRNA sense strand
agucaguucauuaaagcaa

SEQ ID NO: 2505657 - RNA, 19 nt, Homo sapiens
  misc_RNA (1)...(19): siRNA sense strand
auauauggugagcaagaaa

SEQ ID NO: 2505658 - RNA, 19 nt, Homo sapiens
  misc_RNA (1)...(19): siRNA sense strand
ggaaguaaagagggugcaa

SEQ ID NO: 2505659 - RNA, 19 nt, Homo sapiens
  misc_RNA (1)...(19): siRNA sense strand
uagagauuacugauggaaa

SEQ ID NO: 2505660 - RNA, 19 nt, Homo sapiens
  misc_RNA (1)...(19): siRNA sense strand
aaaugaaauuggagcugga

SEQ ID NO: 2505661 - RNA, 19 nt, Homo sapiens
  misc_RNA (1)...(19): siRNA sense strand
caccauugcugaacggaga

SEQ ID NO: 2505662 - RNA, 19 nt, Homo sapiens
  misc_RNA (1)...(19): siRNA sense strand
gugcaauaacggaucugaa

SEQ ID NO: 2505663 - RNA, 19 nt, Homo sapiens
  misc_RNA (1)...(19): siRNA sense strand
ugaaauuggagcuggacca

SEQ ID NO: 2505664 - RNA, 19 nt, Homo sapiens
  misc_RNA (1)...(19): siRNA sense strand
cgagcaagaagcagcccaa

SEQ ID NO: 2505665 - RNA, 19 nt, Homo sapiens
  misc_RNA (1)...(19): siRNA sense strand
augcaaagcaccuuguauu

SEQ ID NO: 2505666 - RNA, 19 nt, Homo sapiens
  misc_RNA (1)...(19): siRNA sense strand
cgaccaaaucccucuggaa

SEQ ID NO: 2505667 - RNA, 19 nt, Homo sapiens
  misc_RNA (1)...(19): siRNA sense strand
guacaauuccguaaaggga

SEQ ID NO: 2505668 - RNA, 19 nt, Homo sapiens
  misc_RNA (1)...(19): siRNA sense strand
guguaucgcuuccggguga

SEQ ID NO: 2505669 - RNA, 19 nt, Homo sapiens
  misc_RNA (1)...(19): siRNA sense strand
caucauugugcuuggcuuu

SEQ ID NO: 2505670 - RNA, 19 nt, Homo sapiens
  misc_RNA (1)...(19): siRNA sense strand
aguuaauccaggugagacu

SEQ ID NO: 2505671 - RNA, 19 nt, Homo sapiens
  misc_RNA (1)...(19): siRNA sense strand
uggaagagaaucugaguac

SEQ ID NO: 2505672 - RNA, 19 nt, Homo sapiens
  misc_RNA (1)...(19): siRNA sense strand
gagcaagaaauuauaccau

SEQ ID NO: 2505673 - RNA, 19 nt, Homo sapiens
  misc_RNA (1)...(19): siRNA sense strand
aguuacaucucauggcuuu

SEQ ID NO: 2505674 - RNA, 19 nt, Homo sapiens
  misc_RNA (1)...(19): siRNA sense strand
acuacauucugcagguauu

SEQ ID NO: 2505675 - RNA, 19 nt, Homo sapiens
  misc_RNA (1)...(19): siRNA sense strand
agguauugguuggaagaga

SEQ ID NO: 2505676 - RNA, 19 nt, Homo sapiens
  misc_RNA (1)...(19): siRNA sense strand
gguguacaagggagaagaa

SEQ ID NO: 2505677 - RNA, 19 nt, Homo sapiens
  misc_RNA (1)...(19): siRNA sense strand
agaagaagccacauuccaa

SEQ ID NO: 2505678 - RNA, 19 nt, Homo sapiens
  misc_RNA (1)...(19): siRNA sense strand
ugcaauaacggaucugaaa

SEQ ID NO: 2505679 - RNA, 19 nt, Homo sapiens
  misc_RNA (1)...(19): siRNA sense strand
ugugaaauuuuaugggaga

SEQ ID NO: 2505680 - RNA, 19 nt, Homo sapiens
  misc_RNA (1)...(19): siRNA sense strand
gcagguauugguuggaaga

SEQ ID NO: 2505681 - RNA, 19 nt, Homo sapiens
  misc_RNA (1)...(19): siRNA sense strand
gggucauacagcagaaaua

SEQ ID NO: 2505682 - RNA, 19 nt, Homo sapiens
  misc_RNA (1)...(19): siRNA sense strand
gugcguuaguagaagaaau

SEQ ID NO: 2505683 - RNA, 19 nt, Homo sapiens
  misc_RNA (1)...(19): siRNA sense strand
auauauugccacugacuaa

SEQ ID NO: 2505684 - RNA, 19 nt, Homo sapiens
  misc_RNA (1)...(19): siRNA sense strand
uugccaaacuggaagguca

SEQ ID NO: 2505685 - RNA, 19 nt, Homo sapiens
  misc_RNA (1)...(19): siRNA sense strand
acagagguugcaagagaaa

SEQ ID NO: 2505686 - RNA, 19 nt, Homo sapiens
  misc_RNA (1)...(19): siRNA sense strand
aagaaaaugcauugccaaa

SEQ ID NO: 2505687 - RNA, 19 nt, Homo sapiens
  misc_RNA (1)...(19): siRNA sense strand
aggucaugaaggugaaauu

SEQ ID NO: 2505688 - RNA, 19 nt, Homo sapiens
  misc_RNA (1)...(19): siRNA sense strand
acgaacagagcaagucaaa

SEQ ID NO: 2505689 - RNA, 19 nt, Homo sapiens
  misc_RNA (1)...(19): siRNA sense strand
ggaaugugguuuaugccau

SEQ ID NO: 2505690 - RNA, 19 nt, Homo sapiens
  misc_RNA (1)...(19): siRNA sense strand
aagaaauccagaaggcaga

SEQ ID NO: 2505691 - RNA, 19 nt, Homo sapiens
  misc_RNA (1)...(19): siRNA sense strand
ugaacacgcuggagggcca

SEQ ID NO: 2505692 - RNA, 19 nt, Homo sapiens
  misc_RNA (1)...(19): siRNA sense strand
gaguguggaaacaggaaaa

SEQ ID NO: 2505693 - RNA, 19 nt, Homo sapiens
  misc_RNA (1)...(19): siRNA sense strand
cuggaaggaagguaaauau

SEQ ID NO: 2505694 - RNA, 19 nt, Homo sapiens
  misc_RNA (1)...(19): siRNA sense strand
ggaguguggaaacaggaaa

SEQ ID NO: 2505695 - RNA, 19 nt, Homo sapiens
  misc_RNA (1)...(19): siRNA sense strand
ccaaauugugggacauuca

SEQ ID NO: 2505696 - RNA, 19 nt, Homo sapiens
  misc_RNA (1)...(19): siRNA sense strand
auuacaggcagcaaggaua

SEQ ID NO: 2505697 - RNA, 19 nt, Homo sapiens
  misc_RNA (1)...(19): siRNA sense strand
cgucuggagaggagcugaa

SEQ ID NO: 2505698 - RNA, 19 nt, Homo sapiens
  misc_RNA (1)...(19): siRNA sense strand
uggucauugugcugagauu

SEQ ID NO: 2505699 - RNA, 19 nt, Homo sapiens
  misc_RNA (1)...(19): siRNA sense strand
ccaggaauuauguuggaau

SEQ ID NO: 2505700 - RNA, 19 nt, Homo sapiens
  misc_RNA (1)...(19): siRNA sense strand
acagccaaauugugggaca

SEQ ID NO: 2505701 - RNA, 19 nt, Homo sapiens
  misc_RNA (1)...(19): siRNA sense strand
uggaaggucaugaagguga

SEQ ID NO: 2505702 - RNA, 19 nt, Homo sapiens
  misc_RNA (1)...(19): siRNA sense strand
ucaacaauccuuacgguga

SEQ ID NO: 2505703 - RNA, 19 nt, Homo sapiens
  misc_RNA (1)...(19): siRNA sense strand
uggaaagcuuauugcaacu

SEQ ID NO: 2505704 - RNA, 19 nt, Homo sapiens
  misc_RNA (1)...(19): siRNA sense strand
cagccaaauugugggacau

SEQ ID NO: 2505705 - RNA, 19 nt, Homo sapiens
  misc_RNA (1)...(19): siRNA sense strand
auacuggaaggaagguaaa

SEQ ID NO: 2505706 - RNA, 19 nt, Homo sapiens
  misc_RNA (1)...(19): siRNA sense strand
gcuuauugcaacugcuuca

SEQ ID NO: 2505707 - RNA, 19 nt, Homo sapiens
  misc_RNA (1)...(19): siRNA sense strand
uuaacuggcucuauggaca

SEQ ID NO: 2505708 - RNA, 19 nt, Homo sapiens
  misc_RNA (1)...(19): siRNA sense strand
gggaugcuacaaauggaaa

SEQ ID NO: 2505709 - RNA, 19 nt, Homo sapiens
  misc_RNA (1)...(19): siRNA sense strand
cuuaacaggccaugaugau

SEQ ID NO: 2505710 - RNA, 19 nt, Homo sapiens
  misc_RNA (1)...(19): siRNA sense strand
gaagaaauccagaaggcag

SEQ ID NO: 2505711 - RNA, 19 nt, Homo sapiens
  misc_RNA (1)...(19): siRNA sense strand
gcgacuggaaguauggaca

SEQ ID NO: 2505712 - RNA, 19 nt, Homo sapiens
  misc_RNA (1)...(19): siRNA sense strand
ugauacagagguugcaaga

SEQ ID NO: 2505713 - RNA, 19 nt, Homo sapiens
  misc_RNA (1)...(19): siRNA sense strand
ggaugcuacaaauggaaaa

SEQ ID NO: 2505714 - RNA, 19 nt, Homo sapiens
  misc_RNA (1)...(19): siRNA sense strand
gcuuugauuacacuggaaa

SEQ ID NO: 2505715 - RNA, 19 nt, Homo sapiens
  misc_RNA (1)...(19): siRNA sense strand
acuggaaagcuuauugcaa

SEQ ID NO: 2505716 - RNA, 19 nt, Homo sapiens
  misc_RNA (1)...(19): siRNA sense strand
uggaagaauuugagcgcau

SEQ ID NO: 2505717 - RNA, 19 nt, Homo sapiens
  misc_RNA (1)...(19): siRNA sense strand
auccagaacaacagggaga

SEQ ID NO: 2505718 - RNA, 19 nt, Homo sapiens
  misc_RNA (1)...(19): siRNA sense strand
gcacagaacuugcggcacc

SEQ ID NO: 2505719 - RNA, 19 nt, Homo sapiens
  misc_RNA (1)...(19): siRNA sense strand
ccagaacaacagggagaau

SEQ ID NO: 2505720 - RNA, 19 nt, Homo sapiens
  misc_RNA (1)...(19): siRNA sense strand
caaaagaaaccaaggaaau

SEQ ID NO: 2505721 - RNA, 19 nt, Homo sapiens
  misc_RNA (1)...(19): siRNA sense strand
cccaaagacauucgggaaa

SEQ ID NO: 2505722 - RNA, 19 nt, Homo sapiens
  misc_RNA (1)...(19): siRNA sense strand
uguuacugaugcagagaua

SEQ ID NO: 2505723 - RNA, 19 nt, Homo sapiens
  misc_RNA (1)...(19): siRNA sense strand
augcagagauacagcaaaa

SEQ ID NO: 2505724 - RNA, 19 nt, Homo sapiens
  misc_RNA (1)...(19): siRNA sense strand
gagaauuccguguagacaa

SEQ ID NO: 2505725 - RNA, 19 nt, Homo sapiens
  misc_RNA (1)...(19): siRNA sense strand
cuuucuacauuguggguuu

SEQ ID NO: 2505726 - RNA, 19 nt, Homo sapiens
  misc_RNA (1)...(19): siRNA sense strand
acaaaagaaaccaaggaaa

SEQ ID NO: 2505727 - RNA, 19 nt, Homo sapiens
  misc_RNA (1)...(19): siRNA sense strand
guaugauaaggcagguaaa

SEQ ID NO: 2505728 - RNA, 19 nt, Homo sapiens
  misc_RNA (1)...(19): siRNA sense strand
gcaaaauacagaugaacau

SEQ ID NO: 2505729 - RNA, 19 nt, Homo sapiens
  misc_RNA (1)...(19): siRNA sense strand
ggauaauaacaccuggaau

SEQ ID NO: 2505730 - RNA, 19 nt, Homo sapiens
  misc_RNA (1)...(19): siRNA sense strand
ucaaagaagacuaccaaaa

SEQ ID NO: 2505731 - RNA, 19 nt, Homo sapiens
  misc_RNA (1)...(19): siRNA sense strand
aggcagguaaagugaggaa

SEQ ID NO: 2505732 - RNA, 19 nt, Homo sapiens
  misc_RNA (1)...(19): siRNA sense strand
gccucauggcccugggaaa

SEQ ID NO: 2505733 - RNA, 19 nt, Homo sapiens
  misc_RNA (1)...(19): siRNA sense strand
gggagacauuagaucacaa

SEQ ID NO: 2505734 - RNA, 19 nt, Homo sapiens
  misc_RNA (1)...(19): siRNA sense strand
cugauaacagggagacauu

SEQ ID NO: 2505735 - RNA, 19 nt, Homo sapiens
  misc_RNA (1)...(19): siRNA sense strand
ugaugaaagagcaugguau

SEQ ID NO: 2505736 - RNA, 19 nt, Homo sapiens
  misc_RNA (1)...(19): siRNA sense strand
gaugauaaccgcuggccuu

SEQ ID NO: 2505737 - RNA, 19 nt, Homo sapiens
  misc_RNA (1)...(19): siRNA sense strand
gcagugaugaggaugacaa

SEQ ID NO: 2505738 - RNA, 19 nt, Homo sapiens
  misc_RNA (1)...(19): siRNA sense strand
cagugaugaggaugacaaa

SEQ ID NO: 2505739 - RNA, 19 nt, Homo sapiens
  misc_RNA (1)...(19): siRNA sense strand
ggagaacaucccaaagaca

SEQ ID NO: 2505740 - RNA, 19 nt, Homo sapiens
  misc_RNA (1)...(19): siRNA sense strand
gaguucgacccgugguuua

SEQ ID NO: 2505741 - RNA, 19 nt, Homo sapiens
  misc_RNA (1)...(19): siRNA sense strand
cagcaaaagagucuacaua

SEQ ID NO: 2505742 - RNA, 19 nt, Homo sapiens
  misc_RNA (1)...(19): siRNA sense strand
gagauuggaaauaaggaca

SEQ ID NO: 2505743 - RNA, 19 nt, Homo sapiens
  misc_RNA (1)...(19): siRNA sense strand
gaugacaugaaaagggaaa

SEQ ID NO: 2505744 - RNA, 19 nt, Homo sapiens
  misc_RNA (1)...(19): siRNA sense strand
gcagguaaagugaggaaac

SEQ ID NO: 2505745 - RNA, 19 nt, Homo sapiens
  misc_RNA (1)...(19): siRNA sense strand
cagguaaagugaggaaaca

SEQ ID NO: 2505746 - RNA, 19 nt, Homo sapiens
  misc_RNA (1)...(19): siRNA sense strand
uggaauggcuaauagaacu

SEQ ID NO: 2505747 - RNA, 19 nt, Homo sapiens
  misc_RNA (1)...(19): siRNA sense strand
agaacaucccaaagacauu

SEQ ID NO: 2505748 - RNA, 19 nt, Homo sapiens
  misc_RNA (1)...(19): siRNA sense strand
guauccacuaggaagaaua

SEQ ID NO: 2505749 - RNA, 19 nt, Homo sapiens
  misc_RNA (1)...(19): siRNA sense strand
ggccuuauucauuggauuu

SEQ ID NO: 2505750 - RNA, 19 nt, Homo sapiens
  misc_RNA (1)...(19): siRNA sense strand
gguuaggauagcugaagga

SEQ ID NO: 2505751 - RNA, 19 nt, Homo sapiens
  misc_RNA (1)...(19): siRNA sense strand
cugagagaccgauuaacaa

SEQ ID NO: 2505752 - RNA, 19 nt, Homo sapiens
  misc_RNA (1)...(19): siRNA sense strand
uaaugaaacagcagccuau

SEQ ID NO: 2505753 - RNA, 19 nt, Homo sapiens
  misc_RNA (1)...(19): siRNA sense strand
gcagauaccuuuuguggga

SEQ ID NO: 2505754 - RNA, 19 nt, Homo sapiens
  misc_RNA (1)...(19): siRNA sense strand
caaccuacgacuugggugu

SEQ ID NO: 2505755 - RNA, 19 nt, Homo sapiens
  misc_RNA (1)...(19): siRNA sense strand
caacaaauuucucuggaug

SEQ ID NO: 2505756 - RNA, 19 nt, Homo sapiens
  misc_RNA (1)...(19): siRNA sense strand
uuacugaugcagagauaca

SEQ ID NO: 2505757 - RNA, 19 nt, Homo sapiens
  misc_RNA (1)...(19): siRNA sense strand
aaucagaacaagugaacac

SEQ ID NO: 2505758 - RNA, 19 nt, Homo sapiens
  misc_RNA (1)...(19): siRNA sense strand
uguugaugcugaugcuauu

SEQ ID NO: 2505759 - RNA, 19 nt, Homo sapiens
  misc_RNA (1)...(19): siRNA sense strand
aaguaaaagcaccugauaa

SEQ ID NO: 2505760 - RNA, 19 nt, Homo sapiens
  misc_RNA (1)...(19): siRNA sense strand
uguaugauaaggcagguaa

SEQ ID NO: 2505761 - RNA, 19 nt, Homo sapiens
  misc_RNA (1)...(19): siRNA sense strand
cguaaugcugagauuggaa

SEQ ID NO: 2505762 - RNA, 19 nt, Homo sapiens
  misc_RNA (1)...(19): siRNA sense strand
cuggaauaacagccacaua

SEQ ID NO: 2505763 - RNA, 19 nt, Homo sapiens
  misc_RNA (1)...(19): siRNA sense strand
ugucaaagaagacuaccaa

SEQ ID NO: 2505764 - RNA, 19 nt, Homo sapiens
  misc_RNA (1)...(19): siRNA sense strand
cuacauagcauauagcacu

SEQ ID NO: 2505765 - RNA, 19 nt, Homo sapiens
  misc_RNA (1)...(19): siRNA sense strand
auacuacagauuuggagaa

SEQ ID NO: 2505766 - RNA, 19 nt, Homo sapiens
  misc_RNA (1)...(19): siRNA sense strand
aggaagaggaagaggaaga

SEQ ID NO: 2505767 - RNA, 19 nt, Homo sapiens
  misc_RNA (1)...(19): siRNA sense strand
augaagaggaagaggaaga

SEQ ID NO: 2505768 - RNA, 19 nt, Homo sapiens
  misc_RNA (1)...(19): siRNA sense strand
aggaagaggaagaagaaga

SEQ ID NO: 2505769 - RNA, 19 nt, Homo sapiens
  misc_RNA (1)...(19): siRNA sense strand
aggauuaugaagaggaaga

SEQ ID NO: 2505770 - RNA, 19 nt, Homo sapiens
  misc_RNA (1)...(19): siRNA sense strand
ggaaagaugguuuaggagu

SEQ ID NO: 2505771 - RNA, 19 nt, Homo sapiens
  misc_RNA (1)...(19): siRNA sense strand
aagaggaagaggaagaaga

SEQ ID NO: 2505772 - RNA, 19 nt, Homo sapiens
  misc_RNA (1)...(19): siRNA sense strand
aggaagaagaagaggcuac

SEQ ID NO: 2505773 - RNA, 19 nt, Homo sapiens
  misc_RNA (1)...(19): siRNA sense strand
uuaugaagaggaagaggaa

SEQ ID NO: 2505774 - RNA, 19 nt, Homo sapiens
  misc_RNA (1)...(19): siRNA sense strand
gaaagaugguuuaggaguc

SEQ ID NO: 2505775 - RNA, 19 nt, Homo sapiens
  misc_RNA (1)...(19): siRNA sense strand
guucgaaagguuacaccaa

SEQ ID NO: 2505776 - RNA, 19 nt, Homo sapiens
  misc_RNA (1)...(19): siRNA sense strand
caaacauuccacaaggcaa

SEQ ID NO: 2505777 - RNA, 19 nt, Homo sapiens
  misc_RNA (1)...(19): siRNA sense strand
aagaagaagaggcuaccaa

SEQ ID NO: 2505778 - RNA, 19 nt, Homo sapiens
  misc_RNA (1)...(19): siRNA sense strand
caggaagcuugcuggagau

SEQ ID NO: 2505779 - RNA, 19 nt, Homo sapiens
  misc_RNA (1)...(19): siRNA sense strand
ccaaaggcaaagagaugga

SEQ ID NO: 2505780 - RNA, 19 nt, Homo sapiens
  misc_RNA (1)...(19): siRNA sense strand
guuauuuagacuuggcuuu

SEQ ID NO: 2505781 - RNA, 19 nt, Homo sapiens
  misc_RNA (1)...(19): siRNA sense strand
guuuaggagucggcggaau

SEQ ID NO: 2505782 - RNA, 19 nt, Homo sapiens
  misc_RNA (1)...(19): siRNA sense strand
auauuuauggacuggcaaa

SEQ ID NO: 2505783 - RNA, 19 nt, Homo sapiens
  misc_RNA (1)...(19): siRNA sense strand
augucaagagaaaggauuu

SEQ ID NO: 2505784 - RNA, 19 nt, Homo sapiens
  misc_RNA (1)...(19): siRNA sense strand
cggaaucaagagaggccuu

SEQ ID NO: 2505785 - RNA, 19 nt, Homo sapiens
  misc_RNA (1)...(19): siRNA sense strand
cauuaaagagacaguucga

SEQ ID NO: 2505786 - RNA, 19 nt, Homo sapiens
  misc_RNA (1)...(19): siRNA sense strand
augauaaaccuuggcuaua

SEQ ID NO: 2505787 - RNA, 19 nt, Homo sapiens
  misc_RNA (1)...(19): siRNA sense strand
acuggauaaugcagggaaa

SEQ ID NO: 2505788 - RNA, 19 nt, Homo sapiens
  misc_RNA (1)...(19): siRNA sense strand
caaaguaauuauaguggga

SEQ ID NO: 2505789 - RNA, 19 nt, Homo sapiens
  misc_RNA (1)...(19): siRNA sense strand
aaguaauuauagugggacu

SEQ ID NO: 2505790 - RNA, 19 nt, Homo sapiens
  misc_RNA (1)...(19): siRNA sense strand
ggauauugguggucaggag

SEQ ID NO: 2505791 - RNA, 19 nt, Homo sapiens
  misc_RNA (1)...(19): siRNA sense strand
cugcgaucauccuggaaca

SEQ ID NO: 2505792 - RNA, 19 nt, Homo sapiens
  misc_RNA (1)...(19): siRNA sense strand
cgaucauccuggaacacau

SEQ ID NO: 2505793 - RNA, 19 nt, Homo sapiens
  misc_RNA (1)...(19): siRNA sense strand
cagggaacgacuagcuauu

SEQ ID NO: 2505794 - RNA, 19 nt, Homo sapiens
  misc_RNA (1)...(19): siRNA sense strand
accaagaacacaaaguaau

SEQ ID NO: 2505795 - RNA, 19 nt, Homo sapiens
  misc_RNA (1)...(19): siRNA sense strand
ccggagaguacgagagaac

SEQ ID NO: 2505796 - RNA, 19 nt, Homo sapiens
  misc_RNA (1)...(19): siRNA sense strand
ggacaggacaccaugcuca

SEQ ID NO: 2505797 - RNA, 19 nt, Homo sapiens
  misc_RNA (1)...(19): siRNA sense strand
ccgaacagcaaauacguga

SEQ ID NO: 2505798 - RNA, 19 nt, Homo sapiens
  misc_RNA (1)...(19): siRNA sense strand
ucgaggagacccugaacau

SEQ ID NO: 2505799 - RNA, 19 nt, Homo sapiens
  misc_RNA (1)...(19): siRNA sense strand
aggaugaagagaaccgaga

SEQ ID NO: 2505800 - RNA, 19 nt, Homo sapiens
  misc_RNA (1)...(19): siRNA sense strand
cgagcguccucauggccaa

SEQ ID NO: 2505801 - RNA, 19 nt, Homo sapiens
  misc_RNA (1)...(19): siRNA sense strand
auucagaaacauaaggaca

SEQ ID NO: 2505802 - RNA, 19 nt, Homo sapiens
  misc_RNA (1)...(19): siRNA sense strand
auggagauucagaaacaua

SEQ ID NO: 2505803 - RNA, 19 nt, Homo sapiens
  misc_RNA (1)...(19): siRNA sense strand
uucagaaacauaaggacaa

SEQ ID NO: 2505804 - RNA, 19 nt, Homo sapiens
  misc_RNA (1)...(19): siRNA sense strand
uggaagugcuggaacggaa

SEQ ID NO: 2505805 - RNA, 19 nt, Homo sapiens
  misc_RNA (1)...(19): siRNA sense strand
aggaguacgccaagcgcua

SEQ ID NO: 2505806 - RNA, 19 nt, Homo sapiens
  misc_RNA (1)...(19): siRNA sense strand
cugugauaacggagcacua

SEQ ID NO: 2505807 - RNA, 19 nt, Homo sapiens
  misc_RNA (1)...(19): siRNA sense strand
cuggauggccugagggacu

SEQ ID NO: 2505808 - RNA, 19 nt, Homo sapiens
  misc_RNA (1)...(19): siRNA sense strand
ggacugugauaacggagca

SEQ ID NO: 2505809 - RNA, 19 nt, Homo sapiens
  misc_RNA (1)...(19): siRNA sense strand
augaagaacuggaggaaga

SEQ ID NO: 2505810 - RNA, 19 nt, Homo sapiens
  misc_RNA (1)...(19): siRNA sense strand
cagaagagcuggagaggca

SEQ ID NO: 2505811 - RNA, 19 nt, Homo sapiens
  misc_RNA (1)...(19): siRNA sense strand
cggaaagggcccagcacaa

SEQ ID NO: 2505812 - RNA, 19 nt, Homo sapiens
  misc_RNA (1)...(19): siRNA sense strand
gcaagaagucagaggcaga

SEQ ID NO: 2505813 - RNA, 19 nt, Homo sapiens
  misc_RNA (1)...(19): siRNA sense strand
cggcaggugcugaggcaaa

SEQ ID NO: 2505814 - RNA, 19 nt, Homo sapiens
  misc_RNA (1)...(19): siRNA sense strand
gggaagagggagaugaaga

SEQ ID NO: 2505815 - RNA, 19 nt, Homo sapiens
  misc_RNA (1)...(19): siRNA sense strand
acgaugacgaggaggaaua

SEQ ID NO: 2505816 - RNA, 19 nt, Homo sapiens
  misc_RNA (1)...(19): siRNA sense strand
cauugaaacgcuaaagaaa

SEQ ID NO: 2505817 - RNA, 19 nt, Homo sapiens
  misc_RNA (1)...(19): siRNA sense strand
gcaagaagcugaagcgugu

SEQ ID NO: 2505818 - RNA, 19 nt, Homo sapiens
  misc_RNA (1)...(19): siRNA sense strand
gcacaauucagaagaucaa

SEQ ID NO: 2505819 - RNA, 19 nt, Homo sapiens
  misc_RNA (1)...(19): siRNA sense strand
aggaggaggaggaggagaa

SEQ ID NO: 2505820 - RNA, 19 nt, Homo sapiens
  misc_RNA (1)...(19): siRNA sense strand
gcauagauuugaagggagu

SEQ ID NO: 2505821 - RNA, 19 nt, Homo sapiens
  misc_RNA (1)...(19): siRNA sense strand
gguaaagcggccagaagaa

SEQ ID NO: 2505822 - RNA, 19 nt, Homo sapiens
  misc_RNA (1)...(19): siRNA sense strand
ggggagaaccugcgggaua

SEQ ID NO: 2505823 - RNA, 19 nt, Homo sapiens
  misc_RNA (1)...(19): siRNA sense strand
ggaucaacagugaggaauu

SEQ ID NO: 2505824 - RNA, 19 nt, Homo sapiens
  misc_RNA (1)...(19): siRNA sense strand
cgaugaugaugaagaugaa

SEQ ID NO: 2505825 - RNA, 19 nt, Homo sapiens
  misc_RNA (1)...(19): siRNA sense strand
gcaagaaauuagaggagcu

SEQ ID NO: 2505826 - RNA, 19 nt, Homo sapiens
  misc_RNA (1)...(19): siRNA sense strand
aggaagaguaugaguauga

SEQ ID NO: 2505827 - RNA, 19 nt, Homo sapiens
  misc_RNA (1)...(19): siRNA sense strand
gggaggagggcaaggaaaa

SEQ ID NO: 2505828 - RNA, 19 nt, Homo sapiens
  misc_RNA (1)...(19): siRNA sense strand
aaaccuaaguggcggaaaa

SEQ ID NO: 2505829 - RNA, 19 nt, Homo sapiens
  misc_RNA (1)...(19): siRNA sense strand
aggcagaagaugaggagca

SEQ ID NO: 2505830 - RNA, 19 nt, Homo sapiens
  misc_RNA (1)...(19): siRNA sense strand
agucagaggaagaauacaa

SEQ ID NO: 2505831 - RNA, 19 nt, Homo sapiens
  misc_RNA (1)...(19): siRNA sense strand
agaacaagcugcuggcuga

SEQ ID NO: 2505832 - RNA, 19 nt, Homo sapiens
  misc_RNA (1)...(19): siRNA sense strand
ugaagggaguggaaggcua

SEQ ID NO: 2505833 - RNA, 19 nt, Homo sapiens
  misc_RNA (1)...(19): siRNA sense strand
gaugaugaggagucagaua

SEQ ID NO: 2505834 - RNA, 19 nt, Homo sapiens
  misc_RNA (1)...(19): siRNA sense strand
uggaagaggaggaugauga

SEQ ID NO: 2505835 - RNA, 19 nt, Homo sapiens
  misc_RNA (1)...(19): siRNA sense strand
caguggaugcccuggaaua

SEQ ID NO: 2505836 - RNA, 19 nt, Homo sapiens
  misc_RNA (1)...(19): siRNA sense strand
ggacagaacccuaaugcca

SEQ ID NO: 2505837 - RNA, 19 nt, Homo sapiens
  misc_RNA (1)...(19): siRNA sense strand
ugcaagaagcccaggaaau

SEQ ID NO: 2505838 - RNA, 19 nt, Homo sapiens
  misc_RNA (1)...(19): siRNA sense strand
aguaugaguaugaggauga

SEQ ID NO: 2505839 - RNA, 19 nt, Homo sapiens
  misc_RNA (1)...(19): siRNA sense strand
augaugaacuagaagaaga

SEQ ID NO: 2505840 - RNA, 19 nt, Homo sapiens
  misc_RNA (1)...(19): siRNA sense strand
gcagaaaagaugauggaga

SEQ ID NO: 2505841 - RNA, 19 nt, Homo sapiens
  misc_RNA (1)...(19): siRNA sense strand
gguaaacccaggauagaau

SEQ ID NO: 2505842 - RNA, 19 nt, Homo sapiens
  misc_RNA (1)...(19): siRNA sense strand
cagaggaggaggaagaaga

SEQ ID NO: 2505843 - RNA, 19 nt, Homo sapiens
  misc_RNA (1)...(19): siRNA sense strand
augaugaggcugaggguga

SEQ ID NO: 2505844 - RNA, 19 nt, Homo sapiens
  misc_RNA (1)...(19): siRNA sense strand
guaugagcccagugagcua

SEQ ID NO: 2505845 - RNA, 19 nt, Homo sapiens
  misc_RNA (1)...(19): siRNA sense strand
aggagaaccuagaugauca

SEQ ID NO: 2505846 - RNA, 19 nt, Homo sapiens
  misc_RNA (1)...(19): siRNA sense strand
agaugaugaacuagaagaa

SEQ ID NO: 2505847 - RNA, 19 nt, Homo sapiens
  misc_RNA (1)...(19): siRNA sense strand
gggagaugaagaaggugaa

SEQ ID NO: 2505848 - RNA, 19 nt, Homo sapiens
  misc_RNA (1)...(19): siRNA sense strand
aaaagaagcuauugcggaa

SEQ ID NO: 2505849 - RNA, 19 nt, Homo sapiens
  misc_RNA (1)...(19): siRNA sense strand
caucaaugaccuauggaga

SEQ ID NO: 2505850 - RNA, 19 nt, Homo sapiens
  misc_RNA (1)...(19): siRNA sense strand
cuguuaaggaacugagaga

SEQ ID NO: 2505851 - RNA, 19 nt, Homo sapiens
  misc_RNA (1)...(19): siRNA sense strand
agacauauuuugaggagau

SEQ ID NO: 2505852 - RNA, 19 nt, Homo sapiens
  misc_RNA (1)...(19): siRNA sense strand
cgggaggagggcaaggaaa

SEQ ID NO: 2505853 - RNA, 19 nt, Homo sapiens
  misc_RNA (1)...(19): siRNA sense strand
aaucaauggaugagcugaa

SEQ ID NO: 2505854 - RNA, 19 nt, Homo sapiens
  misc_RNA (1)...(19): siRNA sense strand
ggaagaagaugaugaggag

SEQ ID NO: 2505855 - RNA, 19 nt, Homo sapiens
  misc_RNA (1)...(19): siRNA sense strand
gugucagggaagagggaga

SEQ ID NO: 2505856 - RNA, 19 nt, Homo sapiens
  misc_RNA (1)...(19): siRNA sense strand
gcaaggaggaacaugaaaa

SEQ ID NO: 2505857 - RNA, 19 nt, Homo sapiens
  misc_RNA (1)...(19): siRNA sense strand
uggaagaagaugacgacuu

SEQ ID NO: 2505858 - RNA, 19 nt, Homo sapiens
  misc_RNA (1)...(19): siRNA sense strand
aggaggacaugaagcggaa

SEQ ID NO: 2505859 - RNA, 19 nt, Homo sapiens
  misc_RNA (1)...(19): siRNA sense strand
ugaugaacuagaagaagaa

SEQ ID NO: 2505860 - RNA, 19 nt, Homo sapiens
  misc_RNA (1)...(19): siRNA sense strand
augaagaaggugaagguga

SEQ ID NO: 2505861 - RNA, 19 nt, Homo sapiens
  misc_RNA (1)...(19): siRNA sense strand
aagagagagccaaguuaaa

SEQ ID NO: 2505862 - RNA, 19 nt, Homo sapiens
  misc_RNA (1)...(19): siRNA sense strand
ccucagagccauucagcuu

SEQ ID NO: 2505863 - RNA, 19 nt, Homo sapiens
  misc_RNA (1)...(19): siRNA sense strand
gcagcaagggcgagaacca

SEQ ID NO: 2505864 - RNA, 19 nt, Homo sapiens
  misc_RNA (1)...(19): siRNA sense strand
agaaauuuguggaagagga

SEQ ID NO: 2505865 - RNA, 19 nt, Homo sapiens
  misc_RNA (1)...(19): siRNA sense strand
ccucagugacaaaguggua

SEQ ID NO: 2505866 - RNA, 19 nt, Homo sapiens
  misc_RNA (1)...(19): siRNA sense strand
acauacaucaagagaguga

SEQ ID NO: 2505867 - RNA, 19 nt, Homo sapiens
  misc_RNA (1)...(19): siRNA sense strand
cagggaagagggagaugaa

SEQ ID NO: 2505868 - RNA, 19 nt, Homo sapiens
  misc_RNA (1)...(19): siRNA sense strand
gugacgaggcagaagauga

SEQ ID NO: 2505869 - RNA, 19 nt, Homo sapiens
  misc_RNA (1)...(19): siRNA sense strand
cagaucagcagguggaaga

SEQ ID NO: 2505870 - RNA, 19 nt, Homo sapiens
  misc_RNA (1)...(19): siRNA sense strand
gagacuuaugagugggcua

SEQ ID NO: 2505871 - RNA, 19 nt, Homo sapiens
  misc_RNA (1)...(19): siRNA sense strand
aggaagaauacaaugauga

SEQ ID NO: 2505872 - RNA, 19 nt, Homo sapiens
  misc_RNA (1)...(19): siRNA sense strand
ggaauauggcaaggaggaa

SEQ ID NO: 2505873 - RNA, 19 nt, Homo sapiens
  misc_RNA (1)...(19): siRNA sense strand
aggaagaagaugaugagga

SEQ ID NO: 2505874 - RNA, 19 nt, Homo sapiens
  misc_RNA (1)...(19): siRNA sense strand
aggacauauuccaggcaua

SEQ ID NO: 2505875 - RNA, 19 nt, Homo sapiens
  misc_RNA (1)...(19): siRNA sense strand
uguaauuugaugagaccaa

SEQ ID NO: 2505876 - RNA, 19 nt, Homo sapiens
  misc_RNA (1)...(19): siRNA sense strand
ccacauggagaaagggagu

SEQ ID NO: 2505877 - RNA, 19 nt, Homo sapiens
  misc_RNA (1)...(19): siRNA sense strand
ccacaugguuggugcugca

SEQ ID NO: 2505878 - RNA, 19 nt, Homo sapiens
  misc_RNA (1)...(19): siRNA sense strand
gaagauaaucauuggcucu

SEQ ID NO: 2505879 - RNA, 19 nt, Homo sapiens
  misc_RNA (1)...(19): siRNA sense strand
aggaagacucccugagaac

SEQ ID NO: 2505880 - RNA, 19 nt, Homo sapiens
  misc_RNA (1)...(19): siRNA sense strand
uuguguuggugaagauaau

SEQ ID NO: 2505881 - RNA, 19 nt, Homo sapiens
  misc_RNA (1)...(19): siRNA sense strand
ccaagaucccacauggaga

SEQ ID NO: 2505882 - RNA, 19 nt, Homo sapiens
  misc_RNA (1)...(19): siRNA sense strand
ucacuaugaagaaggacau

SEQ ID NO: 2505883 - RNA, 19 nt, Homo sapiens
  misc_RNA (1)...(19): siRNA sense strand
ggccacugugugaggagaa

SEQ ID NO: 2505884 - RNA, 19 nt, Homo sapiens
  misc_RNA (1)...(19): siRNA sense strand
cggaagucuuugaggggaa

SEQ ID NO: 2505885 - RNA, 19 nt, Homo sapiens
  misc_RNA (1)...(19): siRNA sense strand
ccaaaggguuucugggacu

SEQ ID NO: 2505886 - RNA, 19 nt, Homo sapiens
  misc_RNA (1)...(19): siRNA sense strand
gcaacuucgcgguggugaa

SEQ ID NO: 2505887 - RNA, 19 nt, Homo sapiens
  misc_RNA (1)...(19): siRNA sense strand
gauucaagcaauuuggaga

SEQ ID NO: 2505888 - RNA, 19 nt, Homo sapiens
  misc_RNA (1)...(19): siRNA sense strand
cgucacugaauuugcuaaa

SEQ ID NO: 2505889 - RNA, 19 nt, Homo sapiens
  misc_RNA (1)...(19): siRNA sense strand
auucaagcaauuuggagaa

SEQ ID NO: 2505890 - RNA, 19 nt, Homo sapiens
  misc_RNA (1)...(19): siRNA sense strand
ggcaaguccugcagaggga

SEQ ID NO: 2505891 - RNA, 19 nt, Homo sapiens
  misc_RNA (1)...(19): siRNA sense strand
aggaagaccacgcggacca

SEQ ID NO: 2505892 - RNA, 19 nt, Homo sapiens
  misc_RNA (1)...(19): siRNA sense strand
gccuagaggaggagcagga

SEQ ID NO: 2505893 - RNA, 19 nt, Homo sapiens
  misc_RNA (1)...(19): siRNA sense strand
cgguggagucacugcaaaa

SEQ ID NO: 2505894 - RNA, 19 nt, Homo sapiens
  misc_RNA (1)...(19): siRNA sense strand
cuacaagucaggagagccu

SEQ ID NO: 2505895 - RNA, 19 nt, Homo sapiens
  misc_RNA (1)...(19): siRNA sense strand
gggcuugggaggagcuguu

SEQ ID NO: 2505896 - RNA, 19 nt, Homo sapiens
  misc_RNA (1)...(19): siRNA sense strand
ccgagaaccuccugcugga

SEQ ID NO: 2505897 - RNA, 19 nt, Homo sapiens
  misc_RNA (1)...(19): siRNA sense strand
gggaagagauggaugccaa

SEQ ID NO: 2505898 - RNA, 19 nt, Homo sapiens
  misc_RNA (1)...(19): siRNA sense strand
gcacaucggaacagggaaa

SEQ ID NO: 2505899 - RNA, 19 nt, Homo sapiens
  misc_RNA (1)...(19): siRNA sense strand
gagaaaaugcagaaagaua

SEQ ID NO: 2505900 - RNA, 19 nt, Homo sapiens
  misc_RNA (1)...(19): siRNA sense strand
ggucaaggccagagggcuu

SEQ ID NO: 2505901 - RNA, 19 nt, Homo sapiens
  misc_RNA (1)...(19): siRNA sense strand
cccuagaaauggagaacua

SEQ ID NO: 2505902 - RNA, 19 nt, Homo sapiens
  misc_RNA (1)...(19): siRNA sense strand
ggaacaaguaugagguuga

SEQ ID NO: 2505903 - RNA, 19 nt, Homo sapiens
  misc_RNA (1)...(19): siRNA sense strand
ggagaaggauguuugggaa

SEQ ID NO: 2505904 - RNA, 19 nt, Homo sapiens
  misc_RNA (1)...(19): siRNA sense strand
caagagggcaagagagaga

SEQ ID NO: 2505905 - RNA, 19 nt, Homo sapiens
  misc_RNA (1)...(19): siRNA sense strand
uggggaaacugaagagaaa

SEQ ID NO: 2505906 - RNA, 19 nt, Homo sapiens
  misc_RNA (1)...(19): siRNA sense strand
gggccguggucaugaagaa

SEQ ID NO: 2505907 - RNA, 19 nt, Homo sapiens
  misc_RNA (1)...(19): siRNA sense strand
caguaaauguacagagaug

SEQ ID NO: 2505908 - RNA, 19 nt, Homo sapiens
  misc_RNA (1)...(19): siRNA sense strand
aaauaaaggacaaggagca

SEQ ID NO: 2505909 - RNA, 19 nt, Homo sapiens
  misc_RNA (1)...(19): siRNA sense strand
caaaugaggcuguaggaca

SEQ ID NO: 2505910 - RNA, 19 nt, Homo sapiens
  misc_RNA (1)...(19): siRNA sense strand
auauaaaguccuagggagu

SEQ ID NO: 2505911 - RNA, 19 nt, Homo sapiens
  misc_RNA (1)...(19): siRNA sense strand
gugcaagaguccaggaucu

SEQ ID NO: 2505912 - RNA, 19 nt, Homo sapiens
  misc_RNA (1)...(19): siRNA sense strand
ggugccaaaucaagacaaa

SEQ ID NO: 2505913 - RNA, 19 nt, Homo sapiens
  misc_RNA (1)...(19): siRNA sense strand
ggaaaugggaagacaugau

SEQ ID NO: 2505914 - RNA, 19 nt, Homo sapiens
  misc_RNA (1)...(19): siRNA sense strand
gcaucaucccugaggucaa

SEQ ID NO: 2505915 - RNA, 19 nt, Homo sapiens
  misc_RNA (1)...(19): siRNA sense strand
aaaugaggcuguaggacau

SEQ ID NO: 2505916 - RNA, 19 nt, Homo sapiens
  misc_RNA (1)...(19): siRNA sense strand
ggcacuaugaugaagaaua

SEQ ID NO: 2505917 - RNA, 19 nt, Homo sapiens
  misc_RNA (1)...(19): siRNA sense strand
cagauaaugaagaugagaa

SEQ ID NO: 2505918 - RNA, 19 nt, Homo sapiens
  misc_RNA (1)...(19): siRNA sense strand
gaggagaagcagaucaaga

SEQ ID NO: 2505919 - RNA, 19 nt, Homo sapiens
  misc_RNA (1)...(19): siRNA sense strand
agaaaauacagaugaggua

SEQ ID NO: 2505920 - RNA, 19 nt, Homo sapiens
  misc_RNA (1)...(19): siRNA sense strand
uuacccaacauuagagaaa

SEQ ID NO: 2505921 - RNA, 19 nt, Homo sapiens
  misc_RNA (1)...(19): siRNA sense strand
ugaaagagcugacugccaa

SEQ ID NO: 2505922 - RNA, 19 nt, Homo sapiens
  misc_RNA (1)...(19): siRNA sense strand
cagcuuagcgauggagaaa

SEQ ID NO: 2505923 - RNA, 19 nt, Homo sapiens
  misc_RNA (1)...(19): siRNA sense strand
agaaagaucuucagcccau

SEQ ID NO: 2505924 - RNA, 19 nt, Homo sapiens
  misc_RNA (1)...(19): siRNA sense strand
uguuuuagcacaagagaua

SEQ ID NO: 2505925 - RNA, 19 nt, Homo sapiens
  misc_RNA (1)...(19): siRNA sense strand
gcuuagcgauggagaaaau

SEQ ID NO: 2505926 - RNA, 19 nt, Homo sapiens
  misc_RNA (1)...(19): siRNA sense strand
ucauuguguuucagagaau

SEQ ID NO: 2505927 - RNA, 19 nt, Homo sapiens
  misc_RNA (1)...(19): siRNA sense strand
ggagacuugcuucgagaaa

SEQ ID NO: 2505928 - RNA, 19 nt, Homo sapiens
  misc_RNA (1)...(19): siRNA sense strand
ccaaagaaugggugauugu

SEQ ID NO: 2505929 - RNA, 19 nt, Homo sapiens
  misc_RNA (1)...(19): siRNA sense strand
cuucaggauuuuaggacaa

SEQ ID NO: 2505930 - RNA, 19 nt, Homo sapiens
  misc_RNA (1)...(19): siRNA sense strand
ccaacauuagagaaaguaa

SEQ ID NO: 2505931 - RNA, 19 nt, Homo sapiens
  misc_RNA (1)...(19): siRNA sense strand
agaccauguuuguagauuu

SEQ ID NO: 2505932 - RNA, 19 nt, Homo sapiens
  misc_RNA (1)...(19): siRNA sense strand
uggagaaaaugcagaaaga

SEQ ID NO: 2505933 - RNA, 19 nt, Homo sapiens
  misc_RNA (1)...(19): siRNA sense strand
aggaggagaagcagaucaa

SEQ ID NO: 2505934 - RNA, 19 nt, Homo sapiens
  misc_RNA (1)...(19): siRNA sense strand
ggaagcuguuggagggcga

SEQ ID NO: 2505935 - RNA, 19 nt, Homo sapiens
  misc_RNA (1)...(19): siRNA sense strand
gaaguuaaguagagggcag

SEQ ID NO: 2505936 - RNA, 19 nt, Homo sapiens
  misc_RNA (1)...(19): siRNA sense strand
cggaacagggaaaugggaa

SEQ ID NO: 2505937 - RNA, 19 nt, Homo sapiens
  misc_RNA (1)...(19): siRNA sense strand
uuggaguaauugagaguga

SEQ ID NO: 2505938 - RNA, 19 nt, Homo sapiens
  misc_RNA (1)...(19): siRNA sense strand
cagucuagaaagagcaaaa

SEQ ID NO: 2505939 - RNA, 19 nt, Homo sapiens
  misc_RNA (1)...(19): siRNA sense strand
acgcagauauaaaguccua

SEQ ID NO: 2505940 - RNA, 19 nt, Homo sapiens
  misc_RNA (1)...(19): siRNA sense strand
aagaauggccugaaaggau

SEQ ID NO: 2505941 - RNA, 19 nt, Homo sapiens
  misc_RNA (1)...(19): siRNA sense strand
accaagagggcaagagaga

SEQ ID NO: 2505942 - RNA, 19 nt, Homo sapiens
  misc_RNA (1)...(19): siRNA sense strand
gagcaaaauuccaaggcca

SEQ ID NO: 2505943 - RNA, 19 nt, Homo sapiens
  misc_RNA (1)...(19): siRNA sense strand
ugaacaagauggagcugga

SEQ ID NO: 2505944 - RNA, 19 nt, Homo sapiens
  misc_RNA (1)...(19): siRNA sense strand
gcauucauucugugggauu

SEQ ID NO: 2505945 - RNA, 19 nt, Homo sapiens
  misc_RNA (1)...(19): siRNA sense strand
ggacauaaaacaacuggaa

SEQ ID NO: 2505946 - RNA, 19 nt, Homo sapiens
  misc_RNA (1)...(19): siRNA sense strand
cucaagugccucugauaaa

SEQ ID NO: 2505947 - RNA, 19 nt, Homo sapiens
  misc_RNA (1)...(19): siRNA sense strand
agauaugaccacaggcuca

SEQ ID NO: 2505948 - RNA, 19 nt, Homo sapiens
  misc_RNA (1)...(19): siRNA sense strand
ccuccaacguccugcccaa

SEQ ID NO: 2505949 - RNA, 19 nt, Homo sapiens
  misc_RNA (1)...(19): siRNA sense strand
agucagauaaugaagauga

SEQ ID NO: 2505950 - RNA, 19 nt, Homo sapiens
  misc_RNA (1)...(19): siRNA sense strand
ucaaaauggaucucagaaa

SEQ ID NO: 2505951 - RNA, 19 nt, Homo sapiens
  misc_RNA (1)...(19): siRNA sense strand
ccggcuggguagacagauu

SEQ ID NO: 2505952 - RNA, 19 nt, Homo sapiens
  misc_RNA (1)...(19): siRNA sense strand
auagacugguugugagaga

SEQ ID NO: 2505953 - RNA, 19 nt, Homo sapiens
  misc_RNA (1)...(19): siRNA sense strand
acauguugaaggucagaua

SEQ ID NO: 2505954 - RNA, 19 nt, Homo sapiens
  misc_RNA (1)...(19): siRNA sense strand
gaggagagcuggcuggagu

SEQ ID NO: 2505955 - RNA, 19 nt, Homo sapiens
  misc_RNA (1)...(19): siRNA sense strand
gucaugaagaagaucgaaa

SEQ ID NO: 2505956 - RNA, 19 nt, Homo sapiens
  misc_RNA (1)...(19): siRNA sense strand
gaaagauaccagugcagga

SEQ ID NO: 2505957 - RNA, 19 nt, Homo sapiens
  misc_RNA (1)...(19): siRNA sense strand
guaacuagacacagccgaa

SEQ ID NO: 2505958 - RNA, 19 nt, Homo sapiens
  misc_RNA (1)...(19): siRNA sense strand
gaucaggucaauagcucaa

SEQ ID NO: 2505959 - RNA, 19 nt, Homo sapiens
  misc_RNA (1)...(19): siRNA sense strand
agaucaagacccucaacaa

SEQ ID NO: 2505960 - RNA, 19 nt, Homo sapiens
  misc_RNA (1)...(19): siRNA sense strand
gggaaaauguugcacugaa

SEQ ID NO: 2505961 - RNA, 19 nt, Homo sapiens
  misc_RNA (1)...(19): siRNA sense strand
cuucagaacaauauacaga

SEQ ID NO: 2505962 - RNA, 19 nt, Homo sapiens
  misc_RNA (1)...(19): siRNA sense strand
cuuuacucuccaagggaaa

SEQ ID NO: 2505963 - RNA, 19 nt, Homo sapiens
  misc_RNA (1)...(19): siRNA sense strand
caggcuacgcagauauaaa

SEQ ID NO: 2505964 - RNA, 19 nt, Homo sapiens
  misc_RNA (1)...(19): siRNA sense strand
gggaagaguaagccagcca

SEQ ID NO: 2505965 - RNA, 19 nt, Homo sapiens
  misc_RNA (1)...(19): siRNA sense strand
agacuugcuucgagaaaau

SEQ ID NO: 2505966 - RNA, 19 nt, Homo sapiens
  misc_RNA (1)...(19): siRNA sense strand
ggucagcugcccuggagaa

SEQ ID NO: 2505967 - RNA, 19 nt, Homo sapiens
  misc_RNA (1)...(19): siRNA sense strand
guaaauguacagagaugga

SEQ ID NO: 2505968 - RNA, 19 nt, Homo sapiens
  misc_RNA (1)...(19): siRNA sense strand
cggaagaagagcuggcuga

SEQ ID NO: 2505969 - RNA, 19 nt, Homo sapiens
  misc_RNA (1)...(19): siRNA sense strand
ggcaaaaggaaauggacaa

SEQ ID NO: 2505970 - RNA, 19 nt, Homo sapiens
  misc_RNA (1)...(19): siRNA sense strand
gggcucaggaagaggccaa

SEQ ID NO: 2505971 - RNA, 19 nt, Homo sapiens
  misc_RNA (1)...(19): siRNA sense strand
agacaaaaggaucggcaaa

SEQ ID NO: 2505972 - RNA, 19 nt, Homo sapiens
  misc_RNA (1)...(19): siRNA sense strand
aagcagaaaugagcagaaa

SEQ ID NO: 2505973 - RNA, 19 nt, Homo sapiens
  misc_RNA (1)...(19): siRNA sense strand
agauaucuuuagaggacau

SEQ ID NO: 2505974 - RNA, 19 nt, Homo sapiens
  misc_RNA (1)...(19): siRNA sense strand
gaaaugagcagaaaggagu

SEQ ID NO: 2505975 - RNA, 19 nt, Homo sapiens
  misc_RNA (1)...(19): siRNA sense strand
gaacaguggacgaggacuc

SEQ ID NO: 2505976 - RNA, 19 nt, Homo sapiens
  misc_RNA (1)...(19): siRNA sense strand
aggccaaagaagcagaaau

SEQ ID NO: 2505977 - RNA, 19 nt, Homo sapiens
  misc_RNA (1)...(19): siRNA sense strand
cggcaaaaggaaauggaca

SEQ ID NO: 2505978 - RNA, 19 nt, Homo sapiens
  misc_RNA (1)...(19): siRNA sense strand
aagaugaaugcaaggaaaa

SEQ ID NO: 2505979 - RNA, 19 nt, Homo sapiens
  misc_RNA (1)...(19): siRNA sense strand
uggcagauaaacuggacaa

SEQ ID NO: 2505980 - RNA, 19 nt, Homo sapiens
  misc_RNA (1)...(19): siRNA sense strand
gcccaggugaagaggaaga

SEQ ID NO: 2505981 - RNA, 19 nt, Homo sapiens
  misc_RNA (1)...(19): siRNA sense strand
ggaagauccuggugcugga

SEQ ID NO: 2505982 - RNA, 19 nt, Homo sapiens
  misc_RNA (1)...(19): siRNA sense strand
aggugguaauagacaaaca

SEQ ID NO: 2505983 - RNA, 19 nt, Homo sapiens
  misc_RNA (1)...(19): siRNA sense strand
aaguuuaagcugagaacaa

SEQ ID NO: 2505984 - RNA, 19 nt, Homo sapiens
  misc_RNA (1)...(19): siRNA sense strand
uaaagaugcuucagggaga

SEQ ID NO: 2505985 - RNA, 19 nt, Homo sapiens
  misc_RNA (1)...(19): siRNA sense strand
aggaaggagacaagcuaaa

SEQ ID NO: 2505986 - RNA, 19 nt, Homo sapiens
  misc_RNA (1)...(19): siRNA sense strand
aagaaagagaagaagagua

SEQ ID NO: 2505987 - RNA, 19 nt, Homo sapiens
  misc_RNA (1)...(19): siRNA sense strand
ccuuggagcaggagaaaca

SEQ ID NO: 2505988 - RNA, 19 nt, Homo sapiens
  misc_RNA (1)...(19): siRNA sense strand
gagccuagucaguggccaa

SEQ ID NO: 2505989 - RNA, 19 nt, Homo sapiens
  misc_RNA (1)...(19): siRNA sense strand
gaagaguaccagagagcca

SEQ ID NO: 2505990 - RNA, 19 nt, Homo sapiens
  misc_RNA (1)...(19): siRNA sense strand
ccagagagccagagaccga

SEQ ID NO: 2505991 - RNA, 19 nt, Homo sapiens
  misc_RNA (1)...(19): siRNA sense strand
uugggaaggucuuggaaau

SEQ ID NO: 2505992 - RNA, 19 nt, Homo sapiens
  misc_RNA (1)...(19): siRNA sense strand
cuuggaaauuacugaacua

SEQ ID NO: 2505993 - RNA, 19 nt, Homo sapiens
  misc_RNA (1)...(19): siRNA sense strand
agaaagagaagaagaguac

SEQ ID NO: 2505994 - RNA, 19 nt, Homo sapiens
  misc_RNA (1)...(19): siRNA sense strand
aggucuaagucaagcucaa

SEQ ID NO: 2505995 - RNA, 19 nt, Homo sapiens
  misc_RNA (1)...(19): siRNA sense strand
cugagaaugaguugaagua

SEQ ID NO: 2505996 - RNA, 19 nt, Homo sapiens
  misc_RNA (1)...(19): siRNA sense strand
cagagauaucacaggagaa

SEQ ID NO: 2505997 - RNA, 19 nt, Homo sapiens
  misc_RNA (1)...(19): siRNA sense strand
gggaagucugucauaguaa

SEQ ID NO: 2505998 - RNA, 19 nt, Homo sapiens
  misc_RNA (1)...(19): siRNA sense strand
ugaaggauuuggaggcaga

SEQ ID NO: 2505999 - RNA, 19 nt, Homo sapiens
  misc_RNA (1)...(19): siRNA sense strand
agauuuugguagagaagaa

SEQ ID NO: 2506000 - RNA, 19 nt, Homo sapiens
  misc_RNA (1)...(19): siRNA sense strand
agucaagcucaaaguuaaa

SEQ ID NO: 2506001 - RNA, 19 nt, Homo sapiens
  misc_RNA (1)...(19): siRNA sense strand
cagcaaaacuaccaaggaa

SEQ ID NO: 2506002 - RNA, 19 nt, Homo sapiens
  misc_RNA (1)...(19): siRNA sense strand
aaagaaaaggccagugaua

SEQ ID NO: 2506003 - RNA, 19 nt, Homo sapiens
  misc_RNA (1)...(19): siRNA sense strand
caaaagaugaagcagaaaa

SEQ ID NO: 2506004 - RNA, 19 nt, Homo sapiens
  misc_RNA (1)...(19): siRNA sense strand
ccacaauguugaucagagu

SEQ ID NO: 2506005 - RNA, 19 nt, Homo sapiens
  misc_RNA (1)...(19): siRNA sense strand
ugagaauacguuugaaaga

SEQ ID NO: 2506006 - RNA, 19 nt, Homo sapiens
  misc_RNA (1)...(19): siRNA sense strand
uagaagaaagagaagaaga

SEQ ID NO: 2506007 - RNA, 19 nt, Homo sapiens
  misc_RNA (1)...(19): siRNA sense strand
augauaaccagaugagaau

SEQ ID NO: 2506008 - RNA, 19 nt, Homo sapiens
  misc_RNA (1)...(19): siRNA sense strand
aggagaaccaggagaaaau

SEQ ID NO: 2506009 - RNA, 19 nt, Homo sapiens
  misc_RNA (1)...(19): siRNA sense strand
gaggcagaagugaaagaua

SEQ ID NO: 2506010 - RNA, 19 nt, Homo sapiens
  misc_RNA (1)...(19): siRNA sense strand
agucaagaauacacugauu

SEQ ID NO: 2506011 - RNA, 19 nt, Homo sapiens
  misc_RNA (1)...(19): siRNA sense strand
cauuugagaaagaagagaa

SEQ ID NO: 2506012 - RNA, 19 nt, Homo sapiens
  misc_RNA (1)...(19): siRNA sense strand
aggcagaagugaaagauac

SEQ ID NO: 2506013 - RNA, 19 nt, Homo sapiens
  misc_RNA (1)...(19): siRNA sense strand
ucaaagcagcacugagaau

SEQ ID NO: 2506014 - RNA, 19 nt, Homo sapiens
  misc_RNA (1)...(19): siRNA sense strand
cuuggaagcggcaggcaua

SEQ ID NO: 2506015 - RNA, 19 nt, Homo sapiens
  misc_RNA (1)...(19): siRNA sense strand
ccucaaaagaugaagcaga

SEQ ID NO: 2506016 - RNA, 19 nt, Homo sapiens
  misc_RNA (1)...(19): siRNA sense strand
agugauaaguugcccagaa

SEQ ID NO: 2506017 - RNA, 19 nt, Homo sapiens
  misc_RNA (1)...(19): siRNA sense strand
uugaaagaugacagaagaa

SEQ ID NO: 2506018 - RNA, 19 nt, Homo sapiens
  misc_RNA (1)...(19): siRNA sense strand
agaccuuggagcaggagaa

SEQ ID NO: 2506019 - RNA, 19 nt, Homo sapiens
  misc_RNA (1)...(19): siRNA sense strand
acagaaugaugcugcugaa

SEQ ID NO: 2506020 - RNA, 19 nt, Homo sapiens
  misc_RNA (1)...(19): siRNA sense strand
cucaaaagaugaagcagaa

SEQ ID NO: 2506021 - RNA, 19 nt, Homo sapiens
  misc_RNA (1)...(19): siRNA sense strand
gaugacagaagaagcaaau

SEQ ID NO: 2506022 - RNA, 19 nt, Homo sapiens
  misc_RNA (1)...(19): siRNA sense strand
cgaggaaggagacaagcua

SEQ ID NO: 2506023 - RNA, 19 nt, Homo sapiens
  misc_RNA (1)...(19): siRNA sense strand
aggcauggaaaccgaggaa

SEQ ID NO: 2506024 - RNA, 19 nt, Homo sapiens
  misc_RNA (1)...(19): siRNA sense strand
gaggaaggagacaagcuaa

SEQ ID NO: 2506025 - RNA, 19 nt, Homo sapiens
  misc_RNA (1)...(19): siRNA sense strand
gcugaaauuggaacaagaa

SEQ ID NO: 2506026 - RNA, 19 nt, Homo sapiens
  misc_RNA (1)...(19): siRNA sense strand
cugaaauuggaacaagaaa

SEQ ID NO: 2506027 - RNA, 19 nt, Homo sapiens
  misc_RNA (1)...(19): siRNA sense strand
ccagagauaucacaggaga

SEQ ID NO: 2506028 - RNA, 19 nt, Homo sapiens
  misc_RNA (1)...(19): siRNA sense strand
agauaucacaggagaacca

SEQ ID NO: 2506029 - RNA, 19 nt, Homo sapiens
  misc_RNA (1)...(19): siRNA sense strand
agugaaagauacaaccaga

SEQ ID NO: 2506030 - RNA, 19 nt, Homo sapiens
  misc_RNA (1)...(19): siRNA sense strand
aaagagaagaagaguacca

SEQ ID NO: 2506031 - RNA, 19 nt, Homo sapiens
  misc_RNA (1)...(19): siRNA sense strand
cugaacuaccagauggaau

SEQ ID NO: 2506032 - RNA, 19 nt, Homo sapiens
  misc_RNA (1)...(19): siRNA sense strand
ugguagagaagaaugaaca

SEQ ID NO: 2506033 - RNA, 19 nt, Homo sapiens
  misc_RNA (1)...(19): siRNA sense strand
agaugacagaagaagcaaa

SEQ ID NO: 2506034 - RNA, 19 nt, Homo sapiens
  misc_RNA (1)...(19): siRNA sense strand
ggugauaguucuggaagca

SEQ ID NO: 2506035 - RNA, 19 nt, Homo sapiens
  misc_RNA (1)...(19): siRNA sense strand
gcucaguguaccaaacaau

SEQ ID NO: 2506036 - RNA, 19 nt, Homo sapiens
  misc_RNA (1)...(19): siRNA sense strand
auuuagcaguguagacaau

SEQ ID NO: 2506037 - RNA, 19 nt, Homo sapiens
  misc_RNA (1)...(19): siRNA sense strand
cgucauuugcuguucgaaa

SEQ ID NO: 2506038 - RNA, 19 nt, Homo sapiens
  misc_RNA (1)...(19): siRNA sense strand
cgggagacggacagaggaa

SEQ ID NO: 2506039 - RNA, 19 nt, Homo sapiens
  misc_RNA (1)...(19): siRNA sense strand
acugaauugaggagauuaa

SEQ ID NO: 2506040 - RNA, 19 nt, Homo sapiens
  misc_RNA (1)...(19): siRNA sense strand
uaauugagguaaugcggaa

SEQ ID NO: 2506041 - RNA, 19 nt, Homo sapiens
  misc_RNA (1)...(19): siRNA sense strand
aguugagccugaagcuaaa

SEQ ID NO: 2506042 - RNA, 19 nt, Homo sapiens
  misc_RNA (1)...(19): siRNA sense strand
uggaggauuaggagaagaa

SEQ ID NO: 2506043 - RNA, 19 nt, Homo sapiens
  misc_RNA (1)...(19): siRNA sense strand
ccaggguggcuuuggagaa

SEQ ID NO: 2506044 - RNA, 19 nt, Homo sapiens
  misc_RNA (1)...(19): siRNA sense strand
uugugaaauuggagauguu

SEQ ID NO: 2506045 - RNA, 19 nt, Homo sapiens
  misc_RNA (1)...(19): siRNA sense strand
cggaaacuucgaaagaaau

SEQ ID NO: 2506046 - RNA, 19 nt, Homo sapiens
  misc_RNA (1)...(19): siRNA sense strand
gggaaggcguauggcgaga

SEQ ID NO: 2506047 - RNA, 19 nt, Homo sapiens
  misc_RNA (1)...(19): siRNA sense strand
gauuaggagaagaagcuga

SEQ ID NO: 2506048 - RNA, 19 nt, Homo sapiens
  misc_RNA (1)...(19): siRNA sense strand
auauaaaguuacuggacag

SEQ ID NO: 2506049 - RNA, 19 nt, Homo sapiens
  misc_RNA (1)...(19): siRNA sense strand
ggccacagagcgaaggaga

SEQ ID NO: 2506050 - RNA, 19 nt, Homo sapiens
  misc_RNA (1)...(19): siRNA sense strand
ucucaugaagcccgugaaa

SEQ ID NO: 2506051 - RNA, 19 nt, Homo sapiens
  misc_RNA (1)...(19): siRNA sense strand
gcggaauguugguacccau

SEQ ID NO: 2506052 - RNA, 19 nt, Homo sapiens
  misc_RNA (1)...(19): siRNA sense strand
ucgaaaagaaagcggacau

SEQ ID NO: 2506053 - RNA, 19 nt, Homo sapiens
  misc_RNA (1)...(19): siRNA sense strand
cgcacuuccaaauggguua

SEQ ID NO: 2506054 - RNA, 19 nt, Homo sapiens
  misc_RNA (1)...(19): siRNA sense strand
ugucaagugggaaggcgua

SEQ ID NO: 2506055 - RNA, 19 nt, Homo sapiens
  misc_RNA (1)...(19): siRNA sense strand
ggaaauuagaccagccuga

SEQ ID NO: 2506056 - RNA, 19 nt, Homo sapiens
  misc_RNA (1)...(19): siRNA sense strand
ggauaaaguuucaggggag

SEQ ID NO: 2506057 - RNA, 19 nt, Homo sapiens
  misc_RNA (1)...(19): siRNA sense strand
cuaaguuggaucugggcuu

SEQ ID NO: 2506058 - RNA, 19 nt, Homo sapiens
  misc_RNA (1)...(19): siRNA sense strand
aagcugaagaagacauaaa

SEQ ID NO: 2506059 - RNA, 19 nt, Homo sapiens
  misc_RNA (1)...(19): siRNA sense strand
ggauauagcuguagacucc

SEQ ID NO: 2506060 - RNA, 19 nt, Homo sapiens
  misc_RNA (1)...(19): siRNA sense strand
ccaugagaucugacaggaa

SEQ ID NO: 2506061 - RNA, 19 nt, Homo sapiens
  misc_RNA (1)...(19): siRNA sense strand
agacaucugugcugggaca

SEQ ID NO: 2506062 - RNA, 19 nt, Homo sapiens
  misc_RNA (1)...(19): siRNA sense strand
uugaggaagcugaagaaga

SEQ ID NO: 2506063 - RNA, 19 nt, Homo sapiens
  misc_RNA (1)...(19): siRNA sense strand
guguggacucuguggucua

SEQ ID NO: 2506064 - RNA, 19 nt, Homo sapiens
  misc_RNA (1)...(19): siRNA sense strand
guuugaggaagcugaagaa

SEQ ID NO: 2506065 - RNA, 19 nt, Homo sapiens
  misc_RNA (1)...(19): siRNA sense strand
gguuugaggaagcugaaga

SEQ ID NO: 2506066 - RNA, 19 nt, Homo sapiens
  misc_RNA (1)...(19): siRNA sense strand
cauuauuagaaucgguaca

SEQ ID NO: 2506067 - RNA, 19 nt, Homo sapiens
  misc_RNA (1)...(19): siRNA sense strand
augagaucugacaggaaua

SEQ ID NO: 2506068 - RNA, 19 nt, Homo sapiens
  misc_RNA (1)...(19): siRNA sense strand
cugaagaagacauaaaaga

SEQ ID NO: 2506069 - RNA, 19 nt, Homo sapiens
  misc_RNA (1)...(19): siRNA sense strand
caauguuuggagauguaaa

SEQ ID NO: 2506070 - RNA, 19 nt, Homo sapiens
  misc_RNA (1)...(19): siRNA sense strand
auguaaaguuugucugugu

SEQ ID NO: 2506071 - RNA, 19 nt, Homo sapiens
  misc_RNA (1)...(19): siRNA sense strand
acuuggauuugauggauga

SEQ ID NO: 2506072 - RNA, 19 nt, Homo sapiens
  misc_RNA (1)...(19): siRNA sense strand
ggaauauugaaauggaauc

SEQ ID NO: 2506073 - RNA, 19 nt, Homo sapiens
  misc_RNA (1)...(19): siRNA sense strand
cuguagacuccuucuuuaa

SEQ ID NO: 2506074 - RNA, 19 nt, Homo sapiens
  misc_RNA (1)...(19): siRNA sense strand
cuugaagagagcauuuaaa

SEQ ID NO: 2506075 - RNA, 19 nt, Homo sapiens
  misc_RNA (1)...(19): siRNA sense strand
cacaaugauuucuggguga

SEQ ID NO: 2506076 - RNA, 19 nt, Homo sapiens
  misc_RNA (1)...(19): siRNA sense strand
cgagggauguggaggccau

SEQ ID NO: 2506077 - RNA, 19 nt, Homo sapiens
  misc_RNA (1)...(19): siRNA sense strand
cugcaggccuccaugggaa

SEQ ID NO: 2506078 - RNA, 19 nt, Homo sapiens
  misc_RNA (1)...(19): siRNA sense strand
cagcaaacagguagcagga

SEQ ID NO: 2506079 - RNA, 19 nt, Homo sapiens
  misc_RNA (1)...(19): siRNA sense strand
cgggauaaugugugccuga

SEQ ID NO: 2506080 - RNA, 19 nt, Homo sapiens
  misc_RNA (1)...(19): siRNA sense strand
agguagcaggaaacggaaa

SEQ ID NO: 2506081 - RNA, 19 nt, Homo sapiens
  misc_RNA (1)...(19): siRNA sense strand
cggacaaguucgaugacac

SEQ ID NO: 2506082 - RNA, 19 nt, Homo sapiens
  misc_RNA (1)...(19): siRNA sense strand
gcggcaagaaccaggaacu

SEQ ID NO: 2506083 - RNA, 19 nt, Homo sapiens
  misc_RNA (1)...(19): siRNA sense strand
augauuucugggugaauua

SEQ ID NO: 2506084 - RNA, 19 nt, Homo sapiens
  misc_RNA (1)...(19): siRNA sense strand
cugcccuacuuccgggaua

SEQ ID NO: 2506085 - RNA, 19 nt, Homo sapiens
  misc_RNA (1)...(19): siRNA sense strand
gagaagagauugugcggua

SEQ ID NO: 2506086 - RNA, 19 nt, Homo sapiens
  misc_RNA (1)...(19): siRNA sense strand
ggaccuaccugcaggacga

SEQ ID NO: 2506087 - RNA, 19 nt, Homo sapiens
  misc_RNA (1)...(19): siRNA sense strand
gcgacuggccgcaggaaaa

SEQ ID NO: 2506088 - RNA, 19 nt, Homo sapiens
  misc_RNA (1)...(19): siRNA sense strand
gaggauaaguccaccgugu

SEQ ID NO: 2506089 - RNA, 19 nt, Homo sapiens
  misc_RNA (1)...(19): siRNA sense strand
ggaugggccuugacggcau

SEQ ID NO: 2506090 - RNA, 19 nt, Homo sapiens
  misc_RNA (1)...(19): siRNA sense strand
gcgcuuaaguauuuccaca

SEQ ID NO: 2506091 - RNA, 19 nt, Homo sapiens
  misc_RNA (1)...(19): siRNA sense strand
ccggugucuacuugagaaa

SEQ ID NO: 2506092 - RNA, 19 nt, Homo sapiens
  misc_RNA (1)...(19): siRNA sense strand
acuuuaaggacuugcccaa

SEQ ID NO: 2506093 - RNA, 19 nt, Homo sapiens
  misc_RNA (1)...(19): siRNA sense strand
ccgugaugcaggcgcuuaa

SEQ ID NO: 2506094 - RNA, 19 nt, Homo sapiens
  misc_RNA (1)...(19): siRNA sense strand
cauaacacaugcugggcca

SEQ ID NO: 2506095 - RNA, 19 nt, Homo sapiens
  misc_RNA (1)...(19): siRNA sense strand
cagaaguacuaccgccaga

SEQ ID NO: 2506096 - RNA, 19 nt, Homo sapiens
  misc_RNA (1)...(19): siRNA sense strand
gauacagagaagagauugu

SEQ ID NO: 2506097 - RNA, 19 nt, Homo sapiens
  misc_RNA (1)...(19): siRNA sense strand
caagaaagguggugcugug

SEQ ID NO: 2506098 - RNA, 19 nt, Homo sapiens
  misc_RNA (1)...(19): siRNA sense strand
uggcuggcgcagaggaaca

SEQ ID NO: 2506099 - RNA, 19 nt, Homo sapiens
  misc_RNA (1)...(19): siRNA sense strand
cgauucaccaagagcauca

SEQ ID NO: 2506100 - RNA, 19 nt, Homo sapiens
  misc_RNA (1)...(19): siRNA sense strand
agaccggccuggaagccua

SEQ ID NO: 2506101 - RNA, 19 nt, Homo sapiens
  misc_RNA (1)...(19): siRNA sense strand
aaagcuagugaaugggaaa

SEQ ID NO: 2506102 - RNA, 19 nt, Homo sapiens
  misc_RNA (1)...(19): siRNA sense strand
gcaacaaauuccugggcac

SEQ ID NO: 2506103 - RNA, 19 nt, Homo sapiens
  misc_RNA (1)...(19): siRNA sense strand
ccauaaagagaaagcuagu

SEQ ID NO: 2506104 - RNA, 19 nt, Homo sapiens
  misc_RNA (1)...(19): siRNA sense strand
aggccaggaauuugaagaa

SEQ ID NO: 2506105 - RNA, 19 nt, Homo sapiens
  misc_RNA (1)...(19): siRNA sense strand
aaccauaaagagaaagcua

SEQ ID NO: 2506106 - RNA, 19 nt, Homo sapiens
  misc_RNA (1)...(19): siRNA sense strand
gaaagcuagugaaugggaa

SEQ ID NO: 2506107 - RNA, 19 nt, Homo sapiens
  misc_RNA (1)...(19): siRNA sense strand
acaugaaagcucugggugu

SEQ ID NO: 2506108 - RNA, 19 nt, Homo sapiens
  misc_RNA (1)...(19): siRNA sense strand
agagaggaucacugaauca

SEQ ID NO: 2506109 - RNA, 19 nt, Homo sapiens
  misc_RNA (1)...(19): siRNA sense strand
acagcugacaauagaaaga

SEQ ID NO: 2506110 - RNA, 19 nt, Homo sapiens
  misc_RNA (1)...(19): siRNA sense strand
cugacaauagaaagaccaa

SEQ ID NO: 2506111 - RNA, 19 nt, Homo sapiens
  misc_RNA (1)...(19): siRNA sense strand
auacagaaaucuccuucaa

SEQ ID NO: 2506112 - RNA, 19 nt, Homo sapiens
  misc_RNA (1)...(19): siRNA sense strand
cugaagaagacucgggaga

SEQ ID NO: 2506113 - RNA, 19 nt, Homo sapiens
  misc_RNA (1)...(19): siRNA sense strand
uggaggugucugugggaaa

SEQ ID NO: 2506114 - RNA, 19 nt, Homo sapiens
  misc_RNA (1)...(19): siRNA sense strand
gggaaugacaacacggaga

SEQ ID NO: 2506115 - RNA, 19 nt, Homo sapiens
  misc_RNA (1)...(19): siRNA sense strand
ccuccaagucguugauaga

SEQ ID NO: 2506116 - RNA, 19 nt, Homo sapiens
  misc_RNA (1)...(19): siRNA sense strand
cgggagaagaagaaggagu

SEQ ID NO: 2506117 - RNA, 19 nt, Homo sapiens
  misc_RNA (1)...(19): siRNA sense strand
agaauaaucuccagcacca

SEQ ID NO: 2506118 - RNA, 19 nt, Homo sapiens
  misc_RNA (1)...(19): siRNA sense strand
gacuggaagaaguggacaa

SEQ ID NO: 2506119 - RNA, 19 nt, Homo sapiens
  misc_RNA (1)...(19): siRNA sense strand
gugaagaaccccaaggaga

SEQ ID NO: 2506120 - RNA, 19 nt, Homo sapiens
  misc_RNA (1)...(19): siRNA sense strand
acuaaggagaagaugaaca

SEQ ID NO: 2506121 - RNA, 19 nt, Homo sapiens
  misc_RNA (1)...(19): siRNA sense strand
ugaaagacgaugaccgcau

SEQ ID NO: 2506122 - RNA, 19 nt, Homo sapiens
  misc_RNA (1)...(19): siRNA sense strand
aaggagaagaugaacaaca

SEQ ID NO: 2506123 - RNA, 19 nt, Homo sapiens
  misc_RNA (1)...(19): siRNA sense strand
ucuacuaaggagaagauga

SEQ ID NO: 2506124 - RNA, 19 nt, Homo sapiens
  misc_RNA (1)...(19): siRNA sense strand
gggagaagaagaaggagug

SEQ ID NO: 2506125 - RNA, 19 nt, Homo sapiens
  misc_RNA (1)...(19): siRNA sense strand
cggagcaaagcauggacaa

SEQ ID NO: 2506126 - RNA, 19 nt, Homo sapiens
  misc_RNA (1)...(19): siRNA sense strand
ccgcaagaucugugaggaa

SEQ ID NO: 2506127 - RNA, 19 nt, Homo sapiens
  misc_RNA (1)...(19): siRNA sense strand
cagaagaucuuuaaggaga

SEQ ID NO: 2506128 - RNA, 19 nt, Homo sapiens
  misc_RNA (1)...(19): siRNA sense strand
aggaauauaucacgggcaa

SEQ ID NO: 2506129 - RNA, 19 nt, Homo sapiens
  misc_RNA (1)...(19): siRNA sense strand
cgcaaguggcugugcaaua

SEQ ID NO: 2506130 - RNA, 19 nt, Homo sapiens
  misc_RNA (1)...(19): siRNA sense strand
aggaaagguucuuggcuga

SEQ ID NO: 2506131 - RNA, 19 nt, Homo sapiens
  misc_RNA (1)...(19): siRNA sense strand
gggaaaaggcugccaacaa

SEQ ID NO: 2506132 - RNA, 19 nt, Homo sapiens
  misc_RNA (1)...(19): siRNA sense strand
cgguacagcugaaggagga

SEQ ID NO: 2506133 - RNA, 19 nt, Homo sapiens
  misc_RNA (1)...(19): siRNA sense strand
agcugaaggaggaaggaaa

SEQ ID NO: 2506134 - RNA, 19 nt, Homo sapiens
  misc_RNA (1)...(19): siRNA sense strand
ccaccaagccagagccaca

SEQ ID NO: 2506135 - RNA, 19 nt, Homo sapiens
  misc_RNA (1)...(19): siRNA sense strand
acuacauguuugagaauca

SEQ ID NO: 2506136 - RNA, 19 nt, Homo sapiens
  misc_RNA (1)...(19): siRNA sense strand
ccaagaagcugguggagag

SEQ ID NO: 2506137 - RNA, 19 nt, Homo sapiens
  misc_RNA (1)...(19): siRNA sense strand
gcaagaaggugucuggcca

SEQ ID NO: 2506138 - RNA, 19 nt, Homo sapiens
  misc_RNA (1)...(19): siRNA sense strand
ccguggagaaugaggagau

SEQ ID NO: 2506139 - RNA, 19 nt, Homo sapiens
  misc_RNA (1)...(19): siRNA sense strand
cugaaaggugugauggaga

SEQ ID NO: 2506140 - RNA, 19 nt, Homo sapiens
  misc_RNA (1)...(19): siRNA sense strand
ccucauggccguggagaau

SEQ ID NO: 2506141 - RNA, 19 nt, Homo sapiens
  misc_RNA (1)...(19): siRNA sense strand
gguucuuggcugacgggaa

SEQ ID NO: 2506142 - RNA, 19 nt, Homo sapiens
  misc_RNA (1)...(19): siRNA sense strand
cagaugagaagaaggcaga

SEQ ID NO: 2506143 - RNA, 19 nt, Homo sapiens
  misc_RNA (1)...(19): siRNA sense strand
gaggcugauaagcgggaaa

SEQ ID NO: 2506144 - RNA, 19 nt, Homo sapiens
  misc_RNA (1)...(19): siRNA sense strand
agccagagccacagugauu

SEQ ID NO: 2506145 - RNA, 19 nt, Homo sapiens
  misc_RNA (1)...(19): siRNA sense strand
uggauaauggucugaggaa

SEQ ID NO: 2506146 - RNA, 19 nt, Homo sapiens
  misc_RNA (1)...(19): siRNA sense strand
acucgaggguacagaagau

SEQ ID NO: 2506147 - RNA, 19 nt, Homo sapiens
  misc_RNA (1)...(19): siRNA sense strand
aaacagaucuacaagacca

SEQ ID NO: 2506148 - RNA, 19 nt, Homo sapiens
  misc_RNA (1)...(19): siRNA sense strand
ccaaggacaagaaggacuu

SEQ ID NO: 2506149 - RNA, 19 nt, Homo sapiens
  misc_RNA (1)...(19): siRNA sense strand
ccacaaauagcuacagcca

SEQ ID NO: 2506150 - RNA, 19 nt, Homo sapiens
  misc_RNA (1)...(19): siRNA sense strand
guucagacagcccgagaau

SEQ ID NO: 2506151 - RNA, 19 nt, Homo sapiens
  misc_RNA (1)...(19): siRNA sense strand
gccugaaaacggagagcua

SEQ ID NO: 2506152 - RNA, 19 nt, Homo sapiens
  misc_RNA (1)...(19): siRNA sense strand
aagaaggaccugaagcaga

SEQ ID NO: 2506153 - RNA, 19 nt, Homo sapiens
  misc_RNA (1)...(19): siRNA sense strand
gccucauggccguggagaa

SEQ ID NO: 2506154 - RNA, 19 nt, Homo sapiens
  misc_RNA (1)...(19): siRNA sense strand
uggaagcgguacagcugaa

SEQ ID NO: 2506155 - RNA, 19 nt, Homo sapiens
  misc_RNA (1)...(19): siRNA sense strand
ucaaagacgugcagcguug

SEQ ID NO: 2506156 - RNA, 19 nt, Homo sapiens
  misc_RNA (1)...(19): siRNA sense strand
aggacauggacaagaacuu

SEQ ID NO: 2506157 - RNA, 19 nt, Homo sapiens
  misc_RNA (1)...(19): siRNA sense strand
acgcugaugugaaggacga

SEQ ID NO: 2506158 - RNA, 19 nt, Homo sapiens
  misc_RNA (1)...(19): siRNA sense strand
gcggggaggaugaugauaa

SEQ ID NO: 2506159 - RNA, 19 nt, Homo sapiens
  misc_RNA (1)...(19): siRNA sense strand
ucagaugccuccagagcca

SEQ ID NO: 2506160 - RNA, 19 nt, Homo sapiens
  misc_RNA (1)...(19): siRNA sense strand
auuuccagcuccaggacua

SEQ ID NO: 2506161 - RNA, 19 nt, Homo sapiens
  misc_RNA (1)...(19): siRNA sense strand
aggaacaccccaaggacaa

SEQ ID NO: 2506162 - RNA, 19 nt, Homo sapiens
  misc_RNA (1)...(19): siRNA sense strand
cagaugugggcaaggugaa

SEQ ID NO: 2506163 - RNA, 19 nt, Homo sapiens
  misc_RNA (1)...(19): siRNA sense strand
agaagauguuugagauccu

SEQ ID NO: 2506164 - RNA, 19 nt, Homo sapiens
  misc_RNA (1)...(19): siRNA sense strand
gaacaauggaguagccuug

SEQ ID NO: 2506165 - RNA, 19 nt, Homo sapiens
  misc_RNA (1)...(19): siRNA sense strand
cggaagggucgacagaaaa

SEQ ID NO: 2506166 - RNA, 19 nt, Homo sapiens
  misc_RNA (1)...(19): siRNA sense strand
ggauaauggucugaggaag

SEQ ID NO: 2506167 - RNA, 19 nt, Homo sapiens
  misc_RNA (1)...(19): siRNA sense strand
gaggaaggaaaccggcauu

SEQ ID NO: 2506168 - RNA, 19 nt, Homo sapiens
  misc_RNA (1)...(19): siRNA sense strand
gagagugagcugcuggaga

SEQ ID NO: 2506169 - RNA, 19 nt, Homo sapiens
  misc_RNA (1)...(19): siRNA sense strand
acaccaagaaggaccugaa

SEQ ID NO: 2506170 - RNA, 19 nt, Homo sapiens
  misc_RNA (1)...(19): siRNA sense strand
ugaagcugaccaaggacaa

SEQ ID NO: 2506171 - RNA, 19 nt, Homo sapiens
  misc_RNA (1)...(19): siRNA sense strand
gcuacgaugucaaggaggu

SEQ ID NO: 2506172 - RNA, 19 nt, Homo sapiens
  misc_RNA (1)...(19): siRNA sense strand
agauggaguuggagggcaa

SEQ ID NO: 2506173 - RNA, 19 nt, Homo sapiens
  misc_RNA (1)...(19): siRNA sense strand
uggacucgguagugggaaa

SEQ ID NO: 2506174 - RNA, 19 nt, Homo sapiens
  misc_RNA (1)...(19): siRNA sense strand
aguccaaguaugaggagga

SEQ ID NO: 2506175 - RNA, 19 nt, Homo sapiens
  misc_RNA (1)...(19): siRNA sense strand
augaagaagagcugggcca

SEQ ID NO: 2506176 - RNA, 19 nt, Homo sapiens
  misc_RNA (1)...(19): siRNA sense strand
agaccaaguaccaggaacu

SEQ ID NO: 2506177 - RNA, 19 nt, Homo sapiens
  misc_RNA (1)...(19): siRNA sense strand
ucaaggacgcucaggccaa

SEQ ID NO: 2506178 - RNA, 19 nt, Homo sapiens
  misc_RNA (1)...(19): siRNA sense strand
ggaaggcucucgugggagu

SEQ ID NO: 2506179 - RNA, 19 nt, Homo sapiens
  misc_RNA (1)...(19): siRNA sense strand
agaacaagguccuggagac

SEQ ID NO: 2506180 - RNA, 19 nt, Homo sapiens
  misc_RNA (1)...(19): siRNA sense strand
agggcaagcuggaggcucu

SEQ ID NO: 2506181 - RNA, 19 nt, Homo sapiens
  misc_RNA (1)...(19): siRNA sense strand
ggggacaggaugcaggaaa

SEQ ID NO: 2506182 - RNA, 19 nt, Homo sapiens
  misc_RNA (1)...(19): siRNA sense strand
aggaggaguauaaguccaa

SEQ ID NO: 2506183 - RNA, 19 nt, Homo sapiens
  misc_RNA (1)...(19): siRNA sense strand
aguaugaggaggaggccca

SEQ ID NO: 2506184 - RNA, 19 nt, Homo sapiens
  misc_RNA (1)...(19): siRNA sense strand
ugaggauggccaagcagaa

SEQ ID NO: 2506185 - RNA, 19 nt, Homo sapiens
  misc_RNA (1)...(19): siRNA sense strand
gaggaggaguauaagucca

SEQ ID NO: 2506186 - RNA, 19 nt, Homo sapiens
  misc_RNA (1)...(19): siRNA sense strand
acaaaggauuggcgagaua

SEQ ID NO: 2506187 - RNA, 19 nt, Homo sapiens
  misc_RNA (1)...(19): siRNA sense strand
ggagaaauccaucaacaaa

SEQ ID NO: 2506188 - RNA, 19 nt, Homo sapiens
  misc_RNA (1)...(19): siRNA sense strand
cggagaaauccaucaacaa

SEQ ID NO: 2506189 - RNA, 19 nt, Homo sapiens
  misc_RNA (1)...(19): siRNA sense strand
gagcaguggugacaagauu

SEQ ID NO: 2506190 - RNA, 19 nt, Homo sapiens
  misc_RNA (1)...(19): siRNA sense strand
caacaaaggauuggcgaga

SEQ ID NO: 2506191 - RNA, 19 nt, Homo sapiens
  misc_RNA (1)...(19): siRNA sense strand
gcgagauaguggcugaaau

SEQ ID NO: 2506192 - RNA, 19 nt, Homo sapiens
  misc_RNA (1)...(19): siRNA sense strand
auggagaagugguacacaa

SEQ ID NO: 2506193 - RNA, 19 nt, Homo sapiens
  misc_RNA (1)...(19): siRNA sense strand
ccgugguggugcagagcau

SEQ ID NO: 2506194 - RNA, 19 nt, Homo sapiens
  misc_RNA (1)...(19): siRNA sense strand
ccggagaaauccaucaaca

SEQ ID NO: 2506195 - RNA, 19 nt, Homo sapiens
  misc_RNA (1)...(19): siRNA sense strand
gagaaauccaucaacaaaa

SEQ ID NO: 2506196 - RNA, 19 nt, Homo sapiens
  misc_RNA (1)...(19): siRNA sense strand
ccucgcagcuccagaaguu

SEQ ID NO: 2506197 - RNA, 19 nt, Homo sapiens
  misc_RNA (1)...(19): siRNA sense strand
aagugguacacaagagcaa

SEQ ID NO: 2506198 - RNA, 19 nt, Homo sapiens
  misc_RNA (1)...(19): siRNA sense strand
gcacagaauucuccaccca

SEQ ID NO: 2506199 - RNA, 19 nt, Homo sapiens
  misc_RNA (1)...(19): siRNA sense strand
cauccauggagaaguggua

SEQ ID NO: 2506200 - RNA, 19 nt, Homo sapiens
  misc_RNA (1)...(19): siRNA sense strand
cgagauaguggcugaaaug

SEQ ID NO: 2506201 - RNA, 19 nt, Homo sapiens
  misc_RNA (1)...(19): siRNA sense strand
guacacaagagcaagcaga

SEQ ID NO: 2506202 - RNA, 19 nt, Homo sapiens
  misc_RNA (1)...(19): siRNA sense strand
gauaguggcugaaauggau

SEQ ID NO: 2506203 - RNA, 19 nt, Homo sapiens
  misc_RNA (1)...(19): siRNA sense strand
gugcagagcauguacaucu

SEQ ID NO: 2506204 - RNA, 19 nt, Homo sapiens
  misc_RNA (1)...(19): siRNA sense strand
gguccucauccauggagaa

SEQ ID NO: 2506205 - RNA, 19 nt, Homo sapiens
  misc_RNA (1)...(19): siRNA sense strand
ggccaugcaacaaaggauu

SEQ ID NO: 2506206 - RNA, 19 nt, Homo sapiens
  misc_RNA (1)...(19): siRNA sense strand
ccacccaggaagaggagca

SEQ ID NO: 2506207 - RNA, 19 nt, Homo sapiens
  misc_RNA (1)...(19): siRNA sense strand
acaaaggauuggcgagaua

SEQ ID NO: 2506208 - RNA, 19 nt, Homo sapiens
  misc_RNA (1)...(19): siRNA sense strand
ggagaaauccaucaacaaa

SEQ ID NO: 2506209 - RNA, 19 nt, Homo sapiens
  misc_RNA (1)...(19): siRNA sense strand
cggagaaauccaucaacaa

SEQ ID NO: 2506210 - RNA, 19 nt, Homo sapiens
  misc_RNA (1)...(19): siRNA sense strand
gagcaguggugacaagauu

SEQ ID NO: 2506211 - RNA, 19 nt, Homo sapiens
  misc_RNA (1)...(19): siRNA sense strand
caacaaaggauuggcgaga

SEQ ID NO: 2506212 - RNA, 19 nt, Homo sapiens
  misc_RNA (1)...(19): siRNA sense strand
gcgagauaguggcugaaau

SEQ ID NO: 2506213 - RNA, 19 nt, Homo sapiens
  misc_RNA (1)...(19): siRNA sense strand
auggagaagugguacacaa

SEQ ID NO: 2506214 - RNA, 19 nt, Homo sapiens
  misc_RNA (1)...(19): siRNA sense strand
ccgugguggugcagagcau

SEQ ID NO: 2506215 - RNA, 19 nt, Homo sapiens
  misc_RNA (1)...(19): siRNA sense strand
ccggagaaauccaucaaca

SEQ ID NO: 2506216 - RNA, 19 nt, Homo sapiens
  misc_RNA (1)...(19): siRNA sense strand
gagaaauccaucaacaaaa

SEQ ID NO: 2506217 - RNA, 19 nt, Homo sapiens
  misc_RNA (1)...(19): siRNA sense strand
ccucgcagcuccagaaguu

SEQ ID NO: 2506218 - RNA, 19 nt, Homo sapiens
  misc_RNA (1)...(19): siRNA sense strand
aagugguacacaagagcaa

SEQ ID NO: 2506219 - RNA, 19 nt, Homo sapiens
  misc_RNA (1)...(19): siRNA sense strand
gcacagaauucuccaccca

SEQ ID NO: 2506220 - RNA, 19 nt, Homo sapiens
  misc_RNA (1)...(19): siRNA sense strand
cauccauggagaaguggua

SEQ ID NO: 2506221 - RNA, 19 nt, Homo sapiens
  misc_RNA (1)...(19): siRNA sense strand
cgagauaguggcugaaaug

SEQ ID NO: 2506222 - RNA, 19 nt, Homo sapiens
  misc_RNA (1)...(19): siRNA sense strand
guacacaagagcaagcaga

SEQ ID NO: 2506223 - RNA, 19 nt, Homo sapiens
  misc_RNA (1)...(19): siRNA sense strand
gauaguggcugaaauggau

SEQ ID NO: 2506224 - RNA, 19 nt, Homo sapiens
  misc_RNA (1)...(19): siRNA sense strand
gugcagagcauguacaucu

SEQ ID NO: 2506225 - RNA, 19 nt, Homo sapiens
  misc_RNA (1)...(19): siRNA sense strand
gguccucauccauggagaa

SEQ ID NO: 2506226 - RNA, 19 nt, Homo sapiens
  misc_RNA (1)...(19): siRNA sense strand
ggccaugcaacaaaggauu

SEQ ID NO: 2506227 - RNA, 19 nt, Homo sapiens
  misc_RNA (1)...(19): siRNA sense strand
ccacccaggaagaggagca

SEQ ID NO: 2506228 - RNA, 19 nt, Homo sapiens
  misc_RNA (1)...(19): siRNA sense strand
cgagaaagucacagaggga

SEQ ID NO: 2506229 - RNA, 19 nt, Homo sapiens
  misc_RNA (1)...(19): siRNA sense strand
ccacuaagauggaugcaga

SEQ ID NO: 2506230 - RNA, 19 nt, Homo sapiens
  misc_RNA (1)...(19): siRNA sense strand
cgggagagggcgaguucaa

SEQ ID NO: 2506231 - RNA, 19 nt, Homo sapiens
  misc_RNA (1)...(19): siRNA sense strand
ggacaaagccagcggagug

SEQ ID NO: 2506232 - RNA, 19 nt, Homo sapiens
  misc_RNA (1)...(19): siRNA sense strand
caucaacaccagagagcca

SEQ ID NO: 2506233 - RNA, 19 nt, Homo sapiens
  misc_RNA (1)...(19): siRNA sense strand
cgaaagugaccaggagcaa

SEQ ID NO: 2506234 - RNA, 19 nt, Homo sapiens
  misc_RNA (1)...(19): siRNA sense strand
gagcagaaaugggagccaa

SEQ ID NO: 2506235 - RNA, 19 nt, Homo sapiens
  misc_RNA (1)...(19): siRNA sense strand
acauggacaaggugggaau

SEQ ID NO: 2506236 - RNA, 19 nt, Homo sapiens
  misc_RNA (1)...(19): siRNA sense strand
gugcagacuaugaugaaca

SEQ ID NO: 2506237 - RNA, 19 nt, Homo sapiens
  misc_RNA (1)...(19): siRNA sense strand
agaaagucacagagggagu

SEQ ID NO: 2506238 - RNA, 19 nt, Homo sapiens
  misc_RNA (1)...(19): siRNA sense strand
gcaccaugcuggagcugga

SEQ ID NO: 2506239 - RNA, 19 nt, Homo sapiens
  misc_RNA (1)...(19): siRNA sense strand
agaugaagugcaagagguu

SEQ ID NO: 2506240 - RNA, 19 nt, Homo sapiens
  misc_RNA (1)...(19): siRNA sense strand
aucacgaaccggagagcaa

SEQ ID NO: 2506241 - RNA, 19 nt, Homo sapiens
  misc_RNA (1)...(19): siRNA sense strand
gagcaaggucgcaagcuga

SEQ ID NO: 2506242 - RNA, 19 nt, Homo sapiens
  misc_RNA (1)...(19): siRNA sense strand
gaugcaaacuccugccaca

SEQ ID NO: 2506243 - RNA, 19 nt, Homo sapiens
  misc_RNA (1)...(19): siRNA sense strand
ggucgcaagcugaggagca

SEQ ID NO: 2506244 - RNA, 19 nt, Homo sapiens
  misc_RNA (1)...(19): siRNA sense strand
gcucgagaccauagggaag

SEQ ID NO: 2506245 - RNA, 19 nt, Homo sapiens
  misc_RNA (1)...(19): siRNA sense strand
ucuggugguauuugggaaa

SEQ ID NO: 2506246 - RNA, 19 nt, Homo sapiens
  misc_RNA (1)...(19): siRNA sense strand
ugguuuagaaagaggggaa

SEQ ID NO: 2506247 - RNA, 19 nt, Homo sapiens
  misc_RNA (1)...(19): siRNA sense strand
acguaaaacuuguccccaa

SEQ ID NO: 2506248 - RNA, 19 nt, Homo sapiens
  misc_RNA (1)...(19): siRNA sense strand
gccuggaagccauggaaga

SEQ ID NO: 2506249 - RNA, 19 nt, Homo sapiens
  misc_RNA (1)...(19): siRNA sense strand
augaacaccuuacgggaca

SEQ ID NO: 2506250 - RNA, 19 nt, Homo sapiens
  misc_RNA (1)...(19): siRNA sense strand
ccugggugcucgagaccau

SEQ ID NO: 2506251 - RNA, 19 nt, Homo sapiens
  misc_RNA (1)...(19): siRNA sense strand
gagaugaagugcaagaggu

SEQ ID NO: 2506252 - RNA, 19 nt, Homo sapiens
  misc_RNA (1)...(19): siRNA sense strand
ggaaacagcuaaagaagcc

SEQ ID NO: 2506253 - RNA, 19 nt, Homo sapiens
  misc_RNA (1)...(19): siRNA sense strand
agagcaagguugagugcac

SEQ ID NO: 2506254 - RNA, 19 nt, Homo sapiens
  misc_RNA (1)...(19): siRNA sense strand
gugcauaucugauugugga

SEQ ID NO: 2506255 - RNA, 19 nt, Homo sapiens
  misc_RNA (1)...(19): siRNA sense strand
ccaccgauucugagagcaa

SEQ ID NO: 2506256 - RNA, 19 nt, Homo sapiens
  misc_RNA (1)...(19): siRNA sense strand
aggaagauuuuggaagaaa

SEQ ID NO: 2506257 - RNA, 19 nt, Homo sapiens
  misc_RNA (1)...(19): siRNA sense strand
ugacuguggauuaugacaa

SEQ ID NO: 2506258 - RNA, 19 nt, Homo sapiens
  misc_RNA (1)...(19): siRNA sense strand
guggauuaugacaaagauu

SEQ ID NO: 2506259 - RNA, 19 nt, Homo sapiens
  misc_RNA (1)...(19): siRNA sense strand
aggaagauuaagcgagaua

SEQ ID NO: 2506260 - RNA, 19 nt, Homo sapiens
  misc_RNA (1)...(19): siRNA sense strand
gcaggaagauuaagcgaga

SEQ ID NO: 2506261 - RNA, 19 nt, Homo sapiens
  misc_RNA (1)...(19): siRNA sense strand
caguagugauagugaggau

SEQ ID NO: 2506262 - RNA, 19 nt, Homo sapiens
  misc_RNA (1)...(19): siRNA sense strand
agaaaugggugguggcagu

SEQ ID NO: 2506263 - RNA, 19 nt, Homo sapiens
  misc_RNA (1)...(19): siRNA sense strand
aaguagaggaaauggugaa

SEQ ID NO: 2506264 - RNA, 19 nt, Homo sapiens
  misc_RNA (1)...(19): siRNA sense strand
caacacagcugaaaggagu

SEQ ID NO: 2506265 - RNA, 19 nt, Homo sapiens
  misc_RNA (1)...(19): siRNA sense strand
cuagaaggccugauggaca

SEQ ID NO: 2506266 - RNA, 19 nt, Homo sapiens
  misc_RNA (1)...(19): siRNA sense strand
ccuacaaacaggaaagcga

SEQ ID NO: 2506267 - RNA, 19 nt, Homo sapiens
  misc_RNA (1)...(19): siRNA sense strand
guucaauauaggagaaaug

SEQ ID NO: 2506268 - RNA, 19 nt, Homo sapiens
  misc_RNA (1)...(19): siRNA sense strand
cuacaaacaggaaagcgaa

SEQ ID NO: 2506269 - RNA, 19 nt, Homo sapiens
  misc_RNA (1)...(19): siRNA sense strand
cagaagaacucaaggcagc

SEQ ID NO: 2506270 - RNA, 19 nt, Homo sapiens
  misc_RNA (1)...(19): siRNA sense strand
ggggagaaggagaagaaga

SEQ ID NO: 2506271 - RNA, 19 nt, Homo sapiens
  misc_RNA (1)...(19): siRNA sense strand
gagaaaugaacauggacgu

SEQ ID NO: 2506272 - RNA, 19 nt, Homo sapiens
  misc_RNA (1)...(19): siRNA sense strand
ggcuagacugugaugcuaa

SEQ ID NO: 2506273 - RNA, 19 nt, Homo sapiens
  misc_RNA (1)...(19): siRNA sense strand
acucaaggcagcaaguaga

SEQ ID NO: 2506274 - RNA, 19 nt, Homo sapiens
  misc_RNA (1)...(19): siRNA sense strand
gcgcacuaguagagagcug

SEQ ID NO: 2506275 - RNA, 19 nt, Homo sapiens
  misc_RNA (1)...(19): siRNA sense strand
gguucaauauaggagaaau

SEQ ID NO: 2506276 - RNA, 19 nt, Homo sapiens
  misc_RNA (1)...(19): siRNA sense strand
cuaguagagagcuggaaga

SEQ ID NO: 2506277 - RNA, 19 nt, Homo sapiens
  misc_RNA (1)...(19): siRNA sense strand
guagagagcuggaagaugc

SEQ ID NO: 2506278 - RNA, 19 nt, Homo sapiens
  misc_RNA (1)...(19): siRNA sense strand
gaacauggacgucgcagga

SEQ ID NO: 2506279 - RNA, 19 nt, Homo sapiens
  misc_RNA (1)...(19): siRNA sense strand
ucauaggggagaaggagaa

SEQ ID NO: 2506280 - RNA, 19 nt, Homo sapiens
  misc_RNA (1)...(19): siRNA sense strand
aaggagaagaagaucauga

SEQ ID NO: 2506281 - RNA, 19 nt, Homo sapiens
  misc_RNA (1)...(19): siRNA sense strand
ugucagaucuagaaggccu

SEQ ID NO: 2506282 - RNA, 19 nt, Homo sapiens
  misc_RNA (1)...(19): siRNA sense strand
ucuaagaaagagugggaaa

SEQ ID NO: 2506283 - RNA, 19 nt, Homo sapiens
  misc_RNA (1)...(19): siRNA sense strand
gcaaagagacccagggaug

SEQ ID NO: 2506284 - RNA, 19 nt, Homo sapiens
  misc_RNA (1)...(19): siRNA sense strand
guguauaugaagagaaacu

SEQ ID NO: 2506285 - RNA, 19 nt, Homo sapiens
  misc_RNA (1)...(19): siRNA sense strand
agaugaaauacucggagaa

SEQ ID NO: 2506286 - RNA, 19 nt, Homo sapiens
  misc_RNA (1)...(19): siRNA sense strand
ggaaaugauucgaagggag

SEQ ID NO: 2506287 - RNA, 19 nt, Homo sapiens
  misc_RNA (1)...(19): siRNA sense strand
agagaaacuaugaggccau

SEQ ID NO: 2506288 - RNA, 19 nt, Homo sapiens
  misc_RNA (1)...(19): siRNA sense strand
gcaucagagaagagaagca

SEQ ID NO: 2506289 - RNA, 19 nt, Homo sapiens
  misc_RNA (1)...(19): siRNA sense strand
gaaaugauucgaagggagu

SEQ ID NO: 2506290 - RNA, 19 nt, Homo sapiens
  misc_RNA (1)...(19): siRNA sense strand
cuaagaaagagugggaaaa

SEQ ID NO: 2506291 - RNA, 19 nt, Homo sapiens
  misc_RNA (1)...(19): siRNA sense strand
aagaugaaauacucggaga

SEQ ID NO: 2506292 - RNA, 19 nt, Homo sapiens
  misc_RNA (1)...(19): siRNA sense strand
uuggcaggcuccagagaau

SEQ ID NO: 2506293 - RNA, 19 nt, Homo sapiens
  misc_RNA (1)...(19): siRNA sense strand
ccaagaagccagcagagga

SEQ ID NO: 2506294 - RNA, 19 nt, Homo sapiens
  misc_RNA (1)...(19): siRNA sense strand
agccagcagaggaaggaaa

SEQ ID NO: 2506295 - RNA, 19 nt, Homo sapiens
  misc_RNA (1)...(19): siRNA sense strand
augaaauacucggagaaaa

SEQ ID NO: 2506296 - RNA, 19 nt, Homo sapiens
  misc_RNA (1)...(19): siRNA sense strand
gagaagagaagcaaggccu

SEQ ID NO: 2506297 - RNA, 19 nt, Homo sapiens
  misc_RNA (1)...(19): siRNA sense strand
ggaaggaaaugauucgaag

SEQ ID NO: 2506298 - RNA, 19 nt, Homo sapiens
  misc_RNA (1)...(19): siRNA sense strand
ucuaagaaagagugggaaa

SEQ ID NO: 2506299 - RNA, 19 nt, Homo sapiens
  misc_RNA (1)...(19): siRNA sense strand
ccacagaccuccaggggaa

SEQ ID NO: 2506300 - RNA, 19 nt, Homo sapiens
  misc_RNA (1)...(19): siRNA sense strand
ggaaaugauucgaaggaag

SEQ ID NO: 2506301 - RNA, 19 nt, Homo sapiens
  misc_RNA (1)...(19): siRNA sense strand
agagaaaguaugaggccau

SEQ ID NO: 2506302 - RNA, 19 nt, Homo sapiens
  misc_RNA (1)...(19): siRNA sense strand
cuuacagaacgaugggaaa

SEQ ID NO: 2506303 - RNA, 19 nt, Homo sapiens
  misc_RNA (1)...(19): siRNA sense strand
guguauaugaagagaaagu

SEQ ID NO: 2506304 - RNA, 19 nt, Homo sapiens
  misc_RNA (1)...(19): siRNA sense strand
agaugaaauccucggagaa

SEQ ID NO: 2506305 - RNA, 19 nt, Homo sapiens
  misc_RNA (1)...(19): siRNA sense strand
gcuuacagaacgaugggaa

SEQ ID NO: 2506306 - RNA, 19 nt, Homo sapiens
  misc_RNA (1)...(19): siRNA sense strand
gagagaaagcagcugguga

SEQ ID NO: 2506307 - RNA, 19 nt, Homo sapiens
  misc_RNA (1)...(19): siRNA sense strand
cucaaauaccagagaagau

SEQ ID NO: 2506308 - RNA, 19 nt, Homo sapiens
  misc_RNA (1)...(19): siRNA sense strand
ucggcaggcuccagggaau

SEQ ID NO: 2506309 - RNA, 19 nt, Homo sapiens
  misc_RNA (1)...(19): siRNA sense strand
gagaagauuaacaaggcau

SEQ ID NO: 2506310 - RNA, 19 nt, Homo sapiens
  misc_RNA (1)...(19): siRNA sense strand
aagaugaaauccucggaga

SEQ ID NO: 2506311 - RNA, 19 nt, Homo sapiens
  misc_RNA (1)...(19): siRNA sense strand
gauaaugaccguaaccaca

SEQ ID NO: 2506312 - RNA, 19 nt, Homo sapiens
  misc_RNA (1)...(19): siRNA sense strand
cuaagaaagagugggaaaa

SEQ ID NO: 2506313 - RNA, 19 nt, Homo sapiens
  misc_RNA (1)...(19): siRNA sense strand
ggaaucagguugaacguuc

SEQ ID NO: 2506314 - RNA, 19 nt, Homo sapiens
  misc_RNA (1)...(19): siRNA sense strand
gcaaggagaccuagggcug

SEQ ID NO: 2506315 - RNA, 19 nt, Homo sapiens
  misc_RNA (1)...(19): siRNA sense strand
agccagcagagguaggaaa

SEQ ID NO: 2506316 - RNA, 19 nt, Homo sapiens
  misc_RNA (1)...(19): siRNA sense strand
aaacaugccuggacccaca

SEQ ID NO: 2506317 - RNA, 19 nt, Homo sapiens
  misc_RNA (1)...(19): siRNA sense strand
ugaaauccucggagaaaau

SEQ ID NO: 2506318 - RNA, 19 nt, Homo sapiens
  misc_RNA (1)...(19): siRNA sense strand
aaguaugaggccaugacua

SEQ ID NO: 2506319 - RNA, 19 nt, Homo sapiens
  misc_RNA (1)...(19): siRNA sense strand
cuccaaaggaauaaagcaa

SEQ ID NO: 2506320 - RNA, 19 nt, Homo sapiens
  misc_RNA (1)...(19): siRNA sense strand
ccuaaagauccaucagcaa

SEQ ID NO: 2506321 - RNA, 19 nt, Homo sapiens
  misc_RNA (1)...(19): siRNA sense strand
cggaaauauuuaugugacu

SEQ ID NO: 2506322 - RNA, 19 nt, Homo sapiens
  misc_RNA (1)...(19): siRNA sense strand
acacagugacaguagacaa

SEQ ID NO: 2506323 - RNA, 19 nt, Homo sapiens
  misc_RNA (1)...(19): siRNA sense strand
gugugugggcagagaagau

SEQ ID NO: 2506324 - RNA, 19 nt, Homo sapiens
  misc_RNA (1)...(19): siRNA sense strand
gauccugaaaagagggaau

SEQ ID NO: 2506325 - RNA, 19 nt, Homo sapiens
  misc_RNA (1)...(19): siRNA sense strand
gaccuuuacauuugggaga

SEQ ID NO: 2506326 - RNA, 19 nt, Homo sapiens
  misc_RNA (1)...(19): siRNA sense strand
gcuacagcucccugggcua

SEQ ID NO: 2506327 - RNA, 19 nt, Homo sapiens
  misc_RNA (1)...(19): siRNA sense strand
cguuacuucugcuguggaa

SEQ ID NO: 2506328 - RNA, 19 nt, Homo sapiens
  misc_RNA (1)...(19): siRNA sense strand
caugggaccuucagagcca

SEQ ID NO: 2506329 - RNA, 19 nt, Homo sapiens
  misc_RNA (1)...(19): siRNA sense strand
ccgccgugcaguuggaauu

SEQ ID NO: 2506330 - RNA, 19 nt, Homo sapiens
  misc_RNA (1)...(19): siRNA sense strand
cugucgaaugcuagaagaa

SEQ ID NO: 2506331 - RNA, 19 nt, Homo sapiens
  misc_RNA (1)...(19): siRNA sense strand
ccaucuauuuugaaagcua

SEQ ID NO: 2506332 - RNA, 19 nt, Homo sapiens
  misc_RNA (1)...(19): siRNA sense strand
ggguauugcaguuggacac

SEQ ID NO: 2506333 - RNA, 19 nt, Homo sapiens
  misc_RNA (1)...(19): siRNA sense strand
gucuauguguggagccgaa

SEQ ID NO: 2506334 - RNA, 19 nt, Homo sapiens
  misc_RNA (1)...(19): siRNA sense strand
acaaagacuuacaggagga

SEQ ID NO: 2506335 - RNA, 19 nt, Homo sapiens
  misc_RNA (1)...(19): siRNA sense strand
ccuauuaccugguccgcaa

SEQ ID NO: 2506336 - RNA, 19 nt, Homo sapiens
  misc_RNA (1)...(19): siRNA sense strand
aagacuuacaggaggacaa

SEQ ID NO: 2506337 - RNA, 19 nt, Homo sapiens
  misc_RNA (1)...(19): siRNA sense strand
ccagauacuccauggccua

SEQ ID NO: 2506338 - RNA, 19 nt, Homo sapiens
  misc_RNA (1)...(19): siRNA sense strand
uguucauggccgagaccaa

SEQ ID NO: 2506339 - RNA, 19 nt, Homo sapiens
  misc_RNA (1)...(19): siRNA sense strand
acuccaaugaugaggacau

SEQ ID NO: 2506340 - RNA, 19 nt, Homo sapiens
  misc_RNA (1)...(19): siRNA sense strand
accaagagaacaugggaca

SEQ ID NO: 2506341 - RNA, 19 nt, Homo sapiens
  misc_RNA (1)...(19): siRNA sense strand
gcucauuggugcaacggca

SEQ ID NO: 2506342 - RNA, 19 nt, Homo sapiens
  misc_RNA (1)...(19): siRNA sense strand
caacaaagacuuacaggag

SEQ ID NO: 2506343 - RNA, 19 nt, Homo sapiens
  misc_RNA (1)...(19): siRNA sense strand
ccgggaaagcuguguucau

SEQ ID NO: 2506344 - RNA, 19 nt, Homo sapiens
  misc_RNA (1)...(19): siRNA sense strand
uggaggaggugaagaggca

SEQ ID NO: 2506345 - RNA, 19 nt, Homo sapiens
  misc_RNA (1)...(19): siRNA sense strand
gaggaggugaagaggcaca

SEQ ID NO: 2506346 - RNA, 19 nt, Homo sapiens
  misc_RNA (1)...(19): siRNA sense strand
uguguggggugaugagaaa

SEQ ID NO: 2506347 - RNA, 19 nt, Homo sapiens
  misc_RNA (1)...(19): siRNA sense strand
aagcagaaugagaucaaca

SEQ ID NO: 2506348 - RNA, 19 nt, Homo sapiens
  misc_RNA (1)...(19): siRNA sense strand
ccaccaaccuuuauggaga

SEQ ID NO: 2506349 - RNA, 19 nt, Homo sapiens
  misc_RNA (1)...(19): siRNA sense strand
ccaaggaggaugcggccaa

SEQ ID NO: 2506350 - RNA, 19 nt, Homo sapiens
  misc_RNA (1)...(19): siRNA sense strand
caagaaaggagguguggca

SEQ ID NO: 2506351 - RNA, 19 nt, Homo sapiens
  misc_RNA (1)...(19): siRNA sense strand
ccaacgaggugguggugca

SEQ ID NO: 2506352 - RNA, 19 nt, Homo sapiens
  misc_RNA (1)...(19): siRNA sense strand
uggaaaggcaagcaggcaa

SEQ ID NO: 2506353 - RNA, 19 nt, Homo sapiens
  misc_RNA (1)...(19): siRNA sense strand
acagcauggugguggaaca

SEQ ID NO: 2506354 - RNA, 19 nt, Homo sapiens
  misc_RNA (1)...(19): siRNA sense strand
guaccuguguccugggaga

SEQ ID NO: 2506355 - RNA, 19 nt, Homo sapiens
  misc_RNA (1)...(19): siRNA sense strand
ucgaagagguuccugguga

SEQ ID NO: 2506356 - RNA, 19 nt, Homo sapiens
  misc_RNA (1)...(19): siRNA sense strand
agacagauggccugggcuu

SEQ ID NO: 2506357 - RNA, 19 nt, Homo sapiens
  misc_RNA (1)...(19): siRNA sense strand
ggcugaaggacaagaagau

SEQ ID NO: 2506358 - RNA, 19 nt, Homo sapiens
  misc_RNA (1)...(19): siRNA sense strand
agaucuggcguguggagaa

SEQ ID NO: 2506359 - RNA, 19 nt, Homo sapiens
  misc_RNA (1)...(19): siRNA sense strand
cggcugaaggacaagaaga

SEQ ID NO: 2506360 - RNA, 19 nt, Homo sapiens
  misc_RNA (1)...(19): siRNA sense strand
gcuaagcgguacaucgaga

SEQ ID NO: 2506361 - RNA, 19 nt, Homo sapiens
  misc_RNA (1)...(19): siRNA sense strand
acaagaagauggaugccca

SEQ ID NO: 2506362 - RNA, 19 nt, Homo sapiens
  misc_RNA (1)...(19): siRNA sense strand
uaugaaagacugaaggcca

SEQ ID NO: 2506363 - RNA, 19 nt, Homo sapiens
  misc_RNA (1)...(19): siRNA sense strand
aagaagaagaaaagacaga

SEQ ID NO: 2506364 - RNA, 19 nt, Homo sapiens
  misc_RNA (1)...(19): siRNA sense strand
gcacugaacuccaacgaug

SEQ ID NO: 2506365 - RNA, 19 nt, Homo sapiens
  misc_RNA (1)...(19): siRNA sense strand
aggcaaacacggaggagag

SEQ ID NO: 2506366 - RNA, 19 nt, Homo sapiens
  misc_RNA (1)...(19): siRNA sense strand
ccaacagcaugguggugga

SEQ ID NO: 2506367 - RNA, 19 nt, Homo sapiens
  misc_RNA (1)...(19): siRNA sense strand
aggugguggugcagagacu

SEQ ID NO: 2506368 - RNA, 19 nt, Homo sapiens
  misc_RNA (1)...(19): siRNA sense strand
ccaccaaccuuuauggaga

SEQ ID NO: 2506369 - RNA, 19 nt, Homo sapiens
  misc_RNA (1)...(19): siRNA sense strand
ccaaggaggaugcggccaa

SEQ ID NO: 2506370 - RNA, 19 nt, Homo sapiens
  misc_RNA (1)...(19): siRNA sense strand
caagaaaggagguguggca

SEQ ID NO: 2506371 - RNA, 19 nt, Homo sapiens
  misc_RNA (1)...(19): siRNA sense strand
ccaacgaggugguggugca

SEQ ID NO: 2506372 - RNA, 19 nt, Homo sapiens
  misc_RNA (1)...(19): siRNA sense strand
uggaaaggcaagcaggcaa

SEQ ID NO: 2506373 - RNA, 19 nt, Homo sapiens
  misc_RNA (1)...(19): siRNA sense strand
guaccuguguccugggaga

SEQ ID NO: 2506374 - RNA, 19 nt, Homo sapiens
  misc_RNA (1)...(19): siRNA sense strand
ucgaagagguuccugguga

SEQ ID NO: 2506375 - RNA, 19 nt, Homo sapiens
  misc_RNA (1)...(19): siRNA sense strand
agacagauggccugggcuu

SEQ ID NO: 2506376 - RNA, 19 nt, Homo sapiens
  misc_RNA (1)...(19): siRNA sense strand
ggcugaaggacaagaagau

SEQ ID NO: 2506377 - RNA, 19 nt, Homo sapiens
  misc_RNA (1)...(19): siRNA sense strand
agaucuggcguguggagaa

SEQ ID NO: 2506378 - RNA, 19 nt, Homo sapiens
  misc_RNA (1)...(19): siRNA sense strand
cggcugaaggacaagaaga

SEQ ID NO: 2506379 - RNA, 19 nt, Homo sapiens
  misc_RNA (1)...(19): siRNA sense strand
gcuaagcgguacaucgaga

SEQ ID NO: 2506380 - RNA, 19 nt, Homo sapiens
  misc_RNA (1)...(19): siRNA sense strand
acaagaagauggaugccca

SEQ ID NO: 2506381 - RNA, 19 nt, Homo sapiens
  misc_RNA (1)...(19): siRNA sense strand
uaugaaagacugaaggcca

SEQ ID NO: 2506382 - RNA, 19 nt, Homo sapiens
  misc_RNA (1)...(19): siRNA sense strand
aagaagaagaaaagacaga

SEQ ID NO: 2506383 - RNA, 19 nt, Homo sapiens
  misc_RNA (1)...(19): siRNA sense strand
gcacugaacuccaacgaug

SEQ ID NO: 2506384 - RNA, 19 nt, Homo sapiens
  misc_RNA (1)...(19): siRNA sense strand
aggcaaacacggaggagag

SEQ ID NO: 2506385 - RNA, 19 nt, Homo sapiens
  misc_RNA (1)...(19): siRNA sense strand
aggugguggugcagagacu

SEQ ID NO: 2506386 - RNA, 19 nt, Homo sapiens
  misc_RNA (1)...(19): siRNA sense strand
aggacuacaucgagcacuu

SEQ ID NO: 2506387 - RNA, 19 nt, Homo sapiens
  misc_RNA (1)...(19): siRNA sense strand
acaaugaaguaguugcuga

SEQ ID NO: 2506388 - RNA, 19 nt, Homo sapiens
  misc_RNA (1)...(19): siRNA sense strand
cagugagaaacguggguca

SEQ ID NO: 2506389 - RNA, 19 nt, Homo sapiens
  misc_RNA (1)...(19): siRNA sense strand
aggccuacggcaaggacua

SEQ ID NO: 2506390 - RNA, 19 nt, Homo sapiens
  misc_RNA (1)...(19): siRNA sense strand
caaugaaguaguugcugau

SEQ ID NO: 2506391 - RNA, 19 nt, Homo sapiens
  misc_RNA (1)...(19): siRNA sense strand
gcuucaagacagagucagu

SEQ ID NO: 2506392 - RNA, 19 nt, Homo sapiens
  misc_RNA (1)...(19): siRNA sense strand
ugguuaagcgucugggaua

SEQ ID NO: 2506393 - RNA, 19 nt, Homo sapiens
  misc_RNA (1)...(19): siRNA sense strand
gugcaaaagaugaaaacaa

SEQ ID NO: 2506394 - RNA, 19 nt, Homo sapiens
  misc_RNA (1)...(19): siRNA sense strand
ugaccaaagaugugaccaa

SEQ ID NO: 2506395 - RNA, 19 nt, Homo sapiens
  misc_RNA (1)...(19): siRNA sense strand
gaugaaaacaacugugaaa

SEQ ID NO: 2506396 - RNA, 19 nt, Homo sapiens
  misc_RNA (1)...(19): siRNA sense strand
ggaagaaugugcuugguca

SEQ ID NO: 2506397 - RNA, 19 nt, Homo sapiens
  misc_RNA (1)...(19): siRNA sense strand
aggccauggaugagaagaa

SEQ ID NO: 2506398 - RNA, 19 nt, Homo sapiens
  misc_RNA (1)...(19): siRNA sense strand
cugaaggaccagacagauu

SEQ ID NO: 2506399 - RNA, 19 nt, Homo sapiens
  misc_RNA (1)...(19): siRNA sense strand
gugcaaggacuuucgggaa

SEQ ID NO: 2506400 - RNA, 19 nt, Homo sapiens
  misc_RNA (1)...(19): siRNA sense strand
caacaaugucccuggcuca

SEQ ID NO: 2506401 - RNA, 19 nt, Homo sapiens
  misc_RNA (1)...(19): siRNA sense strand
uggcugagcugaaggacca

SEQ ID NO: 2506402 - RNA, 19 nt, Homo sapiens
  misc_RNA (1)...(19): siRNA sense strand
cugcaucggaucauggaaa

SEQ ID NO: 2506403 - RNA, 19 nt, Homo sapiens
  misc_RNA (1)...(19): siRNA sense strand
cagcaggauggguguggaa

SEQ ID NO: 2506404 - RNA, 19 nt, Homo sapiens
  misc_RNA (1)...(19): siRNA sense strand
ugagaagaaauuugacgaa

SEQ ID NO: 2506405 - RNA, 19 nt, Homo sapiens
  misc_RNA (1)...(19): siRNA sense strand
ugaacaacugggaggugua

SEQ ID NO: 2506406 - RNA, 19 nt, Homo sapiens
  misc_RNA (1)...(19): siRNA sense strand
gggcuugguguuaaggaau

SEQ ID NO: 2506407 - RNA, 19 nt, Homo sapiens
  misc_RNA (1)...(19): siRNA sense strand
ucuuuguccaugaggguua

SEQ ID NO: 2506408 - RNA, 19 nt, Homo sapiens
  misc_RNA (1)...(19): siRNA sense strand
uagccaaguacgagauuga

SEQ ID NO: 2506409 - RNA, 19 nt, Homo sapiens
  misc_RNA (1)...(19): siRNA sense strand
guggagaugcccaagguau

SEQ ID NO: 2506410 - RNA, 19 nt, Homo sapiens
  misc_RNA (1)...(19): siRNA sense strand
acaacugggagguguacaa

SEQ ID NO: 2506411 - RNA, 19 nt, Homo sapiens
  misc_RNA (1)...(19): siRNA sense strand
uugaacaucuggugcaaaa

SEQ ID NO: 2506412 - RNA, 19 nt, Homo sapiens
  misc_RNA (1)...(19): siRNA sense strand
cguucugaguggagugacu

SEQ ID NO: 2506413 - RNA, 19 nt, Homo sapiens
  misc_RNA (1)...(19): siRNA sense strand
guugagugaccuccagaaa

SEQ ID NO: 2506414 - RNA, 19 nt, Homo sapiens
  misc_RNA (1)...(19): siRNA sense strand
uggaaauuguagaugccau

SEQ ID NO: 2506415 - RNA, 19 nt, Homo sapiens
  misc_RNA (1)...(19): siRNA sense strand
aaggaacagugguggcuga

SEQ ID NO: 2506416 - RNA, 19 nt, Homo sapiens
  misc_RNA (1)...(19): siRNA sense strand
cagaaagcagguaagauca

SEQ ID NO: 2506417 - RNA, 19 nt, Homo sapiens
  misc_RNA (1)...(19): siRNA sense strand
uucgagaccugcaggcaaa

SEQ ID NO: 2506418 - RNA, 19 nt, Homo sapiens
  misc_RNA (1)...(19): siRNA sense strand
ccagacagauuuugagcau

SEQ ID NO: 2506419 - RNA, 19 nt, Homo sapiens
  misc_RNA (1)...(19): siRNA sense strand
ccugguggaugguggagau

SEQ ID NO: 2506420 - RNA, 19 nt, Homo sapiens
  misc_RNA (1)...(19): siRNA sense strand
gggugcaauugacaagaau

SEQ ID NO: 2506421 - RNA, 19 nt, Homo sapiens
  misc_RNA (1)...(19): siRNA sense strand
ugacaagaauggaaaacca

SEQ ID NO: 2506422 - RNA, 19 nt, Homo sapiens
  misc_RNA (1)...(19): siRNA sense strand
aaggaagccaccugggaga

SEQ ID NO: 2506423 - RNA, 19 nt, Homo sapiens
  misc_RNA (1)...(19): siRNA sense strand
cugagaggccggagcuuca

SEQ ID NO: 2506424 - RNA, 19 nt, Homo sapiens
  misc_RNA (1)...(19): siRNA sense strand
ugaacagaucagugccaau

SEQ ID NO: 2506425 - RNA, 19 nt, Homo sapiens
  misc_RNA (1)...(19): siRNA sense strand
ggacuuucgggaacgagaa

SEQ ID NO: 2506426 - RNA, 19 nt, Homo sapiens
  misc_RNA (1)...(19): siRNA sense strand
gcgaaggagaagaggaaca

SEQ ID NO: 2506427 - RNA, 19 nt, Homo sapiens
  misc_RNA (1)...(19): siRNA sense strand
aggcgaaggagaagaggaa

SEQ ID NO: 2506428 - RNA, 19 nt, Homo sapiens
  misc_RNA (1)...(19): siRNA sense strand
acaccaaaggcgaaggaga

SEQ ID NO: 2506429 - RNA, 19 nt, Homo sapiens
  misc_RNA (1)...(19): siRNA sense strand
aggagaugcaagaugacaa

SEQ ID NO: 2506430 - RNA, 19 nt, Homo sapiens
  misc_RNA (1)...(19): siRNA sense strand
ggacaauggguguagccga

SEQ ID NO: 2506431 - RNA, 19 nt, Homo sapiens
  misc_RNA (1)...(19): siRNA sense strand
gcaagaugacaaugaggca

SEQ ID NO: 2506432 - RNA, 19 nt, Homo sapiens
  misc_RNA (1)...(19): siRNA sense strand
uagaaagggcccaggagca

SEQ ID NO: 2506433 - RNA, 19 nt, Homo sapiens
  misc_RNA (1)...(19): siRNA sense strand
aaggagaagaggaacaaga

SEQ ID NO: 2506434 - RNA, 19 nt, Homo sapiens
  misc_RNA (1)...(19): siRNA sense strand
agagaacaccaaaggcgaa

SEQ ID NO: 2506435 - RNA, 19 nt, Homo sapiens
  misc_RNA (1)...(19): siRNA sense strand
gaagagaagggaugcgcca

SEQ ID NO: 2506436 - RNA, 19 nt, Homo sapiens
  misc_RNA (1)...(19): siRNA sense strand
gacaauggguguagccgau

SEQ ID NO: 2506437 - RNA, 19 nt, Homo sapiens
  misc_RNA (1)...(19): siRNA sense strand
ggaaaccagaacacggcaa

SEQ ID NO: 2506438 - RNA, 19 nt, Homo sapiens
  misc_RNA (1)...(19): siRNA sense strand
agacgcaguaagcgagcua

SEQ ID NO: 2506439 - RNA, 19 nt, Homo sapiens
  misc_RNA (1)...(19): siRNA sense strand
uagcagaaauaaucgcaca

SEQ ID NO: 2506440 - RNA, 19 nt, Homo sapiens
  misc_RNA (1)...(19): siRNA sense strand
augaauguccagaugguuu

SEQ ID NO: 2506441 - RNA, 19 nt, Homo sapiens
  misc_RNA (1)...(19): siRNA sense strand
uggaauguguggaaggaug

SEQ ID NO: 2506442 - RNA, 19 nt, Homo sapiens
  misc_RNA (1)...(19): siRNA sense strand
guuggucauuggagcgaau

SEQ ID NO: 2506443 - RNA, 19 nt, Homo sapiens
  misc_RNA (1)...(19): siRNA sense strand
gcugaauccaggagaugca

SEQ ID NO: 2506444 - RNA, 19 nt, Homo sapiens
  misc_RNA (1)...(19): siRNA sense strand
agaaaaggaagcugauaga

SEQ ID NO: 2506445 - RNA, 19 nt, Homo sapiens
  misc_RNA (1)...(19): siRNA sense strand
agauggaaguggaggggaa

SEQ ID NO: 2506446 - RNA, 19 nt, Homo sapiens
  misc_RNA (1)...(19): siRNA sense strand
cugaaaaggagcagaauga

SEQ ID NO: 2506447 - RNA, 19 nt, Homo sapiens
  misc_RNA (1)...(19): siRNA sense strand
guggagauauucaggcaga

SEQ ID NO: 2506448 - RNA, 19 nt, Homo sapiens
  misc_RNA (1)...(19): siRNA sense strand
uggugaggcuacaggccaa

SEQ ID NO: 2506449 - RNA, 19 nt, Homo sapiens
  misc_RNA (1)...(19): siRNA sense strand
gagccuacugggcaggaaa

SEQ ID NO: 2506450 - RNA, 19 nt, Homo sapiens
  misc_RNA (1)...(19): siRNA sense strand
cucagaagguccagaggga

SEQ ID NO: 2506451 - RNA, 19 nt, Homo sapiens
  misc_RNA (1)...(19): siRNA sense strand
cagagaugguggugaggcu

SEQ ID NO: 2506452 - RNA, 19 nt, Homo sapiens
  misc_RNA (1)...(19): siRNA sense strand
ugucuaagagugugagcga

SEQ ID NO: 2506453 - RNA, 19 nt, Homo sapiens
  misc_RNA (1)...(19): siRNA sense strand
gcacagcauuccaagcaca

SEQ ID NO: 2506454 - RNA, 19 nt, Homo sapiens
  misc_RNA (1)...(19): siRNA sense strand
aggagcagaaugagauaga

SEQ ID NO: 2506455 - RNA, 19 nt, Homo sapiens
  misc_RNA (1)...(19): siRNA sense strand
cccagaucccagugaggaa

SEQ ID NO: 2506456 - RNA, 19 nt, Homo sapiens
  misc_RNA (1)...(19): siRNA sense strand
aggcagagaugguggugag

SEQ ID NO: 2506457 - RNA, 19 nt, Homo sapiens
  misc_RNA (1)...(19): siRNA sense strand
gaguggagauauucaggca

SEQ ID NO: 2506458 - RNA, 19 nt, Homo sapiens
  misc_RNA (1)...(19): siRNA sense strand
ccaaaccuucccagagcaa

SEQ ID NO: 2506459 - RNA, 19 nt, Homo sapiens
  misc_RNA (1)...(19): siRNA sense strand
gaacaaaccaguagagcug

SEQ ID NO: 2506460 - RNA, 19 nt, Homo sapiens
  misc_RNA (1)...(19): siRNA sense strand
aagugagacccuagaagaa

SEQ ID NO: 2506461 - RNA, 19 nt, Homo sapiens
  misc_RNA (1)...(19): siRNA sense strand
gcuaauaauuggaagaugg

SEQ ID NO: 2506462 - RNA, 19 nt, Homo sapiens
  misc_RNA (1)...(19): siRNA sense strand
aucuacaguaugugagaaa

SEQ ID NO: 2506463 - RNA, 19 nt, Homo sapiens
  misc_RNA (1)...(19): siRNA sense strand
cuacaguaugugagaaagu

SEQ ID NO: 2506464 - RNA, 19 nt, Homo sapiens
  misc_RNA (1)...(19): siRNA sense strand
ggcgagugaccgaggugaa

SEQ ID NO: 2506465 - RNA, 19 nt, Homo sapiens
  misc_RNA (1)...(19): siRNA sense strand
aauaauuggaagauggcuu

SEQ ID NO: 2506466 - RNA, 19 nt, Homo sapiens
  misc_RNA (1)...(19): siRNA sense strand
gaacaaaaugugaggcucu

SEQ ID NO: 2506467 - RNA, 19 nt, Homo sapiens
  misc_RNA (1)...(19): siRNA sense strand
gagugaccgaggugaagaa

SEQ ID NO: 2506468 - RNA, 19 nt, Homo sapiens
  misc_RNA (1)...(19): siRNA sense strand
acagaauaccagcagaaaa

SEQ ID NO: 2506469 - RNA, 19 nt, Homo sapiens
  misc_RNA (1)...(19): siRNA sense strand
ugugaggcucuguuggaaa

SEQ ID NO: 2506470 - RNA, 19 nt, Homo sapiens
  misc_RNA (1)...(19): siRNA sense strand
ugugagaaaguuuggacau

SEQ ID NO: 2506471 - RNA, 19 nt, Homo sapiens
  misc_RNA (1)...(19): siRNA sense strand
uccacuaauagaagacaua

SEQ ID NO: 2506472 - RNA, 19 nt, Homo sapiens
  misc_RNA (1)...(19): siRNA sense strand
cguaagaagaacucgcuga

SEQ ID NO: 2506473 - RNA, 19 nt, Homo sapiens
  misc_RNA (1)...(19): siRNA sense strand
ugucggagagcgaggcaga

SEQ ID NO: 2506474 - RNA, 19 nt, Homo sapiens
  misc_RNA (1)...(19): siRNA sense strand
ccuccaucaacgugcacaa

SEQ ID NO: 2506475 - RNA, 19 nt, Homo sapiens
  misc_RNA (1)...(19): siRNA sense strand
aguacucgcuggugcguga

SEQ ID NO: 2506476 - RNA, 19 nt, Homo sapiens
  misc_RNA (1)...(19): siRNA sense strand
gcaucaaaguuguuccugu

SEQ ID NO: 2506477 - RNA, 19 nt, Homo sapiens
  misc_RNA (1)...(19): siRNA sense strand
ggaugaagaagcugcucca

SEQ ID NO: 2506478 - RNA, 19 nt, Homo sapiens
  misc_RNA (1)...(19): siRNA sense strand
ccgaaaaggccaaaauuaa

SEQ ID NO: 2506479 - RNA, 19 nt, Homo sapiens
  misc_RNA (1)...(19): siRNA sense strand
cgaaaaggccaaaauuaaa

SEQ ID NO: 2506480 - RNA, 19 nt, Homo sapiens
  misc_RNA (1)...(19): siRNA sense strand
uggacaaauucgagcacca

SEQ ID NO: 2506481 - RNA, 19 nt, Homo sapiens
  misc_RNA (1)...(19): siRNA sense strand
acauggaaguugcgaggau

SEQ ID NO: 2506482 - RNA, 19 nt, Homo sapiens
  misc_RNA (1)...(19): siRNA sense strand
agaaccaggcggugaauuu

SEQ ID NO: 2506483 - RNA, 19 nt, Homo sapiens
  misc_RNA (1)...(19): siRNA sense strand
agaagaaccaggcggugaa

SEQ ID NO: 2506484 - RNA, 19 nt, Homo sapiens
  misc_RNA (1)...(19): siRNA sense strand
gaacugaguaggagugcca

SEQ ID NO: 2506485 - RNA, 19 nt, Homo sapiens
  misc_RNA (1)...(19): siRNA sense strand
cccagaaccaaguggauau

SEQ ID NO: 2506486 - RNA, 19 nt, Homo sapiens
  misc_RNA (1)...(19): siRNA sense strand
agaccaugaaucuggagaa

SEQ ID NO: 2506487 - RNA, 19 nt, Homo sapiens
  misc_RNA (1)...(19): siRNA sense strand
aggccauucagaagggcaa

SEQ ID NO: 2506488 - RNA, 19 nt, Homo sapiens
  misc_RNA (1)...(19): siRNA sense strand
cauggaaguugcgaggaua

SEQ ID NO: 2506489 - RNA, 19 nt, Homo sapiens
  misc_RNA (1)...(19): siRNA sense strand
cagaagaaccaggcgguga

SEQ ID NO: 2506490 - RNA, 19 nt, Homo sapiens
  misc_RNA (1)...(19): siRNA sense strand
agacgcagcaaauggaaga

SEQ ID NO: 2506491 - RNA, 19 nt, Homo sapiens
  misc_RNA (1)...(19): siRNA sense strand
gccaaagaacugaguagga

SEQ ID NO: 2506492 - RNA, 19 nt, Homo sapiens
  misc_RNA (1)...(19): siRNA sense strand
acugaguaggagugccaaa

SEQ ID NO: 2506493 - RNA, 19 nt, Homo sapiens
  misc_RNA (1)...(19): siRNA sense strand
cauugaagaccaugaaucu

SEQ ID NO: 2506494 - RNA, 19 nt, Homo sapiens
  misc_RNA (1)...(19): siRNA sense strand
cggccaaagaacugaguag

SEQ ID NO: 2506495 - RNA, 19 nt, Homo sapiens
  misc_RNA (1)...(19): siRNA sense strand
cggcggagcaggaugaacu

SEQ ID NO: 2506496 - RNA, 19 nt, Homo sapiens
  misc_RNA (1)...(19): siRNA sense strand
gccgaaaaggccaaaauua

SEQ ID NO: 2506497 - RNA, 19 nt, Homo sapiens
  misc_RNA (1)...(19): siRNA sense strand
cgaugggcaaggugaccaa

SEQ ID NO: 2506498 - RNA, 19 nt, Homo sapiens
  misc_RNA (1)...(19): siRNA sense strand
gugguuaagucgauggaug

SEQ ID NO: 2506499 - RNA, 19 nt, Homo sapiens
  misc_RNA (1)...(19): siRNA sense strand
cgacauugaagaccaugaa

SEQ ID NO: 2506500 - RNA, 19 nt, Homo sapiens
  misc_RNA (1)...(19): siRNA sense strand
auaugcugcuccaggaaau

SEQ ID NO: 2506501 - RNA, 19 nt, Homo sapiens
  misc_RNA (1)...(19): siRNA sense strand
ccuucgggaucaaguguga

SEQ ID NO: 2506502 - RNA, 19 nt, Homo sapiens
  misc_RNA (1)...(19): siRNA sense strand
ugaucaaacuagagaccaa

SEQ ID NO: 2506503 - RNA, 19 nt, Homo sapiens
  misc_RNA (1)...(19): siRNA sense strand
aggugacaguggugggaaa

SEQ ID NO: 2506504 - RNA, 19 nt, Homo sapiens
  misc_RNA (1)...(19): siRNA sense strand
gcugagaggagaugugcaa

SEQ ID NO: 2506505 - RNA, 19 nt, Homo sapiens
  misc_RNA (1)...(19): siRNA sense strand
uggcagaugaugaggugaa

SEQ ID NO: 2506506 - RNA, 19 nt, Homo sapiens
  misc_RNA (1)...(19): siRNA sense strand
ggaaaauggcuguugguau

SEQ ID NO: 2506507 - RNA, 19 nt, Homo sapiens
  misc_RNA (1)...(19): siRNA sense strand
gacaauugcaguugggaau

SEQ ID NO: 2506508 - RNA, 19 nt, Homo sapiens
  misc_RNA (1)...(19): siRNA sense strand
cuggaagauugaagacauu

SEQ ID NO: 2506509 - RNA, 19 nt, Homo sapiens
  misc_RNA (1)...(19): siRNA sense strand
cuagagaccaagaagacaa

SEQ ID NO: 2506510 - RNA, 19 nt, Homo sapiens
  misc_RNA (1)...(19): siRNA sense strand
ccuggaagauugaagacau

SEQ ID NO: 2506511 - RNA, 19 nt, Homo sapiens
  misc_RNA (1)...(19): siRNA sense strand
gagaccaguuugaagaaaa

SEQ ID NO: 2506512 - RNA, 19 nt, Homo sapiens
  misc_RNA (1)...(19): siRNA sense strand
aaggaaacauaguggcuca

SEQ ID NO: 2506513 - RNA, 19 nt, Homo sapiens
  misc_RNA (1)...(19): siRNA sense strand
gcaugaugguaaaggauac

SEQ ID NO: 2506514 - RNA, 19 nt, Homo sapiens
  misc_RNA (1)...(19): siRNA sense strand
ugggaaaauucaagacaau

SEQ ID NO: 2506515 - RNA, 19 nt, Homo sapiens
  misc_RNA (1)...(19): siRNA sense strand
caucaaacccuguguggca

SEQ ID NO: 2506516 - RNA, 19 nt, Homo sapiens
  misc_RNA (1)...(19): siRNA sense strand
ugacaauugcaguugggaa

SEQ ID NO: 2506517 - RNA, 19 nt, Homo sapiens
  misc_RNA (1)...(19): siRNA sense strand
accaauacugggaggacaa

SEQ ID NO: 2506518 - RNA, 19 nt, Homo sapiens
  misc_RNA (1)...(19): siRNA sense strand
caggagaagaacugguaca

SEQ ID NO: 2506519 - RNA, 19 nt, Homo sapiens
  misc_RNA (1)...(19): siRNA sense strand
ccacaauaugcccugguua

SEQ ID NO: 2506520 - RNA, 19 nt, Homo sapiens
  misc_RNA (1)...(19): siRNA sense strand
ccaacuauccacugagcau

SEQ ID NO: 2506521 - RNA, 19 nt, Homo sapiens
  misc_RNA (1)...(19): siRNA sense strand
augguaaaggauacagaaa

SEQ ID NO: 2506522 - RNA, 19 nt, Homo sapiens
  misc_RNA (1)...(19): siRNA sense strand
cggcugagaaauauccaaa

SEQ ID NO: 2506523 - RNA, 19 nt, Homo sapiens
  misc_RNA (1)...(19): siRNA sense strand
cauuauggauguaaaggca

SEQ ID NO: 2506524 - RNA, 19 nt, Homo sapiens
  misc_RNA (1)...(19): siRNA sense strand
gaugaugaggugaagguga

SEQ ID NO: 2506525 - RNA, 19 nt, Homo sapiens
  misc_RNA (1)...(19): siRNA sense strand
gcucaugguaauugcacuu

SEQ ID NO: 2506526 - RNA, 19 nt, Homo sapiens
  misc_RNA (1)...(19): siRNA sense strand
ucuccagcaugaugguaaa

SEQ ID NO: 2506527 - RNA, 19 nt, Homo sapiens
  misc_RNA (1)...(19): siRNA sense strand
ggaaaauucaagacaauca

SEQ ID NO: 2506528 - RNA, 19 nt, Homo sapiens
  misc_RNA (1)...(19): siRNA sense strand
gcuuauagaacugugcaaa

SEQ ID NO: 2506529 - RNA, 19 nt, Homo sapiens
  misc_RNA (1)...(19): siRNA sense strand
gcaugaaaucugugcucca

SEQ ID NO: 2506530 - RNA, 19 nt, Homo sapiens
  misc_RNA (1)...(19): siRNA sense strand
caggacugcucaugguaau

SEQ ID NO: 2506531 - RNA, 19 nt, Homo sapiens
  misc_RNA (1)...(19): siRNA sense strand
ccaucaaauccuuucagaa

SEQ ID NO: 2506532 - RNA, 19 nt, Homo sapiens
  misc_RNA (1)...(19): siRNA sense strand
cuauguuccuguaaagaca

SEQ ID NO: 2506533 - RNA, 19 nt, Homo sapiens
  misc_RNA (1)...(19): siRNA sense strand
cgugaagaugggaacagua

SEQ ID NO: 2506534 - RNA, 19 nt, Homo sapiens
  misc_RNA (1)...(19): siRNA sense strand
gagacauuccaaagcgaca

SEQ ID NO: 2506535 - RNA, 19 nt, Homo sapiens
  misc_RNA (1)...(19): siRNA sense strand
cugacucgugguugggaaa

SEQ ID NO: 2506536 - RNA, 19 nt, Homo sapiens
  misc_RNA (1)...(19): siRNA sense strand
aaacuagagaccaagaaga

SEQ ID NO: 2506537 - RNA, 19 nt, Homo sapiens
  misc_RNA (1)...(19): siRNA sense strand
ucuaauagcuuuggggaca

SEQ ID NO: 2506538 - RNA, 19 nt, Homo sapiens
  misc_RNA (1)...(19): siRNA sense strand
cagcaugaugguaaaggau

SEQ ID NO: 2506539 - RNA, 19 nt, Homo sapiens
  misc_RNA (1)...(19): siRNA sense strand
agacauuccagccaacaaa

SEQ ID NO: 2506540 - RNA, 19 nt, Homo sapiens
  misc_RNA (1)...(19): siRNA sense strand
gcuccaggcagcuuggcua

SEQ ID NO: 2506541 - RNA, 19 nt, Homo sapiens
  misc_RNA (1)...(19): siRNA sense strand
ugggaggacaagugguaca

SEQ ID NO: 2506542 - RNA, 19 nt, Homo sapiens
  misc_RNA (1)...(19): siRNA sense strand
gcugacucgugguugggaa

SEQ ID NO: 2506543 - RNA, 19 nt, Homo sapiens
  misc_RNA (1)...(19): siRNA sense strand
ucucaauguuggugaagac

SEQ ID NO: 2506544 - RNA, 19 nt, Homo sapiens
  misc_RNA (1)...(19): siRNA sense strand
uggagaauaaauuggguga

SEQ ID NO: 2506545 - RNA, 19 nt, Homo sapiens
  misc_RNA (1)...(19): siRNA sense strand
auauagaagcagcagaaaa

SEQ ID NO: 2506546 - RNA, 19 nt, Homo sapiens
  misc_RNA (1)...(19): siRNA sense strand
gagacucguuacugggcau

SEQ ID NO: 2506547 - RNA, 19 nt, Homo sapiens
  misc_RNA (1)...(19): siRNA sense strand
guguaaaaucugugggaaa

SEQ ID NO: 2506548 - RNA, 19 nt, Homo sapiens
  misc_RNA (1)...(19): siRNA sense strand
ugauaaugccaaugagaga

SEQ ID NO: 2506549 - RNA, 19 nt, Homo sapiens
  misc_RNA (1)...(19): siRNA sense strand
caaaagaacagcagggaga

SEQ ID NO: 2506550 - RNA, 19 nt, Homo sapiens
  misc_RNA (1)...(19): siRNA sense strand
cccuaauauucgaggugua

SEQ ID NO: 2506551 - RNA, 19 nt, Homo sapiens
  misc_RNA (1)...(19): siRNA sense strand
auauugagguacagggaca

SEQ ID NO: 2506552 - RNA, 19 nt, Homo sapiens
  misc_RNA (1)...(19): siRNA sense strand
cugagauggaacugguaaa

SEQ ID NO: 2506553 - RNA, 19 nt, Homo sapiens
  misc_RNA (1)...(19): siRNA sense strand
uuaaacagcugcauggcaa

SEQ ID NO: 2506554 - RNA, 19 nt, Homo sapiens
  misc_RNA (1)...(19): siRNA sense strand
ucuuauacaggcagugaua

SEQ ID NO: 2506555 - RNA, 19 nt, Homo sapiens
  misc_RNA (1)...(19): siRNA sense strand
cugaagacaguauggauau

SEQ ID NO: 2506556 - RNA, 19 nt, Homo sapiens
  misc_RNA (1)...(19): siRNA sense strand
ccaaaguguaccagggugu

SEQ ID NO: 2506557 - RNA, 19 nt, Homo sapiens
  misc_RNA (1)...(19): siRNA sense strand
agguguagacaaaggccua

SEQ ID NO: 2506558 - RNA, 19 nt, Homo sapiens
  misc_RNA (1)...(19): siRNA sense strand
caaugagagaaauguacaa

SEQ ID NO: 2506559 - RNA, 19 nt, Homo sapiens
  misc_RNA (1)...(19): siRNA sense strand
uaguaaagagggaugugaa

SEQ ID NO: 2506560 - RNA, 19 nt, Homo sapiens
  misc_RNA (1)...(19): siRNA sense strand
auaaugccaaugagagaaa

SEQ ID NO: 2506561 - RNA, 19 nt, Homo sapiens
  misc_RNA (1)...(19): siRNA sense strand
gaguaagugaaauagaaca

SEQ ID NO: 2506562 - RNA, 19 nt, Homo sapiens
  misc_RNA (1)...(19): siRNA sense strand
uggauauggaggacaguga

SEQ ID NO: 2506563 - RNA, 19 nt, Homo sapiens
  misc_RNA (1)...(19): siRNA sense strand
ggaaaacagaguaagugaa

SEQ ID NO: 2506564 - RNA, 19 nt, Homo sapiens
  misc_RNA (1)...(19): siRNA sense strand
uaaagagggaugugaacca

SEQ ID NO: 2506565 - RNA, 19 nt, Homo sapiens
  misc_RNA (1)...(19): siRNA sense strand
uggaauucccugagaugga

SEQ ID NO: 2506566 - RNA, 19 nt, Homo sapiens
  misc_RNA (1)...(19): siRNA sense strand
aucagagguuagaaguaaa

SEQ ID NO: 2506567 - RNA, 19 nt, Homo sapiens
  misc_RNA (1)...(19): siRNA sense strand
ccuuacaggaucaucuuaa

SEQ ID NO: 2506568 - RNA, 19 nt, Homo sapiens
  misc_RNA (1)...(19): siRNA sense strand
acaaaggccuacaguggca

SEQ ID NO: 2506569 - RNA, 19 nt, Homo sapiens
  misc_RNA (1)...(19): siRNA sense strand
guaccaggguguuucguca

SEQ ID NO: 2506570 - RNA, 19 nt, Homo sapiens
  misc_RNA (1)...(19): siRNA sense strand
gcacagagcuacagcaccu

SEQ ID NO: 2506571 - RNA, 19 nt, Homo sapiens
  misc_RNA (1)...(19): siRNA sense strand
ggguaaugacacaguccua

SEQ ID NO: 2506572 - RNA, 19 nt, Homo sapiens
  misc_RNA (1)...(19): siRNA sense strand
ggacagucagcuugcggaa

SEQ ID NO: 2506573 - RNA, 19 nt, Homo sapiens
  misc_RNA (1)...(19): siRNA sense strand
gugaaggagcaguggauac

SEQ ID NO: 2506574 - RNA, 19 nt, Homo sapiens
  misc_RNA (1)...(19): siRNA sense strand
ggcaggaggauguggcaga

SEQ ID NO: 2506575 - RNA, 19 nt, Homo sapiens
  misc_RNA (1)...(19): siRNA sense strand
aggucaugagacuggguua

SEQ ID NO: 2506576 - RNA, 19 nt, Homo sapiens
  misc_RNA (1)...(19): siRNA sense strand
ccgcagaucgagcgagagu

SEQ ID NO: 2506577 - RNA, 19 nt, Homo sapiens
  misc_RNA (1)...(19): siRNA sense strand
ugcaaagaccuucgggaga

SEQ ID NO: 2506578 - RNA, 19 nt, Homo sapiens
  misc_RNA (1)...(19): siRNA sense strand
ugcucaagcuggagagauc

SEQ ID NO: 2506579 - RNA, 19 nt, Homo sapiens
  misc_RNA (1)...(19): siRNA sense strand
caucaagcaccgaggacgu

SEQ ID NO: 2506580 - RNA, 19 nt, Homo sapiens
  misc_RNA (1)...(19): siRNA sense strand
gcauggagagccaagccua

SEQ ID NO: 2506581 - RNA, 19 nt, Homo sapiens
  misc_RNA (1)...(19): siRNA sense strand
agguacggguaaugacaca

SEQ ID NO: 2506582 - RNA, 19 nt, Homo sapiens
  misc_RNA (1)...(19): siRNA sense strand
gcaaggguguccagugcca

SEQ ID NO: 2506583 - RNA, 19 nt, Homo sapiens
  misc_RNA (1)...(19): siRNA sense strand
agaccaagggagaagagaa

SEQ ID NO: 2506584 - RNA, 19 nt, Homo sapiens
  misc_RNA (1)...(19): siRNA sense strand
agagcauguacaagggaua

SEQ ID NO: 2506585 - RNA, 19 nt, Homo sapiens
  misc_RNA (1)...(19): siRNA sense strand
ccaucuuccugguggugaa

SEQ ID NO: 2506586 - RNA, 19 nt, Homo sapiens
  misc_RNA (1)...(19): siRNA sense strand
agagcauuguggagaccaa

SEQ ID NO: 2506587 - RNA, 19 nt, Homo sapiens
  misc_RNA (1)...(19): siRNA sense strand
uguacaagggauauaacaa

SEQ ID NO: 2506588 - RNA, 19 nt, Homo sapiens
  misc_RNA (1)...(19): siRNA sense strand
gagaagagaagguggagag

SEQ ID NO: 2506589 - RNA, 19 nt, Homo sapiens
  misc_RNA (1)...(19): siRNA sense strand
caaugaagaugaugcugga

SEQ ID NO: 2506590 - RNA, 19 nt, Homo sapiens
  misc_RNA (1)...(19): siRNA sense strand
ggugucaguaugagagcau

SEQ ID NO: 2506591 - RNA, 19 nt, Homo sapiens
  misc_RNA (1)...(19): siRNA sense strand
gguccuggauucaugguca

SEQ ID NO: 2506592 - RNA, 19 nt, Homo sapiens
  misc_RNA (1)...(19): siRNA sense strand
uggugaacccugggcgaaa

SEQ ID NO: 2506593 - RNA, 19 nt, Homo sapiens
  misc_RNA (1)...(19): siRNA sense strand
uuguggagaccaagggaga

SEQ ID NO: 2506594 - RNA, 19 nt, Homo sapiens
  misc_RNA (1)...(19): siRNA sense strand
agggagaagagaaggugga

SEQ ID NO: 2506595 - RNA, 19 nt, Homo sapiens
  misc_RNA (1)...(19): siRNA sense strand
ggagaagagaagguggaga

SEQ ID NO: 2506596 - RNA, 19 nt, Homo sapiens
  misc_RNA (1)...(19): siRNA sense strand
ggugcugucuucuggguga

SEQ ID NO: 2506597 - RNA, 19 nt, Homo sapiens
  misc_RNA (1)...(19): siRNA sense strand
gguuguuauugaagaugau

SEQ ID NO: 2506598 - RNA, 19 nt, Homo sapiens
  misc_RNA (1)...(19): siRNA sense strand
ccacaggcacucaugggaa

SEQ ID NO: 2506599 - RNA, 19 nt, Homo sapiens
  misc_RNA (1)...(19): siRNA sense strand
aggaacugcaugaggcuga

SEQ ID NO: 2506600 - RNA, 19 nt, Homo sapiens
  misc_RNA (1)...(19): siRNA sense strand
aggcuuuguacgaggaaua

SEQ ID NO: 2506601 - RNA, 19 nt, Homo sapiens
  misc_RNA (1)...(19): siRNA sense strand
gcuauggagacgaggaaga

SEQ ID NO: 2506602 - RNA, 19 nt, Homo sapiens
  misc_RNA (1)...(19): siRNA sense strand
ggaacgaguauuugcaaaa

SEQ ID NO: 2506603 - RNA, 19 nt, Homo sapiens
  misc_RNA (1)...(19): siRNA sense strand
accagaaauugaaggagaa

SEQ ID NO: 2506604 - RNA, 19 nt, Homo sapiens
  misc_RNA (1)...(19): siRNA sense strand
gagacgaggaagagccauu

SEQ ID NO: 2506605 - RNA, 19 nt, Homo sapiens
  misc_RNA (1)...(19): siRNA sense strand
aaccagaaauugaaggaga

SEQ ID NO: 2506606 - RNA, 19 nt, Homo sapiens
  misc_RNA (1)...(19): siRNA sense strand
agacauuugggaugaacaa

SEQ ID NO: 2506607 - RNA, 19 nt, Homo sapiens
  misc_RNA (1)...(19): siRNA sense strand
ugggaugaacaaagaacua

SEQ ID NO: 2506608 - RNA, 19 nt, Homo sapiens
  misc_RNA (1)...(19): siRNA sense strand
ccagaaauugaaggagaaa

SEQ ID NO: 2506609 - RNA, 19 nt, Homo sapiens
  misc_RNA (1)...(19): siRNA sense strand
acguaguggcaguuguaaa

SEQ ID NO: 2506610 - RNA, 19 nt, Homo sapiens
  misc_RNA (1)...(19): siRNA sense strand
cuaccaaacuggaacgagu

SEQ ID NO: 2506611 - RNA, 19 nt, Homo sapiens
  misc_RNA (1)...(19): siRNA sense strand
auacaaagagaaugcaaca

SEQ ID NO: 2506612 - RNA, 19 nt, Homo sapiens
  misc_RNA (1)...(19): siRNA sense strand
acguauagcucgucaucga

SEQ ID NO: 2506613 - RNA, 19 nt, Homo sapiens
  misc_RNA (1)...(19): siRNA sense strand
ggaugaacaaagaacuaau

SEQ ID NO: 2506614 - RNA, 19 nt, Homo sapiens
  misc_RNA (1)...(19): siRNA sense strand
gaagaaacacguaguggca

SEQ ID NO: 2506615 - RNA, 19 nt, Homo sapiens
  misc_RNA (1)...(19): siRNA sense strand
agacauuucucuugggaag

SEQ ID NO: 2506616 - RNA, 19 nt, Homo sapiens
  misc_RNA (1)...(19): siRNA sense strand
gcaaguagacauuugggau

SEQ ID NO: 2506617 - RNA, 19 nt, Homo sapiens
  misc_RNA (1)...(19): siRNA sense strand
uggaacgaguauuugcaaa

SEQ ID NO: 2506618 - RNA, 19 nt, Homo sapiens
  misc_RNA (1)...(19): siRNA sense strand
agaaacacguaguggcagu

SEQ ID NO: 2506619 - RNA, 19 nt, Homo sapiens
  misc_RNA (1)...(19): siRNA sense strand
ccgagaugaaggugaagau

SEQ ID NO: 2506620 - RNA, 19 nt, Homo sapiens
  misc_RNA (1)...(19): siRNA sense strand
cacuguuggugaugacaaa

SEQ ID NO: 2506621 - RNA, 19 nt, Homo sapiens
  misc_RNA (1)...(19): siRNA sense strand
cggaagagcaaccgagaug

SEQ ID NO: 2506622 - RNA, 19 nt, Homo sapiens
  misc_RNA (1)...(19): siRNA sense strand
aaucuaacucagcggaauu

SEQ ID NO: 2506623 - RNA, 19 nt, Homo sapiens
  misc_RNA (1)...(19): siRNA sense strand
gugauggagagguuagaau

SEQ ID NO: 2506624 - RNA, 19 nt, Homo sapiens
  misc_RNA (1)...(19): siRNA sense strand
cguaguggcaguuguaaaa

SEQ ID NO: 2506625 - RNA, 19 nt, Homo sapiens
  misc_RNA (1)...(19): siRNA sense strand
gugaagaugcugagccgga

SEQ ID NO: 2506626 - RNA, 19 nt, Homo sapiens
  misc_RNA (1)...(19): siRNA sense strand
ggaaucuaacucagcggaa

SEQ ID NO: 2506627 - RNA, 19 nt, Homo sapiens
  misc_RNA (1)...(19): siRNA sense strand
aggcuauggagacgaggaa

SEQ ID NO: 2506628 - RNA, 19 nt, Homo sapiens
  misc_RNA (1)...(19): siRNA sense strand
gaaucuuuccuguagacaa

SEQ ID NO: 2506629 - RNA, 19 nt, Homo sapiens
  misc_RNA (1)...(19): siRNA sense strand
gaucugaugaaaugaacau

SEQ ID NO: 2506630 - RNA, 19 nt, Homo sapiens
  misc_RNA (1)...(19): siRNA sense strand
agaugaaggugaagaugcu

SEQ ID NO: 2506631 - RNA, 19 nt, Homo sapiens
  misc_RNA (1)...(19): siRNA sense strand
acaugaaggcuuuguacga

SEQ ID NO: 2506632 - RNA, 19 nt, Homo sapiens
  misc_RNA (1)...(19): siRNA sense strand
guauauuauguguggaucu

SEQ ID NO: 2506633 - RNA, 19 nt, Homo sapiens
  misc_RNA (1)...(19): siRNA sense strand
caauauuaggaaagacagu

SEQ ID NO: 2506634 - RNA, 19 nt, Homo sapiens
  misc_RNA (1)...(19): siRNA sense strand
ccguacaauacaagcacau

SEQ ID NO: 2506635 - RNA, 19 nt, Homo sapiens
  misc_RNA (1)...(19): siRNA sense strand
gucgaagcagggagguaua

SEQ ID NO: 2506636 - RNA, 19 nt, Homo sapiens
  misc_RNA (1)...(19): siRNA sense strand
cagccaaggauuauaacca

SEQ ID NO: 2506637 - RNA, 19 nt, Homo sapiens
  misc_RNA (1)...(19): siRNA sense strand
agagaaugcaacauguuau

SEQ ID NO: 2506638 - RNA, 19 nt, Homo sapiens
  misc_RNA (1)...(19): siRNA sense strand
aguuggacuuacagagagu

SEQ ID NO: 2506639 - RNA, 19 nt, Homo sapiens
  misc_RNA (1)...(19): siRNA sense strand
cugcagugcuugaugugga

SEQ ID NO: 2506640 - RNA, 19 nt, Homo sapiens
  misc_RNA (1)...(19): siRNA sense strand
aaguagacauuugggauga

SEQ ID NO: 2506641 - RNA, 19 nt, Homo sapiens
  misc_RNA (1)...(19): siRNA sense strand
aguauaaagugaaggagga

SEQ ID NO: 2506642 - RNA, 19 nt, Homo sapiens
  misc_RNA (1)...(19): siRNA sense strand
ggacuaaauggaagcgaca

SEQ ID NO: 2506643 - RNA, 19 nt, Homo sapiens
  misc_RNA (1)...(19): siRNA sense strand
ggaagggacuguuuggaga

SEQ ID NO: 2506644 - RNA, 19 nt, Homo sapiens
  misc_RNA (1)...(19): siRNA sense strand
aagugaaggaggagggcga

SEQ ID NO: 2506645 - RNA, 19 nt, Homo sapiens
  misc_RNA (1)...(19): siRNA sense strand
acuaaauggaagcgacaga

SEQ ID NO: 2506646 - RNA, 19 nt, Homo sapiens
  misc_RNA (1)...(19): siRNA sense strand
ggacaaaaguggcagcaac

SEQ ID NO: 2506647 - RNA, 19 nt, Homo sapiens
  misc_RNA (1)...(19): siRNA sense strand
uuagagacaagcuggacaa

SEQ ID NO: 2506648 - RNA, 19 nt, Homo sapiens
  misc_RNA (1)...(19): siRNA sense strand
ccgcaggacuaaauggaag

SEQ ID NO: 2506649 - RNA, 19 nt, Homo sapiens
  misc_RNA (1)...(19): siRNA sense strand
gugcauauuaacaagggua

SEQ ID NO: 2506650 - RNA, 19 nt, Homo sapiens
  misc_RNA (1)...(19): siRNA sense strand
cugcaggaggacagcuuaa

SEQ ID NO: 2506651 - RNA, 19 nt, Homo sapiens
  misc_RNA (1)...(19): siRNA sense strand
uaauaaaggaaaugagccu

SEQ ID NO: 2506652 - RNA, 19 nt, Homo sapiens
  misc_RNA (1)...(19): siRNA sense strand
agacaucucuucaaggaca

SEQ ID NO: 2506653 - RNA, 19 nt, Homo sapiens
  misc_RNA (1)...(19): siRNA sense strand
uuucgaggucgcagauaua

SEQ ID NO: 2506654 - RNA, 19 nt, Homo sapiens
  misc_RNA (1)...(19): siRNA sense strand
ccucgugcucguagaucaa

SEQ ID NO: 2506655 - RNA, 19 nt, Homo sapiens
  misc_RNA (1)...(19): siRNA sense strand
cgcagauauaaguguuuaa

SEQ ID NO: 2506656 - RNA, 19 nt, Homo sapiens
  misc_RNA (1)...(19): siRNA sense strand
acagaaagcagucagcaga

SEQ ID NO: 2506657 - RNA, 19 nt, Homo sapiens
  misc_RNA (1)...(19): siRNA sense strand
ccaacauagcuaauacaga

SEQ ID NO: 2506658 - RNA, 19 nt, Homo sapiens
  misc_RNA (1)...(19): siRNA sense strand
gauccuaaaaugucugaaa

SEQ ID NO: 2506659 - RNA, 19 nt, Homo sapiens
  misc_RNA (1)...(19): siRNA sense strand
ccagugaaguugagagacu

SEQ ID NO: 2506660 - RNA, 19 nt, Homo sapiens
  misc_RNA (1)...(19): siRNA sense strand
agaaagaauacaagccaga

SEQ ID NO: 2506661 - RNA, 19 nt, Homo sapiens
  misc_RNA (1)...(19): siRNA sense strand
gucacaaagaagaaacaaa

SEQ ID NO: 2506662 - RNA, 19 nt, Homo sapiens
  misc_RNA (1)...(19): siRNA sense strand
uggauugugaggagaaaga

SEQ ID NO: 2506663 - RNA, 19 nt, Homo sapiens
  misc_RNA (1)...(19): siRNA sense strand
augauuuccugaagagaca

SEQ ID NO: 2506664 - RNA, 19 nt, Homo sapiens
  misc_RNA (1)...(19): siRNA sense strand
gcgucaaaggaguugugaa

SEQ ID NO: 2506665 - RNA, 19 nt, Homo sapiens
  misc_RNA (1)...(19): siRNA sense strand
gaggagaaagacugggacu

SEQ ID NO: 2506666 - RNA, 19 nt, Homo sapiens
  misc_RNA (1)...(19): siRNA sense strand
ucgcaacugcagaagaaau

SEQ ID NO: 2506667 - RNA, 19 nt, Homo sapiens
  misc_RNA (1)...(19): siRNA sense strand
ccuggauugugaggagaaa

SEQ ID NO: 2506668 - RNA, 19 nt, Homo sapiens
  misc_RNA (1)...(19): siRNA sense strand
ugccaaagucauagccaca

SEQ ID NO: 2506669 - RNA, 19 nt, Homo sapiens
  misc_RNA (1)...(19): siRNA sense strand
caagaaagaauacaagcca

SEQ ID NO: 2506670 - RNA, 19 nt, Homo sapiens
  misc_RNA (1)...(19): siRNA sense strand
uggccauguuggaggacaa

SEQ ID NO: 2506671 - RNA, 19 nt, Homo sapiens
  misc_RNA (1)...(19): siRNA sense strand
agaaggagcucauugccaa

SEQ ID NO: 2506672 - RNA, 19 nt, Homo sapiens
  misc_RNA (1)...(19): siRNA sense strand
guguggaacaacuggagaa

SEQ ID NO: 2506673 - RNA, 19 nt, Homo sapiens
  misc_RNA (1)...(19): siRNA sense strand
gagcaaaggaagaaggagc

SEQ ID NO: 2506674 - RNA, 19 nt, Homo sapiens
  misc_RNA (1)...(19): siRNA sense strand
ccaaguuagaucaggcaga

SEQ ID NO: 2506675 - RNA, 19 nt, Homo sapiens
  misc_RNA (1)...(19): siRNA sense strand
cagaaaaggagaaggugga

SEQ ID NO: 2506676 - RNA, 19 nt, Homo sapiens
  misc_RNA (1)...(19): siRNA sense strand
gaggacaauccaaagguca

SEQ ID NO: 2506677 - RNA, 19 nt, Homo sapiens
  misc_RNA (1)...(19): siRNA sense strand
aguuagaucaggcagaaaa

SEQ ID NO: 2506678 - RNA, 19 nt, Homo sapiens
  misc_RNA (1)...(19): siRNA sense strand
aggcucugacggaggagaa

SEQ ID NO: 2506679 - RNA, 19 nt, Homo sapiens
  misc_RNA (1)...(19): siRNA sense strand
cugaauaugcagagaaaau

SEQ ID NO: 2506680 - RNA, 19 nt, Homo sapiens
  misc_RNA (1)...(19): siRNA sense strand
cugaaauacgccagcaaau

SEQ ID NO: 2506681 - RNA, 19 nt, Homo sapiens
  misc_RNA (1)...(19): siRNA sense strand
cugaagaggaugcugggaa

SEQ ID NO: 2506682 - RNA, 19 nt, Homo sapiens
  misc_RNA (1)...(19): siRNA sense strand
agagaaaauuccuggugaa

SEQ ID NO: 2506683 - RNA, 19 nt, Homo sapiens
  misc_RNA (1)...(19): siRNA sense strand
cagacauagaccugaagaa

SEQ ID NO: 2506684 - RNA, 19 nt, Homo sapiens
  misc_RNA (1)...(19): siRNA sense strand
cugaagaagcuggcugaaa

SEQ ID NO: 2506685 - RNA, 19 nt, Homo sapiens
  misc_RNA (1)...(19): siRNA sense strand
gaucagaccucuaugcugu

SEQ ID NO: 2506686 - RNA, 19 nt, Homo sapiens
  misc_RNA (1)...(19): siRNA sense strand
acauugaguccgggugaua

SEQ ID NO: 2506687 - RNA, 19 nt, Homo sapiens
  misc_RNA (1)...(19): siRNA sense strand
cugaaguagcaaaggaaug

SEQ ID NO: 2506688 - RNA, 19 nt, Homo sapiens
  misc_RNA (1)...(19): siRNA sense strand
cagaagaggaggaggauuu

SEQ ID NO: 2506689 - RNA, 19 nt, Homo sapiens
  misc_RNA (1)...(19): siRNA sense strand
ucaccgaggcugagagcaa

SEQ ID NO: 2506690 - RNA, 19 nt, Homo sapiens
  misc_RNA (1)...(19): siRNA sense strand
ccgcagaagaggaggagga

SEQ ID NO: 2506691 - RNA, 19 nt, Homo sapiens
  misc_RNA (1)...(19): siRNA sense strand
ggaaggaggcagagagcug

SEQ ID NO: 2506692 - RNA, 19 nt, Homo sapiens
  misc_RNA (1)...(19): siRNA sense strand
ugcuuaacgugcagaacaa

SEQ ID NO: 2506693 - RNA, 19 nt, Homo sapiens
  misc_RNA (1)...(19): siRNA sense strand
ugaaggaggucgaugagca

SEQ ID NO: 2506694 - RNA, 19 nt, Homo sapiens
  misc_RNA (1)...(19): siRNA sense strand
acaccguggucgagcccua

SEQ ID NO: 2506695 - RNA, 19 nt, Homo sapiens
  misc_RNA (1)...(19): siRNA sense strand
aagaauacccugaucgcau

SEQ ID NO: 2506696 - RNA, 19 nt, Homo sapiens
  misc_RNA (1)...(19): siRNA sense strand
ccaucaguugguagagaau

SEQ ID NO: 2506697 - RNA, 19 nt, Homo sapiens
  misc_RNA (1)...(19): siRNA sense strand
gguacacaggcgagggcau

SEQ ID NO: 2506698 - RNA, 19 nt, Homo sapiens
  misc_RNA (1)...(19): siRNA sense strand
gcagguaacaacugggcca

SEQ ID NO: 2506699 - RNA, 19 nt, Homo sapiens
  misc_RNA (1)...(19): siRNA sense strand
gugcagaacaagaacagca

SEQ ID NO: 2506700 - RNA, 19 nt, Homo sapiens
  misc_RNA (1)...(19): siRNA sense strand
gcagaagaggaggaggauu

SEQ ID NO: 2506701 - RNA, 19 nt, Homo sapiens
  misc_RNA (1)...(19): siRNA sense strand
caguagaggaggaggugaa

SEQ ID NO: 2506702 - RNA, 19 nt, Homo sapiens
  misc_RNA (1)...(19): siRNA sense strand
augaagaacugcugggaga

SEQ ID NO: 2506703 - RNA, 19 nt, Homo sapiens
  misc_RNA (1)...(19): siRNA sense strand
ggaagaaggccaaggcuca

SEQ ID NO: 2506704 - RNA, 19 nt, Homo sapiens
  misc_RNA (1)...(19): siRNA sense strand
ggucaaauaccuagccaca

SEQ ID NO: 2506705 - RNA, 19 nt, Homo sapiens
  misc_RNA (1)...(19): siRNA sense strand
ggaagauggugguggccca

SEQ ID NO: 2506706 - RNA, 19 nt, Homo sapiens
  misc_RNA (1)...(19): siRNA sense strand
ugacagaguacguggagca

SEQ ID NO: 2506707 - RNA, 19 nt, Homo sapiens
  misc_RNA (1)...(19): siRNA sense strand
uggcaugaauccucgggaa

SEQ ID NO: 2506708 - RNA, 19 nt, Homo sapiens
  misc_RNA (1)...(19): siRNA sense strand
cgaccgaggaggagaucca

SEQ ID NO: 2506709 - RNA, 19 nt, Homo sapiens
  misc_RNA (1)...(19): siRNA sense strand
gagccaacccagaggccau

SEQ ID NO: 2506710 - RNA, 19 nt, Homo sapiens
  misc_RNA (1)...(19): siRNA sense strand
cugaaagagcacuguguca

SEQ ID NO: 2506711 - RNA, 19 nt, Homo sapiens
  misc_RNA (1)...(19): siRNA sense strand
ggguugaccagaaggagau

SEQ ID NO: 2506712 - RNA, 19 nt, Homo sapiens
  misc_RNA (1)...(19): siRNA sense strand
ggugaaagcccucaaggca

SEQ ID NO: 2506713 - RNA, 19 nt, Homo sapiens
  misc_RNA (1)...(19): siRNA sense strand
ugaaagcccucaaggcaga

SEQ ID NO: 2506714 - RNA, 19 nt, Homo sapiens
  misc_RNA (1)...(19): siRNA sense strand
gcaagauggaugacgagga

SEQ ID NO: 2506715 - RNA, 19 nt, Homo sapiens
  misc_RNA (1)...(19): siRNA sense strand
cggguugaccagaaggaga

SEQ ID NO: 2506716 - RNA, 19 nt, Homo sapiens
  misc_RNA (1)...(19): siRNA sense strand
ccagagugccugaaggagu

SEQ ID NO: 2506717 - RNA, 19 nt, Homo sapiens
  misc_RNA (1)...(19): siRNA sense strand
agaaugagagccugggcau

SEQ ID NO: 2506718 - RNA, 19 nt, Homo sapiens
  misc_RNA (1)...(19): siRNA sense strand
cggcauauccggcagcaca

SEQ ID NO: 2506719 - RNA, 19 nt, Homo sapiens
  misc_RNA (1)...(19): siRNA sense strand
gaggaggguucuaguggca

SEQ ID NO: 2506720 - RNA, 19 nt, Homo sapiens
  misc_RNA (1)...(19): siRNA sense strand
aggagcggguggagaggau

SEQ ID NO: 2506721 - RNA, 19 nt, Homo sapiens
  misc_RNA (1)...(19): siRNA sense strand
agcagauggucauggucaa

SEQ ID NO: 2506722 - RNA, 19 nt, Homo sapiens
  misc_RNA (1)...(19): siRNA sense strand
agccauuugugcaggccaa

SEQ ID NO: 2506723 - RNA, 19 nt, Homo sapiens
  misc_RNA (1)...(19): siRNA sense strand
cagcagauggucaugguca

SEQ ID NO: 2506724 - RNA, 19 nt, Homo sapiens
  misc_RNA (1)...(19): siRNA sense strand
gcauccaccggcaggacaa

SEQ ID NO: 2506725 - RNA, 19 nt, Homo sapiens
  misc_RNA (1)...(19): siRNA sense strand
agggcaagauggaugacga

SEQ ID NO: 2506726 - RNA, 19 nt, Homo sapiens
  misc_RNA (1)...(19): siRNA sense strand
cagccagccucaugagcca

SEQ ID NO: 2506727 - RNA, 19 nt, Homo sapiens
  misc_RNA (1)...(19): siRNA sense strand
gguucaugguaaugugugu

SEQ ID NO: 2506728 - RNA, 19 nt, Homo sapiens
  misc_RNA (1)...(19): siRNA sense strand
gagaucugggcgaggguca

SEQ ID NO: 2506729 - RNA, 19 nt, Homo sapiens
  misc_RNA (1)...(19): siRNA sense strand
agaucugcuuugacggaga

SEQ ID NO: 2506730 - RNA, 19 nt, Homo sapiens
  misc_RNA (1)...(19): siRNA sense strand
gggaagaaggccaaggcuc

SEQ ID NO: 2506731 - RNA, 19 nt, Homo sapiens
  misc_RNA (1)...(19): siRNA sense strand
gcgucggacccuacgguuu

SEQ ID NO: 2506732 - RNA, 19 nt, Homo sapiens
  misc_RNA (1)...(19): siRNA sense strand
cugaaggaguauaaguucu

SEQ ID NO: 2506733 - RNA, 19 nt, Homo sapiens
  misc_RNA (1)...(19): siRNA sense strand
gugugaucuuggaggacua

SEQ ID NO: 2506734 - RNA, 19 nt, Homo sapiens
  misc_RNA (1)...(19): siRNA sense strand
guggagaugaagaaagcaa

SEQ ID NO: 2506735 - RNA, 19 nt, Homo sapiens
  misc_RNA (1)...(19): siRNA sense strand
agaacaagagcaagcaaaa

SEQ ID NO: 2506736 - RNA, 19 nt, Homo sapiens
  misc_RNA (1)...(19): siRNA sense strand
gcacccuguuccugggcaa

SEQ ID NO: 2506737 - RNA, 19 nt, Homo sapiens
  misc_RNA (1)...(19): siRNA sense strand
uggcuaaagcagaaggugu

SEQ ID NO: 2506738 - RNA, 19 nt, Homo sapiens
  misc_RNA (1)...(19): siRNA sense strand
agccugagaacaagagcaa

SEQ ID NO: 2506739 - RNA, 19 nt, Homo sapiens
  misc_RNA (1)...(19): siRNA sense strand
gcuccaaacugcuggcuac

SEQ ID NO: 2506740 - RNA, 19 nt, Homo sapiens
  misc_RNA (1)...(19): siRNA sense strand
cgcuggaggagguggucaa

SEQ ID NO: 2506741 - RNA, 19 nt, Homo sapiens
  misc_RNA (1)...(19): siRNA sense strand
cuguaaugaucgcugccua

SEQ ID NO: 2506742 - RNA, 19 nt, Homo sapiens
  misc_RNA (1)...(19): siRNA sense strand
cuggaaucccggagcugaa

SEQ ID NO: 2506743 - RNA, 19 nt, Homo sapiens
  misc_RNA (1)...(19): siRNA sense strand
augugaggguggagcacuu

SEQ ID NO: 2506744 - RNA, 19 nt, Homo sapiens
  misc_RNA (1)...(19): siRNA sense strand
ccaccuugcaccaggcaca

SEQ ID NO: 2506745 - RNA, 19 nt, Homo sapiens
  misc_RNA (1)...(19): siRNA sense strand
uggaggacuaccuggauau

SEQ ID NO: 2506746 - RNA, 19 nt, Homo sapiens
  misc_RNA (1)...(19): siRNA sense strand
agaccauguuggcgggugu

SEQ ID NO: 2506747 - RNA, 19 nt, Homo sapiens
  misc_RNA (1)...(19): siRNA sense strand
aggcgaguccggaggaaau

SEQ ID NO: 2506748 - RNA, 19 nt, Homo sapiens
  misc_RNA (1)...(19): siRNA sense strand
gcacacagccucagccuca

SEQ ID NO: 2506749 - RNA, 19 nt, Homo sapiens
  misc_RNA (1)...(19): siRNA sense strand
ucgagucgcugguggccaa

SEQ ID NO: 2506750 - RNA, 19 nt, Homo sapiens
  misc_RNA (1)...(19): siRNA sense strand
acacuagccccgagaguuu

SEQ ID NO: 2506751 - RNA, 19 nt, Homo sapiens
  misc_RNA (1)...(19): siRNA sense strand
guuucagaaccgaagaaca

SEQ ID NO: 2506752 - RNA, 19 nt, Homo sapiens
  misc_RNA (1)...(19): siRNA sense strand
ggcucagauucgcaacaaa

SEQ ID NO: 2506753 - RNA, 19 nt, Homo sapiens
  misc_RNA (1)...(19): siRNA sense strand
ugacaguaaaggagggaaa

SEQ ID NO: 2506754 - RNA, 19 nt, Homo sapiens
  misc_RNA (1)...(19): siRNA sense strand
gguuacagucaaagggauu

SEQ ID NO: 2506755 - RNA, 19 nt, Homo sapiens
  misc_RNA (1)...(19): siRNA sense strand
ugaaauugcuugaugccaa

SEQ ID NO: 2506756 - RNA, 19 nt, Homo sapiens
  misc_RNA (1)...(19): siRNA sense strand
gauuuaaccuucuggccaa

SEQ ID NO: 2506757 - RNA, 19 nt, Homo sapiens
  misc_RNA (1)...(19): siRNA sense strand
uagcagaacaucagcgcaa

SEQ ID NO: 2506758 - RNA, 19 nt, Homo sapiens
  misc_RNA (1)...(19): siRNA sense strand
cagcagugugucagauaua

SEQ ID NO: 2506759 - RNA, 19 nt, Homo sapiens
  misc_RNA (1)...(19): siRNA sense strand
ugaugauggaauaaggaaa

SEQ ID NO: 2506760 - RNA, 19 nt, Homo sapiens
  misc_RNA (1)...(19): siRNA sense strand
gugcaaucagugacaguaa

SEQ ID NO: 2506761 - RNA, 19 nt, Homo sapiens
  misc_RNA (1)...(19): siRNA sense strand
uguuagaagucgaguggca

SEQ ID NO: 2506762 - RNA, 19 nt, Homo sapiens
  misc_RNA (1)...(19): siRNA sense strand
cgagacagccagagacaca

SEQ ID NO: 2506763 - RNA, 19 nt, Homo sapiens
  misc_RNA (1)...(19): siRNA sense strand
uggcaaauguagcagaaca

SEQ ID NO: 2506764 - RNA, 19 nt, Homo sapiens
  misc_RNA (1)...(19): siRNA sense strand
cauuaaauaugguggugca

SEQ ID NO: 2506765 - RNA, 19 nt, Homo sapiens
  misc_RNA (1)...(19): siRNA sense strand
ccaaggggacuuugagaaa

SEQ ID NO: 2506766 - RNA, 19 nt, Homo sapiens
  misc_RNA (1)...(19): siRNA sense strand
gugcaaaucuuaaaccaca

SEQ ID NO: 2506767 - RNA, 19 nt, Homo sapiens
  misc_RNA (1)...(19): siRNA sense strand
cgccauauagauagaaauu

SEQ ID NO: 2506768 - RNA, 19 nt, Homo sapiens
  misc_RNA (1)...(19): siRNA sense strand
agauggaggaagugcaaga

SEQ ID NO: 2506769 - RNA, 19 nt, Homo sapiens
  misc_RNA (1)...(19): siRNA sense strand
gggcgagagucuauagcca

SEQ ID NO: 2506770 - RNA, 19 nt, Homo sapiens
  misc_RNA (1)...(19): siRNA sense strand
uaugagaagacgacaggaa

SEQ ID NO: 2506771 - RNA, 19 nt, Homo sapiens
  misc_RNA (1)...(19): siRNA sense strand
gaaacaaaggauggaguau

SEQ ID NO: 2506772 - RNA, 19 nt, Homo sapiens
  misc_RNA (1)...(19): siRNA sense strand
cggaaagaugcuaugauca

SEQ ID NO: 2506773 - RNA, 19 nt, Homo sapiens
  misc_RNA (1)...(19): siRNA sense strand
ugagaagacgacaggaaaa

SEQ ID NO: 2506774 - RNA, 19 nt, Homo sapiens
  misc_RNA (1)...(19): siRNA sense strand
augagaagacgacaggaaa

SEQ ID NO: 2506775 - RNA, 19 nt, Homo sapiens
  misc_RNA (1)...(19): siRNA sense strand
gcgcaaacaggaaauaaaa

SEQ ID NO: 2506776 - RNA, 19 nt, Homo sapiens
  misc_RNA (1)...(19): siRNA sense strand
gguucuaaaggaugauauu

SEQ ID NO: 2506777 - RNA, 19 nt, Homo sapiens
  misc_RNA (1)...(19): siRNA sense strand
cggaagcaaugguggaaag

SEQ ID NO: 2506778 - RNA, 19 nt, Homo sapiens
  misc_RNA (1)...(19): siRNA sense strand
ggaacuuggaugaaagcca

SEQ ID NO: 2506779 - RNA, 19 nt, Homo sapiens
  misc_RNA (1)...(19): siRNA sense strand
gucaaaggucccagcaaau

SEQ ID NO: 2506780 - RNA, 19 nt, Homo sapiens
  misc_RNA (1)...(19): siRNA sense strand
aagaaacaccugagaugau

SEQ ID NO: 2506781 - RNA, 19 nt, Homo sapiens
  misc_RNA (1)...(19): siRNA sense strand
auuaaauggugcacaacuu

SEQ ID NO: 2506782 - RNA, 19 nt, Homo sapiens
  misc_RNA (1)...(19): siRNA sense strand
aguaaaggagggaaacaga

SEQ ID NO: 2506783 - RNA, 19 nt, Homo sapiens
  misc_RNA (1)...(19): siRNA sense strand
aagauuauccacagagcau

SEQ ID NO: 2506784 - RNA, 19 nt, Homo sapiens
  misc_RNA (1)...(19): siRNA sense strand
ccgaguuacaagaaauuau

SEQ ID NO: 2506785 - RNA, 19 nt, Homo sapiens
  misc_RNA (1)...(19): siRNA sense strand
uaucaugagcaggaagaaa

SEQ ID NO: 2506786 - RNA, 19 nt, Homo sapiens
  misc_RNA (1)...(19): siRNA sense strand
gaaaggaccaggagagggu

SEQ ID NO: 2506787 - RNA, 19 nt, Homo sapiens
  misc_RNA (1)...(19): siRNA sense strand
ccacaauggaacaagaucu

SEQ ID NO: 2506788 - RNA, 19 nt, Homo sapiens
  misc_RNA (1)...(19): siRNA sense strand
cagcaaauauaacacguca

SEQ ID NO: 2506789 - RNA, 19 nt, Homo sapiens
  misc_RNA (1)...(19): siRNA sense strand
gaagaaauuccaugugcca

SEQ ID NO: 2506790 - RNA, 19 nt, Homo sapiens
  misc_RNA (1)...(19): siRNA sense strand
ccagacggacagagaacau

SEQ ID NO: 2506791 - RNA, 19 nt, Homo sapiens
  misc_RNA (1)...(19): siRNA sense strand
agaaauuaugagaagacga

SEQ ID NO: 2506792 - RNA, 19 nt, Homo sapiens
  misc_RNA (1)...(19): siRNA sense strand
gaugaaagccagagcagag

SEQ ID NO: 2506793 - RNA, 19 nt, Homo sapiens
  misc_RNA (1)...(19): siRNA sense strand
caucagcgcaaacaggaaa

SEQ ID NO: 2506794 - RNA, 19 nt, Homo sapiens
  misc_RNA (1)...(19): siRNA sense strand
aaguggagacucuggauuu

SEQ ID NO: 2506795 - RNA, 19 nt, Homo sapiens
  misc_RNA (1)...(19): siRNA sense strand
agaacaagccagaucuuca

SEQ ID NO: 2506796 - RNA, 19 nt, Homo sapiens
  misc_RNA (1)...(19): siRNA sense strand
ugugaugagguuaaggcaa

SEQ ID NO: 2506797 - RNA, 19 nt, Homo sapiens
  misc_RNA (1)...(19): siRNA sense strand
agcgcaaacaggaaauaaa

SEQ ID NO: 2506798 - RNA, 19 nt, Homo sapiens
  misc_RNA (1)...(19): siRNA sense strand
gucaauagucuuggaguau

SEQ ID NO: 2506799 - RNA, 19 nt, Homo sapiens
  misc_RNA (1)...(19): siRNA sense strand
uagccaaaucacuguacaa

SEQ ID NO: 2506800 - RNA, 19 nt, Homo sapiens
  misc_RNA (1)...(19): siRNA sense strand
caagaaauuaugagaagac

SEQ ID NO: 2506801 - RNA, 19 nt, Homo sapiens
  misc_RNA (1)...(19): siRNA sense strand
gggcaaaguguggacucaa

SEQ ID NO: 2506802 - RNA, 19 nt, Homo sapiens
  misc_RNA (1)...(19): siRNA sense strand
uggaaaguucgaaaugcaa

SEQ ID NO: 2506803 - RNA, 19 nt, Homo sapiens
  misc_RNA (1)...(19): siRNA sense strand
acaagaaagguaaaaggaa

SEQ ID NO: 2506804 - RNA, 19 nt, Homo sapiens
  misc_RNA (1)...(19): siRNA sense strand
ucagauggaggaagugcaa

SEQ ID NO: 2506805 - RNA, 19 nt, Homo sapiens
  misc_RNA (1)...(19): siRNA sense strand
aaagaaugaacuggagaau

SEQ ID NO: 2506806 - RNA, 19 nt, Homo sapiens
  misc_RNA (1)...(19): siRNA sense strand
uugacagagaugugcaaau

SEQ ID NO: 2506807 - RNA, 19 nt, Homo sapiens
  misc_RNA (1)...(19): siRNA sense strand
agguaaaaggaaaggacca

SEQ ID NO: 2506808 - RNA, 19 nt, Homo sapiens
  misc_RNA (1)...(19): siRNA sense strand
ggagcuugggucugggaaa

SEQ ID NO: 2506809 - RNA, 19 nt, Homo sapiens
  misc_RNA (1)...(19): siRNA sense strand
cagcaguaccugagcuaca

SEQ ID NO: 2506810 - RNA, 19 nt, Homo sapiens
  misc_RNA (1)...(19): siRNA sense strand
ugguauugggagaaagaga

SEQ ID NO: 2506811 - RNA, 19 nt, Homo sapiens
  misc_RNA (1)...(19): siRNA sense strand
cugauuugaaggauguaaa

SEQ ID NO: 2506812 - RNA, 19 nt, Homo sapiens
  misc_RNA (1)...(19): siRNA sense strand
ccgugcucguggugggaau

SEQ ID NO: 2506813 - RNA, 19 nt, Homo sapiens
  misc_RNA (1)...(19): siRNA sense strand
ccugguauugggagaaaga

SEQ ID NO: 2506814 - RNA, 19 nt, Homo sapiens
  misc_RNA (1)...(19): siRNA sense strand
guguccugguauugggaga

SEQ ID NO: 2506815 - RNA, 19 nt, Homo sapiens
  misc_RNA (1)...(19): siRNA sense strand
uagaaaucuggcugagaaa

SEQ ID NO: 2506816 - RNA, 19 nt, Homo sapiens
  misc_RNA (1)...(19): siRNA sense strand
gaagauucggaaagggcaa

SEQ ID NO: 2506817 - RNA, 19 nt, Homo sapiens
  misc_RNA (1)...(19): siRNA sense strand
aaacaaacaucauccguga

SEQ ID NO: 2506818 - RNA, 19 nt, Homo sapiens
  misc_RNA (1)...(19): siRNA sense strand
cuuaguuggugaagauaca

SEQ ID NO: 2506819 - RNA, 19 nt, Homo sapiens
  misc_RNA (1)...(19): siRNA sense strand
cugucaaagccaucauaua

SEQ ID NO: 2506820 - RNA, 19 nt, Homo sapiens
  misc_RNA (1)...(19): siRNA sense strand
guuaagaaguuaggggauu

SEQ ID NO: 2506821 - RNA, 19 nt, Homo sapiens
  misc_RNA (1)...(19): siRNA sense strand
agaccagcaaggaggaaga

SEQ ID NO: 2506822 - RNA, 19 nt, Homo sapiens
  misc_RNA (1)...(19): siRNA sense strand
ucuacaaccuggugcgcuu

SEQ ID NO: 2506823 - RNA, 19 nt, Homo sapiens
  misc_RNA (1)...(19): siRNA sense strand
gugacuaucuggaagacca

SEQ ID NO: 2506824 - RNA, 19 nt, Homo sapiens
  misc_RNA (1)...(19): siRNA sense strand
ccucugaacaggaguggga

SEQ ID NO: 2506825 - RNA, 19 nt, Homo sapiens
  misc_RNA (1)...(19): siRNA sense strand
gggcagugaagauucggaa

SEQ ID NO: 2506826 - RNA, 19 nt, Homo sapiens
  misc_RNA (1)...(19): siRNA sense strand
ccaauaugccagcugucaa

SEQ ID NO: 2506827 - RNA, 19 nt, Homo sapiens
  misc_RNA (1)...(19): siRNA sense strand
uggaagaugacaugaccau

SEQ ID NO: 2506828 - RNA, 19 nt, Homo sapiens
  misc_RNA (1)...(19): siRNA sense strand
uggugaagauacagaacgu

SEQ ID NO: 2506829 - RNA, 19 nt, Homo sapiens
  misc_RNA (1)...(19): siRNA sense strand
cugaacaggagugggacaa

SEQ ID NO: 2506830 - RNA, 19 nt, Homo sapiens
  misc_RNA (1)...(19): siRNA sense strand
gcaaggagaaggaucgcca

SEQ ID NO: 2506831 - RNA, 19 nt, Homo sapiens
  misc_RNA (1)...(19): siRNA sense strand
ccaucaguguggaaaagaa

SEQ ID NO: 2506832 - RNA, 19 nt, Homo sapiens
  misc_RNA (1)...(19): siRNA sense strand
uauaauaaccagcaggugu

SEQ ID NO: 2506833 - RNA, 19 nt, Homo sapiens
  misc_RNA (1)...(19): siRNA sense strand
gaguaacccuucagaacua

SEQ ID NO: 2506834 - RNA, 19 nt, Homo sapiens
  misc_RNA (1)...(19): siRNA sense strand
gcauuggaacagugggaau

SEQ ID NO: 2506835 - RNA, 19 nt, Homo sapiens
  misc_RNA (1)...(19): siRNA sense strand
aggagaaguaacugaaauu

SEQ ID NO: 2506836 - RNA, 19 nt, Homo sapiens
  misc_RNA (1)...(19): siRNA sense strand
ugugaaagcugcuagugaa

SEQ ID NO: 2506837 - RNA, 19 nt, Homo sapiens
  misc_RNA (1)...(19): siRNA sense strand
agagaaacacgaaugggua

SEQ ID NO: 2506838 - RNA, 19 nt, Homo sapiens
  misc_RNA (1)...(19): siRNA sense strand
acuuaugagugaagaagca

SEQ ID NO: 2506839 - RNA, 19 nt, Homo sapiens
  misc_RNA (1)...(19): siRNA sense strand
cacaggaagcguugggaga

SEQ ID NO: 2506840 - RNA, 19 nt, Homo sapiens
  misc_RNA (1)...(19): siRNA sense strand
ugaacuuaugagugaagaa

SEQ ID NO: 2506841 - RNA, 19 nt, Homo sapiens
  misc_RNA (1)...(19): siRNA sense strand
gugugaaagcugcuaguga

SEQ ID NO: 2506842 - RNA, 19 nt, Homo sapiens
  misc_RNA (1)...(19): siRNA sense strand
cguugggagauguuguuua

SEQ ID NO: 2506843 - RNA, 19 nt, Homo sapiens
  misc_RNA (1)...(19): siRNA sense strand
ggaucuggugauaggcaaa

SEQ ID NO: 2506844 - RNA, 19 nt, Homo sapiens
  misc_RNA (1)...(19): siRNA sense strand
cuacaaccucaaagagaau

SEQ ID NO: 2506845 - RNA, 19 nt, Homo sapiens
  misc_RNA (1)...(19): siRNA sense strand
ucauaaagcacaacgcaga

SEQ ID NO: 2506846 - RNA, 19 nt, Homo sapiens
  misc_RNA (1)...(19): siRNA sense strand
gcccaagcccacagagaca

SEQ ID NO: 2506847 - RNA, 19 nt, Homo sapiens
  misc_RNA (1)...(19): siRNA sense strand
gggaucuggugauaggcaa

SEQ ID NO: 2506848 - RNA, 19 nt, Homo sapiens
  misc_RNA (1)...(19): siRNA sense strand
gaguuuggccggagggauc

SEQ ID NO: 2506849 - RNA, 19 nt, Homo sapiens
  misc_RNA (1)...(19): siRNA sense strand
aaggagugguucucggcaa

SEQ ID NO: 2506850 - RNA, 19 nt, Homo sapiens
  misc_RNA (1)...(19): siRNA sense strand
ggugauaggcaaaugcgau

SEQ ID NO: 2506851 - RNA, 19 nt, Homo sapiens
  misc_RNA (1)...(19): siRNA sense strand
cacacaugguagaaaguca

SEQ ID NO: 2506852 - RNA, 19 nt, Homo sapiens
  misc_RNA (1)...(19): siRNA sense strand
ggacagacugaaugccuca

SEQ ID NO: 2506853 - RNA, 19 nt, Homo sapiens
  misc_RNA (1)...(19): siRNA sense strand
gcaggaaacaccagcagca

SEQ ID NO: 2506854 - RNA, 19 nt, Homo sapiens
  misc_RNA (1)...(19): siRNA sense strand
ggaaacaccagcagcagca

SEQ ID NO: 2506855 - RNA, 19 nt, Homo sapiens
  misc_RNA (1)...(19): siRNA sense strand
aggugauagugaaggagua

SEQ ID NO: 2506856 - RNA, 19 nt, Homo sapiens
  misc_RNA (1)...(19): siRNA sense strand
aggccgaggacgcgaacaa

SEQ ID NO: 2506857 - RNA, 19 nt, Homo sapiens
  misc_RNA (1)...(19): siRNA sense strand
gaguaugaaugcagagccu

SEQ ID NO: 2506858 - RNA, 19 nt, Homo sapiens
  misc_RNA (1)...(19): siRNA sense strand
guacacaggaaccgggaca

SEQ ID NO: 2506859 - RNA, 19 nt, Homo sapiens
  misc_RNA (1)...(19): siRNA sense strand
guaugaaugcagagccuca

SEQ ID NO: 2506860 - RNA, 19 nt, Homo sapiens
  misc_RNA (1)...(19): siRNA sense strand
agaaggagccagcggagga

SEQ ID NO: 2506861 - RNA, 19 nt, Homo sapiens
  misc_RNA (1)...(19): siRNA sense strand
ggugauagugaaggaguau

SEQ ID NO: 2506862 - RNA, 19 nt, Homo sapiens
  misc_RNA (1)...(19): siRNA sense strand
ugaauuuggaggugaggga

SEQ ID NO: 2506863 - RNA, 19 nt, Homo sapiens
  misc_RNA (1)...(19): siRNA sense strand
uaugaaaacccauggacaa

SEQ ID NO: 2506864 - RNA, 19 nt, Homo sapiens
  misc_RNA (1)...(19): siRNA sense strand
ggauggauuuauugcucga

SEQ ID NO: 2506865 - RNA, 19 nt, Homo sapiens
  misc_RNA (1)...(19): siRNA sense strand
gcagagaccuggagggaga

SEQ ID NO: 2506866 - RNA, 19 nt, Homo sapiens
  misc_RNA (1)...(19): siRNA sense strand
cagaagaaacagagcauga

SEQ ID NO: 2506867 - RNA, 19 nt, Homo sapiens
  misc_RNA (1)...(19): siRNA sense strand
agaaguuacucaaggagaa

SEQ ID NO: 2506868 - RNA, 19 nt, Homo sapiens
  misc_RNA (1)...(19): siRNA sense strand
agaugagggcugugauuaa

SEQ ID NO: 2506869 - RNA, 19 nt, Homo sapiens
  misc_RNA (1)...(19): siRNA sense strand
gcucagaaagugaagaaga

SEQ ID NO: 2506870 - RNA, 19 nt, Homo sapiens
  misc_RNA (1)...(19): siRNA sense strand
ggugaugaugagaagaaua

SEQ ID NO: 2506871 - RNA, 19 nt, Homo sapiens
  misc_RNA (1)...(19): siRNA sense strand
cugcuaaagugguagauga

SEQ ID NO: 2506872 - RNA, 19 nt, Homo sapiens
  misc_RNA (1)...(19): siRNA sense strand
agucagaagcagaaagcau

SEQ ID NO: 2506873 - RNA, 19 nt, Homo sapiens
  misc_RNA (1)...(19): siRNA sense strand
ucauguuugucaaggaaua

SEQ ID NO: 2506874 - RNA, 19 nt, Homo sapiens
  misc_RNA (1)...(19): siRNA sense strand
cagucgagcugaagacaau

SEQ ID NO: 2506875 - RNA, 19 nt, Homo sapiens
  misc_RNA (1)...(19): siRNA sense strand
ugaaauacauugaaggacu

SEQ ID NO: 2506876 - RNA, 19 nt, Homo sapiens
  misc_RNA (1)...(19): siRNA sense strand
gaugaaaauccaacagaaa

SEQ ID NO: 2506877 - RNA, 19 nt, Homo sapiens
  misc_RNA (1)...(19): siRNA sense strand
aguuaggaguugucggaau

SEQ ID NO: 2506878 - RNA, 19 nt, Homo sapiens
  misc_RNA (1)...(19): siRNA sense strand
auggagaaaucuugagaca

SEQ ID NO: 2506879 - RNA, 19 nt, Homo sapiens
  misc_RNA (1)...(19): siRNA sense strand
gugaagagggaaugauaga

SEQ ID NO: 2506880 - RNA, 19 nt, Homo sapiens
  misc_RNA (1)...(19): siRNA sense strand
gggacagaauggagaaauc

SEQ ID NO: 2506881 - RNA, 19 nt, Homo sapiens
  misc_RNA (1)...(19): siRNA sense strand
acaaaguuccaguuaguaa

SEQ ID NO: 2506882 - RNA, 19 nt, Homo sapiens
  misc_RNA (1)...(19): siRNA sense strand
cuaugaagagggagaguca

SEQ ID NO: 2506883 - RNA, 19 nt, Homo sapiens
  misc_RNA (1)...(19): siRNA sense strand
cuauagaucucaagaccau

SEQ ID NO: 2506884 - RNA, 19 nt, Homo sapiens
  misc_RNA (1)...(19): siRNA sense strand
ugauacugguagugccaaa

SEQ ID NO: 2506885 - RNA, 19 nt, Homo sapiens
  misc_RNA (1)...(19): siRNA sense strand
acucuaugguugaggacuu

SEQ ID NO: 2506886 - RNA, 19 nt, Homo sapiens
  misc_RNA (1)...(19): siRNA sense strand
cagccaagaaagcagaaua

SEQ ID NO: 2506887 - RNA, 19 nt, Homo sapiens
  misc_RNA (1)...(19): siRNA sense strand
acauaagaaagcagcgaau

SEQ ID NO: 2506888 - RNA, 19 nt, Homo sapiens
  misc_RNA (1)...(19): siRNA sense strand
ccaacaaguaccaagauau

SEQ ID NO: 2506889 - RNA, 19 nt, Homo sapiens
  misc_RNA (1)...(19): siRNA sense strand
gaugagaagaauacagaca

SEQ ID NO: 2506890 - RNA, 19 nt, Homo sapiens
  misc_RNA (1)...(19): siRNA sense strand
agcuaaauuugccgaguua

SEQ ID NO: 2506891 - RNA, 19 nt, Homo sapiens
  misc_RNA (1)...(19): siRNA sense strand
aggagaagcagaugacgaa

SEQ ID NO: 2506892 - RNA, 19 nt, Homo sapiens
  misc_RNA (1)...(19): siRNA sense strand
ugcaauggccaaagauaua

SEQ ID NO: 2506893 - RNA, 19 nt, Homo sapiens
  misc_RNA (1)...(19): siRNA sense strand
ugaagagaugggagaagaa

SEQ ID NO: 2506894 - RNA, 19 nt, Homo sapiens
  misc_RNA (1)...(19): siRNA sense strand
aguacaaggaggucguuua

SEQ ID NO: 2506895 - RNA, 19 nt, Homo sapiens
  misc_RNA (1)...(19): siRNA sense strand
cagauaaaggugaugauga

SEQ ID NO: 2506896 - RNA, 19 nt, Homo sapiens
  misc_RNA (1)...(19): siRNA sense strand
auaagaaagcagcgaauga

SEQ ID NO: 2506897 - RNA, 19 nt, Homo sapiens
  misc_RNA (1)...(19): siRNA sense strand
agguggagaugaugauauu

SEQ ID NO: 2506898 - RNA, 19 nt, Homo sapiens
  misc_RNA (1)...(19): siRNA sense strand
auauagaucuccucgcaaa

SEQ ID NO: 2506899 - RNA, 19 nt, Homo sapiens
  misc_RNA (1)...(19): siRNA sense strand
acgaagaugaugaugaaga

SEQ ID NO: 2506900 - RNA, 19 nt, Homo sapiens
  misc_RNA (1)...(19): siRNA sense strand
cagcuuacuugaaggagau

SEQ ID NO: 2506901 - RNA, 19 nt, Homo sapiens
  misc_RNA (1)...(19): siRNA sense strand
uccaagagaagaagagcua

SEQ ID NO: 2506902 - RNA, 19 nt, Homo sapiens
  misc_RNA (1)...(19): siRNA sense strand
aagaaagcagcgaaugaaa

SEQ ID NO: 2506903 - RNA, 19 nt, Homo sapiens
  misc_RNA (1)...(19): siRNA sense strand
agggaaugauagaagacau

SEQ ID NO: 2506904 - RNA, 19 nt, Homo sapiens
  misc_RNA (1)...(19): siRNA sense strand
cuaugaagcuguaaagaac

SEQ ID NO: 2506905 - RNA, 19 nt, Homo sapiens
  misc_RNA (1)...(19): siRNA sense strand
ucgaacaagaaaugaguuu

SEQ ID NO: 2506906 - RNA, 19 nt, Homo sapiens
  misc_RNA (1)...(19): siRNA sense strand
ccagcuuacuugaaggaga

SEQ ID NO: 2506907 - RNA, 19 nt, Homo sapiens
  misc_RNA (1)...(19): siRNA sense strand
uggugaagagggaaugaua

SEQ ID NO: 2506908 - RNA, 19 nt, Homo sapiens
  misc_RNA (1)...(19): siRNA sense strand
agaaacuaaaugaggucua

SEQ ID NO: 2506909 - RNA, 19 nt, Homo sapiens
  misc_RNA (1)...(19): siRNA sense strand
cuucaauauggcucagaaa

SEQ ID NO: 2506910 - RNA, 19 nt, Homo sapiens
  misc_RNA (1)...(19): siRNA sense strand
cgaguuagaagguggagau

SEQ ID NO: 2506911 - RNA, 19 nt, Homo sapiens
  misc_RNA (1)...(19): siRNA sense strand
ggagaaaucuugagacagc

SEQ ID NO: 2506912 - RNA, 19 nt, Homo sapiens
  misc_RNA (1)...(19): siRNA sense strand
gcggaguccaacagcauua

SEQ ID NO: 2506913 - RNA, 19 nt, Homo sapiens
  misc_RNA (1)...(19): siRNA sense strand
cucagaaagugaagaagau

SEQ ID NO: 2506914 - RNA, 19 nt, Homo sapiens
  misc_RNA (1)...(19): siRNA sense strand
ucagaaaggagaagcagau

SEQ ID NO: 2506915 - RNA, 19 nt, Homo sapiens
  misc_RNA (1)...(19): siRNA sense strand
aagcagaugacgaagauga

SEQ ID NO: 2506916 - RNA, 19 nt, Homo sapiens
  misc_RNA (1)...(19): siRNA sense strand
gggagagucagaagcagaa

SEQ ID NO: 2506917 - RNA, 19 nt, Homo sapiens
  misc_RNA (1)...(19): siRNA sense strand
gaguaggaagaguggcauu

SEQ ID NO: 2506918 - RNA, 19 nt, Homo sapiens
  misc_RNA (1)...(19): siRNA sense strand
ucuaugaagcuguaaagaa

SEQ ID NO: 2506919 - RNA, 19 nt, Homo sapiens
  misc_RNA (1)...(19): siRNA sense strand
gagaagcagaugacgaaga

SEQ ID NO: 2506920 - RNA, 19 nt, Homo sapiens
  misc_RNA (1)...(19): siRNA sense strand
augcaauggccaaagauau

SEQ ID NO: 2506921 - RNA, 19 nt, Homo sapiens
  misc_RNA (1)...(19): siRNA sense strand
gaaugauagaagacaugaa

SEQ ID NO: 2506922 - RNA, 19 nt, Homo sapiens
  misc_RNA (1)...(19): siRNA sense strand
ugggagaagaagauaguga

SEQ ID NO: 2506923 - RNA, 19 nt, Homo sapiens
  misc_RNA (1)...(19): siRNA sense strand
caauaauuaaggagccuau

SEQ ID NO: 2506924 - RNA, 19 nt, Homo sapiens
  misc_RNA (1)...(19): siRNA sense strand
agaaauuccugcuguggau

SEQ ID NO: 2506925 - RNA, 19 nt, Homo sapiens
  misc_RNA (1)...(19): siRNA sense strand
ugaugaugaagaugggcaa

SEQ ID NO: 2506926 - RNA, 19 nt, Homo sapiens
  misc_RNA (1)...(19): siRNA sense strand
aggcugaaauugaacauca

SEQ ID NO: 2506927 - RNA, 19 nt, Homo sapiens
  misc_RNA (1)...(19): siRNA sense strand
cuacaacagauccgaacaa

SEQ ID NO: 2506928 - RNA, 19 nt, Homo sapiens
  misc_RNA (1)...(19): siRNA sense strand
agcaaguuaugcaggcaaa

SEQ ID NO: 2506929 - RNA, 19 nt, Homo sapiens
  misc_RNA (1)...(19): siRNA sense strand
gguuuauaaugaugcacau

SEQ ID NO: 2506930 - RNA, 19 nt, Homo sapiens
  misc_RNA (1)...(19): siRNA sense strand
agauaaaggugaugaugag

SEQ ID NO: 2506931 - RNA, 19 nt, Homo sapiens
  misc_RNA (1)...(19): siRNA sense strand
agagaugggagaagaagau

SEQ ID NO: 2506932 - RNA, 19 nt, Homo sapiens
  misc_RNA (1)...(19): siRNA sense strand
ggacaacaggugggaguuu

SEQ ID NO: 2506933 - RNA, 19 nt, Homo sapiens
  misc_RNA (1)...(19): siRNA sense strand
uuacaauggcacuucaaua

SEQ ID NO: 2506934 - RNA, 19 nt, Homo sapiens
  misc_RNA (1)...(19): siRNA sense strand
gcagagaccuggagggaga

SEQ ID NO: 2506935 - RNA, 19 nt, Homo sapiens
  misc_RNA (1)...(19): siRNA sense strand
cagaagaaacagagcauga

SEQ ID NO: 2506936 - RNA, 19 nt, Homo sapiens
  misc_RNA (1)...(19): siRNA sense strand
agaaguuacucaaggagaa

SEQ ID NO: 2506937 - RNA, 19 nt, Homo sapiens
  misc_RNA (1)...(19): siRNA sense strand
agaugagggcugugauuaa

SEQ ID NO: 2506938 - RNA, 19 nt, Homo sapiens
  misc_RNA (1)...(19): siRNA sense strand
gcucagaaagugaagaaga

SEQ ID NO: 2506939 - RNA, 19 nt, Homo sapiens
  misc_RNA (1)...(19): siRNA sense strand
ggugaugaugagaagaaua

SEQ ID NO: 2506940 - RNA, 19 nt, Homo sapiens
  misc_RNA (1)...(19): siRNA sense strand
cugcuaaagugguagauga

SEQ ID NO: 2506941 - RNA, 19 nt, Homo sapiens
  misc_RNA (1)...(19): siRNA sense strand
agucagaagcagaaagcau

SEQ ID NO: 2506942 - RNA, 19 nt, Homo sapiens
  misc_RNA (1)...(19): siRNA sense strand
ucauguuugucaaggaaua

SEQ ID NO: 2506943 - RNA, 19 nt, Homo sapiens
  misc_RNA (1)...(19): siRNA sense strand
cagucgagcugaagacaau

SEQ ID NO: 2506944 - RNA, 19 nt, Homo sapiens
  misc_RNA (1)...(19): siRNA sense strand
ugaaauacauugaaggacu

SEQ ID NO: 2506945 - RNA, 19 nt, Homo sapiens
  misc_RNA (1)...(19): siRNA sense strand
gaugaaaauccaacagaaa

SEQ ID NO: 2506946 - RNA, 19 nt, Homo sapiens
  misc_RNA (1)...(19): siRNA sense strand
aguuaggaguugucggaau

SEQ ID NO: 2506947 - RNA, 19 nt, Homo sapiens
  misc_RNA (1)...(19): siRNA sense strand
auggagaaaucuugagaca

SEQ ID NO: 2506948 - RNA, 19 nt, Homo sapiens
  misc_RNA (1)...(19): siRNA sense strand
gugaagagggaaugauaga

SEQ ID NO: 2506949 - RNA, 19 nt, Homo sapiens
  misc_RNA (1)...(19): siRNA sense strand
gggacagaauggagaaauc

SEQ ID NO: 2506950 - RNA, 19 nt, Homo sapiens
  misc_RNA (1)...(19): siRNA sense strand
acaaaguuccaguuaguaa

SEQ ID NO: 2506951 - RNA, 19 nt, Homo sapiens
  misc_RNA (1)...(19): siRNA sense strand
cuaugaagagggagaguca

SEQ ID NO: 2506952 - RNA, 19 nt, Homo sapiens
  misc_RNA (1)...(19): siRNA sense strand
cuauagaucucaagaccau

SEQ ID NO: 2506953 - RNA, 19 nt, Homo sapiens
  misc_RNA (1)...(19): siRNA sense strand
ugauacugguagugccaaa

SEQ ID NO: 2506954 - RNA, 19 nt, Homo sapiens
  misc_RNA (1)...(19): siRNA sense strand
acucuaugguugaggacuu

SEQ ID NO: 2506955 - RNA, 19 nt, Homo sapiens
  misc_RNA (1)...(19): siRNA sense strand
cagccaagaaagcagaaua

SEQ ID NO: 2506956 - RNA, 19 nt, Homo sapiens
  misc_RNA (1)...(19): siRNA sense strand
acauaagaaagcagcgaau

SEQ ID NO: 2506957 - RNA, 19 nt, Homo sapiens
  misc_RNA (1)...(19): siRNA sense strand
ccaacaaguaccaagauau

SEQ ID NO: 2506958 - RNA, 19 nt, Homo sapiens
  misc_RNA (1)...(19): siRNA sense strand
gaugagaagaauacagaca

SEQ ID NO: 2506959 - RNA, 19 nt, Homo sapiens
  misc_RNA (1)...(19): siRNA sense strand
agcuaaauuugccgaguua

SEQ ID NO: 2506960 - RNA, 19 nt, Homo sapiens
  misc_RNA (1)...(19): siRNA sense strand
aggagaagcagaugacgaa

SEQ ID NO: 2506961 - RNA, 19 nt, Homo sapiens
  misc_RNA (1)...(19): siRNA sense strand
ugcaauggccaaagauaua

SEQ ID NO: 2506962 - RNA, 19 nt, Homo sapiens
  misc_RNA (1)...(19): siRNA sense strand
ugaagagaugggagaagaa

SEQ ID NO: 2506963 - RNA, 19 nt, Homo sapiens
  misc_RNA (1)...(19): siRNA sense strand
aguacaaggaggucguuua

SEQ ID NO: 2506964 - RNA, 19 nt, Homo sapiens
  misc_RNA (1)...(19): siRNA sense strand
cagauaaaggugaugauga

SEQ ID NO: 2506965 - RNA, 19 nt, Homo sapiens
  misc_RNA (1)...(19): siRNA sense strand
auaagaaagcagcgaauga

SEQ ID NO: 2506966 - RNA, 19 nt, Homo sapiens
  misc_RNA (1)...(19): siRNA sense strand
agguggagaugaugauauu

SEQ ID NO: 2506967 - RNA, 19 nt, Homo sapiens
  misc_RNA (1)...(19): siRNA sense strand
auauagaucuccucgcaaa

SEQ ID NO: 2506968 - RNA, 19 nt, Homo sapiens
  misc_RNA (1)...(19): siRNA sense strand
acgaagaugaugaugaaga

SEQ ID NO: 2506969 - RNA, 19 nt, Homo sapiens
  misc_RNA (1)...(19): siRNA sense strand
cagcuuacuugaaggagau

SEQ ID NO: 2506970 - RNA, 19 nt, Homo sapiens
  misc_RNA (1)...(19): siRNA sense strand
uccaagagaagaagagcua

SEQ ID NO: 2506971 - RNA, 19 nt, Homo sapiens
  misc_RNA (1)...(19): siRNA sense strand
aagaaagcagcgaaugaaa

SEQ ID NO: 2506972 - RNA, 19 nt, Homo sapiens
  misc_RNA (1)...(19): siRNA sense strand
agggaaugauagaagacau

SEQ ID NO: 2506973 - RNA, 19 nt, Homo sapiens
  misc_RNA (1)...(19): siRNA sense strand
cuaugaagcuguaaagaac

SEQ ID NO: 2506974 - RNA, 19 nt, Homo sapiens
  misc_RNA (1)...(19): siRNA sense strand
ucgaacaagaaaugaguuu

SEQ ID NO: 2506975 - RNA, 19 nt, Homo sapiens
  misc_RNA (1)...(19): siRNA sense strand
ccagcuuacuugaaggaga

SEQ ID NO: 2506976 - RNA, 19 nt, Homo sapiens
  misc_RNA (1)...(19): siRNA sense strand
uggugaagagggaaugaua

SEQ ID NO: 2506977 - RNA, 19 nt, Homo sapiens
  misc_RNA (1)...(19): siRNA sense strand
agaaacuaaaugaggucua

SEQ ID NO: 2506978 - RNA, 19 nt, Homo sapiens
  misc_RNA (1)...(19): siRNA sense strand
cuucaauauggcucagaaa

SEQ ID NO: 2506979 - RNA, 19 nt, Homo sapiens
  misc_RNA (1)...(19): siRNA sense strand
cgaguuagaagguggagau

SEQ ID NO: 2506980 - RNA, 19 nt, Homo sapiens
  misc_RNA (1)...(19): siRNA sense strand
ggagaaaucuugagacagc

SEQ ID NO: 2506981 - RNA, 19 nt, Homo sapiens
  misc_RNA (1)...(19): siRNA sense strand
gcggaguccaacagcauua

SEQ ID NO: 2506982 - RNA, 19 nt, Homo sapiens
  misc_RNA (1)...(19): siRNA sense strand
cucagaaagugaagaagau

SEQ ID NO: 2506983 - RNA, 19 nt, Homo sapiens
  misc_RNA (1)...(19): siRNA sense strand
ucagaaaggagaagcagau

SEQ ID NO: 2506984 - RNA, 19 nt, Homo sapiens
  misc_RNA (1)...(19): siRNA sense strand
aagcagaugacgaagauga

SEQ ID NO: 2506985 - RNA, 19 nt, Homo sapiens
  misc_RNA (1)...(19): siRNA sense strand
gggagagucagaagcagaa

SEQ ID NO: 2506986 - RNA, 19 nt, Homo sapiens
  misc_RNA (1)...(19): siRNA sense strand
gaguaggaagaguggcauu

SEQ ID NO: 2506987 - RNA, 19 nt, Homo sapiens
  misc_RNA (1)...(19): siRNA sense strand
ucuaugaagcuguaaagaa

SEQ ID NO: 2506988 - RNA, 19 nt, Homo sapiens
  misc_RNA (1)...(19): siRNA sense strand
gagaagcagaugacgaaga

SEQ ID NO: 2506989 - RNA, 19 nt, Homo sapiens
  misc_RNA (1)...(19): siRNA sense strand
augcaauggccaaagauau

SEQ ID NO: 2506990 - RNA, 19 nt, Homo sapiens
  misc_RNA (1)...(19): siRNA sense strand
gaaugauagaagacaugaa

SEQ ID NO: 2506991 - RNA, 19 nt, Homo sapiens
  misc_RNA (1)...(19): siRNA sense strand
ugggagaagaagauaguga

SEQ ID NO: 2506992 - RNA, 19 nt, Homo sapiens
  misc_RNA (1)...(19): siRNA sense strand
caauaauuaaggagccuau

SEQ ID NO: 2506993 - RNA, 19 nt, Homo sapiens
  misc_RNA (1)...(19): siRNA sense strand
agaaauuccugcuguggau

SEQ ID NO: 2506994 - RNA, 19 nt, Homo sapiens
  misc_RNA (1)...(19): siRNA sense strand
ugaugaugaagaugggcaa

SEQ ID NO: 2506995 - RNA, 19 nt, Homo sapiens
  misc_RNA (1)...(19): siRNA sense strand
aggcugaaauugaacauca

SEQ ID NO: 2506996 - RNA, 19 nt, Homo sapiens
  misc_RNA (1)...(19): siRNA sense strand
cuacaacagauccgaacaa

SEQ ID NO: 2506997 - RNA, 19 nt, Homo sapiens
  misc_RNA (1)...(19): siRNA sense strand
agcaaguuaugcaggcaaa

SEQ ID NO: 2506998 - RNA, 19 nt, Homo sapiens
  misc_RNA (1)...(19): siRNA sense strand
gguuuauaaugaugcacau

SEQ ID NO: 2506999 - RNA, 19 nt, Homo sapiens
  misc_RNA (1)...(19): siRNA sense strand
agauaaaggugaugaugag

SEQ ID NO: 2507000 - RNA, 19 nt, Homo sapiens
  misc_RNA (1)...(19): siRNA sense strand
agagaugggagaagaagau

SEQ ID NO: 2507001 - RNA, 19 nt, Homo sapiens
  misc_RNA (1)...(19): siRNA sense strand
ggacaacaggugggaguuu

SEQ ID NO: 2507002 - RNA, 19 nt, Homo sapiens
  misc_RNA (1)...(19): siRNA sense strand
uuacaauggcacuucaaua

SEQ ID NO: 2507003 - RNA, 19 nt, Homo sapiens
  misc_RNA (1)...(19): siRNA sense strand
gcagagaccuggagggaga

SEQ ID NO: 2507004 - RNA, 19 nt, Homo sapiens
  misc_RNA (1)...(19): siRNA sense strand
agaaguuacucaaggagaa

SEQ ID NO: 2507005 - RNA, 19 nt, Homo sapiens
  misc_RNA (1)...(19): siRNA sense strand
gcucagaaagugaagaaga

SEQ ID NO: 2507006 - RNA, 19 nt, Homo sapiens
  misc_RNA (1)...(19): siRNA sense strand
agucagaagcagaaagcau

SEQ ID NO: 2507007 - RNA, 19 nt, Homo sapiens
  misc_RNA (1)...(19): siRNA sense strand
gaugaaaauccaacagaaa

SEQ ID NO: 2507008 - RNA, 19 nt, Homo sapiens
  misc_RNA (1)...(19): siRNA sense strand
aguuaggaguugucggaau

SEQ ID NO: 2507009 - RNA, 19 nt, Homo sapiens
  misc_RNA (1)...(19): siRNA sense strand
gugaagagggaaugauaga

SEQ ID NO: 2507010 - RNA, 19 nt, Homo sapiens
  misc_RNA (1)...(19): siRNA sense strand
cuaugaagagggagaguca

SEQ ID NO: 2507011 - RNA, 19 nt, Homo sapiens
  misc_RNA (1)...(19): siRNA sense strand
cuauagaucucaagaccau

SEQ ID NO: 2507012 - RNA, 19 nt, Homo sapiens
  misc_RNA (1)...(19): siRNA sense strand
ugauacugguagugccaaa

SEQ ID NO: 2507013 - RNA, 19 nt, Homo sapiens
  misc_RNA (1)...(19): siRNA sense strand
acucuaugguugaggacuu

SEQ ID NO: 2507014 - RNA, 19 nt, Homo sapiens
  misc_RNA (1)...(19): siRNA sense strand
acauaagaaagcagcgaau

SEQ ID NO: 2507015 - RNA, 19 nt, Homo sapiens
  misc_RNA (1)...(19): siRNA sense strand
ccaacaaguaccaagauau

SEQ ID NO: 2507016 - RNA, 19 nt, Homo sapiens
  misc_RNA (1)...(19): siRNA sense strand
aggagaagcagaugacgaa

SEQ ID NO: 2507017 - RNA, 19 nt, Homo sapiens
  misc_RNA (1)...(19): siRNA sense strand
ugcaauggccaaagauaua

SEQ ID NO: 2507018 - RNA, 19 nt, Homo sapiens
  misc_RNA (1)...(19): siRNA sense strand
aguacaaggaggucguuua

SEQ ID NO: 2507019 - RNA, 19 nt, Homo sapiens
  misc_RNA (1)...(19): siRNA sense strand
auaagaaagcagcgaauga

SEQ ID NO: 2507020 - RNA, 19 nt, Homo sapiens
  misc_RNA (1)...(19): siRNA sense strand
auauagaucuccucgcaaa

SEQ ID NO: 2507021 - RNA, 19 nt, Homo sapiens
  misc_RNA (1)...(19): siRNA sense strand
acgaagaugaugaugaaga

SEQ ID NO: 2507022 - RNA, 19 nt, Homo sapiens
  misc_RNA (1)...(19): siRNA sense strand
cagcuuacuugaaggagau

SEQ ID NO: 2507023 - RNA, 19 nt, Homo sapiens
  misc_RNA (1)...(19): siRNA sense strand
uccaagagaagaagagcua

SEQ ID NO: 2507024 - RNA, 19 nt, Homo sapiens
  misc_RNA (1)...(19): siRNA sense strand
aagaaagcagcgaaugaaa

SEQ ID NO: 2507025 - RNA, 19 nt, Homo sapiens
  misc_RNA (1)...(19): siRNA sense strand
agggaaugauagaagacau

SEQ ID NO: 2507026 - RNA, 19 nt, Homo sapiens
  misc_RNA (1)...(19): siRNA sense strand
cuaugaagcuguaaagaac

SEQ ID NO: 2507027 - RNA, 19 nt, Homo sapiens
  misc_RNA (1)...(19): siRNA sense strand
ucgaacaagaaaugaguuu

SEQ ID NO: 2507028 - RNA, 19 nt, Homo sapiens
  misc_RNA (1)...(19): siRNA sense strand
ccagcuuacuugaaggaga

SEQ ID NO: 2507029 - RNA, 19 nt, Homo sapiens
  misc_RNA (1)...(19): siRNA sense strand
uggugaagagggaaugaua

SEQ ID NO: 2507030 - RNA, 19 nt, Homo sapiens
  misc_RNA (1)...(19): siRNA sense strand
agaaacuaaaugaggucua

SEQ ID NO: 2507031 - RNA, 19 nt, Homo sapiens
  misc_RNA (1)...(19): siRNA sense strand
cuucaauauggcucagaaa

SEQ ID NO: 2507032 - RNA, 19 nt, Homo sapiens
  misc_RNA (1)...(19): siRNA sense strand
cucagaaagugaagaagau

SEQ ID NO: 2507033 - RNA, 19 nt, Homo sapiens
  misc_RNA (1)...(19): siRNA sense strand
ucagaaaggagaagcagau

SEQ ID NO: 2507034 - RNA, 19 nt, Homo sapiens
  misc_RNA (1)...(19): siRNA sense strand
aagcagaugacgaagauga

SEQ ID NO: 2507035 - RNA, 19 nt, Homo sapiens
  misc_RNA (1)...(19): siRNA sense strand
gggagagucagaagcagaa

SEQ ID NO: 2507036 - RNA, 19 nt, Homo sapiens
  misc_RNA (1)...(19): siRNA sense strand
gaguaggaagaguggcauu

SEQ ID NO: 2507037 - RNA, 19 nt, Homo sapiens
  misc_RNA (1)...(19): siRNA sense strand
ucuaugaagcuguaaagaa

SEQ ID NO: 2507038 - RNA, 19 nt, Homo sapiens
  misc_RNA (1)...(19): siRNA sense strand
gagaagcagaugacgaaga

SEQ ID NO: 2507039 - RNA, 19 nt, Homo sapiens
  misc_RNA (1)...(19): siRNA sense strand
augcaauggccaaagauau

SEQ ID NO: 2507040 - RNA, 19 nt, Homo sapiens
  misc_RNA (1)...(19): siRNA sense strand
gaaugauagaagacaugaa

SEQ ID NO: 2507041 - RNA, 19 nt, Homo sapiens
  misc_RNA (1)...(19): siRNA sense strand
caauaauuaaggagccuau

SEQ ID NO: 2507042 - RNA, 19 nt, Homo sapiens
  misc_RNA (1)...(19): siRNA sense strand
agaaauuccugcuguggau

SEQ ID NO: 2507043 - RNA, 19 nt, Homo sapiens
  misc_RNA (1)...(19): siRNA sense strand
ugaugaugaagaugggcaa

SEQ ID NO: 2507044 - RNA, 19 nt, Homo sapiens
  misc_RNA (1)...(19): siRNA sense strand
aggcugaaauugaacauca

SEQ ID NO: 2507045 - RNA, 19 nt, Homo sapiens
  misc_RNA (1)...(19): siRNA sense strand
cuacaacagauccgaacaa

SEQ ID NO: 2507046 - RNA, 19 nt, Homo sapiens
  misc_RNA (1)...(19): siRNA sense strand
agcaaguuaugcaggcaaa

SEQ ID NO: 2507047 - RNA, 19 nt, Homo sapiens
  misc_RNA (1)...(19): siRNA sense strand
gguuuauaaugaugcacau

SEQ ID NO: 2507048 - RNA, 19 nt, Homo sapiens
  misc_RNA (1)...(19): siRNA sense strand
uuacaauggcacuucaaua

SEQ ID NO: 2507049 - RNA, 19 nt, Homo sapiens
  misc_RNA (1)...(19): siRNA sense strand
ggcaaagaagaaagagcuu

SEQ ID NO: 2507050 - RNA, 19 nt, Homo sapiens
  misc_RNA (1)...(19): siRNA sense strand
ccaaugcagcagaaacuaa

SEQ ID NO: 2507051 - RNA, 19 nt, Homo sapiens
  misc_RNA (1)...(19): siRNA sense strand
augaagcuguaaagaacua

SEQ ID NO: 2507052 - RNA, 19 nt, Homo sapiens
  misc_RNA (1)...(19): siRNA sense strand
cuguaaagaacuauacuga

SEQ ID NO: 2507053 - RNA, 19 nt, Homo sapiens
  misc_RNA (1)...(19): siRNA sense strand
ggaacgagcaagaaggaug

SEQ ID NO: 2507054 - RNA, 19 nt, Homo sapiens
  misc_RNA (1)...(19): siRNA sense strand
caugaaauggcuaagucaa

SEQ ID NO: 2507055 - RNA, 19 nt, Homo sapiens
  misc_RNA (1)...(19): siRNA sense strand
gguucaggcagaagacuuu

SEQ ID NO: 2507056 - RNA, 19 nt, Homo sapiens
  misc_RNA (1)...(19): siRNA sense strand
ugaagaugggcaagacaau

SEQ ID NO: 2507057 - RNA, 19 nt, Homo sapiens
  misc_RNA (1)...(19): siRNA sense strand
augaagagggagagucaga

SEQ ID NO: 2507058 - RNA, 19 nt, Homo sapiens
  misc_RNA (1)...(19): siRNA sense strand
ccauugacuugaugaaaau

SEQ ID NO: 2507059 - RNA, 19 nt, Homo sapiens
  misc_RNA (1)...(19): siRNA sense strand
uaacauccgcaaugacaaa

SEQ ID NO: 2507060 - RNA, 19 nt, Homo sapiens
  misc_RNA (1)...(19): siRNA sense strand
gagaaguuacucaaggaga

SEQ ID NO: 2507061 - RNA, 19 nt, Homo sapiens
  misc_RNA (1)...(19): siRNA sense strand
gaaguuacucaaggagaaa

SEQ ID NO: 2507062 - RNA, 19 nt, Homo sapiens
  misc_RNA (1)...(19): siRNA sense strand
acagaauggaagcuacaaa

SEQ ID NO: 2507063 - RNA, 19 nt, Homo sapiens
  misc_RNA (1)...(19): siRNA sense strand
gugaagaagaugcugcuuu

SEQ ID NO: 2507064 - RNA, 19 nt, Homo sapiens
  misc_RNA (1)...(19): siRNA sense strand
aagaaaucaaccagacuau

SEQ ID NO: 2507065 - RNA, 19 nt, Homo sapiens
  misc_RNA (1)...(19): siRNA sense strand
caugcaauggccaaagaua

SEQ ID NO: 2507066 - RNA, 19 nt, Homo sapiens
  misc_RNA (1)...(19): siRNA sense strand
agggagagucagaagcaga

SEQ ID NO: 2507067 - RNA, 19 nt, Homo sapiens
  misc_RNA (1)...(19): siRNA sense strand
aguauuggaacgagcaaga

SEQ ID NO: 2507068 - RNA, 19 nt, Homo sapiens
  misc_RNA (1)...(19): siRNA sense strand
gcuugcaaacucugggauu

SEQ ID NO: 2507069 - RNA, 19 nt, Homo sapiens
  misc_RNA (1)...(19): siRNA sense strand
agaaaggagaagcagauga

SEQ ID NO: 2507070 - RNA, 19 nt, Homo sapiens
  misc_RNA (1)...(19): siRNA sense strand
ccugauuauuaccagcaaa

SEQ ID NO: 2507071 - RNA, 19 nt, Homo sapiens
  misc_RNA (1)...(19): siRNA sense strand
cagcaaguuaugcaggcaa

SEQ ID NO: 2507072 - RNA, 19 nt, Homo sapiens
  misc_RNA (1)...(19): siRNA sense strand
augcacauauccuggagaa

SEQ ID NO: 2507073 - RNA, 19 nt, Homo sapiens
  misc_RNA (1)...(19): siRNA sense strand
gagacuauaaggaugaaca

SEQ ID NO: 2507074 - RNA, 19 nt, Homo sapiens
  misc_RNA (1)...(19): siRNA sense strand
cagaugacgaagaugauga

SEQ ID NO: 2507075 - RNA, 19 nt, Homo sapiens
  misc_RNA (1)...(19): siRNA sense strand
ucuugaagccauaguugua

SEQ ID NO: 2507076 - RNA, 19 nt, Homo sapiens
  misc_RNA (1)...(19): siRNA sense strand
ggauacagaauggaagcua

SEQ ID NO: 2507077 - RNA, 19 nt, Homo sapiens
  misc_RNA (1)...(19): siRNA sense strand
gaacaucaugaaauggcua

SEQ ID NO: 2507078 - RNA, 19 nt, Homo sapiens
  misc_RNA (1)...(19): siRNA sense strand
gcagagaccuggagggaga

SEQ ID NO: 2507079 - RNA, 19 nt, Homo sapiens
  misc_RNA (1)...(19): siRNA sense strand
cagaagaaacagagcauga

SEQ ID NO: 2507080 - RNA, 19 nt, Homo sapiens
  misc_RNA (1)...(19): siRNA sense strand
agaaguuacucaaggagaa

SEQ ID NO: 2507081 - RNA, 19 nt, Homo sapiens
  misc_RNA (1)...(19): siRNA sense strand
agaugagggcugugauuaa

SEQ ID NO: 2507082 - RNA, 19 nt, Homo sapiens
  misc_RNA (1)...(19): siRNA sense strand
gcucagaaagugaagaaga

SEQ ID NO: 2507083 - RNA, 19 nt, Homo sapiens
  misc_RNA (1)...(19): siRNA sense strand
ggugaugaugagaagaaua

SEQ ID NO: 2507084 - RNA, 19 nt, Homo sapiens
  misc_RNA (1)...(19): siRNA sense strand
cugcuaaagugguagauga

SEQ ID NO: 2507085 - RNA, 19 nt, Homo sapiens
  misc_RNA (1)...(19): siRNA sense strand
agucagaagcagaaagcau

SEQ ID NO: 2507086 - RNA, 19 nt, Homo sapiens
  misc_RNA (1)...(19): siRNA sense strand
ucauguuugucaaggaaua

SEQ ID NO: 2507087 - RNA, 19 nt, Homo sapiens
  misc_RNA (1)...(19): siRNA sense strand
cagucgagcugaagacaau

SEQ ID NO: 2507088 - RNA, 19 nt, Homo sapiens
  misc_RNA (1)...(19): siRNA sense strand
ugaaauacauugaaggacu

SEQ ID NO: 2507089 - RNA, 19 nt, Homo sapiens
  misc_RNA (1)...(19): siRNA sense strand
gaugaaaauccaacagaaa

SEQ ID NO: 2507090 - RNA, 19 nt, Homo sapiens
  misc_RNA (1)...(19): siRNA sense strand
aguuaggaguugucggaau

SEQ ID NO: 2507091 - RNA, 19 nt, Homo sapiens
  misc_RNA (1)...(19): siRNA sense strand
auggagaaaucuugagaca

SEQ ID NO: 2507092 - RNA, 19 nt, Homo sapiens
  misc_RNA (1)...(19): siRNA sense strand
gugaagagggaaugauaga

SEQ ID NO: 2507093 - RNA, 19 nt, Homo sapiens
  misc_RNA (1)...(19): siRNA sense strand
gggacagaauggagaaauc

SEQ ID NO: 2507094 - RNA, 19 nt, Homo sapiens
  misc_RNA (1)...(19): siRNA sense strand
acaaaguuccaguuaguaa

SEQ ID NO: 2507095 - RNA, 19 nt, Homo sapiens
  misc_RNA (1)...(19): siRNA sense strand
cuaugaagagggagaguca

SEQ ID NO: 2507096 - RNA, 19 nt, Homo sapiens
  misc_RNA (1)...(19): siRNA sense strand
cuauagaucucaagaccau

SEQ ID NO: 2507097 - RNA, 19 nt, Homo sapiens
  misc_RNA (1)...(19): siRNA sense strand
ugauacugguagugccaaa

SEQ ID NO: 2507098 - RNA, 19 nt, Homo sapiens
  misc_RNA (1)...(19): siRNA sense strand
acucuaugguugaggacuu

SEQ ID NO: 2507099 - RNA, 19 nt, Homo sapiens
  misc_RNA (1)...(19): siRNA sense strand
cagccaagaaagcagaaua

SEQ ID NO: 2507100 - RNA, 19 nt, Homo sapiens
  misc_RNA (1)...(19): siRNA sense strand
acauaagaaagcagcgaau

SEQ ID NO: 2507101 - RNA, 19 nt, Homo sapiens
  misc_RNA (1)...(19): siRNA sense strand
ccaacaaguaccaagauau

SEQ ID NO: 2507102 - RNA, 19 nt, Homo sapiens
  misc_RNA (1)...(19): siRNA sense strand
gaugagaagaauacagaca

SEQ ID NO: 2507103 - RNA, 19 nt, Homo sapiens
  misc_RNA (1)...(19): siRNA sense strand
agcuaaauuugccgaguua

SEQ ID NO: 2507104 - RNA, 19 nt, Homo sapiens
  misc_RNA (1)...(19): siRNA sense strand
aggagaagcagaugacgaa

SEQ ID NO: 2507105 - RNA, 19 nt, Homo sapiens
  misc_RNA (1)...(19): siRNA sense strand
ugcaauggccaaagauaua

SEQ ID NO: 2507106 - RNA, 19 nt, Homo sapiens
  misc_RNA (1)...(19): siRNA sense strand
ugaagagaugggagaagaa

SEQ ID NO: 2507107 - RNA, 19 nt, Homo sapiens
  misc_RNA (1)...(19): siRNA sense strand
aguacaaggaggucguuua

SEQ ID NO: 2507108 - RNA, 19 nt, Homo sapiens
  misc_RNA (1)...(19): siRNA sense strand
cagauaaaggugaugauga

SEQ ID NO: 2507109 - RNA, 19 nt, Homo sapiens
  misc_RNA (1)...(19): siRNA sense strand
auaagaaagcagcgaauga

SEQ ID NO: 2507110 - RNA, 19 nt, Homo sapiens
  misc_RNA (1)...(19): siRNA sense strand
agguggagaugaugauauu

SEQ ID NO: 2507111 - RNA, 19 nt, Homo sapiens
  misc_RNA (1)...(19): siRNA sense strand
auauagaucuccucgcaaa

SEQ ID NO: 2507112 - RNA, 19 nt, Homo sapiens
  misc_RNA (1)...(19): siRNA sense strand
acgaagaugaugaugaaga

SEQ ID NO: 2507113 - RNA, 19 nt, Homo sapiens
  misc_RNA (1)...(19): siRNA sense strand
cagcuuacuugaaggagau

SEQ ID NO: 2507114 - RNA, 19 nt, Homo sapiens
  misc_RNA (1)...(19): siRNA sense strand
uccaagagaagaagagcua

SEQ ID NO: 2507115 - RNA, 19 nt, Homo sapiens
  misc_RNA (1)...(19): siRNA sense strand
aagaaagcagcgaaugaaa

SEQ ID NO: 2507116 - RNA, 19 nt, Homo sapiens
  misc_RNA (1)...(19): siRNA sense strand
agggaaugauagaagacau

SEQ ID NO: 2507117 - RNA, 19 nt, Homo sapiens
  misc_RNA (1)...(19): siRNA sense strand
cuaugaagcuguaaagaac

SEQ ID NO: 2507118 - RNA, 19 nt, Homo sapiens
  misc_RNA (1)...(19): siRNA sense strand
ucgaacaagaaaugaguuu

SEQ ID NO: 2507119 - RNA, 19 nt, Homo sapiens
  misc_RNA (1)...(19): siRNA sense strand
ccagcuuacuugaaggaga

SEQ ID NO: 2507120 - RNA, 19 nt, Homo sapiens
  misc_RNA (1)...(19): siRNA sense strand
uggugaagagggaaugaua

SEQ ID NO: 2507121 - RNA, 19 nt, Homo sapiens
  misc_RNA (1)...(19): siRNA sense strand
agaaacuaaaugaggucua

SEQ ID NO: 2507122 - RNA, 19 nt, Homo sapiens
  misc_RNA (1)...(19): siRNA sense strand
cuucaauauggcucagaaa

SEQ ID NO: 2507123 - RNA, 19 nt, Homo sapiens
  misc_RNA (1)...(19): siRNA sense strand
cgaguuagaagguggagau

SEQ ID NO: 2507124 - RNA, 19 nt, Homo sapiens
  misc_RNA (1)...(19): siRNA sense strand
ggagaaaucuugagacagc

SEQ ID NO: 2507125 - RNA, 19 nt, Homo sapiens
  misc_RNA (1)...(19): siRNA sense strand
gcggaguccaacagcauua

SEQ ID NO: 2507126 - RNA, 19 nt, Homo sapiens
  misc_RNA (1)...(19): siRNA sense strand
cucagaaagugaagaagau

SEQ ID NO: 2507127 - RNA, 19 nt, Homo sapiens
  misc_RNA (1)...(19): siRNA sense strand
ucagaaaggagaagcagau

SEQ ID NO: 2507128 - RNA, 19 nt, Homo sapiens
  misc_RNA (1)...(19): siRNA sense strand
aagcagaugacgaagauga

SEQ ID NO: 2507129 - RNA, 19 nt, Homo sapiens
  misc_RNA (1)...(19): siRNA sense strand
gggagagucagaagcagaa

SEQ ID NO: 2507130 - RNA, 19 nt, Homo sapiens
  misc_RNA (1)...(19): siRNA sense strand
gaguaggaagaguggcauu

SEQ ID NO: 2507131 - RNA, 19 nt, Homo sapiens
  misc_RNA (1)...(19): siRNA sense strand
ucuaugaagcuguaaagaa

SEQ ID NO: 2507132 - RNA, 19 nt, Homo sapiens
  misc_RNA (1)...(19): siRNA sense strand
gagaagcagaugacgaaga

SEQ ID NO: 2507133 - RNA, 19 nt, Homo sapiens
  misc_RNA (1)...(19): siRNA sense strand
augcaauggccaaagauau

SEQ ID NO: 2507134 - RNA, 19 nt, Homo sapiens
  misc_RNA (1)...(19): siRNA sense strand
gaaugauagaagacaugaa

SEQ ID NO: 2507135 - RNA, 19 nt, Homo sapiens
  misc_RNA (1)...(19): siRNA sense strand
ugggagaagaagauaguga

SEQ ID NO: 2507136 - RNA, 19 nt, Homo sapiens
  misc_RNA (1)...(19): siRNA sense strand
caauaauuaaggagccuau

SEQ ID NO: 2507137 - RNA, 19 nt, Homo sapiens
  misc_RNA (1)...(19): siRNA sense strand
agaaauuccugcuguggau

SEQ ID NO: 2507138 - RNA, 19 nt, Homo sapiens
  misc_RNA (1)...(19): siRNA sense strand
ugaugaugaagaugggcaa

SEQ ID NO: 2507139 - RNA, 19 nt, Homo sapiens
  misc_RNA (1)...(19): siRNA sense strand
aggcugaaauugaacauca

SEQ ID NO: 2507140 - RNA, 19 nt, Homo sapiens
  misc_RNA (1)...(19): siRNA sense strand
cuacaacagauccgaacaa

SEQ ID NO: 2507141 - RNA, 19 nt, Homo sapiens
  misc_RNA (1)...(19): siRNA sense strand
agcaaguuaugcaggcaaa

SEQ ID NO: 2507142 - RNA, 19 nt, Homo sapiens
  misc_RNA (1)...(19): siRNA sense strand
gguuuauaaugaugcacau

SEQ ID NO: 2507143 - RNA, 19 nt, Homo sapiens
  misc_RNA (1)...(19): siRNA sense strand
agauaaaggugaugaugag

SEQ ID NO: 2507144 - RNA, 19 nt, Homo sapiens
  misc_RNA (1)...(19): siRNA sense strand
agagaugggagaagaagau

SEQ ID NO: 2507145 - RNA, 19 nt, Homo sapiens
  misc_RNA (1)...(19): siRNA sense strand
ggacaacaggugggaguuu

SEQ ID NO: 2507146 - RNA, 19 nt, Homo sapiens
  misc_RNA (1)...(19): siRNA sense strand
uuacaauggcacuucaaua

SEQ ID NO: 2507147 - RNA, 19 nt, Homo sapiens
  misc_RNA (1)...(19): siRNA sense strand
gcuuaaagucagugaaaau

SEQ ID NO: 2507148 - RNA, 19 nt, Homo sapiens
  misc_RNA (1)...(19): siRNA sense strand
gaacaagacuuaaagcuga

SEQ ID NO: 2507149 - RNA, 19 nt, Homo sapiens
  misc_RNA (1)...(19): siRNA sense strand
cucaagaaccagaaauaaa

SEQ ID NO: 2507150 - RNA, 19 nt, Homo sapiens
  misc_RNA (1)...(19): siRNA sense strand
agaacagaacacuggaaua

SEQ ID NO: 2507151 - RNA, 19 nt, Homo sapiens
  misc_RNA (1)...(19): siRNA sense strand
cagaaccagcuaagggaaa

SEQ ID NO: 2507152 - RNA, 19 nt, Homo sapiens
  misc_RNA (1)...(19): siRNA sense strand
gaagauaaauuaauggcca

SEQ ID NO: 2507153 - RNA, 19 nt, Homo sapiens
  misc_RNA (1)...(19): siRNA sense strand
aggcuuaaagucagugaaa

SEQ ID NO: 2507154 - RNA, 19 nt, Homo sapiens
  misc_RNA (1)...(19): siRNA sense strand
caucagaggaagagucaca

SEQ ID NO: 2507155 - RNA, 19 nt, Homo sapiens
  misc_RNA (1)...(19): siRNA sense strand
gagcagaaaaccugaaaau

SEQ ID NO: 2507156 - RNA, 19 nt, Homo sapiens
  misc_RNA (1)...(19): siRNA sense strand
gacaugaacaagagggaca

SEQ ID NO: 2507157 - RNA, 19 nt, Homo sapiens
  misc_RNA (1)...(19): siRNA sense strand
gucucaagaaccagaaaua

SEQ ID NO: 2507158 - RNA, 19 nt, Homo sapiens
  misc_RNA (1)...(19): siRNA sense strand
agagguugaagaagaaaua

SEQ ID NO: 2507159 - RNA, 19 nt, Homo sapiens
  misc_RNA (1)...(19): siRNA sense strand
acaagagggacaaggaaaa

SEQ ID NO: 2507160 - RNA, 19 nt, Homo sapiens
  misc_RNA (1)...(19): siRNA sense strand
aacaagagggacaaggaaa

SEQ ID NO: 2507161 - RNA, 19 nt, Homo sapiens
  misc_RNA (1)...(19): siRNA sense strand
auaaagaagcauggaagua

SEQ ID NO: 2507162 - RNA, 19 nt, Homo sapiens
  misc_RNA (1)...(19): siRNA sense strand
acagacggccagagaguau

SEQ ID NO: 2507163 - RNA, 19 nt, Homo sapiens
  misc_RNA (1)...(19): siRNA sense strand
uggcaauggugaugaugga

SEQ ID NO: 2507164 - RNA, 19 nt, Homo sapiens
  misc_RNA (1)...(19): siRNA sense strand
uggaacuagaugaaacaaa

SEQ ID NO: 2507165 - RNA, 19 nt, Homo sapiens
  misc_RNA (1)...(19): siRNA sense strand
gggcacuucuggagaccau

SEQ ID NO: 2507166 - RNA, 19 nt, Homo sapiens
  misc_RNA (1)...(19): siRNA sense strand
acaaaaugauacccggaaa

SEQ ID NO: 2507167 - RNA, 19 nt, Homo sapiens
  misc_RNA (1)...(19): siRNA sense strand
uggaaauucagaaguagua

SEQ ID NO: 2507168 - RNA, 19 nt, Homo sapiens
  misc_RNA (1)...(19): siRNA sense strand
augaagaagcauuaacgaa

SEQ ID NO: 2507169 - RNA, 19 nt, Homo sapiens
  misc_RNA (1)...(19): siRNA sense strand
cacugagaaugaagaguau

SEQ ID NO: 2507170 - RNA, 19 nt, Homo sapiens
  misc_RNA (1)...(19): siRNA sense strand
cugagaaugaagaguauca

SEQ ID NO: 2507171 - RNA, 19 nt, Homo sapiens
  misc_RNA (1)...(19): siRNA sense strand
uagaaguggcugaacagaa

SEQ ID NO: 2507172 - RNA, 19 nt, Homo sapiens
  misc_RNA (1)...(19): siRNA sense strand
aaacaaaacaucagaacca

SEQ ID NO: 2507173 - RNA, 19 nt, Homo sapiens
  misc_RNA (1)...(19): siRNA sense strand
gucgagaagaucuggacaa

SEQ ID NO: 2507174 - RNA, 19 nt, Homo sapiens
  misc_RNA (1)...(19): siRNA sense strand
aaauagccagccagagaaa

SEQ ID NO: 2507175 - RNA, 19 nt, Homo sapiens
  misc_RNA (1)...(19): siRNA sense strand
gugauagagagguugaaga

SEQ ID NO: 2507176 - RNA, 19 nt, Homo sapiens
  misc_RNA (1)...(19): siRNA sense strand
gucauaagaaagaagaaga

SEQ ID NO: 2507177 - RNA, 19 nt, Homo sapiens
  misc_RNA (1)...(19): siRNA sense strand
gagagguugaagaagaaau

SEQ ID NO: 2507178 - RNA, 19 nt, Homo sapiens
  misc_RNA (1)...(19): siRNA sense strand
gggacacugacaugaacaa

SEQ ID NO: 2507179 - RNA, 19 nt, Homo sapiens
  misc_RNA (1)...(19): siRNA sense strand
caaucuucuacuugagcaa

SEQ ID NO: 2507180 - RNA, 19 nt, Homo sapiens
  misc_RNA (1)...(19): siRNA sense strand
ccagaaauaaauaaggacu

SEQ ID NO: 2507181 - RNA, 19 nt, Homo sapiens
  misc_RNA (1)...(19): siRNA sense strand
gaacacuggaauaucacaa

SEQ ID NO: 2507182 - RNA, 19 nt, Homo sapiens
  misc_RNA (1)...(19): siRNA sense strand
ggaagagucacaaaggcuu

SEQ ID NO: 2507183 - RNA, 19 nt, Homo sapiens
  misc_RNA (1)...(19): siRNA sense strand
cagcuaagggaaaauaaaa

SEQ ID NO: 2507184 - RNA, 19 nt, Homo sapiens
  misc_RNA (1)...(19): siRNA sense strand
auucagaaguaguacaacu

SEQ ID NO: 2507185 - RNA, 19 nt, Homo sapiens
  misc_RNA (1)...(19): siRNA sense strand
cauuugaucucaggagcaa

SEQ ID NO: 2507186 - RNA, 19 nt, Homo sapiens
  misc_RNA (1)...(19): siRNA sense strand
gggagcggcaagagcaaca

SEQ ID NO: 2507187 - RNA, 19 nt, Homo sapiens
  misc_RNA (1)...(19): siRNA sense strand
acuugauagauauggaaga

SEQ ID NO: 2507188 - RNA, 19 nt, Homo sapiens
  misc_RNA (1)...(19): siRNA sense strand
uggugaugauggauuaauu

SEQ ID NO: 2507189 - RNA, 19 nt, Homo sapiens
  misc_RNA (1)...(19): siRNA sense strand
aagacuggaacuagaugaa

SEQ ID NO: 2507190 - RNA, 19 nt, Homo sapiens
  misc_RNA (1)...(19): siRNA sense strand
aaaggacagcucugauaaa

SEQ ID NO: 2507191 - RNA, 19 nt, Homo sapiens
  misc_RNA (1)...(19): siRNA sense strand
aaauaaagaagcauggaag

SEQ ID NO: 2507192 - RNA, 19 nt, Homo sapiens
  misc_RNA (1)...(19): siRNA sense strand
aauaaagaagcauggaagu

SEQ ID NO: 2507193 - RNA, 19 nt, Homo sapiens
  misc_RNA (1)...(19): siRNA sense strand
uggaaguaauccuguggga

SEQ ID NO: 2507194 - RNA, 19 nt, Homo sapiens
  misc_RNA (1)...(19): siRNA sense strand
acaaaggaggagcagaaaa

SEQ ID NO: 2507195 - RNA, 19 nt, Homo sapiens
  misc_RNA (1)...(19): siRNA sense strand
aaacaaaagcagauagaag

SEQ ID NO: 2507196 - RNA, 19 nt, Homo sapiens
  misc_RNA (1)...(19): siRNA sense strand
gcuacaaccugguggccaa

SEQ ID NO: 2507197 - RNA, 19 nt, Homo sapiens
  misc_RNA (1)...(19): siRNA sense strand
ugaaggaaucagaggacaa

SEQ ID NO: 2507198 - RNA, 19 nt, Homo sapiens
  misc_RNA (1)...(19): siRNA sense strand
acuguaaguaugaguguau

SEQ ID NO: 2507199 - RNA, 19 nt, Homo sapiens
  misc_RNA (1)...(19): siRNA sense strand
ucacagagaaaauggacua

SEQ ID NO: 2507200 - RNA, 19 nt, Homo sapiens
  misc_RNA (1)...(19): siRNA sense strand
ccuccaggaaggucacaaa

SEQ ID NO: 2507201 - RNA, 19 nt, Homo sapiens
  misc_RNA (1)...(19): siRNA sense strand
aggacaaguucaagcugga

SEQ ID NO: 2507202 - RNA, 19 nt, Homo sapiens
  misc_RNA (1)...(19): siRNA sense strand
acacugaccucacagagaa

SEQ ID NO: 2507203 - RNA, 19 nt, Homo sapiens
  misc_RNA (1)...(19): siRNA sense strand
agaacagagugguggguga

SEQ ID NO: 2507204 - RNA, 19 nt, Homo sapiens
  misc_RNA (1)...(19): siRNA sense strand
cggaacgacucuagaccca

SEQ ID NO: 2507205 - RNA, 19 nt, Homo sapiens
  misc_RNA (1)...(19): siRNA sense strand
uggcacugcuccagcggua

SEQ ID NO: 2507206 - RNA, 19 nt, Homo sapiens
  misc_RNA (1)...(19): siRNA sense strand
agaagaguaccuagcggaa

SEQ ID NO: 2507207 - RNA, 19 nt, Homo sapiens
  misc_RNA (1)...(19): siRNA sense strand
aggcaaggguucaagcucu

SEQ ID NO: 2507208 - RNA, 19 nt, Homo sapiens
  misc_RNA (1)...(19): siRNA sense strand
aggaaugaucaauuggaau

SEQ ID NO: 2507209 - RNA, 19 nt, Homo sapiens
  misc_RNA (1)...(19): siRNA sense strand
gcuuucaaguggagggaag

SEQ ID NO: 2507210 - RNA, 19 nt, Homo sapiens
  misc_RNA (1)...(19): siRNA sense strand
gcaaaauguuccaggugca

SEQ ID NO: 2507211 - RNA, 19 nt, Homo sapiens
  misc_RNA (1)...(19): siRNA sense strand
cuucaaacaaugaccucaa

SEQ ID NO: 2507212 - RNA, 19 nt, Homo sapiens
  misc_RNA (1)...(19): siRNA sense strand
aggaagucguggcgaggga

SEQ ID NO: 2507213 - RNA, 19 nt, Homo sapiens
  misc_RNA (1)...(19): siRNA sense strand
cuccauaccaagaguccaa

SEQ ID NO: 2507214 - RNA, 19 nt, Homo sapiens
  misc_RNA (1)...(19): siRNA sense strand
ccuuuacgucagcgacaaa

SEQ ID NO: 2507215 - RNA, 19 nt, Homo sapiens
  misc_RNA (1)...(19): siRNA sense strand
ggcucauggagaugggauu

SEQ ID NO: 2507216 - RNA, 19 nt, Homo sapiens
  misc_RNA (1)...(19): siRNA sense strand
caagaguccaaguggcaca

SEQ ID NO: 2507217 - RNA, 19 nt, Homo sapiens
  misc_RNA (1)...(19): siRNA sense strand
agacagcagcagggaggaa

SEQ ID NO: 2507218 - RNA, 19 nt, Homo sapiens
  misc_RNA (1)...(19): siRNA sense strand
caguagaaguagaaaccca

SEQ ID NO: 2507219 - RNA, 19 nt, Homo sapiens
  misc_RNA (1)...(19): siRNA sense strand
cugaagaacagaaggcgau

SEQ ID NO: 2507220 - RNA, 19 nt, Homo sapiens
  misc_RNA (1)...(19): siRNA sense strand
caugacagauacugggaca

SEQ ID NO: 2507221 - RNA, 19 nt, Homo sapiens
  misc_RNA (1)...(19): siRNA sense strand
aaguagaaacccaaggaga

SEQ ID NO: 2507222 - RNA, 19 nt, Homo sapiens
  misc_RNA (1)...(19): siRNA sense strand
agugaaaguacuuagcauu

SEQ ID NO: 2507223 - RNA, 19 nt, Homo sapiens
  misc_RNA (1)...(19): siRNA sense strand
aagaacagaaggcgaucaa

SEQ ID NO: 2507224 - RNA, 19 nt, Homo sapiens
  misc_RNA (1)...(19): siRNA sense strand
aguacuuagcauugaucaa

SEQ ID NO: 2507225 - RNA, 19 nt, Homo sapiens
  misc_RNA (1)...(19): siRNA sense strand
aguacgaguauuuggauca

SEQ ID NO: 2507226 - RNA, 19 nt, Homo sapiens
  misc_RNA (1)...(19): siRNA sense strand
agaaggcgaucaaggccaa

SEQ ID NO: 2507227 - RNA, 19 nt, Homo sapiens
  misc_RNA (1)...(19): siRNA sense strand
aggucuauaaugaagagaa

SEQ ID NO: 2507228 - RNA, 19 nt, Homo sapiens
  misc_RNA (1)...(19): siRNA sense strand
cuuuauaaguucagugcug

SEQ ID NO: 2507229 - RNA, 19 nt, Homo sapiens
  misc_RNA (1)...(19): siRNA sense strand
acacaaagcagaagguuau

SEQ ID NO: 2507230 - RNA, 19 nt, Homo sapiens
  misc_RNA (1)...(19): siRNA sense strand
gugaaauacagguaaugaa

SEQ ID NO: 2507231 - RNA, 19 nt, Homo sapiens
  misc_RNA (1)...(19): siRNA sense strand
uugaauggauccagcgcua

SEQ ID NO: 2507232 - RNA, 19 nt, Homo sapiens
  misc_RNA (1)...(19): siRNA sense strand
gggagaugucuuagaggca

SEQ ID NO: 2507233 - RNA, 19 nt, Homo sapiens
  misc_RNA (1)...(19): siRNA sense strand
uacacaaagcagaagguua

SEQ ID NO: 2507234 - RNA, 19 nt, Homo sapiens
  misc_RNA (1)...(19): siRNA sense strand
uaaugaaagucuugcggca

SEQ ID NO: 2507235 - RNA, 19 nt, Homo sapiens
  misc_RNA (1)...(19): siRNA sense strand
ggucgguauaugaggcuuu

SEQ ID NO: 2507236 - RNA, 19 nt, Homo sapiens
  misc_RNA (1)...(19): siRNA sense strand
ugggagaaugugaagauau

SEQ ID NO: 2507237 - RNA, 19 nt, Homo sapiens
  misc_RNA (1)...(19): siRNA sense strand
gcuccuaugggucgguaua

SEQ ID NO: 2507238 - RNA, 19 nt, Homo sapiens
  misc_RNA (1)...(19): siRNA sense strand
gagcacaucucgaguauac

SEQ ID NO: 2507239 - RNA, 19 nt, Homo sapiens
  misc_RNA (1)...(19): siRNA sense strand
agaagaaggccucugauga

SEQ ID NO: 2507240 - RNA, 19 nt, Homo sapiens
  misc_RNA (1)...(19): siRNA sense strand
augaaagucuugcggcaca

SEQ ID NO: 2507241 - RNA, 19 nt, Homo sapiens
  misc_RNA (1)...(19): siRNA sense strand
uggacaagugggagaaugu

SEQ ID NO: 2507242 - RNA, 19 nt, Homo sapiens
  misc_RNA (1)...(19): siRNA sense strand
augguuaugaggugggcaa

SEQ ID NO: 2507243 - RNA, 19 nt, Homo sapiens
  misc_RNA (1)...(19): siRNA sense strand
agguuaugguggcagucaa

SEQ ID NO: 2507244 - RNA, 19 nt, Homo sapiens
  misc_RNA (1)...(19): siRNA sense strand
agaaccuguugcuggacaa

SEQ ID NO: 2507245 - RNA, 19 nt, Homo sapiens
  misc_RNA (1)...(19): siRNA sense strand
ggggaagggagaugucuua

SEQ ID NO: 2507246 - RNA, 19 nt, Homo sapiens
  misc_RNA (1)...(19): siRNA sense strand
guuccugccccgugaaaua

SEQ ID NO: 2507247 - RNA, 19 nt, Homo sapiens
  misc_RNA (1)...(19): siRNA sense strand
cccgugaaauacagguaau

SEQ ID NO: 2507248 - RNA, 19 nt, Homo sapiens
  misc_RNA (1)...(19): siRNA sense strand
ugugaagauaucagacuuu

SEQ ID NO: 2507249 - RNA, 19 nt, Homo sapiens
  misc_RNA (1)...(19): siRNA sense strand
ccucugaugacuaucuuaa

SEQ ID NO: 2507250 - RNA, 19 nt, Homo sapiens
  misc_RNA (1)...(19): siRNA sense strand
ucucggagcugcaggguga

SEQ ID NO: 2507251 - RNA, 19 nt, Homo sapiens
  misc_RNA (1)...(19): siRNA sense strand
ucgaguaccuccaggacga

SEQ ID NO: 2507252 - RNA, 19 nt, Homo sapiens
  misc_RNA (1)...(19): siRNA sense strand
accucuaccugcaggacaa

SEQ ID NO: 2507253 - RNA, 19 nt, Homo sapiens
  misc_RNA (1)...(19): siRNA sense strand
ggaucuacucgaacaacau

SEQ ID NO: 2507254 - RNA, 19 nt, Homo sapiens
  misc_RNA (1)...(19): siRNA sense strand
aggacaaccacaucgagua

SEQ ID NO: 2507255 - RNA, 19 nt, Homo sapiens
  misc_RNA (1)...(19): siRNA sense strand
ggagaguagaggugagaau

SEQ ID NO: 2507256 - RNA, 19 nt, Homo sapiens
  misc_RNA (1)...(19): siRNA sense strand
gugcaaaggaaaugaguca

SEQ ID NO: 2507257 - RNA, 19 nt, Homo sapiens
  misc_RNA (1)...(19): siRNA sense strand
caugaacagugguggacaa

SEQ ID NO: 2507258 - RNA, 19 nt, Homo sapiens
  misc_RNA (1)...(19): siRNA sense strand
aggugaaauuccagggaca

SEQ ID NO: 2507259 - RNA, 19 nt, Homo sapiens
  misc_RNA (1)...(19): siRNA sense strand
cuggaaaaguugaggugaa

SEQ ID NO: 2507260 - RNA, 19 nt, Homo sapiens
  misc_RNA (1)...(19): siRNA sense strand
uggcagucgucgugcuaaa

SEQ ID NO: 2507261 - RNA, 19 nt, Homo sapiens
  misc_RNA (1)...(19): siRNA sense strand
ccgaaaaguuccaguguga

SEQ ID NO: 2507262 - RNA, 19 nt, Homo sapiens
  misc_RNA (1)...(19): siRNA sense strand
gcauauugauuuuggaaga

SEQ ID NO: 2507263 - RNA, 19 nt, Homo sapiens
  misc_RNA (1)...(19): siRNA sense strand
ccucaacugucgugugcaa

SEQ ID NO: 2507264 - RNA, 19 nt, Homo sapiens
  misc_RNA (1)...(19): siRNA sense strand
ggacaauaugugaccagaa

SEQ ID NO: 2507265 - RNA, 19 nt, Homo sapiens
  misc_RNA (1)...(19): siRNA sense strand
cagggagaguggaggugaa

SEQ ID NO: 2507266 - RNA, 19 nt, Homo sapiens
  misc_RNA (1)...(19): siRNA sense strand
agaauuaaacuguggagau

SEQ ID NO: 2507267 - RNA, 19 nt, Homo sapiens
  misc_RNA (1)...(19): siRNA sense strand
gcagaagagaccuggauca

SEQ ID NO: 2507268 - RNA, 19 nt, Homo sapiens
  misc_RNA (1)...(19): siRNA sense strand
aguaaugaagcuagagaca

SEQ ID NO: 2507269 - RNA, 19 nt, Homo sapiens
  misc_RNA (1)...(19): siRNA sense strand
uggacguguugaagugaaa

SEQ ID NO: 2507270 - RNA, 19 nt, Homo sapiens
  misc_RNA (1)...(19): siRNA sense strand
aggcggaagugguguguca

SEQ ID NO: 2507271 - RNA, 19 nt, Homo sapiens
  misc_RNA (1)...(19): siRNA sense strand
agugaaacaugcagacaca

SEQ ID NO: 2507272 - RNA, 19 nt, Homo sapiens
  misc_RNA (1)...(19): siRNA sense strand
cagugugaagggagugaaa

SEQ ID NO: 2507273 - RNA, 19 nt, Homo sapiens
  misc_RNA (1)...(19): siRNA sense strand
agaccugccucaagagaga

SEQ ID NO: 2507274 - RNA, 19 nt, Homo sapiens
  misc_RNA (1)...(19): siRNA sense strand
ugaucugcuuagaggacaa

SEQ ID NO: 2507275 - RNA, 19 nt, Homo sapiens
  misc_RNA (1)...(19): siRNA sense strand
gggagaucacuuuggaaaa

SEQ ID NO: 2507276 - RNA, 19 nt, Homo sapiens
  misc_RNA (1)...(19): siRNA sense strand
gcacaggaauggaguccca

SEQ ID NO: 2507277 - RNA, 19 nt, Homo sapiens
  misc_RNA (1)...(19): siRNA sense strand
ugggagaucacuuuggaaa

SEQ ID NO: 2507278 - RNA, 19 nt, Homo sapiens
  misc_RNA (1)...(19): siRNA sense strand
cgaugggaguggaaacaga

SEQ ID NO: 2507279 - RNA, 19 nt, Homo sapiens
  misc_RNA (1)...(19): siRNA sense strand
ccucagaguuucaaccaga

SEQ ID NO: 2507280 - RNA, 19 nt, Homo sapiens
  misc_RNA (1)...(19): siRNA sense strand
ccauuuggcuggaugacau

SEQ ID NO: 2507281 - RNA, 19 nt, Homo sapiens
  misc_RNA (1)...(19): siRNA sense strand
agcuagagacauuuggaua

SEQ ID NO: 2507282 - RNA, 19 nt, Homo sapiens
  misc_RNA (1)...(19): siRNA sense strand
acacaucgcuguugggagu

SEQ ID NO: 2507283 - RNA, 19 nt, Homo sapiens
  misc_RNA (1)...(19): siRNA sense strand
gcgacuagcagauggaagu

SEQ ID NO: 2507284 - RNA, 19 nt, Homo sapiens
  misc_RNA (1)...(19): siRNA sense strand
gggaauucugugugcuaau

SEQ ID NO: 2507285 - RNA, 19 nt, Homo sapiens
  misc_RNA (1)...(19): siRNA sense strand
ggucuaacuugggccgaaa

SEQ ID NO: 2507286 - RNA, 19 nt, Homo sapiens
  misc_RNA (1)...(19): siRNA sense strand
ggacaaacggcuccgccua

SEQ ID NO: 2507287 - RNA, 19 nt, Homo sapiens
  misc_RNA (1)...(19): siRNA sense strand
ugaagaugcuagcgacaca

SEQ ID NO: 2507288 - RNA, 19 nt, Homo sapiens
  misc_RNA (1)...(19): siRNA sense strand
cugcacauaugauggaaaa

SEQ ID NO: 2507289 - RNA, 19 nt, Homo sapiens
  misc_RNA (1)...(19): siRNA sense strand
augcagcuguuguguguaa

SEQ ID NO: 2507290 - RNA, 19 nt, Homo sapiens
  misc_RNA (1)...(19): siRNA sense strand
ugcuaaaccuaguaaugaa

SEQ ID NO: 2507291 - RNA, 19 nt, Homo sapiens
  misc_RNA (1)...(19): siRNA sense strand
acgggcaaguggagaucaa

SEQ ID NO: 2507292 - RNA, 19 nt, Homo sapiens
  misc_RNA (1)...(19): siRNA sense strand
guuucauugcuuagggaau

SEQ ID NO: 2507293 - RNA, 19 nt, Homo sapiens
  misc_RNA (1)...(19): siRNA sense strand
uggaaaagggaauggucua

SEQ ID NO: 2507294 - RNA, 19 nt, Homo sapiens
  misc_RNA (1)...(19): siRNA sense strand
aauaagagugcguggagga

SEQ ID NO: 2507295 - RNA, 19 nt, Homo sapiens
  misc_RNA (1)...(19): siRNA sense strand
gugcaaacagcuuggaugu

SEQ ID NO: 2507296 - RNA, 19 nt, Homo sapiens
  misc_RNA (1)...(19): siRNA sense strand
ggagaguagagcugaaaau

SEQ ID NO: 2507297 - RNA, 19 nt, Homo sapiens
  misc_RNA (1)...(19): siRNA sense strand
gugugaagggagugaaacu

SEQ ID NO: 2507298 - RNA, 19 nt, Homo sapiens
  misc_RNA (1)...(19): siRNA sense strand
cagcacgacugcaggcaca

SEQ ID NO: 2507299 - RNA, 19 nt, Homo sapiens
  misc_RNA (1)...(19): siRNA sense strand
cuguuaucauggagaagau

SEQ ID NO: 2507300 - RNA, 19 nt, Homo sapiens
  misc_RNA (1)...(19): siRNA sense strand
ggugagaauucaugaacag

SEQ ID NO: 2507301 - RNA, 19 nt, Homo sapiens
  misc_RNA (1)...(19): siRNA sense strand
aggugaaauaccaaggaga

SEQ ID NO: 2507302 - RNA, 19 nt, Homo sapiens
  misc_RNA (1)...(19): siRNA sense strand
cagauggagcacaaggaau

SEQ ID NO: 2507303 - RNA, 19 nt, Homo sapiens
  misc_RNA (1)...(19): siRNA sense strand
ccacaugggacaagaaccu

SEQ ID NO: 2507304 - RNA, 19 nt, Homo sapiens
  misc_RNA (1)...(19): siRNA sense strand
ugaggcuaguggauggaaa

SEQ ID NO: 2507305 - RNA, 19 nt, Homo sapiens
  misc_RNA (1)...(19): siRNA sense strand
agaucaacgugcuuggaca

SEQ ID NO: 2507306 - RNA, 19 nt, Homo sapiens
  misc_RNA (1)...(19): siRNA sense strand
acagagaggaugugauugu

SEQ ID NO: 2507307 - RNA, 19 nt, Homo sapiens
  misc_RNA (1)...(19): siRNA sense strand
ccgacuugugaauggcaaa

SEQ ID NO: 2507308 - RNA, 19 nt, Homo sapiens
  misc_RNA (1)...(19): siRNA sense strand
caaauguaucugacccaua

SEQ ID NO: 2507309 - RNA, 19 nt, Homo sapiens
  misc_RNA (1)...(19): siRNA sense strand
agaagauguuggugugaac

SEQ ID NO: 2507310 - RNA, 19 nt, Homo sapiens
  misc_RNA (1)...(19): siRNA sense strand
ugaagauguuggagugauc

SEQ ID NO: 2507311 - RNA, 19 nt, Homo sapiens
  misc_RNA (1)...(19): siRNA sense strand
gugggaauucugugugcua

SEQ ID NO: 2507312 - RNA, 19 nt, Homo sapiens
  misc_RNA (1)...(19): siRNA sense strand
agagaggaugugauuguaa

SEQ ID NO: 2507313 - RNA, 19 nt, Homo sapiens
  misc_RNA (1)...(19): siRNA sense strand
cagaaagaacauuacacau

SEQ ID NO: 2507314 - RNA, 19 nt, Homo sapiens
  misc_RNA (1)...(19): siRNA sense strand
ugugcugugcagagaauua

SEQ ID NO: 2507315 - RNA, 19 nt, Homo sapiens
  misc_RNA (1)...(19): siRNA sense strand
gcucagaauucacagccuu

SEQ ID NO: 2507316 - RNA, 19 nt, Homo sapiens
  misc_RNA (1)...(19): siRNA sense strand
cugggacaguggaggugaa

SEQ ID NO: 2507317 - RNA, 19 nt, Homo sapiens
  misc_RNA (1)...(19): siRNA sense strand
ccauguuauuacagagauu

SEQ ID NO: 2507318 - RNA, 19 nt, Homo sapiens
  misc_RNA (1)...(19): siRNA sense strand
uucgaagaguugaggaaua

SEQ ID NO: 2507319 - RNA, 19 nt, Homo sapiens
  misc_RNA (1)...(19): siRNA sense strand
agaucaaauuccaagaaga

SEQ ID NO: 2507320 - RNA, 19 nt, Homo sapiens
  misc_RNA (1)...(19): siRNA sense strand
aggcuuugcuggacggaau

SEQ ID NO: 2507321 - RNA, 19 nt, Homo sapiens
  misc_RNA (1)...(19): siRNA sense strand
ccaggugguaggagagauu

SEQ ID NO: 2507322 - RNA, 19 nt, Homo sapiens
  misc_RNA (1)...(19): siRNA sense strand
ccucaacaaguuagagaga

SEQ ID NO: 2507323 - RNA, 19 nt, Homo sapiens
  misc_RNA (1)...(19): siRNA sense strand
aguuagagagauaugcaua

SEQ ID NO: 2507324 - RNA, 19 nt, Homo sapiens
  misc_RNA (1)...(19): siRNA sense strand
guuucuaguuuuaggguuu

SEQ ID NO: 2507325 - RNA, 19 nt, Homo sapiens
  misc_RNA (1)...(19): siRNA sense strand
gggcaucagaaauugggaa

SEQ ID NO: 2507326 - RNA, 19 nt, Homo sapiens
  misc_RNA (1)...(19): siRNA sense strand
ugaugugcccuuuaggaaa

SEQ ID NO: 2507327 - RNA, 19 nt, Homo sapiens
  misc_RNA (1)...(19): siRNA sense strand
gaauaaaaguggacgcaag

SEQ ID NO: 2507328 - RNA, 19 nt, Homo sapiens
  misc_RNA (1)...(19): siRNA sense strand
aaguaaaugggaagcuauu

SEQ ID NO: 2507329 - RNA, 19 nt, Homo sapiens
  misc_RNA (1)...(19): siRNA sense strand
caguuuggaugguggcuca

SEQ ID NO: 2507330 - RNA, 19 nt, Homo sapiens
  misc_RNA (1)...(19): siRNA sense strand
agauccugauagugaaauu

SEQ ID NO: 2507331 - RNA, 19 nt, Homo sapiens
  misc_RNA (1)...(19): siRNA sense strand
auuucgaagaguugaggaa

SEQ ID NO: 2507332 - RNA, 19 nt, Homo sapiens
  misc_RNA (1)...(19): siRNA sense strand
agugaaauugcuacaacua

SEQ ID NO: 2507333 - RNA, 19 nt, Homo sapiens
  misc_RNA (1)...(19): siRNA sense strand
ugaucauuccagagcacua

SEQ ID NO: 2507334 - RNA, 19 nt, Homo sapiens
  misc_RNA (1)...(19): siRNA sense strand
aggcaagcaagaagaaagu

SEQ ID NO: 2507335 - RNA, 19 nt, Homo sapiens
  misc_RNA (1)...(19): siRNA sense strand
guauagacgccgauaucca

SEQ ID NO: 2507336 - RNA, 19 nt, Homo sapiens
  misc_RNA (1)...(19): siRNA sense strand
cuguauaucuuguacggca

SEQ ID NO: 2507337 - RNA, 19 nt, Homo sapiens
  misc_RNA (1)...(19): siRNA sense strand
ggaaauucucaaugacugu

SEQ ID NO: 2507338 - RNA, 19 nt, Homo sapiens
  misc_RNA (1)...(19): siRNA sense strand
gaguuuaguucaaagcagu

SEQ ID NO: 2507339 - RNA, 19 nt, Homo sapiens
  misc_RNA (1)...(19): siRNA sense strand
ccugauagugaaauugcua

SEQ ID NO: 2507340 - RNA, 19 nt, Homo sapiens
  misc_RNA (1)...(19): siRNA sense strand
uauuagaaacccugaucau

SEQ ID NO: 2507341 - RNA, 19 nt, Homo sapiens
  misc_RNA (1)...(19): siRNA sense strand
caccauacgccaauaucaa

SEQ ID NO: 2507342 - RNA, 19 nt, Homo sapiens
  misc_RNA (1)...(19): siRNA sense strand
cuaugaaaguauccagcca

SEQ ID NO: 2507343 - RNA, 19 nt, Homo sapiens
  misc_RNA (1)...(19): siRNA sense strand
ugaugagggcgcugcauuu

SEQ ID NO: 2507344 - RNA, 19 nt, Homo sapiens
  misc_RNA (1)...(19): siRNA sense strand
gaccgaagaaagaagcuau

SEQ ID NO: 2507345 - RNA, 19 nt, Homo sapiens
  misc_RNA (1)...(19): siRNA sense strand
caucuuuaugucagaaaca

SEQ ID NO: 2507346 - RNA, 19 nt, Homo sapiens
  misc_RNA (1)...(19): siRNA sense strand
ccauguuauuacagagauu

SEQ ID NO: 2507347 - RNA, 19 nt, Homo sapiens
  misc_RNA (1)...(19): siRNA sense strand
uucgaagaguugaggaaua

SEQ ID NO: 2507348 - RNA, 19 nt, Homo sapiens
  misc_RNA (1)...(19): siRNA sense strand
agaucaaauuccaagaaga

SEQ ID NO: 2507349 - RNA, 19 nt, Homo sapiens
  misc_RNA (1)...(19): siRNA sense strand
aggcuuugcuggacggaau

SEQ ID NO: 2507350 - RNA, 19 nt, Homo sapiens
  misc_RNA (1)...(19): siRNA sense strand
ccaggugguaggagagauu

SEQ ID NO: 2507351 - RNA, 19 nt, Homo sapiens
  misc_RNA (1)...(19): siRNA sense strand
ccucaacaaguuagagaga

SEQ ID NO: 2507352 - RNA, 19 nt, Homo sapiens
  misc_RNA (1)...(19): siRNA sense strand
aguuagagagauaugcaua

SEQ ID NO: 2507353 - RNA, 19 nt, Homo sapiens
  misc_RNA (1)...(19): siRNA sense strand
guuucuaguuuuaggguuu

SEQ ID NO: 2507354 - RNA, 19 nt, Homo sapiens
  misc_RNA (1)...(19): siRNA sense strand
gggcaucagaaauugggaa

SEQ ID NO: 2507355 - RNA, 19 nt, Homo sapiens
  misc_RNA (1)...(19): siRNA sense strand
ugaugugcccuuuaggaaa

SEQ ID NO: 2507356 - RNA, 19 nt, Homo sapiens
  misc_RNA (1)...(19): siRNA sense strand
gaauaaaaguggacgcaag

SEQ ID NO: 2507357 - RNA, 19 nt, Homo sapiens
  misc_RNA (1)...(19): siRNA sense strand
aaguaaaugggaagcuauu

SEQ ID NO: 2507358 - RNA, 19 nt, Homo sapiens
  misc_RNA (1)...(19): siRNA sense strand
caguuuggaugguggcuca

SEQ ID NO: 2507359 - RNA, 19 nt, Homo sapiens
  misc_RNA (1)...(19): siRNA sense strand
agauccugauagugaaauu

SEQ ID NO: 2507360 - RNA, 19 nt, Homo sapiens
  misc_RNA (1)...(19): siRNA sense strand
auuucgaagaguugaggaa

SEQ ID NO: 2507361 - RNA, 19 nt, Homo sapiens
  misc_RNA (1)...(19): siRNA sense strand
agugaaauugcuacaacua

SEQ ID NO: 2507362 - RNA, 19 nt, Homo sapiens
  misc_RNA (1)...(19): siRNA sense strand
ugaucauuccagagcacua

SEQ ID NO: 2507363 - RNA, 19 nt, Homo sapiens
  misc_RNA (1)...(19): siRNA sense strand
aggcaagcaagaagaaagu

SEQ ID NO: 2507364 - RNA, 19 nt, Homo sapiens
  misc_RNA (1)...(19): siRNA sense strand
guauagacgccgauaucca

SEQ ID NO: 2507365 - RNA, 19 nt, Homo sapiens
  misc_RNA (1)...(19): siRNA sense strand
cuguauaucuuguacggca

SEQ ID NO: 2507366 - RNA, 19 nt, Homo sapiens
  misc_RNA (1)...(19): siRNA sense strand
ggaaauucucaaugacugu

SEQ ID NO: 2507367 - RNA, 19 nt, Homo sapiens
  misc_RNA (1)...(19): siRNA sense strand
gaguuuaguucaaagcagu

SEQ ID NO: 2507368 - RNA, 19 nt, Homo sapiens
  misc_RNA (1)...(19): siRNA sense strand
ccugauagugaaauugcua

SEQ ID NO: 2507369 - RNA, 19 nt, Homo sapiens
  misc_RNA (1)...(19): siRNA sense strand
uauuagaaacccugaucau

SEQ ID NO: 2507370 - RNA, 19 nt, Homo sapiens
  misc_RNA (1)...(19): siRNA sense strand
caccauacgccaauaucaa

SEQ ID NO: 2507371 - RNA, 19 nt, Homo sapiens
  misc_RNA (1)...(19): siRNA sense strand
cuaugaaaguauccagcca

SEQ ID NO: 2507372 - RNA, 19 nt, Homo sapiens
  misc_RNA (1)...(19): siRNA sense strand
ugaugagggcgcugcauuu

SEQ ID NO: 2507373 - RNA, 19 nt, Homo sapiens
  misc_RNA (1)...(19): siRNA sense strand
gaccgaagaaagaagcuau

SEQ ID NO: 2507374 - RNA, 19 nt, Homo sapiens
  misc_RNA (1)...(19): siRNA sense strand
caucuuuaugucagaaaca

SEQ ID NO: 2507375 - RNA, 19 nt, Homo sapiens
  misc_RNA (1)...(19): siRNA sense strand
aggcaaagagagaggacaa

SEQ ID NO: 2507376 - RNA, 19 nt, Homo sapiens
  misc_RNA (1)...(19): siRNA sense strand
aggaguuugcagagaaaua

SEQ ID NO: 2507377 - RNA, 19 nt, Homo sapiens
  misc_RNA (1)...(19): siRNA sense strand
guaaauugcugcuagccaa

SEQ ID NO: 2507378 - RNA, 19 nt, Homo sapiens
  misc_RNA (1)...(19): siRNA sense strand
cauaacagccuuaagguga

SEQ ID NO: 2507379 - RNA, 19 nt, Homo sapiens
  misc_RNA (1)...(19): siRNA sense strand
aagaaacgggacaaggaaa

SEQ ID NO: 2507380 - RNA, 19 nt, Homo sapiens
  misc_RNA (1)...(19): siRNA sense strand
aaagaaaggaccaggagca

SEQ ID NO: 2507381 - RNA, 19 nt, Homo sapiens
  misc_RNA (1)...(19): siRNA sense strand
agaaacgggacaaggaaaa

SEQ ID NO: 2507382 - RNA, 19 nt, Homo sapiens
  misc_RNA (1)...(19): siRNA sense strand
agacaacagggaagaccaa

SEQ ID NO: 2507383 - RNA, 19 nt, Homo sapiens
  misc_RNA (1)...(19): siRNA sense strand
gggagaagcccauggaccu

SEQ ID NO: 2507384 - RNA, 19 nt, Homo sapiens
  misc_RNA (1)...(19): siRNA sense strand
gagagaggacaaaggcaca

SEQ ID NO: 2507385 - RNA, 19 nt, Homo sapiens
  misc_RNA (1)...(19): siRNA sense strand
gguccaguucugaagacaa

SEQ ID NO: 2507386 - RNA, 19 nt, Homo sapiens
  misc_RNA (1)...(19): siRNA sense strand
ggacaaaggcacaaggacg

SEQ ID NO: 2507387 - RNA, 19 nt, Homo sapiens
  misc_RNA (1)...(19): siRNA sense strand
ggcaaagagagaggacaaa

SEQ ID NO: 2507388 - RNA, 19 nt, Homo sapiens
  misc_RNA (1)...(19): siRNA sense strand
cgucucagauacaaggaca

SEQ ID NO: 2507389 - RNA, 19 nt, Homo sapiens
  misc_RNA (1)...(19): siRNA sense strand
ccaagccagaggaggcaaa

SEQ ID NO: 2507390 - RNA, 19 nt, Homo sapiens
  misc_RNA (1)...(19): siRNA sense strand
cagcacagccagaggcaac

SEQ ID NO: 2507391 - RNA, 19 nt, Homo sapiens
  misc_RNA (1)...(19): siRNA sense strand
cguuuaaggaguuugcaga

SEQ ID NO: 2507392 - RNA, 19 nt, Homo sapiens
  misc_RNA (1)...(19): siRNA sense strand
auggagacaaagaagacaa

SEQ ID NO: 2507393 - RNA, 19 nt, Homo sapiens
  misc_RNA (1)...(19): siRNA sense strand
ccugaggagucaagguuuu

SEQ ID NO: 2507394 - RNA, 19 nt, Homo sapiens
  misc_RNA (1)...(19): siRNA sense strand
aggaacgaaagcagauauu

SEQ ID NO: 2507395 - RNA, 19 nt, Homo sapiens
  misc_RNA (1)...(19): siRNA sense strand
uagccaaagaagaauucaa

SEQ ID NO: 2507396 - RNA, 19 nt, Homo sapiens
  misc_RNA (1)...(19): siRNA sense strand
cagacuaaggcugcggaaa

SEQ ID NO: 2507397 - RNA, 19 nt, Homo sapiens
  misc_RNA (1)...(19): siRNA sense strand
cggcaaagagcgugaugaa

SEQ ID NO: 2507398 - RNA, 19 nt, Homo sapiens
  misc_RNA (1)...(19): siRNA sense strand
aagcagaaauugaggcaga

SEQ ID NO: 2507399 - RNA, 19 nt, Homo sapiens
  misc_RNA (1)...(19): siRNA sense strand
agaacaaacaggagacauu

SEQ ID NO: 2507400 - RNA, 19 nt, Homo sapiens
  misc_RNA (1)...(19): siRNA sense strand
gggacuuguuugaggguca

SEQ ID NO: 2507401 - RNA, 19 nt, Homo sapiens
  misc_RNA (1)...(19): siRNA sense strand
gcauauuagcugagaaacu

SEQ ID NO: 2507402 - RNA, 19 nt, Homo sapiens
  misc_RNA (1)...(19): siRNA sense strand
agaagaaaccacaaguuaa

SEQ ID NO: 2507403 - RNA, 19 nt, Homo sapiens
  misc_RNA (1)...(19): siRNA sense strand
agaaauuacugcagcuuau

SEQ ID NO: 2507404 - RNA, 19 nt, Homo sapiens
  misc_RNA (1)...(19): siRNA sense strand
augaauauccacagagcaa

SEQ ID NO: 2507405 - RNA, 19 nt, Homo sapiens
  misc_RNA (1)...(19): siRNA sense strand
uggagaauccugugagaau

SEQ ID NO: 2507406 - RNA, 19 nt, Homo sapiens
  misc_RNA (1)...(19): siRNA sense strand
caggaaggaauguuagaaa

SEQ ID NO: 2507407 - RNA, 19 nt, Homo sapiens
  misc_RNA (1)...(19): siRNA sense strand
ccaaacagugaaugugaaa

SEQ ID NO: 2507408 - RNA, 19 nt, Homo sapiens
  misc_RNA (1)...(19): siRNA sense strand
cuaaauaagaagagcacca

SEQ ID NO: 2507409 - RNA, 19 nt, Homo sapiens
  misc_RNA (1)...(19): siRNA sense strand
gggaaaagccaaggaauua

SEQ ID NO: 2507410 - RNA, 19 nt, Homo sapiens
  misc_RNA (1)...(19): siRNA sense strand
uaacaaugugcuagaacaa

SEQ ID NO: 2507411 - RNA, 19 nt, Homo sapiens
  misc_RNA (1)...(19): siRNA sense strand
ccucauggcauuaaagaau

SEQ ID NO: 2507412 - RNA, 19 nt, Homo sapiens
  misc_RNA (1)...(19): siRNA sense strand
gaucauuacuucaggaacu

SEQ ID NO: 2507413 - RNA, 19 nt, Homo sapiens
  misc_RNA (1)...(19): siRNA sense strand
ccaaacaagcucugucaaa

SEQ ID NO: 2507414 - RNA, 19 nt, Homo sapiens
  misc_RNA (1)...(19): siRNA sense strand
ccaaagauauccugaaaau

SEQ ID NO: 2507415 - RNA, 19 nt, Homo sapiens
  misc_RNA (1)...(19): siRNA sense strand
agauauguacugaggacua

SEQ ID NO: 2507416 - RNA, 19 nt, Homo sapiens
  misc_RNA (1)...(19): siRNA sense strand
ugaacaacuuacuggacaa

SEQ ID NO: 2507417 - RNA, 19 nt, Homo sapiens
  misc_RNA (1)...(19): siRNA sense strand
ccuuaagggacaagaugaa

SEQ ID NO: 2507418 - RNA, 19 nt, Homo sapiens
  misc_RNA (1)...(19): siRNA sense strand
ggagaagaggcaagcagaa

SEQ ID NO: 2507419 - RNA, 19 nt, Homo sapiens
  misc_RNA (1)...(19): siRNA sense strand
ggacaauauugcaaaggca

SEQ ID NO: 2507420 - RNA, 19 nt, Homo sapiens
  misc_RNA (1)...(19): siRNA sense strand
cugaggaggaagaggaaga

SEQ ID NO: 2507421 - RNA, 19 nt, Homo sapiens
  misc_RNA (1)...(19): siRNA sense strand
acaaguagcacgagacaga

SEQ ID NO: 2507422 - RNA, 19 nt, Homo sapiens
  misc_RNA (1)...(19): siRNA sense strand
gagaagaggcaagcagaaa

SEQ ID NO: 2507423 - RNA, 19 nt, Homo sapiens
  misc_RNA (1)...(19): siRNA sense strand
cugcaaagacagcacauua

SEQ ID NO: 2507424 - RNA, 19 nt, Homo sapiens
  misc_RNA (1)...(19): siRNA sense strand
gaauguaaccagcgcacaa

SEQ ID NO: 2507425 - RNA, 19 nt, Homo sapiens
  misc_RNA (1)...(19): siRNA sense strand
cgaacugauuccagcaauu

SEQ ID NO: 2507426 - RNA, 19 nt, Homo sapiens
  misc_RNA (1)...(19): siRNA sense strand
agaaauugaggcagagaga

SEQ ID NO: 2507427 - RNA, 19 nt, Homo sapiens
  misc_RNA (1)...(19): siRNA sense strand
ggaauggguaggagagcau

SEQ ID NO: 2507428 - RNA, 19 nt, Homo sapiens
  misc_RNA (1)...(19): siRNA sense strand
gagagaagaacgauaccaa

SEQ ID NO: 2507429 - RNA, 19 nt, Homo sapiens
  misc_RNA (1)...(19): siRNA sense strand
cagaagucuuagaugagaa

SEQ ID NO: 2507430 - RNA, 19 nt, Homo sapiens
  misc_RNA (1)...(19): siRNA sense strand
ccacaacagaugaagaaaa

SEQ ID NO: 2507431 - RNA, 19 nt, Homo sapiens
  misc_RNA (1)...(19): siRNA sense strand
cuaaauauucugugccaau

SEQ ID NO: 2507432 - RNA, 19 nt, Homo sapiens
  misc_RNA (1)...(19): siRNA sense strand
gcugaaagccgcuggggaa

SEQ ID NO: 2507433 - RNA, 19 nt, Homo sapiens
  misc_RNA (1)...(19): siRNA sense strand
guuacaaccucgugggcca

SEQ ID NO: 2507434 - RNA, 19 nt, Homo sapiens
  misc_RNA (1)...(19): siRNA sense strand
ggaccaaacaacucgagua

SEQ ID NO: 2507435 - RNA, 19 nt, Homo sapiens
  misc_RNA (1)...(19): siRNA sense strand
agaccaugccacagggcua

SEQ ID NO: 2507436 - RNA, 19 nt, Homo sapiens
  misc_RNA (1)...(19): siRNA sense strand
cauaagauuuucugggcaa

SEQ ID NO: 2507437 - RNA, 19 nt, Homo sapiens
  misc_RNA (1)...(19): siRNA sense strand
gggaaaaugcagaugaaca

SEQ ID NO: 2507438 - RNA, 19 nt, Homo sapiens
  misc_RNA (1)...(19): siRNA sense strand
agggaaaagccaaggaauu

SEQ ID NO: 2507439 - RNA, 19 nt, Homo sapiens
  misc_RNA (1)...(19): siRNA sense strand
ccaaaauccugugggaaaa

SEQ ID NO: 2507440 - RNA, 19 nt, Homo sapiens
  misc_RNA (1)...(19): siRNA sense strand
ugcuauaucugaagcuaaa

SEQ ID NO: 2507441 - RNA, 19 nt, Homo sapiens
  misc_RNA (1)...(19): siRNA sense strand
gagcaagccaugaagcaau

SEQ ID NO: 2507442 - RNA, 19 nt, Homo sapiens
  misc_RNA (1)...(19): siRNA sense strand
aggaaggaauguuagaaaa

SEQ ID NO: 2507443 - RNA, 19 nt, Homo sapiens
  misc_RNA (1)...(19): siRNA sense strand
aagaagagcaccacagaga

SEQ ID NO: 2507444 - RNA, 19 nt, Homo sapiens
  misc_RNA (1)...(19): siRNA sense strand
uggcaggauuaacgacaua

SEQ ID NO: 2507445 - RNA, 19 nt, Homo sapiens
  misc_RNA (1)...(19): siRNA sense strand
uuaaguaacuggagagaag

SEQ ID NO: 2507446 - RNA, 19 nt, Homo sapiens
  misc_RNA (1)...(19): siRNA sense strand
gcucgaucccagagugcaa

SEQ ID NO: 2507447 - RNA, 19 nt, Homo sapiens
  misc_RNA (1)...(19): siRNA sense strand
caaugggaauacaacgaaa

SEQ ID NO: 2507448 - RNA, 19 nt, Homo sapiens
  misc_RNA (1)...(19): siRNA sense strand
acaacuuacuggacaauau

SEQ ID NO: 2507449 - RNA, 19 nt, Homo sapiens
  misc_RNA (1)...(19): siRNA sense strand
gcacgagacagaauggaau

SEQ ID NO: 2507450 - RNA, 19 nt, Homo sapiens
  misc_RNA (1)...(19): siRNA sense strand
gaucagaaaguauugacaa

SEQ ID NO: 2507451 - RNA, 19 nt, Homo sapiens
  misc_RNA (1)...(19): siRNA sense strand
cagaagaaugucaguuaau

SEQ ID NO: 2507452 - RNA, 19 nt, Homo sapiens
  misc_RNA (1)...(19): siRNA sense strand
guuccuugauugacacaaa

SEQ ID NO: 2507453 - RNA, 19 nt, Homo sapiens
  misc_RNA (1)...(19): siRNA sense strand
gggaaagaagaaaccacaa

SEQ ID NO: 2507454 - RNA, 19 nt, Homo sapiens
  misc_RNA (1)...(19): siRNA sense strand
ggauuuaugaaguagaaca

SEQ ID NO: 2507455 - RNA, 19 nt, Homo sapiens
  misc_RNA (1)...(19): siRNA sense strand
agaaguuggugaagaggga

SEQ ID NO: 2507456 - RNA, 19 nt, Homo sapiens
  misc_RNA (1)...(19): siRNA sense strand
ugaacugaguguuguggaa

SEQ ID NO: 2507457 - RNA, 19 nt, Homo sapiens
  misc_RNA (1)...(19): siRNA sense strand
uccaaaauccugugggaaa

SEQ ID NO: 2507458 - RNA, 19 nt, Homo sapiens
  misc_RNA (1)...(19): siRNA sense strand
ccaagcagaaggaggauga

SEQ ID NO: 2507459 - RNA, 19 nt, Homo sapiens
  misc_RNA (1)...(19): siRNA sense strand
agacagaaacagaaaagua

SEQ ID NO: 2507460 - RNA, 19 nt, Homo sapiens
  misc_RNA (1)...(19): siRNA sense strand
aagacgaaaucuagcucaa

SEQ ID NO: 2507461 - RNA, 19 nt, Homo sapiens
  misc_RNA (1)...(19): siRNA sense strand
aaguuggugaagagggaaa

SEQ ID NO: 2507462 - RNA, 19 nt, Homo sapiens
  misc_RNA (1)...(19): siRNA sense strand
acaaugugcuagaacaaau

SEQ ID NO: 2507463 - RNA, 19 nt, Homo sapiens
  misc_RNA (1)...(19): siRNA sense strand
uggucaagcaugucguaaa

SEQ ID NO: 2507464 - RNA, 19 nt, Homo sapiens
  misc_RNA (1)...(19): siRNA sense strand
gggaagagcuggagaaggg

SEQ ID NO: 2507465 - RNA, 19 nt, Homo sapiens
  misc_RNA (1)...(19): siRNA sense strand
gauaccaagaugacauaaa

SEQ ID NO: 2507466 - RNA, 19 nt, Homo sapiens
  misc_RNA (1)...(19): siRNA sense strand
ggaugaagcuggaggcaga

SEQ ID NO: 2507467 - RNA, 19 nt, Homo sapiens
  misc_RNA (1)...(19): siRNA sense strand
ggagauauuaaaagaggaa

SEQ ID NO: 2507468 - RNA, 19 nt, Homo sapiens
  misc_RNA (1)...(19): siRNA sense strand
cgacagaaggugaagccga

SEQ ID NO: 2507469 - RNA, 19 nt, Homo sapiens
  misc_RNA (1)...(19): siRNA sense strand
aaggacagucauugcguaa

SEQ ID NO: 2507470 - RNA, 19 nt, Homo sapiens
  misc_RNA (1)...(19): siRNA sense strand
gugacaugaacguggacuu

SEQ ID NO: 2507471 - RNA, 19 nt, Homo sapiens
  misc_RNA (1)...(19): siRNA sense strand
uggaaagaagaaaggggua

SEQ ID NO: 2507472 - RNA, 19 nt, Homo sapiens
  misc_RNA (1)...(19): siRNA sense strand
cuguucaaacugaccaaua

SEQ ID NO: 2507473 - RNA, 19 nt, Homo sapiens
  misc_RNA (1)...(19): siRNA sense strand
ggaaaguggaggaggccuu

SEQ ID NO: 2507474 - RNA, 19 nt, Homo sapiens
  misc_RNA (1)...(19): siRNA sense strand
agaagauggaggacggcaa

SEQ ID NO: 2507475 - RNA, 19 nt, Homo sapiens
  misc_RNA (1)...(19): siRNA sense strand
cggugauucuggagcugaa

SEQ ID NO: 2507476 - RNA, 19 nt, Homo sapiens
  misc_RNA (1)...(19): siRNA sense strand
gagaaaguucagaaggacu

SEQ ID NO: 2507477 - RNA, 19 nt, Homo sapiens
  misc_RNA (1)...(19): siRNA sense strand
acgccuuccuccugagcaa

SEQ ID NO: 2507478 - RNA, 19 nt, Homo sapiens
  misc_RNA (1)...(19): siRNA sense strand
agaaaugccacgugccuga

SEQ ID NO: 2507479 - RNA, 19 nt, Homo sapiens
  misc_RNA (1)...(19): siRNA sense strand
acaagaaccugaacgagga

SEQ ID NO: 2507480 - RNA, 19 nt, Homo sapiens
  misc_RNA (1)...(19): siRNA sense strand
acaugaaccagguggagga

SEQ ID NO: 2507481 - RNA, 19 nt, Homo sapiens
  misc_RNA (1)...(19): siRNA sense strand
gggaaggaaaguacgggca

SEQ ID NO: 2507482 - RNA, 19 nt, Homo sapiens
  misc_RNA (1)...(19): siRNA sense strand
gagcagaccaagcgcgugu

SEQ ID NO: 2507483 - RNA, 19 nt, Homo sapiens
  misc_RNA (1)...(19): siRNA sense strand
ggaggaaaguggaggaggc

SEQ ID NO: 2507484 - RNA, 19 nt, Homo sapiens
  misc_RNA (1)...(19): siRNA sense strand
gugccugggacaugcgcua

SEQ ID NO: 2507485 - RNA, 19 nt, Homo sapiens
  misc_RNA (1)...(19): siRNA sense strand
gagaugagcaugagggagg

SEQ ID NO: 2507486 - RNA, 19 nt, Homo sapiens
  misc_RNA (1)...(19): siRNA sense strand
aggaaaacaucaaacgcau

SEQ ID NO: 2507487 - RNA, 19 nt, Homo sapiens
  misc_RNA (1)...(19): siRNA sense strand
uggagaugaacauggccaa

SEQ ID NO: 2507488 - RNA, 19 nt, Homo sapiens
  misc_RNA (1)...(19): siRNA sense strand
cccagagagacucaggaaa

SEQ ID NO: 2507489 - RNA, 19 nt, Homo sapiens
  misc_RNA (1)...(19): siRNA sense strand
augaaauggaggagagcaa

SEQ ID NO: 2507490 - RNA, 19 nt, Homo sapiens
  misc_RNA (1)...(19): siRNA sense strand
gguuagaugaagaaagcaa

SEQ ID NO: 2507491 - RNA, 19 nt, Homo sapiens
  misc_RNA (1)...(19): siRNA sense strand
acuugguggcugaggcaua

SEQ ID NO: 2507492 - RNA, 19 nt, Homo sapiens
  misc_RNA (1)...(19): siRNA sense strand
gagugaaguucgggcaaaa

SEQ ID NO: 2507493 - RNA, 19 nt, Homo sapiens
  misc_RNA (1)...(19): siRNA sense strand
guuagaugaagaaagcaaa

SEQ ID NO: 2507494 - RNA, 19 nt, Homo sapiens
  misc_RNA (1)...(19): siRNA sense strand
ccaagggagaagaaaccaa

SEQ ID NO: 2507495 - RNA, 19 nt, Homo sapiens
  misc_RNA (1)...(19): siRNA sense strand
ucaaugauguggagccuga

SEQ ID NO: 2507496 - RNA, 19 nt, Homo sapiens
  misc_RNA (1)...(19): siRNA sense strand
gguaaagguuccugagugc

SEQ ID NO: 2507497 - RNA, 19 nt, Homo sapiens
  misc_RNA (1)...(19): siRNA sense strand
aggugaguguugugcaaga

SEQ ID NO: 2507498 - RNA, 19 nt, Homo sapiens
  misc_RNA (1)...(19): siRNA sense strand
aggaaaugggugaagucau

SEQ ID NO: 2507499 - RNA, 19 nt, Homo sapiens
  misc_RNA (1)...(19): siRNA sense strand
ggaugaggccaacgggcuu

SEQ ID NO: 2507500 - RNA, 19 nt, Homo sapiens
  misc_RNA (1)...(19): siRNA sense strand
ggugcuacacacagaucaa

SEQ ID NO: 2507501 - RNA, 19 nt, Homo sapiens
  misc_RNA (1)...(19): siRNA sense strand
uggagaacgcugcagaaau

SEQ ID NO: 2507502 - RNA, 19 nt, Homo sapiens
  misc_RNA (1)...(19): siRNA sense strand
ggccagaauaccaugaaca

SEQ ID NO: 2507503 - RNA, 19 nt, Homo sapiens
  misc_RNA (1)...(19): siRNA sense strand
ccccaaaggguuagaugaa

SEQ ID NO: 2507504 - RNA, 19 nt, Homo sapiens
  misc_RNA (1)...(19): siRNA sense strand
acgcaaacgccugaagcaa

SEQ ID NO: 2507505 - RNA, 19 nt, Homo sapiens
  misc_RNA (1)...(19): siRNA sense strand
gccaggaauuccaggcuca

SEQ ID NO: 2507506 - RNA, 19 nt, Homo sapiens
  misc_RNA (1)...(19): siRNA sense strand
aggcaguggauuucaucaa

SEQ ID NO: 2507507 - RNA, 19 nt, Homo sapiens
  misc_RNA (1)...(19): siRNA sense strand
gaacaugaaauggaggaga

SEQ ID NO: 2507508 - RNA, 19 nt, Homo sapiens
  misc_RNA (1)...(19): siRNA sense strand
ggcauauagguuugugcaa

SEQ ID NO: 2507509 - RNA, 19 nt, Homo sapiens
  misc_RNA (1)...(19): siRNA sense strand
cgacaaaauggcugaugau

SEQ ID NO: 2507510 - RNA, 19 nt, Homo sapiens
  misc_RNA (1)...(19): siRNA sense strand
guaaccuguccguggagaa

SEQ ID NO: 2507511 - RNA, 19 nt, Homo sapiens
  misc_RNA (1)...(19): siRNA sense strand
aaggaaaugaugugcuuca

SEQ ID NO: 2507512 - RNA, 19 nt, Homo sapiens
  misc_RNA (1)...(19): siRNA sense strand
ccacauaccuagagcacca

SEQ ID NO: 2507513 - RNA, 19 nt, Homo sapiens
  misc_RNA (1)...(19): siRNA sense strand
ugaaguuggauuugggaaa

SEQ ID NO: 2507514 - RNA, 19 nt, Homo sapiens
  misc_RNA (1)...(19): siRNA sense strand
aggaaaugccugaaccaaa

SEQ ID NO: 2507515 - RNA, 19 nt, Homo sapiens
  misc_RNA (1)...(19): siRNA sense strand
gggaaagagacaaggagga

SEQ ID NO: 2507516 - RNA, 19 nt, Homo sapiens
  misc_RNA (1)...(19): siRNA sense strand
ggaagaagcagcaggagca

SEQ ID NO: 2507517 - RNA, 19 nt, Homo sapiens
  misc_RNA (1)...(19): siRNA sense strand
aggaaagcauggagaaaau

SEQ ID NO: 2507518 - RNA, 19 nt, Homo sapiens
  misc_RNA (1)...(19): siRNA sense strand
auaacuucuucaugggaua

SEQ ID NO: 2507519 - RNA, 19 nt, Homo sapiens
  misc_RNA (1)...(19): siRNA sense strand
aggaacggcuggagagacu

SEQ ID NO: 2507520 - RNA, 19 nt, Homo sapiens
  misc_RNA (1)...(19): siRNA sense strand
gcacaagggcagucaccau

SEQ ID NO: 2507521 - RNA, 19 nt, Homo sapiens
  misc_RNA (1)...(19): siRNA sense strand
aagaaggcacagugaauau

SEQ ID NO: 2507522 - RNA, 19 nt, Homo sapiens
  misc_RNA (1)...(19): siRNA sense strand
ccgggaaaguggaagaugu

SEQ ID NO: 2507523 - RNA, 19 nt, Homo sapiens
  misc_RNA (1)...(19): siRNA sense strand
guguagacuugaacagcau

SEQ ID NO: 2507524 - RNA, 19 nt, Homo sapiens
  misc_RNA (1)...(19): siRNA sense strand
ugcuuaacuuggaggagua

SEQ ID NO: 2507525 - RNA, 19 nt, Homo sapiens
  misc_RNA (1)...(19): siRNA sense strand
cgggaaaguggaagauguu

SEQ ID NO: 2507526 - RNA, 19 nt, Homo sapiens
  misc_RNA (1)...(19): siRNA sense strand
gugagagaauacagggcca

SEQ ID NO: 2507527 - RNA, 19 nt, Homo sapiens
  misc_RNA (1)...(19): siRNA sense strand
uaggauugcaccagaguau

SEQ ID NO: 2507528 - RNA, 19 nt, Homo sapiens
  misc_RNA (1)...(19): siRNA sense strand
uggcaugacaacaggcuau

SEQ ID NO: 2507529 - RNA, 19 nt, Homo sapiens
  misc_RNA (1)...(19): siRNA sense strand
auaggaaagcauggagaaa

SEQ ID NO: 2507530 - RNA, 19 nt, Homo sapiens
  misc_RNA (1)...(19): siRNA sense strand
gcuacaaagaaguauauca

SEQ ID NO: 2507531 - RNA, 19 nt, Homo sapiens
  misc_RNA (1)...(19): siRNA sense strand
augaugaugcuguuaguaa

SEQ ID NO: 2507532 - RNA, 19 nt, Homo sapiens
  misc_RNA (1)...(19): siRNA sense strand
ccuuugagagacuguauaa

SEQ ID NO: 2507533 - RNA, 19 nt, Homo sapiens
  misc_RNA (1)...(19): siRNA sense strand
uggagaaaauggagccaau

SEQ ID NO: 2507534 - RNA, 19 nt, Homo sapiens
  misc_RNA (1)...(19): siRNA sense strand
ucguuuagcuagaacauca

SEQ ID NO: 2507535 - RNA, 19 nt, Homo sapiens
  misc_RNA (1)...(19): siRNA sense strand
acaucuaccuaaaguucua

SEQ ID NO: 2507536 - RNA, 19 nt, Homo sapiens
  misc_RNA (1)...(19): siRNA sense strand
aggagaugccacugucaua

SEQ ID NO: 2507537 - RNA, 19 nt, Homo sapiens
  misc_RNA (1)...(19): siRNA sense strand
ugaacagcauagagccaau

SEQ ID NO: 2507538 - RNA, 19 nt, Homo sapiens
  misc_RNA (1)...(19): siRNA sense strand
ggaaaguggaagauguugu

SEQ ID NO: 2507539 - RNA, 19 nt, Homo sapiens
  misc_RNA (1)...(19): siRNA sense strand
ccugcagaauggaagauuu

SEQ ID NO: 2507540 - RNA, 19 nt, Homo sapiens
  misc_RNA (1)...(19): siRNA sense strand
uuacgcaaaucuuggaauu

SEQ ID NO: 2507541 - RNA, 19 nt, Homo sapiens
  misc_RNA (1)...(19): siRNA sense strand
guuaaugggacaugaugau

SEQ ID NO: 2507542 - RNA, 19 nt, Homo sapiens
  misc_RNA (1)...(19): siRNA sense strand
cagucaccaugaaaggaaa

SEQ ID NO: 2507543 - RNA, 19 nt, Homo sapiens
  misc_RNA (1)...(19): siRNA sense strand
ccagaagagcaaagaugca

SEQ ID NO: 2507544 - RNA, 19 nt, Homo sapiens
  misc_RNA (1)...(19): siRNA sense strand
uggaagauguuguggagac

SEQ ID NO: 2507545 - RNA, 19 nt, Homo sapiens
  misc_RNA (1)...(19): siRNA sense strand
cguuaaugggacaugauga

SEQ ID NO: 2507546 - RNA, 19 nt, Homo sapiens
  misc_RNA (1)...(19): siRNA sense strand
aauaggaaagcauggagaa

SEQ ID NO: 2507547 - RNA, 19 nt, Homo sapiens
  misc_RNA (1)...(19): siRNA sense strand
cauggaaugcaaagcagaa

SEQ ID NO: 2507548 - RNA, 19 nt, Homo sapiens
  misc_RNA (1)...(19): siRNA sense strand
gcuacaugcugcaguggca

SEQ ID NO: 2507549 - RNA, 19 nt, Homo sapiens
  misc_RNA (1)...(19): siRNA sense strand
aagaugcauuggaaagcaa

SEQ ID NO: 2507550 - RNA, 19 nt, Homo sapiens
  misc_RNA (1)...(19): siRNA sense strand
aguaagaucuguuggcaug

SEQ ID NO: 2507551 - RNA, 19 nt, Homo sapiens
  misc_RNA (1)...(19): siRNA sense strand
uggauuugggaaagagaca

SEQ ID NO: 2507552 - RNA, 19 nt, Homo sapiens
  misc_RNA (1)...(19): siRNA sense strand
agcaaagaugcauuggaaa

SEQ ID NO: 2507553 - RNA, 19 nt, Homo sapiens
  misc_RNA (1)...(19): siRNA sense strand
ccucaacggcuacccgaaa

SEQ ID NO: 2507554 - RNA, 19 nt, Homo sapiens
  misc_RNA (1)...(19): siRNA sense strand
aggacacguuaaugggaca

SEQ ID NO: 2507555 - RNA, 19 nt, Homo sapiens
  misc_RNA (1)...(19): siRNA sense strand
gugacauguauauggauga

SEQ ID NO: 2507556 - RNA, 19 nt, Homo sapiens
  misc_RNA (1)...(19): siRNA sense strand
uaaaauagaaaggggcaaa

SEQ ID NO: 2507557 - RNA, 19 nt, Homo sapiens
  misc_RNA (1)...(19): siRNA sense strand
cugacacgcuaccaggaaa

SEQ ID NO: 2507558 - RNA, 19 nt, Homo sapiens
  misc_RNA (1)...(19): siRNA sense strand
gcuuugucugggauggaaa

SEQ ID NO: 2507559 - RNA, 19 nt, Homo sapiens
  misc_RNA (1)...(19): siRNA sense strand
uuaacuuggaggaguacua

SEQ ID NO: 2507560 - RNA, 19 nt, Homo sapiens
  misc_RNA (1)...(19): siRNA sense strand
gaggacagaugguugacga

SEQ ID NO: 2507561 - RNA, 19 nt, Homo sapiens
  misc_RNA (1)...(19): siRNA sense strand
aaacacuggccuggaauaa

SEQ ID NO: 2507562 - RNA, 19 nt, Homo sapiens
  misc_RNA (1)...(19): siRNA sense strand
gggacaugaugaugcuguu

SEQ ID NO: 2507563 - RNA, 19 nt, Homo sapiens
  misc_RNA (1)...(19): siRNA sense strand
uggaauaccgcuauggcaa

SEQ ID NO: 2507564 - RNA, 19 nt, Homo sapiens
  misc_RNA (1)...(19): siRNA sense strand
cuauaaaacaccagccaau

SEQ ID NO: 2507565 - RNA, 19 nt, Homo sapiens
  misc_RNA (1)...(19): siRNA sense strand
ccuucauccuggaggugau

SEQ ID NO: 2507566 - RNA, 19 nt, Homo sapiens
  misc_RNA (1)...(19): siRNA sense strand
ggcuaugacccuuaugcaa

SEQ ID NO: 2507567 - RNA, 19 nt, Homo sapiens
  misc_RNA (1)...(19): siRNA sense strand
uggagguaggcaaggagaa

SEQ ID NO: 2507568 - RNA, 19 nt, Homo sapiens
  misc_RNA (1)...(19): siRNA sense strand
ccaaguggaacaaggccau

SEQ ID NO: 2507569 - RNA, 19 nt, Homo sapiens
  misc_RNA (1)...(19): siRNA sense strand
ggagagcccuucuggguga

SEQ ID NO: 2507570 - RNA, 19 nt, Homo sapiens
  misc_RNA (1)...(19): siRNA sense strand
gucaauuacacgaagaaga

SEQ ID NO: 2507571 - RNA, 19 nt, Homo sapiens
  misc_RNA (1)...(19): siRNA sense strand
acgaagaagaucaagcuga

SEQ ID NO: 2507572 - RNA, 19 nt, Homo sapiens
  misc_RNA (1)...(19): siRNA sense strand
cggcugugcuggagaaccu

SEQ ID NO: 2507573 - RNA, 19 nt, Homo sapiens
  misc_RNA (1)...(19): siRNA sense strand
uggcagagacaguuggguu

SEQ ID NO: 2507574 - RNA, 19 nt, Homo sapiens
  misc_RNA (1)...(19): siRNA sense strand
acaaaagguggcagagaca

SEQ ID NO: 2507575 - RNA, 19 nt, Homo sapiens
  misc_RNA (1)...(19): siRNA sense strand
cgaagaagaucaagcugag

SEQ ID NO: 2507576 - RNA, 19 nt, Homo sapiens
  misc_RNA (1)...(19): siRNA sense strand
aguacauguuggugcgcua

SEQ ID NO: 2507577 - RNA, 19 nt, Homo sapiens
  misc_RNA (1)...(19): siRNA sense strand
ccgaggagaucuacggguu

SEQ ID NO: 2507578 - RNA, 19 nt, Homo sapiens
  misc_RNA (1)...(19): siRNA sense strand
ccuacaaccucucccgcaa

SEQ ID NO: 2507579 - RNA, 19 nt, Homo sapiens
  misc_RNA (1)...(19): siRNA sense strand
agaagaccgaggagaucua

SEQ ID NO: 2507580 - RNA, 19 nt, Homo sapiens
  misc_RNA (1)...(19): siRNA sense strand
ccacggugugcgaggacuu

SEQ ID NO: 2507581 - RNA, 19 nt, Homo sapiens
  misc_RNA (1)...(19): siRNA sense strand
ccuucgugguccuggauau

SEQ ID NO: 2507582 - RNA, 19 nt, Homo sapiens
  misc_RNA (1)...(19): siRNA sense strand
guauaugagcgucugggaa

SEQ ID NO: 2507583 - RNA, 19 nt, Homo sapiens
  misc_RNA (1)...(19): siRNA sense strand
gggacaaaauacugggaac

SEQ ID NO: 2507584 - RNA, 19 nt, Homo sapiens
  misc_RNA (1)...(19): siRNA sense strand
gcuacaagauccacccuga

SEQ ID NO: 2507585 - RNA, 19 nt, Homo sapiens
  misc_RNA (1)...(19): siRNA sense strand
ggggagaaagggugggaaa

SEQ ID NO: 2507586 - RNA, 19 nt, Homo sapiens
  misc_RNA (1)...(19): siRNA sense strand
gaaaaggaggagagagcau

SEQ ID NO: 2507587 - RNA, 19 nt, Homo sapiens
  misc_RNA (1)...(19): siRNA sense strand
gggaaaaggaggagagagc

SEQ ID NO: 2507588 - RNA, 19 nt, Homo sapiens
  misc_RNA (1)...(19): siRNA sense strand
gggagaaagggugggaaaa

SEQ ID NO: 2507589 - RNA, 19 nt, Homo sapiens
  misc_RNA (1)...(19): siRNA sense strand
cuucaggcguuuggaggaa

SEQ ID NO: 2507590 - RNA, 19 nt, Homo sapiens
  misc_RNA (1)...(19): siRNA sense strand
gcgucaacgucaugaucau

SEQ ID NO: 2507591 - RNA, 19 nt, Homo sapiens
  misc_RNA (1)...(19): siRNA sense strand
aaggaagggaucauagaau

SEQ ID NO: 2507592 - RNA, 19 nt, Homo sapiens
  misc_RNA (1)...(19): siRNA sense strand
ggacgguguaccagcucaa

SEQ ID NO: 2507593 - RNA, 19 nt, Homo sapiens
  misc_RNA (1)...(19): siRNA sense strand
gugaagacacgaaugcaga

SEQ ID NO: 2507594 - RNA, 19 nt, Homo sapiens
  misc_RNA (1)...(19): siRNA sense strand
cccaaagcccaguacacaa

SEQ ID NO: 2507595 - RNA, 19 nt, Homo sapiens
  misc_RNA (1)...(19): siRNA sense strand
gcgucaacgucaugaucau

SEQ ID NO: 2507596 - RNA, 19 nt, Homo sapiens
  misc_RNA (1)...(19): siRNA sense strand
gugaagacacgaaugcaga

SEQ ID NO: 2507597 - RNA, 19 nt, Homo sapiens
  misc_RNA (1)...(19): siRNA sense strand
cccaaagcccaguacacaa

SEQ ID NO: 2507598 - RNA, 19 nt, Homo sapiens
  misc_RNA (1)...(19): siRNA sense strand
gcuaagaaaaugagagcau

SEQ ID NO: 2507599 - RNA, 19 nt, Homo sapiens
  misc_RNA (1)...(19): siRNA sense strand
ccguauggcccaagacaca

SEQ ID NO: 2507600 - RNA, 19 nt, Homo sapiens
  misc_RNA (1)...(19): siRNA sense strand
accaaagacugcagagacu

SEQ ID NO: 2507601 - RNA, 19 nt, Homo sapiens
  misc_RNA (1)...(19): siRNA sense strand
gcccaagacacaugcaaaa

SEQ ID NO: 2507602 - RNA, 19 nt, Homo sapiens
  misc_RNA (1)...(19): siRNA sense strand
cagggaaggcagaagcaca

SEQ ID NO: 2507603 - RNA, 19 nt, Homo sapiens
  misc_RNA (1)...(19): siRNA sense strand
cauaaaagagcaaccacaa

SEQ ID NO: 2507604 - RNA, 19 nt, Homo sapiens
  misc_RNA (1)...(19): siRNA sense strand
uggugguuccauagagaaa

SEQ ID NO: 2507605 - RNA, 19 nt, Homo sapiens
  misc_RNA (1)...(19): siRNA sense strand
cuucuaauugcaugugaaa

SEQ ID NO: 2507606 - RNA, 19 nt, Homo sapiens
  misc_RNA (1)...(19): siRNA sense strand
cagagggagcaaagcaaau

SEQ ID NO: 2507607 - RNA, 19 nt, Homo sapiens
  misc_RNA (1)...(19): siRNA sense strand
guugaaagaagaaaccaga

SEQ ID NO: 2507608 - RNA, 19 nt, Homo sapiens
  misc_RNA (1)...(19): siRNA sense strand
ucaaagaacugcagcugcu

SEQ ID NO: 2507609 - RNA, 19 nt, Homo sapiens
  misc_RNA (1)...(19): siRNA sense strand
cguaaguacaagagcauga

SEQ ID NO: 2507610 - RNA, 19 nt, Homo sapiens
  misc_RNA (1)...(19): siRNA sense strand
gaagauauccccugggcaa

SEQ ID NO: 2507611 - RNA, 19 nt, Homo sapiens
  misc_RNA (1)...(19): siRNA sense strand
auggagagguggaacaaaa

SEQ ID NO: 2507612 - RNA, 19 nt, Homo sapiens
  misc_RNA (1)...(19): siRNA sense strand
caacaggaaagaaacggaa

SEQ ID NO: 2507613 - RNA, 19 nt, Homo sapiens
  misc_RNA (1)...(19): siRNA sense strand
aaagaaagcugcaagccca

SEQ ID NO: 2507614 - RNA, 19 nt, Homo sapiens
  misc_RNA (1)...(19): siRNA sense strand
cugauggagagguggaaca

SEQ ID NO: 2507615 - RNA, 19 nt, Homo sapiens
  misc_RNA (1)...(19): siRNA sense strand
uguggcaacaggaaagaaa

SEQ ID NO: 2507616 - RNA, 19 nt, Homo sapiens
  misc_RNA (1)...(19): siRNA sense strand
gugcguaaguacaagagca

SEQ ID NO: 2507617 - RNA, 19 nt, Homo sapiens
  misc_RNA (1)...(19): siRNA sense strand
ccggaagaggcaacaaaca

SEQ ID NO: 2507618 - RNA, 19 nt, Homo sapiens
  misc_RNA (1)...(19): siRNA sense strand
ccauagaagcacaugcagu

SEQ ID NO: 2507619 - RNA, 19 nt, Homo sapiens
  misc_RNA (1)...(19): siRNA sense strand
cuuuaaaguguuuggugca

SEQ ID NO: 2507620 - RNA, 19 nt, Homo sapiens
  misc_RNA (1)...(19): siRNA sense strand
cagagaacaaggaagaaaa

SEQ ID NO: 2507621 - RNA, 19 nt, Homo sapiens
  misc_RNA (1)...(19): siRNA sense strand
gagaaugucuuaccggaga

SEQ ID NO: 2507622 - RNA, 19 nt, Homo sapiens
  misc_RNA (1)...(19): siRNA sense strand
cgaaaacucaucagagaau

SEQ ID NO: 2507623 - RNA, 19 nt, Homo sapiens
  misc_RNA (1)...(19): siRNA sense strand
auaaagccucagagaacaa

SEQ ID NO: 2507624 - RNA, 19 nt, Homo sapiens
  misc_RNA (1)...(19): siRNA sense strand
ggagguucuaagauauaaa

SEQ ID NO: 2507625 - RNA, 19 nt, Homo sapiens
  misc_RNA (1)...(19): siRNA sense strand
ucuaagauauaaagccuca

SEQ ID NO: 2507626 - RNA, 19 nt, Homo sapiens
  misc_RNA (1)...(19): siRNA sense strand
guucuaagauauaaagccu

SEQ ID NO: 2507627 - RNA, 19 nt, Homo sapiens
  misc_RNA (1)...(19): siRNA sense strand
ggguugaugcacagagaag

SEQ ID NO: 2507628 - RNA, 19 nt, Homo sapiens
  misc_RNA (1)...(19): siRNA sense strand
gcucugaggaugaagugga

SEQ ID NO: 2507629 - RNA, 19 nt, Homo sapiens
  misc_RNA (1)...(19): siRNA sense strand
agaaugucuuaccggagaa

SEQ ID NO: 2507630 - RNA, 19 nt, Homo sapiens
  misc_RNA (1)...(19): siRNA sense strand
auucugauuccgaggauga

SEQ ID NO: 2507631 - RNA, 19 nt, Homo sapiens
  misc_RNA (1)...(19): siRNA sense strand
uguaaaagccacacagaaa

SEQ ID NO: 2507632 - RNA, 19 nt, Homo sapiens
  misc_RNA (1)...(19): siRNA sense strand
ugcagauaguggagauaaa

SEQ ID NO: 2507633 - RNA, 19 nt, Homo sapiens
  misc_RNA (1)...(19): siRNA sense strand
gcacaaagauccaagacag

SEQ ID NO: 2507634 - RNA, 19 nt, Homo sapiens
  misc_RNA (1)...(19): siRNA sense strand
cuucacugguguagggaca

SEQ ID NO: 2507635 - RNA, 19 nt, Homo sapiens
  misc_RNA (1)...(19): siRNA sense strand
aagaaugcuucauggaaaa

SEQ ID NO: 2507636 - RNA, 19 nt, Homo sapiens
  misc_RNA (1)...(19): siRNA sense strand
acuugauaauggaguacua

SEQ ID NO: 2507637 - RNA, 19 nt, Homo sapiens
  misc_RNA (1)...(19): siRNA sense strand
gcuuaauacuucugggccu

SEQ ID NO: 2507638 - RNA, 19 nt, Homo sapiens
  misc_RNA (1)...(19): siRNA sense strand
uaucugagucaccgagaaa

SEQ ID NO: 2507639 - RNA, 19 nt, Homo sapiens
  misc_RNA (1)...(19): siRNA sense strand
ggacauugggguugaugaa

SEQ ID NO: 2507640 - RNA, 19 nt, Homo sapiens
  misc_RNA (1)...(19): siRNA sense strand
gcuacaugaagcuguuaaa

SEQ ID NO: 2507641 - RNA, 19 nt, Homo sapiens
  misc_RNA (1)...(19): siRNA sense strand
caugacuggaaguaagaaa

SEQ ID NO: 2507642 - RNA, 19 nt, Homo sapiens
  misc_RNA (1)...(19): siRNA sense strand
uguuaaggaugcagauagu

SEQ ID NO: 2507643 - RNA, 19 nt, Homo sapiens
  misc_RNA (1)...(19): siRNA sense strand
ucuuugaaucugaagguuu

SEQ ID NO: 2507644 - RNA, 19 nt, Homo sapiens
  misc_RNA (1)...(19): siRNA sense strand
aguaugguuuggagaagau

SEQ ID NO: 2507645 - RNA, 19 nt, Homo sapiens
  misc_RNA (1)...(19): siRNA sense strand
cugucggcaugaagagcua

SEQ ID NO: 2507646 - RNA, 19 nt, Homo sapiens
  misc_RNA (1)...(19): siRNA sense strand
ccgacuaggggauaaaaua

SEQ ID NO: 2507647 - RNA, 19 nt, Homo sapiens
  misc_RNA (1)...(19): siRNA sense strand
aaauauaccuguaagaccu

SEQ ID NO: 2507648 - RNA, 19 nt, Homo sapiens
  misc_RNA (1)...(19): siRNA sense strand
agccacgggucuaggaaca

SEQ ID NO: 2507649 - RNA, 19 nt, Homo sapiens
  misc_RNA (1)...(19): siRNA sense strand
guugguggaggcugggaua

SEQ ID NO: 2507650 - RNA, 19 nt, Homo sapiens
  misc_RNA (1)...(19): siRNA sense strand
ccaagcugccuaaagcaaa

SEQ ID NO: 2507651 - RNA, 19 nt, Homo sapiens
  misc_RNA (1)...(19): siRNA sense strand
gcauucaacuaaagggccu

SEQ ID NO: 2507652 - RNA, 19 nt, Homo sapiens
  misc_RNA (1)...(19): siRNA sense strand
cauucaaauucauccucaa

SEQ ID NO: 2507653 - RNA, 19 nt, Homo sapiens
  misc_RNA (1)...(19): siRNA sense strand
gaauauaguuucagcuacc

SEQ ID NO: 2507654 - RNA, 19 nt, Homo sapiens
  misc_RNA (1)...(19): siRNA sense strand
guggauagcugugaggcau

SEQ ID NO: 2507655 - RNA, 19 nt, Homo sapiens
  misc_RNA (1)...(19): siRNA sense strand
gggacaauaccgcaaacuu

SEQ ID NO: 2507656 - RNA, 19 nt, Homo sapiens
  misc_RNA (1)...(19): siRNA sense strand
ugucaugacuggaaguaag

SEQ ID NO: 2507657 - RNA, 19 nt, Homo sapiens
  misc_RNA (1)...(19): siRNA sense strand
ggauuacaggugugagcca

SEQ ID NO: 2507658 - RNA, 19 nt, Homo sapiens
  misc_RNA (1)...(19): siRNA sense strand
gaaagaagguucagggauc

SEQ ID NO: 2507659 - RNA, 19 nt, Homo sapiens
  misc_RNA (1)...(19): siRNA sense strand
acgaagaggaggaagagaa

SEQ ID NO: 2507660 - RNA, 19 nt, Homo sapiens
  misc_RNA (1)...(19): siRNA sense strand
aggaagaggaagaagaaga

SEQ ID NO: 2507661 - RNA, 19 nt, Homo sapiens
  misc_RNA (1)...(19): siRNA sense strand
aggaggaggaggaggagaa

SEQ ID NO: 2507662 - RNA, 19 nt, Homo sapiens
  misc_RNA (1)...(19): siRNA sense strand
aggaggaggaggaggagaa

SEQ ID NO: 2507663 - RNA, 19 nt, Homo sapiens
  misc_RNA (1)...(19): siRNA sense strand
aggaggaggaggagaaaga

SEQ ID NO: 2507664 - RNA, 19 nt, Homo sapiens
  misc_RNA (1)...(19): siRNA sense strand
aggaagaggaagaacaaau

SEQ ID NO: 2507665 - RNA, 19 nt, Homo sapiens
  misc_RNA (1)...(19): siRNA sense strand
aggaggagaaggagaagaa

SEQ ID NO: 2507666 - RNA, 19 nt, Homo sapiens
  misc_RNA (1)...(19): siRNA sense strand
aggagaaggagaagaaaca

SEQ ID NO: 2507667 - RNA, 19 nt, Homo sapiens
  misc_RNA (1)...(19): siRNA sense strand
guuaggagcuggaggcuga

SEQ ID NO: 2507668 - RNA, 19 nt, Homo sapiens
  misc_RNA (1)...(19): siRNA sense strand
aggagaagaaacagaagaa

SEQ ID NO: 2507669 - RNA, 19 nt, Homo sapiens
  misc_RNA (1)...(19): siRNA sense strand
agaagaaggaggaggagga

SEQ ID NO: 2507670 - RNA, 19 nt, Homo sapiens
  misc_RNA (1)...(19): siRNA sense strand
aggaagagaaggaggagga

SEQ ID NO: 2507671 - RNA, 19 nt, Homo sapiens
  misc_RNA (1)...(19): siRNA sense strand
augaaugugaggaaagaaa

SEQ ID NO: 2507672 - RNA, 19 nt, Homo sapiens
  misc_RNA (1)...(19): siRNA sense strand
aggaggaggagaaggagaa

SEQ ID NO: 2507673 - RNA, 19 nt, Homo sapiens
  misc_RNA (1)...(19): siRNA sense strand
agaagaagaaggaggagga

SEQ ID NO: 2507674 - RNA, 19 nt, Homo sapiens
  misc_RNA (1)...(19): siRNA sense strand
aagacgaagaggaggaaga

SEQ ID NO: 2507675 - RNA, 19 nt, Homo sapiens
  misc_RNA (1)...(19): siRNA sense strand
aggagaaagaagaggagga

SEQ ID NO: 2507676 - RNA, 19 nt, Homo sapiens
  misc_RNA (1)...(19): siRNA sense strand
cagaagaagaggaagagga

SEQ ID NO: 2507677 - RNA, 19 nt, Homo sapiens
  misc_RNA (1)...(19): siRNA sense strand
aggaggagaagaaggagaa

SEQ ID NO: 2507678 - RNA, 19 nt, Homo sapiens
  misc_RNA (1)...(19): siRNA sense strand
ccgugaugaaugugaggaa

SEQ ID NO: 2507679 - RNA, 19 nt, Homo sapiens
  misc_RNA (1)...(19): siRNA sense strand
agaaagaugaugaagcaga

SEQ ID NO: 2507680 - RNA, 19 nt, Homo sapiens
  misc_RNA (1)...(19): siRNA sense strand
agaaggaggaggaggagga

SEQ ID NO: 2507681 - RNA, 19 nt, Homo sapiens
  misc_RNA (1)...(19): siRNA sense strand
aggaggaagaagaaggaga

SEQ ID NO: 2507682 - RNA, 19 nt, Homo sapiens
  misc_RNA (1)...(19): siRNA sense strand
agaaggaggaggaggagga

SEQ ID NO: 2507683 - RNA, 19 nt, Homo sapiens
  misc_RNA (1)...(19): siRNA sense strand
aagagaaggaggaggagga

SEQ ID NO: 2507684 - RNA, 19 nt, Homo sapiens
  misc_RNA (1)...(19): siRNA sense strand
aggagaagaaggaggagga

SEQ ID NO: 2507685 - RNA, 19 nt, Homo sapiens
  misc_RNA (1)...(19): siRNA sense strand
aggaagaagaagaagagga

SEQ ID NO: 2507686 - RNA, 19 nt, Homo sapiens
  misc_RNA (1)...(19): siRNA sense strand
gaggaggagaagaaggaga

SEQ ID NO: 2507687 - RNA, 19 nt, Homo sapiens
  misc_RNA (1)...(19): siRNA sense strand
agaugaugaagcagaagaa

SEQ ID NO: 2507688 - RNA, 19 nt, Homo sapiens
  misc_RNA (1)...(19): siRNA sense strand
aggaggaggaggagaagga

SEQ ID NO: 2507689 - RNA, 19 nt, Homo sapiens
  misc_RNA (1)...(19): siRNA sense strand
aagaagaagaggaagagga

SEQ ID NO: 2507690 - RNA, 19 nt, Homo sapiens
  misc_RNA (1)...(19): siRNA sense strand
uagaagacgaagaggagga

SEQ ID NO: 2507691 - RNA, 19 nt, Homo sapiens
  misc_RNA (1)...(19): siRNA sense strand
aagaggaagaggaagaaga

SEQ ID NO: 2507692 - RNA, 19 nt, Homo sapiens
  misc_RNA (1)...(19): siRNA sense strand
aagaggaagaagaagaaga

SEQ ID NO: 2507693 - RNA, 19 nt, Homo sapiens
  misc_RNA (1)...(19): siRNA sense strand
cgaaagaagguucagggau

SEQ ID NO: 2507694 - RNA, 19 nt, Homo sapiens
  misc_RNA (1)...(19): siRNA sense strand
acauauugcagcugacauu

SEQ ID NO: 2507695 - RNA, 19 nt, Homo sapiens
  misc_RNA (1)...(19): siRNA sense strand
uaauaguaguagaagacga

SEQ ID NO: 2507696 - RNA, 19 nt, Homo sapiens
  misc_RNA (1)...(19): siRNA sense strand
aagaggaagaggaagaaca

SEQ ID NO: 2507697 - RNA, 19 nt, Homo sapiens
  misc_RNA (1)...(19): siRNA sense strand
aggaaaaccaagaacacaa

SEQ ID NO: 2507698 - RNA, 19 nt, Homo sapiens
  misc_RNA (1)...(19): siRNA sense strand
aagaggaggaagagaagga

SEQ ID NO: 2507699 - RNA, 19 nt, Homo sapiens
  misc_RNA (1)...(19): siRNA sense strand
aggagaagaagaaggagga

SEQ ID NO: 2507700 - RNA, 19 nt, Homo sapiens
  misc_RNA (1)...(19): siRNA sense strand
gaggaggaggagaaggaga

SEQ ID NO: 2507701 - RNA, 19 nt, Homo sapiens
  misc_RNA (1)...(19): siRNA sense strand
ugaugaagcagaagaagca

SEQ ID NO: 2507702 - RNA, 19 nt, Homo sapiens
  misc_RNA (1)...(19): siRNA sense strand
aauaguaguagaagacgaa

SEQ ID NO: 2507703 - RNA, 19 nt, Homo sapiens
  misc_RNA (1)...(19): siRNA sense strand
aggaggaggagaaagaaga

SEQ ID NO: 2507704 - RNA, 19 nt, Homo sapiens
  misc_RNA (1)...(19): siRNA sense strand
aaacagaagagguggcaac

SEQ ID NO: 2507705 - RNA, 19 nt, Homo sapiens
  misc_RNA (1)...(19): siRNA sense strand
agcuggaggcugagagaga

SEQ ID NO: 2507706 - RNA, 19 nt, Homo sapiens
  misc_RNA (1)...(19): siRNA sense strand
ccgccuacuucuugugcau

SEQ ID NO: 2507707 - RNA, 19 nt, Homo sapiens
  misc_RNA (1)...(19): siRNA sense strand
gcagcaggaacaugcgcaa

SEQ ID NO: 2507708 - RNA, 19 nt, Homo sapiens
  misc_RNA (1)...(19): siRNA sense strand
gcaagaacuuacaagaggu

SEQ ID NO: 2507709 - RNA, 19 nt, Homo sapiens
  misc_RNA (1)...(19): siRNA sense strand
cguucgaaauuaacagaaa

SEQ ID NO: 2507710 - RNA, 19 nt, Homo sapiens
  misc_RNA (1)...(19): siRNA sense strand
guauggagauaaagggaca

SEQ ID NO: 2507711 - RNA, 19 nt, Homo sapiens
  misc_RNA (1)...(19): siRNA sense strand
uguagaaacuggaagccaa

SEQ ID NO: 2507712 - RNA, 19 nt, Homo sapiens
  misc_RNA (1)...(19): siRNA sense strand
agauaaagggacaguaaga

SEQ ID NO: 2507713 - RNA, 19 nt, Homo sapiens
  misc_RNA (1)...(19): siRNA sense strand
guacuaaagaagagaugau

SEQ ID NO: 2507714 - RNA, 19 nt, Homo sapiens
  misc_RNA (1)...(19): siRNA sense strand
cagaaauagaaaugcagua

SEQ ID NO: 2507715 - RNA, 19 nt, Homo sapiens
  misc_RNA (1)...(19): siRNA sense strand
cugugaagauauuaaggaa

SEQ ID NO: 2507716 - RNA, 19 nt, Homo sapiens
  misc_RNA (1)...(19): siRNA sense strand
caguaagacaaguaagaga

SEQ ID NO: 2507717 - RNA, 19 nt, Homo sapiens
  misc_RNA (1)...(19): siRNA sense strand
ugaugaaguagaagagaga

SEQ ID NO: 2507718 - RNA, 19 nt, Homo sapiens
  misc_RNA (1)...(19): siRNA sense strand
aagagagagcugagaauuu

SEQ ID NO: 2507719 - RNA, 19 nt, Homo sapiens
  misc_RNA (1)...(19): siRNA sense strand
agaagagagagcugagaau

SEQ ID NO: 2507720 - RNA, 19 nt, Homo sapiens
  misc_RNA (1)...(19): siRNA sense strand
aagacaaguaagagaauca

SEQ ID NO: 2507721 - RNA, 19 nt, Homo sapiens
  misc_RNA (1)...(19): siRNA sense strand
augcaacagaugaggaaau

SEQ ID NO: 2507722 - RNA, 19 nt, Homo sapiens
  misc_RNA (1)...(19): siRNA sense strand
ugugaaagcaccugaguca

SEQ ID NO: 2507723 - RNA, 19 nt, Homo sapiens
  misc_RNA (1)...(19): siRNA sense strand
ugaagaaagaaguagauga

SEQ ID NO: 2507724 - RNA, 19 nt, Homo sapiens
  misc_RNA (1)...(19): siRNA sense strand
aguaagacaaguaagagaa

SEQ ID NO: 2507725 - RNA, 19 nt, Homo sapiens
  misc_RNA (1)...(19): siRNA sense strand
ccuuaugaaucucagaaau

SEQ ID NO: 2507726 - RNA, 19 nt, Homo sapiens
  misc_RNA (1)...(19): siRNA sense strand
caagaguugcagauauaaa

SEQ ID NO: 2507727 - RNA, 19 nt, Homo sapiens
  misc_RNA (1)...(19): siRNA sense strand
uugagaagccagaaggaga

SEQ ID NO: 2507728 - RNA, 19 nt, Homo sapiens
  misc_RNA (1)...(19): siRNA sense strand
ugagaagccagaaggagaa

SEQ ID NO: 2507729 - RNA, 19 nt, Homo sapiens
  misc_RNA (1)...(19): siRNA sense strand
gcaccugagucauuggaga

SEQ ID NO: 2507730 - RNA, 19 nt, Homo sapiens
  misc_RNA (1)...(19): siRNA sense strand
cagaaauuaguaagaccaa

SEQ ID NO: 2507731 - RNA, 19 nt, Homo sapiens
  misc_RNA (1)...(19): siRNA sense strand
uuugggaagucaauagaaa

SEQ ID NO: 2507732 - RNA, 19 nt, Homo sapiens
  misc_RNA (1)...(19): siRNA sense strand
gaaguagaugaaauggaaa

SEQ ID NO: 2507733 - RNA, 19 nt, Homo sapiens
  misc_RNA (1)...(19): siRNA sense strand
gaauaaaacucaaagcagu

SEQ ID NO: 2507734 - RNA, 19 nt, Homo sapiens
  misc_RNA (1)...(19): siRNA sense strand
cagaaggagaagauggcuu

SEQ ID NO: 2507735 - RNA, 19 nt, Homo sapiens
  misc_RNA (1)...(19): siRNA sense strand
uccaaucaguggucggaaa

SEQ ID NO: 2507736 - RNA, 19 nt, Homo sapiens
  misc_RNA (1)...(19): siRNA sense strand
cagagcaagagauuggaaa

SEQ ID NO: 2507737 - RNA, 19 nt, Homo sapiens
  misc_RNA (1)...(19): siRNA sense strand
acagaaaagaacugaaaga

SEQ ID NO: 2507738 - RNA, 19 nt, Homo sapiens
  misc_RNA (1)...(19): siRNA sense strand
gaugcugaguauggagaua

SEQ ID NO: 2507739 - RNA, 19 nt, Homo sapiens
  misc_RNA (1)...(19): siRNA sense strand
guaagacaaguaagagaau

SEQ ID NO: 2507740 - RNA, 19 nt, Homo sapiens
  misc_RNA (1)...(19): siRNA sense strand
ggucaaaauucaauaccuu

SEQ ID NO: 2507741 - RNA, 19 nt, Homo sapiens
  misc_RNA (1)...(19): siRNA sense strand
auaaagggacaguaagaca

SEQ ID NO: 2507742 - RNA, 19 nt, Homo sapiens
  misc_RNA (1)...(19): siRNA sense strand
guaaacauagugaggagau

SEQ ID NO: 2507743 - RNA, 19 nt, Homo sapiens
  misc_RNA (1)...(19): siRNA sense strand
gaagaaaagagaacaugaa

SEQ ID NO: 2507744 - RNA, 19 nt, Homo sapiens
  misc_RNA (1)...(19): siRNA sense strand
ggauacacgaaacuauaaa

SEQ ID NO: 2507745 - RNA, 19 nt, Homo sapiens
  misc_RNA (1)...(19): siRNA sense strand
cuguaaacauagugaggag

SEQ ID NO: 2507746 - RNA, 19 nt, Homo sapiens
  misc_RNA (1)...(19): siRNA sense strand
gcaagacauaaguacuaaa

SEQ ID NO: 2507747 - RNA, 19 nt, Homo sapiens
  misc_RNA (1)...(19): siRNA sense strand
ugcugaguauggagauaaa

SEQ ID NO: 2507748 - RNA, 19 nt, Homo sapiens
  misc_RNA (1)...(19): siRNA sense strand
cauauuacgacuaucacaa

SEQ ID NO: 2507749 - RNA, 19 nt, Homo sapiens
  misc_RNA (1)...(19): siRNA sense strand
cuauaaaugcaacagauga

SEQ ID NO: 2507750 - RNA, 19 nt, Homo sapiens
  misc_RNA (1)...(19): siRNA sense strand
aagauuauaugcaggacca

SEQ ID NO: 2507751 - RNA, 19 nt, Homo sapiens
  misc_RNA (1)...(19): siRNA sense strand
caccugagucauuggagaa

SEQ ID NO: 2507752 - RNA, 19 nt, Homo sapiens
  misc_RNA (1)...(19): siRNA sense strand
aaaugcaacagaugaggaa

SEQ ID NO: 2507753 - RNA, 19 nt, Homo sapiens
  misc_RNA (1)...(19): siRNA sense strand
aguuuaugcaagucagauu

SEQ ID NO: 2507754 - RNA, 19 nt, Homo sapiens
  misc_RNA (1)...(19): siRNA sense strand
ccgaauugaagaaagaagu

SEQ ID NO: 2507755 - RNA, 19 nt, Homo sapiens
  misc_RNA (1)...(19): siRNA sense strand
aacucaaagcagucaauua

SEQ ID NO: 2507756 - RNA, 19 nt, Homo sapiens
  misc_RNA (1)...(19): siRNA sense strand
guggauaaccauucaaaau

SEQ ID NO: 2507757 - RNA, 19 nt, Homo sapiens
  misc_RNA (1)...(19): siRNA sense strand
cgaaacuauaaaugcaaca

SEQ ID NO: 2507758 - RNA, 19 nt, Homo sapiens
  misc_RNA (1)...(19): siRNA sense strand
agugaggagauuaaagaca

SEQ ID NO: 2507759 - RNA, 19 nt, Homo sapiens
  misc_RNA (1)...(19): siRNA sense strand
gggacaguaagacaaguaa

SEQ ID NO: 2507760 - RNA, 19 nt, Homo sapiens
  misc_RNA (1)...(19): siRNA sense strand
aaauagaaaugcaguaccu

SEQ ID NO: 2507761 - RNA, 19 nt, Homo sapiens
  misc_RNA (1)...(19): siRNA sense strand
uaaacauagugaggagauu

SEQ ID NO: 2507762 - RNA, 19 nt, Homo sapiens
  misc_RNA (1)...(19): siRNA sense strand
aacauagugaggagauuaa

SEQ ID NO: 2507763 - RNA, 19 nt, Homo sapiens
  misc_RNA (1)...(19): siRNA sense strand
ccaauauugacuuuagaca

SEQ ID NO: 2507764 - RNA, 19 nt, Homo sapiens
  misc_RNA (1)...(19): siRNA sense strand
cauuacaggugcaagggaa

SEQ ID NO: 2507765 - RNA, 19 nt, Homo sapiens
  misc_RNA (1)...(19): siRNA sense strand
agagacaagcagugaugaa

SEQ ID NO: 2507766 - RNA, 19 nt, Homo sapiens
  misc_RNA (1)...(19): siRNA sense strand
caguaguagagauggaaaa

SEQ ID NO: 2507767 - RNA, 19 nt, Homo sapiens
  misc_RNA (1)...(19): siRNA sense strand
gaaucaaacuuuauggaag

SEQ ID NO: 2507768 - RNA, 19 nt, Homo sapiens
  misc_RNA (1)...(19): siRNA sense strand
guuggaaauucaagcccua

SEQ ID NO: 2507769 - RNA, 19 nt, Homo sapiens
  misc_RNA (1)...(19): siRNA sense strand
cgaaagugaccgaggagcu

SEQ ID NO: 2507770 - RNA, 19 nt, Homo sapiens
  misc_RNA (1)...(19): siRNA sense strand
cuucaucagcacagauaau

SEQ ID NO: 2507771 - RNA, 19 nt, Homo sapiens
  misc_RNA (1)...(19): siRNA sense strand
ugaacagugcuuugagaca

SEQ ID NO: 2507772 - RNA, 19 nt, Homo sapiens
  misc_RNA (1)...(19): siRNA sense strand
agacaagcagugaugaaca

SEQ ID NO: 2507773 - RNA, 19 nt, Homo sapiens
  misc_RNA (1)...(19): siRNA sense strand
cagaggaaagagagaugau

SEQ ID NO: 2507774 - RNA, 19 nt, Homo sapiens
  misc_RNA (1)...(19): siRNA sense strand
caccaucaucacagcguaa

SEQ ID NO: 2507775 - RNA, 19 nt, Homo sapiens
  misc_RNA (1)...(19): siRNA sense strand
ugauaacagaagagacagu

SEQ ID NO: 2507776 - RNA, 19 nt, Homo sapiens
  misc_RNA (1)...(19): siRNA sense strand
aagaagaagaggcuggaga

SEQ ID NO: 2507777 - RNA, 19 nt, Homo sapiens
  misc_RNA (1)...(19): siRNA sense strand
aagaugaguuggagcagga

SEQ ID NO: 2507778 - RNA, 19 nt, Homo sapiens
  misc_RNA (1)...(19): siRNA sense strand
cauaagagcugucuggaga

SEQ ID NO: 2507779 - RNA, 19 nt, Homo sapiens
  misc_RNA (1)...(19): siRNA sense strand
cggaguuugcaguggagaa

SEQ ID NO: 2507780 - RNA, 19 nt, Homo sapiens
  misc_RNA (1)...(19): siRNA sense strand
ugaagaagguggcagagga

SEQ ID NO: 2507781 - RNA, 19 nt, Homo sapiens
  misc_RNA (1)...(19): siRNA sense strand
ccgaguggagaaagaccaa

SEQ ID NO: 2507782 - RNA, 19 nt, Homo sapiens
  misc_RNA (1)...(19): siRNA sense strand
cuggaaugaugaagaacaa

SEQ ID NO: 2507783 - RNA, 19 nt, Homo sapiens
  misc_RNA (1)...(19): siRNA sense strand
ugaucgaugaggagagaaa

SEQ ID NO: 2507784 - RNA, 19 nt, Homo sapiens
  misc_RNA (1)...(19): siRNA sense strand
cuuuaguguuaauggcaaa

SEQ ID NO: 2507785 - RNA, 19 nt, Homo sapiens
  misc_RNA (1)...(19): siRNA sense strand
aaucaaagccugugggaug

SEQ ID NO: 2507786 - RNA, 19 nt, Homo sapiens
  misc_RNA (1)...(19): siRNA sense strand
uugcaauacuggaaacaau

SEQ ID NO: 2507787 - RNA, 19 nt, Homo sapiens
  misc_RNA (1)...(19): siRNA sense strand
uauuauagaagcagagcau

SEQ ID NO: 2507788 - RNA, 19 nt, Homo sapiens
  misc_RNA (1)...(19): siRNA sense strand
ucgcagaagcugacaacau

SEQ ID NO: 2507789 - RNA, 19 nt, Homo sapiens
  misc_RNA (1)...(19): siRNA sense strand
uccaaaaguaacaggaaaa

SEQ ID NO: 2507790 - RNA, 19 nt, Homo sapiens
  misc_RNA (1)...(19): siRNA sense strand
aagcaaaagagguuguuaa

SEQ ID NO: 2507791 - RNA, 19 nt, Homo sapiens
  misc_RNA (1)...(19): siRNA sense strand
ccaguuuggaauaaguaaa

SEQ ID NO: 2507792 - RNA, 19 nt, Homo sapiens
  misc_RNA (1)...(19): siRNA sense strand
uugaagaggaugcagcuaa

SEQ ID NO: 2507793 - RNA, 19 nt, Homo sapiens
  misc_RNA (1)...(19): siRNA sense strand
gugcaaggaauaugaaaau

SEQ ID NO: 2507794 - RNA, 19 nt, Homo sapiens
  misc_RNA (1)...(19): siRNA sense strand
cccaacagacccagaagaa

SEQ ID NO: 2507795 - RNA, 19 nt, Homo sapiens
  misc_RNA (1)...(19): siRNA sense strand
ugacaaguggcuuaagcua

SEQ ID NO: 2507796 - RNA, 19 nt, Homo sapiens
  misc_RNA (1)...(19): siRNA sense strand
uagaaaagacauuggcauu

SEQ ID NO: 2507797 - RNA, 19 nt, Homo sapiens
  misc_RNA (1)...(19): siRNA sense strand
ucaugcaacaagugaacaa

SEQ ID NO: 2507798 - RNA, 19 nt, Homo sapiens
  misc_RNA (1)...(19): siRNA sense strand
aguuaaggaggcuggauuu

SEQ ID NO: 2507799 - RNA, 19 nt, Homo sapiens
  misc_RNA (1)...(19): siRNA sense strand
gagcaaacugagaaaauuu

SEQ ID NO: 2507800 - RNA, 19 nt, Homo sapiens
  misc_RNA (1)...(19): siRNA sense strand
uaauagacucuuugaggau

SEQ ID NO: 2507801 - RNA, 19 nt, Homo sapiens
  misc_RNA (1)...(19): siRNA sense strand
cugaagaaaccgaaccaca

SEQ ID NO: 2507802 - RNA, 19 nt, Homo sapiens
  misc_RNA (1)...(19): siRNA sense strand
aagcagagcauaagacagu

SEQ ID NO: 2507803 - RNA, 19 nt, Homo sapiens
  misc_RNA (1)...(19): siRNA sense strand
agaaaccgcugaaagggaa

SEQ ID NO: 2507804 - RNA, 19 nt, Homo sapiens
  misc_RNA (1)...(19): siRNA sense strand
gaauagcagaccagcguga

SEQ ID NO: 2507805 - RNA, 19 nt, Homo sapiens
  misc_RNA (1)...(19): siRNA sense strand
aguuguaucucaaggaagu

SEQ ID NO: 2507806 - RNA, 19 nt, Homo sapiens
  misc_RNA (1)...(19): siRNA sense strand
acaaguaguauuaucggaa

SEQ ID NO: 2507807 - RNA, 19 nt, Homo sapiens
  misc_RNA (1)...(19): siRNA sense strand
gcaaggaauaugaaaauga

SEQ ID NO: 2507808 - RNA, 19 nt, Homo sapiens
  misc_RNA (1)...(19): siRNA sense strand
gcacaguuugcgauggaca

SEQ ID NO: 2507809 - RNA, 19 nt, Homo sapiens
  misc_RNA (1)...(19): siRNA sense strand
ggaaacaauuacugggacc

SEQ ID NO: 2507810 - RNA, 19 nt, Homo sapiens
  misc_RNA (1)...(19): siRNA sense strand
gaacaaaggcuuaacagug

SEQ ID NO: 2507811 - RNA, 19 nt, Homo sapiens
  misc_RNA (1)...(19): siRNA sense strand
gaaaccgcugaaagggaaa

SEQ ID NO: 2507812 - RNA, 19 nt, Homo sapiens
  misc_RNA (1)...(19): siRNA sense strand
ugaaagggaaauacagcau

SEQ ID NO: 2507813 - RNA, 19 nt, Homo sapiens
  misc_RNA (1)...(19): siRNA sense strand
gugaacaaagagagcagau

SEQ ID NO: 2507814 - RNA, 19 nt, Homo sapiens
  misc_RNA (1)...(19): siRNA sense strand
ccuggaaugaugaagaaca

SEQ ID NO: 2507815 - RNA, 19 nt, Homo sapiens
  misc_RNA (1)...(19): siRNA sense strand
gaaugaugaagaacaaaca

SEQ ID NO: 2507816 - RNA, 19 nt, Homo sapiens
  misc_RNA (1)...(19): siRNA sense strand
guugcagaacaaaggcuua

SEQ ID NO: 2507817 - RNA, 19 nt, Homo sapiens
  misc_RNA (1)...(19): siRNA sense strand
ugaacugaacgaagacgaa

SEQ ID NO: 2507818 - RNA, 19 nt, Homo sapiens
  misc_RNA (1)...(19): siRNA sense strand
agugauugauguuuaccaa

SEQ ID NO: 2507819 - RNA, 19 nt, Homo sapiens
  misc_RNA (1)...(19): siRNA sense strand
ugaugaagaacaaacaaga

SEQ ID NO: 2507820 - RNA, 19 nt, Homo sapiens
  misc_RNA (1)...(19): siRNA sense strand
ucaaaauacuggagcaaag

SEQ ID NO: 2507821 - RNA, 19 nt, Homo sapiens
  misc_RNA (1)...(19): siRNA sense strand
uaacgaacgaucugaggau

SEQ ID NO: 2507822 - RNA, 19 nt, Homo sapiens
  misc_RNA (1)...(19): siRNA sense strand
augaagaacaaacaagaca

SEQ ID NO: 2507823 - RNA, 19 nt, Homo sapiens
  misc_RNA (1)...(19): siRNA sense strand
ucuggaaagacaacauuua

SEQ ID NO: 2507824 - RNA, 19 nt, Homo sapiens
  misc_RNA (1)...(19): siRNA sense strand
auccaaaaguaacaggaaa

SEQ ID NO: 2507825 - RNA, 19 nt, Homo sapiens
  misc_RNA (1)...(19): siRNA sense strand
aaacauuguccauggagca

SEQ ID NO: 2507826 - RNA, 19 nt, Homo sapiens
  misc_RNA (1)...(19): siRNA sense strand
cugaaauuccauuaguaga

SEQ ID NO: 2507827 - RNA, 19 nt, Homo sapiens
  misc_RNA (1)...(19): siRNA sense strand
agcaaagacaaguaguauu

SEQ ID NO: 2507828 - RNA, 19 nt, Homo sapiens
  misc_RNA (1)...(19): siRNA sense strand
ccgcugaaagggaaauaca

SEQ ID NO: 2507829 - RNA, 19 nt, Homo sapiens
  misc_RNA (1)...(19): siRNA sense strand
gugaagaaaauguuccuaa

SEQ ID NO: 2507830 - RNA, 19 nt, Homo sapiens
  misc_RNA (1)...(19): siRNA sense strand
aguuacagacagucaucaa

SEQ ID NO: 2507831 - RNA, 19 nt, Homo sapiens
  misc_RNA (1)...(19): siRNA sense strand
aaauuaaccugcuggguga

SEQ ID NO: 2507832 - RNA, 19 nt, Homo sapiens
  misc_RNA (1)...(19): siRNA sense strand
agaauagaguucaaggaca

SEQ ID NO: 2507833 - RNA, 19 nt, Homo sapiens
  misc_RNA (1)...(19): siRNA sense strand
aggacagaauagaguucaa

SEQ ID NO: 2507834 - RNA, 19 nt, Homo sapiens
  misc_RNA (1)...(19): siRNA sense strand
acaucaagugggaagacaa

SEQ ID NO: 2507835 - RNA, 19 nt, Homo sapiens
  misc_RNA (1)...(19): siRNA sense strand
cgugcaagccagaugugaa

SEQ ID NO: 2507836 - RNA, 19 nt, Homo sapiens
  misc_RNA (1)...(19): siRNA sense strand
cugcaagcugccaggaaga

SEQ ID NO: 2507837 - RNA, 19 nt, Homo sapiens
  misc_RNA (1)...(19): siRNA sense strand
aaggacaagaggccagaaa

SEQ ID NO: 2507838 - RNA, 19 nt, Homo sapiens
  misc_RNA (1)...(19): siRNA sense strand
cgccacuauuauaagcuua

SEQ ID NO: 2507839 - RNA, 19 nt, Homo sapiens
  misc_RNA (1)...(19): siRNA sense strand
ggacaaagccacaaccaga

SEQ ID NO: 2507840 - RNA, 19 nt, Homo sapiens
  misc_RNA (1)...(19): siRNA sense strand
ccagcaagacagaugccua

SEQ ID NO: 2507841 - RNA, 19 nt, Homo sapiens
  misc_RNA (1)...(19): siRNA sense strand
gaaaugaagaagacugcca

SEQ ID NO: 2507842 - RNA, 19 nt, Homo sapiens
  misc_RNA (1)...(19): siRNA sense strand
gaaucugccgccagggaga

SEQ ID NO: 2507843 - RNA, 19 nt, Homo sapiens
  misc_RNA (1)...(19): siRNA sense strand
aguuagagacaccugggaa

SEQ ID NO: 2507844 - RNA, 19 nt, Homo sapiens
  misc_RNA (1)...(19): siRNA sense strand
agaaauaacuguagggcca

SEQ ID NO: 2507845 - RNA, 19 nt, Homo sapiens
  misc_RNA (1)...(19): siRNA sense strand
ugaagaaggaagugauaaa

SEQ ID NO: 2507846 - RNA, 19 nt, Homo sapiens
  misc_RNA (1)...(19): siRNA sense strand
gugcaaagagccagggaau

SEQ ID NO: 2507847 - RNA, 19 nt, Homo sapiens
  misc_RNA (1)...(19): siRNA sense strand
cuuagaaguacgaaagaaa

SEQ ID NO: 2507848 - RNA, 19 nt, Homo sapiens
  misc_RNA (1)...(19): siRNA sense strand
cuuaagucuuggagauaaa

SEQ ID NO: 2507849 - RNA, 19 nt, Homo sapiens
  misc_RNA (1)...(19): siRNA sense strand
ccaccaagaaagaggaaga

SEQ ID NO: 2507850 - RNA, 19 nt, Homo sapiens
  misc_RNA (1)...(19): siRNA sense strand
cugcuaaacuagaagaaga

SEQ ID NO: 2507851 - RNA, 19 nt, Homo sapiens
  misc_RNA (1)...(19): siRNA sense strand
cauuauggauccugggaga

SEQ ID NO: 2507852 - RNA, 19 nt, Homo sapiens
  misc_RNA (1)...(19): siRNA sense strand
cagcuauguuagaagaaau

SEQ ID NO: 2507853 - RNA, 19 nt, Homo sapiens
  misc_RNA (1)...(19): siRNA sense strand
auaugaagcugcugggaca

SEQ ID NO: 2507854 - RNA, 19 nt, Homo sapiens
  misc_RNA (1)...(19): siRNA sense strand
cuguauaugcagaagcuua

SEQ ID NO: 2507855 - RNA, 19 nt, Homo sapiens
  misc_RNA (1)...(19): siRNA sense strand
gcaaauugaaagaagcaga

SEQ ID NO: 2507856 - RNA, 19 nt, Homo sapiens
  misc_RNA (1)...(19): siRNA sense strand
ccugaagaaggaagugaua

SEQ ID NO: 2507857 - RNA, 19 nt, Homo sapiens
  misc_RNA (1)...(19): siRNA sense strand
aggaagacauucagagugu

SEQ ID NO: 2507858 - RNA, 19 nt, Homo sapiens
  misc_RNA (1)...(19): siRNA sense strand
gcagcaagugacagaaauu

SEQ ID NO: 2507859 - RNA, 19 nt, Homo sapiens
  misc_RNA (1)...(19): siRNA sense strand
aaagaaagaagcuggugaa

SEQ ID NO: 2507860 - RNA, 19 nt, Homo sapiens
  misc_RNA (1)...(19): siRNA sense strand
gaaccaaaccagugauacu

SEQ ID NO: 2507861 - RNA, 19 nt, Homo sapiens
  misc_RNA (1)...(19): siRNA sense strand
ggccuuaagucuuggagau

SEQ ID NO: 2507862 - RNA, 19 nt, Homo sapiens
  misc_RNA (1)...(19): siRNA sense strand
cagaaauugguuacugaaa

SEQ ID NO: 2507863 - RNA, 19 nt, Homo sapiens
  misc_RNA (1)...(19): siRNA sense strand
uagcuuugguucaggagaa

SEQ ID NO: 2507864 - RNA, 19 nt, Homo sapiens
  misc_RNA (1)...(19): siRNA sense strand
gaucccaauuguagaguca

SEQ ID NO: 2507865 - RNA, 19 nt, Homo sapiens
  misc_RNA (1)...(19): siRNA sense strand
cgucaaaguagcaucaaca

SEQ ID NO: 2507866 - RNA, 19 nt, Homo sapiens
  misc_RNA (1)...(19): siRNA sense strand
gaaaugaacugcaaggaag

SEQ ID NO: 2507867 - RNA, 19 nt, Homo sapiens
  misc_RNA (1)...(19): siRNA sense strand
cauauaagaauucgugcaa

SEQ ID NO: 2507868 - RNA, 19 nt, Homo sapiens
  misc_RNA (1)...(19): siRNA sense strand
auggauauccuaagaguau

SEQ ID NO: 2507869 - RNA, 19 nt, Homo sapiens
  misc_RNA (1)...(19): siRNA sense strand
ccuuaagucuuggagauaa

SEQ ID NO: 2507870 - RNA, 19 nt, Homo sapiens
  misc_RNA (1)...(19): siRNA sense strand
cugcuaagaaugaaaugaa

SEQ ID NO: 2507871 - RNA, 19 nt, Homo sapiens
  misc_RNA (1)...(19): siRNA sense strand
ugaaaugaacugcaaggaa

SEQ ID NO: 2507872 - RNA, 19 nt, Homo sapiens
  misc_RNA (1)...(19): siRNA sense strand
acaucgacaucauggacua

SEQ ID NO: 2507873 - RNA, 19 nt, Homo sapiens
  misc_RNA (1)...(19): siRNA sense strand
ccaagauugcauugcgcua

SEQ ID NO: 2507874 - RNA, 19 nt, Homo sapiens
  misc_RNA (1)...(19): siRNA sense strand
gccaauggauucagaacca

SEQ ID NO: 2507875 - RNA, 19 nt, Homo sapiens
  misc_RNA (1)...(19): siRNA sense strand
gcuuugauaaccugagaau

SEQ ID NO: 2507876 - RNA, 19 nt, Homo sapiens
  misc_RNA (1)...(19): siRNA sense strand
agaaagaagcuggugaauu

SEQ ID NO: 2507877 - RNA, 19 nt, Homo sapiens
  misc_RNA (1)...(19): siRNA sense strand
ccaucugaaauuagcuuaa

SEQ ID NO: 2507878 - RNA, 19 nt, Homo sapiens
  misc_RNA (1)...(19): siRNA sense strand
cuaaacuagaagaagagaa

SEQ ID NO: 2507879 - RNA, 19 nt, Homo sapiens
  misc_RNA (1)...(19): siRNA sense strand
agugauacuuugcagaauu

SEQ ID NO: 2507880 - RNA, 19 nt, Homo sapiens
  misc_RNA (1)...(19): siRNA sense strand
aucugaaacuuguggaaaa

SEQ ID NO: 2507881 - RNA, 19 nt, Homo sapiens
  misc_RNA (1)...(19): siRNA sense strand
caugcuaauccaucagaaa

SEQ ID NO: 2507882 - RNA, 19 nt, Homo sapiens
  misc_RNA (1)...(19): siRNA sense strand
guaccaaggaagacauuca

SEQ ID NO: 2507883 - RNA, 19 nt, Homo sapiens
  misc_RNA (1)...(19): siRNA sense strand
ccaauuguagagucagaaa

SEQ ID NO: 2507884 - RNA, 19 nt, Homo sapiens
  misc_RNA (1)...(19): siRNA sense strand
cggcugagaacguaugcua

SEQ ID NO: 2507885 - RNA, 19 nt, Homo sapiens
  misc_RNA (1)...(19): siRNA sense strand
gaggaaagaggcagcagau

SEQ ID NO: 2507886 - RNA, 19 nt, Homo sapiens
  misc_RNA (1)...(19): siRNA sense strand
gcuagaaccuuuaaugcca

SEQ ID NO: 2507887 - RNA, 19 nt, Homo sapiens
  misc_RNA (1)...(19): siRNA sense strand
aggaucgagcuuuggauua

SEQ ID NO: 2507888 - RNA, 19 nt, Homo sapiens
  misc_RNA (1)...(19): siRNA sense strand
gauuuaccgaggagcauua

SEQ ID NO: 2507889 - RNA, 19 nt, Homo sapiens
  misc_RNA (1)...(19): siRNA sense strand
gccaauuacugaugaugau

SEQ ID NO: 2507890 - RNA, 19 nt, Homo sapiens
  misc_RNA (1)...(19): siRNA sense strand
ggaucugaaacuuguggaa

SEQ ID NO: 2507891 - RNA, 19 nt, Homo sapiens
  misc_RNA (1)...(19): siRNA sense strand
ugguuauuguccugaagaa

SEQ ID NO: 2507892 - RNA, 19 nt, Homo sapiens
  misc_RNA (1)...(19): siRNA sense strand
gguaacacacagaggaaag

SEQ ID NO: 2507893 - RNA, 19 nt, Homo sapiens
  misc_RNA (1)...(19): siRNA sense strand
gccuuaagucuuggagaua

SEQ ID NO: 2507894 - RNA, 19 nt, Homo sapiens
  misc_RNA (1)...(19): siRNA sense strand
ggauguacuuguugugaac

SEQ ID NO: 2507895 - RNA, 19 nt, Homo sapiens
  misc_RNA (1)...(19): siRNA sense strand
auuauuaaggagagcgaca

SEQ ID NO: 2507896 - RNA, 19 nt, Homo sapiens
  misc_RNA (1)...(19): siRNA sense strand
cugcugaugucuuggaguu

SEQ ID NO: 2507897 - RNA, 19 nt, Homo sapiens
  misc_RNA (1)...(19): siRNA sense strand
uggguaacacacagaggaa

SEQ ID NO: 2507898 - RNA, 19 nt, Homo sapiens
  misc_RNA (1)...(19): siRNA sense strand
gggccgaauuugaauggga

SEQ ID NO: 2507899 - RNA, 19 nt, Homo sapiens
  misc_RNA (1)...(19): siRNA sense strand
ggccgaauuugaaugggaa

SEQ ID NO: 2507900 - RNA, 19 nt, Homo sapiens
  misc_RNA (1)...(19): siRNA sense strand
caucauucguuuugugcua

SEQ ID NO: 2507901 - RNA, 19 nt, Homo sapiens
  misc_RNA (1)...(19): siRNA sense strand
cuauccugcauuugggaaa

SEQ ID NO: 2507902 - RNA, 19 nt, Homo sapiens
  misc_RNA (1)...(19): siRNA sense strand
ggguaacacacagaggaaa

SEQ ID NO: 2507903 - RNA, 19 nt, Homo sapiens
  misc_RNA (1)...(19): siRNA sense strand
ucaacuugucacagaagaa

SEQ ID NO: 2507904 - RNA, 19 nt, Homo sapiens
  misc_RNA (1)...(19): siRNA sense strand
aaauaaugugucugagcau

SEQ ID NO: 2507905 - RNA, 19 nt, Homo sapiens
  misc_RNA (1)...(19): siRNA sense strand
aaaugaacugcaaggaaga

SEQ ID NO: 2507906 - RNA, 19 nt, Homo sapiens
  misc_RNA (1)...(19): siRNA sense strand
cugcaaggaagaucaguuu

SEQ ID NO: 2507907 - RNA, 19 nt, Homo sapiens
  misc_RNA (1)...(19): siRNA sense strand
aggaucugguuauggauau

SEQ ID NO: 2507908 - RNA, 19 nt, Homo sapiens
  misc_RNA (1)...(19): siRNA sense strand
gaucacacuaucaagaaau

SEQ ID NO: 2507909 - RNA, 19 nt, Homo sapiens
  misc_RNA (1)...(19): siRNA sense strand
gggaaaacaaagugacagu

SEQ ID NO: 2507910 - RNA, 19 nt, Homo sapiens
  misc_RNA (1)...(19): siRNA sense strand
gaacugauuuauaaggucu

SEQ ID NO: 2507911 - RNA, 19 nt, Homo sapiens
  misc_RNA (1)...(19): siRNA sense strand
aguuagaagaggaggaaca

SEQ ID NO: 2507912 - RNA, 19 nt, Homo sapiens
  misc_RNA (1)...(19): siRNA sense strand
guaacaaggacgugggcau

SEQ ID NO: 2507913 - RNA, 19 nt, Homo sapiens
  misc_RNA (1)...(19): siRNA sense strand
gaaaguuagaagaggagga

SEQ ID NO: 2507914 - RNA, 19 nt, Homo sapiens
  misc_RNA (1)...(19): siRNA sense strand
ggcgaaaguuagaagagga

SEQ ID NO: 2507915 - RNA, 19 nt, Homo sapiens
  misc_RNA (1)...(19): siRNA sense strand
gcaucugguugaaaggaga

SEQ ID NO: 2507916 - RNA, 19 nt, Homo sapiens
  misc_RNA (1)...(19): siRNA sense strand
augagauggugaagaagau

SEQ ID NO: 2507917 - RNA, 19 nt, Homo sapiens
  misc_RNA (1)...(19): siRNA sense strand
gguugaaaggagaagacca

SEQ ID NO: 2507918 - RNA, 19 nt, Homo sapiens
  misc_RNA (1)...(19): siRNA sense strand
cuaaaauaucgguggcgaa

SEQ ID NO: 2507919 - RNA, 19 nt, Homo sapiens
  misc_RNA (1)...(19): siRNA sense strand
agcaggacauggagcgcua

SEQ ID NO: 2507920 - RNA, 19 nt, Homo sapiens
  misc_RNA (1)...(19): siRNA sense strand
gcccaagaauauauagcca

SEQ ID NO: 2507921 - RNA, 19 nt, Homo sapiens
  misc_RNA (1)...(19): siRNA sense strand
uggugacgacuguggacaa

SEQ ID NO: 2507922 - RNA, 19 nt, Homo sapiens
  misc_RNA (1)...(19): siRNA sense strand
acaugaaguuauugccagu

SEQ ID NO: 2507923 - RNA, 19 nt, Homo sapiens
  misc_RNA (1)...(19): siRNA sense strand
aggcggaggacaacaugaa

SEQ ID NO: 2507924 - RNA, 19 nt, Homo sapiens
  misc_RNA (1)...(19): siRNA sense strand
guguaacgaaugugggaaa

SEQ ID NO: 2507925 - RNA, 19 nt, Homo sapiens
  misc_RNA (1)...(19): siRNA sense strand
ccuuaugagugcagcgaau

SEQ ID NO: 2507926 - RNA, 19 nt, Homo sapiens
  misc_RNA (1)...(19): siRNA sense strand
gggaaagccuucagccgaa

SEQ ID NO: 2507927 - RNA, 19 nt, Homo sapiens
  misc_RNA (1)...(19): siRNA sense strand
gggaaaaccuucaggcaga

SEQ ID NO: 2507928 - RNA, 19 nt, Homo sapiens
  misc_RNA (1)...(19): siRNA sense strand
gggaaauucuucagccgaa

SEQ ID NO: 2507929 - RNA, 19 nt, Homo sapiens
  misc_RNA (1)...(19): siRNA sense strand
ccguaugagugcugugaau

SEQ ID NO: 2507930 - RNA, 19 nt, Homo sapiens
  misc_RNA (1)...(19): siRNA sense strand
ccuuaugaaugcagcaaau

SEQ ID NO: 2507931 - RNA, 19 nt, Homo sapiens
  misc_RNA (1)...(19): siRNA sense strand
guguggugacugugggaaa

SEQ ID NO: 2507932 - RNA, 19 nt, Homo sapiens
  misc_RNA (1)...(19): siRNA sense strand
gggaaauucuucagccaca

SEQ ID NO: 2507933 - RNA, 19 nt, Homo sapiens
  misc_RNA (1)...(19): siRNA sense strand
agagaaaggagcauggaga

SEQ ID NO: 2507934 - RNA, 19 nt, Homo sapiens
  misc_RNA (1)...(19): siRNA sense strand
ccauaugagugcagcgacu

SEQ ID NO: 2507935 - RNA, 19 nt, Homo sapiens
  misc_RNA (1)...(19): siRNA sense strand
gggaaguuauuuagccaga

SEQ ID NO: 2507936 - RNA, 19 nt, Homo sapiens
  misc_RNA (1)...(19): siRNA sense strand
gugugaggcauaugugaaa

SEQ ID NO: 2507937 - RNA, 19 nt, Homo sapiens
  misc_RNA (1)...(19): siRNA sense strand
guguggugagugugggaaa

SEQ ID NO: 2507938 - RNA, 19 nt, Homo sapiens
  misc_RNA (1)...(19): siRNA sense strand
augcagcgaaugugggaaa

SEQ ID NO: 2507939 - RNA, 19 nt, Homo sapiens
  misc_RNA (1)...(19): siRNA sense strand
ccucaauagccaucggaga

SEQ ID NO: 2507940 - RNA, 19 nt, Homo sapiens
  misc_RNA (1)...(19): siRNA sense strand
ccucauucaacaucagaua

SEQ ID NO: 2507941 - RNA, 19 nt, Homo sapiens
  misc_RNA (1)...(19): siRNA sense strand
aguucacacuggagaaaga

SEQ ID NO: 2507942 - RNA, 19 nt, Homo sapiens
  misc_RNA (1)...(19): siRNA sense strand
cuguagaaggaguggcaca

SEQ ID NO: 2507943 - RNA, 19 nt, Homo sapiens
  misc_RNA (1)...(19): siRNA sense strand
agaaaggagcauggagaau

SEQ ID NO: 2507944 - RNA, 19 nt, Homo sapiens
  misc_RNA (1)...(19): siRNA sense strand
gccauggaacagagggcaa

SEQ ID NO: 2507945 - RNA, 19 nt, Homo sapiens
  misc_RNA (1)...(19): siRNA sense strand
ccuuacgaaugcagcgaau

SEQ ID NO: 2507946 - RNA, 19 nt, Homo sapiens
  misc_RNA (1)...(19): siRNA sense strand
guaaagaccugcagagacc

SEQ ID NO: 2507947 - RNA, 19 nt, Homo sapiens
  misc_RNA (1)...(19): siRNA sense strand
cauuugugugugaggcaua

SEQ ID NO: 2507948 - RNA, 19 nt, Homo sapiens
  misc_RNA (1)...(19): siRNA sense strand
ucacauugcacuaaggcau

SEQ ID NO: 2507949 - RNA, 19 nt, Homo sapiens
  misc_RNA (1)...(19): siRNA sense strand
aguucacaauagaggaaaa

SEQ ID NO: 2507950 - RNA, 19 nt, Homo sapiens
  misc_RNA (1)...(19): siRNA sense strand
ccuaauuaaacauuggaga

SEQ ID NO: 2507951 - RNA, 19 nt, Homo sapiens
  misc_RNA (1)...(19): siRNA sense strand
aaccaaagcuccagccuca

SEQ ID NO: 2507952 - RNA, 19 nt, Homo sapiens
  misc_RNA (1)...(19): siRNA sense strand
acagcacacaccagagaua

SEQ ID NO: 2507953 - RNA, 19 nt, Homo sapiens
  misc_RNA (1)...(19): siRNA sense strand
agaauccacagcagagaaa

SEQ ID NO: 2507954 - RNA, 19 nt, Homo sapiens
  misc_RNA (1)...(19): siRNA sense strand
gugcugugaauguggaaaa

SEQ ID NO: 2507955 - RNA, 19 nt, Homo sapiens
  misc_RNA (1)...(19): siRNA sense strand
auuaaacauuggagaguuc

SEQ ID NO: 2507956 - RNA, 19 nt, Homo sapiens
  misc_RNA (1)...(19): siRNA sense strand
agccagagcuccagccuca

SEQ ID NO: 2507957 - RNA, 19 nt, Homo sapiens
  misc_RNA (1)...(19): siRNA sense strand
ccuuaccagugcagugaau

SEQ ID NO: 2507958 - RNA, 19 nt, Homo sapiens
  misc_RNA (1)...(19): siRNA sense strand
ccucaauaaccaccggaga

SEQ ID NO: 2507959 - RNA, 19 nt, Homo sapiens
  misc_RNA (1)...(19): siRNA sense strand
ugggaaauucuuuaaccaa

SEQ ID NO: 2507960 - RNA, 19 nt, Homo sapiens
  misc_RNA (1)...(19): siRNA sense strand
caauagaggaaaaccguau

SEQ ID NO: 2507961 - RNA, 19 nt, Homo sapiens
  misc_RNA (1)...(19): siRNA sense strand
ucaugaaacaucagcgagu

SEQ ID NO: 2507962 - RNA, 19 nt, Homo sapiens
  misc_RNA (1)...(19): siRNA sense strand
ggaaggacuuuguggccac

SEQ ID NO: 2507963 - RNA, 19 nt, Homo sapiens
  misc_RNA (1)...(19): siRNA sense strand
gggcagaaggugauggaga

SEQ ID NO: 2507964 - RNA, 19 nt, Homo sapiens
  misc_RNA (1)...(19): siRNA sense strand
gggagaaggcaaaggcaga

SEQ ID NO: 2507965 - RNA, 19 nt, Homo sapiens
  misc_RNA (1)...(19): siRNA sense strand
aagcagagacagagcggaa

SEQ ID NO: 2507966 - RNA, 19 nt, Homo sapiens
  misc_RNA (1)...(19): siRNA sense strand
ccaacauaccagaggcaau

SEQ ID NO: 2507967 - RNA, 19 nt, Homo sapiens
  misc_RNA (1)...(19): siRNA sense strand
gcacaagauagaagaggga

SEQ ID NO: 2507968 - RNA, 19 nt, Homo sapiens
  misc_RNA (1)...(19): siRNA sense strand
gaauguaccuugugggacu

SEQ ID NO: 2507969 - RNA, 19 nt, Homo sapiens
  misc_RNA (1)...(19): siRNA sense strand
acaagauagaagagggaca

SEQ ID NO: 2507970 - RNA, 19 nt, Homo sapiens
  misc_RNA (1)...(19): siRNA sense strand
aggcaaaggcagaugcuga

SEQ ID NO: 2507971 - RNA, 19 nt, Homo sapiens
  misc_RNA (1)...(19): siRNA sense strand
auggaaagugagaagacaa

SEQ ID NO: 2507972 - RNA, 19 nt, Homo sapiens
  misc_RNA (1)...(19): siRNA sense strand
acagaauugaaguggugaa

SEQ ID NO: 2507973 - RNA, 19 nt, Homo sapiens
  misc_RNA (1)...(19): siRNA sense strand
auucaagcugugcggguaa

SEQ ID NO: 2507974 - RNA, 19 nt, Homo sapiens
  misc_RNA (1)...(19): siRNA sense strand
ugaaaauagccgaagccaa

SEQ ID NO: 2507975 - RNA, 19 nt, Homo sapiens
  misc_RNA (1)...(19): siRNA sense strand
gcuuagaagaugaacccuu

SEQ ID NO: 2507976 - RNA, 19 nt, Homo sapiens
  misc_RNA (1)...(19): siRNA sense strand
cugaugaaguacaaggcca

SEQ ID NO: 2507977 - RNA, 19 nt, Homo sapiens
  misc_RNA (1)...(19): siRNA sense strand
gcaagauuuacuuuggcaa

SEQ ID NO: 2507978 - RNA, 19 nt, Homo sapiens
  misc_RNA (1)...(19): siRNA sense strand
gaagaugaacccuuggaga

SEQ ID NO: 2507979 - RNA, 19 nt, Homo sapiens
  misc_RNA (1)...(19): siRNA sense strand
agaaacagaagguggugga

SEQ ID NO: 2507980 - RNA, 19 nt, Homo sapiens
  misc_RNA (1)...(19): siRNA sense strand
ugaugaaguacaaggccau

SEQ ID NO: 2507981 - RNA, 19 nt, Homo sapiens
  misc_RNA (1)...(19): siRNA sense strand
aaaaggaagcagagacaga

SEQ ID NO: 2507982 - RNA, 19 nt, Homo sapiens
  misc_RNA (1)...(19): siRNA sense strand
gaguugauggaaagugaga

SEQ ID NO: 2507983 - RNA, 19 nt, Homo sapiens
  misc_RNA (1)...(19): siRNA sense strand
ugaagaggcugguuggcga

SEQ ID NO: 2507984 - RNA, 19 nt, Homo sapiens
  misc_RNA (1)...(19): siRNA sense strand
gugacaguggugugggaaa

SEQ ID NO: 2507985 - RNA, 19 nt, Homo sapiens
  misc_RNA (1)...(19): siRNA sense strand
auguagagucccagaagaa

SEQ ID NO: 2507986 - RNA, 19 nt, Homo sapiens
  misc_RNA (1)...(19): siRNA sense strand
ccgaagacggagagaccuu

SEQ ID NO: 2507987 - RNA, 19 nt, Homo sapiens
  misc_RNA (1)...(19): siRNA sense strand
ugaucaugcugcuaggcaa

SEQ ID NO: 2507988 - RNA, 19 nt, Homo sapiens
  misc_RNA (1)...(19): siRNA sense strand
cacugagauucaugaguau

SEQ ID NO: 2507989 - RNA, 19 nt, Homo sapiens
  misc_RNA (1)...(19): siRNA sense strand
gcgaaagagugauccguuc

SEQ ID NO: 2507990 - RNA, 19 nt, Homo sapiens
  misc_RNA (1)...(19): siRNA sense strand
cuuccagauccgagacuau

SEQ ID NO: 2507991 - RNA, 19 nt, Homo sapiens
  misc_RNA (1)...(19): siRNA sense strand
gggugacagugguguggga

SEQ ID NO: 2507992 - RNA, 19 nt, Homo sapiens
  misc_RNA (1)...(19): siRNA sense strand
agaaagaagaagagguaga

SEQ ID NO: 2507993 - RNA, 19 nt, Homo sapiens
  misc_RNA (1)...(19): siRNA sense strand
aagaagagguagagagacu

SEQ ID NO: 2507994 - RNA, 19 nt, Homo sapiens
  misc_RNA (1)...(19): siRNA sense strand
agaagaagagguagagaga

SEQ ID NO: 2507995 - RNA, 19 nt, Homo sapiens
  misc_RNA (1)...(19): siRNA sense strand
agugagaagguuagugaua

SEQ ID NO: 2507996 - RNA, 19 nt, Homo sapiens
  misc_RNA (1)...(19): siRNA sense strand
ccuggaagaaagacagaaa

SEQ ID NO: 2507997 - RNA, 19 nt, Homo sapiens
  misc_RNA (1)...(19): siRNA sense strand
cagaaaagucacuggcuaa

SEQ ID NO: 2507998 - RNA, 19 nt, Homo sapiens
  misc_RNA (1)...(19): siRNA sense strand
ggguagaagcauuugauga

SEQ ID NO: 2507999 - RNA, 19 nt, Homo sapiens
  misc_RNA (1)...(19): siRNA sense strand
uauuuagagaagaggguua

SEQ ID NO: 2508000 - RNA, 19 nt, Homo sapiens
  misc_RNA (1)...(19): siRNA sense strand
ugcaaggagugaagagcaa

SEQ ID NO: 2508001 - RNA, 19 nt, Homo sapiens
  misc_RNA (1)...(19): siRNA sense strand
ccaggaaugacaaggaaau

SEQ ID NO: 2508002 - RNA, 19 nt, Homo sapiens
  misc_RNA (1)...(19): siRNA sense strand
caauauaaagcaagacuca

SEQ ID NO: 2508003 - RNA, 19 nt, Homo sapiens
  misc_RNA (1)...(19): siRNA sense strand
gaaagcaggaagugcgaau

SEQ ID NO: 2508004 - RNA, 19 nt, Homo sapiens
  misc_RNA (1)...(19): siRNA sense strand
uggaagagguuuuagcuaa

SEQ ID NO: 2508005 - RNA, 19 nt, Homo sapiens
  misc_RNA (1)...(19): siRNA sense strand
agaaagacagaaacugaaa

SEQ ID NO: 2508006 - RNA, 19 nt, Homo sapiens
  misc_RNA (1)...(19): siRNA sense strand
ucagauauuaccaaggaua

SEQ ID NO: 2508007 - RNA, 19 nt, Homo sapiens
  misc_RNA (1)...(19): siRNA sense strand
aggaaauguuacagcuuca

SEQ ID NO: 2508008 - RNA, 19 nt, Homo sapiens
  misc_RNA (1)...(19): siRNA sense strand
augaagucuugcagaaauu

SEQ ID NO: 2508009 - RNA, 19 nt, Homo sapiens
  misc_RNA (1)...(19): siRNA sense strand
ccagaaacuugaaaaggaa

SEQ ID NO: 2508010 - RNA, 19 nt, Homo sapiens
  misc_RNA (1)...(19): siRNA sense strand
gguuaaagaacuacagaug

SEQ ID NO: 2508011 - RNA, 19 nt, Homo sapiens
  misc_RNA (1)...(19): siRNA sense strand
uuuaagaagaucaaggcua

SEQ ID NO: 2508012 - RNA, 19 nt, Homo sapiens
  misc_RNA (1)...(19): siRNA sense strand
ugucuuuacaggaggaauu

SEQ ID NO: 2508013 - RNA, 19 nt, Homo sapiens
  misc_RNA (1)...(19): siRNA sense strand
ugaagaugcuuauggcaca

SEQ ID NO: 2508014 - RNA, 19 nt, Homo sapiens
  misc_RNA (1)...(19): siRNA sense strand
caaaauaauccuagagaag

SEQ ID NO: 2508015 - RNA, 19 nt, Homo sapiens
  misc_RNA (1)...(19): siRNA sense strand
aggaggaauuccagaaacu

SEQ ID NO: 2508016 - RNA, 19 nt, Homo sapiens
  misc_RNA (1)...(19): siRNA sense strand
gugauauaaugcugcaaaa

SEQ ID NO: 2508017 - RNA, 19 nt, Homo sapiens
  misc_RNA (1)...(19): siRNA sense strand
gaugaugaaaugacagaga

SEQ ID NO: 2508018 - RNA, 19 nt, Homo sapiens
  misc_RNA (1)...(19): siRNA sense strand
aguauuuagagauggacaa

SEQ ID NO: 2508019 - RNA, 19 nt, Homo sapiens
  misc_RNA (1)...(19): siRNA sense strand
cagcaaaucaacgaaguaa

SEQ ID NO: 2508020 - RNA, 19 nt, Homo sapiens
  misc_RNA (1)...(19): siRNA sense strand
cagcucaguuaaaggauca

SEQ ID NO: 2508021 - RNA, 19 nt, Homo sapiens
  misc_RNA (1)...(19): siRNA sense strand
gcuaaaggagaauguugaa

SEQ ID NO: 2508022 - RNA, 19 nt, Homo sapiens
  misc_RNA (1)...(19): siRNA sense strand
aggaaagguacaugacuga

SEQ ID NO: 2508023 - RNA, 19 nt, Homo sapiens
  misc_RNA (1)...(19): siRNA sense strand
gcauaucuuccuugagaca

SEQ ID NO: 2508024 - RNA, 19 nt, Homo sapiens
  misc_RNA (1)...(19): siRNA sense strand
agagaagaggguuaaagaa

SEQ ID NO: 2508025 - RNA, 19 nt, Homo sapiens
  misc_RNA (1)...(19): siRNA sense strand
gcaagaaagaagaagaggu

SEQ ID NO: 2508026 - RNA, 19 nt, Homo sapiens
  misc_RNA (1)...(19): siRNA sense strand
aggaucaauuagaggaagu

SEQ ID NO: 2508027 - RNA, 19 nt, Homo sapiens
  misc_RNA (1)...(19): siRNA sense strand
agccagaauuucaaaguca

SEQ ID NO: 2508028 - RNA, 19 nt, Homo sapiens
  misc_RNA (1)...(19): siRNA sense strand
aggcuaauuauguguguuu

SEQ ID NO: 2508029 - RNA, 19 nt, Homo sapiens
  misc_RNA (1)...(19): siRNA sense strand
uggaagaaagacagaaacu

SEQ ID NO: 2508030 - RNA, 19 nt, Homo sapiens
  misc_RNA (1)...(19): siRNA sense strand
agcaaaucaacgaaguaaa

SEQ ID NO: 2508031 - RNA, 19 nt, Homo sapiens
  misc_RNA (1)...(19): siRNA sense strand
agugaagcaugucgggaga

SEQ ID NO: 2508032 - RNA, 19 nt, Homo sapiens
  misc_RNA (1)...(19): siRNA sense strand
agaagaggguuaaagaacu

SEQ ID NO: 2508033 - RNA, 19 nt, Homo sapiens
  misc_RNA (1)...(19): siRNA sense strand
ugacugaaaugcaacaaaa

SEQ ID NO: 2508034 - RNA, 19 nt, Homo sapiens
  misc_RNA (1)...(19): siRNA sense strand
aaaagaggcccaagaacaa

SEQ ID NO: 2508035 - RNA, 19 nt, Homo sapiens
  misc_RNA (1)...(19): siRNA sense strand
gcuuacaaccuguucaaga

SEQ ID NO: 2508036 - RNA, 19 nt, Homo sapiens
  misc_RNA (1)...(19): siRNA sense strand
ucaaagagagugagaaggu

SEQ ID NO: 2508037 - RNA, 19 nt, Homo sapiens
  misc_RNA (1)...(19): siRNA sense strand
auaucuuccuugagacaau

SEQ ID NO: 2508038 - RNA, 19 nt, Homo sapiens
  misc_RNA (1)...(19): siRNA sense strand
gccagaauuucaaagucaa

SEQ ID NO: 2508039 - RNA, 19 nt, Homo sapiens
  misc_RNA (1)...(19): siRNA sense strand
aucaauaagcuaaaggaga

SEQ ID NO: 2508040 - RNA, 19 nt, Homo sapiens
  misc_RNA (1)...(19): siRNA sense strand
gguguggagaggccagaaa

SEQ ID NO: 2508041 - RNA, 19 nt, Homo sapiens
  misc_RNA (1)...(19): siRNA sense strand
ccuuaagcaagaaagaaga

SEQ ID NO: 2508042 - RNA, 19 nt, Homo sapiens
  misc_RNA (1)...(19): siRNA sense strand
aggaaaaccuggaagaaag

SEQ ID NO: 2508043 - RNA, 19 nt, Homo sapiens
  misc_RNA (1)...(19): siRNA sense strand
acagaaaagucacuggcua

SEQ ID NO: 2508044 - RNA, 19 nt, Homo sapiens
  misc_RNA (1)...(19): siRNA sense strand
aaaugaagucuugcagaaa

SEQ ID NO: 2508045 - RNA, 19 nt, Homo sapiens
  misc_RNA (1)...(19): siRNA sense strand
gcagaauuuggaagagguu

SEQ ID NO: 2508046 - RNA, 19 nt, Homo sapiens
  misc_RNA (1)...(19): siRNA sense strand
ggacaaaaccuuaagcaag

SEQ ID NO: 2508047 - RNA, 19 nt, Homo sapiens
  misc_RNA (1)...(19): siRNA sense strand
aagaaagacagaaacugaa

SEQ ID NO: 2508048 - RNA, 19 nt, Homo sapiens
  misc_RNA (1)...(19): siRNA sense strand
cuccaagcuucuuauguaa

SEQ ID NO: 2508049 - RNA, 19 nt, Homo sapiens
  misc_RNA (1)...(19): siRNA sense strand
cuucaggaauccaggaaug

SEQ ID NO: 2508050 - RNA, 19 nt, Homo sapiens
  misc_RNA (1)...(19): siRNA sense strand
guauuuagagauggacaaa

SEQ ID NO: 2508051 - RNA, 19 nt, Homo sapiens
  misc_RNA (1)...(19): siRNA sense strand
cuuaagcaagaaagaagaa

SEQ ID NO: 2508052 - RNA, 19 nt, Homo sapiens
  misc_RNA (1)...(19): siRNA sense strand
uaagcaagaaagaagaaga

SEQ ID NO: 2508053 - RNA, 19 nt, Homo sapiens
  misc_RNA (1)...(19): siRNA sense strand
agaaagaagaagagguaga

SEQ ID NO: 2508054 - RNA, 19 nt, Homo sapiens
  misc_RNA (1)...(19): siRNA sense strand
aagaagagguagagagacu

SEQ ID NO: 2508055 - RNA, 19 nt, Homo sapiens
  misc_RNA (1)...(19): siRNA sense strand
auuagaaagcccagagaaa

SEQ ID NO: 2508056 - RNA, 19 nt, Homo sapiens
  misc_RNA (1)...(19): siRNA sense strand
gagccaaacuggauaagua

SEQ ID NO: 2508057 - RNA, 19 nt, Homo sapiens
  misc_RNA (1)...(19): siRNA sense strand
ggucauagacugugauuca

SEQ ID NO: 2508058 - RNA, 19 nt, Homo sapiens
  misc_RNA (1)...(19): siRNA sense strand
cagaugaagccaagaguau

SEQ ID NO: 2508059 - RNA, 19 nt, Homo sapiens
  misc_RNA (1)...(19): siRNA sense strand
agaagaagagguagagaga

SEQ ID NO: 2508060 - RNA, 19 nt, Homo sapiens
  misc_RNA (1)...(19): siRNA sense strand
agugagaagguuagugaua

SEQ ID NO: 2508061 - RNA, 19 nt, Homo sapiens
  misc_RNA (1)...(19): siRNA sense strand
ccuggaagaaagacagaaa

SEQ ID NO: 2508062 - RNA, 19 nt, Homo sapiens
  misc_RNA (1)...(19): siRNA sense strand
ugaccaaaggcuugcaaua

SEQ ID NO: 2508063 - RNA, 19 nt, Homo sapiens
  misc_RNA (1)...(19): siRNA sense strand
cacauuuggaagagagaaa

SEQ ID NO: 2508064 - RNA, 19 nt, Homo sapiens
  misc_RNA (1)...(19): siRNA sense strand
cagaaaagucacuggcuaa

SEQ ID NO: 2508065 - RNA, 19 nt, Homo sapiens
  misc_RNA (1)...(19): siRNA sense strand
gauaaguaccacagucuaa

SEQ ID NO: 2508066 - RNA, 19 nt, Homo sapiens
  misc_RNA (1)...(19): siRNA sense strand
uauuuagagaagaggguua

SEQ ID NO: 2508067 - RNA, 19 nt, Homo sapiens
  misc_RNA (1)...(19): siRNA sense strand
ugcaaggagugaagagcaa

SEQ ID NO: 2508068 - RNA, 19 nt, Homo sapiens
  misc_RNA (1)...(19): siRNA sense strand
cagaaaaccaagaucaaaa

SEQ ID NO: 2508069 - RNA, 19 nt, Homo sapiens
  misc_RNA (1)...(19): siRNA sense strand
ccaggaaugacaaggaaau

SEQ ID NO: 2508070 - RNA, 19 nt, Homo sapiens
  misc_RNA (1)...(19): siRNA sense strand
gaaagcaggaagugcgaau

SEQ ID NO: 2508071 - RNA, 19 nt, Homo sapiens
  misc_RNA (1)...(19): siRNA sense strand
caauauaaagcaagacuca

SEQ ID NO: 2508072 - RNA, 19 nt, Homo sapiens
  misc_RNA (1)...(19): siRNA sense strand
uggaagagguuuuagcuaa

SEQ ID NO: 2508073 - RNA, 19 nt, Homo sapiens
  misc_RNA (1)...(19): siRNA sense strand
caagaguaucagagaugua

SEQ ID NO: 2508074 - RNA, 19 nt, Homo sapiens
  misc_RNA (1)...(19): siRNA sense strand
agaaagacagaaacugaaa

SEQ ID NO: 2508075 - RNA, 19 nt, Homo sapiens
  misc_RNA (1)...(19): siRNA sense strand
gguuacaucauaugaagaa

SEQ ID NO: 2508076 - RNA, 19 nt, Homo sapiens
  misc_RNA (1)...(19): siRNA sense strand
ucagauauuaccaaggaua

SEQ ID NO: 2508077 - RNA, 19 nt, Homo sapiens
  misc_RNA (1)...(19): siRNA sense strand
aggaaauguuacagcuuca

SEQ ID NO: 2508078 - RNA, 19 nt, Homo sapiens
  misc_RNA (1)...(19): siRNA sense strand
augaagucuugcagaaauu

SEQ ID NO: 2508079 - RNA, 19 nt, Homo sapiens
  misc_RNA (1)...(19): siRNA sense strand
ccagaaacuugaaaaggaa

SEQ ID NO: 2508080 - RNA, 19 nt, Homo sapiens
  misc_RNA (1)...(19): siRNA sense strand
gguuaaagaacuacagaug

SEQ ID NO: 2508081 - RNA, 19 nt, Homo sapiens
  misc_RNA (1)...(19): siRNA sense strand
uuuaagaagaucaaggcua

SEQ ID NO: 2508082 - RNA, 19 nt, Homo sapiens
  misc_RNA (1)...(19): siRNA sense strand
ugucuuuacaggaggaauu

SEQ ID NO: 2508083 - RNA, 19 nt, Homo sapiens
  misc_RNA (1)...(19): siRNA sense strand
caaaauaauccuagagaag

SEQ ID NO: 2508084 - RNA, 19 nt, Homo sapiens
  misc_RNA (1)...(19): siRNA sense strand
aggaggaauuccagaaacu

SEQ ID NO: 2508085 - RNA, 19 nt, Homo sapiens
  misc_RNA (1)...(19): siRNA sense strand
gugauauaaugcugcaaaa

SEQ ID NO: 2508086 - RNA, 19 nt, Homo sapiens
  misc_RNA (1)...(19): siRNA sense strand
aguauuuagagauggacaa

SEQ ID NO: 2508087 - RNA, 19 nt, Homo sapiens
  misc_RNA (1)...(19): siRNA sense strand
cagcaaaucaacgaaguaa

SEQ ID NO: 2508088 - RNA, 19 nt, Homo sapiens
  misc_RNA (1)...(19): siRNA sense strand
cagcucaguuaaaggauca

SEQ ID NO: 2508089 - RNA, 19 nt, Homo sapiens
  misc_RNA (1)...(19): siRNA sense strand
gcuaaaggagaauguugaa

SEQ ID NO: 2508090 - RNA, 19 nt, Homo sapiens
  misc_RNA (1)...(19): siRNA sense strand
aggaaagguacaugacuga

SEQ ID NO: 2508091 - RNA, 19 nt, Homo sapiens
  misc_RNA (1)...(19): siRNA sense strand
ggaagagagaaauaaacau

SEQ ID NO: 2508092 - RNA, 19 nt, Homo sapiens
  misc_RNA (1)...(19): siRNA sense strand
agagaagaggguuaaagaa

SEQ ID NO: 2508093 - RNA, 19 nt, Homo sapiens
  misc_RNA (1)...(19): siRNA sense strand
gcaagaaagaagaagaggu

SEQ ID NO: 2508094 - RNA, 19 nt, Homo sapiens
  misc_RNA (1)...(19): siRNA sense strand
aggaucaauuagaggaagu

SEQ ID NO: 2508095 - RNA, 19 nt, Homo sapiens
  misc_RNA (1)...(19): siRNA sense strand
gaugaagccaagaguauca

SEQ ID NO: 2508096 - RNA, 19 nt, Homo sapiens
  misc_RNA (1)...(19): siRNA sense strand
agccagaauuucaaaguca

SEQ ID NO: 2508097 - RNA, 19 nt, Homo sapiens
  misc_RNA (1)...(19): siRNA sense strand
aggcuaauuauguguguuu

SEQ ID NO: 2508098 - RNA, 19 nt, Homo sapiens
  misc_RNA (1)...(19): siRNA sense strand
uggaagaaagacagaaacu

SEQ ID NO: 2508099 - RNA, 19 nt, Homo sapiens
  misc_RNA (1)...(19): siRNA sense strand
agcaaaucaacgaaguaaa

SEQ ID NO: 2508100 - RNA, 19 nt, Homo sapiens
  misc_RNA (1)...(19): siRNA sense strand
uggaagagagaaauaaaca

SEQ ID NO: 2508101 - RNA, 19 nt, Homo sapiens
  misc_RNA (1)...(19): siRNA sense strand
agugaagcaugucgggaga

SEQ ID NO: 2508102 - RNA, 19 nt, Homo sapiens
  misc_RNA (1)...(19): siRNA sense strand
agaagaggguuaaagaacu

SEQ ID NO: 2508103 - RNA, 19 nt, Homo sapiens
  misc_RNA (1)...(19): siRNA sense strand
ugacugaaaugcaacaaaa

SEQ ID NO: 2508104 - RNA, 19 nt, Homo sapiens
  misc_RNA (1)...(19): siRNA sense strand
aaaagaggcccaagaacaa

SEQ ID NO: 2508105 - RNA, 19 nt, Homo sapiens
  misc_RNA (1)...(19): siRNA sense strand
gcuuacaaccuguucaaga

SEQ ID NO: 2508106 - RNA, 19 nt, Homo sapiens
  misc_RNA (1)...(19): siRNA sense strand
ucaaagagagugagaaggu

SEQ ID NO: 2508107 - RNA, 19 nt, Homo sapiens
  misc_RNA (1)...(19): siRNA sense strand
aucaauaagcuaaaggaga

SEQ ID NO: 2508108 - RNA, 19 nt, Homo sapiens
  misc_RNA (1)...(19): siRNA sense strand
gccagaauuucaaagucaa

SEQ ID NO: 2508109 - RNA, 19 nt, Homo sapiens
  misc_RNA (1)...(19): siRNA sense strand
gguguggagaggccagaaa

SEQ ID NO: 2508110 - RNA, 19 nt, Homo sapiens
  misc_RNA (1)...(19): siRNA sense strand
ccuuaagcaagaaagaaga

SEQ ID NO: 2508111 - RNA, 19 nt, Homo sapiens
  misc_RNA (1)...(19): siRNA sense strand
aggaaaaccuggaagaaag

SEQ ID NO: 2508112 - RNA, 19 nt, Homo sapiens
  misc_RNA (1)...(19): siRNA sense strand
acagaaaagucacuggcua

SEQ ID NO: 2508113 - RNA, 19 nt, Homo sapiens
  misc_RNA (1)...(19): siRNA sense strand
aaaugaagucuugcagaaa

SEQ ID NO: 2508114 - RNA, 19 nt, Homo sapiens
  misc_RNA (1)...(19): siRNA sense strand
gcagaauuuggaagagguu

SEQ ID NO: 2508115 - RNA, 19 nt, Homo sapiens
  misc_RNA (1)...(19): siRNA sense strand
ggacaaaaccuuaagcaag

SEQ ID NO: 2508116 - RNA, 19 nt, Homo sapiens
  misc_RNA (1)...(19): siRNA sense strand
aagaaagacagaaacugaa

SEQ ID NO: 2508117 - RNA, 19 nt, Homo sapiens
  misc_RNA (1)...(19): siRNA sense strand
cuccaagcuucuuauguaa

SEQ ID NO: 2508118 - RNA, 19 nt, Homo sapiens
  misc_RNA (1)...(19): siRNA sense strand
uugaagaagucgagcuccu

SEQ ID NO: 2508119 - RNA, 19 nt, Homo sapiens
  misc_RNA (1)...(19): siRNA sense strand
aguacaagguggagcgcaa

SEQ ID NO: 2508120 - RNA, 19 nt, Homo sapiens
  misc_RNA (1)...(19): siRNA sense strand
gggaagaggcaguggcuga

SEQ ID NO: 2508121 - RNA, 19 nt, Homo sapiens
  misc_RNA (1)...(19): siRNA sense strand
agaaggaacucaccggcua

SEQ ID NO: 2508122 - RNA, 19 nt, Homo sapiens
  misc_RNA (1)...(19): siRNA sense strand
acaagaacaugcagcgcga

SEQ ID NO: 2508123 - RNA, 19 nt, Homo sapiens
  misc_RNA (1)...(19): siRNA sense strand
cgaagaaggugacugagga

SEQ ID NO: 2508124 - RNA, 19 nt, Homo sapiens
  misc_RNA (1)...(19): siRNA sense strand
cuuacaacauccuggcaga

SEQ ID NO: 2508125 - RNA, 19 nt, Homo sapiens
  misc_RNA (1)...(19): siRNA sense strand
aggcaguggcugaggacgu

SEQ ID NO: 2508126 - RNA, 19 nt, Homo sapiens
  misc_RNA (1)...(19): siRNA sense strand
ggacugagacugaugugga

SEQ ID NO: 2508127 - RNA, 19 nt, Homo sapiens
  misc_RNA (1)...(19): siRNA sense strand
gcuacaacgccgaugucau

SEQ ID NO: 2508128 - RNA, 19 nt, Homo sapiens
  misc_RNA (1)...(19): siRNA sense strand
acauugagguggacggcaa

SEQ ID NO: 2508129 - RNA, 19 nt, Homo sapiens
  misc_RNA (1)...(19): siRNA sense strand
gaaagaagcuggugaucgu

SEQ ID NO: 2508130 - RNA, 19 nt, Homo sapiens
  misc_RNA (1)...(19): siRNA sense strand
ccaucauccugguggggaa

SEQ ID NO: 2508131 - RNA, 19 nt, Homo sapiens
  misc_RNA (1)...(19): siRNA sense strand
ggaucagugccuuuggcua

SEQ ID NO: 2508132 - RNA, 19 nt, Homo sapiens
  misc_RNA (1)...(19): siRNA sense strand
ggauggugccugugggaag

SEQ ID NO: 2508133 - RNA, 19 nt, Homo sapiens
  misc_RNA (1)...(19): siRNA sense strand
uggccaagaugaagcagga

SEQ ID NO: 2508134 - RNA, 19 nt, Homo sapiens
  misc_RNA (1)...(19): siRNA sense strand
acacagcagggcaggaaga

SEQ ID NO: 2508135 - RNA, 19 nt, Homo sapiens
  misc_RNA (1)...(19): siRNA sense strand
aggcaaauuucuugggcaa

SEQ ID NO: 2508136 - RNA, 19 nt, Homo sapiens
  misc_RNA (1)...(19): siRNA sense strand
cagccagaacacugagaaa

SEQ ID NO: 2508137 - RNA, 19 nt, Homo sapiens
  misc_RNA (1)...(19): siRNA sense strand
agacauaauccaaggccuu

SEQ ID NO: 2508138 - RNA, 19 nt, Homo sapiens
  misc_RNA (1)...(19): siRNA sense strand
cggccaugguucuggugaa

SEQ ID NO: 2508139 - RNA, 19 nt, Homo sapiens
  misc_RNA (1)...(19): siRNA sense strand
ccugaauauacaagaaaga

SEQ ID NO: 2508140 - RNA, 19 nt, Homo sapiens
  misc_RNA (1)...(19): siRNA sense strand
gaacaggccuugucagcca

SEQ ID NO: 2508141 - RNA, 19 nt, Homo sapiens
  misc_RNA (1)...(19): siRNA sense strand
uuuaaagccaagugggaga

SEQ ID NO: 2508142 - RNA, 19 nt, Homo sapiens
  misc_RNA (1)...(19): siRNA sense strand
cuggaauugcaaagagaga

SEQ ID NO: 2508143 - RNA, 19 nt, Homo sapiens
  misc_RNA (1)...(19): siRNA sense strand
ggaauugcaaagagagacu

SEQ ID NO: 2508144 - RNA, 19 nt, Homo sapiens
  misc_RNA (1)...(19): siRNA sense strand
ggguggauacagagcugaa

SEQ ID NO: 2508145 - RNA, 19 nt, Homo sapiens
  misc_RNA (1)...(19): siRNA sense strand
cagaaagagcaguucgcuu

SEQ ID NO: 2508146 - RNA, 19 nt, Homo sapiens
  misc_RNA (1)...(19): siRNA sense strand
agauggauuacaagggaga

SEQ ID NO: 2508147 - RNA, 19 nt, Homo sapiens
  misc_RNA (1)...(19): siRNA sense strand
agaugaggcaacuggaaca

SEQ ID NO: 2508148 - RNA, 19 nt, Homo sapiens
  misc_RNA (1)...(19): siRNA sense strand
caucuuaccuuuauggagu

SEQ ID NO: 2508149 - RNA, 19 nt, Homo sapiens
  misc_RNA (1)...(19): siRNA sense strand
aaagaagacccaagggaag

SEQ ID NO: 2508150 - RNA, 19 nt, Homo sapiens
  misc_RNA (1)...(19): siRNA sense strand
cagggcaggagaagaggaa

SEQ ID NO: 2508151 - RNA, 19 nt, Homo sapiens
  misc_RNA (1)...(19): siRNA sense strand
aaaagaagacccaagggaa

SEQ ID NO: 2508152 - RNA, 19 nt, Homo sapiens
  misc_RNA (1)...(19): siRNA sense strand
gggcaggagaagaggaacc

SEQ ID NO: 2508153 - RNA, 19 nt, Homo sapiens
  misc_RNA (1)...(19): siRNA sense strand
agggagaugccguggccuu

SEQ ID NO: 2508154 - RNA, 19 nt, Homo sapiens
  misc_RNA (1)...(19): siRNA sense strand
uggaaauacuggagaccau

SEQ ID NO: 2508155 - RNA, 19 nt, Homo sapiens
  misc_RNA (1)...(19): siRNA sense strand
aaacaaaaggagacagaaa

SEQ ID NO: 2508156 - RNA, 19 nt, Homo sapiens
  misc_RNA (1)...(19): siRNA sense strand
cuguauacuccuugaucaa

SEQ ID NO: 2508157 - RNA, 19 nt, Homo sapiens
  misc_RNA (1)...(19): siRNA sense strand
ccuauaagcacgagccuga

SEQ ID NO: 2508158 - RNA, 19 nt, Homo sapiens
  misc_RNA (1)...(19): siRNA sense strand
agaccaucguggacagaau

SEQ ID NO: 2508159 - RNA, 19 nt, Homo sapiens
  misc_RNA (1)...(19): siRNA sense strand
caagaaacauuuaagccuu

SEQ ID NO: 2508160 - RNA, 19 nt, Homo sapiens
  misc_RNA (1)...(19): siRNA sense strand
ccuggaugagcuuggaaua

SEQ ID NO: 2508161 - RNA, 19 nt, Homo sapiens
  misc_RNA (1)...(19): siRNA sense strand
gccugaacgguuagagaau

SEQ ID NO: 2508162 - RNA, 19 nt, Homo sapiens
  misc_RNA (1)...(19): siRNA sense strand
acggagaccuggaggguuc

SEQ ID NO: 2508163 - RNA, 19 nt, Homo sapiens
  misc_RNA (1)...(19): siRNA sense strand
aggacgaagcaguagaaga

SEQ ID NO: 2508164 - RNA, 19 nt, Homo sapiens
  misc_RNA (1)...(19): siRNA sense strand
ggacagaauaguaagagcu

SEQ ID NO: 2508165 - RNA, 19 nt, Homo sapiens
  misc_RNA (1)...(19): siRNA sense strand
ccaaacaaaaggagacaga

SEQ ID NO: 2508166 - RNA, 19 nt, Homo sapiens
  misc_RNA (1)...(19): siRNA sense strand
uaguaagagcugaggucca

SEQ ID NO: 2508167 - RNA, 19 nt, Homo sapiens
  misc_RNA (1)...(19): siRNA sense strand
ugaacauauuuguggaaag

SEQ ID NO: 2508168 - RNA, 19 nt, Homo sapiens
  misc_RNA (1)...(19): siRNA sense strand
gagcugagguccaucgguu

SEQ ID NO: 2508169 - RNA, 19 nt, Homo sapiens
  misc_RNA (1)...(19): siRNA sense strand
agauaguauuguggguauu

SEQ ID NO: 2508170 - RNA, 19 nt, Homo sapiens
  misc_RNA (1)...(19): siRNA sense strand
ggaauaggaacguaccaca

SEQ ID NO: 2508171 - RNA, 19 nt, Homo sapiens
  misc_RNA (1)...(19): siRNA sense strand
gcagauaguauugugggua

SEQ ID NO: 2508172 - RNA, 19 nt, Homo sapiens
  misc_RNA (1)...(19): siRNA sense strand
agcuggaguucgaggacga

SEQ ID NO: 2508173 - RNA, 19 nt, Homo sapiens
  misc_RNA (1)...(19): siRNA sense strand
cgcaugagcuucaguggga

SEQ ID NO: 2508174 - RNA, 19 nt, Homo sapiens
  misc_RNA (1)...(19): siRNA sense strand
auuuguggaaagacgaaua

SEQ ID NO: 2508175 - RNA, 19 nt, Homo sapiens
  misc_RNA (1)...(19): siRNA sense strand
guaaacagaaagagcggaa

SEQ ID NO: 2508176 - RNA, 19 nt, Homo sapiens
  misc_RNA (1)...(19): siRNA sense strand
guuggaagaaggauggaaa

SEQ ID NO: 2508177 - RNA, 19 nt, Homo sapiens
  misc_RNA (1)...(19): siRNA sense strand
agaugaaauacgaguguuu

SEQ ID NO: 2508178 - RNA, 19 nt, Homo sapiens
  misc_RNA (1)...(19): siRNA sense strand
caucagaaggguugguuau

SEQ ID NO: 2508179 - RNA, 19 nt, Homo sapiens
  misc_RNA (1)...(19): siRNA sense strand
agucagaaucaaaggcuau

SEQ ID NO: 2508180 - RNA, 19 nt, Homo sapiens
  misc_RNA (1)...(19): siRNA sense strand
uggagauggaagagcuaua

SEQ ID NO: 2508181 - RNA, 19 nt, Homo sapiens
  misc_RNA (1)...(19): siRNA sense strand
acgaaugguuccagugaca

SEQ ID NO: 2508182 - RNA, 19 nt, Homo sapiens
  misc_RNA (1)...(19): siRNA sense strand
guggaagggaguuggaaga

SEQ ID NO: 2508183 - RNA, 19 nt, Homo sapiens
  misc_RNA (1)...(19): siRNA sense strand
cggaaaacacgauggauau

SEQ ID NO: 2508184 - RNA, 19 nt, Homo sapiens
  misc_RNA (1)...(19): siRNA sense strand
gagaagaaaguuuuggaaa

SEQ ID NO: 2508185 - RNA, 19 nt, Homo sapiens
  misc_RNA (1)...(19): siRNA sense strand
ucggaaaacacgauggaua

SEQ ID NO: 2508186 - RNA, 19 nt, Homo sapiens
  misc_RNA (1)...(19): siRNA sense strand
agcaauaagguuagaugaa

SEQ ID NO: 2508187 - RNA, 19 nt, Homo sapiens
  misc_RNA (1)...(19): siRNA sense strand
uggaagagcuauauggucu

SEQ ID NO: 2508188 - RNA, 19 nt, Homo sapiens
  misc_RNA (1)...(19): siRNA sense strand
cccuaaacaccauggcuaa

SEQ ID NO: 2508189 - RNA, 19 nt, Homo sapiens
  misc_RNA (1)...(19): siRNA sense strand
ggaaguacuaccuagggaa

SEQ ID NO: 2508190 - RNA, 19 nt, Homo sapiens
  misc_RNA (1)...(19): siRNA sense strand
gaagagaaaucuaaaccca

SEQ ID NO: 2508191 - RNA, 19 nt, Homo sapiens
  misc_RNA (1)...(19): siRNA sense strand
aagcaugagaugagaggca

SEQ ID NO: 2508192 - RNA, 19 nt, Homo sapiens
  misc_RNA (1)...(19): siRNA sense strand
ggaagagcuauauggucua

SEQ ID NO: 2508193 - RNA, 19 nt, Homo sapiens
  misc_RNA (1)...(19): siRNA sense strand
accacacgcuauaggaaua

SEQ ID NO: 2508194 - RNA, 19 nt, Homo sapiens
  misc_RNA (1)...(19): siRNA sense strand
aagaaaggcaagagaguug

SEQ ID NO: 2508195 - RNA, 19 nt, Homo sapiens
  misc_RNA (1)...(19): siRNA sense strand
gaauaguaacaguugccaa

SEQ ID NO: 2508196 - RNA, 19 nt, Homo sapiens
  misc_RNA (1)...(19): siRNA sense strand
acaaacagaucauacgaga

SEQ ID NO: 2508197 - RNA, 19 nt, Homo sapiens
  misc_RNA (1)...(19): siRNA sense strand
agaaaguuuuggaaagcaa

SEQ ID NO: 2508198 - RNA, 19 nt, Homo sapiens
  misc_RNA (1)...(19): siRNA sense strand
uaaagaaaggcaagagagu

SEQ ID NO: 2508199 - RNA, 19 nt, Homo sapiens
  misc_RNA (1)...(19): siRNA sense strand
ccagaggggaugagaaaga

SEQ ID NO: 2508200 - RNA, 19 nt, Homo sapiens
  misc_RNA (1)...(19): siRNA sense strand
caaacagaucauacgagaa

SEQ ID NO: 2508201 - RNA, 19 nt, Homo sapiens
  misc_RNA (1)...(19): siRNA sense strand
ccgaaaggaggcugcucaa

SEQ ID NO: 2508202 - RNA, 19 nt, Homo sapiens
  misc_RNA (1)...(19): siRNA sense strand
ucaaacuggcugaagagaa

SEQ ID NO: 2508203 - RNA, 19 nt, Homo sapiens
  misc_RNA (1)...(19): siRNA sense strand
gcuuagaaacauugaaccu

SEQ ID NO: 2508204 - RNA, 19 nt, Homo sapiens
  misc_RNA (1)...(19): siRNA sense strand
gcaugagaugagaggcaca

SEQ ID NO: 2508205 - RNA, 19 nt, Homo sapiens
  misc_RNA (1)...(19): siRNA sense strand
acuuuauaccacugggauu

SEQ ID NO: 2508206 - RNA, 19 nt, Homo sapiens
  misc_RNA (1)...(19): siRNA sense strand
aagucagaaucaaaggcua

SEQ ID NO: 2508207 - RNA, 19 nt, Homo sapiens
  misc_RNA (1)...(19): siRNA sense strand
agaagaaaguuuuggaaag

SEQ ID NO: 2508208 - RNA, 19 nt, Homo sapiens
  misc_RNA (1)...(19): siRNA sense strand
uggagagaagggaaauuua

SEQ ID NO: 2508209 - RNA, 19 nt, Homo sapiens
  misc_RNA (1)...(19): siRNA sense strand
agagaaaucuaaacccaga

SEQ ID NO: 2508210 - RNA, 19 nt, Homo sapiens
  misc_RNA (1)...(19): siRNA sense strand
cuuacaacacauaccauua

SEQ ID NO: 2508211 - RNA, 19 nt, Homo sapiens
  misc_RNA (1)...(19): siRNA sense strand
gaugagaggcacagcugau

SEQ ID NO: 2508212 - RNA, 19 nt, Homo sapiens
  misc_RNA (1)...(19): siRNA sense strand
ggguauugggacuggagca

SEQ ID NO: 2508213 - RNA, 19 nt, Homo sapiens
  misc_RNA (1)...(19): siRNA sense strand
ccagggaaugaauggauuu

SEQ ID NO: 2508214 - RNA, 19 nt, Homo sapiens
  misc_RNA (1)...(19): siRNA sense strand
ccuaaacaccauggcuaaa

SEQ ID NO: 2508215 - RNA, 19 nt, Homo sapiens
  misc_RNA (1)...(19): siRNA sense strand
ggcuaaaaugggacaaaau

SEQ ID NO: 2508216 - RNA, 19 nt, Homo sapiens
  misc_RNA (1)...(19): siRNA sense strand
gcugagaauggcugguuca

SEQ ID NO: 2508217 - RNA, 19 nt, Homo sapiens
  misc_RNA (1)...(19): siRNA sense strand
cggaggaacuacggcgaca

SEQ ID NO: 2508218 - RNA, 19 nt, Homo sapiens
  misc_RNA (1)...(19): siRNA sense strand
ggacuggagcauugcaagu

SEQ ID NO: 2508219 - RNA, 19 nt, Homo sapiens
  misc_RNA (1)...(19): siRNA sense strand
acuuaucagcccuggauuu

SEQ ID NO: 2508220 - RNA, 19 nt, Homo sapiens
  misc_RNA (1)...(19): siRNA sense strand
acgcaaaaggucugcagua

SEQ ID NO: 2508221 - RNA, 19 nt, Homo sapiens
  misc_RNA (1)...(19): siRNA sense strand
acaucagaaggguugguua

SEQ ID NO: 2508222 - RNA, 19 nt, Homo sapiens
  misc_RNA (1)...(19): siRNA sense strand
gggaugagaaagaaguugu

SEQ ID NO: 2508223 - RNA, 19 nt, Homo sapiens
  misc_RNA (1)...(19): siRNA sense strand
aguucuagaugcagucaga

SEQ ID NO: 2508224 - RNA, 19 nt, Homo sapiens
  misc_RNA (1)...(19): siRNA sense strand
cauugaaccuauaguuacu

SEQ ID NO: 2508225 - RNA, 19 nt, Homo sapiens
  misc_RNA (1)...(19): siRNA sense strand
cagucagacccaagaaaau

SEQ ID NO: 2508226 - RNA, 19 nt, Homo sapiens
  misc_RNA (1)...(19): siRNA sense strand
auuaaagaaaggcaagaga

SEQ ID NO: 2508227 - RNA, 19 nt, Homo sapiens
  misc_RNA (1)...(19): siRNA sense strand
aaacagaaagagcggaaac

SEQ ID NO: 2508228 - RNA, 19 nt, Homo sapiens
  misc_RNA (1)...(19): siRNA sense strand
uugagauguuggcaagaau

SEQ ID NO: 2508229 - RNA, 19 nt, Homo sapiens
  misc_RNA (1)...(19): siRNA sense strand
ucaccaucaacgagccuaa

SEQ ID NO: 2508230 - RNA, 19 nt, Homo sapiens
  misc_RNA (1)...(19): siRNA sense strand
caguaaaaguggugggcau

SEQ ID NO: 2508231 - RNA, 19 nt, Homo sapiens
  misc_RNA (1)...(19): siRNA sense strand
gaggaagaggacacaguaa

SEQ ID NO: 2508232 - RNA, 19 nt, Homo sapiens
  misc_RNA (1)...(19): siRNA sense strand
aggaagaggacacaguaaa

SEQ ID NO: 2508233 - RNA, 19 nt, Homo sapiens
  misc_RNA (1)...(19): siRNA sense strand
ggaagaggacacaguaaaa

SEQ ID NO: 2508234 - RNA, 19 nt, Homo sapiens
  misc_RNA (1)...(19): siRNA sense strand
ugaagaugccuccaagaaa

SEQ ID NO: 2508235 - RNA, 19 nt, Homo sapiens
  misc_RNA (1)...(19): siRNA sense strand
gugaagaugccuccaagaa

SEQ ID NO: 2508236 - RNA, 19 nt, Homo sapiens
  misc_RNA (1)...(19): siRNA sense strand
gugcuaagacgcugccuga

SEQ ID NO: 2508237 - RNA, 19 nt, Homo sapiens
  misc_RNA (1)...(19): siRNA sense strand
ggaaauaugaacaggccuu

SEQ ID NO: 2508238 - RNA, 19 nt, Homo sapiens
  misc_RNA (1)...(19): siRNA sense strand
ccaagacguuucaggccua

SEQ ID NO: 2508239 - RNA, 19 nt, Homo sapiens
  misc_RNA (1)...(19): siRNA sense strand
agaaguacaaagaggggaa

SEQ ID NO: 2508240 - RNA, 19 nt, Homo sapiens
  misc_RNA (1)...(19): siRNA sense strand
ccacaugaucaaagacaac

SEQ ID NO: 2508241 - RNA, 19 nt, Homo sapiens
  misc_RNA (1)...(19): siRNA sense strand
ugguuugaguacacgguaa

SEQ ID NO: 2508242 - RNA, 19 nt, Homo sapiens
  misc_RNA (1)...(19): siRNA sense strand
cuuccuaauccgagacaca

SEQ ID NO: 2508243 - RNA, 19 nt, Homo sapiens
  misc_RNA (1)...(19): siRNA sense strand
gggucaacuggcugaucaa

SEQ ID NO: 2508244 - RNA, 19 nt, Homo sapiens
  misc_RNA (1)...(19): siRNA sense strand
ucgaauauccugcagguga

SEQ ID NO: 2508245 - RNA, 19 nt, Homo sapiens
  misc_RNA (1)...(19): siRNA sense strand
acacaagccucauucccaa

SEQ ID NO: 2508246 - RNA, 19 nt, Homo sapiens
  misc_RNA (1)...(19): siRNA sense strand
aggcagagaaacuggaaau

SEQ ID NO: 2508247 - RNA, 19 nt, Homo sapiens
  misc_RNA (1)...(19): siRNA sense strand
gcuuuaaggcagagaaacu

SEQ ID NO: 2508248 - RNA, 19 nt, Homo sapiens
  misc_RNA (1)...(19): siRNA sense strand
ccacaaaggaacaacacca

SEQ ID NO: 2508249 - RNA, 19 nt, Homo sapiens
  misc_RNA (1)...(19): siRNA sense strand
ucgcuuuaaggcagagaaa

SEQ ID NO: 2508250 - RNA, 19 nt, Homo sapiens
  misc_RNA (1)...(19): siRNA sense strand
ccgacaacauucagccaga

SEQ ID NO: 2508251 - RNA, 19 nt, Homo sapiens
  misc_RNA (1)...(19): siRNA sense strand
ugaaguaaauguuggugca

SEQ ID NO: 2508252 - RNA, 19 nt, Homo sapiens
  misc_RNA (1)...(19): siRNA sense strand
gaugaaauggaaaggcuca

SEQ ID NO: 2508253 - RNA, 19 nt, Homo sapiens
  misc_RNA (1)...(19): siRNA sense strand
gugaaagagaugaugccuu

SEQ ID NO: 2508254 - RNA, 19 nt, Homo sapiens
  misc_RNA (1)...(19): siRNA sense strand
gacugaaaauuaugggcua

SEQ ID NO: 2508255 - RNA, 19 nt, Homo sapiens
  misc_RNA (1)...(19): siRNA sense strand
aaguacaagcagacucaaa

SEQ ID NO: 2508256 - RNA, 19 nt, Homo sapiens
  misc_RNA (1)...(19): siRNA sense strand
uuauagaagcuucaggaga

SEQ ID NO: 2508257 - RNA, 19 nt, Homo sapiens
  misc_RNA (1)...(19): siRNA sense strand
ggcucaagugugaaagaga

SEQ ID NO: 2508258 - RNA, 19 nt, Homo sapiens
  misc_RNA (1)...(19): siRNA sense strand
cagaugaaauggaaaggcu

SEQ ID NO: 2508259 - RNA, 19 nt, Homo sapiens
  misc_RNA (1)...(19): siRNA sense strand
caacauucagccagaaaau

SEQ ID NO: 2508260 - RNA, 19 nt, Homo sapiens
  misc_RNA (1)...(19): siRNA sense strand
cauaauuaccggagccaag

SEQ ID NO: 2508261 - RNA, 19 nt, Homo sapiens
  misc_RNA (1)...(19): siRNA sense strand
aaauuaugggcuacaagaa

SEQ ID NO: 2508262 - RNA, 19 nt, Homo sapiens
  misc_RNA (1)...(19): siRNA sense strand
ugaaagagaugaugccuug

SEQ ID NO: 2508263 - RNA, 19 nt, Homo sapiens
  misc_RNA (1)...(19): siRNA sense strand
agaaagagagcaugggcau

SEQ ID NO: 2508264 - RNA, 19 nt, Homo sapiens
  misc_RNA (1)...(19): siRNA sense strand
acguaaaggaguauuggaa

SEQ ID NO: 2508265 - RNA, 19 nt, Homo sapiens
  misc_RNA (1)...(19): siRNA sense strand
cugcugaggcggagagguu

SEQ ID NO: 2508266 - RNA, 19 nt, Homo sapiens
  misc_RNA (1)...(19): siRNA sense strand
aggacagcgucaaggguga

SEQ ID NO: 2508267 - RNA, 19 nt, Homo sapiens
  misc_RNA (1)...(19): siRNA sense strand
gcuuuaaagaccagaccuu

SEQ ID NO: 2508268 - RNA, 19 nt, Homo sapiens
  misc_RNA (1)...(19): siRNA sense strand
acaagaugauggagugcca

SEQ ID NO: 2508269 - RNA, 19 nt, Homo sapiens
  misc_RNA (1)...(19): siRNA sense strand
aaguuagaaaugcgguaaa

SEQ ID NO: 2508270 - RNA, 19 nt, Homo sapiens
  misc_RNA (1)...(19): siRNA sense strand
guggagaaggacagcguca

SEQ ID NO: 2508271 - RNA, 19 nt, Homo sapiens
  misc_RNA (1)...(19): siRNA sense strand
gggacaagaugauggagug

SEQ ID NO: 2508272 - RNA, 19 nt, Homo sapiens
  misc_RNA (1)...(19): siRNA sense strand
ugaaguuagaaaugcggua

SEQ ID NO: 2508273 - RNA, 19 nt, Homo sapiens
  misc_RNA (1)...(19): siRNA sense strand
gacaauaagguucugggaa

SEQ ID NO: 2508274 - RNA, 19 nt, Homo sapiens
  misc_RNA (1)...(19): siRNA sense strand
gcauguguuucaucgggaa

SEQ ID NO: 2508275 - RNA, 19 nt, Homo sapiens
  misc_RNA (1)...(19): siRNA sense strand
cggagagguuaccagguga

SEQ ID NO: 2508276 - RNA, 19 nt, Homo sapiens
  misc_RNA (1)...(19): siRNA sense strand
acauagguggccugagaga

SEQ ID NO: 2508277 - RNA, 19 nt, Homo sapiens
  misc_RNA (1)...(19): siRNA sense strand
ggucacuaugcaagaacuu

SEQ ID NO: 2508278 - RNA, 19 nt, Homo sapiens
  misc_RNA (1)...(19): siRNA sense strand
ccaugaaggugcuggagaa

SEQ ID NO: 2508279 - RNA, 19 nt, Homo sapiens
  misc_RNA (1)...(19): siRNA sense strand
ggaggaagccagaaagcga

SEQ ID NO: 2508280 - RNA, 19 nt, Homo sapiens
  misc_RNA (1)...(19): siRNA sense strand
guguaagacgugcggagaa

SEQ ID NO: 2508281 - RNA, 19 nt, Homo sapiens
  misc_RNA (1)...(19): siRNA sense strand
aggacgaggagcugaacaa

SEQ ID NO: 2508282 - RNA, 19 nt, Homo sapiens
  misc_RNA (1)...(19): siRNA sense strand
ccccaaagcccaagaggaa

SEQ ID NO: 2508283 - RNA, 19 nt, Homo sapiens
  misc_RNA (1)...(19): siRNA sense strand
aggagaagagggugcagaa

SEQ ID NO: 2508284 - RNA, 19 nt, Homo sapiens
  misc_RNA (1)...(19): siRNA sense strand
agaacaggaaggaggccaa

SEQ ID NO: 2508285 - RNA, 19 nt, Homo sapiens
  misc_RNA (1)...(19): siRNA sense strand
agaaggagcgggaggacga

SEQ ID NO: 2508286 - RNA, 19 nt, Homo sapiens
  misc_RNA (1)...(19): siRNA sense strand
acguggacuucgaggcuau

SEQ ID NO: 2508287 - RNA, 19 nt, Homo sapiens
  misc_RNA (1)...(19): siRNA sense strand
ugaagaaggcaaaggccga

SEQ ID NO: 2508288 - RNA, 19 nt, Homo sapiens
  misc_RNA (1)...(19): siRNA sense strand
uguuggaggaagccagaaa

SEQ ID NO: 2508289 - RNA, 19 nt, Homo sapiens
  misc_RNA (1)...(19): siRNA sense strand
ggcuggucguggugaagaa

SEQ ID NO: 2508290 - RNA, 19 nt, Homo sapiens
  misc_RNA (1)...(19): siRNA sense strand
aggaggaggacgagcagga

SEQ ID NO: 2508291 - RNA, 19 nt, Homo sapiens
  misc_RNA (1)...(19): siRNA sense strand
gaggaagccagaaagcgaa

SEQ ID NO: 2508292 - RNA, 19 nt, Homo sapiens
  misc_RNA (1)...(19): siRNA sense strand
ucguggugaagaaggcaaa

SEQ ID NO: 2508293 - RNA, 19 nt, Homo sapiens
  misc_RNA (1)...(19): siRNA sense strand
uggacagugacgacagcaa

SEQ ID NO: 2508294 - RNA, 19 nt, Homo sapiens
  misc_RNA (1)...(19): siRNA sense strand
guguaaugaaugugggaaa

SEQ ID NO: 2508295 - RNA, 19 nt, Homo sapiens
  misc_RNA (1)...(19): siRNA sense strand
agagaauguauuugggaaa

SEQ ID NO: 2508296 - RNA, 19 nt, Homo sapiens
  misc_RNA (1)...(19): siRNA sense strand
auguaaggaaugugggaaa

SEQ ID NO: 2508297 - RNA, 19 nt, Homo sapiens
  misc_RNA (1)...(19): siRNA sense strand
auguaaugaaugugggaaa

SEQ ID NO: 2508298 - RNA, 19 nt, Homo sapiens
  misc_RNA (1)...(19): siRNA sense strand
auguaaugaaugugggaaa

SEQ ID NO: 2508299 - RNA, 19 nt, Homo sapiens
  misc_RNA (1)...(19): siRNA sense strand
gauuacagaaagagagaau

SEQ ID NO: 2508300 - RNA, 19 nt, Homo sapiens
  misc_RNA (1)...(19): siRNA sense strand
cagauaacucauagaggaa

SEQ ID NO: 2508301 - RNA, 19 nt, Homo sapiens
  misc_RNA (1)...(19): siRNA sense strand
cauggauaguggaggaauu

SEQ ID NO: 2508302 - RNA, 19 nt, Homo sapiens
  misc_RNA (1)...(19): siRNA sense strand
auguagugaaugugagaaa

SEQ ID NO: 2508303 - RNA, 19 nt, Homo sapiens
  misc_RNA (1)...(19): siRNA sense strand
gagagaauguauuugggaa

SEQ ID NO: 2508304 - RNA, 19 nt, Homo sapiens
  misc_RNA (1)...(19): siRNA sense strand
ccucauugcacaucagaua

SEQ ID NO: 2508305 - RNA, 19 nt, Homo sapiens
  misc_RNA (1)...(19): siRNA sense strand
auguaaucaaugugggaaa

SEQ ID NO: 2508306 - RNA, 19 nt, Homo sapiens
  misc_RNA (1)...(19): siRNA sense strand
augugaugcuggagaacua

SEQ ID NO: 2508307 - RNA, 19 nt, Homo sapiens
  misc_RNA (1)...(19): siRNA sense strand
uuguagugauuguaggaaa

SEQ ID NO: 2508308 - RNA, 19 nt, Homo sapiens
  misc_RNA (1)...(19): siRNA sense strand
uagagaagaacaaggaaau

SEQ ID NO: 2508309 - RNA, 19 nt, Homo sapiens
  misc_RNA (1)...(19): siRNA sense strand
aauucauacuggagagaga

SEQ ID NO: 2508310 - RNA, 19 nt, Homo sapiens
  misc_RNA (1)...(19): siRNA sense strand
augcaaggaauguggaaau

SEQ ID NO: 2508311 - RNA, 19 nt, Homo sapiens
  misc_RNA (1)...(19): siRNA sense strand
aauacacacaggagagaaa

SEQ ID NO: 2508312 - RNA, 19 nt, Homo sapiens
  misc_RNA (1)...(19): siRNA sense strand
uuagagaagaacaaggaaa

SEQ ID NO: 2508313 - RNA, 19 nt, Homo sapiens
  misc_RNA (1)...(19): siRNA sense strand
ccguauguuuguagugauu

SEQ ID NO: 2508314 - RNA, 19 nt, Homo sapiens
  misc_RNA (1)...(19): siRNA sense strand
uguaagagaaugaacacaa

SEQ ID NO: 2508315 - RNA, 19 nt, Homo sapiens
  misc_RNA (1)...(19): siRNA sense strand
aggagaagagccauggaua

SEQ ID NO: 2508316 - RNA, 19 nt, Homo sapiens
  misc_RNA (1)...(19): siRNA sense strand
agaaauccuaugaguguaa

SEQ ID NO: 2508317 - RNA, 19 nt, Homo sapiens
  misc_RNA (1)...(19): siRNA sense strand
cagaaaucccacaaggaau

SEQ ID NO: 2508318 - RNA, 19 nt, Homo sapiens
  misc_RNA (1)...(19): siRNA sense strand
gagaaaagucauuugggaa

SEQ ID NO: 2508319 - RNA, 19 nt, Homo sapiens
  misc_RNA (1)...(19): siRNA sense strand
agucaguguaagagaauga

SEQ ID NO: 2508320 - RNA, 19 nt, Homo sapiens
  misc_RNA (1)...(19): siRNA sense strand
augcaaugaaugugggaga

SEQ ID NO: 2508321 - RNA, 19 nt, Homo sapiens
  misc_RNA (1)...(19): siRNA sense strand
guggaaaugccuucagcaa

SEQ ID NO: 2508322 - RNA, 19 nt, Homo sapiens
  misc_RNA (1)...(19): siRNA sense strand
ggagcaaggagaagagcca

SEQ ID NO: 2508323 - RNA, 19 nt, Homo sapiens
  misc_RNA (1)...(19): siRNA sense strand
uguagugauuguaggaaaa

SEQ ID NO: 2508324 - RNA, 19 nt, Homo sapiens
  misc_RNA (1)...(19): siRNA sense strand
agaaugaacacaaaggaga

SEQ ID NO: 2508325 - RNA, 19 nt, Homo sapiens
  misc_RNA (1)...(19): siRNA sense strand
aauucacacaggagagaaa

SEQ ID NO: 2508326 - RNA, 19 nt, Homo sapiens
  misc_RNA (1)...(19): siRNA sense strand
acacaaaaggggagacaga

SEQ ID NO: 2508327 - RNA, 19 nt, Homo sapiens
  misc_RNA (1)...(19): siRNA sense strand
cccuaugaauguagugaau

SEQ ID NO: 2508328 - RNA, 19 nt, Homo sapiens
  misc_RNA (1)...(19): siRNA sense strand
cagagaacuauaugggaga

SEQ ID NO: 2508329 - RNA, 19 nt, Homo sapiens
  misc_RNA (1)...(19): siRNA sense strand
cagaaagagagaauguauu

SEQ ID NO: 2508330 - RNA, 19 nt, Homo sapiens
  misc_RNA (1)...(19): siRNA sense strand
cagaaagauuccugaugga

SEQ ID NO: 2508331 - RNA, 19 nt, Homo sapiens
  misc_RNA (1)...(19): siRNA sense strand
gccaaaugaauguaaggaa

SEQ ID NO: 2508332 - RNA, 19 nt, Homo sapiens
  misc_RNA (1)...(19): siRNA sense strand
gggagaaccuacugcagga

SEQ ID NO: 2508333 - RNA, 19 nt, Homo sapiens
  misc_RNA (1)...(19): siRNA sense strand
ucaaauuggagcaaggaga

SEQ ID NO: 2508334 - RNA, 19 nt, Homo sapiens
  misc_RNA (1)...(19): siRNA sense strand
aggaaauccaagauaaaca

SEQ ID NO: 2508335 - RNA, 19 nt, Homo sapiens
  misc_RNA (1)...(19): siRNA sense strand
acagaaagagagaauguau

SEQ ID NO: 2508336 - RNA, 19 nt, Homo sapiens
  misc_RNA (1)...(19): siRNA sense strand
agaaaagucauuugggaau

SEQ ID NO: 2508337 - RNA, 19 nt, Homo sapiens
  misc_RNA (1)...(19): siRNA sense strand
ccauagaagaauucacaca

SEQ ID NO: 2508338 - RNA, 19 nt, Homo sapiens
  misc_RNA (1)...(19): siRNA sense strand
acagaggagagaagccaaa

SEQ ID NO: 2508339 - RNA, 19 nt, Homo sapiens
  misc_RNA (1)...(19): siRNA sense strand
cccuaugaaugcagugaau

SEQ ID NO: 2508340 - RNA, 19 nt, Homo sapiens
  misc_RNA (1)...(19): siRNA sense strand
ccuuauuguacaccagaaa

SEQ ID NO: 2508341 - RNA, 19 nt, Homo sapiens
  misc_RNA (1)...(19): siRNA sense strand
gcaccagaacauucagauu

SEQ ID NO: 2508342 - RNA, 19 nt, Homo sapiens
  misc_RNA (1)...(19): siRNA sense strand
gggcaugccgucagcaaaa

SEQ ID NO: 2508343 - RNA, 19 nt, Homo sapiens
  misc_RNA (1)...(19): siRNA sense strand
aaucagaacuacccagaca

SEQ ID NO: 2508344 - RNA, 19 nt, Homo sapiens
  misc_RNA (1)...(19): siRNA sense strand
gagaauguauuugggaaaa

SEQ ID NO: 2508345 - RNA, 19 nt, Homo sapiens
  misc_RNA (1)...(19): siRNA sense strand
cuggagaacuacagcaacu

SEQ ID NO: 2508346 - RNA, 19 nt, Homo sapiens
  misc_RNA (1)...(19): siRNA sense strand
gaauguagugaaugugaga

SEQ ID NO: 2508347 - RNA, 19 nt, Homo sapiens
  misc_RNA (1)...(19): siRNA sense strand
cccuaugaguguaaugaau

SEQ ID NO: 2508348 - RNA, 19 nt, Homo sapiens
  misc_RNA (1)...(19): siRNA sense strand
ucagauaacucauagagga

SEQ ID NO: 2508349 - RNA, 19 nt, Homo sapiens
  misc_RNA (1)...(19): siRNA sense strand
guguaaugaaugugggaaa

SEQ ID NO: 2508350 - RNA, 19 nt, Homo sapiens
  misc_RNA (1)...(19): siRNA sense strand
agagaauguauuugggaaa

SEQ ID NO: 2508351 - RNA, 19 nt, Homo sapiens
  misc_RNA (1)...(19): siRNA sense strand
auguaaggaaugugggaaa

SEQ ID NO: 2508352 - RNA, 19 nt, Homo sapiens
  misc_RNA (1)...(19): siRNA sense strand
auguaaugaaugugggaaa

SEQ ID NO: 2508353 - RNA, 19 nt, Homo sapiens
  misc_RNA (1)...(19): siRNA sense strand
auguaaugaaugugggaaa

SEQ ID NO: 2508354 - RNA, 19 nt, Homo sapiens
  misc_RNA (1)...(19): siRNA sense strand
gauuacagaaagagagaau

SEQ ID NO: 2508355 - RNA, 19 nt, Homo sapiens
  misc_RNA (1)...(19): siRNA sense strand
cagauaacucauagaggaa

SEQ ID NO: 2508356 - RNA, 19 nt, Homo sapiens
  misc_RNA (1)...(19): siRNA sense strand
cauggauaguggaggaauu

SEQ ID NO: 2508357 - RNA, 19 nt, Homo sapiens
  misc_RNA (1)...(19): siRNA sense strand
auguagugaaugugagaaa

SEQ ID NO: 2508358 - RNA, 19 nt, Homo sapiens
  misc_RNA (1)...(19): siRNA sense strand
gagagaauguauuugggaa

SEQ ID NO: 2508359 - RNA, 19 nt, Homo sapiens
  misc_RNA (1)...(19): siRNA sense strand
ccucauugcacaucagaua

SEQ ID NO: 2508360 - RNA, 19 nt, Homo sapiens
  misc_RNA (1)...(19): siRNA sense strand
auguaaucaaugugggaaa

SEQ ID NO: 2508361 - RNA, 19 nt, Homo sapiens
  misc_RNA (1)...(19): siRNA sense strand
uuguagugauuguaggaaa

SEQ ID NO: 2508362 - RNA, 19 nt, Homo sapiens
  misc_RNA (1)...(19): siRNA sense strand
uagagaagaacaaggaaau

SEQ ID NO: 2508363 - RNA, 19 nt, Homo sapiens
  misc_RNA (1)...(19): siRNA sense strand
aauucauacuggagagaga

SEQ ID NO: 2508364 - RNA, 19 nt, Homo sapiens
  misc_RNA (1)...(19): siRNA sense strand
augcaaggaauguggaaau

SEQ ID NO: 2508365 - RNA, 19 nt, Homo sapiens
  misc_RNA (1)...(19): siRNA sense strand
aauacacacaggagagaaa

SEQ ID NO: 2508366 - RNA, 19 nt, Homo sapiens
  misc_RNA (1)...(19): siRNA sense strand
uuagagaagaacaaggaaa

SEQ ID NO: 2508367 - RNA, 19 nt, Homo sapiens
  misc_RNA (1)...(19): siRNA sense strand
ccguauguuuguagugauu

SEQ ID NO: 2508368 - RNA, 19 nt, Homo sapiens
  misc_RNA (1)...(19): siRNA sense strand
uguaagagaaugaacacaa

SEQ ID NO: 2508369 - RNA, 19 nt, Homo sapiens
  misc_RNA (1)...(19): siRNA sense strand
aggagaagagccauggaua

SEQ ID NO: 2508370 - RNA, 19 nt, Homo sapiens
  misc_RNA (1)...(19): siRNA sense strand
agaaauccuaugaguguaa

SEQ ID NO: 2508371 - RNA, 19 nt, Homo sapiens
  misc_RNA (1)...(19): siRNA sense strand
cagaaaucccacaaggaau

SEQ ID NO: 2508372 - RNA, 19 nt, Homo sapiens
  misc_RNA (1)...(19): siRNA sense strand
gagaaaagucauuugggaa

SEQ ID NO: 2508373 - RNA, 19 nt, Homo sapiens
  misc_RNA (1)...(19): siRNA sense strand
agucaguguaagagaauga

SEQ ID NO: 2508374 - RNA, 19 nt, Homo sapiens
  misc_RNA (1)...(19): siRNA sense strand
augcaaugaaugugggaga

SEQ ID NO: 2508375 - RNA, 19 nt, Homo sapiens
  misc_RNA (1)...(19): siRNA sense strand
guggaaaugccuucagcaa

SEQ ID NO: 2508376 - RNA, 19 nt, Homo sapiens
  misc_RNA (1)...(19): siRNA sense strand
ggagcaaggagaagagcca

SEQ ID NO: 2508377 - RNA, 19 nt, Homo sapiens
  misc_RNA (1)...(19): siRNA sense strand
uguagugauuguaggaaaa

SEQ ID NO: 2508378 - RNA, 19 nt, Homo sapiens
  misc_RNA (1)...(19): siRNA sense strand
agaaugaacacaaaggaga

SEQ ID NO: 2508379 - RNA, 19 nt, Homo sapiens
  misc_RNA (1)...(19): siRNA sense strand
aauucacacaggagagaaa

SEQ ID NO: 2508380 - RNA, 19 nt, Homo sapiens
  misc_RNA (1)...(19): siRNA sense strand
acacaaaaggggagacaga

SEQ ID NO: 2508381 - RNA, 19 nt, Homo sapiens
  misc_RNA (1)...(19): siRNA sense strand
cccuaugaauguagugaau

SEQ ID NO: 2508382 - RNA, 19 nt, Homo sapiens
  misc_RNA (1)...(19): siRNA sense strand
cagagaacuauaugggaga

SEQ ID NO: 2508383 - RNA, 19 nt, Homo sapiens
  misc_RNA (1)...(19): siRNA sense strand
cagaaagagagaauguauu

SEQ ID NO: 2508384 - RNA, 19 nt, Homo sapiens
  misc_RNA (1)...(19): siRNA sense strand
cagaaagauuccugaugga

SEQ ID NO: 2508385 - RNA, 19 nt, Homo sapiens
  misc_RNA (1)...(19): siRNA sense strand
gccaaaugaauguaaggaa

SEQ ID NO: 2508386 - RNA, 19 nt, Homo sapiens
  misc_RNA (1)...(19): siRNA sense strand
gggagaaccuacugcagga

SEQ ID NO: 2508387 - RNA, 19 nt, Homo sapiens
  misc_RNA (1)...(19): siRNA sense strand
aggaaauccaagauaaaca

SEQ ID NO: 2508388 - RNA, 19 nt, Homo sapiens
  misc_RNA (1)...(19): siRNA sense strand
acagaaagagagaauguau

SEQ ID NO: 2508389 - RNA, 19 nt, Homo sapiens
  misc_RNA (1)...(19): siRNA sense strand
ucaaauuggagcaaggaga

SEQ ID NO: 2508390 - RNA, 19 nt, Homo sapiens
  misc_RNA (1)...(19): siRNA sense strand
agaaaagucauuugggaau

SEQ ID NO: 2508391 - RNA, 19 nt, Homo sapiens
  misc_RNA (1)...(19): siRNA sense strand
ccauagaagaauucacaca

SEQ ID NO: 2508392 - RNA, 19 nt, Homo sapiens
  misc_RNA (1)...(19): siRNA sense strand
acagaggagagaagccaaa

SEQ ID NO: 2508393 - RNA, 19 nt, Homo sapiens
  misc_RNA (1)...(19): siRNA sense strand
cccuaugaaugcagugaau

SEQ ID NO: 2508394 - RNA, 19 nt, Homo sapiens
  misc_RNA (1)...(19): siRNA sense strand
ccuuauuguacaccagaaa

SEQ ID NO: 2508395 - RNA, 19 nt, Homo sapiens
  misc_RNA (1)...(19): siRNA sense strand
gcaccagaacauucagauu

SEQ ID NO: 2508396 - RNA, 19 nt, Homo sapiens
  misc_RNA (1)...(19): siRNA sense strand
gggcaugccgucagcaaaa

SEQ ID NO: 2508397 - RNA, 19 nt, Homo sapiens
  misc_RNA (1)...(19): siRNA sense strand
aaucagaacuacccagaca

SEQ ID NO: 2508398 - RNA, 19 nt, Homo sapiens
  misc_RNA (1)...(19): siRNA sense strand
gagaauguauuugggaaaa

SEQ ID NO: 2508399 - RNA, 19 nt, Homo sapiens
  misc_RNA (1)...(19): siRNA sense strand
gaauguagugaaugugaga

SEQ ID NO: 2508400 - RNA, 19 nt, Homo sapiens
  misc_RNA (1)...(19): siRNA sense strand
cccuaugaguguaaugaau

SEQ ID NO: 2508401 - RNA, 19 nt, Homo sapiens
  misc_RNA (1)...(19): siRNA sense strand
cuggagaacuacagcaacu

SEQ ID NO: 2508402 - RNA, 19 nt, Homo sapiens
  misc_RNA (1)...(19): siRNA sense strand
ucagauaacucauagagga

SEQ ID NO: 2508403 - RNA, 19 nt, Homo sapiens
  misc_RNA (1)...(19): siRNA sense strand
cugauuacagaaagagaga

SEQ ID NO: 2508404 - RNA, 19 nt, Homo sapiens
  misc_RNA (1)...(19): siRNA sense strand
uuacagaaagagagaaugu

SEQ ID NO: 2508405 - RNA, 19 nt, Homo sapiens
  misc_RNA (1)...(19): siRNA sense strand
agaaguaauuguugcaaag

SEQ ID NO: 2508406 - RNA, 19 nt, Homo sapiens
  misc_RNA (1)...(19): siRNA sense strand
acacuuaagaagagagaga

SEQ ID NO: 2508407 - RNA, 19 nt, Homo sapiens
  misc_RNA (1)...(19): siRNA sense strand
cauugaagaaguagaacaa

SEQ ID NO: 2508408 - RNA, 19 nt, Homo sapiens
  misc_RNA (1)...(19): siRNA sense strand
gcuuaugaacguuuggaaa

SEQ ID NO: 2508409 - RNA, 19 nt, Homo sapiens
  misc_RNA (1)...(19): siRNA sense strand
aagaagagagagaggcauu

SEQ ID NO: 2508410 - RNA, 19 nt, Homo sapiens
  misc_RNA (1)...(19): siRNA sense strand
uugaagaaguagaacaaca

SEQ ID NO: 2508411 - RNA, 19 nt, Homo sapiens
  misc_RNA (1)...(19): siRNA sense strand
acauuuaaggacugggcua

SEQ ID NO: 2508412 - RNA, 19 nt, Homo sapiens
  misc_RNA (1)...(19): siRNA sense strand
gguuauugaaggaguagau

SEQ ID NO: 2508413 - RNA, 19 nt, Homo sapiens
  misc_RNA (1)...(19): siRNA sense strand
uauugaaggaguagaugaa

SEQ ID NO: 2508414 - RNA, 19 nt, Homo sapiens
  misc_RNA (1)...(19): siRNA sense strand
uugaaggaguagaugaaga

SEQ ID NO: 2508415 - RNA, 19 nt, Homo sapiens
  misc_RNA (1)...(19): siRNA sense strand
aauucuacagagugggaaa

SEQ ID NO: 2508416 - RNA, 19 nt, Homo sapiens
  misc_RNA (1)...(19): siRNA sense strand
cuuaugaacguuuggaaaa

SEQ ID NO: 2508417 - RNA, 19 nt, Homo sapiens
  misc_RNA (1)...(19): siRNA sense strand
ugaagaaagguuacgaaca

SEQ ID NO: 2508418 - RNA, 19 nt, Homo sapiens
  misc_RNA (1)...(19): siRNA sense strand
aagaaaaggaugaugauga

SEQ ID NO: 2508419 - RNA, 19 nt, Homo sapiens
  misc_RNA (1)...(19): siRNA sense strand
cacugaagacauugaagaa

SEQ ID NO: 2508420 - RNA, 19 nt, Homo sapiens
  misc_RNA (1)...(19): siRNA sense strand
gcagacagauugaggacac

SEQ ID NO: 2508421 - RNA, 19 nt, Homo sapiens
  misc_RNA (1)...(19): siRNA sense strand
cauuuaaggacugggcuaa

SEQ ID NO: 2508422 - RNA, 19 nt, Homo sapiens
  misc_RNA (1)...(19): siRNA sense strand
cugaguaauccacugaaua

SEQ ID NO: 2508423 - RNA, 19 nt, Homo sapiens
  misc_RNA (1)...(19): siRNA sense strand
acauugaagaaguagaaca

SEQ ID NO: 2508424 - RNA, 19 nt, Homo sapiens
  misc_RNA (1)...(19): siRNA sense strand
uguuauguauggaagccaa

SEQ ID NO: 2508425 - RNA, 19 nt, Homo sapiens
  misc_RNA (1)...(19): siRNA sense strand
aagcaaagauggucgaccu

SEQ ID NO: 2508426 - RNA, 19 nt, Homo sapiens
  misc_RNA (1)...(19): siRNA sense strand
agaaaaggaugaugaugau

SEQ ID NO: 2508427 - RNA, 19 nt, Homo sapiens
  misc_RNA (1)...(19): siRNA sense strand
uguuguaaagggaagaaau

SEQ ID NO: 2508428 - RNA, 19 nt, Homo sapiens
  misc_RNA (1)...(19): siRNA sense strand
uugcauugcuguuuguaau

SEQ ID NO: 2508429 - RNA, 19 nt, Homo sapiens
  misc_RNA (1)...(19): siRNA sense strand
ugaaggaguagaugaagau

SEQ ID NO: 2508430 - RNA, 19 nt, Homo sapiens
  misc_RNA (1)...(19): siRNA sense strand
uuaagaagagagagaggca

SEQ ID NO: 2508431 - RNA, 19 nt, Homo sapiens
  misc_RNA (1)...(19): siRNA sense strand
uggaauguuggcagcuaua

SEQ ID NO: 2508432 - RNA, 19 nt, Homo sapiens
  misc_RNA (1)...(19): siRNA sense strand
ccugaguaauccacugaau

SEQ ID NO: 2508433 - RNA, 19 nt, Homo sapiens
  misc_RNA (1)...(19): siRNA sense strand
gcuggauauauguucguaa

SEQ ID NO: 2508434 - RNA, 19 nt, Homo sapiens
  misc_RNA (1)...(19): siRNA sense strand
gccaaagagaugugaugca

SEQ ID NO: 2508435 - RNA, 19 nt, Homo sapiens
  misc_RNA (1)...(19): siRNA sense strand
acacugaagacauugaaga

SEQ ID NO: 2508436 - RNA, 19 nt, Homo sapiens
  misc_RNA (1)...(19): siRNA sense strand
aggacugggcuaaugcuaa

SEQ ID NO: 2508437 - RNA, 19 nt, Homo sapiens
  misc_RNA (1)...(19): siRNA sense strand
uggaaaacacugaagacau

SEQ ID NO: 2508438 - RNA, 19 nt, Homo sapiens
  misc_RNA (1)...(19): siRNA sense strand
guuauguauggaagccaaa

SEQ ID NO: 2508439 - RNA, 19 nt, Homo sapiens
  misc_RNA (1)...(19): siRNA sense strand
caacauagauggaaaggca

SEQ ID NO: 2508440 - RNA, 19 nt, Homo sapiens
  misc_RNA (1)...(19): siRNA sense strand
cugacaacauagauggaaa

SEQ ID NO: 2508441 - RNA, 19 nt, Homo sapiens
  misc_RNA (1)...(19): siRNA sense strand
gaggaaaguuggagcacca

SEQ ID NO: 2508442 - RNA, 19 nt, Homo sapiens
  misc_RNA (1)...(19): siRNA sense strand
guggcaagauggagggaga

SEQ ID NO: 2508443 - RNA, 19 nt, Homo sapiens
  misc_RNA (1)...(19): siRNA sense strand
ucuucagauuggugagaaa

SEQ ID NO: 2508444 - RNA, 19 nt, Homo sapiens
  misc_RNA (1)...(19): siRNA sense strand
uggaauaaaggaagccaaa

SEQ ID NO: 2508445 - RNA, 19 nt, Homo sapiens
  misc_RNA (1)...(19): siRNA sense strand
acagaugaagacagagaaa

SEQ ID NO: 2508446 - RNA, 19 nt, Homo sapiens
  misc_RNA (1)...(19): siRNA sense strand
ccuugaaagaacaugauaa

SEQ ID NO: 2508447 - RNA, 19 nt, Homo sapiens
  misc_RNA (1)...(19): siRNA sense strand
acauauugaaguugaggaa

SEQ ID NO: 2508448 - RNA, 19 nt, Homo sapiens
  misc_RNA (1)...(19): siRNA sense strand
caauaguggaauaaaggaa

SEQ ID NO: 2508449 - RNA, 19 nt, Homo sapiens
  misc_RNA (1)...(19): siRNA sense strand
aggaagaggaggaggaaag

SEQ ID NO: 2508450 - RNA, 19 nt, Homo sapiens
  misc_RNA (1)...(19): siRNA sense strand
cugaaugacaauaguggaa

SEQ ID NO: 2508451 - RNA, 19 nt, Homo sapiens
  misc_RNA (1)...(19): siRNA sense strand
guaauuuaucugaaggcaa

SEQ ID NO: 2508452 - RNA, 19 nt, Homo sapiens
  misc_RNA (1)...(19): siRNA sense strand
ucacagaaacagaagccua

SEQ ID NO: 2508453 - RNA, 19 nt, Homo sapiens
  misc_RNA (1)...(19): siRNA sense strand
ccaagaauauuuaaagcga

SEQ ID NO: 2508454 - RNA, 19 nt, Homo sapiens
  misc_RNA (1)...(19): siRNA sense strand
ugacagaugaagacagaga

SEQ ID NO: 2508455 - RNA, 19 nt, Homo sapiens
  misc_RNA (1)...(19): siRNA sense strand
cacaaaagcccuucagaaa

SEQ ID NO: 2508456 - RNA, 19 nt, Homo sapiens
  misc_RNA (1)...(19): siRNA sense strand
aagauuaaguccagagaac

SEQ ID NO: 2508457 - RNA, 19 nt, Homo sapiens
  misc_RNA (1)...(19): siRNA sense strand
ccacaaauacagagaagcu

SEQ ID NO: 2508458 - RNA, 19 nt, Homo sapiens
  misc_RNA (1)...(19): siRNA sense strand
aaaagaaacccgugaucaa

SEQ ID NO: 2508459 - RNA, 19 nt, Homo sapiens
  misc_RNA (1)...(19): siRNA sense strand
aggccacccuucaggauaa

SEQ ID NO: 2508460 - RNA, 19 nt, Homo sapiens
  misc_RNA (1)...(19): siRNA sense strand
guguauugucugaggagga

SEQ ID NO: 2508461 - RNA, 19 nt, Homo sapiens
  misc_RNA (1)...(19): siRNA sense strand
agaaauacugacacgggaa

SEQ ID NO: 2508462 - RNA, 19 nt, Homo sapiens
  misc_RNA (1)...(19): siRNA sense strand
agagauuggaccuggaaaa

SEQ ID NO: 2508463 - RNA, 19 nt, Homo sapiens
  misc_RNA (1)...(19): siRNA sense strand
gcuguggagacaagagcaa

SEQ ID NO: 2508464 - RNA, 19 nt, Homo sapiens
  misc_RNA (1)...(19): siRNA sense strand
gaugacaguaacucagaaa

SEQ ID NO: 2508465 - RNA, 19 nt, Homo sapiens
  misc_RNA (1)...(19): siRNA sense strand
aacaagagaaccuggacaa

SEQ ID NO: 2508466 - RNA, 19 nt, Homo sapiens
  misc_RNA (1)...(19): siRNA sense strand
cugaaggaaauaugugaau

SEQ ID NO: 2508467 - RNA, 19 nt, Homo sapiens
  misc_RNA (1)...(19): siRNA sense strand
aagaagaugcuaugcucaa

SEQ ID NO: 2508468 - RNA, 19 nt, Homo sapiens
  misc_RNA (1)...(19): siRNA sense strand
cagacagcccagagcagua

SEQ ID NO: 2508469 - RNA, 19 nt, Homo sapiens
  misc_RNA (1)...(19): siRNA sense strand
acaaacuaguaaugacaca

SEQ ID NO: 2508470 - RNA, 19 nt, Homo sapiens
  misc_RNA (1)...(19): siRNA sense strand
gaucagagggagaaauacu

SEQ ID NO: 2508471 - RNA, 19 nt, Homo sapiens
  misc_RNA (1)...(19): siRNA sense strand
guggaauaaaggaagccaa

SEQ ID NO: 2508472 - RNA, 19 nt, Homo sapiens
  misc_RNA (1)...(19): siRNA sense strand
gggcugcgggacagugaaa

SEQ ID NO: 2508473 - RNA, 19 nt, Homo sapiens
  misc_RNA (1)...(19): siRNA sense strand
ugucaaggcaugaaaacaa

SEQ ID NO: 2508474 - RNA, 19 nt, Homo sapiens
  misc_RNA (1)...(19): siRNA sense strand
uggacaaacaccagacuca

SEQ ID NO: 2508475 - RNA, 19 nt, Homo sapiens
  misc_RNA (1)...(19): siRNA sense strand
ggcucauacucgaaaccaa

SEQ ID NO: 2508476 - RNA, 19 nt, Homo sapiens
  misc_RNA (1)...(19): siRNA sense strand
augcuaugcucaaaagaua

SEQ ID NO: 2508477 - RNA, 19 nt, Homo sapiens
  misc_RNA (1)...(19): siRNA sense strand
ccagcggaucagagggaga

SEQ ID NO: 2508478 - RNA, 19 nt, Homo sapiens
  misc_RNA (1)...(19): siRNA sense strand
ccagagcaguaaugugaca

SEQ ID NO: 2508479 - RNA, 19 nt, Homo sapiens
  misc_RNA (1)...(19): siRNA sense strand
acugacagaugaagacaga

SEQ ID NO: 2508480 - RNA, 19 nt, Homo sapiens
  misc_RNA (1)...(19): siRNA sense strand
caacaagagaaccuggaca

SEQ ID NO: 2508481 - RNA, 19 nt, Homo sapiens
  misc_RNA (1)...(19): siRNA sense strand
cuacaagggaacaagaagu

SEQ ID NO: 2508482 - RNA, 19 nt, Homo sapiens
  misc_RNA (1)...(19): siRNA sense strand
gagaaauacugacacggga

SEQ ID NO: 2508483 - RNA, 19 nt, Homo sapiens
  misc_RNA (1)...(19): siRNA sense strand
caggaagaggaggaggaaa

SEQ ID NO: 2508484 - RNA, 19 nt, Homo sapiens
  misc_RNA (1)...(19): siRNA sense strand
agaccuuaccauuucaaua

SEQ ID NO: 2508485 - RNA, 19 nt, Homo sapiens
  misc_RNA (1)...(19): siRNA sense strand
gaauauuggcagcggugca

SEQ ID NO: 2508486 - RNA, 19 nt, Homo sapiens
  misc_RNA (1)...(19): siRNA sense strand
acaaaagcccuucagaaaa

SEQ ID NO: 2508487 - RNA, 19 nt, Homo sapiens
  misc_RNA (1)...(19): siRNA sense strand
acaaagacagcuaacaaaa

SEQ ID NO: 2508488 - RNA, 19 nt, Homo sapiens
  misc_RNA (1)...(19): siRNA sense strand
uaacaaaauugcuucggaa

SEQ ID NO: 2508489 - RNA, 19 nt, Homo sapiens
  misc_RNA (1)...(19): siRNA sense strand
caugcagaguuaagcugaa

SEQ ID NO: 2508490 - RNA, 19 nt, Homo sapiens
  misc_RNA (1)...(19): siRNA sense strand
ggggauuaacucaggaaca

SEQ ID NO: 2508491 - RNA, 19 nt, Homo sapiens
  misc_RNA (1)...(19): siRNA sense strand
ugucaagaggauuguauca

SEQ ID NO: 2508492 - RNA, 19 nt, Homo sapiens
  misc_RNA (1)...(19): siRNA sense strand
uggagggagaagauggaau

SEQ ID NO: 2508493 - RNA, 19 nt, Homo sapiens
  misc_RNA (1)...(19): siRNA sense strand
ccaugaaggagguggguga

SEQ ID NO: 2508494 - RNA, 19 nt, Homo sapiens
  misc_RNA (1)...(19): siRNA sense strand
ccaaaggagagaaaggcca

SEQ ID NO: 2508495 - RNA, 19 nt, Homo sapiens
  misc_RNA (1)...(19): siRNA sense strand
gggugauggcuuacaggau

SEQ ID NO: 2508496 - RNA, 19 nt, Homo sapiens
  misc_RNA (1)...(19): siRNA sense strand
ugaacccaaaggagagaaa

SEQ ID NO: 2508497 - RNA, 19 nt, Homo sapiens
  misc_RNA (1)...(19): siRNA sense strand
ccaugaaggagguggguga

SEQ ID NO: 2508498 - RNA, 19 nt, Homo sapiens
  misc_RNA (1)...(19): siRNA sense strand
ccaaaggagagaaaggcca

SEQ ID NO: 2508499 - RNA, 19 nt, Homo sapiens
  misc_RNA (1)...(19): siRNA sense strand
gggugauggcuuacaggau

SEQ ID NO: 2508500 - RNA, 19 nt, Homo sapiens
  misc_RNA (1)...(19): siRNA sense strand
ugaacccaaaggagagaaa

SEQ ID NO: 2508501 - RNA, 19 nt, Homo sapiens
  misc_RNA (1)...(19): siRNA sense strand
caacaaacuugcugugaua

SEQ ID NO: 2508502 - RNA, 19 nt, Homo sapiens
  misc_RNA (1)...(19): siRNA sense strand
ggaaaugaaaucaaggaua

SEQ ID NO: 2508503 - RNA, 19 nt, Homo sapiens
  misc_RNA (1)...(19): siRNA sense strand
ccgugauggugcugggaaa

SEQ ID NO: 2508504 - RNA, 19 nt, Homo sapiens
  misc_RNA (1)...(19): siRNA sense strand
gcacagaaacagaauauuu

SEQ ID NO: 2508505 - RNA, 19 nt, Homo sapiens
  misc_RNA (1)...(19): siRNA sense strand
caaggauauuggugauuaa

SEQ ID NO: 2508506 - RNA, 19 nt, Homo sapiens
  misc_RNA (1)...(19): siRNA sense strand
acaaggaaguuaaagacaa

SEQ ID NO: 2508507 - RNA, 19 nt, Homo sapiens
  misc_RNA (1)...(19): siRNA sense strand
caaggaaguuaaagacaau

SEQ ID NO: 2508508 - RNA, 19 nt, Homo sapiens
  misc_RNA (1)...(19): siRNA sense strand
guuaaagacaaucaggaaa

SEQ ID NO: 2508509 - RNA, 19 nt, Homo sapiens
  misc_RNA (1)...(19): siRNA sense strand
gaaugaacaaggaaguuaa

SEQ ID NO: 2508510 - RNA, 19 nt, Homo sapiens
  misc_RNA (1)...(19): siRNA sense strand
cauaaagggucaacauaca

SEQ ID NO: 2508511 - RNA, 19 nt, Homo sapiens
  misc_RNA (1)...(19): siRNA sense strand
aguuaaagacaaucaggaa

SEQ ID NO: 2508512 - RNA, 19 nt, Homo sapiens
  misc_RNA (1)...(19): siRNA sense strand
agacgaagaugaauugaau

SEQ ID NO: 2508513 - RNA, 19 nt, Homo sapiens
  misc_RNA (1)...(19): siRNA sense strand
cuuauauccuggaaagaau

SEQ ID NO: 2508514 - RNA, 19 nt, Homo sapiens
  misc_RNA (1)...(19): siRNA sense strand
cagcacagaaacagaauau

SEQ ID NO: 2508515 - RNA, 19 nt, Homo sapiens
  misc_RNA (1)...(19): siRNA sense strand
aagcaagcauuaaaggaau

SEQ ID NO: 2508516 - RNA, 19 nt, Homo sapiens
  misc_RNA (1)...(19): siRNA sense strand
caucgaaaucucauugaaa

SEQ ID NO: 2508517 - RNA, 19 nt, Homo sapiens
  misc_RNA (1)...(19): siRNA sense strand
gggucaacauacagaaacu

SEQ ID NO: 2508518 - RNA, 19 nt, Homo sapiens
  misc_RNA (1)...(19): siRNA sense strand
ugaacaaggaaguuaaaga

SEQ ID NO: 2508519 - RNA, 19 nt, Homo sapiens
  misc_RNA (1)...(19): siRNA sense strand
gaauugaaucuucugguua

SEQ ID NO: 2508520 - RNA, 19 nt, Homo sapiens
  misc_RNA (1)...(19): siRNA sense strand
caucuuugcagcacagaaa

SEQ ID NO: 2508521 - RNA, 19 nt, Homo sapiens
  misc_RNA (1)...(19): siRNA sense strand
agacaaucaggaaaugaaa

SEQ ID NO: 2508522 - RNA, 19 nt, Homo sapiens
  misc_RNA (1)...(19): siRNA sense strand
uggcaacccuccugaauuu

SEQ ID NO: 2508523 - RNA, 19 nt, Homo sapiens
  misc_RNA (1)...(19): siRNA sense strand
gaguaaagauggaaaauac

SEQ ID NO: 2508524 - RNA, 19 nt, Homo sapiens
  misc_RNA (1)...(19): siRNA sense strand
aaagcaagcauuaaaggaa

SEQ ID NO: 2508525 - RNA, 19 nt, Homo sapiens
  misc_RNA (1)...(19): siRNA sense strand
gcaagucacauucaagaaa

SEQ ID NO: 2508526 - RNA, 19 nt, Homo sapiens
  misc_RNA (1)...(19): siRNA sense strand
gauuaaggcugcagaagac

SEQ ID NO: 2508527 - RNA, 19 nt, Homo sapiens
  misc_RNA (1)...(19): siRNA sense strand
agaaugaacaaggaaguua

SEQ ID NO: 2508528 - RNA, 19 nt, Homo sapiens
  misc_RNA (1)...(19): siRNA sense strand
ugauuaaggcugcagaaga

SEQ ID NO: 2508529 - RNA, 19 nt, Homo sapiens
  misc_RNA (1)...(19): siRNA sense strand
ccaacaggcuugugacauc

SEQ ID NO: 2508530 - RNA, 19 nt, Homo sapiens
  misc_RNA (1)...(19): siRNA sense strand
uggaaagaauggcagacuu

SEQ ID NO: 2508531 - RNA, 19 nt, Homo sapiens
  misc_RNA (1)...(19): siRNA sense strand
ccaacaaacuugcugugau

SEQ ID NO: 2508532 - RNA, 19 nt, Homo sapiens
  misc_RNA (1)...(19): siRNA sense strand
ggaaagaauggcagacuug

SEQ ID NO: 2508533 - RNA, 19 nt, Homo sapiens
  misc_RNA (1)...(19): siRNA sense strand
ggggaaagcaagcauuaaa

SEQ ID NO: 2508534 - RNA, 19 nt, Homo sapiens
  misc_RNA (1)...(19): siRNA sense strand
caugaaucguuccaacaaa

SEQ ID NO: 2508535 - RNA, 19 nt, Homo sapiens
  misc_RNA (1)...(19): siRNA sense strand
cgggaggacuguaccugaa

SEQ ID NO: 2508536 - RNA, 19 nt, Homo sapiens
  misc_RNA (1)...(19): siRNA sense strand
uggcagacuuggagacuuc

SEQ ID NO: 2508537 - RNA, 19 nt, Homo sapiens
  misc_RNA (1)...(19): siRNA sense strand
caguauuugcugugggugu

SEQ ID NO: 2508538 - RNA, 19 nt, Homo sapiens
  misc_RNA (1)...(19): siRNA sense strand
aagacaaucaggaaaugaa

SEQ ID NO: 2508539 - RNA, 19 nt, Homo sapiens
  misc_RNA (1)...(19): siRNA sense strand
ggugauuaaggcugcagaa

SEQ ID NO: 2508540 - RNA, 19 nt, Homo sapiens
  misc_RNA (1)...(19): siRNA sense strand
cagacgaagaugaauugaa

SEQ ID NO: 2508541 - RNA, 19 nt, Homo sapiens
  misc_RNA (1)...(19): siRNA sense strand
ggaguaaagauggaaaaua

SEQ ID NO: 2508542 - RNA, 19 nt, Homo sapiens
  misc_RNA (1)...(19): siRNA sense strand
ugaaauugguuaugucugu

SEQ ID NO: 2508543 - RNA, 19 nt, Homo sapiens
  misc_RNA (1)...(19): siRNA sense strand
ugaccaaaagugacauaaa

SEQ ID NO: 2508544 - RNA, 19 nt, Homo sapiens
  misc_RNA (1)...(19): siRNA sense strand
gacauaaagggucaacaua

SEQ ID NO: 2508545 - RNA, 19 nt, Homo sapiens
  misc_RNA (1)...(19): siRNA sense strand
aaaucaaggauauugguga

SEQ ID NO: 2508546 - RNA, 19 nt, Homo sapiens
  misc_RNA (1)...(19): siRNA sense strand
cagcaaaugaaguuauugu

SEQ ID NO: 2508547 - RNA, 19 nt, Homo sapiens
  misc_RNA (1)...(19): siRNA sense strand
gauugaugccuguguuuua

SEQ ID NO: 2508548 - RNA, 19 nt, Homo sapiens
  misc_RNA (1)...(19): siRNA sense strand
gagacagccuuuaaaauuu

SEQ ID NO: 2508549 - RNA, 19 nt, Homo sapiens
  misc_RNA (1)...(19): siRNA sense strand
auaaagaacuggagggccu

SEQ ID NO: 2508550 - RNA, 19 nt, Homo sapiens
  misc_RNA (1)...(19): siRNA sense strand
caguagagucccagaggau

SEQ ID NO: 2508551 - RNA, 19 nt, Homo sapiens
  misc_RNA (1)...(19): siRNA sense strand
gcagcaagcuugagagccu

SEQ ID NO: 2508552 - RNA, 19 nt, Homo sapiens
  misc_RNA (1)...(19): siRNA sense strand
aggaggaggagaagcgcaa

SEQ ID NO: 2508553 - RNA, 19 nt, Homo sapiens
  misc_RNA (1)...(19): siRNA sense strand
agaucaagaagcuggagaa

SEQ ID NO: 2508554 - RNA, 19 nt, Homo sapiens
  misc_RNA (1)...(19): siRNA sense strand
ccgccaacuggaagacaua

SEQ ID NO: 2508555 - RNA, 19 nt, Homo sapiens
  misc_RNA (1)...(19): siRNA sense strand
uugagauggcugaggagaa

SEQ ID NO: 2508556 - RNA, 19 nt, Homo sapiens
  misc_RNA (1)...(19): siRNA sense strand
gcacagaagcaucaggcca

SEQ ID NO: 2508557 - RNA, 19 nt, Homo sapiens
  misc_RNA (1)...(19): siRNA sense strand
cggaauucacagaagcaga

SEQ ID NO: 2508558 - RNA, 19 nt, Homo sapiens
  misc_RNA (1)...(19): siRNA sense strand
ccacauucaagcaggagau

SEQ ID NO: 2508559 - RNA, 19 nt, Homo sapiens
  misc_RNA (1)...(19): siRNA sense strand
cauucaagcaggagaugga

SEQ ID NO: 2508560 - RNA, 19 nt, Homo sapiens
  misc_RNA (1)...(19): siRNA sense strand
aagaagcuggagaaagaaa

SEQ ID NO: 2508561 - RNA, 19 nt, Homo sapiens
  misc_RNA (1)...(19): siRNA sense strand
cccuauacacagagaaguu

SEQ ID NO: 2508562 - RNA, 19 nt, Homo sapiens
  misc_RNA (1)...(19): siRNA sense strand
ccaaaagcagcgagguauu

SEQ ID NO: 2508563 - RNA, 19 nt, Homo sapiens
  misc_RNA (1)...(19): siRNA sense strand
ccgaagaugcagagaaguc

SEQ ID NO: 2508564 - RNA, 19 nt, Homo sapiens
  misc_RNA (1)...(19): siRNA sense strand
caucgaaggccacaggaga

SEQ ID NO: 2508565 - RNA, 19 nt, Homo sapiens
  misc_RNA (1)...(19): siRNA sense strand
cugaugaagcagcaagaga

SEQ ID NO: 2508566 - RNA, 19 nt, Homo sapiens
  misc_RNA (1)...(19): siRNA sense strand
gugcaagaaguaugcugaa

SEQ ID NO: 2508567 - RNA, 19 nt, Homo sapiens
  misc_RNA (1)...(19): siRNA sense strand
augcugaacugcuggagga

SEQ ID NO: 2508568 - RNA, 19 nt, Homo sapiens
  misc_RNA (1)...(19): siRNA sense strand
ucaagcaggagauggaaaa

SEQ ID NO: 2508569 - RNA, 19 nt, Homo sapiens
  misc_RNA (1)...(19): siRNA sense strand
acaagaggguacaggaccu

SEQ ID NO: 2508570 - RNA, 19 nt, Homo sapiens
  misc_RNA (1)...(19): siRNA sense strand
acacagagaaguuugagga

SEQ ID NO: 2508571 - RNA, 19 nt, Homo sapiens
  misc_RNA (1)...(19): siRNA sense strand
gccaagaaacggaggaaau

SEQ ID NO: 2508572 - RNA, 19 nt, Homo sapiens
  misc_RNA (1)...(19): siRNA sense strand
cgucaugggcuauguguaa

SEQ ID NO: 2508573 - RNA, 19 nt, Homo sapiens
  misc_RNA (1)...(19): siRNA sense strand
ggggaaaggucucgagaau

SEQ ID NO: 2508574 - RNA, 19 nt, Homo sapiens
  misc_RNA (1)...(19): siRNA sense strand
ggucaaugaguuuggagaa

SEQ ID NO: 2508575 - RNA, 19 nt, Homo sapiens
  misc_RNA (1)...(19): siRNA sense strand
agaggaaaccaguggagaa

SEQ ID NO: 2508576 - RNA, 19 nt, Homo sapiens
  misc_RNA (1)...(19): siRNA sense strand
ggauauagaaccuuggaca

SEQ ID NO: 2508577 - RNA, 19 nt, Homo sapiens
  misc_RNA (1)...(19): siRNA sense strand
guaaacaaagaaacggaaa

SEQ ID NO: 2508578 - RNA, 19 nt, Homo sapiens
  misc_RNA (1)...(19): siRNA sense strand
ggucaaggauauagaaccu

SEQ ID NO: 2508579 - RNA, 19 nt, Homo sapiens
  misc_RNA (1)...(19): siRNA sense strand
ccgagugacgagagagaau

SEQ ID NO: 2508580 - RNA, 19 nt, Homo sapiens
  misc_RNA (1)...(19): siRNA sense strand
ugauagaauagcagaugaa

SEQ ID NO: 2508581 - RNA, 19 nt, Homo sapiens
  misc_RNA (1)...(19): siRNA sense strand
aggaaggaccagucauuaa

SEQ ID NO: 2508582 - RNA, 19 nt, Homo sapiens
  misc_RNA (1)...(19): siRNA sense strand
gccaaauauuagaagauca

SEQ ID NO: 2508583 - RNA, 19 nt, Homo sapiens
  misc_RNA (1)...(19): siRNA sense strand
gcuuaaaccuccuacccaa

SEQ ID NO: 2508584 - RNA, 19 nt, Homo sapiens
  misc_RNA (1)...(19): siRNA sense strand
agagagaauugcaaugaau

SEQ ID NO: 2508585 - RNA, 19 nt, Homo sapiens
  misc_RNA (1)...(19): siRNA sense strand
ggacaaagugcuaguuacu

SEQ ID NO: 2508586 - RNA, 19 nt, Homo sapiens
  misc_RNA (1)...(19): siRNA sense strand
uaaugaaggcagaugggaa

SEQ ID NO: 2508587 - RNA, 19 nt, Homo sapiens
  misc_RNA (1)...(19): siRNA sense strand
aggcagaugggaaugaaua

SEQ ID NO: 2508588 - RNA, 19 nt, Homo sapiens
  misc_RNA (1)...(19): siRNA sense strand
acaaacauguggaggagga

SEQ ID NO: 2508589 - RNA, 19 nt, Homo sapiens
  misc_RNA (1)...(19): siRNA sense strand
guggcauguuauuggcaaa

SEQ ID NO: 2508590 - RNA, 19 nt, Homo sapiens
  misc_RNA (1)...(19): siRNA sense strand
gcuagcuagugcaguguua

SEQ ID NO: 2508591 - RNA, 19 nt, Homo sapiens
  misc_RNA (1)...(19): siRNA sense strand
cgagaaucuuauuguauga

SEQ ID NO: 2508592 - RNA, 19 nt, Homo sapiens
  misc_RNA (1)...(19): siRNA sense strand
aggacagaacggugaauau

SEQ ID NO: 2508593 - RNA, 19 nt, Homo sapiens
  misc_RNA (1)...(19): siRNA sense strand
ggaggaaggaccagucauu

SEQ ID NO: 2508594 - RNA, 19 nt, Homo sapiens
  misc_RNA (1)...(19): siRNA sense strand
ccuuacaguucuuguucaa

SEQ ID NO: 2508595 - RNA, 19 nt, Homo sapiens
  misc_RNA (1)...(19): siRNA sense strand
ucaacucacaggaggauua

SEQ ID NO: 2508596 - RNA, 19 nt, Homo sapiens
  misc_RNA (1)...(19): siRNA sense strand
aaugaaggcagaugggaau

SEQ ID NO: 2508597 - RNA, 19 nt, Homo sapiens
  misc_RNA (1)...(19): siRNA sense strand
guguuaaacuccagugcca

SEQ ID NO: 2508598 - RNA, 19 nt, Homo sapiens
  misc_RNA (1)...(19): siRNA sense strand
gaaaauggacaaagugcua

SEQ ID NO: 2508599 - RNA, 19 nt, Homo sapiens
  misc_RNA (1)...(19): siRNA sense strand
uuucauaccuacagcaaca

SEQ ID NO: 2508600 - RNA, 19 nt, Homo sapiens
  misc_RNA (1)...(19): siRNA sense strand
ugacaguuaccuugcauua

SEQ ID NO: 2508601 - RNA, 19 nt, Homo sapiens
  misc_RNA (1)...(19): siRNA sense strand
aaauaacgcaguugaaaga

SEQ ID NO: 2508602 - RNA, 19 nt, Homo sapiens
  misc_RNA (1)...(19): siRNA sense strand
ucgacaagagaaagaaauu

SEQ ID NO: 2508603 - RNA, 19 nt, Homo sapiens
  misc_RNA (1)...(19): siRNA sense strand
agguguuguguguggguaa

SEQ ID NO: 2508604 - RNA, 19 nt, Homo sapiens
  misc_RNA (1)...(19): siRNA sense strand
cggaaauauguuacugaau

SEQ ID NO: 2508605 - RNA, 19 nt, Homo sapiens
  misc_RNA (1)...(19): siRNA sense strand
gcuagugaauggagcgagu

SEQ ID NO: 2508606 - RNA, 19 nt, Homo sapiens
  misc_RNA (1)...(19): siRNA sense strand
uacacauaguagugguaaa

SEQ ID NO: 2508607 - RNA, 19 nt, Homo sapiens
  misc_RNA (1)...(19): siRNA sense strand
gucaaacuguagucggaaa

SEQ ID NO: 2508608 - RNA, 19 nt, Homo sapiens
  misc_RNA (1)...(19): siRNA sense strand
uacuaaucgacaagagaaa

SEQ ID NO: 2508609 - RNA, 19 nt, Homo sapiens
  misc_RNA (1)...(19): siRNA sense strand
gauauagaaccuuggacau

SEQ ID NO: 2508610 - RNA, 19 nt, Homo sapiens
  misc_RNA (1)...(19): siRNA sense strand
gaaagaugaaagaagacau

SEQ ID NO: 2508611 - RNA, 19 nt, Homo sapiens
  misc_RNA (1)...(19): siRNA sense strand
ggcaacaaacucagaauga

SEQ ID NO: 2508612 - RNA, 19 nt, Homo sapiens
  misc_RNA (1)...(19): siRNA sense strand
ggauaugguugaagauggu

SEQ ID NO: 2508613 - RNA, 19 nt, Homo sapiens
  misc_RNA (1)...(19): siRNA sense strand
aacauguggaggaggaaua

SEQ ID NO: 2508614 - RNA, 19 nt, Homo sapiens
  misc_RNA (1)...(19): siRNA sense strand
gcauugccgucaugggcua

SEQ ID NO: 2508615 - RNA, 19 nt, Homo sapiens
  misc_RNA (1)...(19): siRNA sense strand
gcacacaagacuuucgaga

SEQ ID NO: 2508616 - RNA, 19 nt, Homo sapiens
  misc_RNA (1)...(19): siRNA sense strand
cuguaaucguccugagcca

SEQ ID NO: 2508617 - RNA, 19 nt, Homo sapiens
  misc_RNA (1)...(19): siRNA sense strand
ccaagaaacggaggaaauu

SEQ ID NO: 2508618 - RNA, 19 nt, Homo sapiens
  misc_RNA (1)...(19): siRNA sense strand
ggaugaaaauggacaaagu

SEQ ID NO: 2508619 - RNA, 19 nt, Homo sapiens
  misc_RNA (1)...(19): siRNA sense strand
uggccaaauauuagaagau

SEQ ID NO: 2508620 - RNA, 19 nt, Homo sapiens
  misc_RNA (1)...(19): siRNA sense strand
ugggcuauguguaaacaaa

SEQ ID NO: 2508621 - RNA, 19 nt, Homo sapiens
  misc_RNA (1)...(19): siRNA sense strand
gugucaaggucuucagcga

SEQ ID NO: 2508622 - RNA, 19 nt, Homo sapiens
  misc_RNA (1)...(19): siRNA sense strand
ucgugaugcucuugauaga

SEQ ID NO: 2508623 - RNA, 19 nt, Homo sapiens
  misc_RNA (1)...(19): siRNA sense strand
caucaggaaccauggacau

SEQ ID NO: 2508624 - RNA, 19 nt, Homo sapiens
  misc_RNA (1)...(19): siRNA sense strand
augaauaugaagaugguca

SEQ ID NO: 2508625 - RNA, 19 nt, Homo sapiens
  misc_RNA (1)...(19): siRNA sense strand
aagaaagaguuuuaggaca

SEQ ID NO: 2508626 - RNA, 19 nt, Homo sapiens
  misc_RNA (1)...(19): siRNA sense strand
aaacaaagaaacggaaaca

SEQ ID NO: 2508627 - RNA, 19 nt, Homo sapiens
  misc_RNA (1)...(19): siRNA sense strand
guacuaaucgacaagagaa

SEQ ID NO: 2508628 - RNA, 19 nt, Homo sapiens
  misc_RNA (1)...(19): siRNA sense strand
ugacaaugaaugccaagaa

SEQ ID NO: 2508629 - RNA, 19 nt, Homo sapiens
  misc_RNA (1)...(19): siRNA sense strand
ugaauacaguggaucaaau

SEQ ID NO: 2508630 - RNA, 19 nt, Homo sapiens
  misc_RNA (1)...(19): siRNA sense strand
ucaauaucccuuuggaaga

SEQ ID NO: 2508631 - RNA, 19 nt, Homo sapiens
  misc_RNA (1)...(19): siRNA sense strand
ucucaguguuccaggaguu

SEQ ID NO: 2508632 - RNA, 19 nt, Homo sapiens
  misc_RNA (1)...(19): siRNA sense strand
gcucugauuuuaaugguaa

SEQ ID NO: 2508633 - RNA, 19 nt, Homo sapiens
  misc_RNA (1)...(19): siRNA sense strand
ugggaaggcuguaccaaaa

SEQ ID NO: 2508634 - RNA, 19 nt, Homo sapiens
  misc_RNA (1)...(19): siRNA sense strand
gcaaugugguccagggccu

SEQ ID NO: 2508635 - RNA, 19 nt, Homo sapiens
  misc_RNA (1)...(19): siRNA sense strand
uugacaaaccagaugaaga

SEQ ID NO: 2508636 - RNA, 19 nt, Homo sapiens
  misc_RNA (1)...(19): siRNA sense strand
uaaaugugucaaugagcua

SEQ ID NO: 2508637 - RNA, 19 nt, Homo sapiens
  misc_RNA (1)...(19): siRNA sense strand
gggucaaugaguuuggaga

SEQ ID NO: 2508638 - RNA, 19 nt, Homo sapiens
  misc_RNA (1)...(19): siRNA sense strand
caguggaacuacggaaauu

SEQ ID NO: 2508639 - RNA, 19 nt, Homo sapiens
  misc_RNA (1)...(19): siRNA sense strand
cuaaucgacaagagaaaga

SEQ ID NO: 2508640 - RNA, 19 nt, Homo sapiens
  misc_RNA (1)...(19): siRNA sense strand
acucaagcccgcuauguaa

SEQ ID NO: 2508641 - RNA, 19 nt, Homo sapiens
  misc_RNA (1)...(19): siRNA sense strand
gugccaagauagacaaaug

SEQ ID NO: 2508642 - RNA, 19 nt, Homo sapiens
  misc_RNA (1)...(19): siRNA sense strand
gaugagaauuacugugauc

SEQ ID NO: 2508643 - RNA, 19 nt, Homo sapiens
  misc_RNA (1)...(19): siRNA sense strand
gccaagaaacggaggaaau

SEQ ID NO: 2508644 - RNA, 19 nt, Homo sapiens
  misc_RNA (1)...(19): siRNA sense strand
cgucaugggcuauguguaa

SEQ ID NO: 2508645 - RNA, 19 nt, Homo sapiens
  misc_RNA (1)...(19): siRNA sense strand
ggggaaaggucucgagaau

SEQ ID NO: 2508646 - RNA, 19 nt, Homo sapiens
  misc_RNA (1)...(19): siRNA sense strand
ggucaaugaguuuggagaa

SEQ ID NO: 2508647 - RNA, 19 nt, Homo sapiens
  misc_RNA (1)...(19): siRNA sense strand
agaggaaaccaguggagaa

SEQ ID NO: 2508648 - RNA, 19 nt, Homo sapiens
  misc_RNA (1)...(19): siRNA sense strand
ggauauagaaccuuggaca

SEQ ID NO: 2508649 - RNA, 19 nt, Homo sapiens
  misc_RNA (1)...(19): siRNA sense strand
guaaacaaagaaacggaaa

SEQ ID NO: 2508650 - RNA, 19 nt, Homo sapiens
  misc_RNA (1)...(19): siRNA sense strand
ggucaaggauauagaaccu

SEQ ID NO: 2508651 - RNA, 19 nt, Homo sapiens
  misc_RNA (1)...(19): siRNA sense strand
ccgagugacgagagagaau

SEQ ID NO: 2508652 - RNA, 19 nt, Homo sapiens
  misc_RNA (1)...(19): siRNA sense strand
ugauagaauagcagaugaa

SEQ ID NO: 2508653 - RNA, 19 nt, Homo sapiens
  misc_RNA (1)...(19): siRNA sense strand
aggaaggaccagucauuaa

SEQ ID NO: 2508654 - RNA, 19 nt, Homo sapiens
  misc_RNA (1)...(19): siRNA sense strand
gccaaauauuagaagauca

SEQ ID NO: 2508655 - RNA, 19 nt, Homo sapiens
  misc_RNA (1)...(19): siRNA sense strand
gcuuaaaccuccuacccaa

SEQ ID NO: 2508656 - RNA, 19 nt, Homo sapiens
  misc_RNA (1)...(19): siRNA sense strand
agagagaauugcaaugaau

SEQ ID NO: 2508657 - RNA, 19 nt, Homo sapiens
  misc_RNA (1)...(19): siRNA sense strand
ggacaaagugcuaguuacu

SEQ ID NO: 2508658 - RNA, 19 nt, Homo sapiens
  misc_RNA (1)...(19): siRNA sense strand
uaaugaaggcagaugggaa

SEQ ID NO: 2508659 - RNA, 19 nt, Homo sapiens
  misc_RNA (1)...(19): siRNA sense strand
aggcagaugggaaugaaua

SEQ ID NO: 2508660 - RNA, 19 nt, Homo sapiens
  misc_RNA (1)...(19): siRNA sense strand
acaaacauguggaggagga

SEQ ID NO: 2508661 - RNA, 19 nt, Homo sapiens
  misc_RNA (1)...(19): siRNA sense strand
guggcauguuauuggcaaa

SEQ ID NO: 2508662 - RNA, 19 nt, Homo sapiens
  misc_RNA (1)...(19): siRNA sense strand
gcuagcuagugcaguguua

SEQ ID NO: 2508663 - RNA, 19 nt, Homo sapiens
  misc_RNA (1)...(19): siRNA sense strand
cgagaaucuuauuguauga

SEQ ID NO: 2508664 - RNA, 19 nt, Homo sapiens
  misc_RNA (1)...(19): siRNA sense strand
aggacagaacggugaauau

SEQ ID NO: 2508665 - RNA, 19 nt, Homo sapiens
  misc_RNA (1)...(19): siRNA sense strand
ggaggaaggaccagucauu

SEQ ID NO: 2508666 - RNA, 19 nt, Homo sapiens
  misc_RNA (1)...(19): siRNA sense strand
ccuuacaguucuuguucaa

SEQ ID NO: 2508667 - RNA, 19 nt, Homo sapiens
  misc_RNA (1)...(19): siRNA sense strand
ucaacucacaggaggauua

SEQ ID NO: 2508668 - RNA, 19 nt, Homo sapiens
  misc_RNA (1)...(19): siRNA sense strand
aaugaaggcagaugggaau

SEQ ID NO: 2508669 - RNA, 19 nt, Homo sapiens
  misc_RNA (1)...(19): siRNA sense strand
guguuaaacuccagugcca

SEQ ID NO: 2508670 - RNA, 19 nt, Homo sapiens
  misc_RNA (1)...(19): siRNA sense strand
gaaaauggacaaagugcua

SEQ ID NO: 2508671 - RNA, 19 nt, Homo sapiens
  misc_RNA (1)...(19): siRNA sense strand
uuucauaccuacagcaaca

SEQ ID NO: 2508672 - RNA, 19 nt, Homo sapiens
  misc_RNA (1)...(19): siRNA sense strand
ugacaguuaccuugcauua

SEQ ID NO: 2508673 - RNA, 19 nt, Homo sapiens
  misc_RNA (1)...(19): siRNA sense strand
aaauaacgcaguugaaaga

SEQ ID NO: 2508674 - RNA, 19 nt, Homo sapiens
  misc_RNA (1)...(19): siRNA sense strand
ucgacaagagaaagaaauu

SEQ ID NO: 2508675 - RNA, 19 nt, Homo sapiens
  misc_RNA (1)...(19): siRNA sense strand
agguguuguguguggguaa

SEQ ID NO: 2508676 - RNA, 19 nt, Homo sapiens
  misc_RNA (1)...(19): siRNA sense strand
cggaaauauguuacugaau

SEQ ID NO: 2508677 - RNA, 19 nt, Homo sapiens
  misc_RNA (1)...(19): siRNA sense strand
gcuagugaauggagcgagu

SEQ ID NO: 2508678 - RNA, 19 nt, Homo sapiens
  misc_RNA (1)...(19): siRNA sense strand
uacacauaguagugguaaa

SEQ ID NO: 2508679 - RNA, 19 nt, Homo sapiens
  misc_RNA (1)...(19): siRNA sense strand
gucaaacuguagucggaaa

SEQ ID NO: 2508680 - RNA, 19 nt, Homo sapiens
  misc_RNA (1)...(19): siRNA sense strand
uacuaaucgacaagagaaa

SEQ ID NO: 2508681 - RNA, 19 nt, Homo sapiens
  misc_RNA (1)...(19): siRNA sense strand
gauauagaaccuuggacau

SEQ ID NO: 2508682 - RNA, 19 nt, Homo sapiens
  misc_RNA (1)...(19): siRNA sense strand
gaaagaugaaagaagacau

SEQ ID NO: 2508683 - RNA, 19 nt, Homo sapiens
  misc_RNA (1)...(19): siRNA sense strand
ggcaacaaacucagaauga

SEQ ID NO: 2508684 - RNA, 19 nt, Homo sapiens
  misc_RNA (1)...(19): siRNA sense strand
ggauaugguugaagauggu

SEQ ID NO: 2508685 - RNA, 19 nt, Homo sapiens
  misc_RNA (1)...(19): siRNA sense strand
aacauguggaggaggaaua

SEQ ID NO: 2508686 - RNA, 19 nt, Homo sapiens
  misc_RNA (1)...(19): siRNA sense strand
gcauugccgucaugggcua

SEQ ID NO: 2508687 - RNA, 19 nt, Homo sapiens
  misc_RNA (1)...(19): siRNA sense strand
gcacacaagacuuucgaga

SEQ ID NO: 2508688 - RNA, 19 nt, Homo sapiens
  misc_RNA (1)...(19): siRNA sense strand
cuguaaucguccugagcca

SEQ ID NO: 2508689 - RNA, 19 nt, Homo sapiens
  misc_RNA (1)...(19): siRNA sense strand
ccaagaaacggaggaaauu

SEQ ID NO: 2508690 - RNA, 19 nt, Homo sapiens
  misc_RNA (1)...(19): siRNA sense strand
ggaugaaaauggacaaagu

SEQ ID NO: 2508691 - RNA, 19 nt, Homo sapiens
  misc_RNA (1)...(19): siRNA sense strand
uggccaaauauuagaagau

SEQ ID NO: 2508692 - RNA, 19 nt, Homo sapiens
  misc_RNA (1)...(19): siRNA sense strand
ugggcuauguguaaacaaa

SEQ ID NO: 2508693 - RNA, 19 nt, Homo sapiens
  misc_RNA (1)...(19): siRNA sense strand
gugucaaggucuucagcga

SEQ ID NO: 2508694 - RNA, 19 nt, Homo sapiens
  misc_RNA (1)...(19): siRNA sense strand
ucgugaugcucuugauaga

SEQ ID NO: 2508695 - RNA, 19 nt, Homo sapiens
  misc_RNA (1)...(19): siRNA sense strand
caucaggaaccauggacau

SEQ ID NO: 2508696 - RNA, 19 nt, Homo sapiens
  misc_RNA (1)...(19): siRNA sense strand
augaauaugaagaugguca

SEQ ID NO: 2508697 - RNA, 19 nt, Homo sapiens
  misc_RNA (1)...(19): siRNA sense strand
aagaaagaguuuuaggaca

SEQ ID NO: 2508698 - RNA, 19 nt, Homo sapiens
  misc_RNA (1)...(19): siRNA sense strand
aaacaaagaaacggaaaca

SEQ ID NO: 2508699 - RNA, 19 nt, Homo sapiens
  misc_RNA (1)...(19): siRNA sense strand
guacuaaucgacaagagaa

SEQ ID NO: 2508700 - RNA, 19 nt, Homo sapiens
  misc_RNA (1)...(19): siRNA sense strand
ugacaaugaaugccaagaa

SEQ ID NO: 2508701 - RNA, 19 nt, Homo sapiens
  misc_RNA (1)...(19): siRNA sense strand
ugaauacaguggaucaaau

SEQ ID NO: 2508702 - RNA, 19 nt, Homo sapiens
  misc_RNA (1)...(19): siRNA sense strand
ucaauaucccuuuggaaga

SEQ ID NO: 2508703 - RNA, 19 nt, Homo sapiens
  misc_RNA (1)...(19): siRNA sense strand
ucucaguguuccaggaguu

SEQ ID NO: 2508704 - RNA, 19 nt, Homo sapiens
  misc_RNA (1)...(19): siRNA sense strand
gcucugauuuuaaugguaa

SEQ ID NO: 2508705 - RNA, 19 nt, Homo sapiens
  misc_RNA (1)...(19): siRNA sense strand
ugggaaggcuguaccaaaa

SEQ ID NO: 2508706 - RNA, 19 nt, Homo sapiens
  misc_RNA (1)...(19): siRNA sense strand
gcaaugugguccagggccu

SEQ ID NO: 2508707 - RNA, 19 nt, Homo sapiens
  misc_RNA (1)...(19): siRNA sense strand
uugacaaaccagaugaaga

SEQ ID NO: 2508708 - RNA, 19 nt, Homo sapiens
  misc_RNA (1)...(19): siRNA sense strand
uaaaugugucaaugagcua

SEQ ID NO: 2508709 - RNA, 19 nt, Homo sapiens
  misc_RNA (1)...(19): siRNA sense strand
gggucaaugaguuuggaga

SEQ ID NO: 2508710 - RNA, 19 nt, Homo sapiens
  misc_RNA (1)...(19): siRNA sense strand
caguggaacuacggaaauu

SEQ ID NO: 2508711 - RNA, 19 nt, Homo sapiens
  misc_RNA (1)...(19): siRNA sense strand
cuaaucgacaagagaaaga

SEQ ID NO: 2508712 - RNA, 19 nt, Homo sapiens
  misc_RNA (1)...(19): siRNA sense strand
acucaagcccgcuauguaa

SEQ ID NO: 2508713 - RNA, 19 nt, Homo sapiens
  misc_RNA (1)...(19): siRNA sense strand
gugccaagauagacaaaug

SEQ ID NO: 2508714 - RNA, 19 nt, Homo sapiens
  misc_RNA (1)...(19): siRNA sense strand
gaugagaauuacugugauc

SEQ ID NO: 2508715 - RNA, 19 nt, Homo sapiens
  misc_RNA (1)...(19): siRNA sense strand
cugaggacgcugagggaca

SEQ ID NO: 2508716 - RNA, 19 nt, Homo sapiens
  misc_RNA (1)...(19): siRNA sense strand
cgggcaggacccagauaaa

SEQ ID NO: 2508717 - RNA, 19 nt, Homo sapiens
  misc_RNA (1)...(19): siRNA sense strand
gagcagaacaugggagcca

SEQ ID NO: 2508718 - RNA, 19 nt, Homo sapiens
  misc_RNA (1)...(19): siRNA sense strand
cccuggugcugguggaaau

SEQ ID NO: 2508719 - RNA, 19 nt, Homo sapiens
  misc_RNA (1)...(19): siRNA sense strand
uggucaugguggaaggcuu

SEQ ID NO: 2508720 - RNA, 19 nt, Homo sapiens
  misc_RNA (1)...(19): siRNA sense strand
gaugaaagcuggaaaggag

SEQ ID NO: 2508721 - RNA, 19 nt, Homo sapiens
  misc_RNA (1)...(19): siRNA sense strand
gcacuaauuccaagaggca

SEQ ID NO: 2508722 - RNA, 19 nt, Homo sapiens
  misc_RNA (1)...(19): siRNA sense strand
cuggaaaggaggaggccca

SEQ ID NO: 2508723 - RNA, 19 nt, Homo sapiens
  misc_RNA (1)...(19): siRNA sense strand
cccuaaaggaugaacguca

SEQ ID NO: 2508724 - RNA, 19 nt, Homo sapiens
  misc_RNA (1)...(19): siRNA sense strand
ccucagaacuauaagaagc

SEQ ID NO: 2508725 - RNA, 19 nt, Homo sapiens
  misc_RNA (1)...(19): siRNA sense strand
uugaguugcgggaggagaa

SEQ ID NO: 2508726 - RNA, 19 nt, Homo sapiens
  misc_RNA (1)...(19): siRNA sense strand
cuuaaagagcaccaagaca

SEQ ID NO: 2508727 - RNA, 19 nt, Homo sapiens
  misc_RNA (1)...(19): siRNA sense strand
aagcaaaagcccagcacuu

SEQ ID NO: 2508728 - RNA, 19 nt, Homo sapiens
  misc_RNA (1)...(19): siRNA sense strand
gcaccaagacaucugccua

SEQ ID NO: 2508729 - RNA, 19 nt, Homo sapiens
  misc_RNA (1)...(19): siRNA sense strand
gggaggagaacacgaggca

SEQ ID NO: 2508730 - RNA, 19 nt, Homo sapiens
  misc_RNA (1)...(19): siRNA sense strand
gcagcagcucacugaagaa

SEQ ID NO: 2508731 - RNA, 19 nt, Homo sapiens
  misc_RNA (1)...(19): siRNA sense strand
acagaaacaaagauggcua

SEQ ID NO: 2508732 - RNA, 19 nt, Homo sapiens
  misc_RNA (1)...(19): siRNA sense strand
uggaggaugcagagaccua

SEQ ID NO: 2508733 - RNA, 19 nt, Homo sapiens
  misc_RNA (1)...(19): siRNA sense strand
ggaacauguuugugggcag

SEQ ID NO: 2508734 - RNA, 19 nt, Homo sapiens
  misc_RNA (1)...(19): siRNA sense strand
aguacgaccaugaggcuuu

SEQ ID NO: 2508735 - RNA, 19 nt, Homo sapiens
  misc_RNA (1)...(19): siRNA sense strand
cgggaaguggccaaggaau

SEQ ID NO: 2508736 - RNA, 19 nt, Homo sapiens
  misc_RNA (1)...(19): siRNA sense strand
cggcugagcaaagcggaaa

SEQ ID NO: 2508737 - RNA, 19 nt, Homo sapiens
  misc_RNA (1)...(19): siRNA sense strand
gcggcugagcaaagcggaa

SEQ ID NO: 2508738 - RNA, 19 nt, Homo sapiens
  misc_RNA (1)...(19): siRNA sense strand
guugggaggagcugcgcaa

SEQ ID NO: 2508739 - RNA, 19 nt, Homo sapiens
  misc_RNA (1)...(19): siRNA sense strand
cugaaacccuggaggaccu

SEQ ID NO: 2508740 - RNA, 19 nt, Homo sapiens
  misc_RNA (1)...(19): siRNA sense strand
aaguacaggaagaagguua

SEQ ID NO: 2508741 - RNA, 19 nt, Homo sapiens
  misc_RNA (1)...(19): siRNA sense strand
gaggaguguuauauggcaa

SEQ ID NO: 2508742 - RNA, 19 nt, Homo sapiens
  misc_RNA (1)...(19): siRNA sense strand
gaagaagguuaucuggcaa

SEQ ID NO: 2508743 - RNA, 19 nt, Homo sapiens
  misc_RNA (1)...(19): siRNA sense strand
ggaccaaagggaagggugu

SEQ ID NO: 2508744 - RNA, 19 nt, Homo sapiens
  misc_RNA (1)...(19): siRNA sense strand
caccauagcccguugggaa

SEQ ID NO: 2508745 - RNA, 19 nt, Homo sapiens
  misc_RNA (1)...(19): siRNA sense strand
auuagaagggagaagcaaa

SEQ ID NO: 2508746 - RNA, 19 nt, Homo sapiens
  misc_RNA (1)...(19): siRNA sense strand
acauauaaaaggaguggaa

SEQ ID NO: 2508747 - RNA, 19 nt, Homo sapiens
  misc_RNA (1)...(19): siRNA sense strand
agagaaagggauugaucuu

SEQ ID NO: 2508748 - RNA, 19 nt, Homo sapiens
  misc_RNA (1)...(19): siRNA sense strand
ggaagaagguuaucuggca

SEQ ID NO: 2508749 - RNA, 19 nt, Homo sapiens
  misc_RNA (1)...(19): siRNA sense strand
ggcaguagagaaagggauu

SEQ ID NO: 2508750 - RNA, 19 nt, Homo sapiens
  misc_RNA (1)...(19): siRNA sense strand
uguaaauaugggagaaguu

SEQ ID NO: 2508751 - RNA, 19 nt, Homo sapiens
  misc_RNA (1)...(19): siRNA sense strand
agaaguuggcaguagagaa

SEQ ID NO: 2508752 - RNA, 19 nt, Homo sapiens
  misc_RNA (1)...(19): siRNA sense strand
uaagauauuagaagggaga

SEQ ID NO: 2508753 - RNA, 19 nt, Homo sapiens
  misc_RNA (1)...(19): siRNA sense strand
caaagauacuuguugcuga

SEQ ID NO: 2508754 - RNA, 19 nt, Homo sapiens
  misc_RNA (1)...(19): siRNA sense strand
uuggcaagccugaggauau

SEQ ID NO: 2508755 - RNA, 19 nt, Homo sapiens
  misc_RNA (1)...(19): siRNA sense strand
guguuauauggcaaagaua

SEQ ID NO: 2508756 - RNA, 19 nt, Homo sapiens
  misc_RNA (1)...(19): siRNA sense strand
ggguuauugcacagcgauu

SEQ ID NO: 2508757 - RNA, 19 nt, Homo sapiens
  misc_RNA (1)...(19): siRNA sense strand
guuuugaaguacaggaaga

SEQ ID NO: 2508758 - RNA, 19 nt, Homo sapiens
  misc_RNA (1)...(19): siRNA sense strand
agggauugaucuuacacaa

SEQ ID NO: 2508759 - RNA, 19 nt, Homo sapiens
  misc_RNA (1)...(19): siRNA sense strand
aggguaaacuacagccaca

SEQ ID NO: 2508760 - RNA, 19 nt, Homo sapiens
  misc_RNA (1)...(19): siRNA sense strand
accauagcccguugggaaa

SEQ ID NO: 2508761 - RNA, 19 nt, Homo sapiens
  misc_RNA (1)...(19): siRNA sense strand
aagaagguuaucuggcaaa

SEQ ID NO: 2508762 - RNA, 19 nt, Homo sapiens
  misc_RNA (1)...(19): siRNA sense strand
cugaggauauugaggccuu

SEQ ID NO: 2508763 - RNA, 19 nt, Homo sapiens
  misc_RNA (1)...(19): siRNA sense strand
cagcaacauucgucggguu

SEQ ID NO: 2508764 - RNA, 19 nt, Homo sapiens
  misc_RNA (1)...(19): siRNA sense strand
agcaagagaggguaaacua

SEQ ID NO: 2508765 - RNA, 19 nt, Homo sapiens
  misc_RNA (1)...(19): siRNA sense strand
ggacaaaaucaaugaaggu

SEQ ID NO: 2508766 - RNA, 19 nt, Homo sapiens
  misc_RNA (1)...(19): siRNA sense strand
agagguugaaacugauaaa

SEQ ID NO: 2508767 - RNA, 19 nt, Homo sapiens
  misc_RNA (1)...(19): siRNA sense strand
acaguucagagaugggaaa

SEQ ID NO: 2508768 - RNA, 19 nt, Homo sapiens
  misc_RNA (1)...(19): siRNA sense strand
aguggaaaccauugcuaau

SEQ ID NO: 2508769 - RNA, 19 nt, Homo sapiens
  misc_RNA (1)...(19): siRNA sense strand
ccugaaggcacaagagaug

SEQ ID NO: 2508770 - RNA, 19 nt, Homo sapiens
  misc_RNA (1)...(19): siRNA sense strand
aaggagacuuacuggcaga

SEQ ID NO: 2508771 - RNA, 19 nt, Homo sapiens
  misc_RNA (1)...(19): siRNA sense strand
aguaaaagggacaggacca

SEQ ID NO: 2508772 - RNA, 19 nt, Homo sapiens
  misc_RNA (1)...(19): siRNA sense strand
cagauaucccaaucagcaa

SEQ ID NO: 2508773 - RNA, 19 nt, Homo sapiens
  misc_RNA (1)...(19): siRNA sense strand
uuagaagggagaagcaaaa

SEQ ID NO: 2508774 - RNA, 19 nt, Homo sapiens
  misc_RNA (1)...(19): siRNA sense strand
gaagcuaagugaaggagac

SEQ ID NO: 2508775 - RNA, 19 nt, Homo sapiens
  misc_RNA (1)...(19): siRNA sense strand
acuuacuggcagagauaga

SEQ ID NO: 2508776 - RNA, 19 nt, Homo sapiens
  misc_RNA (1)...(19): siRNA sense strand
aguacaggaagaagguuau

SEQ ID NO: 2508777 - RNA, 19 nt, Homo sapiens
  misc_RNA (1)...(19): siRNA sense strand
gguuugauguggcuagcau

SEQ ID NO: 2508778 - RNA, 19 nt, Homo sapiens
  misc_RNA (1)...(19): siRNA sense strand
aggaguguuauauggcaaa

SEQ ID NO: 2508779 - RNA, 19 nt, Homo sapiens
  misc_RNA (1)...(19): siRNA sense strand
aaccaaagcaagagagggu

SEQ ID NO: 2508780 - RNA, 19 nt, Homo sapiens
  misc_RNA (1)...(19): siRNA sense strand
gcugaagguaccagggaug

SEQ ID NO: 2508781 - RNA, 19 nt, Homo sapiens
  misc_RNA (1)...(19): siRNA sense strand
gggugagaagcuaagugaa

SEQ ID NO: 2508782 - RNA, 19 nt, Homo sapiens
  misc_RNA (1)...(19): siRNA sense strand
uugcaaagaaguuggcagu

SEQ ID NO: 2508783 - RNA, 19 nt, Homo sapiens
  misc_RNA (1)...(19): siRNA sense strand
caguagagaaagggauuga

SEQ ID NO: 2508784 - RNA, 19 nt, Homo sapiens
  misc_RNA (1)...(19): siRNA sense strand
aauuggugcuucagaggau

SEQ ID NO: 2508785 - RNA, 19 nt, Homo sapiens
  misc_RNA (1)...(19): siRNA sense strand
gcguauugcuaaaggagga

SEQ ID NO: 2508786 - RNA, 19 nt, Homo sapiens
  misc_RNA (1)...(19): siRNA sense strand
caaugagaaaggagaguau

SEQ ID NO: 2508787 - RNA, 19 nt, Homo sapiens
  misc_RNA (1)...(19): siRNA sense strand
gagaauugggaucggaaau

SEQ ID NO: 2508788 - RNA, 19 nt, Homo sapiens
  misc_RNA (1)...(19): siRNA sense strand
gcauaguagaccucguaaa

SEQ ID NO: 2508789 - RNA, 19 nt, Homo sapiens
  misc_RNA (1)...(19): siRNA sense strand
cuccagugauccagagaau

SEQ ID NO: 2508790 - RNA, 19 nt, Homo sapiens
  misc_RNA (1)...(19): siRNA sense strand
gagaguaugagguggcaga

SEQ ID NO: 2508791 - RNA, 19 nt, Homo sapiens
  misc_RNA (1)...(19): siRNA sense strand
ccguuguccugauggcaua

SEQ ID NO: 2508792 - RNA, 19 nt, Homo sapiens
  misc_RNA (1)...(19): siRNA sense strand
agaucaagagauagacgaa

SEQ ID NO: 2508793 - RNA, 19 nt, Homo sapiens
  misc_RNA (1)...(19): siRNA sense strand
augagguggcagagggaau

SEQ ID NO: 2508794 - RNA, 19 nt, Homo sapiens
  misc_RNA (1)...(19): siRNA sense strand
uugauugggaugaagaaua

SEQ ID NO: 2508795 - RNA, 19 nt, Homo sapiens
  misc_RNA (1)...(19): siRNA sense strand
auucgaauguccugggaga

SEQ ID NO: 2508796 - RNA, 19 nt, Homo sapiens
  misc_RNA (1)...(19): siRNA sense strand
gaacauaacuuuacacgac

SEQ ID NO: 2508797 - RNA, 19 nt, Homo sapiens
  misc_RNA (1)...(19): siRNA sense strand
cacagaugggagaagaaua

SEQ ID NO: 2508798 - RNA, 19 nt, Homo sapiens
  misc_RNA (1)...(19): siRNA sense strand
augagaaaggagaguauga

SEQ ID NO: 2508799 - RNA, 19 nt, Homo sapiens
  misc_RNA (1)...(19): siRNA sense strand
agagaauugggaucggaaa

SEQ ID NO: 2508800 - RNA, 19 nt, Homo sapiens
  misc_RNA (1)...(19): siRNA sense strand
agaagauuagauugggaau

SEQ ID NO: 2508801 - RNA, 19 nt, Homo sapiens
  misc_RNA (1)...(19): siRNA sense strand
gguugauugggaugaagaa

SEQ ID NO: 2508802 - RNA, 19 nt, Homo sapiens
  misc_RNA (1)...(19): siRNA sense strand
aagagauagacgaagguca

SEQ ID NO: 2508803 - RNA, 19 nt, Homo sapiens
  misc_RNA (1)...(19): siRNA sense strand
aggaaagagucggcaugua

SEQ ID NO: 2508804 - RNA, 19 nt, Homo sapiens
  misc_RNA (1)...(19): siRNA sense strand
gggcaggauguuuggaucu

SEQ ID NO: 2508805 - RNA, 19 nt, Homo sapiens
  misc_RNA (1)...(19): siRNA sense strand
aagaagauuagauugggaa

SEQ ID NO: 2508806 - RNA, 19 nt, Homo sapiens
  misc_RNA (1)...(19): siRNA sense strand
uacacgacccaaugagaaa

SEQ ID NO: 2508807 - RNA, 19 nt, Homo sapiens
  misc_RNA (1)...(19): siRNA sense strand
gggaauagaagguuauccu

SEQ ID NO: 2508808 - RNA, 19 nt, Homo sapiens
  misc_RNA (1)...(19): siRNA sense strand
agaugguagcuguaagaca

SEQ ID NO: 2508809 - RNA, 19 nt, Homo sapiens
  misc_RNA (1)...(19): siRNA sense strand
guagacuuucaguguguaa

SEQ ID NO: 2508810 - RNA, 19 nt, Homo sapiens
  misc_RNA (1)...(19): siRNA sense strand
uucaguguguaaagaguaa

SEQ ID NO: 2508811 - RNA, 19 nt, Homo sapiens
  misc_RNA (1)...(19): siRNA sense strand
ugaaaaugcaaaagaagga

SEQ ID NO: 2508812 - RNA, 19 nt, Homo sapiens
  misc_RNA (1)...(19): siRNA sense strand
cugcacagccaaauacaau

SEQ ID NO: 2508813 - RNA, 19 nt, Homo sapiens
  misc_RNA (1)...(19): siRNA sense strand
cagagaauugggaucggaa

SEQ ID NO: 2508814 - RNA, 19 nt, Homo sapiens
  misc_RNA (1)...(19): siRNA sense strand
ugcccuaaugcaugaguua

SEQ ID NO: 2508815 - RNA, 19 nt, Homo sapiens
  misc_RNA (1)...(19): siRNA sense strand
acgccaaggaccaggagua

SEQ ID NO: 2508816 - RNA, 19 nt, Homo sapiens
  misc_RNA (1)...(19): siRNA sense strand
gggagaagcucaagggugc

SEQ ID NO: 2508817 - RNA, 19 nt, Homo sapiens
  misc_RNA (1)...(19): siRNA sense strand
augugaagaaugaggaguu

SEQ ID NO: 2508818 - RNA, 19 nt, Homo sapiens
  misc_RNA (1)...(19): siRNA sense strand
cgugaugguauuauagaca

SEQ ID NO: 2508819 - RNA, 19 nt, Homo sapiens
  misc_RNA (1)...(19): siRNA sense strand
guauuauagacaaggagga

SEQ ID NO: 2508820 - RNA, 19 nt, Homo sapiens
  misc_RNA (1)...(19): siRNA sense strand
caggaggagaucaagaaca

SEQ ID NO: 2508821 - RNA, 19 nt, Homo sapiens
  misc_RNA (1)...(19): siRNA sense strand
agaugaagaacuugagaaa

SEQ ID NO: 2508822 - RNA, 19 nt, Homo sapiens
  misc_RNA (1)...(19): siRNA sense strand
cuacauggaaagagauaaa

SEQ ID NO: 2508823 - RNA, 19 nt, Homo sapiens
  misc_RNA (1)...(19): siRNA sense strand
cagaauuuaaagaggguaa

SEQ ID NO: 2508824 - RNA, 19 nt, Homo sapiens
  misc_RNA (1)...(19): siRNA sense strand
caaacauaguggcaggaaa

SEQ ID NO: 2508825 - RNA, 19 nt, Homo sapiens
  misc_RNA (1)...(19): siRNA sense strand
agaaacgguugaagaacaa

SEQ ID NO: 2508826 - RNA, 19 nt, Homo sapiens
  misc_RNA (1)...(19): siRNA sense strand
aucagaaagugcagaauaa

SEQ ID NO: 2508827 - RNA, 19 nt, Homo sapiens
  misc_RNA (1)...(19): siRNA sense strand
auugauagaugcuggcaaa

SEQ ID NO: 2508828 - RNA, 19 nt, Homo sapiens
  misc_RNA (1)...(19): siRNA sense strand
caguagaguucgaggugga

SEQ ID NO: 2508829 - RNA, 19 nt, Homo sapiens
  misc_RNA (1)...(19): siRNA sense strand
cugcaaacuuguacaaaca

SEQ ID NO: 2508830 - RNA, 19 nt, Homo sapiens
  misc_RNA (1)...(19): siRNA sense strand
gccaagaagagaaaguuaa

SEQ ID NO: 2508831 - RNA, 19 nt, Homo sapiens
  misc_RNA (1)...(19): siRNA sense strand
gucauuagccuguggcaaa

SEQ ID NO: 2508832 - RNA, 19 nt, Homo sapiens
  misc_RNA (1)...(19): siRNA sense strand
aaggaauggugaagcaauu

SEQ ID NO: 2508833 - RNA, 19 nt, Homo sapiens
  misc_RNA (1)...(19): siRNA sense strand
cgaauuaugaagaugagaa

SEQ ID NO: 2508834 - RNA, 19 nt, Homo sapiens
  misc_RNA (1)...(19): siRNA sense strand
agaagaagaagcagacaga

SEQ ID NO: 2508835 - RNA, 19 nt, Homo sapiens
  misc_RNA (1)...(19): siRNA sense strand
caagcaggcaacuggaaua

SEQ ID NO: 2508836 - RNA, 19 nt, Homo sapiens
  misc_RNA (1)...(19): siRNA sense strand
cgaagauggcugaggaauc

SEQ ID NO: 2508837 - RNA, 19 nt, Homo sapiens
  misc_RNA (1)...(19): siRNA sense strand
ugguaaaacuucaggagau

SEQ ID NO: 2508838 - RNA, 19 nt, Homo sapiens
  misc_RNA (1)...(19): siRNA sense strand
aaauaaaccagcugaacuu

SEQ ID NO: 2508839 - RNA, 19 nt, Homo sapiens
  misc_RNA (1)...(19): siRNA sense strand
gcaggaaacuucaguggca

SEQ ID NO: 2508840 - RNA, 19 nt, Homo sapiens
  misc_RNA (1)...(19): siRNA sense strand
ggauggagaguuaaggaga

SEQ ID NO: 2508841 - RNA, 19 nt, Homo sapiens
  misc_RNA (1)...(19): siRNA sense strand
uguacaaacagcugagaca

SEQ ID NO: 2508842 - RNA, 19 nt, Homo sapiens
  misc_RNA (1)...(19): siRNA sense strand
gcuaauguuuaaugaggga

SEQ ID NO: 2508843 - RNA, 19 nt, Homo sapiens
  misc_RNA (1)...(19): siRNA sense strand
acagaugaaaccuggcaaa

SEQ ID NO: 2508844 - RNA, 19 nt, Homo sapiens
  misc_RNA (1)...(19): siRNA sense strand
gguaaaacuucaggagauu

SEQ ID NO: 2508845 - RNA, 19 nt, Homo sapiens
  misc_RNA (1)...(19): siRNA sense strand
gaagagaucaagcaggcaa

SEQ ID NO: 2508846 - RNA, 19 nt, Homo sapiens
  misc_RNA (1)...(19): siRNA sense strand
agaaagacacuuagccaca

SEQ ID NO: 2508847 - RNA, 19 nt, Homo sapiens
  misc_RNA (1)...(19): siRNA sense strand
agaaguuagugaucaagaa

SEQ ID NO: 2508848 - RNA, 19 nt, Homo sapiens
  misc_RNA (1)...(19): siRNA sense strand
cuuacaagauuucugcaaa

SEQ ID NO: 2508849 - RNA, 19 nt, Homo sapiens
  misc_RNA (1)...(19): siRNA sense strand
aagaagaagcagacagacu

SEQ ID NO: 2508850 - RNA, 19 nt, Homo sapiens
  misc_RNA (1)...(19): siRNA sense strand
acuucuaggugaacacuua

SEQ ID NO: 2508851 - RNA, 19 nt, Homo sapiens
  misc_RNA (1)...(19): siRNA sense strand
cagaaagugcagaauaaga

SEQ ID NO: 2508852 - RNA, 19 nt, Homo sapiens
  misc_RNA (1)...(19): siRNA sense strand
uggugaagcaauugauaga

SEQ ID NO: 2508853 - RNA, 19 nt, Homo sapiens
  misc_RNA (1)...(19): siRNA sense strand
cuaugcagcugaaggccaa

SEQ ID NO: 2508854 - RNA, 19 nt, Homo sapiens
  misc_RNA (1)...(19): siRNA sense strand
aguaaagccugcugaucuu

SEQ ID NO: 2508855 - RNA, 19 nt, Homo sapiens
  misc_RNA (1)...(19): siRNA sense strand
agacauggaacuuucuaaa

SEQ ID NO: 2508856 - RNA, 19 nt, Homo sapiens
  misc_RNA (1)...(19): siRNA sense strand
gaguauuucaagacagaca

SEQ ID NO: 2508857 - RNA, 19 nt, Homo sapiens
  misc_RNA (1)...(19): siRNA sense strand
cgggaaauauugaguuaac

SEQ ID NO: 2508858 - RNA, 19 nt, Homo sapiens
  misc_RNA (1)...(19): siRNA sense strand
aagaugagaaagacacuua

SEQ ID NO: 2508859 - RNA, 19 nt, Homo sapiens
  misc_RNA (1)...(19): siRNA sense strand
gacuacauggaaagagaua

SEQ ID NO: 2508860 - RNA, 19 nt, Homo sapiens
  misc_RNA (1)...(19): siRNA sense strand
acaucaaagcacagauuca

SEQ ID NO: 2508861 - RNA, 19 nt, Homo sapiens
  misc_RNA (1)...(19): siRNA sense strand
cugugaauauccugacaau

SEQ ID NO: 2508862 - RNA, 19 nt, Homo sapiens
  misc_RNA (1)...(19): siRNA sense strand
agggagaggaguucaguuu

SEQ ID NO: 2508863 - RNA, 19 nt, Homo sapiens
  misc_RNA (1)...(19): siRNA sense strand
aagaguauuucaagacaga

SEQ ID NO: 2508864 - RNA, 19 nt, Homo sapiens
  misc_RNA (1)...(19): siRNA sense strand
acaugggacuggaguuauu

SEQ ID NO: 2508865 - RNA, 19 nt, Homo sapiens
  misc_RNA (1)...(19): siRNA sense strand
ugauugagagggaaaggaa

SEQ ID NO: 2508866 - RNA, 19 nt, Homo sapiens
  misc_RNA (1)...(19): siRNA sense strand
gagggaaaggaauggugaa

SEQ ID NO: 2508867 - RNA, 19 nt, Homo sapiens
  misc_RNA (1)...(19): siRNA sense strand
cuggaauagaggauggaga

SEQ ID NO: 2508868 - RNA, 19 nt, Homo sapiens
  misc_RNA (1)...(19): siRNA sense strand
aagcuagaguucuggcgaa

SEQ ID NO: 2508869 - RNA, 19 nt, Homo sapiens
  misc_RNA (1)...(19): siRNA sense strand
ugccaagaagagaaaguua

SEQ ID NO: 2508870 - RNA, 19 nt, Homo sapiens
  misc_RNA (1)...(19): siRNA sense strand
ccuggaguuuguaggguuu

SEQ ID NO: 2508871 - RNA, 19 nt, Homo sapiens
  misc_RNA (1)...(19): siRNA sense strand
uucaagaauugcuggauuu

SEQ ID NO: 2508872 - RNA, 19 nt, Homo sapiens
  misc_RNA (1)...(19): siRNA sense strand
aaacauaguggcaggaaac

SEQ ID NO: 2508873 - RNA, 19 nt, Homo sapiens
  misc_RNA (1)...(19): siRNA sense strand
agcuagaguucuggcgaaa

SEQ ID NO: 2508874 - RNA, 19 nt, Homo sapiens
  misc_RNA (1)...(19): siRNA sense strand
caaauccagaugaaagaaa

SEQ ID NO: 2508875 - RNA, 19 nt, Homo sapiens
  misc_RNA (1)...(19): siRNA sense strand
gcaacaaagaagcuacaga

SEQ ID NO: 2508876 - RNA, 19 nt, Homo sapiens
  misc_RNA (1)...(19): siRNA sense strand
ucaaacaguauaugcagaa

SEQ ID NO: 2508877 - RNA, 19 nt, Homo sapiens
  misc_RNA (1)...(19): siRNA sense strand
uccgggaaauauugaguua

SEQ ID NO: 2508878 - RNA, 19 nt, Homo sapiens
  misc_RNA (1)...(19): siRNA sense strand
cauugaagauggugacaag

SEQ ID NO: 2508879 - RNA, 19 nt, Homo sapiens
  misc_RNA (1)...(19): siRNA sense strand
ccacaaagucagcagcaga

SEQ ID NO: 2508880 - RNA, 19 nt, Homo sapiens
  misc_RNA (1)...(19): siRNA sense strand
cugugagaaacaauaguua

SEQ ID NO: 2508881 - RNA, 19 nt, Homo sapiens
  misc_RNA (1)...(19): siRNA sense strand
uuuugauggcugugagaaa

SEQ ID NO: 2508882 - RNA, 19 nt, Homo sapiens
  misc_RNA (1)...(19): siRNA sense strand
agucagaaaaggauaaaga

SEQ ID NO: 2508883 - RNA, 19 nt, Homo sapiens
  misc_RNA (1)...(19): siRNA sense strand
caguaacauccuugggagu

SEQ ID NO: 2508884 - RNA, 19 nt, Homo sapiens
  misc_RNA (1)...(19): siRNA sense strand
cagaagacaccaaagagca

SEQ ID NO: 2508885 - RNA, 19 nt, Homo sapiens
  misc_RNA (1)...(19): siRNA sense strand
uuuaagaaagccagugaca

SEQ ID NO: 2508886 - RNA, 19 nt, Homo sapiens
  misc_RNA (1)...(19): siRNA sense strand
ucagaaaaggauaaagaga

SEQ ID NO: 2508887 - RNA, 19 nt, Homo sapiens
  misc_RNA (1)...(19): siRNA sense strand
ucaucaucucugugcuaaa

SEQ ID NO: 2508888 - RNA, 19 nt, Homo sapiens
  misc_RNA (1)...(19): siRNA sense strand
ggaaccaagccaaggcgaa

SEQ ID NO: 2508889 - RNA, 19 nt, Homo sapiens
  misc_RNA (1)...(19): siRNA sense strand
gaagaaaggaacacgggca

SEQ ID NO: 2508890 - RNA, 19 nt, Homo sapiens
  misc_RNA (1)...(19): siRNA sense strand
cuauugaagaagugacuga

SEQ ID NO: 2508891 - RNA, 19 nt, Homo sapiens
  misc_RNA (1)...(19): siRNA sense strand
aauauuucauggagagcau

SEQ ID NO: 2508892 - RNA, 19 nt, Homo sapiens
  misc_RNA (1)...(19): siRNA sense strand
ugauaaagaagaaaggaac

SEQ ID NO: 2508893 - RNA, 19 nt, Homo sapiens
  misc_RNA (1)...(19): siRNA sense strand
aggaacaacaugccagaau

SEQ ID NO: 2508894 - RNA, 19 nt, Homo sapiens
  misc_RNA (1)...(19): siRNA sense strand
aagaaaggaacacgggcau

SEQ ID NO: 2508895 - RNA, 19 nt, Homo sapiens
  misc_RNA (1)...(19): siRNA sense strand
agaaaggaacacgggcaua

SEQ ID NO: 2508896 - RNA, 19 nt, Homo sapiens
  misc_RNA (1)...(19): siRNA sense strand
gaugacuauaugugggaca

SEQ ID NO: 2508897 - RNA, 19 nt, Homo sapiens
  misc_RNA (1)...(19): siRNA sense strand
cucuauuccaugugggauu

SEQ ID NO: 2508898 - RNA, 19 nt, Homo sapiens
  misc_RNA (1)...(19): siRNA sense strand
acaaauauuucauggagag

SEQ ID NO: 2508899 - RNA, 19 nt, Homo sapiens
  misc_RNA (1)...(19): siRNA sense strand
cgggaaacauggcgggaaa

SEQ ID NO: 2508900 - RNA, 19 nt, Homo sapiens
  misc_RNA (1)...(19): siRNA sense strand
ccacaaaggagaaaggaga

SEQ ID NO: 2508901 - RNA, 19 nt, Homo sapiens
  misc_RNA (1)...(19): siRNA sense strand
gauuauaagaucugggauu

SEQ ID NO: 2508902 - RNA, 19 nt, Homo sapiens
  misc_RNA (1)...(19): siRNA sense strand
aggcaaaggugacgaaaca

SEQ ID NO: 2508903 - RNA, 19 nt, Homo sapiens
  misc_RNA (1)...(19): siRNA sense strand
aagcaauauuacagggcaa

SEQ ID NO: 2508904 - RNA, 19 nt, Homo sapiens
  misc_RNA (1)...(19): siRNA sense strand
aggagaaaggagagaagaa

SEQ ID NO: 2508905 - RNA, 19 nt, Homo sapiens
  misc_RNA (1)...(19): siRNA sense strand
ggaaggaagccaagaacau

SEQ ID NO: 2508906 - RNA, 19 nt, Homo sapiens
  misc_RNA (1)...(19): siRNA sense strand
ugggagagguagauggcaa

SEQ ID NO: 2508907 - RNA, 19 nt, Homo sapiens
  misc_RNA (1)...(19): siRNA sense strand
aggcaaauguugggagaau

SEQ ID NO: 2508908 - RNA, 19 nt, Homo sapiens
  misc_RNA (1)...(19): siRNA sense strand
uguaaagaacaaaggacaa

SEQ ID NO: 2508909 - RNA, 19 nt, Homo sapiens
  misc_RNA (1)...(19): siRNA sense strand
ggccaaacccugaaggauu

SEQ ID NO: 2508910 - RNA, 19 nt, Homo sapiens
  misc_RNA (1)...(19): siRNA sense strand
ugaacaaggaggagaugua

SEQ ID NO: 2508911 - RNA, 19 nt, Homo sapiens
  misc_RNA (1)...(19): siRNA sense strand
cagagcaguaugagaguua

SEQ ID NO: 2508912 - RNA, 19 nt, Homo sapiens
  misc_RNA (1)...(19): siRNA sense strand
gcaagaagaugguaggacu

SEQ ID NO: 2508913 - RNA, 19 nt, Homo sapiens
  misc_RNA (1)...(19): siRNA sense strand
gcacaaaagauaaagagaa

SEQ ID NO: 2508914 - RNA, 19 nt, Homo sapiens
  misc_RNA (1)...(19): siRNA sense strand
agaaauacggcgugguuau

SEQ ID NO: 2508915 - RNA, 19 nt, Homo sapiens
  misc_RNA (1)...(19): siRNA sense strand
ccggaagacaucagcauua

SEQ ID NO: 2508916 - RNA, 19 nt, Homo sapiens
  misc_RNA (1)...(19): siRNA sense strand
gggagagguagauggcaaa

SEQ ID NO: 2508917 - RNA, 19 nt, Homo sapiens
  misc_RNA (1)...(19): siRNA sense strand
guguaaagaacaaaggaca

SEQ ID NO: 2508918 - RNA, 19 nt, Homo sapiens
  misc_RNA (1)...(19): siRNA sense strand
ccgcaaggucucucaguua

SEQ ID NO: 2508919 - RNA, 19 nt, Homo sapiens
  misc_RNA (1)...(19): siRNA sense strand
ugaacaaaucagaagggaa

SEQ ID NO: 2508920 - RNA, 19 nt, Homo sapiens
  misc_RNA (1)...(19): siRNA sense strand
aauugauggcucagagaua

SEQ ID NO: 2508921 - RNA, 19 nt, Homo sapiens
  misc_RNA (1)...(19): siRNA sense strand
aaucugugcuggaggaaau

SEQ ID NO: 2508922 - RNA, 19 nt, Homo sapiens
  misc_RNA (1)...(19): siRNA sense strand
ggaagauugcagagcagua

SEQ ID NO: 2508923 - RNA, 19 nt, Homo sapiens
  misc_RNA (1)...(19): siRNA sense strand
aggcagaagcucaguauuu

SEQ ID NO: 2508924 - RNA, 19 nt, Homo sapiens
  misc_RNA (1)...(19): siRNA sense strand
ggugaaaugaggaaugauu

SEQ ID NO: 2508925 - RNA, 19 nt, Homo sapiens
  misc_RNA (1)...(19): siRNA sense strand
agacaagacagaugcagaa

SEQ ID NO: 2508926 - RNA, 19 nt, Homo sapiens
  misc_RNA (1)...(19): siRNA sense strand
gugccugaauggaguuaua

SEQ ID NO: 2508927 - RNA, 19 nt, Homo sapiens
  misc_RNA (1)...(19): siRNA sense strand
caggagagacaaaggauga

SEQ ID NO: 2508928 - RNA, 19 nt, Homo sapiens
  misc_RNA (1)...(19): siRNA sense strand
ucgaaugggagcaggagaa

SEQ ID NO: 2508929 - RNA, 19 nt, Homo sapiens
  misc_RNA (1)...(19): siRNA sense strand
aggaagaacuaagggauuu

SEQ ID NO: 2508930 - RNA, 19 nt, Homo sapiens
  misc_RNA (1)...(19): siRNA sense strand
uaacaaggaagcugggauu

SEQ ID NO: 2508931 - RNA, 19 nt, Homo sapiens
  misc_RNA (1)...(19): siRNA sense strand
gagcaaagggucuggagca

SEQ ID NO: 2508932 - RNA, 19 nt, Homo sapiens
  misc_RNA (1)...(19): siRNA sense strand
auggagagguuguuagauu

SEQ ID NO: 2508933 - RNA, 19 nt, Homo sapiens
  misc_RNA (1)...(19): siRNA sense strand
aaacagaauggcagcgcaa

SEQ ID NO: 2508934 - RNA, 19 nt, Homo sapiens
  misc_RNA (1)...(19): siRNA sense strand
cgacaucggaagaaagaca

SEQ ID NO: 2508935 - RNA, 19 nt, Homo sapiens
  misc_RNA (1)...(19): siRNA sense strand
ucuugaggcugaauagaaa

SEQ ID NO: 2508936 - RNA, 19 nt, Homo sapiens
  misc_RNA (1)...(19): siRNA sense strand
gcuuagggauacaggaguu

SEQ ID NO: 2508937 - RNA, 19 nt, Homo sapiens
  misc_RNA (1)...(19): siRNA sense strand
gcucaguauuugcagauau

SEQ ID NO: 2508938 - RNA, 19 nt, Homo sapiens
  misc_RNA (1)...(19): siRNA sense strand
caauugaagugcuagaaaa

SEQ ID NO: 2508939 - RNA, 19 nt, Homo sapiens
  misc_RNA (1)...(19): siRNA sense strand
aaggaagaacuaagggauu

SEQ ID NO: 2508940 - RNA, 19 nt, Homo sapiens
  misc_RNA (1)...(19): siRNA sense strand
uuaaacagguggaagccaa

SEQ ID NO: 2508941 - RNA, 19 nt, Homo sapiens
  misc_RNA (1)...(19): siRNA sense strand
cacaaacauucccgagaaa

SEQ ID NO: 2508942 - RNA, 19 nt, Homo sapiens
  misc_RNA (1)...(19): siRNA sense strand
agaaaggagagaagaaguu

SEQ ID NO: 2508943 - RNA, 19 nt, Homo sapiens
  misc_RNA (1)...(19): siRNA sense strand
guaaaguuucugcaggaua

SEQ ID NO: 2508944 - RNA, 19 nt, Homo sapiens
  misc_RNA (1)...(19): siRNA sense strand
aagccaagcuaauugacaa

SEQ ID NO: 2508945 - RNA, 19 nt, Homo sapiens
  misc_RNA (1)...(19): siRNA sense strand
cugauaaaccggaacgaca

SEQ ID NO: 2508946 - RNA, 19 nt, Homo sapiens
  misc_RNA (1)...(19): siRNA sense strand
ucacagaagcagagcggca

SEQ ID NO: 2508947 - RNA, 19 nt, Homo sapiens
  misc_RNA (1)...(19): siRNA sense strand
caugaaaaugggagaggua

SEQ ID NO: 2508948 - RNA, 19 nt, Homo sapiens
  misc_RNA (1)...(19): siRNA sense strand
aguuauagaugcugcaguu

SEQ ID NO: 2508949 - RNA, 19 nt, Homo sapiens
  misc_RNA (1)...(19): siRNA sense strand
gcaaugaacaacugggacu

SEQ ID NO: 2508950 - RNA, 19 nt, Homo sapiens
  misc_RNA (1)...(19): siRNA sense strand
agaagaaguuguuuggguu

SEQ ID NO: 2508951 - RNA, 19 nt, Homo sapiens
  misc_RNA (1)...(19): siRNA sense strand
caugucggauagugggaaa

SEQ ID NO: 2508952 - RNA, 19 nt, Homo sapiens
  misc_RNA (1)...(19): siRNA sense strand
aggaaauagaugugauagu

SEQ ID NO: 2508953 - RNA, 19 nt, Homo sapiens
  misc_RNA (1)...(19): siRNA sense strand
cagcuacagcagugggauu

SEQ ID NO: 2508954 - RNA, 19 nt, Homo sapiens
  misc_RNA (1)...(19): siRNA sense strand
ggaccuggugccuaggaaa

SEQ ID NO: 2508955 - RNA, 19 nt, Homo sapiens
  misc_RNA (1)...(19): siRNA sense strand
ccuuugugcuuuaccauaa

SEQ ID NO: 2508956 - RNA, 19 nt, Homo sapiens
  misc_RNA (1)...(19): siRNA sense strand
gcaagagagcaaagggucu

SEQ ID NO: 2508957 - RNA, 19 nt, Homo sapiens
  misc_RNA (1)...(19): siRNA sense strand
acggagacauugaacaaau

SEQ ID NO: 2508958 - RNA, 19 nt, Homo sapiens
  misc_RNA (1)...(19): siRNA sense strand
aagaaaauugagcgggaaa

SEQ ID NO: 2508959 - RNA, 19 nt, Homo sapiens
  misc_RNA (1)...(19): siRNA sense strand
uauacuuggugcagaguuu

SEQ ID NO: 2508960 - RNA, 19 nt, Homo sapiens
  misc_RNA (1)...(19): siRNA sense strand
gggaauaauaaucaagcca

SEQ ID NO: 2508961 - RNA, 19 nt, Homo sapiens
  misc_RNA (1)...(19): siRNA sense strand
cugaagauggggagaaaau

SEQ ID NO: 2508962 - RNA, 19 nt, Homo sapiens
  misc_RNA (1)...(19): siRNA sense strand
gcauggagcugaaggagca

SEQ ID NO: 2508963 - RNA, 19 nt, Homo sapiens
  misc_RNA (1)...(19): siRNA sense strand
gggcuauaucugcggugaa

SEQ ID NO: 2508964 - RNA, 19 nt, Homo sapiens
  misc_RNA (1)...(19): siRNA sense strand
ugguggucuucgugggcaa

SEQ ID NO: 2508965 - RNA, 19 nt, Homo sapiens
  misc_RNA (1)...(19): siRNA sense strand
cgaccagcugaaagaaaga

SEQ ID NO: 2508966 - RNA, 19 nt, Homo sapiens
  misc_RNA (1)...(19): siRNA sense strand
aagaaagaccagugaacac

SEQ ID NO: 2508967 - RNA, 19 nt, Homo sapiens
  misc_RNA (1)...(19): siRNA sense strand
gagcagaucaaacggguga

SEQ ID NO: 2508968 - RNA, 19 nt, Homo sapiens
  misc_RNA (1)...(19): siRNA sense strand
ccauggugcugguggggaa

SEQ ID NO: 2508969 - RNA, 19 nt, Homo sapiens
  misc_RNA (1)...(19): siRNA sense strand
aguacagggagcagaucaa

SEQ ID NO: 2508970 - RNA, 19 nt, Homo sapiens
  misc_RNA (1)...(19): siRNA sense strand
agaucaaacgggugaagga

SEQ ID NO: 2508971 - RNA, 19 nt, Homo sapiens
  misc_RNA (1)...(19): siRNA sense strand
aauauaagcuggugguggu

SEQ ID NO: 2508972 - RNA, 19 nt, Homo sapiens
  misc_RNA (1)...(19): siRNA sense strand
caggaggaguacagcgcca

SEQ ID NO: 2508973 - RNA, 19 nt, Homo sapiens
  misc_RNA (1)...(19): siRNA sense strand
gagacgugccuguuggaca

SEQ ID NO: 2508974 - RNA, 19 nt, Homo sapiens
  misc_RNA (1)...(19): siRNA sense strand
gcugagaucccuagagcua

SEQ ID NO: 2508975 - RNA, 19 nt, Homo sapiens
  misc_RNA (1)...(19): siRNA sense strand
ucggagagauuauaggcaa

SEQ ID NO: 2508976 - RNA, 19 nt, Homo sapiens
  misc_RNA (1)...(19): siRNA sense strand
gcucagacugguagcuuca

SEQ ID NO: 2508977 - RNA, 19 nt, Homo sapiens
  misc_RNA (1)...(19): siRNA sense strand
guuuuaugucggagagauu

SEQ ID NO: 2508978 - RNA, 19 nt, Homo sapiens
  misc_RNA (1)...(19): siRNA sense strand
cggagagauuauaggcaag

SEQ ID NO: 2508979 - RNA, 19 nt, Homo sapiens
  misc_RNA (1)...(19): siRNA sense strand
ugagaucccuagagcuauu

SEQ ID NO: 2508980 - RNA, 19 nt, Homo sapiens
  misc_RNA (1)...(19): siRNA sense strand
acgaaaacuugguggagaa

SEQ ID NO: 2508981 - RNA, 19 nt, Homo sapiens
  misc_RNA (1)...(19): siRNA sense strand
ggaaagaugcccaugccua

SEQ ID NO: 2508982 - RNA, 19 nt, Homo sapiens
  misc_RNA (1)...(19): siRNA sense strand
cuacaacagccaagggaca

SEQ ID NO: 2508983 - RNA, 19 nt, Homo sapiens
  misc_RNA (1)...(19): siRNA sense strand
caguuugagaaauuggaua

SEQ ID NO: 2508984 - RNA, 19 nt, Homo sapiens
  misc_RNA (1)...(19): siRNA sense strand
cuguguaccuggagggaag

SEQ ID NO: 2508985 - RNA, 19 nt, Homo sapiens
  misc_RNA (1)...(19): siRNA sense strand
ucucagaccagcaggcgaa

SEQ ID NO: 2508986 - RNA, 19 nt, Homo sapiens
  misc_RNA (1)...(19): siRNA sense strand
agaucuucgccaagggcaa

SEQ ID NO: 2508987 - RNA, 19 nt, Homo sapiens
  misc_RNA (1)...(19): siRNA sense strand
ucagaacagugaaugggaa

SEQ ID NO: 2508988 - RNA, 19 nt, Homo sapiens
  misc_RNA (1)...(19): siRNA sense strand
uguucaugcucaauggcaa

SEQ ID NO: 2508989 - RNA, 19 nt, Homo sapiens
  misc_RNA (1)...(19): siRNA sense strand
agaccaacugugauggcua

SEQ ID NO: 2508990 - RNA, 19 nt, Homo sapiens
  misc_RNA (1)...(19): siRNA sense strand
augucauggugcuggagaa

SEQ ID NO: 2508991 - RNA, 19 nt, Homo sapiens
  misc_RNA (1)...(19): siRNA sense strand
cgaucuagccugaaaucca

SEQ ID NO: 2508992 - RNA, 19 nt, Homo sapiens
  misc_RNA (1)...(19): siRNA sense strand
aggaagaaugggaugaagu

SEQ ID NO: 2508993 - RNA, 19 nt, Homo sapiens
  misc_RNA (1)...(19): siRNA sense strand
agaagcagaccgagcugaa

SEQ ID NO: 2508994 - RNA, 19 nt, Homo sapiens
  misc_RNA (1)...(19): siRNA sense strand
cugccaucacauagaguau

SEQ ID NO: 2508995 - RNA, 19 nt, Homo sapiens
  misc_RNA (1)...(19): siRNA sense strand
gcauuaauguccuggcuuc

SEQ ID NO: 2508996 - RNA, 19 nt, Homo sapiens
  misc_RNA (1)...(19): siRNA sense strand
acuccaaggguuucggcua

SEQ ID NO: 2508997 - RNA, 19 nt, Homo sapiens
  misc_RNA (1)...(19): siRNA sense strand
uggaaauggaguccgaaga

SEQ ID NO: 2508998 - RNA, 19 nt, Homo sapiens
  misc_RNA (1)...(19): siRNA sense strand
uggagaaugccaaccacaa

SEQ ID NO: 2508999 - RNA, 19 nt, Homo sapiens
  misc_RNA (1)...(19): siRNA sense strand
caugaucagaacagugaau

SEQ ID NO: 2509000 - RNA, 19 nt, Homo sapiens
  misc_RNA (1)...(19): siRNA sense strand
gggaugaaguuggaggugu

SEQ ID NO: 2509001 - RNA, 19 nt, Homo sapiens
  misc_RNA (1)...(19): siRNA sense strand
ccuuuggaauagagaguaa

SEQ ID NO: 2509002 - RNA, 19 nt, Homo sapiens
  misc_RNA (1)...(19): siRNA sense strand
cuaccuuguugaagagaaa

SEQ ID NO: 2509003 - RNA, 19 nt, Homo sapiens
  misc_RNA (1)...(19): siRNA sense strand
caauaaagauucaugggau

SEQ ID NO: 2509004 - RNA, 19 nt, Homo sapiens
  misc_RNA (1)...(19): siRNA sense strand
gugaaaugccacaaggaau

SEQ ID NO: 2509005 - RNA, 19 nt, Homo sapiens
  misc_RNA (1)...(19): siRNA sense strand
cuucaaggaaagagccaaa

SEQ ID NO: 2509006 - RNA, 19 nt, Homo sapiens
  misc_RNA (1)...(19): siRNA sense strand
agacaaaugaucuugcaaa

SEQ ID NO: 2509007 - RNA, 19 nt, Homo sapiens
  misc_RNA (1)...(19): siRNA sense strand
gggcacaaaaugaaaguaa

SEQ ID NO: 2509008 - RNA, 19 nt, Homo sapiens
  misc_RNA (1)...(19): siRNA sense strand
agauuuacauguaggcauu

SEQ ID NO: 2509009 - RNA, 19 nt, Homo sapiens
  misc_RNA (1)...(19): siRNA sense strand
ugaacaaccaggaaagaau

SEQ ID NO: 2509010 - RNA, 19 nt, Homo sapiens
  misc_RNA (1)...(19): siRNA sense strand
gacaaaugaucuugcaaaa

SEQ ID NO: 2509011 - RNA, 19 nt, Homo sapiens
  misc_RNA (1)...(19): siRNA sense strand
gauauuaauuggugcagca

SEQ ID NO: 2509012 - RNA, 19 nt, Homo sapiens
  misc_RNA (1)...(19): siRNA sense strand
auuaauuggugcagcaaaa

SEQ ID NO: 2509013 - RNA, 19 nt, Homo sapiens
  misc_RNA (1)...(19): siRNA sense strand
uggaauagagaguaaucaa

SEQ ID NO: 2509014 - RNA, 19 nt, Homo sapiens
  misc_RNA (1)...(19): siRNA sense strand
uuaucaagcuauagugaca

SEQ ID NO: 2509015 - RNA, 19 nt, Homo sapiens
  misc_RNA (1)...(19): siRNA sense strand
ggaugcugucaaagaauua

SEQ ID NO: 2509016 - RNA, 19 nt, Homo sapiens
  misc_RNA (1)...(19): siRNA sense strand
ugaauauacaggacagauu

SEQ ID NO: 2509017 - RNA, 19 nt, Homo sapiens
  misc_RNA (1)...(19): siRNA sense strand
ugugauuggauguggagaa

SEQ ID NO: 2509018 - RNA, 19 nt, Homo sapiens
  misc_RNA (1)...(19): siRNA sense strand
gcacaaaaugaaaguaaca

SEQ ID NO: 2509019 - RNA, 19 nt, Homo sapiens
  misc_RNA (1)...(19): siRNA sense strand
ccggaaugugauugcuaaa

SEQ ID NO: 2509020 - RNA, 19 nt, Homo sapiens
  misc_RNA (1)...(19): siRNA sense strand
gauaaaacgaggaucgaau

SEQ ID NO: 2509021 - RNA, 19 nt, Homo sapiens
  misc_RNA (1)...(19): siRNA sense strand
ggucuuguuaacuggauua

SEQ ID NO: 2509022 - RNA, 19 nt, Homo sapiens
  misc_RNA (1)...(19): siRNA sense strand
aaguaacagaccugauuua

SEQ ID NO: 2509023 - RNA, 19 nt, Homo sapiens
  misc_RNA (1)...(19): siRNA sense strand
cugacuaccuuguugaaga

SEQ ID NO: 2509024 - RNA, 19 nt, Homo sapiens
  misc_RNA (1)...(19): siRNA sense strand
ggaggaagccagauugcau

SEQ ID NO: 2509025 - RNA, 19 nt, Homo sapiens
  misc_RNA (1)...(19): siRNA sense strand
ugugauugcuaaagcucua

SEQ ID NO: 2509026 - RNA, 19 nt, Homo sapiens
  misc_RNA (1)...(19): siRNA sense strand
gaaauugaauauaccguca

SEQ ID NO: 2509027 - RNA, 19 nt, Homo sapiens
  misc_RNA (1)...(19): siRNA sense strand
guuggaauacuuuggaauu

SEQ ID NO: 2509028 - RNA, 19 nt, Homo sapiens
  misc_RNA (1)...(19): siRNA sense strand
uggagauaccauuuguaaa

SEQ ID NO: 2509029 - RNA, 19 nt, Homo sapiens
  misc_RNA (1)...(19): siRNA sense strand
uuguaaaggaggugaaaug

SEQ ID NO: 2509030 - RNA, 19 nt, Homo sapiens
  misc_RNA (1)...(19): siRNA sense strand
acccaaagaaauaguaaca

SEQ ID NO: 2509031 - RNA, 19 nt, Homo sapiens
  misc_RNA (1)...(19): siRNA sense strand
aagucaagaagaugccaaa

SEQ ID NO: 2509032 - RNA, 19 nt, Homo sapiens
  misc_RNA (1)...(19): siRNA sense strand
caagcaucauaauuggaua

SEQ ID NO: 2509033 - RNA, 19 nt, Homo sapiens
  misc_RNA (1)...(19): siRNA sense strand
cagugaauuugguaagguu

SEQ ID NO: 2509034 - RNA, 19 nt, Homo sapiens
  misc_RNA (1)...(19): siRNA sense strand
cuguugaggugcaccaaau

SEQ ID NO: 2509035 - RNA, 19 nt, Homo sapiens
  misc_RNA (1)...(19): siRNA sense strand
gcugauaauccaagcaucu

SEQ ID NO: 2509036 - RNA, 19 nt, Homo sapiens
  misc_RNA (1)...(19): siRNA sense strand
gcaucugagcuuacccaaa

SEQ ID NO: 2509037 - RNA, 19 nt, Homo sapiens
  misc_RNA (1)...(19): siRNA sense strand
gagauuuacauguaggcau

SEQ ID NO: 2509038 - RNA, 19 nt, Homo sapiens
  misc_RNA (1)...(19): siRNA sense strand
gagauaguacagaacacaa

SEQ ID NO: 2509039 - RNA, 19 nt, Homo sapiens
  misc_RNA (1)...(19): siRNA sense strand
gcuauagugacaugauuau

SEQ ID NO: 2509040 - RNA, 19 nt, Homo sapiens
  misc_RNA (1)...(19): siRNA sense strand
caggauucgugauaggaca

SEQ ID NO: 2509041 - RNA, 19 nt, Homo sapiens
  misc_RNA (1)...(19): siRNA sense strand
acaacagugaauuugguaa

SEQ ID NO: 2509042 - RNA, 19 nt, Homo sapiens
  misc_RNA (1)...(19): siRNA sense strand
aauuaguacucauggagca

SEQ ID NO: 2509043 - RNA, 19 nt, Homo sapiens
  misc_RNA (1)...(19): siRNA sense strand
cuaaacaggcaauccggaa

SEQ ID NO: 2509044 - RNA, 19 nt, Homo sapiens
  misc_RNA (1)...(19): siRNA sense strand
cauuuguaaaggaggugaa

SEQ ID NO: 2509045 - RNA, 19 nt, Homo sapiens
  misc_RNA (1)...(19): siRNA sense strand
ugaugaggacuuaagguuu

SEQ ID NO: 2509046 - RNA, 19 nt, Homo sapiens
  misc_RNA (1)...(19): siRNA sense strand
agauaguacagaacacaau

SEQ ID NO: 2509047 - RNA, 19 nt, Homo sapiens
  misc_RNA (1)...(19): siRNA sense strand
acugauaagaauugcagau

SEQ ID NO: 2509048 - RNA, 19 nt, Homo sapiens
  misc_RNA (1)...(19): siRNA sense strand
agcuauagugacaugauua

SEQ ID NO: 2509049 - RNA, 19 nt, Homo sapiens
  misc_RNA (1)...(19): siRNA sense strand
ggaaguuagauuugugugu

SEQ ID NO: 2509050 - RNA, 19 nt, Homo sapiens
  misc_RNA (1)...(19): siRNA sense strand
gcagaugugcagaucaaaa

SEQ ID NO: 2509051 - RNA, 19 nt, Homo sapiens
  misc_RNA (1)...(19): siRNA sense strand
ggacuuaagguuucagaac

SEQ ID NO: 2509052 - RNA, 19 nt, Homo sapiens
  misc_RNA (1)...(19): siRNA sense strand
aaucaagcauauguggaaa

SEQ ID NO: 2509053 - RNA, 19 nt, Homo sapiens
  misc_RNA (1)...(19): siRNA sense strand
ggucuggaauuaaaggagu

SEQ ID NO: 2509054 - RNA, 19 nt, Homo sapiens
  misc_RNA (1)...(19): siRNA sense strand
gggucgugauguugucauu

SEQ ID NO: 2509055 - RNA, 19 nt, Homo sapiens
  misc_RNA (1)...(19): siRNA sense strand
ugacauguuuacagaguuc

SEQ ID NO: 2509056 - RNA, 19 nt, Homo sapiens
  misc_RNA (1)...(19): siRNA sense strand
caaagaaauaguaacacca

SEQ ID NO: 2509057 - RNA, 19 nt, Homo sapiens
  misc_RNA (1)...(19): siRNA sense strand
acgaaauacgagaggcaau

SEQ ID NO: 2509058 - RNA, 19 nt, Homo sapiens
  misc_RNA (1)...(19): siRNA sense strand
ccacgaaauacgagaggca

SEQ ID NO: 2509059 - RNA, 19 nt, Homo sapiens
  misc_RNA (1)...(19): siRNA sense strand
cagaaggcaucuuggagga

SEQ ID NO: 2509060 - RNA, 19 nt, Homo sapiens
  misc_RNA (1)...(19): siRNA sense strand
uguuuaagcacaauggcua

SEQ ID NO: 2509061 - RNA, 19 nt, Homo sapiens
  misc_RNA (1)...(19): siRNA sense strand
ucaaaguucuuaaggacca

SEQ ID NO: 2509062 - RNA, 19 nt, Homo sapiens
  misc_RNA (1)...(19): siRNA sense strand
cggcagaaggagaaaauga

SEQ ID NO: 2509063 - RNA, 19 nt, Homo sapiens
  misc_RNA (1)...(19): siRNA sense strand
uuacaaaugaagagacagu

SEQ ID NO: 2509064 - RNA, 19 nt, Homo sapiens
  misc_RNA (1)...(19): siRNA sense strand
cuaaaugcucucagguaca

SEQ ID NO: 2509065 - RNA, 19 nt, Homo sapiens
  misc_RNA (1)...(19): siRNA sense strand
ccggaauacagaagcagau

SEQ ID NO: 2509066 - RNA, 19 nt, Homo sapiens
  misc_RNA (1)...(19): siRNA sense strand
augaauuggcaaaucgaau

SEQ ID NO: 2509067 - RNA, 19 nt, Homo sapiens
  misc_RNA (1)...(19): siRNA sense strand
cuaauaguguggaaggucu

SEQ ID NO: 2509068 - RNA, 19 nt, Homo sapiens
  misc_RNA (1)...(19): siRNA sense strand
aggagcuggccacgaaaua

SEQ ID NO: 2509069 - RNA, 19 nt, Homo sapiens
  misc_RNA (1)...(19): siRNA sense strand
aggaaaagcauuagcaaaa

SEQ ID NO: 2509070 - RNA, 19 nt, Homo sapiens
  misc_RNA (1)...(19): siRNA sense strand
cagaagaaguugaagcaga

SEQ ID NO: 2509071 - RNA, 19 nt, Homo sapiens
  misc_RNA (1)...(19): siRNA sense strand
gugaagaagaagaagaaaa

SEQ ID NO: 2509072 - RNA, 19 nt, Homo sapiens
  misc_RNA (1)...(19): siRNA sense strand
aguugaagcagaagugaaa

SEQ ID NO: 2509073 - RNA, 19 nt, Homo sapiens
  misc_RNA (1)...(19): siRNA sense strand
uguuagaugacuuggauaa

SEQ ID NO: 2509074 - RNA, 19 nt, Homo sapiens
  misc_RNA (1)...(19): siRNA sense strand
ccucaaaucuagacgggau

SEQ ID NO: 2509075 - RNA, 19 nt, Homo sapiens
  misc_RNA (1)...(19): siRNA sense strand
aagaagaggaagaagaaaa

SEQ ID NO: 2509076 - RNA, 19 nt, Homo sapiens
  misc_RNA (1)...(19): siRNA sense strand
uuuggaagacagagggaua

SEQ ID NO: 2509077 - RNA, 19 nt, Homo sapiens
  misc_RNA (1)...(19): siRNA sense strand
agacagagggauaagaaaa

SEQ ID NO: 2509078 - RNA, 19 nt, Homo sapiens
  misc_RNA (1)...(19): siRNA sense strand
cugugaagaagaagaagaa

SEQ ID NO: 2509079 - RNA, 19 nt, Homo sapiens
  misc_RNA (1)...(19): siRNA sense strand
agguagauaaagaggauga

SEQ ID NO: 2509080 - RNA, 19 nt, Homo sapiens
  misc_RNA (1)...(19): siRNA sense strand
aagaaacaucugugaagaa

SEQ ID NO: 2509081 - RNA, 19 nt, Homo sapiens
  misc_RNA (1)...(19): siRNA sense strand
aaguugaagaagaggaaga

SEQ ID NO: 2509082 - RNA, 19 nt, Homo sapiens
  misc_RNA (1)...(19): siRNA sense strand
uugaagaagaggaagaaga

SEQ ID NO: 2509083 - RNA, 19 nt, Homo sapiens
  misc_RNA (1)...(19): siRNA sense strand
cagcucugauggagggcaa

SEQ ID NO: 2509084 - RNA, 19 nt, Homo sapiens
  misc_RNA (1)...(19): siRNA sense strand
gguugagaacuuuggaaga

SEQ ID NO: 2509085 - RNA, 19 nt, Homo sapiens
  misc_RNA (1)...(19): siRNA sense strand
gcaaaauagaacagguaga

SEQ ID NO: 2509086 - RNA, 19 nt, Homo sapiens
  misc_RNA (1)...(19): siRNA sense strand
aagaagaagaaaaggggua

SEQ ID NO: 2509087 - RNA, 19 nt, Homo sapiens
  misc_RNA (1)...(19): siRNA sense strand
gucccaaacacaaaggaaa

SEQ ID NO: 2509088 - RNA, 19 nt, Homo sapiens
  misc_RNA (1)...(19): siRNA sense strand
aauaaguggaacaggaaaa

SEQ ID NO: 2509089 - RNA, 19 nt, Homo sapiens
  misc_RNA (1)...(19): siRNA sense strand
aauugcuaguccagagaaa

SEQ ID NO: 2509090 - RNA, 19 nt, Homo sapiens
  misc_RNA (1)...(19): siRNA sense strand
caggaaaagcauuagcaaa

SEQ ID NO: 2509091 - RNA, 19 nt, Homo sapiens
  misc_RNA (1)...(19): siRNA sense strand
aguugagaacagagccaaa

SEQ ID NO: 2509092 - RNA, 19 nt, Homo sapiens
  misc_RNA (1)...(19): siRNA sense strand
aguuaaaguugaagaagag

SEQ ID NO: 2509093 - RNA, 19 nt, Homo sapiens
  misc_RNA (1)...(19): siRNA sense strand
cugcaaugggaguugagaa

SEQ ID NO: 2509094 - RNA, 19 nt, Homo sapiens
  misc_RNA (1)...(19): siRNA sense strand
ugaacuuaugagaggaauu

SEQ ID NO: 2509095 - RNA, 19 nt, Homo sapiens
  misc_RNA (1)...(19): siRNA sense strand
agaaaguuggcgauaggaa

SEQ ID NO: 2509096 - RNA, 19 nt, Homo sapiens
  misc_RNA (1)...(19): siRNA sense strand
ccauguaccagcacagcaa

SEQ ID NO: 2509097 - RNA, 19 nt, Homo sapiens
  misc_RNA (1)...(19): siRNA sense strand
cauuaugcgauguagagaa

SEQ ID NO: 2509098 - RNA, 19 nt, Homo sapiens
  misc_RNA (1)...(19): siRNA sense strand
gggccagacaagucccaaa

SEQ ID NO: 2509099 - RNA, 19 nt, Homo sapiens
  misc_RNA (1)...(19): siRNA sense strand
acacaaaagugaagugaag

SEQ ID NO: 2509100 - RNA, 19 nt, Homo sapiens
  misc_RNA (1)...(19): siRNA sense strand
caucugugaagaagaagaa

SEQ ID NO: 2509101 - RNA, 19 nt, Homo sapiens
  misc_RNA (1)...(19): siRNA sense strand
aagacagagggauaagaaa

SEQ ID NO: 2509102 - RNA, 19 nt, Homo sapiens
  misc_RNA (1)...(19): siRNA sense strand
ggaaagaauuugaaacucc

SEQ ID NO: 2509103 - RNA, 19 nt, Homo sapiens
  misc_RNA (1)...(19): siRNA sense strand
uggcagaagaagaagaaac

SEQ ID NO: 2509104 - RNA, 19 nt, Homo sapiens
  misc_RNA (1)...(19): siRNA sense strand
cagaagaagaagaaacauc

SEQ ID NO: 2509105 - RNA, 19 nt, Homo sapiens
  misc_RNA (1)...(19): siRNA sense strand
cagagaaagcaaacaaaau

SEQ ID NO: 2509106 - RNA, 19 nt, Homo sapiens
  misc_RNA (1)...(19): siRNA sense strand
ucauaaaggaaaagcugaa

SEQ ID NO: 2509107 - RNA, 19 nt, Homo sapiens
  misc_RNA (1)...(19): siRNA sense strand
agucaugguuggggaauua

SEQ ID NO: 2509108 - RNA, 19 nt, Homo sapiens
  misc_RNA (1)...(19): siRNA sense strand
uggaacaggaaaagcauua

SEQ ID NO: 2509109 - RNA, 19 nt, Homo sapiens
  misc_RNA (1)...(19): siRNA sense strand
auuaugcgauguagagaau

SEQ ID NO: 2509110 - RNA, 19 nt, Homo sapiens
  misc_RNA (1)...(19): siRNA sense strand
gcgauguagagaaugguau

SEQ ID NO: 2509111 - RNA, 19 nt, Homo sapiens
  misc_RNA (1)...(19): siRNA sense strand
aaguugaagcagaagugaa

SEQ ID NO: 2509112 - RNA, 19 nt, Homo sapiens
  misc_RNA (1)...(19): siRNA sense strand
ggguagaaccacgugaaau

SEQ ID NO: 2509113 - RNA, 19 nt, Homo sapiens
  misc_RNA (1)...(19): siRNA sense strand
ccaaauuagaggccagguu

SEQ ID NO: 2509114 - RNA, 19 nt, Homo sapiens
  misc_RNA (1)...(19): siRNA sense strand
aaauaaguggaacaggaaa

SEQ ID NO: 2509115 - RNA, 19 nt, Homo sapiens
  misc_RNA (1)...(19): siRNA sense strand
acgcaaaauagaacaggua

SEQ ID NO: 2509116 - RNA, 19 nt, Homo sapiens
  misc_RNA (1)...(19): siRNA sense strand
ggaugaaauuacugaaaag

SEQ ID NO: 2509117 - RNA, 19 nt, Homo sapiens
  misc_RNA (1)...(19): siRNA sense strand
ccagagaaagcaaacaaaa

SEQ ID NO: 2509118 - RNA, 19 nt, Homo sapiens
  misc_RNA (1)...(19): siRNA sense strand
cagacaagucccaaacaca

SEQ ID NO: 2509119 - RNA, 19 nt, Homo sapiens
  misc_RNA (1)...(19): siRNA sense strand
guuagaugacuuggauaaa

SEQ ID NO: 2509120 - RNA, 19 nt, Homo sapiens
  misc_RNA (1)...(19): siRNA sense strand
ggaguugagaacagagcca

SEQ ID NO: 2509121 - RNA, 19 nt, Homo sapiens
  misc_RNA (1)...(19): siRNA sense strand
gagccaaauuagaggccag

SEQ ID NO: 2509122 - RNA, 19 nt, Homo sapiens
  misc_RNA (1)...(19): siRNA sense strand
gaaacaucugugaagaaga

SEQ ID NO: 2509123 - RNA, 19 nt, Homo sapiens
  misc_RNA (1)...(19): siRNA sense strand
acacauuaaggaagaacca

SEQ ID NO: 2509124 - RNA, 19 nt, Homo sapiens
  misc_RNA (1)...(19): siRNA sense strand
gaggggucauaaaggaaaa

SEQ ID NO: 2509125 - RNA, 19 nt, Homo sapiens
  misc_RNA (1)...(19): siRNA sense strand
cucaaaucuagacgggaua

SEQ ID NO: 2509126 - RNA, 19 nt, Homo sapiens
  misc_RNA (1)...(19): siRNA sense strand
uugagaaauuucaggauac

SEQ ID NO: 2509127 - RNA, 19 nt, Homo sapiens
  misc_RNA (1)...(19): siRNA sense strand
gaacagaagaacaaaggga

SEQ ID NO: 2509128 - RNA, 19 nt, Homo sapiens
  misc_RNA (1)...(19): siRNA sense strand
agccggaacagaagaacaa

SEQ ID NO: 2509129 - RNA, 19 nt, Homo sapiens
  misc_RNA (1)...(19): siRNA sense strand
ugugaagacaagaacggaa

SEQ ID NO: 2509130 - RNA, 19 nt, Homo sapiens
  misc_RNA (1)...(19): siRNA sense strand
gcacaaacgcuguauccca

SEQ ID NO: 2509131 - RNA, 19 nt, Homo sapiens
  misc_RNA (1)...(19): siRNA sense strand
acagcugcccagagggauu

SEQ ID NO: 2509132 - RNA, 19 nt, Homo sapiens
  misc_RNA (1)...(19): siRNA sense strand
acagaagaacaaagggaag

SEQ ID NO: 2509133 - RNA, 19 nt, Homo sapiens
  misc_RNA (1)...(19): siRNA sense strand
cuuacaaaugugacagaua

SEQ ID NO: 2509134 - RNA, 19 nt, Homo sapiens
  misc_RNA (1)...(19): siRNA sense strand
agauaauaagggacggaga

SEQ ID NO: 2509135 - RNA, 19 nt, Homo sapiens
  misc_RNA (1)...(19): siRNA sense strand
cugaaaucaaccuuacaaa

SEQ ID NO: 2509136 - RNA, 19 nt, Homo sapiens
  misc_RNA (1)...(19): siRNA sense strand
aggaaaaguaugaacugaa

SEQ ID NO: 2509137 - RNA, 19 nt, Homo sapiens
  misc_RNA (1)...(19): siRNA sense strand
acgaaaagaaggagaucaa

SEQ ID NO: 2509138 - RNA, 19 nt, Homo sapiens
  misc_RNA (1)...(19): siRNA sense strand
ccaucgaggagcagaucaa

SEQ ID NO: 2509139 - RNA, 19 nt, Homo sapiens
  misc_RNA (1)...(19): siRNA sense strand
aggagaagguggaggagac

SEQ ID NO: 2509140 - RNA, 19 nt, Homo sapiens
  misc_RNA (1)...(19): siRNA sense strand
ccaugaugaagcagaaaga

SEQ ID NO: 2509141 - RNA, 19 nt, Homo sapiens
  misc_RNA (1)...(19): siRNA sense strand
acuccaugaugaagcagaa

SEQ ID NO: 2509142 - RNA, 19 nt, Homo sapiens
  misc_RNA (1)...(19): siRNA sense strand
ugggaagacagcagcguuu

SEQ ID NO: 2509143 - RNA, 19 nt, Homo sapiens
  misc_RNA (1)...(19): siRNA sense strand
guauaaagaagauccgcuu

SEQ ID NO: 2509144 - RNA, 19 nt, Homo sapiens
  misc_RNA (1)...(19): siRNA sense strand
uggaagaggccgaggugcu

SEQ ID NO: 2509145 - RNA, 19 nt, Homo sapiens
  misc_RNA (1)...(19): siRNA sense strand
uggugauggaugaggcaga

SEQ ID NO: 2509146 - RNA, 19 nt, Homo sapiens
  misc_RNA (1)...(19): siRNA sense strand
acccugaccuggaggccaa

SEQ ID NO: 2509147 - RNA, 19 nt, Homo sapiens
  misc_RNA (1)...(19): siRNA sense strand
aggccaagcgcaaggcuga

SEQ ID NO: 2509148 - RNA, 19 nt, Homo sapiens
  misc_RNA (1)...(19): siRNA sense strand
ucaaggagaagguggagga

SEQ ID NO: 2509149 - RNA, 19 nt, Homo sapiens
  misc_RNA (1)...(19): siRNA sense strand
ccucuagggcugaaagacu

SEQ ID NO: 2509150 - RNA, 19 nt, Homo sapiens
  misc_RNA (1)...(19): siRNA sense strand
ucaagaagaagcuggagga

SEQ ID NO: 2509151 - RNA, 19 nt, Homo sapiens
  misc_RNA (1)...(19): siRNA sense strand
gcuaagacaggcaguggga

SEQ ID NO: 2509152 - RNA, 19 nt, Homo sapiens
  misc_RNA (1)...(19): siRNA sense strand
caaagaaaugagagaggaa

SEQ ID NO: 2509153 - RNA, 19 nt, Homo sapiens
  misc_RNA (1)...(19): siRNA sense strand
agaaauaaaucaaggagga

SEQ ID NO: 2509154 - RNA, 19 nt, Homo sapiens
  misc_RNA (1)...(19): siRNA sense strand
aggaggaagaggaaggaaa

SEQ ID NO: 2509155 - RNA, 19 nt, Homo sapiens
  misc_RNA (1)...(19): siRNA sense strand
aggaagaaacuauggaauu

SEQ ID NO: 2509156 - RNA, 19 nt, Homo sapiens
  misc_RNA (1)...(19): siRNA sense strand
agaaaggcaaagagauaua

SEQ ID NO: 2509157 - RNA, 19 nt, Homo sapiens
  misc_RNA (1)...(19): siRNA sense strand
cugcaaagccuuagaaaau

SEQ ID NO: 2509158 - RNA, 19 nt, Homo sapiens
  misc_RNA (1)...(19): siRNA sense strand
cuuagagacucaagaggaa

SEQ ID NO: 2509159 - RNA, 19 nt, Homo sapiens
  misc_RNA (1)...(19): siRNA sense strand
cuugagaaguagugugauu

SEQ ID NO: 2509160 - RNA, 19 nt, Homo sapiens
  misc_RNA (1)...(19): siRNA sense strand
auuaauagcaucagagaga

SEQ ID NO: 2509161 - RNA, 19 nt, Homo sapiens
  misc_RNA (1)...(19): siRNA sense strand
gcaaagagauauagaggag

SEQ ID NO: 2509162 - RNA, 19 nt, Homo sapiens
  misc_RNA (1)...(19): siRNA sense strand
ucuagagagagaagagaaa

SEQ ID NO: 2509163 - RNA, 19 nt, Homo sapiens
  misc_RNA (1)...(19): siRNA sense strand
aaaugagagaggaaagaaa

SEQ ID NO: 2509164 - RNA, 19 nt, Homo sapiens
  misc_RNA (1)...(19): siRNA sense strand
uaauagcaucagagagaua

SEQ ID NO: 2509165 - RNA, 19 nt, Homo sapiens
  misc_RNA (1)...(19): siRNA sense strand
aggaaagagcucugaaaca

SEQ ID NO: 2509166 - RNA, 19 nt, Homo sapiens
  misc_RNA (1)...(19): siRNA sense strand
aaacagggaugguagggaa

SEQ ID NO: 2509167 - RNA, 19 nt, Homo sapiens
  misc_RNA (1)...(19): siRNA sense strand
gcaauauagaugacagaga

SEQ ID NO: 2509168 - RNA, 19 nt, Homo sapiens
  misc_RNA (1)...(19): siRNA sense strand
ggauggaggaugaugaaga

SEQ ID NO: 2509169 - RNA, 19 nt, Homo sapiens
  misc_RNA (1)...(19): siRNA sense strand
uggaggaggaggaggaaga

SEQ ID NO: 2509170 - RNA, 19 nt, Homo sapiens
  misc_RNA (1)...(19): siRNA sense strand
uuugaggagaugagggaaa

SEQ ID NO: 2509171 - RNA, 19 nt, Homo sapiens
  misc_RNA (1)...(19): siRNA sense strand
ccuaauagacucaaagcau

SEQ ID NO: 2509172 - RNA, 19 nt, Homo sapiens
  misc_RNA (1)...(19): siRNA sense strand
agaauagggcagaggacau

SEQ ID NO: 2509173 - RNA, 19 nt, Homo sapiens
  misc_RNA (1)...(19): siRNA sense strand
cugaaacaggaaagguaaa

SEQ ID NO: 2509174 - RNA, 19 nt, Homo sapiens
  misc_RNA (1)...(19): siRNA sense strand
aauaaaucaaggaggaaga

SEQ ID NO: 2509175 - RNA, 19 nt, Homo sapiens
  misc_RNA (1)...(19): siRNA sense strand
aagcauagagcuggagaaa

SEQ ID NO: 2509176 - RNA, 19 nt, Homo sapiens
  misc_RNA (1)...(19): siRNA sense strand
uaggaaggauggagaggau

SEQ ID NO: 2509177 - RNA, 19 nt, Homo sapiens
  misc_RNA (1)...(19): siRNA sense strand
ggaugaaggagcaguacuu

SEQ ID NO: 2509178 - RNA, 19 nt, Homo sapiens
  misc_RNA (1)...(19): siRNA sense strand
gcuagaggaggaagaggaa

SEQ ID NO: 2509179 - RNA, 19 nt, Homo sapiens
  misc_RNA (1)...(19): siRNA sense strand
uagaggaggaagaggaaca

SEQ ID NO: 2509180 - RNA, 19 nt, Homo sapiens
  misc_RNA (1)...(19): siRNA sense strand
gaggaagaaacuauggaau

SEQ ID NO: 2509181 - RNA, 19 nt, Homo sapiens
  misc_RNA (1)...(19): siRNA sense strand
gaauuuacagaaagagaga

SEQ ID NO: 2509182 - RNA, 19 nt, Homo sapiens
  misc_RNA (1)...(19): siRNA sense strand
acuggaugcuagaaguaaa

SEQ ID NO: 2509183 - RNA, 19 nt, Homo sapiens
  misc_RNA (1)...(19): siRNA sense strand
ucaaaguucugcuggaaaa

SEQ ID NO: 2509184 - RNA, 19 nt, Homo sapiens
  misc_RNA (1)...(19): siRNA sense strand
caguaguaggacagaguuu

SEQ ID NO: 2509185 - RNA, 19 nt, Homo sapiens
  misc_RNA (1)...(19): siRNA sense strand
ugcuagacuugcaaagaaa

SEQ ID NO: 2509186 - RNA, 19 nt, Homo sapiens
  misc_RNA (1)...(19): siRNA sense strand
uggaagaaaccuuaugcaa

SEQ ID NO: 2509187 - RNA, 19 nt, Homo sapiens
  misc_RNA (1)...(19): siRNA sense strand
gcacaaaacccaggaggaa

SEQ ID NO: 2509188 - RNA, 19 nt, Homo sapiens
  misc_RNA (1)...(19): siRNA sense strand
gcauuugauuuuaggggua

SEQ ID NO: 2509189 - RNA, 19 nt, Homo sapiens
  misc_RNA (1)...(19): siRNA sense strand
agguaaagaauucagagaa

SEQ ID NO: 2509190 - RNA, 19 nt, Homo sapiens
  misc_RNA (1)...(19): siRNA sense strand
agaauaaagaggagguuuu

SEQ ID NO: 2509191 - RNA, 19 nt, Homo sapiens
  misc_RNA (1)...(19): siRNA sense strand
aggaggaagaagaagaaga

SEQ ID NO: 2509192 - RNA, 19 nt, Homo sapiens
  misc_RNA (1)...(19): siRNA sense strand
auucaggugucuuggaaau

SEQ ID NO: 2509193 - RNA, 19 nt, Homo sapiens
  misc_RNA (1)...(19): siRNA sense strand
auacaaugcaaaugaccaa

SEQ ID NO: 2509194 - RNA, 19 nt, Homo sapiens
  misc_RNA (1)...(19): siRNA sense strand
gaggacauaauuaaggaaa

SEQ ID NO: 2509195 - RNA, 19 nt, Homo sapiens
  misc_RNA (1)...(19): siRNA sense strand
ggaaaauagaaggagaaaa

SEQ ID NO: 2509196 - RNA, 19 nt, Homo sapiens
  misc_RNA (1)...(19): siRNA sense strand
aaagcaugaaguugagaua

SEQ ID NO: 2509197 - RNA, 19 nt, Homo sapiens
  misc_RNA (1)...(19): siRNA sense strand
uaaaagaggagauuggaaa

SEQ ID NO: 2509198 - RNA, 19 nt, Homo sapiens
  misc_RNA (1)...(19): siRNA sense strand
gagauauagaggagagauc

SEQ ID NO: 2509199 - RNA, 19 nt, Homo sapiens
  misc_RNA (1)...(19): siRNA sense strand
ccucaaagucacuagagau

SEQ ID NO: 2509200 - RNA, 19 nt, Homo sapiens
  misc_RNA (1)...(19): siRNA sense strand
auccaaagaagcagacuua

SEQ ID NO: 2509201 - RNA, 19 nt, Homo sapiens
  misc_RNA (1)...(19): siRNA sense strand
auuaguaagcaauggagua

SEQ ID NO: 2509202 - RNA, 19 nt, Homo sapiens
  misc_RNA (1)...(19): siRNA sense strand
uugcuaagccagaggagau

SEQ ID NO: 2509203 - RNA, 19 nt, Homo sapiens
  misc_RNA (1)...(19): siRNA sense strand
uggaggaggaagaagaaga

SEQ ID NO: 2509204 - RNA, 19 nt, Homo sapiens
  misc_RNA (1)...(19): siRNA sense strand
ugagaaguagugugauuaa

SEQ ID NO: 2509205 - RNA, 19 nt, Homo sapiens
  misc_RNA (1)...(19): siRNA sense strand
gagaaaauaauaagggcuu

SEQ ID NO: 2509206 - RNA, 19 nt, Homo sapiens
  misc_RNA (1)...(19): siRNA sense strand
gagguaaagaauucagaga

SEQ ID NO: 2509207 - RNA, 19 nt, Homo sapiens
  misc_RNA (1)...(19): siRNA sense strand
agggaaaauagaaggagaa

SEQ ID NO: 2509208 - RNA, 19 nt, Homo sapiens
  misc_RNA (1)...(19): siRNA sense strand
ugaagaaagaauagacagu

SEQ ID NO: 2509209 - RNA, 19 nt, Homo sapiens
  misc_RNA (1)...(19): siRNA sense strand
aggacagaguuucagcaaa

SEQ ID NO: 2509210 - RNA, 19 nt, Homo sapiens
  misc_RNA (1)...(19): siRNA sense strand
gggaaaauagaaggagaaa

SEQ ID NO: 2509211 - RNA, 19 nt, Homo sapiens
  misc_RNA (1)...(19): siRNA sense strand
ucugaaacaggaaagguaa

SEQ ID NO: 2509212 - RNA, 19 nt, Homo sapiens
  misc_RNA (1)...(19): siRNA sense strand
gcuagaaguaaauggagca

SEQ ID NO: 2509213 - RNA, 19 nt, Homo sapiens
  misc_RNA (1)...(19): siRNA sense strand
agauaaacugaaacgcaua

SEQ ID NO: 2509214 - RNA, 19 nt, Homo sapiens
  misc_RNA (1)...(19): siRNA sense strand
ccaucaaagccucaagaau

SEQ ID NO: 2509215 - RNA, 19 nt, Homo sapiens
  misc_RNA (1)...(19): siRNA sense strand
ccgccugagaauugagauu

SEQ ID NO: 2509216 - RNA, 19 nt, Homo sapiens
  misc_RNA (1)...(19): siRNA sense strand
uugaagaagcucuggacau

SEQ ID NO: 2509217 - RNA, 19 nt, Homo sapiens
  misc_RNA (1)...(19): siRNA sense strand
acugaaacgcauaaccaaa

SEQ ID NO: 2509218 - RNA, 19 nt, Homo sapiens
  misc_RNA (1)...(19): siRNA sense strand
uagauaaacugaaacgcau

SEQ ID NO: 2509219 - RNA, 19 nt, Homo sapiens
  misc_RNA (1)...(19): siRNA sense strand
cuauacugacugugaguga

SEQ ID NO: 2509220 - RNA, 19 nt, Homo sapiens
  misc_RNA (1)...(19): siRNA sense strand
ugaaaauggacauggugaa

SEQ ID NO: 2509221 - RNA, 19 nt, Homo sapiens
  misc_RNA (1)...(19): siRNA sense strand
guagauaaacugaaacgca

SEQ ID NO: 2509222 - RNA, 19 nt, Homo sapiens
  misc_RNA (1)...(19): siRNA sense strand
agaccuuccuggaggccuu

SEQ ID NO: 2509223 - RNA, 19 nt, Homo sapiens
  misc_RNA (1)...(19): siRNA sense strand
cgguggacguggaggacau

SEQ ID NO: 2509224 - RNA, 19 nt, Homo sapiens
  misc_RNA (1)...(19): siRNA sense strand
gcgaauucgacgugagcuu

SEQ ID NO: 2509225 - RNA, 19 nt, Homo sapiens
  misc_RNA (1)...(19): siRNA sense strand
caggaggacugcugggaga

SEQ ID NO: 2509226 - RNA, 19 nt, Homo sapiens
  misc_RNA (1)...(19): siRNA sense strand
gcaucuguuuccagggaga

SEQ ID NO: 2509227 - RNA, 19 nt, Homo sapiens
  misc_RNA (1)...(19): siRNA sense strand
agaaucuagccgagaagaa

SEQ ID NO: 2509228 - RNA, 19 nt, Homo sapiens
  misc_RNA (1)...(19): siRNA sense strand
ggaacgagacgguggacgu

SEQ ID NO: 2509229 - RNA, 19 nt, Homo sapiens
  misc_RNA (1)...(19): siRNA sense strand
gucccaaagcagugcacaa

SEQ ID NO: 2509230 - RNA, 19 nt, Homo sapiens
  misc_RNA (1)...(19): siRNA sense strand
aggagaagcgggagcagga

SEQ ID NO: 2509231 - RNA, 19 nt, Homo sapiens
  misc_RNA (1)...(19): siRNA sense strand
gggagaacuuuguggugcu

SEQ ID NO: 2509232 - RNA, 19 nt, Homo sapiens
  misc_RNA (1)...(19): siRNA sense strand
aguacaaaugcgagaucga

SEQ ID NO: 2509233 - RNA, 19 nt, Homo sapiens
  misc_RNA (1)...(19): siRNA sense strand
uggccgugcuggauggcaa

SEQ ID NO: 2509234 - RNA, 19 nt, Homo sapiens
  misc_RNA (1)...(19): siRNA sense strand
cggacaucgagcaguacua

SEQ ID NO: 2509235 - RNA, 19 nt, Homo sapiens
  misc_RNA (1)...(19): siRNA sense strand
auggcaacguggugggcau

SEQ ID NO: 2509236 - RNA, 19 nt, Homo sapiens
  misc_RNA (1)...(19): siRNA sense strand
uggcuauggcuguggcuau

SEQ ID NO: 2509237 - RNA, 19 nt, Homo sapiens
  misc_RNA (1)...(19): siRNA sense strand
aggccugggcugugguuau

SEQ ID NO: 2509238 - RNA, 19 nt, Homo sapiens
  misc_RNA (1)...(19): siRNA sense strand
aggccugggcuguggcuau

SEQ ID NO: 2509239 - RNA, 19 nt, Homo sapiens
  misc_RNA (1)...(19): siRNA sense strand
ggaagaaggccaaggaagu

SEQ ID NO: 2509240 - RNA, 19 nt, Homo sapiens
  misc_RNA (1)...(19): siRNA sense strand
ccaaggaagugacgacuaa

SEQ ID NO: 2509241 - RNA, 19 nt, Homo sapiens
  misc_RNA (1)...(19): siRNA sense strand
cgacacaggugauggcgaa

SEQ ID NO: 2509242 - RNA, 19 nt, Homo sapiens
  misc_RNA (1)...(19): siRNA sense strand
aaaagaagguagugcagaa

SEQ ID NO: 2509243 - RNA, 19 nt, Homo sapiens
  misc_RNA (1)...(19): siRNA sense strand
agagauuaucaaaggagaa

SEQ ID NO: 2509244 - RNA, 19 nt, Homo sapiens
  misc_RNA (1)...(19): siRNA sense strand
acagaaaccgggaagggaa

SEQ ID NO: 2509245 - RNA, 19 nt, Homo sapiens
  misc_RNA (1)...(19): siRNA sense strand
agguagugcagaaggaaaa

SEQ ID NO: 2509246 - RNA, 19 nt, Homo sapiens
  misc_RNA (1)...(19): siRNA sense strand
acagaauugcagagauuau

SEQ ID NO: 2509247 - RNA, 19 nt, Homo sapiens
  misc_RNA (1)...(19): siRNA sense strand
aauacuaccugauggguga

SEQ ID NO: 2509248 - RNA, 19 nt, Homo sapiens
  misc_RNA (1)...(19): siRNA sense strand
ccaagggcuccgugaagaa

SEQ ID NO: 2509249 - RNA, 19 nt, Homo sapiens
  misc_RNA (1)...(19): siRNA sense strand
acguaaaugcccaggcuga

SEQ ID NO: 2509250 - RNA, 19 nt, Homo sapiens
  misc_RNA (1)...(19): siRNA sense strand
cgaccaugccucaggagau

SEQ ID NO: 2509251 - RNA, 19 nt, Homo sapiens
  misc_RNA (1)...(19): siRNA sense strand
gggaagaaggccaaggaag

SEQ ID NO: 2509252 - RNA, 19 nt, Homo sapiens
  misc_RNA (1)...(19): siRNA sense strand
ggaaaaggagggagaagca

SEQ ID NO: 2509253 - RNA, 19 nt, Homo sapiens
  misc_RNA (1)...(19): siRNA sense strand
uggagguggaggagcuuaa

SEQ ID NO: 2509254 - RNA, 19 nt, Homo sapiens
  misc_RNA (1)...(19): siRNA sense strand
aguucaucuuucagggcaa

SEQ ID NO: 2509255 - RNA, 19 nt, Homo sapiens
  misc_RNA (1)...(19): siRNA sense strand
agaagguagugcagaagga

SEQ ID NO: 2509256 - RNA, 19 nt, Homo sapiens
  misc_RNA (1)...(19): siRNA sense strand
cagagauuaucaaaggaga

SEQ ID NO: 2509257 - RNA, 19 nt, Homo sapiens
  misc_RNA (1)...(19): siRNA sense strand
aagguagugcagaaggaaa

SEQ ID NO: 2509258 - RNA, 19 nt, Homo sapiens
  misc_RNA (1)...(19): siRNA sense strand
uagaggaauucgaggccca

SEQ ID NO: 2509259 - RNA, 19 nt, Homo sapiens
  misc_RNA (1)...(19): siRNA sense strand
caguggaaaaggagggaga

SEQ ID NO: 2509260 - RNA, 19 nt, Homo sapiens
  misc_RNA (1)...(19): siRNA sense strand
ugaucaauuuggaggugga

SEQ ID NO: 2509261 - RNA, 19 nt, Homo sapiens
  misc_RNA (1)...(19): siRNA sense strand
caggagauccggaccgaga

SEQ ID NO: 2509262 - RNA, 19 nt, Homo sapiens
  misc_RNA (1)...(19): siRNA sense strand
gugaagaaaccgaggcgac

SEQ ID NO: 2509263 - RNA, 19 nt, Homo sapiens
  misc_RNA (1)...(19): siRNA sense strand
gccaaggaagugacgacua

SEQ ID NO: 2509264 - RNA, 19 nt, Homo sapiens
  misc_RNA (1)...(19): siRNA sense strand
cggcgauggaggaaaagaa

SEQ ID NO: 2509265 - RNA, 19 nt, Homo sapiens
  misc_RNA (1)...(19): siRNA sense strand
ugucaaacguaaaugccca

SEQ ID NO: 2509266 - RNA, 19 nt, Homo sapiens
  misc_RNA (1)...(19): siRNA sense strand
aagaguugucaaacguaaa

SEQ ID NO: 2509267 - RNA, 19 nt, Homo sapiens
  misc_RNA (1)...(19): siRNA sense strand
gcgagaagcuaguggaggu

SEQ ID NO: 2509268 - RNA, 19 nt, Homo sapiens
  misc_RNA (1)...(19): siRNA sense strand
gggagcaguacgaggaaca

SEQ ID NO: 2509269 - RNA, 19 nt, Homo sapiens
  misc_RNA (1)...(19): siRNA sense strand
ccuauaucguguaccgcaa

SEQ ID NO: 2509270 - RNA, 19 nt, Homo sapiens
  misc_RNA (1)...(19): siRNA sense strand
accuggaccuaguggagaa

SEQ ID NO: 2509271 - RNA, 19 nt, Homo sapiens
  misc_RNA (1)...(19): siRNA sense strand
uggagaacauuaagcacca

SEQ ID NO: 2509272 - RNA, 19 nt, Homo sapiens
  misc_RNA (1)...(19): siRNA sense strand
gagcaggaguacaagcgga

SEQ ID NO: 2509273 - RNA, 19 nt, Homo sapiens
  misc_RNA (1)...(19): siRNA sense strand
uggaccuaguggagaacau

SEQ ID NO: 2509274 - RNA, 19 nt, Homo sapiens
  misc_RNA (1)...(19): siRNA sense strand
ggacagugaucgcuggaga

SEQ ID NO: 2509275 - RNA, 19 nt, Homo sapiens
  misc_RNA (1)...(19): siRNA sense strand
ccagaaaggguguggguac

SEQ ID NO: 2509276 - RNA, 19 nt, Homo sapiens
  misc_RNA (1)...(19): siRNA sense strand
cggcggagcuaaugggucu

SEQ ID NO: 2509277 - RNA, 19 nt, Homo sapiens
  misc_RNA (1)...(19): siRNA sense strand
ccuacaacuccaugaucaa

SEQ ID NO: 2509278 - RNA, 19 nt, Homo sapiens
  misc_RNA (1)...(19): siRNA sense strand
uagaaaugacaaagggaau

SEQ ID NO: 2509279 - RNA, 19 nt, Homo sapiens
  misc_RNA (1)...(19): siRNA sense strand
acuucaaagagauggauaa

SEQ ID NO: 2509280 - RNA, 19 nt, Homo sapiens
  misc_RNA (1)...(19): siRNA sense strand
cuucaaagagauggauaaa

SEQ ID NO: 2509281 - RNA, 19 nt, Homo sapiens
  misc_RNA (1)...(19): siRNA sense strand
gugcauacaaacuagaaaa

SEQ ID NO: 2509282 - RNA, 19 nt, Homo sapiens
  misc_RNA (1)...(19): siRNA sense strand
uuagaaaugacaaagggaa

SEQ ID NO: 2509283 - RNA, 19 nt, Homo sapiens
  misc_RNA (1)...(19): siRNA sense strand
ccgaaauugaaucaguaau

SEQ ID NO: 2509284 - RNA, 19 nt, Homo sapiens
  misc_RNA (1)...(19): siRNA sense strand
ccgaagaggaggaggagga

SEQ ID NO: 2509285 - RNA, 19 nt, Homo sapiens
  misc_RNA (1)...(19): siRNA sense strand
cgaccgaagaggaggagga

SEQ ID NO: 2509286 - RNA, 19 nt, Homo sapiens
  misc_RNA (1)...(19): siRNA sense strand
gaaacuuccuccuggccaa

SEQ ID NO: 2509287 - RNA, 19 nt, Homo sapiens
  misc_RNA (1)...(19): siRNA sense strand
aggccaagguucugaccca

SEQ ID NO: 2509288 - RNA, 19 nt, Homo sapiens
  misc_RNA (1)...(19): siRNA sense strand
agagcgagucugaugggaa

SEQ ID NO: 2509289 - RNA, 19 nt, Homo sapiens
  misc_RNA (1)...(19): siRNA sense strand
uggaggagcccuuggaacu

SEQ ID NO: 2509290 - RNA, 19 nt, Homo sapiens
  misc_RNA (1)...(19): siRNA sense strand
acaaguaucgacugcgcaa

SEQ ID NO: 2509291 - RNA, 19 nt, Homo sapiens
  misc_RNA (1)...(19): siRNA sense strand
gugaaaacgcaggggauaa

SEQ ID NO: 2509292 - RNA, 19 nt, Homo sapiens
  misc_RNA (1)...(19): siRNA sense strand
ccaaauagcuucaagugcu

SEQ ID NO: 2509293 - RNA, 19 nt, Homo sapiens
  misc_RNA (1)...(19): siRNA sense strand
ggucuugcugugaaggaau

SEQ ID NO: 2509294 - RNA, 19 nt, Homo sapiens
  misc_RNA (1)...(19): siRNA sense strand
cugagaucuggaagaaaua

SEQ ID NO: 2509295 - RNA, 19 nt, Homo sapiens
  misc_RNA (1)...(19): siRNA sense strand
ugacaaauauucugagccu

SEQ ID NO: 2509296 - RNA, 19 nt, Homo sapiens
  misc_RNA (1)...(19): siRNA sense strand
ggaagaaauauggagguga

SEQ ID NO: 2509297 - RNA, 19 nt, Homo sapiens
  misc_RNA (1)...(19): siRNA sense strand
gaagaaauauggaggugag

SEQ ID NO: 2509298 - RNA, 19 nt, Homo sapiens
  misc_RNA (1)...(19): siRNA sense strand
gaaauauggaggugagccu

SEQ ID NO: 2509299 - RNA, 19 nt, Homo sapiens
  misc_RNA (1)...(19): siRNA sense strand
cauugagauuugggaggaa

SEQ ID NO: 2509300 - RNA, 19 nt, Homo sapiens
  misc_RNA (1)...(19): siRNA sense strand
agaagaaagaagugcugga

SEQ ID NO: 2509301 - RNA, 19 nt, Homo sapiens
  misc_RNA (1)...(19): siRNA sense strand
gggagaacaacaacagcca

SEQ ID NO: 2509302 - RNA, 19 nt, Homo sapiens
  misc_RNA (1)...(19): siRNA sense strand
agaaaauagaugaugcaga

SEQ ID NO: 2509303 - RNA, 19 nt, Homo sapiens
  misc_RNA (1)...(19): siRNA sense strand
cugagaaugugguggagga

SEQ ID NO: 2509304 - RNA, 19 nt, Homo sapiens
  misc_RNA (1)...(19): siRNA sense strand
uggagagaagcgaggacaa

SEQ ID NO: 2509305 - RNA, 19 nt, Homo sapiens
  misc_RNA (1)...(19): siRNA sense strand
aggagaagaccaaggccau

SEQ ID NO: 2509306 - RNA, 19 nt, Homo sapiens
  misc_RNA (1)...(19): siRNA sense strand
ccuucauggagcuggacaa

SEQ ID NO: 2509307 - RNA, 19 nt, Homo sapiens
  misc_RNA (1)...(19): siRNA sense strand
gaggagaagaccaaggcca

SEQ ID NO: 2509308 - RNA, 19 nt, Homo sapiens
  misc_RNA (1)...(19): siRNA sense strand
agugcaaccuggagagaag

SEQ ID NO: 2509309 - RNA, 19 nt, Homo sapiens
  misc_RNA (1)...(19): siRNA sense strand
uggcagucccagagagcaa

SEQ ID NO: 2509310 - RNA, 19 nt, Homo sapiens
  misc_RNA (1)...(19): siRNA sense strand
agacauuaccaucgagaca

SEQ ID NO: 2509311 - RNA, 19 nt, Homo sapiens
  misc_RNA (1)...(19): siRNA sense strand
uguccuuccuagagggcaa

SEQ ID NO: 2509312 - RNA, 19 nt, Homo sapiens
  misc_RNA (1)...(19): siRNA sense strand
ccaaaaugaagaagaucaa

SEQ ID NO: 2509313 - RNA, 19 nt, Homo sapiens
  misc_RNA (1)...(19): siRNA sense strand
ugcaugaggcugagggcaa

SEQ ID NO: 2509314 - RNA, 19 nt, Homo sapiens
  misc_RNA (1)...(19): siRNA sense strand
ugauggaguuuauggccaa

SEQ ID NO: 2509315 - RNA, 19 nt, Homo sapiens
  misc_RNA (1)...(19): siRNA sense strand
agaucaaguuucagcacau

SEQ ID NO: 2509316 - RNA, 19 nt, Homo sapiens
  misc_RNA (1)...(19): siRNA sense strand
cauugaagaagcugccaaa

SEQ ID NO: 2509317 - RNA, 19 nt, Homo sapiens
  misc_RNA (1)...(19): siRNA sense strand
cagagaaaccugagaacac

SEQ ID NO: 2509318 - RNA, 19 nt, Homo sapiens
  misc_RNA (1)...(19): siRNA sense strand
guguggagcaggugagguu

SEQ ID NO: 2509319 - RNA, 19 nt, Homo sapiens
  misc_RNA (1)...(19): siRNA sense strand
acauacuccuggacagcaa

SEQ ID NO: 2509320 - RNA, 19 nt, Homo sapiens
  misc_RNA (1)...(19): siRNA sense strand
ccaggagccgagauggaaa

SEQ ID NO: 2509321 - RNA, 19 nt, Homo sapiens
  misc_RNA (1)...(19): siRNA sense strand
gggagguuaaugaggacau

SEQ ID NO: 2509322 - RNA, 19 nt, Homo sapiens
  misc_RNA (1)...(19): siRNA sense strand
gcugaagaguggagcgguc

SEQ ID NO: 2509323 - RNA, 19 nt, Homo sapiens
  misc_RNA (1)...(19): siRNA sense strand
agguagacguggacugcca

SEQ ID NO: 2509324 - RNA, 19 nt, Homo sapiens
  misc_RNA (1)...(19): siRNA sense strand
caacaaggugggcuggaca

SEQ ID NO: 2509325 - RNA, 19 nt, Homo sapiens
  misc_RNA (1)...(19): siRNA sense strand
cugccaaaaugaagaagau

SEQ ID NO: 2509326 - RNA, 19 nt, Homo sapiens
  misc_RNA (1)...(19): siRNA sense strand
ggguauugugauggaguuu

SEQ ID NO: 2509327 - RNA, 19 nt, Homo sapiens
  misc_RNA (1)...(19): siRNA sense strand
uguguaucuaugagaacaa

SEQ ID NO: 2509328 - RNA, 19 nt, Homo sapiens
  misc_RNA (1)...(19): siRNA sense strand
caaccgaguggaugaggau

SEQ ID NO: 2509329 - RNA, 19 nt, Homo sapiens
  misc_RNA (1)...(19): siRNA sense strand
gcaacauacuccuggacag

SEQ ID NO: 2509330 - RNA, 19 nt, Homo sapiens
  misc_RNA (1)...(19): siRNA sense strand
ccugagauguuccuggaga

SEQ ID NO: 2509331 - RNA, 19 nt, Homo sapiens
  misc_RNA (1)...(19): siRNA sense strand
ugguagaguaugugaggaa

SEQ ID NO: 2509332 - RNA, 19 nt, Homo sapiens
  misc_RNA (1)...(19): siRNA sense strand
cuuacaacgacgagggacu

SEQ ID NO: 2509333 - RNA, 19 nt, Homo sapiens
  misc_RNA (1)...(19): siRNA sense strand
gagaagaauccucagagca

SEQ ID NO: 2509334 - RNA, 19 nt, Homo sapiens
  misc_RNA (1)...(19): siRNA sense strand
ccggaaaugugaagacccu

SEQ ID NO: 2509335 - RNA, 19 nt, Homo sapiens
  misc_RNA (1)...(19): siRNA sense strand
aagaagaacaugauccuca

SEQ ID NO: 2509336 - RNA, 19 nt, Homo sapiens
  misc_RNA (1)...(19): siRNA sense strand
ugguagaguaugugaggaa

SEQ ID NO: 2509337 - RNA, 19 nt, Homo sapiens
  misc_RNA (1)...(19): siRNA sense strand
cuuacaacgacgagggacu

SEQ ID NO: 2509338 - RNA, 19 nt, Homo sapiens
  misc_RNA (1)...(19): siRNA sense strand
gagaagaauccucagagca

SEQ ID NO: 2509339 - RNA, 19 nt, Homo sapiens
  misc_RNA (1)...(19): siRNA sense strand
ccggaaaugugaagacccu

SEQ ID NO: 2509340 - RNA, 19 nt, Homo sapiens
  misc_RNA (1)...(19): siRNA sense strand
aagaagaacaugauccuca

SEQ ID NO: 2509341 - RNA, 19 nt, Homo sapiens
  misc_RNA (1)...(19): siRNA sense strand
agaugaaagaggagaugaa

SEQ ID NO: 2509342 - RNA, 19 nt, Homo sapiens
  misc_RNA (1)...(19): siRNA sense strand
cgggacaaguucagccaga

SEQ ID NO: 2509343 - RNA, 19 nt, Homo sapiens
  misc_RNA (1)...(19): siRNA sense strand
ugaugauagaagaggagau

SEQ ID NO: 2509344 - RNA, 19 nt, Homo sapiens
  misc_RNA (1)...(19): siRNA sense strand
aggagaugaaagaggagau

SEQ ID NO: 2509345 - RNA, 19 nt, Homo sapiens
  misc_RNA (1)...(19): siRNA sense strand
aggagguccgagaaggaaa

SEQ ID NO: 2509346 - RNA, 19 nt, Homo sapiens
  misc_RNA (1)...(19): siRNA sense strand
cagaagagaucauucagga

SEQ ID NO: 2509347 - RNA, 19 nt, Homo sapiens
  misc_RNA (1)...(19): siRNA sense strand
ucccgaauccagagaggaa

SEQ ID NO: 2509348 - RNA, 19 nt, Homo sapiens
  misc_RNA (1)...(19): siRNA sense strand
gacaaaguccugaccgcaa

SEQ ID NO: 2509349 - RNA, 19 nt, Homo sapiens
  misc_RNA (1)...(19): siRNA sense strand
ggauucaaauggaaggaca

SEQ ID NO: 2509350 - RNA, 19 nt, Homo sapiens
  misc_RNA (1)...(19): siRNA sense strand
gauucaaauggaaggacaa

SEQ ID NO: 2509351 - RNA, 19 nt, Homo sapiens
  misc_RNA (1)...(19): siRNA sense strand
ggucagagugcuggaggaa

SEQ ID NO: 2509352 - RNA, 19 nt, Homo sapiens
  misc_RNA (1)...(19): siRNA sense strand
gaguauagcauaaagccuu

SEQ ID NO: 2509353 - RNA, 19 nt, Homo sapiens
  misc_RNA (1)...(19): siRNA sense strand
acuugucaauguagagcaa

SEQ ID NO: 2509354 - RNA, 19 nt, Homo sapiens
  misc_RNA (1)...(19): siRNA sense strand
gaucaucgcccuuugggaa

SEQ ID NO: 2509355 - RNA, 19 nt, Homo sapiens
  misc_RNA (1)...(19): siRNA sense strand
gggaaaagcacguugucuu

SEQ ID NO: 2509356 - RNA, 19 nt, Homo sapiens
  misc_RNA (1)...(19): siRNA sense strand
uugucaauguagagcaaca

SEQ ID NO: 2509357 - RNA, 19 nt, Homo sapiens
  misc_RNA (1)...(19): siRNA sense strand
ggacaauauccuugccaac

SEQ ID NO: 2509358 - RNA, 19 nt, Homo sapiens
  misc_RNA (1)...(19): siRNA sense strand
ugauuuaacaccagcacau

SEQ ID NO: 2509359 - RNA, 19 nt, Homo sapiens
  misc_RNA (1)...(19): siRNA sense strand
ccucagagaagcaagaacu

SEQ ID NO: 2509360 - RNA, 19 nt, Homo sapiens
  misc_RNA (1)...(19): siRNA sense strand
guggauaagcacuggaaug

SEQ ID NO: 2509361 - RNA, 19 nt, Homo sapiens
  misc_RNA (1)...(19): siRNA sense strand
ggaggaaggugcugccauc

SEQ ID NO: 2509362 - RNA, 19 nt, Homo sapiens
  misc_RNA (1)...(19): siRNA sense strand
ucaaaugacauaaagacca

SEQ ID NO: 2509363 - RNA, 19 nt, Homo sapiens
  misc_RNA (1)...(19): siRNA sense strand
acuucagaacacagaaaga

SEQ ID NO: 2509364 - RNA, 19 nt, Homo sapiens
  misc_RNA (1)...(19): siRNA sense strand
ccucccagccucaggacaa

SEQ ID NO: 2509365 - RNA, 19 nt, Homo sapiens
  misc_RNA (1)...(19): siRNA sense strand
ugacccagcaaguggagaa

SEQ ID NO: 2509366 - RNA, 19 nt, Homo sapiens
  misc_RNA (1)...(19): siRNA sense strand
uuccagaaguuuaggcuga

SEQ ID NO: 2509367 - RNA, 19 nt, Homo sapiens
  misc_RNA (1)...(19): siRNA sense strand
guggagaaguggaggccuc

SEQ ID NO: 2509368 - RNA, 19 nt, Homo sapiens
  misc_RNA (1)...(19): siRNA sense strand
gcuucaacucuauggagau

SEQ ID NO: 2509369 - RNA, 19 nt, Homo sapiens
  misc_RNA (1)...(19): siRNA sense strand
ccacaagcaagaugggaag

SEQ ID NO: 2509370 - RNA, 19 nt, Homo sapiens
  misc_RNA (1)...(19): siRNA sense strand
agagcaaugaugaggacca

SEQ ID NO: 2509371 - RNA, 19 nt, Homo sapiens
  misc_RNA (1)...(19): siRNA sense strand
ccuccuccucagagagcaa

SEQ ID NO: 2509372 - RNA, 19 nt, Homo sapiens
  misc_RNA (1)...(19): siRNA sense strand
aggaagaggaagaugaaga

SEQ ID NO: 2509373 - RNA, 19 nt, Homo sapiens
  misc_RNA (1)...(19): siRNA sense strand
ccgaagaggacuuagaaaa

SEQ ID NO: 2509374 - RNA, 19 nt, Homo sapiens
  misc_RNA (1)...(19): siRNA sense strand
aggaagaugaagaagaaga

SEQ ID NO: 2509375 - RNA, 19 nt, Homo sapiens
  misc_RNA (1)...(19): siRNA sense strand
gaagaagaagauaaggcua

SEQ ID NO: 2509376 - RNA, 19 nt, Homo sapiens
  misc_RNA (1)...(19): siRNA sense strand
agacuaacccagaaguaau

SEQ ID NO: 2509377 - RNA, 19 nt, Homo sapiens
  misc_RNA (1)...(19): siRNA sense strand
ccaccaagaagcuggccaa

SEQ ID NO: 2509378 - RNA, 19 nt, Homo sapiens
  misc_RNA (1)...(19): siRNA sense strand
acgcuuacagaaugagaaa

SEQ ID NO: 2509379 - RNA, 19 nt, Homo sapiens
  misc_RNA (1)...(19): siRNA sense strand
cgaagaggacuuagaaaau

SEQ ID NO: 2509380 - RNA, 19 nt, Homo sapiens
  misc_RNA (1)...(19): siRNA sense strand
augaagaguuuguuggcuu

SEQ ID NO: 2509381 - RNA, 19 nt, Homo sapiens
  misc_RNA (1)...(19): siRNA sense strand
ugaacaucaaggagaacaa

SEQ ID NO: 2509382 - RNA, 19 nt, Homo sapiens
  misc_RNA (1)...(19): siRNA sense strand
cggaagaguuuuacagcuu

SEQ ID NO: 2509383 - RNA, 19 nt, Homo sapiens
  misc_RNA (1)...(19): siRNA sense strand
ugagcgaggaagaggaaga

SEQ ID NO: 2509384 - RNA, 19 nt, Homo sapiens
  misc_RNA (1)...(19): siRNA sense strand
aagaggaagaugaagaaga

SEQ ID NO: 2509385 - RNA, 19 nt, Homo sapiens
  misc_RNA (1)...(19): siRNA sense strand
cuuagaaaauguugccaua

SEQ ID NO: 2509386 - RNA, 19 nt, Homo sapiens
  misc_RNA (1)...(19): siRNA sense strand
uggccaaguuuuaugguua

SEQ ID NO: 2509387 - RNA, 19 nt, Homo sapiens
  misc_RNA (1)...(19): siRNA sense strand
cucacuagagucagggaaa

SEQ ID NO: 2509388 - RNA, 19 nt, Homo sapiens
  misc_RNA (1)...(19): siRNA sense strand
ggauuuacgcagagugauc

SEQ ID NO: 2509389 - RNA, 19 nt, Homo sapiens
  misc_RNA (1)...(19): siRNA sense strand
cgacaaaagaccaucgaca

SEQ ID NO: 2509390 - RNA, 19 nt, Homo sapiens
  misc_RNA (1)...(19): siRNA sense strand
cuugaaagaaagaaagacu

SEQ ID NO: 2509391 - RNA, 19 nt, Homo sapiens
  misc_RNA (1)...(19): siRNA sense strand
guuaaggaauaucuggaga

SEQ ID NO: 2509392 - RNA, 19 nt, Homo sapiens
  misc_RNA (1)...(19): siRNA sense strand
aggagcugguagaagacaa

SEQ ID NO: 2509393 - RNA, 19 nt, Homo sapiens
  misc_RNA (1)...(19): siRNA sense strand
agaagagcuaagaagaauu

SEQ ID NO: 2509394 - RNA, 19 nt, Homo sapiens
  misc_RNA (1)...(19): siRNA sense strand
cuaaauuugcggaagaguu

SEQ ID NO: 2509395 - RNA, 19 nt, Homo sapiens
  misc_RNA (1)...(19): siRNA sense strand
ggugagcgaggaagaggaa

SEQ ID NO: 2509396 - RNA, 19 nt, Homo sapiens
  misc_RNA (1)...(19): siRNA sense strand
cugaaaaggaccaugaaca

SEQ ID NO: 2509397 - RNA, 19 nt, Homo sapiens
  misc_RNA (1)...(19): siRNA sense strand
aggucuagaagaaguagua

SEQ ID NO: 2509398 - RNA, 19 nt, Homo sapiens
  misc_RNA (1)...(19): siRNA sense strand
gaggaugacucucgggaug

SEQ ID NO: 2509399 - RNA, 19 nt, Homo sapiens
  misc_RNA (1)...(19): siRNA sense strand
ucuaggaagaagacaguga

SEQ ID NO: 2509400 - RNA, 19 nt, Homo sapiens
  misc_RNA (1)...(19): siRNA sense strand
ggagcugguagaagacaau

SEQ ID NO: 2509401 - RNA, 19 nt, Homo sapiens
  misc_RNA (1)...(19): siRNA sense strand
caggauuuacgcagaguga

SEQ ID NO: 2509402 - RNA, 19 nt, Homo sapiens
  misc_RNA (1)...(19): siRNA sense strand
aaguaauggucguggaguc

SEQ ID NO: 2509403 - RNA, 19 nt, Homo sapiens
  misc_RNA (1)...(19): siRNA sense strand
aguuauuggcggaauugaa

SEQ ID NO: 2509404 - RNA, 19 nt, Homo sapiens
  misc_RNA (1)...(19): siRNA sense strand
gggaaaugccgggaguaca

SEQ ID NO: 2509405 - RNA, 19 nt, Homo sapiens
  misc_RNA (1)...(19): siRNA sense strand
gucuagaagaaguaguauu

SEQ ID NO: 2509406 - RNA, 19 nt, Homo sapiens
  misc_RNA (1)...(19): siRNA sense strand
aagaagaagauaaggcuac

SEQ ID NO: 2509407 - RNA, 19 nt, Homo sapiens
  misc_RNA (1)...(19): siRNA sense strand
gauacaaagggaagauucu

SEQ ID NO: 2509408 - RNA, 19 nt, Homo sapiens
  misc_RNA (1)...(19): siRNA sense strand
ugaaaaggaccaugaacau

SEQ ID NO: 2509409 - RNA, 19 nt, Homo sapiens
  misc_RNA (1)...(19): siRNA sense strand
cccaguuauuggcggaauu

SEQ ID NO: 2509410 - RNA, 19 nt, Homo sapiens
  misc_RNA (1)...(19): siRNA sense strand
cagggaaacagcaggaugu

SEQ ID NO: 2509411 - RNA, 19 nt, Homo sapiens
  misc_RNA (1)...(19): siRNA sense strand
gagucagauuugagugaug

SEQ ID NO: 2509412 - RNA, 19 nt, Homo sapiens
  misc_RNA (1)...(19): siRNA sense strand
cagaaguaauggucgugga

SEQ ID NO: 2509413 - RNA, 19 nt, Homo sapiens
  misc_RNA (1)...(19): siRNA sense strand
ugauaaaguucuggguaac

SEQ ID NO: 2509414 - RNA, 19 nt, Homo sapiens
  misc_RNA (1)...(19): siRNA sense strand
cugcauugguggaggagga

SEQ ID NO: 2509415 - RNA, 19 nt, Homo sapiens
  misc_RNA (1)...(19): siRNA sense strand
gcaaggaaaucaaagacga

SEQ ID NO: 2509416 - RNA, 19 nt, Homo sapiens
  misc_RNA (1)...(19): siRNA sense strand
ccagaagcugcaaggaaau

SEQ ID NO: 2509417 - RNA, 19 nt, Homo sapiens
  misc_RNA (1)...(19): siRNA sense strand
ggacauaaucuguuuggca

SEQ ID NO: 2509418 - RNA, 19 nt, Homo sapiens
  misc_RNA (1)...(19): siRNA sense strand
aggccaaggaccugggcau

SEQ ID NO: 2509419 - RNA, 19 nt, Homo sapiens
  misc_RNA (1)...(19): siRNA sense strand
cggugaucccuguggucua

SEQ ID NO: 2509420 - RNA, 19 nt, Homo sapiens
  misc_RNA (1)...(19): siRNA sense strand
cccuauggccagcgggaau

SEQ ID NO: 2509421 - RNA, 19 nt, Homo sapiens
  misc_RNA (1)...(19): siRNA sense strand
gcaaagcagucuacccaga

SEQ ID NO: 2509422 - RNA, 19 nt, Homo sapiens
  misc_RNA (1)...(19): siRNA sense strand
acuacgacauccaggccaa

SEQ ID NO: 2509423 - RNA, 19 nt, Homo sapiens
  misc_RNA (1)...(19): siRNA sense strand
gaaggaaaguguuggacug

SEQ ID NO: 2509424 - RNA, 19 nt, Homo sapiens
  misc_RNA (1)...(19): siRNA sense strand
gagaaugacaugcguggga

SEQ ID NO: 2509425 - RNA, 19 nt, Homo sapiens
  misc_RNA (1)...(19): siRNA sense strand
gacauaaucuguuuggcau

SEQ ID NO: 2509426 - RNA, 19 nt, Homo sapiens
  misc_RNA (1)...(19): siRNA sense strand
ggaaugagggucaccggau

SEQ ID NO: 2509427 - RNA, 19 nt, Homo sapiens
  misc_RNA (1)...(19): siRNA sense strand
aggcuaacccggaggccaa

SEQ ID NO: 2509428 - RNA, 19 nt, Homo sapiens
  misc_RNA (1)...(19): siRNA sense strand
ugucagagcaagaggagga

SEQ ID NO: 2509429 - RNA, 19 nt, Homo sapiens
  misc_RNA (1)...(19): siRNA sense strand
cagagcaagaggaggaaaa

SEQ ID NO: 2509430 - RNA, 19 nt, Homo sapiens
  misc_RNA (1)...(19): siRNA sense strand
acgagauggcccugagaau

SEQ ID NO: 2509431 - RNA, 19 nt, Homo sapiens
  misc_RNA (1)...(19): siRNA sense strand
ggaucgucucuguggcuaa

SEQ ID NO: 2509432 - RNA, 19 nt, Homo sapiens
  misc_RNA (1)...(19): siRNA sense strand
agaucaagguuccaggaga

SEQ ID NO: 2509433 - RNA, 19 nt, Homo sapiens
  misc_RNA (1)...(19): siRNA sense strand
gagaaggaauguccgguga

SEQ ID NO: 2509434 - RNA, 19 nt, Homo sapiens
  misc_RNA (1)...(19): siRNA sense strand
ccuucagcgucucggcaaa

SEQ ID NO: 2509435 - RNA, 19 nt, Homo sapiens
  misc_RNA (1)...(19): siRNA sense strand
cggugaaacgggagcgacu

SEQ ID NO: 2509436 - RNA, 19 nt, Homo sapiens
  misc_RNA (1)...(19): siRNA sense strand
cggagagguuugacgucau

SEQ ID NO: 2509437 - RNA, 19 nt, Homo sapiens
  misc_RNA (1)...(19): siRNA sense strand
cggcaaagcgucaggaguc

SEQ ID NO: 2509438 - RNA, 19 nt, Homo sapiens
  misc_RNA (1)...(19): siRNA sense strand
gaucaagguuccaggagag

SEQ ID NO: 2509439 - RNA, 19 nt, Homo sapiens
  misc_RNA (1)...(19): siRNA sense strand
ccagagaccuccaaccaga

SEQ ID NO: 2509440 - RNA, 19 nt, Homo sapiens
  misc_RNA (1)...(19): siRNA sense strand
ccgacgaagcuauggagga

SEQ ID NO: 2509441 - RNA, 19 nt, Homo sapiens
  misc_RNA (1)...(19): siRNA sense strand
gguugaacugaaagagagu

SEQ ID NO: 2509442 - RNA, 19 nt, Homo sapiens
  misc_RNA (1)...(19): siRNA sense strand
uuuccuugcaagagguuua

SEQ ID NO: 2509443 - RNA, 19 nt, Homo sapiens
  misc_RNA (1)...(19): siRNA sense strand
cugugcaggcugugaguga

SEQ ID NO: 2509444 - RNA, 19 nt, Homo sapiens
  misc_RNA (1)...(19): siRNA sense strand
gcagaugcccggaugcuga

SEQ ID NO: 2509445 - RNA, 19 nt, Homo sapiens
  misc_RNA (1)...(19): siRNA sense strand
aggagaagguguuggacca

SEQ ID NO: 2509446 - RNA, 19 nt, Homo sapiens
  misc_RNA (1)...(19): siRNA sense strand
ggacagagaccauggugga

SEQ ID NO: 2509447 - RNA, 19 nt, Homo sapiens
  misc_RNA (1)...(19): siRNA sense strand
agcagaugguggagaggua

SEQ ID NO: 2509448 - RNA, 19 nt, Homo sapiens
  misc_RNA (1)...(19): siRNA sense strand
agaccaugguggagaaacu

SEQ ID NO: 2509449 - RNA, 19 nt, Homo sapiens
  misc_RNA (1)...(19): siRNA sense strand
uguacaggcacaagagcaa

SEQ ID NO: 2509450 - RNA, 19 nt, Homo sapiens
  misc_RNA (1)...(19): siRNA sense strand
cuguguggcuggaggcuga

SEQ ID NO: 2509451 - RNA, 19 nt, Homo sapiens
  misc_RNA (1)...(19): siRNA sense strand
cggacaauguggacgccau

SEQ ID NO: 2509452 - RNA, 19 nt, Homo sapiens
  misc_RNA (1)...(19): siRNA sense strand
acgcagaggugcaggcuuc

SEQ ID NO: 2509453 - RNA, 19 nt, Homo sapiens
  misc_RNA (1)...(19): siRNA sense strand
ucacagaccucaugacgga

SEQ ID NO: 2509454 - RNA, 19 nt, Homo sapiens
  misc_RNA (1)...(19): siRNA sense strand
ugcagaaguuuguggacga

SEQ ID NO: 2509455 - RNA, 19 nt, Homo sapiens
  misc_RNA (1)...(19): siRNA sense strand
uggcugagcucuccgggaa

SEQ ID NO: 2509456 - RNA, 19 nt, Homo sapiens
  misc_RNA (1)...(19): siRNA sense strand
gcuacaagcagauggugga

SEQ ID NO: 2509457 - RNA, 19 nt, Homo sapiens
  misc_RNA (1)...(19): siRNA sense strand
ccgacuacaacaacagcua

SEQ ID NO: 2509458 - RNA, 19 nt, Homo sapiens
  misc_RNA (1)...(19): siRNA sense strand
guuaugaggaggacagcca

SEQ ID NO: 2509459 - RNA, 19 nt, Homo sapiens
  misc_RNA (1)...(19): siRNA sense strand
cuggaguaccugacggaca

SEQ ID NO: 2509460 - RNA, 19 nt, Homo sapiens
  misc_RNA (1)...(19): siRNA sense strand
ccggauugugugugugaca

SEQ ID NO: 2509461 - RNA, 19 nt, Homo sapiens
  misc_RNA (1)...(19): siRNA sense strand
aggucaaggagaagguguu

SEQ ID NO: 2509462 - RNA, 19 nt, Homo sapiens
  misc_RNA (1)...(19): siRNA sense strand
cugcacaucuggaagacca

SEQ ID NO: 2509463 - RNA, 19 nt, Homo sapiens
  misc_RNA (1)...(19): siRNA sense strand
cagaguagccacugcgugu

SEQ ID NO: 2509464 - RNA, 19 nt, Homo sapiens
  misc_RNA (1)...(19): siRNA sense strand
uggaaaacaaagugacuga

SEQ ID NO: 2509465 - RNA, 19 nt, Homo sapiens
  misc_RNA (1)...(19): siRNA sense strand
acuuaacccuccaggcaca

SEQ ID NO: 2509466 - RNA, 19 nt, Homo sapiens
  misc_RNA (1)...(19): siRNA sense strand
ggaucaaccuccaggcuga

SEQ ID NO: 2509467 - RNA, 19 nt, Homo sapiens
  misc_RNA (1)...(19): siRNA sense strand
ccuacuucaccaagagaaa

SEQ ID NO: 2509468 - RNA, 19 nt, Homo sapiens
  misc_RNA (1)...(19): siRNA sense strand
aguaaauuguguuggaguu

SEQ ID NO: 2509469 - RNA, 19 nt, Homo sapiens
  misc_RNA (1)...(19): siRNA sense strand
uggcaggaauucagcgaga

SEQ ID NO: 2509470 - RNA, 19 nt, Homo sapiens
  misc_RNA (1)...(19): siRNA sense strand
cgacaggagcugaucaaca

SEQ ID NO: 2509471 - RNA, 19 nt, Homo sapiens
  misc_RNA (1)...(19): siRNA sense strand
gcuagaugcuggugugcca

SEQ ID NO: 2509472 - RNA, 19 nt, Homo sapiens
  misc_RNA (1)...(19): siRNA sense strand
gcaggaauucagcgagaga

SEQ ID NO: 2509473 - RNA, 19 nt, Homo sapiens
  misc_RNA (1)...(19): siRNA sense strand
ggagaaacuaugaugagca

SEQ ID NO: 2509474 - RNA, 19 nt, Homo sapiens
  misc_RNA (1)...(19): siRNA sense strand
acaccaaauccuacugcaa

SEQ ID NO: 2509475 - RNA, 19 nt, Homo sapiens
  misc_RNA (1)...(19): siRNA sense strand
caggaugcgaaguguaaau

SEQ ID NO: 2509476 - RNA, 19 nt, Homo sapiens
  misc_RNA (1)...(19): siRNA sense strand
uugcaaaggagguucaaaa

SEQ ID NO: 2509477 - RNA, 19 nt, Homo sapiens
  misc_RNA (1)...(19): siRNA sense strand
cugcaaauggucaguugua

SEQ ID NO: 2509478 - RNA, 19 nt, Homo sapiens
  misc_RNA (1)...(19): siRNA sense strand
guaacgugucccagucaaa

SEQ ID NO: 2509479 - RNA, 19 nt, Homo sapiens
  misc_RNA (1)...(19): siRNA sense strand
ccauauugccuucggagga

SEQ ID NO: 2509480 - RNA, 19 nt, Homo sapiens
  misc_RNA (1)...(19): siRNA sense strand
gauucugauaacuggcaaa

SEQ ID NO: 2509481 - RNA, 19 nt, Homo sapiens
  misc_RNA (1)...(19): siRNA sense strand
gagaauuuacagaaagcca

SEQ ID NO: 2509482 - RNA, 19 nt, Homo sapiens
  misc_RNA (1)...(19): siRNA sense strand
guguacuuguggugaccua

SEQ ID NO: 2509483 - RNA, 19 nt, Homo sapiens
  misc_RNA (1)...(19): siRNA sense strand
ugucauagaggaagaccuu

SEQ ID NO: 2509484 - RNA, 19 nt, Homo sapiens
  misc_RNA (1)...(19): siRNA sense strand
cauuaauggcccaguacca

SEQ ID NO: 2509485 - RNA, 19 nt, Homo sapiens
  misc_RNA (1)...(19): siRNA sense strand
cagaagaagaagucacacu

SEQ ID NO: 2509486 - RNA, 19 nt, Homo sapiens
  misc_RNA (1)...(19): siRNA sense strand
gcaugguguuggucgacau

SEQ ID NO: 2509487 - RNA, 19 nt, Homo sapiens
  misc_RNA (1)...(19): siRNA sense strand
gaguaaauuguguuggagu

SEQ ID NO: 2509488 - RNA, 19 nt, Homo sapiens
  misc_RNA (1)...(19): siRNA sense strand
uguugaaacucuuuaggga

SEQ ID NO: 2509489 - RNA, 19 nt, Homo sapiens
  misc_RNA (1)...(19): siRNA sense strand
gaguuauggauccaacaaa

SEQ ID NO: 2509490 - RNA, 19 nt, Homo sapiens
  misc_RNA (1)...(19): siRNA sense strand
aaacaggaugcgaagugua

SEQ ID NO: 2509491 - RNA, 19 nt, Homo sapiens
  misc_RNA (1)...(19): siRNA sense strand
uagaggaagaccuugcaaa

SEQ ID NO: 2509492 - RNA, 19 nt, Homo sapiens
  misc_RNA (1)...(19): siRNA sense strand
guugaaacucuuuagggau

SEQ ID NO: 2509493 - RNA, 19 nt, Homo sapiens
  misc_RNA (1)...(19): siRNA sense strand
agaagaagucacacuccaa

SEQ ID NO: 2509494 - RNA, 19 nt, Homo sapiens
  misc_RNA (1)...(19): siRNA sense strand
uguaaacagcaaagaugau

SEQ ID NO: 2509495 - RNA, 19 nt, Homo sapiens
  misc_RNA (1)...(19): siRNA sense strand
agacacaacuccagcaccu

SEQ ID NO: 2509496 - RNA, 19 nt, Homo sapiens
  misc_RNA (1)...(19): siRNA sense strand
gcuauggaggccugggcua

SEQ ID NO: 2509497 - RNA, 19 nt, Homo sapiens
  misc_RNA (1)...(19): siRNA sense strand
cagacugggcuguggcuau

SEQ ID NO: 2509498 - RNA, 19 nt, Homo sapiens
  misc_RNA (1)...(19): siRNA sense strand
aggccugggcuguggcuau

SEQ ID NO: 2509499 - RNA, 19 nt, Homo sapiens
  misc_RNA (1)...(19): siRNA sense strand
gugaagugagcgaggaaga

SEQ ID NO: 2509500 - RNA, 19 nt, Homo sapiens
  misc_RNA (1)...(19): siRNA sense strand
uguccaagaaagagagaga

SEQ ID NO: 2509501 - RNA, 19 nt, Homo sapiens
  misc_RNA (1)...(19): siRNA sense strand
cuguagagucccagcccua

SEQ ID NO: 2509502 - RNA, 19 nt, Homo sapiens
  misc_RNA (1)...(19): siRNA sense strand
gaaagagagagaagccaga

SEQ ID NO: 2509503 - RNA, 19 nt, Homo sapiens
  misc_RNA (1)...(19): siRNA sense strand
cugugaagugagcgaggaa

SEQ ID NO: 2509504 - RNA, 19 nt, Homo sapiens
  misc_RNA (1)...(19): siRNA sense strand
ccuugagagccaugugcaa

SEQ ID NO: 2509505 - RNA, 19 nt, Homo sapiens
  misc_RNA (1)...(19): siRNA sense strand
aagaagacccagaugacga

SEQ ID NO: 2509506 - RNA, 19 nt, Homo sapiens
  misc_RNA (1)...(19): siRNA sense strand
gcgaggaagaguuucguga

SEQ ID NO: 2509507 - RNA, 19 nt, Homo sapiens
  misc_RNA (1)...(19): siRNA sense strand
cugggagccuugagagcca

SEQ ID NO: 2509508 - RNA, 19 nt, Homo sapiens
  misc_RNA (1)...(19): siRNA sense strand
gggauuccguggaguggga

SEQ ID NO: 2509509 - RNA, 19 nt, Homo sapiens
  misc_RNA (1)...(19): siRNA sense strand
gugaagugagcgaggaaga

SEQ ID NO: 2509510 - RNA, 19 nt, Homo sapiens
  misc_RNA (1)...(19): siRNA sense strand
cuguagagucccagcccua

SEQ ID NO: 2509511 - RNA, 19 nt, Homo sapiens
  misc_RNA (1)...(19): siRNA sense strand
cugugaagugagcgaggaa

SEQ ID NO: 2509512 - RNA, 19 nt, Homo sapiens
  misc_RNA (1)...(19): siRNA sense strand
ccuugagagccaugugcaa

SEQ ID NO: 2509513 - RNA, 19 nt, Homo sapiens
  misc_RNA (1)...(19): siRNA sense strand
gcgaggaagaguuucguga

SEQ ID NO: 2509514 - RNA, 19 nt, Homo sapiens
  misc_RNA (1)...(19): siRNA sense strand
cugggagccuugagagcca

SEQ ID NO: 2509515 - RNA, 19 nt, Homo sapiens
  misc_RNA (1)...(19): siRNA sense strand
gggauuccguggaguggga

SEQ ID NO: 2509516 - RNA, 19 nt, Homo sapiens
  misc_RNA (1)...(19): siRNA sense strand
gugaagugagcgaggaaga

SEQ ID NO: 2509517 - RNA, 19 nt, Homo sapiens
  misc_RNA (1)...(19): siRNA sense strand
uguccaagaaagagagaga

SEQ ID NO: 2509518 - RNA, 19 nt, Homo sapiens
  misc_RNA (1)...(19): siRNA sense strand
cuguagagucccagcccua

SEQ ID NO: 2509519 - RNA, 19 nt, Homo sapiens
  misc_RNA (1)...(19): siRNA sense strand
gaaagagagagaagccaga

SEQ ID NO: 2509520 - RNA, 19 nt, Homo sapiens
  misc_RNA (1)...(19): siRNA sense strand
cugugaagugagcgaggaa

SEQ ID NO: 2509521 - RNA, 19 nt, Homo sapiens
  misc_RNA (1)...(19): siRNA sense strand
ccuugagagccaugugcaa

SEQ ID NO: 2509522 - RNA, 19 nt, Homo sapiens
  misc_RNA (1)...(19): siRNA sense strand
aagaagacccagaugacga

SEQ ID NO: 2509523 - RNA, 19 nt, Homo sapiens
  misc_RNA (1)...(19): siRNA sense strand
gcgaggaagaguuucguga

SEQ ID NO: 2509524 - RNA, 19 nt, Homo sapiens
  misc_RNA (1)...(19): siRNA sense strand
cugggagccuugagagcca

SEQ ID NO: 2509525 - RNA, 19 nt, Homo sapiens
  misc_RNA (1)...(19): siRNA sense strand
gggauuccguggaguggga

SEQ ID NO: 2509526 - RNA, 19 nt, Homo sapiens
  misc_RNA (1)...(19): siRNA sense strand
gugaagugagcgaggaaga

SEQ ID NO: 2509527 - RNA, 19 nt, Homo sapiens
  misc_RNA (1)...(19): siRNA sense strand
uguccaagaaagagagaga

SEQ ID NO: 2509528 - RNA, 19 nt, Homo sapiens
  misc_RNA (1)...(19): siRNA sense strand
cuguagagucccagcccua

SEQ ID NO: 2509529 - RNA, 19 nt, Homo sapiens
  misc_RNA (1)...(19): siRNA sense strand
gaaagagagagaagccaga

SEQ ID NO: 2509530 - RNA, 19 nt, Homo sapiens
  misc_RNA (1)...(19): siRNA sense strand
cugugaagugagcgaggaa

SEQ ID NO: 2509531 - RNA, 19 nt, Homo sapiens
  misc_RNA (1)...(19): siRNA sense strand
ccuugagagccaugugcaa

SEQ ID NO: 2509532 - RNA, 19 nt, Homo sapiens
  misc_RNA (1)...(19): siRNA sense strand
aagaagacccagaugacga

SEQ ID NO: 2509533 - RNA, 19 nt, Homo sapiens
  misc_RNA (1)...(19): siRNA sense strand
gcgaggaagaguuucguga

SEQ ID NO: 2509534 - RNA, 19 nt, Homo sapiens
  misc_RNA (1)...(19): siRNA sense strand
cugggagccuugagagcca

SEQ ID NO: 2509535 - RNA, 19 nt, Homo sapiens
  misc_RNA (1)...(19): siRNA sense strand
gggauuccguggaguggga

SEQ ID NO: 2509536 - RNA, 19 nt, Homo sapiens
  misc_RNA (1)...(19): siRNA sense strand
aggccuaggcuauggcuau

SEQ ID NO: 2509537 - RNA, 19 nt, Homo sapiens
  misc_RNA (1)...(19): siRNA sense strand
gauacgaaggccuaggcua

SEQ ID NO: 2509538 - RNA, 19 nt, Homo sapiens
  misc_RNA (1)...(19): siRNA sense strand
gcggcagcuacuacggaaa

SEQ ID NO: 2509539 - RNA, 19 nt, Homo sapiens
  misc_RNA (1)...(19): siRNA sense strand
ucacaagacuacugcgcua

SEQ ID NO: 2509540 - RNA, 19 nt, Homo sapiens
  misc_RNA (1)...(19): siRNA sense strand
gaacauuacuuucugggaa

SEQ ID NO: 2509541 - RNA, 19 nt, Homo sapiens
  misc_RNA (1)...(19): siRNA sense strand
agagaaugccuuugguaau

SEQ ID NO: 2509542 - RNA, 19 nt, Homo sapiens
  misc_RNA (1)...(19): siRNA sense strand
auuuaaaggacuugccaau

SEQ ID NO: 2509543 - RNA, 19 nt, Homo sapiens
  misc_RNA (1)...(19): siRNA sense strand
auacugagacugagaacau

SEQ ID NO: 2509544 - RNA, 19 nt, Homo sapiens
  misc_RNA (1)...(19): siRNA sense strand
gggaaaauagacuugaaua

SEQ ID NO: 2509545 - RNA, 19 nt, Homo sapiens
  misc_RNA (1)...(19): siRNA sense strand
cuggaauauuuaagggacu

SEQ ID NO: 2509546 - RNA, 19 nt, Homo sapiens
  misc_RNA (1)...(19): siRNA sense strand
ucauaauccuauugaagca

SEQ ID NO: 2509547 - RNA, 19 nt, Homo sapiens
  misc_RNA (1)...(19): siRNA sense strand
caguguuaccugugcaaau

SEQ ID NO: 2509548 - RNA, 19 nt, Homo sapiens
  misc_RNA (1)...(19): siRNA sense strand
acuuaggccuuucgaguau

SEQ ID NO: 2509549 - RNA, 19 nt, Homo sapiens
  misc_RNA (1)...(19): siRNA sense strand
agaaguugaaugaggcuuu

SEQ ID NO: 2509550 - RNA, 19 nt, Homo sapiens
  misc_RNA (1)...(19): siRNA sense strand
cuacaaaggaaucgccuca

SEQ ID NO: 2509551 - RNA, 19 nt, Homo sapiens
  misc_RNA (1)...(19): siRNA sense strand
agacaaauuaacugccgua

SEQ ID NO: 2509552 - RNA, 19 nt, Homo sapiens
  misc_RNA (1)...(19): siRNA sense strand
ggaaaauagacuugaauac

SEQ ID NO: 2509553 - RNA, 19 nt, Homo sapiens
  misc_RNA (1)...(19): siRNA sense strand
cagaaaacucaagggaaaa

SEQ ID NO: 2509554 - RNA, 19 nt, Homo sapiens
  misc_RNA (1)...(19): siRNA sense strand
uggcauaaaguaaccacaa

SEQ ID NO: 2509555 - RNA, 19 nt, Homo sapiens
  misc_RNA (1)...(19): siRNA sense strand
caucaaacgcuuagauccu

SEQ ID NO: 2509556 - RNA, 19 nt, Homo sapiens
  misc_RNA (1)...(19): siRNA sense strand
uggaaaauacugagacuga

SEQ ID NO: 2509557 - RNA, 19 nt, Homo sapiens
  misc_RNA (1)...(19): siRNA sense strand
acaaagaaauacuuggaug

SEQ ID NO: 2509558 - RNA, 19 nt, Homo sapiens
  misc_RNA (1)...(19): siRNA sense strand
agagacuacagcaguguua

SEQ ID NO: 2509559 - RNA, 19 nt, Homo sapiens
  misc_RNA (1)...(19): siRNA sense strand
aaguugagaaguugaauga

SEQ ID NO: 2509560 - RNA, 19 nt, Homo sapiens
  misc_RNA (1)...(19): siRNA sense strand
gcuuguuuguauuuaggaa

SEQ ID NO: 2509561 - RNA, 19 nt, Homo sapiens
  misc_RNA (1)...(19): siRNA sense strand
uaucagucagcaagguaua

SEQ ID NO: 2509562 - RNA, 19 nt, Homo sapiens
  misc_RNA (1)...(19): siRNA sense strand
gcuucaaugucagggaaaa

SEQ ID NO: 2509563 - RNA, 19 nt, Homo sapiens
  misc_RNA (1)...(19): siRNA sense strand
acugagacugagaacauua

SEQ ID NO: 2509564 - RNA, 19 nt, Homo sapiens
  misc_RNA (1)...(19): siRNA sense strand
agaaauaagcauagugacu

SEQ ID NO: 2509565 - RNA, 19 nt, Homo sapiens
  misc_RNA (1)...(19): siRNA sense strand
uaaauaaaguaguggagca

SEQ ID NO: 2509566 - RNA, 19 nt, Homo sapiens
  misc_RNA (1)...(19): siRNA sense strand
aagaaaaucuaguggaaca

SEQ ID NO: 2509567 - RNA, 19 nt, Homo sapiens
  misc_RNA (1)...(19): siRNA sense strand
agacaauggagcagaggau

SEQ ID NO: 2509568 - RNA, 19 nt, Homo sapiens
  misc_RNA (1)...(19): siRNA sense strand
ccaaagaagaaaguagaaa

SEQ ID NO: 2509569 - RNA, 19 nt, Homo sapiens
  misc_RNA (1)...(19): siRNA sense strand
ggacaauguagcugauuca

SEQ ID NO: 2509570 - RNA, 19 nt, Homo sapiens
  misc_RNA (1)...(19): siRNA sense strand
cauggaaagaccaggaaau

SEQ ID NO: 2509571 - RNA, 19 nt, Homo sapiens
  misc_RNA (1)...(19): siRNA sense strand
agucaaaggcuuggaguuu

SEQ ID NO: 2509572 - RNA, 19 nt, Homo sapiens
  misc_RNA (1)...(19): siRNA sense strand
gauucuaacaaauggguuu

SEQ ID NO: 2509573 - RNA, 19 nt, Homo sapiens
  misc_RNA (1)...(19): siRNA sense strand
agacacugauggagaggau

SEQ ID NO: 2509574 - RNA, 19 nt, Homo sapiens
  misc_RNA (1)...(19): siRNA sense strand
gaaacaagcacuuugccaa

SEQ ID NO: 2509575 - RNA, 19 nt, Homo sapiens
  misc_RNA (1)...(19): siRNA sense strand
acaauggagcagaggauga

SEQ ID NO: 2509576 - RNA, 19 nt, Homo sapiens
  misc_RNA (1)...(19): siRNA sense strand
guagagaagacaagcacau

SEQ ID NO: 2509577 - RNA, 19 nt, Homo sapiens
  misc_RNA (1)...(19): siRNA sense strand
ugggcaagaaggugagauu

SEQ ID NO: 2509578 - RNA, 19 nt, Homo sapiens
  misc_RNA (1)...(19): siRNA sense strand
cccugaugcugaagaggaa

SEQ ID NO: 2509579 - RNA, 19 nt, Homo sapiens
  misc_RNA (1)...(19): siRNA sense strand
agccauuaggagagaacaa

SEQ ID NO: 2509580 - RNA, 19 nt, Homo sapiens
  misc_RNA (1)...(19): siRNA sense strand
augcacauggcuugagaua

SEQ ID NO: 2509581 - RNA, 19 nt, Homo sapiens
  misc_RNA (1)...(19): siRNA sense strand
ccacaagcucucaagaaaa

SEQ ID NO: 2509582 - RNA, 19 nt, Homo sapiens
  misc_RNA (1)...(19): siRNA sense strand
aaguaguggagcagagaca

SEQ ID NO: 2509583 - RNA, 19 nt, Homo sapiens
  misc_RNA (1)...(19): siRNA sense strand
gcauggaaagaccaggaaa

SEQ ID NO: 2509584 - RNA, 19 nt, Homo sapiens
  misc_RNA (1)...(19): siRNA sense strand
ccaggagauuuuagaacua

SEQ ID NO: 2509585 - RNA, 19 nt, Homo sapiens
  misc_RNA (1)...(19): siRNA sense strand
cuguaaauccucagggaac

SEQ ID NO: 2509586 - RNA, 19 nt, Homo sapiens
  misc_RNA (1)...(19): siRNA sense strand
aggugaugacuuuggagaa

SEQ ID NO: 2509587 - RNA, 19 nt, Homo sapiens
  misc_RNA (1)...(19): siRNA sense strand
aggaaaggauacaauuaga

SEQ ID NO: 2509588 - RNA, 19 nt, Homo sapiens
  misc_RNA (1)...(19): siRNA sense strand
ggauaacaaaggagacacu

SEQ ID NO: 2509589 - RNA, 19 nt, Homo sapiens
  misc_RNA (1)...(19): siRNA sense strand
caacacugcaacaggauga

SEQ ID NO: 2509590 - RNA, 19 nt, Homo sapiens
  misc_RNA (1)...(19): siRNA sense strand
uaggagagaacaauguaaa

SEQ ID NO: 2509591 - RNA, 19 nt, Homo sapiens
  misc_RNA (1)...(19): siRNA sense strand
ugguagacucagcugauaa

SEQ ID NO: 2509592 - RNA, 19 nt, Homo sapiens
  misc_RNA (1)...(19): siRNA sense strand
ggguuugcaguguuggaaa

SEQ ID NO: 2509593 - RNA, 19 nt, Homo sapiens
  misc_RNA (1)...(19): siRNA sense strand
aaaugauagagaagcacua

SEQ ID NO: 2509594 - RNA, 19 nt, Homo sapiens
  misc_RNA (1)...(19): siRNA sense strand
augccaagguguugauguu

SEQ ID NO: 2509595 - RNA, 19 nt, Homo sapiens
  misc_RNA (1)...(19): siRNA sense strand
uggguagaagcuuggauaa

SEQ ID NO: 2509596 - RNA, 19 nt, Homo sapiens
  misc_RNA (1)...(19): siRNA sense strand
cagucaaaggcuuggaguu

SEQ ID NO: 2509597 - RNA, 19 nt, Homo sapiens
  misc_RNA (1)...(19): siRNA sense strand
ccauguaugcagcaggauu

SEQ ID NO: 2509598 - RNA, 19 nt, Homo sapiens
  misc_RNA (1)...(19): siRNA sense strand
aaacaagcacuuugccaau

SEQ ID NO: 2509599 - RNA, 19 nt, Homo sapiens
  misc_RNA (1)...(19): siRNA sense strand
cgagagaggccuuaccuga

SEQ ID NO: 2509600 - RNA, 19 nt, Homo sapiens
  misc_RNA (1)...(19): siRNA sense strand
ccucaaagugacugaugca

SEQ ID NO: 2509601 - RNA, 19 nt, Homo sapiens
  misc_RNA (1)...(19): siRNA sense strand
caaaacaagcaguuagaga

SEQ ID NO: 2509602 - RNA, 19 nt, Homo sapiens
  misc_RNA (1)...(19): siRNA sense strand
gagaauuuggggauauaaa

SEQ ID NO: 2509603 - RNA, 19 nt, Homo sapiens
  misc_RNA (1)...(19): siRNA sense strand
caccaaggaaccacugaaa

SEQ ID NO: 2509604 - RNA, 19 nt, Homo sapiens
  misc_RNA (1)...(19): siRNA sense strand
guaguggagcagagacaga

SEQ ID NO: 2509605 - RNA, 19 nt, Homo sapiens
  misc_RNA (1)...(19): siRNA sense strand
acaauguagcugauucaaa

SEQ ID NO: 2509606 - RNA, 19 nt, Homo sapiens
  misc_RNA (1)...(19): siRNA sense strand
gcaauaagaagcagccugu

SEQ ID NO: 2509607 - RNA, 19 nt, Homo sapiens
  misc_RNA (1)...(19): siRNA sense strand
aaggagacacugauggaga

SEQ ID NO: 2509608 - RNA, 19 nt, Homo sapiens
  misc_RNA (1)...(19): siRNA sense strand
ugauaauucagaagccauu

SEQ ID NO: 2509609 - RNA, 19 nt, Homo sapiens
  misc_RNA (1)...(19): siRNA sense strand
cacugaaccuguugcaaaa

SEQ ID NO: 2509610 - RNA, 19 nt, Homo sapiens
  misc_RNA (1)...(19): siRNA sense strand
cccaaagaagaaaguagaa

SEQ ID NO: 2509611 - RNA, 19 nt, Homo sapiens
  misc_RNA (1)...(19): siRNA sense strand
ggugauaguaguaaugacu

SEQ ID NO: 2509612 - RNA, 19 nt, Homo sapiens
  misc_RNA (1)...(19): siRNA sense strand
acauaggacagaugaaaau

SEQ ID NO: 2509613 - RNA, 19 nt, Homo sapiens
  misc_RNA (1)...(19): siRNA sense strand
uguaaauccucagggaaca

SEQ ID NO: 2509614 - RNA, 19 nt, Homo sapiens
  misc_RNA (1)...(19): siRNA sense strand
acuaauuuccaaagcccaa

SEQ ID NO: 2509615 - RNA, 19 nt, Homo sapiens
  misc_RNA (1)...(19): siRNA sense strand
caguguaccuucagcaacu

SEQ ID NO: 2509616 - RNA, 19 nt, Homo sapiens
  misc_RNA (1)...(19): siRNA sense strand
gggaauagacacccgaaac

SEQ ID NO: 2509617 - RNA, 19 nt, Homo sapiens
  misc_RNA (1)...(19): siRNA sense strand
agagaaagcuugugcccaa

SEQ ID NO: 2509618 - RNA, 19 nt, Homo sapiens
  misc_RNA (1)...(19): siRNA sense strand
agaccaaaucagaagggaa

SEQ ID NO: 2509619 - RNA, 19 nt, Homo sapiens
  misc_RNA (1)...(19): siRNA sense strand
acucuuaagccucgaacaa

SEQ ID NO: 2509620 - RNA, 19 nt, Homo sapiens
  misc_RNA (1)...(19): siRNA sense strand
ggaguuaauuucugggaag

SEQ ID NO: 2509621 - RNA, 19 nt, Homo sapiens
  misc_RNA (1)...(19): siRNA sense strand
ucugagugaggaagaaaua

SEQ ID NO: 2509622 - RNA, 19 nt, Homo sapiens
  misc_RNA (1)...(19): siRNA sense strand
acaaauuggacuuggaaac

SEQ ID NO: 2509623 - RNA, 19 nt, Homo sapiens
  misc_RNA (1)...(19): siRNA sense strand
ugacggaagagaauggauu

SEQ ID NO: 2509624 - RNA, 19 nt, Homo sapiens
  misc_RNA (1)...(19): siRNA sense strand
auacauaccugcagacauc

SEQ ID NO: 2509625 - RNA, 19 nt, Homo sapiens
  misc_RNA (1)...(19): siRNA sense strand
gugaggaagaaauagaaaa

SEQ ID NO: 2509626 - RNA, 19 nt, Homo sapiens
  misc_RNA (1)...(19): siRNA sense strand
gcucauaccagauguggca

SEQ ID NO: 2509627 - RNA, 19 nt, Homo sapiens
  misc_RNA (1)...(19): siRNA sense strand
gaccaaaucagaagggaac

SEQ ID NO: 2509628 - RNA, 19 nt, Homo sapiens
  misc_RNA (1)...(19): siRNA sense strand
agugaggaagaaauagaaa

SEQ ID NO: 2509629 - RNA, 19 nt, Homo sapiens
  misc_RNA (1)...(19): siRNA sense strand
ggacauugaagcauaucuu

SEQ ID NO: 2509630 - RNA, 19 nt, Homo sapiens
  misc_RNA (1)...(19): siRNA sense strand
cuugaaagaauuggcuaua

SEQ ID NO: 2509631 - RNA, 19 nt, Homo sapiens
  misc_RNA (1)...(19): siRNA sense strand
auaagaagucuaggaacaa

SEQ ID NO: 2509632 - RNA, 19 nt, Homo sapiens
  misc_RNA (1)...(19): siRNA sense strand
acuuaggcuuagaggccau

SEQ ID NO: 2509633 - RNA, 19 nt, Homo sapiens
  misc_RNA (1)...(19): siRNA sense strand
ccacgauguugggagggua

SEQ ID NO: 2509634 - RNA, 19 nt, Homo sapiens
  misc_RNA (1)...(19): siRNA sense strand
ucaaguugugagaagaaau

SEQ ID NO: 2509635 - RNA, 19 nt, Homo sapiens
  misc_RNA (1)...(19): siRNA sense strand
cauugucgaugcuggguuu

SEQ ID NO: 2509636 - RNA, 19 nt, Homo sapiens
  misc_RNA (1)...(19): siRNA sense strand
ugagugaggaagaaauaga

SEQ ID NO: 2509637 - RNA, 19 nt, Homo sapiens
  misc_RNA (1)...(19): siRNA sense strand
auggcuacccgcugggaua

SEQ ID NO: 2509638 - RNA, 19 nt, Homo sapiens
  misc_RNA (1)...(19): siRNA sense strand
gggauauagcguuggcugu

SEQ ID NO: 2509639 - RNA, 19 nt, Homo sapiens
  misc_RNA (1)...(19): siRNA sense strand
agguggagcuucaggccaa

SEQ ID NO: 2509640 - RNA, 19 nt, Homo sapiens
  misc_RNA (1)...(19): siRNA sense strand
cuauagccuuggagggaau

SEQ ID NO: 2509641 - RNA, 19 nt, Homo sapiens
  misc_RNA (1)...(19): siRNA sense strand
agaagaaccuggagcccau

SEQ ID NO: 2509642 - RNA, 19 nt, Homo sapiens
  misc_RNA (1)...(19): siRNA sense strand
cugagaagcaugagggauc

SEQ ID NO: 2509643 - RNA, 19 nt, Homo sapiens
  misc_RNA (1)...(19): siRNA sense strand
agagauaugagguggagau

SEQ ID NO: 2509644 - RNA, 19 nt, Homo sapiens
  misc_RNA (1)...(19): siRNA sense strand
ucaaggacacccagggcaa

SEQ ID NO: 2509645 - RNA, 19 nt, Homo sapiens
  misc_RNA (1)...(19): siRNA sense strand
aaacacaccaggagcgaga

SEQ ID NO: 2509646 - RNA, 19 nt, Homo sapiens
  misc_RNA (1)...(19): siRNA sense strand
gugaagaagcagcgugcca

SEQ ID NO: 2509647 - RNA, 19 nt, Homo sapiens
  misc_RNA (1)...(19): siRNA sense strand
ugaaggaugcccaggccaa

SEQ ID NO: 2509648 - RNA, 19 nt, Homo sapiens
  misc_RNA (1)...(19): siRNA sense strand
caaggaaggcuguggguag

SEQ ID NO: 2509649 - RNA, 19 nt, Homo sapiens
  misc_RNA (1)...(19): siRNA sense strand
gcgaguaccaggagcucau

SEQ ID NO: 2509650 - RNA, 19 nt, Homo sapiens
  misc_RNA (1)...(19): siRNA sense strand
agaucgggaaugugaagaa

SEQ ID NO: 2509651 - RNA, 19 nt, Homo sapiens
  misc_RNA (1)...(19): siRNA sense strand
gggaacagaucaaggugcu

SEQ ID NO: 2509652 - RNA, 19 nt, Homo sapiens
  misc_RNA (1)...(19): siRNA sense strand
augaguuuguggugcuuaa

SEQ ID NO: 2509653 - RNA, 19 nt, Homo sapiens
  misc_RNA (1)...(19): siRNA sense strand
ugguggaggacuauaagaa

SEQ ID NO: 2509654 - RNA, 19 nt, Homo sapiens
  misc_RNA (1)...(19): siRNA sense strand
agaccaagauccaggagcu

SEQ ID NO: 2509655 - RNA, 19 nt, Homo sapiens
  misc_RNA (1)...(19): siRNA sense strand
agaucgcccugaagagcaa

SEQ ID NO: 2509656 - RNA, 19 nt, Homo sapiens
  misc_RNA (1)...(19): siRNA sense strand
ggagcgagaugguggagcu

SEQ ID NO: 2509657 - RNA, 19 nt, Homo sapiens
  misc_RNA (1)...(19): siRNA sense strand
ccaguggugacaagggcaa

SEQ ID NO: 2509658 - RNA, 19 nt, Homo sapiens
  misc_RNA (1)...(19): siRNA sense strand
gggcaacuucagugugcau

SEQ ID NO: 2509659 - RNA, 19 nt, Homo sapiens
  misc_RNA (1)...(19): siRNA sense strand
agaagagauaugaggugga

SEQ ID NO: 2509660 - RNA, 19 nt, Homo sapiens
  misc_RNA (1)...(19): siRNA sense strand
gcuuaagaaggaugcagau

SEQ ID NO: 2509661 - RNA, 19 nt, Homo sapiens
  misc_RNA (1)...(19): siRNA sense strand
agaaugaguuuguggugcu

SEQ ID NO: 2509662 - RNA, 19 nt, Homo sapiens
  misc_RNA (1)...(19): siRNA sense strand
ugagggaucugguggagga

SEQ ID NO: 2509663 - RNA, 19 nt, Homo sapiens
  misc_RNA (1)...(19): siRNA sense strand
ugaaacuggcccuggacau

SEQ ID NO: 2509664 - RNA, 19 nt, Homo sapiens
  misc_RNA (1)...(19): siRNA sense strand
gcucuuggcuccuggacca

SEQ ID NO: 2509665 - RNA, 19 nt, Homo sapiens
  misc_RNA (1)...(19): siRNA sense strand
gggaugaggaacagagaac

SEQ ID NO: 2509666 - RNA, 19 nt, Homo sapiens
  misc_RNA (1)...(19): siRNA sense strand
augaagaggcuuugaggga

SEQ ID NO: 2509667 - RNA, 19 nt, Homo sapiens
  misc_RNA (1)...(19): siRNA sense strand
guaugaaacgaaagagcca

SEQ ID NO: 2509668 - RNA, 19 nt, Homo sapiens
  misc_RNA (1)...(19): siRNA sense strand
agcuaaaguaccuggagua

SEQ ID NO: 2509669 - RNA, 19 nt, Homo sapiens
  misc_RNA (1)...(19): siRNA sense strand
gggagauaugauaaaguuu

SEQ ID NO: 2509670 - RNA, 19 nt, Homo sapiens
  misc_RNA (1)...(19): siRNA sense strand
cuuugagggaugaggaaca

SEQ ID NO: 2509671 - RNA, 19 nt, Homo sapiens
  misc_RNA (1)...(19): siRNA sense strand
ccucgaggucagaagagua

SEQ ID NO: 2509672 - RNA, 19 nt, Homo sapiens
  misc_RNA (1)...(19): siRNA sense strand
gaagaggcuuugagggaug

SEQ ID NO: 2509673 - RNA, 19 nt, Homo sapiens
  misc_RNA (1)...(19): siRNA sense strand
acagagaacccaagccaga

SEQ ID NO: 2509674 - RNA, 19 nt, Homo sapiens
  misc_RNA (1)...(19): siRNA sense strand
ccaggcucguugugagaau

SEQ ID NO: 2509675 - RNA, 19 nt, Homo sapiens
  misc_RNA (1)...(19): siRNA sense strand
gaacagagaacccaagcca

SEQ ID NO: 2509676 - RNA, 19 nt, Homo sapiens
  misc_RNA (1)...(19): siRNA sense strand
ugaaggaaguggaucccau

SEQ ID NO: 2509677 - RNA, 19 nt, Homo sapiens
  misc_RNA (1)...(19): siRNA sense strand
augaaacgaaagagccaau

SEQ ID NO: 2509678 - RNA, 19 nt, Homo sapiens
  misc_RNA (1)...(19): siRNA sense strand
agccaauuacaaagggaga

SEQ ID NO: 2509679 - RNA, 19 nt, Homo sapiens
  misc_RNA (1)...(19): siRNA sense strand
cagcuaaaguaccuggagu

SEQ ID NO: 2509680 - RNA, 19 nt, Homo sapiens
  misc_RNA (1)...(19): siRNA sense strand
gaugaaaaguuguggggua

SEQ ID NO: 2509681 - RNA, 19 nt, Homo sapiens
  misc_RNA (1)...(19): siRNA sense strand
gaagagauguggaggagga

SEQ ID NO: 2509682 - RNA, 19 nt, Homo sapiens
  misc_RNA (1)...(19): siRNA sense strand
cgcagaaccugaagcgcaa

SEQ ID NO: 2509683 - RNA, 19 nt, Homo sapiens
  misc_RNA (1)...(19): siRNA sense strand
ccaaaguggaggagcgagu

SEQ ID NO: 2509684 - RNA, 19 nt, Homo sapiens
  misc_RNA (1)...(19): siRNA sense strand
ugaagaagguguggggaaa

SEQ ID NO: 2509685 - RNA, 19 nt, Homo sapiens
  misc_RNA (1)...(19): siRNA sense strand
ccaaacagaccaugggcuu

SEQ ID NO: 2509686 - RNA, 19 nt, Homo sapiens
  misc_RNA (1)...(19): siRNA sense strand
augaaaaguugugggguaa

SEQ ID NO: 2509687 - RNA, 19 nt, Homo sapiens
  misc_RNA (1)...(19): siRNA sense strand
ggggaugacugcuggguga

SEQ ID NO: 2509688 - RNA, 19 nt, Homo sapiens
  misc_RNA (1)...(19): siRNA sense strand
guccaggcgaggaaggaaa

SEQ ID NO: 2509689 - RNA, 19 nt, Homo sapiens
  misc_RNA (1)...(19): siRNA sense strand
cauuugaggaugacgaaga

SEQ ID NO: 2509690 - RNA, 19 nt, Homo sapiens
  misc_RNA (1)...(19): siRNA sense strand
ccgaaaaugcuaaaaucaa

SEQ ID NO: 2509691 - RNA, 19 nt, Homo sapiens
  misc_RNA (1)...(19): siRNA sense strand
agguagaggaagagaaggu

SEQ ID NO: 2509692 - RNA, 19 nt, Homo sapiens
  misc_RNA (1)...(19): siRNA sense strand
gcaacgucuaccagaacua

SEQ ID NO: 2509693 - RNA, 19 nt, Homo sapiens
  misc_RNA (1)...(19): siRNA sense strand
uggaagugcuggaggacac

SEQ ID NO: 2509694 - RNA, 19 nt, Homo sapiens
  misc_RNA (1)...(19): siRNA sense strand
ucgcagagcaguuucgcaa

SEQ ID NO: 2509695 - RNA, 19 nt, Homo sapiens
  misc_RNA (1)...(19): siRNA sense strand
aggaugacgaagaagaaga

SEQ ID NO: 2509696 - RNA, 19 nt, Homo sapiens
  misc_RNA (1)...(19): siRNA sense strand
agcagguguuugauaguaa

SEQ ID NO: 2509697 - RNA, 19 nt, Homo sapiens
  misc_RNA (1)...(19): siRNA sense strand
aaagcagccuggagagcau

SEQ ID NO: 2509698 - RNA, 19 nt, Homo sapiens
  misc_RNA (1)...(19): siRNA sense strand
cgggacaguacuuggugua

SEQ ID NO: 2509699 - RNA, 19 nt, Homo sapiens
  misc_RNA (1)...(19): siRNA sense strand
uggaauacgaugcggacca

SEQ ID NO: 2509700 - RNA, 19 nt, Homo sapiens
  misc_RNA (1)...(19): siRNA sense strand
uugaagaagguguggggaa

SEQ ID NO: 2509701 - RNA, 19 nt, Homo sapiens
  misc_RNA (1)...(19): siRNA sense strand
agcucaaagaagagaugaa

SEQ ID NO: 2509702 - RNA, 19 nt, Homo sapiens
  misc_RNA (1)...(19): siRNA sense strand
agcaggauccagagaagaa

SEQ ID NO: 2509703 - RNA, 19 nt, Homo sapiens
  misc_RNA (1)...(19): siRNA sense strand
guaaaagaacuaagggcca

SEQ ID NO: 2509704 - RNA, 19 nt, Homo sapiens
  misc_RNA (1)...(19): siRNA sense strand
gauccagagaagaaagcuu

SEQ ID NO: 2509705 - RNA, 19 nt, Homo sapiens
  misc_RNA (1)...(19): siRNA sense strand
gguggaaggcugcaggcau

SEQ ID NO: 2509706 - RNA, 19 nt, Homo sapiens
  misc_RNA (1)...(19): siRNA sense strand
cugagguagaggaagagaa

SEQ ID NO: 2509707 - RNA, 19 nt, Homo sapiens
  misc_RNA (1)...(19): siRNA sense strand
cauugaagccacuaaacau

SEQ ID NO: 2509708 - RNA, 19 nt, Homo sapiens
  misc_RNA (1)...(19): siRNA sense strand
guggaaggcugcaggcauc

SEQ ID NO: 2509709 - RNA, 19 nt, Homo sapiens
  misc_RNA (1)...(19): siRNA sense strand
auggggaccuaguggaaua

SEQ ID NO: 2509710 - RNA, 19 nt, Homo sapiens
  misc_RNA (1)...(19): siRNA sense strand
agaggugguccgaaggcua

SEQ ID NO: 2509711 - RNA, 19 nt, Homo sapiens
  misc_RNA (1)...(19): siRNA sense strand
caagaucagccaugggcau

SEQ ID NO: 2509712 - RNA, 19 nt, Homo sapiens
  misc_RNA (1)...(19): siRNA sense strand
ccauuaccuggaagauaaa

SEQ ID NO: 2509713 - RNA, 19 nt, Homo sapiens
  misc_RNA (1)...(19): siRNA sense strand
gagaaaaggcgaagggagc

SEQ ID NO: 2509714 - RNA, 19 nt, Homo sapiens
  misc_RNA (1)...(19): siRNA sense strand
cagcuguuccugagguaga

SEQ ID NO: 2509715 - RNA, 19 nt, Homo sapiens
  misc_RNA (1)...(19): siRNA sense strand
ggcuggaagugcuggagga

SEQ ID NO: 2509716 - RNA, 19 nt, Homo sapiens
  misc_RNA (1)...(19): siRNA sense strand
uggaagaggcccugaagcu

SEQ ID NO: 2509717 - RNA, 19 nt, Homo sapiens
  misc_RNA (1)...(19): siRNA sense strand
ccugagaggugguccgaag

SEQ ID NO: 2509718 - RNA, 19 nt, Homo sapiens
  misc_RNA (1)...(19): siRNA sense strand
cugcaagagaauuugagau

SEQ ID NO: 2509719 - RNA, 19 nt, Homo sapiens
  misc_RNA (1)...(19): siRNA sense strand
gugaagaagcagugugcca

SEQ ID NO: 2509720 - RNA, 19 nt, Homo sapiens
  misc_RNA (1)...(19): siRNA sense strand
agaauaaccuggagcccau

SEQ ID NO: 2509721 - RNA, 19 nt, Homo sapiens
  misc_RNA (1)...(19): siRNA sense strand
gcaagugaauucagggacu

SEQ ID NO: 2509722 - RNA, 19 nt, Homo sapiens
  misc_RNA (1)...(19): siRNA sense strand
aaguggagcugcaggccaa

SEQ ID NO: 2509723 - RNA, 19 nt, Homo sapiens
  misc_RNA (1)...(19): siRNA sense strand
aggacuacaagaagaggua

SEQ ID NO: 2509724 - RNA, 19 nt, Homo sapiens
  misc_RNA (1)...(19): siRNA sense strand
cgagcaaaguggagcugca

SEQ ID NO: 2509725 - RNA, 19 nt, Homo sapiens
  misc_RNA (1)...(19): siRNA sense strand
agagguaugaagaagaaau

SEQ ID NO: 2509726 - RNA, 19 nt, Homo sapiens
  misc_RNA (1)...(19): siRNA sense strand
gaauauaccaacuccguga

SEQ ID NO: 2509727 - RNA, 19 nt, Homo sapiens
  misc_RNA (1)...(19): siRNA sense strand
ugguggaggacuacaagaa

SEQ ID NO: 2509728 - RNA, 19 nt, Homo sapiens
  misc_RNA (1)...(19): siRNA sense strand
auaccaacuccgugagcau

SEQ ID NO: 2509729 - RNA, 19 nt, Homo sapiens
  misc_RNA (1)...(19): siRNA sense strand
ggaagcagcuggagacgcu

SEQ ID NO: 2509730 - RNA, 19 nt, Homo sapiens
  misc_RNA (1)...(19): siRNA sense strand
agaccaaguuccaggagcu

SEQ ID NO: 2509731 - RNA, 19 nt, Homo sapiens
  misc_RNA (1)...(19): siRNA sense strand
gggcaaagggcucagugga

SEQ ID NO: 2509732 - RNA, 19 nt, Homo sapiens
  misc_RNA (1)...(19): siRNA sense strand
agaaugaauuuguggugcu

SEQ ID NO: 2509733 - RNA, 19 nt, Homo sapiens
  misc_RNA (1)...(19): siRNA sense strand
gcucagauccagucccaca

SEQ ID NO: 2509734 - RNA, 19 nt, Homo sapiens
  misc_RNA (1)...(19): siRNA sense strand
gugcaggauguccggagaa

SEQ ID NO: 2509735 - RNA, 19 nt, Homo sapiens
  misc_RNA (1)...(19): siRNA sense strand
gcaaggaauuuaaaggcaa

SEQ ID NO: 2509736 - RNA, 19 nt, Homo sapiens
  misc_RNA (1)...(19): siRNA sense strand
ggauaaugaugacgggaga

SEQ ID NO: 2509737 - RNA, 19 nt, Homo sapiens
  misc_RNA (1)...(19): siRNA sense strand
cgacugaagaagaggaaaa

SEQ ID NO: 2509738 - RNA, 19 nt, Homo sapiens
  misc_RNA (1)...(19): siRNA sense strand
cggcauaauucaauccgaa

SEQ ID NO: 2509739 - RNA, 19 nt, Homo sapiens
  misc_RNA (1)...(19): siRNA sense strand
uuauauaagcagaggucau

SEQ ID NO: 2509740 - RNA, 19 nt, Homo sapiens
  misc_RNA (1)...(19): siRNA sense strand
agaccaaugagcaggagaa

SEQ ID NO: 2509741 - RNA, 19 nt, Homo sapiens
  misc_RNA (1)...(19): siRNA sense strand
auuuaaaggcaauggacau

SEQ ID NO: 2509742 - RNA, 19 nt, Homo sapiens
  misc_RNA (1)...(19): siRNA sense strand
gcgccaagucacagagcca

SEQ ID NO: 2509743 - RNA, 19 nt, Homo sapiens
  misc_RNA (1)...(19): siRNA sense strand
acuaaaguucacagaaaga

SEQ ID NO: 2509744 - RNA, 19 nt, Homo sapiens
  misc_RNA (1)...(19): siRNA sense strand
gcaacgaggcugagaggcu

SEQ ID NO: 2509745 - RNA, 19 nt, Homo sapiens
  misc_RNA (1)...(19): siRNA sense strand
cggaguaacagcaaggcuu

SEQ ID NO: 2509746 - RNA, 19 nt, Homo sapiens
  misc_RNA (1)...(19): siRNA sense strand
acauggacacagagaccaa

SEQ ID NO: 2509747 - RNA, 19 nt, Homo sapiens
  misc_RNA (1)...(19): siRNA sense strand
gcugaugugugauggcaga

SEQ ID NO: 2509748 - RNA, 19 nt, Homo sapiens
  misc_RNA (1)...(19): siRNA sense strand
aggagaacagugaggacuu

SEQ ID NO: 2509749 - RNA, 19 nt, Homo sapiens
  misc_RNA (1)...(19): siRNA sense strand
agcagaggucauuggauaa

SEQ ID NO: 2509750 - RNA, 19 nt, Homo sapiens
  misc_RNA (1)...(19): siRNA sense strand
cugaagaagaggaaaacau

SEQ ID NO: 2509751 - RNA, 19 nt, Homo sapiens
  misc_RNA (1)...(19): siRNA sense strand
gcgugugucaaguaggcaa

SEQ ID NO: 2509752 - RNA, 19 nt, Homo sapiens
  misc_RNA (1)...(19): siRNA sense strand
gggcagagaccacuggagu

SEQ ID NO: 2509753 - RNA, 19 nt, Homo sapiens
  misc_RNA (1)...(19): siRNA sense strand
acacagagaccaaugagca

SEQ ID NO: 2509754 - RNA, 19 nt, Homo sapiens
  misc_RNA (1)...(19): siRNA sense strand
acaacguggaucugggaga

SEQ ID NO: 2509755 - RNA, 19 nt, Homo sapiens
  misc_RNA (1)...(19): siRNA sense strand
agacggggauccaggagaa

SEQ ID NO: 2509756 - RNA, 19 nt, Homo sapiens
  misc_RNA (1)...(19): siRNA sense strand
uuuaaaggcaauggacaua

SEQ ID NO: 2509757 - RNA, 19 nt, Homo sapiens
  misc_RNA (1)...(19): siRNA sense strand
aggaaaacauccaccaaga

SEQ ID NO: 2509758 - RNA, 19 nt, Homo sapiens
  misc_RNA (1)...(19): siRNA sense strand
ccagaguuauauaagcaga

SEQ ID NO: 2509759 - RNA, 19 nt, Homo sapiens
  misc_RNA (1)...(19): siRNA sense strand
gcaaagacaacaaccagga

SEQ ID NO: 2509760 - RNA, 19 nt, Homo sapiens
  misc_RNA (1)...(19): siRNA sense strand
uaauucaauccgaagacaa

SEQ ID NO: 2509761 - RNA, 19 nt, Homo sapiens
  misc_RNA (1)...(19): siRNA sense strand
ccaugagguuggagaacaa

SEQ ID NO: 2509762 - RNA, 19 nt, Homo sapiens
  misc_RNA (1)...(19): siRNA sense strand
cgguauaagcgcagcaaau

SEQ ID NO: 2509763 - RNA, 19 nt, Homo sapiens
  misc_RNA (1)...(19): siRNA sense strand
ccucaauacccaaaguaaa

SEQ ID NO: 2509764 - RNA, 19 nt, Homo sapiens
  misc_RNA (1)...(19): siRNA sense strand
cugcacagaaacagagaaa

SEQ ID NO: 2509765 - RNA, 19 nt, Homo sapiens
  misc_RNA (1)...(19): siRNA sense strand
gaugauaguaagggagaaa

SEQ ID NO: 2509766 - RNA, 19 nt, Homo sapiens
  misc_RNA (1)...(19): siRNA sense strand
guuuauaguaggaaagaga

SEQ ID NO: 2509767 - RNA, 19 nt, Homo sapiens
  misc_RNA (1)...(19): siRNA sense strand
gucagaaaucagaggcaua

SEQ ID NO: 2509768 - RNA, 19 nt, Homo sapiens
  misc_RNA (1)...(19): siRNA sense strand
ggaugaugauucagggcca

SEQ ID NO: 2509769 - RNA, 19 nt, Homo sapiens
  misc_RNA (1)...(19): siRNA sense strand
ccaaagguaaagaaagcua

SEQ ID NO: 2509770 - RNA, 19 nt, Homo sapiens
  misc_RNA (1)...(19): siRNA sense strand
ucucuuuagucgaaugaaa

SEQ ID NO: 2509771 - RNA, 19 nt, Homo sapiens
  misc_RNA (1)...(19): siRNA sense strand
cauaaugggccuuugggaa

SEQ ID NO: 2509772 - RNA, 19 nt, Homo sapiens
  misc_RNA (1)...(19): siRNA sense strand
ccuuugacucaguaagaaa

SEQ ID NO: 2509773 - RNA, 19 nt, Homo sapiens
  misc_RNA (1)...(19): siRNA sense strand
cagcaaauuagaaagaaga

SEQ ID NO: 2509774 - RNA, 19 nt, Homo sapiens
  misc_RNA (1)...(19): siRNA sense strand
ggauuaugcaggagcacau

SEQ ID NO: 2509775 - RNA, 19 nt, Homo sapiens
  misc_RNA (1)...(19): siRNA sense strand
gaacaaucgaauacgaaca

SEQ ID NO: 2509776 - RNA, 19 nt, Homo sapiens
  misc_RNA (1)...(19): siRNA sense strand
cuggaagguuaucggaaau

SEQ ID NO: 2509777 - RNA, 19 nt, Homo sapiens
  misc_RNA (1)...(19): siRNA sense strand
acaaagaacgcgugggucu

SEQ ID NO: 2509778 - RNA, 19 nt, Homo sapiens
  misc_RNA (1)...(19): siRNA sense strand
ucuaggaaguggagaagga

SEQ ID NO: 2509779 - RNA, 19 nt, Homo sapiens
  misc_RNA (1)...(19): siRNA sense strand
gcgcagcaaauuagaaaga

SEQ ID NO: 2509780 - RNA, 19 nt, Homo sapiens
  misc_RNA (1)...(19): siRNA sense strand
agaaagaagagcaaacaca

SEQ ID NO: 2509781 - RNA, 19 nt, Homo sapiens
  misc_RNA (1)...(19): siRNA sense strand
uggcugagcagguaugaaa

SEQ ID NO: 2509782 - RNA, 19 nt, Homo sapiens
  misc_RNA (1)...(19): siRNA sense strand
gcaugauacaaguggcaga

SEQ ID NO: 2509783 - RNA, 19 nt, Homo sapiens
  misc_RNA (1)...(19): siRNA sense strand
ucuauaagaauguggccua

SEQ ID NO: 2509784 - RNA, 19 nt, Homo sapiens
  misc_RNA (1)...(19): siRNA sense strand
gauacaaguggcagacauu

SEQ ID NO: 2509785 - RNA, 19 nt, Homo sapiens
  misc_RNA (1)...(19): siRNA sense strand
aggaugaguaugagaaguu

SEQ ID NO: 2509786 - RNA, 19 nt, Homo sapiens
  misc_RNA (1)...(19): siRNA sense strand
gcagaguggcugaggaauc

SEQ ID NO: 2509787 - RNA, 19 nt, Homo sapiens
  misc_RNA (1)...(19): siRNA sense strand
ggugaugacccuugcuauu

SEQ ID NO: 2509788 - RNA, 19 nt, Homo sapiens
  misc_RNA (1)...(19): siRNA sense strand
ugagacugcuuuagaucaa

SEQ ID NO: 2509789 - RNA, 19 nt, Homo sapiens
  misc_RNA (1)...(19): siRNA sense strand
cagagaaacaacacgguga

SEQ ID NO: 2509790 - RNA, 19 nt, Homo sapiens
  misc_RNA (1)...(19): siRNA sense strand
gcagcaaauuagaaagaag

SEQ ID NO: 2509791 - RNA, 19 nt, Homo sapiens
  misc_RNA (1)...(19): siRNA sense strand
gcgcaguaggucauggaau

SEQ ID NO: 2509792 - RNA, 19 nt, Homo sapiens
  misc_RNA (1)...(19): siRNA sense strand
uggagcaagucuggagaaa

SEQ ID NO: 2509793 - RNA, 19 nt, Homo sapiens
  misc_RNA (1)...(19): siRNA sense strand
augcagaguggcugaggaa

SEQ ID NO: 2509794 - RNA, 19 nt, Homo sapiens
  misc_RNA (1)...(19): siRNA sense strand
ggaugcaccauuagaaaca

SEQ ID NO: 2509795 - RNA, 19 nt, Homo sapiens
  misc_RNA (1)...(19): siRNA sense strand
cauucaaagugauguggau

SEQ ID NO: 2509796 - RNA, 19 nt, Homo sapiens
  misc_RNA (1)...(19): siRNA sense strand
ccuucguacuuuauguaua

SEQ ID NO: 2509797 - RNA, 19 nt, Homo sapiens
  misc_RNA (1)...(19): siRNA sense strand
ggucauggaaucuggcuga

SEQ ID NO: 2509798 - RNA, 19 nt, Homo sapiens
  misc_RNA (1)...(19): siRNA sense strand
cccagaagcacuuggauga

SEQ ID NO: 2509799 - RNA, 19 nt, Homo sapiens
  misc_RNA (1)...(19): siRNA sense strand
aaacagacgugguaccaga

SEQ ID NO: 2509800 - RNA, 19 nt, Homo sapiens
  misc_RNA (1)...(19): siRNA sense strand
uggcaagucaggaagaaga

SEQ ID NO: 2509801 - RNA, 19 nt, Homo sapiens
  misc_RNA (1)...(19): siRNA sense strand
ggccaugaaaccaaagcaa

SEQ ID NO: 2509802 - RNA, 19 nt, Homo sapiens
  misc_RNA (1)...(19): siRNA sense strand
ucgaagauguaguguggca

SEQ ID NO: 2509803 - RNA, 19 nt, Homo sapiens
  misc_RNA (1)...(19): siRNA sense strand
caaauuagaaagaagagca

SEQ ID NO: 2509804 - RNA, 19 nt, Homo sapiens
  misc_RNA (1)...(19): siRNA sense strand
cguacuuuauguauagcaa

SEQ ID NO: 2509805 - RNA, 19 nt, Homo sapiens
  misc_RNA (1)...(19): siRNA sense strand
ucauugaaagcaagaguuu

SEQ ID NO: 2509806 - RNA, 19 nt, Homo sapiens
  misc_RNA (1)...(19): siRNA sense strand
acugagaauaagaugguuu

SEQ ID NO: 2509807 - RNA, 19 nt, Homo sapiens
  misc_RNA (1)...(19): siRNA sense strand
auacagaguucuucaggga

SEQ ID NO: 2509808 - RNA, 19 nt, Homo sapiens
  misc_RNA (1)...(19): siRNA sense strand
ucucugaagaugaagauuu

SEQ ID NO: 2509809 - RNA, 19 nt, Homo sapiens
  misc_RNA (1)...(19): siRNA sense strand
cagaugauaguaagggaga

SEQ ID NO: 2509810 - RNA, 19 nt, Homo sapiens
  misc_RNA (1)...(19): siRNA sense strand
aguggcagacauugggaua

SEQ ID NO: 2509811 - RNA, 19 nt, Homo sapiens
  misc_RNA (1)...(19): siRNA sense strand
ggucagaaaucagaggcau

SEQ ID NO: 2509812 - RNA, 19 nt, Homo sapiens
  misc_RNA (1)...(19): siRNA sense strand
auugaaagcaagaguuuga

SEQ ID NO: 2509813 - RNA, 19 nt, Homo sapiens
  misc_RNA (1)...(19): siRNA sense strand
gaaacaacacggugaugca

SEQ ID NO: 2509814 - RNA, 19 nt, Homo sapiens
  misc_RNA (1)...(19): siRNA sense strand
uggagaaacaacagaugau

SEQ ID NO: 2509815 - RNA, 19 nt, Homo sapiens
  misc_RNA (1)...(19): siRNA sense strand
agaagcacuuggaugacua

SEQ ID NO: 2509816 - RNA, 19 nt, Homo sapiens
  misc_RNA (1)...(19): siRNA sense strand
agaaagaugugucugcaga

SEQ ID NO: 2509817 - RNA, 19 nt, Homo sapiens
  misc_RNA (1)...(19): siRNA sense strand
acgcgugggucucaguaaa

SEQ ID NO: 2509818 - RNA, 19 nt, Homo sapiens
  misc_RNA (1)...(19): siRNA sense strand
guaccagacaccaggcuuu

SEQ ID NO: 2509819 - RNA, 19 nt, Homo sapiens
  misc_RNA (1)...(19): siRNA sense strand
caaucaaguugugguguau

SEQ ID NO: 2509820 - RNA, 19 nt, Homo sapiens
  misc_RNA (1)...(19): siRNA sense strand
ugugauggccagugacuuu

SEQ ID NO: 2509821 - RNA, 19 nt, Homo sapiens
  misc_RNA (1)...(19): siRNA sense strand
aguucaaacaucucagcaa

SEQ ID NO: 2509822 - RNA, 19 nt, Homo sapiens
  misc_RNA (1)...(19): siRNA sense strand
aguaggauagaaugugaaa

SEQ ID NO: 2509823 - RNA, 19 nt, Homo sapiens
  misc_RNA (1)...(19): siRNA sense strand
gcuuagaggaugcaccauu

SEQ ID NO: 2509824 - RNA, 19 nt, Homo sapiens
  misc_RNA (1)...(19): siRNA sense strand
cgaagcggccuuaguguau

SEQ ID NO: 2509825 - RNA, 19 nt, Homo sapiens
  misc_RNA (1)...(19): siRNA sense strand
gaauaugcagaguggcuga

SEQ ID NO: 2509826 - RNA, 19 nt, Homo sapiens
  misc_RNA (1)...(19): siRNA sense strand
agaaaagugaaguggugaa

SEQ ID NO: 2509827 - RNA, 19 nt, Homo sapiens
  misc_RNA (1)...(19): siRNA sense strand
gggcuggaaagaugaauca

SEQ ID NO: 2509828 - RNA, 19 nt, Homo sapiens
  misc_RNA (1)...(19): siRNA sense strand
ccaugaaaccaaagcaaug

SEQ ID NO: 2509829 - RNA, 19 nt, Homo sapiens
  misc_RNA (1)...(19): siRNA sense strand
cauugaaacagacguggua

SEQ ID NO: 2509830 - RNA, 19 nt, Homo sapiens
  misc_RNA (1)...(19): siRNA sense strand
aauucauaguggagagaaa

SEQ ID NO: 2509831 - RNA, 19 nt, Homo sapiens
  misc_RNA (1)...(19): siRNA sense strand
augcaaagaauguggcaaa

SEQ ID NO: 2509832 - RNA, 19 nt, Homo sapiens
  misc_RNA (1)...(19): siRNA sense strand
auguaaagaauguggcaaa

SEQ ID NO: 2509833 - RNA, 19 nt, Homo sapiens
  misc_RNA (1)...(19): siRNA sense strand
augugaagaaugugggaaa

SEQ ID NO: 2509834 - RNA, 19 nt, Homo sapiens
  misc_RNA (1)...(19): siRNA sense strand
cuaacuagacauaggagaa

SEQ ID NO: 2509835 - RNA, 19 nt, Homo sapiens
  misc_RNA (1)...(19): siRNA sense strand
gagcaggauaugaaagauu

SEQ ID NO: 2509836 - RNA, 19 nt, Homo sapiens
  misc_RNA (1)...(19): siRNA sense strand
augugaagaauguggcaaa

SEQ ID NO: 2509837 - RNA, 19 nt, Homo sapiens
  misc_RNA (1)...(19): siRNA sense strand
augugaagaauguggcaaa

SEQ ID NO: 2509838 - RNA, 19 nt, Homo sapiens
  misc_RNA (1)...(19): siRNA sense strand
augugaagaauguggcaaa

SEQ ID NO: 2509839 - RNA, 19 nt, Homo sapiens
  misc_RNA (1)...(19): siRNA sense strand
augugaagaauguggcaaa

SEQ ID NO: 2509840 - RNA, 19 nt, Homo sapiens
  misc_RNA (1)...(19): siRNA sense strand
cuaacuagccauaagagaa

SEQ ID NO: 2509841 - RNA, 19 nt, Homo sapiens
  misc_RNA (1)...(19): siRNA sense strand
augugaagaauguggcaaa

SEQ ID NO: 2509842 - RNA, 19 nt, Homo sapiens
  misc_RNA (1)...(19): siRNA sense strand
gguaaggggcagaaagaau

SEQ ID NO: 2509843 - RNA, 19 nt, Homo sapiens
  misc_RNA (1)...(19): siRNA sense strand
acucaauguucaucaacua

SEQ ID NO: 2509844 - RNA, 19 nt, Homo sapiens
  misc_RNA (1)...(19): siRNA sense strand
ccuaaguagccauaagaga

SEQ ID NO: 2509845 - RNA, 19 nt, Homo sapiens
  misc_RNA (1)...(19): siRNA sense strand
gcaggauaugaaagauuua

SEQ ID NO: 2509846 - RNA, 19 nt, Homo sapiens
  misc_RNA (1)...(19): siRNA sense strand
aauuuuagcuggaggucaa

SEQ ID NO: 2509847 - RNA, 19 nt, Homo sapiens
  misc_RNA (1)...(19): siRNA sense strand
aagccuuacucgucauaaa

SEQ ID NO: 2509848 - RNA, 19 nt, Homo sapiens
  misc_RNA (1)...(19): siRNA sense strand
aagccuuacucgucauaaa

SEQ ID NO: 2509849 - RNA, 19 nt, Homo sapiens
  misc_RNA (1)...(19): siRNA sense strand
uggagaggaaccugacaaa

SEQ ID NO: 2509850 - RNA, 19 nt, Homo sapiens
  misc_RNA (1)...(19): siRNA sense strand
uaacuagccauaagagaau

SEQ ID NO: 2509851 - RNA, 19 nt, Homo sapiens
  misc_RNA (1)...(19): siRNA sense strand
uggcagaaccuuuacucaa

SEQ ID NO: 2509852 - RNA, 19 nt, Homo sapiens
  misc_RNA (1)...(19): siRNA sense strand
augugaugaaugugacaaa

SEQ ID NO: 2509853 - RNA, 19 nt, Homo sapiens
  misc_RNA (1)...(19): siRNA sense strand
agaauguggcaaagcguuu

SEQ ID NO: 2509854 - RNA, 19 nt, Homo sapiens
  misc_RNA (1)...(19): siRNA sense strand
ggcagaaagaauauugcaa

SEQ ID NO: 2509855 - RNA, 19 nt, Homo sapiens
  misc_RNA (1)...(19): siRNA sense strand
cagagcaggauaugaaaga

SEQ ID NO: 2509856 - RNA, 19 nt, Homo sapiens
  misc_RNA (1)...(19): siRNA sense strand
guggcaaagcguuuaacaa

SEQ ID NO: 2509857 - RNA, 19 nt, Homo sapiens
  misc_RNA (1)...(19): siRNA sense strand
ccauacaaaugugaagaau

SEQ ID NO: 2509858 - RNA, 19 nt, Homo sapiens
  misc_RNA (1)...(19): siRNA sense strand
cccuacaaaugcaaagaau

SEQ ID NO: 2509859 - RNA, 19 nt, Homo sapiens
  misc_RNA (1)...(19): siRNA sense strand
cccuacaaaugcaaagaau

SEQ ID NO: 2509860 - RNA, 19 nt, Homo sapiens
  misc_RNA (1)...(19): siRNA sense strand
gcguuuaacaaguucucaa

SEQ ID NO: 2509861 - RNA, 19 nt, Homo sapiens
  misc_RNA (1)...(19): siRNA sense strand
gaugaaugugacaaaguuu

SEQ ID NO: 2509862 - RNA, 19 nt, Homo sapiens
  misc_RNA (1)...(19): siRNA sense strand
ccauaguaaguauaagaga

SEQ ID NO: 2509863 - RNA, 19 nt, Homo sapiens
  misc_RNA (1)...(19): siRNA sense strand
ccuuacaagugugaagaau

SEQ ID NO: 2509864 - RNA, 19 nt, Homo sapiens
  misc_RNA (1)...(19): siRNA sense strand
uauugaauguggcagaaau

SEQ ID NO: 2509865 - RNA, 19 nt, Homo sapiens
  misc_RNA (1)...(19): siRNA sense strand
aauucauacuggagagaag

SEQ ID NO: 2509866 - RNA, 19 nt, Homo sapiens
  misc_RNA (1)...(19): siRNA sense strand
acaaaugugaugaauguga

SEQ ID NO: 2509867 - RNA, 19 nt, Homo sapiens
  misc_RNA (1)...(19): siRNA sense strand
gaaccugacaaauguaaaa

SEQ ID NO: 2509868 - RNA, 19 nt, Homo sapiens
  misc_RNA (1)...(19): siRNA sense strand
augugaagaauguggcaga

SEQ ID NO: 2509869 - RNA, 19 nt, Homo sapiens
  misc_RNA (1)...(19): siRNA sense strand
gcacaauaucacuuugcau

SEQ ID NO: 2509870 - RNA, 19 nt, Homo sapiens
  misc_RNA (1)...(19): siRNA sense strand
guaaggggcagaaagaaua

SEQ ID NO: 2509871 - RNA, 19 nt, Homo sapiens
  misc_RNA (1)...(19): siRNA sense strand
cuucagugcaaguaggaaa

SEQ ID NO: 2509872 - RNA, 19 nt, Homo sapiens
  misc_RNA (1)...(19): siRNA sense strand
gagucagugcuuauggaaa

SEQ ID NO: 2509873 - RNA, 19 nt, Homo sapiens
  misc_RNA (1)...(19): siRNA sense strand
cauuggaauaccugguuaa

SEQ ID NO: 2509874 - RNA, 19 nt, Homo sapiens
  misc_RNA (1)...(19): siRNA sense strand
cggcuauuucugugagaga

SEQ ID NO: 2509875 - RNA, 19 nt, Homo sapiens
  misc_RNA (1)...(19): siRNA sense strand
ggggaaaugaugaagguuu

SEQ ID NO: 2509876 - RNA, 19 nt, Homo sapiens
  misc_RNA (1)...(19): siRNA sense strand
gcuauuucugugagagaga

SEQ ID NO: 2509877 - RNA, 19 nt, Homo sapiens
  misc_RNA (1)...(19): siRNA sense strand
auuugcagccacagagaaa

SEQ ID NO: 2509878 - RNA, 19 nt, Homo sapiens
  misc_RNA (1)...(19): siRNA sense strand
uguugaauggcauaagaaa

SEQ ID NO: 2509879 - RNA, 19 nt, Homo sapiens
  misc_RNA (1)...(19): siRNA sense strand
gguuaauaauacccagcuu

SEQ ID NO: 2509880 - RNA, 19 nt, Homo sapiens
  misc_RNA (1)...(19): siRNA sense strand
ccuacaaccagcaguuaau

SEQ ID NO: 2509881 - RNA, 19 nt, Homo sapiens
  misc_RNA (1)...(19): siRNA sense strand
gagagagaacaauggcaca

SEQ ID NO: 2509882 - RNA, 19 nt, Homo sapiens
  misc_RNA (1)...(19): siRNA sense strand
guuuaguguugaauggcau

SEQ ID NO: 2509883 - RNA, 19 nt, Homo sapiens
  misc_RNA (1)...(19): siRNA sense strand
cugcucaguucaacggcua

SEQ ID NO: 2509884 - RNA, 19 nt, Homo sapiens
  misc_RNA (1)...(19): siRNA sense strand
ggcacugaauggaaggcau

SEQ ID NO: 2509885 - RNA, 19 nt, Homo sapiens
  misc_RNA (1)...(19): siRNA sense strand
agugcaaguaggaaauauu

SEQ ID NO: 2509886 - RNA, 19 nt, Homo sapiens
  misc_RNA (1)...(19): siRNA sense strand
caggcuaggaagauagaaa

SEQ ID NO: 2509887 - RNA, 19 nt, Homo sapiens
  misc_RNA (1)...(19): siRNA sense strand
gagccaacgaagaaggaau

SEQ ID NO: 2509888 - RNA, 19 nt, Homo sapiens
  misc_RNA (1)...(19): siRNA sense strand
cggcaaggucuuaaggacu

SEQ ID NO: 2509889 - RNA, 19 nt, Homo sapiens
  misc_RNA (1)...(19): siRNA sense strand
aggacugauucgucaacaa

SEQ ID NO: 2509890 - RNA, 19 nt, Homo sapiens
  misc_RNA (1)...(19): siRNA sense strand
aagcaucaggcuaggaaga

SEQ ID NO: 2509891 - RNA, 19 nt, Homo sapiens
  misc_RNA (1)...(19): siRNA sense strand
aggcuguggagcuguguua

SEQ ID NO: 2509892 - RNA, 19 nt, Homo sapiens
  misc_RNA (1)...(19): siRNA sense strand
aguccuccucagagaguua

SEQ ID NO: 2509893 - RNA, 19 nt, Homo sapiens
  misc_RNA (1)...(19): siRNA sense strand
cuuaaggacugauucguca

SEQ ID NO: 2509894 - RNA, 19 nt, Homo sapiens
  misc_RNA (1)...(19): siRNA sense strand
ccgcaaauuccgagacgaa

SEQ ID NO: 2509895 - RNA, 19 nt, Homo sapiens
  misc_RNA (1)...(19): siRNA sense strand
cugcagaucaucagaggaa

SEQ ID NO: 2509896 - RNA, 19 nt, Homo sapiens
  misc_RNA (1)...(19): siRNA sense strand
gcagaucaucagaggaaau

SEQ ID NO: 2509897 - RNA, 19 nt, Homo sapiens
  misc_RNA (1)...(19): siRNA sense strand
gcaaaguguguaacggaau

SEQ ID NO: 2509898 - RNA, 19 nt, Homo sapiens
  misc_RNA (1)...(19): siRNA sense strand
cugaaaaccguaaaggaaa

SEQ ID NO: 2509899 - RNA, 19 nt, Homo sapiens
  misc_RNA (1)...(19): siRNA sense strand
ucaacacaguggagcgaau

SEQ ID NO: 2509900 - RNA, 19 nt, Homo sapiens
  misc_RNA (1)...(19): siRNA sense strand
aggagcugcccaugagaaa

SEQ ID NO: 2509901 - RNA, 19 nt, Homo sapiens
  misc_RNA (1)...(19): siRNA sense strand
cgcaaaguguguaacggaa

SEQ ID NO: 2509902 - RNA, 19 nt, Homo sapiens
  misc_RNA (1)...(19): siRNA sense strand
gagacgaagccacgugcaa

SEQ ID NO: 2509903 - RNA, 19 nt, Homo sapiens
  misc_RNA (1)...(19): siRNA sense strand
ugaaaaccguaaaggaaau

SEQ ID NO: 2509904 - RNA, 19 nt, Homo sapiens
  misc_RNA (1)...(19): siRNA sense strand
cuccagaggauguucaaua

SEQ ID NO: 2509905 - RNA, 19 nt, Homo sapiens
  misc_RNA (1)...(19): siRNA sense strand
uggaaaaccugcagaucau

SEQ ID NO: 2509906 - RNA, 19 nt, Homo sapiens
  misc_RNA (1)...(19): siRNA sense strand
gcaacaugucgauggacuu

SEQ ID NO: 2509907 - RNA, 19 nt, Homo sapiens
  misc_RNA (1)...(19): siRNA sense strand
cgaaaauuccuaugccuua

SEQ ID NO: 2509908 - RNA, 19 nt, Homo sapiens
  misc_RNA (1)...(19): siRNA sense strand
cuccauaaaugcuacgaau

SEQ ID NO: 2509909 - RNA, 19 nt, Homo sapiens
  misc_RNA (1)...(19): siRNA sense strand
gugaggugguccuugggaa

SEQ ID NO: 2509910 - RNA, 19 nt, Homo sapiens
  misc_RNA (1)...(19): siRNA sense strand
cguaccagauggaugugaa

SEQ ID NO: 2509911 - RNA, 19 nt, Homo sapiens
  misc_RNA (1)...(19): siRNA sense strand
ggaaaagaaaguuugccaa

SEQ ID NO: 2509912 - RNA, 19 nt, Homo sapiens
  misc_RNA (1)...(19): siRNA sense strand
agaggagaacugccagaaa

SEQ ID NO: 2509913 - RNA, 19 nt, Homo sapiens
  misc_RNA (1)...(19): siRNA sense strand
guguguaacggaauaggua

SEQ ID NO: 2509914 - RNA, 19 nt, Homo sapiens
  misc_RNA (1)...(19): siRNA sense strand
ucugaaaaccguaaaggaa

SEQ ID NO: 2509915 - RNA, 19 nt, Homo sapiens
  misc_RNA (1)...(19): siRNA sense strand
uggugaauuuaaagacuca

SEQ ID NO: 2509916 - RNA, 19 nt, Homo sapiens
  misc_RNA (1)...(19): siRNA sense strand
ugaggugguccuugggaau

SEQ ID NO: 2509917 - RNA, 19 nt, Homo sapiens
  misc_RNA (1)...(19): siRNA sense strand
ccgcaaaguguguaacgga

SEQ ID NO: 2509918 - RNA, 19 nt, Homo sapiens
  misc_RNA (1)...(19): siRNA sense strand
accuaugugcagaggaauu

SEQ ID NO: 2509919 - RNA, 19 nt, Homo sapiens
  misc_RNA (1)...(19): siRNA sense strand
ggagaggagaacugccaga

SEQ ID NO: 2509920 - RNA, 19 nt, Homo sapiens
  misc_RNA (1)...(19): siRNA sense strand
augugaaccccgagggcaa

SEQ ID NO: 2509921 - RNA, 19 nt, Homo sapiens
  misc_RNA (1)...(19): siRNA sense strand
uccauaaaugcuacgaaua

SEQ ID NO: 2509922 - RNA, 19 nt, Homo sapiens
  misc_RNA (1)...(19): siRNA sense strand
ggaaauuaccuaugugcag

SEQ ID NO: 2509923 - RNA, 19 nt, Homo sapiens
  misc_RNA (1)...(19): siRNA sense strand
gagucgggcucuggaggaa

SEQ ID NO: 2509924 - RNA, 19 nt, Homo sapiens
  misc_RNA (1)...(19): siRNA sense strand
ccgcaaauuccgagacgaa

SEQ ID NO: 2509925 - RNA, 19 nt, Homo sapiens
  misc_RNA (1)...(19): siRNA sense strand
cugcagaucaucagaggaa

SEQ ID NO: 2509926 - RNA, 19 nt, Homo sapiens
  misc_RNA (1)...(19): siRNA sense strand
gcagaucaucagaggaaau

SEQ ID NO: 2509927 - RNA, 19 nt, Homo sapiens
  misc_RNA (1)...(19): siRNA sense strand
gcaaaguguguaacggaau

SEQ ID NO: 2509928 - RNA, 19 nt, Homo sapiens
  misc_RNA (1)...(19): siRNA sense strand
cugaaaaccguaaaggaaa

SEQ ID NO: 2509929 - RNA, 19 nt, Homo sapiens
  misc_RNA (1)...(19): siRNA sense strand
ucaacacaguggagcgaau

SEQ ID NO: 2509930 - RNA, 19 nt, Homo sapiens
  misc_RNA (1)...(19): siRNA sense strand
aggagcugcccaugagaaa

SEQ ID NO: 2509931 - RNA, 19 nt, Homo sapiens
  misc_RNA (1)...(19): siRNA sense strand
cgcaaaguguguaacggaa

SEQ ID NO: 2509932 - RNA, 19 nt, Homo sapiens
  misc_RNA (1)...(19): siRNA sense strand
gagacgaagccacgugcaa

SEQ ID NO: 2509933 - RNA, 19 nt, Homo sapiens
  misc_RNA (1)...(19): siRNA sense strand
ugaaaaccguaaaggaaau

SEQ ID NO: 2509934 - RNA, 19 nt, Homo sapiens
  misc_RNA (1)...(19): siRNA sense strand
cuccagaggauguucaaua

SEQ ID NO: 2509935 - RNA, 19 nt, Homo sapiens
  misc_RNA (1)...(19): siRNA sense strand
uggaaaaccugcagaucau

SEQ ID NO: 2509936 - RNA, 19 nt, Homo sapiens
  misc_RNA (1)...(19): siRNA sense strand
gcaacaugucgauggacuu

SEQ ID NO: 2509937 - RNA, 19 nt, Homo sapiens
  misc_RNA (1)...(19): siRNA sense strand
cgaaaauuccuaugccuua

SEQ ID NO: 2509938 - RNA, 19 nt, Homo sapiens
  misc_RNA (1)...(19): siRNA sense strand
cuccauaaaugcuacgaau

SEQ ID NO: 2509939 - RNA, 19 nt, Homo sapiens
  misc_RNA (1)...(19): siRNA sense strand
gugaggugguccuugggaa

SEQ ID NO: 2509940 - RNA, 19 nt, Homo sapiens
  misc_RNA (1)...(19): siRNA sense strand
cguaccagauggaugugaa

SEQ ID NO: 2509941 - RNA, 19 nt, Homo sapiens
  misc_RNA (1)...(19): siRNA sense strand
ggaaaagaaaguuugccaa

SEQ ID NO: 2509942 - RNA, 19 nt, Homo sapiens
  misc_RNA (1)...(19): siRNA sense strand
agaggagaacugccagaaa

SEQ ID NO: 2509943 - RNA, 19 nt, Homo sapiens
  misc_RNA (1)...(19): siRNA sense strand
guguguaacggaauaggua

SEQ ID NO: 2509944 - RNA, 19 nt, Homo sapiens
  misc_RNA (1)...(19): siRNA sense strand
ucugaaaaccguaaaggaa

SEQ ID NO: 2509945 - RNA, 19 nt, Homo sapiens
  misc_RNA (1)...(19): siRNA sense strand
uggugaauuuaaagacuca

SEQ ID NO: 2509946 - RNA, 19 nt, Homo sapiens
  misc_RNA (1)...(19): siRNA sense strand
ugaggugguccuugggaau

SEQ ID NO: 2509947 - RNA, 19 nt, Homo sapiens
  misc_RNA (1)...(19): siRNA sense strand
ccgcaaaguguguaacgga

SEQ ID NO: 2509948 - RNA, 19 nt, Homo sapiens
  misc_RNA (1)...(19): siRNA sense strand
accuaugugcagaggaauu

SEQ ID NO: 2509949 - RNA, 19 nt, Homo sapiens
  misc_RNA (1)...(19): siRNA sense strand
ggagaggagaacugccaga

SEQ ID NO: 2509950 - RNA, 19 nt, Homo sapiens
  misc_RNA (1)...(19): siRNA sense strand
augugaaccccgagggcaa

SEQ ID NO: 2509951 - RNA, 19 nt, Homo sapiens
  misc_RNA (1)...(19): siRNA sense strand
uccauaaaugcuacgaaua

SEQ ID NO: 2509952 - RNA, 19 nt, Homo sapiens
  misc_RNA (1)...(19): siRNA sense strand
ggaaauuaccuaugugcag

SEQ ID NO: 2509953 - RNA, 19 nt, Homo sapiens
  misc_RNA (1)...(19): siRNA sense strand
gagucgggcucuggaggaa

SEQ ID NO: 2509954 - RNA, 19 nt, Homo sapiens
  misc_RNA (1)...(19): siRNA sense strand
ccgcaaauuccgagacgaa

SEQ ID NO: 2509955 - RNA, 19 nt, Homo sapiens
  misc_RNA (1)...(19): siRNA sense strand
cugcagaucaucagaggaa

SEQ ID NO: 2509956 - RNA, 19 nt, Homo sapiens
  misc_RNA (1)...(19): siRNA sense strand
gcagaucaucagaggaaau

SEQ ID NO: 2509957 - RNA, 19 nt, Homo sapiens
  misc_RNA (1)...(19): siRNA sense strand
gcaaaguguguaacggaau

SEQ ID NO: 2509958 - RNA, 19 nt, Homo sapiens
  misc_RNA (1)...(19): siRNA sense strand
cugaaaaccguaaaggaaa

SEQ ID NO: 2509959 - RNA, 19 nt, Homo sapiens
  misc_RNA (1)...(19): siRNA sense strand
ucaacacaguggagcgaau

SEQ ID NO: 2509960 - RNA, 19 nt, Homo sapiens
  misc_RNA (1)...(19): siRNA sense strand
aggagcugcccaugagaaa

SEQ ID NO: 2509961 - RNA, 19 nt, Homo sapiens
  misc_RNA (1)...(19): siRNA sense strand
cgcaaaguguguaacggaa

SEQ ID NO: 2509962 - RNA, 19 nt, Homo sapiens
  misc_RNA (1)...(19): siRNA sense strand
gagacgaagccacgugcaa

SEQ ID NO: 2509963 - RNA, 19 nt, Homo sapiens
  misc_RNA (1)...(19): siRNA sense strand
ugaaaaccguaaaggaaau

SEQ ID NO: 2509964 - RNA, 19 nt, Homo sapiens
  misc_RNA (1)...(19): siRNA sense strand
cuccagaggauguucaaua

SEQ ID NO: 2509965 - RNA, 19 nt, Homo sapiens
  misc_RNA (1)...(19): siRNA sense strand
uggaaaaccugcagaucau

SEQ ID NO: 2509966 - RNA, 19 nt, Homo sapiens
  misc_RNA (1)...(19): siRNA sense strand
gcaacaugucgauggacuu

SEQ ID NO: 2509967 - RNA, 19 nt, Homo sapiens
  misc_RNA (1)...(19): siRNA sense strand
cgaaaauuccuaugccuua

SEQ ID NO: 2509968 - RNA, 19 nt, Homo sapiens
  misc_RNA (1)...(19): siRNA sense strand
cuccauaaaugcuacgaau

SEQ ID NO: 2509969 - RNA, 19 nt, Homo sapiens
  misc_RNA (1)...(19): siRNA sense strand
gugaggugguccuugggaa

SEQ ID NO: 2509970 - RNA, 19 nt, Homo sapiens
  misc_RNA (1)...(19): siRNA sense strand
cguaccagauggaugugaa

SEQ ID NO: 2509971 - RNA, 19 nt, Homo sapiens
  misc_RNA (1)...(19): siRNA sense strand
ggaaaagaaaguuugccaa

SEQ ID NO: 2509972 - RNA, 19 nt, Homo sapiens
  misc_RNA (1)...(19): siRNA sense strand
agaggagaacugccagaaa

SEQ ID NO: 2509973 - RNA, 19 nt, Homo sapiens
  misc_RNA (1)...(19): siRNA sense strand
guguguaacggaauaggua

SEQ ID NO: 2509974 - RNA, 19 nt, Homo sapiens
  misc_RNA (1)...(19): siRNA sense strand
ucugaaaaccguaaaggaa

SEQ ID NO: 2509975 - RNA, 19 nt, Homo sapiens
  misc_RNA (1)...(19): siRNA sense strand
uggugaauuuaaagacuca

SEQ ID NO: 2509976 - RNA, 19 nt, Homo sapiens
  misc_RNA (1)...(19): siRNA sense strand
ugaggugguccuugggaau

SEQ ID NO: 2509977 - RNA, 19 nt, Homo sapiens
  misc_RNA (1)...(19): siRNA sense strand
ccgcaaaguguguaacgga

SEQ ID NO: 2509978 - RNA, 19 nt, Homo sapiens
  misc_RNA (1)...(19): siRNA sense strand
accuaugugcagaggaauu

SEQ ID NO: 2509979 - RNA, 19 nt, Homo sapiens
  misc_RNA (1)...(19): siRNA sense strand
ggagaggagaacugccaga

SEQ ID NO: 2509980 - RNA, 19 nt, Homo sapiens
  misc_RNA (1)...(19): siRNA sense strand
augugaaccccgagggcaa

SEQ ID NO: 2509981 - RNA, 19 nt, Homo sapiens
  misc_RNA (1)...(19): siRNA sense strand
uccauaaaugcuacgaaua

SEQ ID NO: 2509982 - RNA, 19 nt, Homo sapiens
  misc_RNA (1)...(19): siRNA sense strand
ggaaauuaccuaugugcag

SEQ ID NO: 2509983 - RNA, 19 nt, Homo sapiens
  misc_RNA (1)...(19): siRNA sense strand
gagucgggcucuggaggaa

SEQ ID NO: 2509984 - RNA, 19 nt, Homo sapiens
  misc_RNA (1)...(19): siRNA sense strand
ccgcaaauuccgagacgaa

SEQ ID NO: 2509985 - RNA, 19 nt, Homo sapiens
  misc_RNA (1)...(19): siRNA sense strand
cugcagaucaucagaggaa

SEQ ID NO: 2509986 - RNA, 19 nt, Homo sapiens
  misc_RNA (1)...(19): siRNA sense strand
gcagaucaucagaggaaau

SEQ ID NO: 2509987 - RNA, 19 nt, Homo sapiens
  misc_RNA (1)...(19): siRNA sense strand
gcaaaguguguaacggaau

SEQ ID NO: 2509988 - RNA, 19 nt, Homo sapiens
  misc_RNA (1)...(19): siRNA sense strand
cugaaaaccguaaaggaaa

SEQ ID NO: 2509989 - RNA, 19 nt, Homo sapiens
  misc_RNA (1)...(19): siRNA sense strand
ucaacacaguggagcgaau

SEQ ID NO: 2509990 - RNA, 19 nt, Homo sapiens
  misc_RNA (1)...(19): siRNA sense strand
aggagcugcccaugagaaa

SEQ ID NO: 2509991 - RNA, 19 nt, Homo sapiens
  misc_RNA (1)...(19): siRNA sense strand
cgcaaaguguguaacggaa

SEQ ID NO: 2509992 - RNA, 19 nt, Homo sapiens
  misc_RNA (1)...(19): siRNA sense strand
gagacgaagccacgugcaa

SEQ ID NO: 2509993 - RNA, 19 nt, Homo sapiens
  misc_RNA (1)...(19): siRNA sense strand
ugaaaaccguaaaggaaau

SEQ ID NO: 2509994 - RNA, 19 nt, Homo sapiens
  misc_RNA (1)...(19): siRNA sense strand
cuccagaggauguucaaua

SEQ ID NO: 2509995 - RNA, 19 nt, Homo sapiens
  misc_RNA (1)...(19): siRNA sense strand
uggaaaaccugcagaucau

SEQ ID NO: 2509996 - RNA, 19 nt, Homo sapiens
  misc_RNA (1)...(19): siRNA sense strand
gcaacaugucgauggacuu

SEQ ID NO: 2509997 - RNA, 19 nt, Homo sapiens
  misc_RNA (1)...(19): siRNA sense strand
cgaaaauuccuaugccuua

SEQ ID NO: 2509998 - RNA, 19 nt, Homo sapiens
  misc_RNA (1)...(19): siRNA sense strand
cuccauaaaugcuacgaau

SEQ ID NO: 2509999 - RNA, 19 nt, Homo sapiens
  misc_RNA (1)...(19): siRNA sense strand
gugaggugguccuugggaa

SEQ ID NO: 2510000 - RNA, 19 nt, Homo sapiens
  misc_RNA (1)...(19): siRNA sense strand
cguaccagauggaugugaa

SEQ ID NO: 2510001 - RNA, 19 nt, Homo sapiens
  misc_RNA (1)...(19): siRNA sense strand
ggaaaagaaaguuugccaa

SEQ ID NO: 2510002 - RNA, 19 nt, Homo sapiens
  misc_RNA (1)...(19): siRNA sense strand
agaggagaacugccagaaa

SEQ ID NO: 2510003 - RNA, 19 nt, Homo sapiens
  misc_RNA (1)...(19): siRNA sense strand
guguguaacggaauaggua

SEQ ID NO: 2510004 - RNA, 19 nt, Homo sapiens
  misc_RNA (1)...(19): siRNA sense strand
ucugaaaaccguaaaggaa

SEQ ID NO: 2510005 - RNA, 19 nt, Homo sapiens
  misc_RNA (1)...(19): siRNA sense strand
uggugaauuuaaagacuca

SEQ ID NO: 2510006 - RNA, 19 nt, Homo sapiens
  misc_RNA (1)...(19): siRNA sense strand
ugaggugguccuugggaau

SEQ ID NO: 2510007 - RNA, 19 nt, Homo sapiens
  misc_RNA (1)...(19): siRNA sense strand
ccgcaaaguguguaacgga

SEQ ID NO: 2510008 - RNA, 19 nt, Homo sapiens
  misc_RNA (1)...(19): siRNA sense strand
accuaugugcagaggaauu

SEQ ID NO: 2510009 - RNA, 19 nt, Homo sapiens
  misc_RNA (1)...(19): siRNA sense strand
ggagaggagaacugccaga

SEQ ID NO: 2510010 - RNA, 19 nt, Homo sapiens
  misc_RNA (1)...(19): siRNA sense strand
augugaaccccgagggcaa

SEQ ID NO: 2510011 - RNA, 19 nt, Homo sapiens
  misc_RNA (1)...(19): siRNA sense strand
uccauaaaugcuacgaaua

SEQ ID NO: 2510012 - RNA, 19 nt, Homo sapiens
  misc_RNA (1)...(19): siRNA sense strand
ggaaauuaccuaugugcag

SEQ ID NO: 2510013 - RNA, 19 nt, Homo sapiens
  misc_RNA (1)...(19): siRNA sense strand
gagucgggcucuggaggaa

SEQ ID NO: 2510014 - RNA, 19 nt, Homo sapiens
  misc_RNA (1)...(19): siRNA sense strand
gggaagaggaagagagcau

SEQ ID NO: 2510015 - RNA, 19 nt, Homo sapiens
  misc_RNA (1)...(19): siRNA sense strand
caggauaguuggaggaaaa

SEQ ID NO: 2510016 - RNA, 19 nt, Homo sapiens
  misc_RNA (1)...(19): siRNA sense strand
cugcagagcugaagggaca

SEQ ID NO: 2510017 - RNA, 19 nt, Homo sapiens
  misc_RNA (1)...(19): siRNA sense strand
ccagaacacccuagggaaa

SEQ ID NO: 2510018 - RNA, 19 nt, Homo sapiens
  misc_RNA (1)...(19): siRNA sense strand
aguuagaaguacuggaaau

SEQ ID NO: 2510019 - RNA, 19 nt, Homo sapiens
  misc_RNA (1)...(19): siRNA sense strand
cugugaagcuguuggaaau

SEQ ID NO: 2510020 - RNA, 19 nt, Homo sapiens
  misc_RNA (1)...(19): siRNA sense strand
agagagaucuagagcacaa

SEQ ID NO: 2510021 - RNA, 19 nt, Homo sapiens
  misc_RNA (1)...(19): siRNA sense strand
cggauaaggcagaguaaca

SEQ ID NO: 2510022 - RNA, 19 nt, Homo sapiens
  misc_RNA (1)...(19): siRNA sense strand
acuaugauuucaagggaua

SEQ ID NO: 2510023 - RNA, 19 nt, Homo sapiens
  misc_RNA (1)...(19): siRNA sense strand
gccucaaauuaaugggaaa

SEQ ID NO: 2510024 - RNA, 19 nt, Homo sapiens
  misc_RNA (1)...(19): siRNA sense strand
ggagcaugauggagaaaca

SEQ ID NO: 2510025 - RNA, 19 nt, Homo sapiens
  misc_RNA (1)...(19): siRNA sense strand
ccuagaaauaguacaguua

SEQ ID NO: 2510026 - RNA, 19 nt, Homo sapiens
  misc_RNA (1)...(19): siRNA sense strand
ccagaugggaagaggaaga

SEQ ID NO: 2510027 - RNA, 19 nt, Homo sapiens
  misc_RNA (1)...(19): siRNA sense strand
cagaagaacacaaagaaga

SEQ ID NO: 2510028 - RNA, 19 nt, Homo sapiens
  misc_RNA (1)...(19): siRNA sense strand
aggccaagcccuacaguua

SEQ ID NO: 2510029 - RNA, 19 nt, Homo sapiens
  misc_RNA (1)...(19): siRNA sense strand
gcaagugcuccaugggaaa

SEQ ID NO: 2510030 - RNA, 19 nt, Homo sapiens
  misc_RNA (1)...(19): siRNA sense strand
guaaauaaccauaacccaa

SEQ ID NO: 2510031 - RNA, 19 nt, Homo sapiens
  misc_RNA (1)...(19): siRNA sense strand
gagcaaaggaggcaaguca

SEQ ID NO: 2510032 - RNA, 19 nt, Homo sapiens
  misc_RNA (1)...(19): siRNA sense strand
aggcacaacuaucgggaau

SEQ ID NO: 2510033 - RNA, 19 nt, Homo sapiens
  misc_RNA (1)...(19): siRNA sense strand
ccaauaacaguaaggacua

SEQ ID NO: 2510034 - RNA, 19 nt, Homo sapiens
  misc_RNA (1)...(19): siRNA sense strand
gguaaaaggcagaggaauc

SEQ ID NO: 2510035 - RNA, 19 nt, Homo sapiens
  misc_RNA (1)...(19): siRNA sense strand
cuguaagagaagugaguga

SEQ ID NO: 2510036 - RNA, 19 nt, Homo sapiens
  misc_RNA (1)...(19): siRNA sense strand
gguuaaugcaagaccaaau

SEQ ID NO: 2510037 - RNA, 19 nt, Homo sapiens
  misc_RNA (1)...(19): siRNA sense strand
cugagaagaccgacauuua

SEQ ID NO: 2510038 - RNA, 19 nt, Homo sapiens
  misc_RNA (1)...(19): siRNA sense strand
agaugugauugaagaacua

SEQ ID NO: 2510039 - RNA, 19 nt, Homo sapiens
  misc_RNA (1)...(19): siRNA sense strand
gcaauuaguagcagagguu

SEQ ID NO: 2510040 - RNA, 19 nt, Homo sapiens
  misc_RNA (1)...(19): siRNA sense strand
gaaguaagcauguuggcua

SEQ ID NO: 2510041 - RNA, 19 nt, Homo sapiens
  misc_RNA (1)...(19): siRNA sense strand
caguaaugauuguagccua

SEQ ID NO: 2510042 - RNA, 19 nt, Homo sapiens
  misc_RNA (1)...(19): siRNA sense strand
caaacccaguguagagaaa

SEQ ID NO: 2510043 - RNA, 19 nt, Homo sapiens
  misc_RNA (1)...(19): siRNA sense strand
caguaaggacuaugaucaa

SEQ ID NO: 2510044 - RNA, 19 nt, Homo sapiens
  misc_RNA (1)...(19): siRNA sense strand
agcaaagacucaaguacaa

SEQ ID NO: 2510045 - RNA, 19 nt, Homo sapiens
  misc_RNA (1)...(19): siRNA sense strand
ccaaauaauguggagguua

SEQ ID NO: 2510046 - RNA, 19 nt, Homo sapiens
  misc_RNA (1)...(19): siRNA sense strand
gcuauaauaaaguccgaaa

SEQ ID NO: 2510047 - RNA, 19 nt, Homo sapiens
  misc_RNA (1)...(19): siRNA sense strand
agagaugaggccagugaaa

SEQ ID NO: 2510048 - RNA, 19 nt, Homo sapiens
  misc_RNA (1)...(19): siRNA sense strand
agucaagaugaaaggacaa

SEQ ID NO: 2510049 - RNA, 19 nt, Homo sapiens
  misc_RNA (1)...(19): siRNA sense strand
gugaaacacaaauggacua

SEQ ID NO: 2510050 - RNA, 19 nt, Homo sapiens
  misc_RNA (1)...(19): siRNA sense strand
ccucaaggcacaaugcuaa

SEQ ID NO: 2510051 - RNA, 19 nt, Homo sapiens
  misc_RNA (1)...(19): siRNA sense strand
ccugugaagcuguuggaaa

SEQ ID NO: 2510052 - RNA, 19 nt, Homo sapiens
  misc_RNA (1)...(19): siRNA sense strand
uugguuagauugauggaaa

SEQ ID NO: 2510053 - RNA, 19 nt, Homo sapiens
  misc_RNA (1)...(19): siRNA sense strand
ugauggaaguaaagugaga

SEQ ID NO: 2510054 - RNA, 19 nt, Homo sapiens
  misc_RNA (1)...(19): siRNA sense strand
cagucaagaugaaaggaca

SEQ ID NO: 2510055 - RNA, 19 nt, Homo sapiens
  misc_RNA (1)...(19): siRNA sense strand
ggaucaugccagacaauau

SEQ ID NO: 2510056 - RNA, 19 nt, Homo sapiens
  misc_RNA (1)...(19): siRNA sense strand
aggagaagccagauguaau

SEQ ID NO: 2510057 - RNA, 19 nt, Homo sapiens
  misc_RNA (1)...(19): siRNA sense strand
gcucaaaucacuuuaccaa

SEQ ID NO: 2510058 - RNA, 19 nt, Homo sapiens
  misc_RNA (1)...(19): siRNA sense strand
agggagaauaggaggcauu

SEQ ID NO: 2510059 - RNA, 19 nt, Homo sapiens
  misc_RNA (1)...(19): siRNA sense strand
ucuaagaggaaacagaaua

SEQ ID NO: 2510060 - RNA, 19 nt, Homo sapiens
  misc_RNA (1)...(19): siRNA sense strand
caucaagagacaagaaagu

SEQ ID NO: 2510061 - RNA, 19 nt, Homo sapiens
  misc_RNA (1)...(19): siRNA sense strand
gcaacagaacuuuguaaau

SEQ ID NO: 2510062 - RNA, 19 nt, Homo sapiens
  misc_RNA (1)...(19): siRNA sense strand
cacaauugcuucugaaaca

SEQ ID NO: 2510063 - RNA, 19 nt, Homo sapiens
  misc_RNA (1)...(19): siRNA sense strand
agaugaggccagugaaaca

SEQ ID NO: 2510064 - RNA, 19 nt, Homo sapiens
  misc_RNA (1)...(19): siRNA sense strand
gccuuuaccugcauggaaa

SEQ ID NO: 2510065 - RNA, 19 nt, Homo sapiens
  misc_RNA (1)...(19): siRNA sense strand
augacuacaucgugcuaaa

SEQ ID NO: 2510066 - RNA, 19 nt, Homo sapiens
  misc_RNA (1)...(19): siRNA sense strand
gauugaagaacuagcccaa

SEQ ID NO: 2510067 - RNA, 19 nt, Homo sapiens
  misc_RNA (1)...(19): siRNA sense strand
acaaauguguggccagcaa

SEQ ID NO: 2510068 - RNA, 19 nt, Homo sapiens
  misc_RNA (1)...(19): siRNA sense strand
cugacuggauacaggagaa

SEQ ID NO: 2510069 - RNA, 19 nt, Homo sapiens
  misc_RNA (1)...(19): siRNA sense strand
auucucaccuauaggauaa

SEQ ID NO: 2510070 - RNA, 19 nt, Homo sapiens
  misc_RNA (1)...(19): siRNA sense strand
ccaaccaugucaagccaaa

SEQ ID NO: 2510071 - RNA, 19 nt, Homo sapiens
  misc_RNA (1)...(19): siRNA sense strand
caaagaugucaaugucaaa

SEQ ID NO: 2510072 - RNA, 19 nt, Homo sapiens
  misc_RNA (1)...(19): siRNA sense strand
gcaaaggaggcaagucauu

SEQ ID NO: 2510073 - RNA, 19 nt, Homo sapiens
  misc_RNA (1)...(19): siRNA sense strand
gcagaaucacaguccauaa

SEQ ID NO: 2510074 - RNA, 19 nt, Homo sapiens
  misc_RNA (1)...(19): siRNA sense strand
cgaaaacuucagaaagaua

SEQ ID NO: 2510075 - RNA, 19 nt, Homo sapiens
  misc_RNA (1)...(19): siRNA sense strand
ggauacaggagaagccaga

SEQ ID NO: 2510076 - RNA, 19 nt, Homo sapiens
  misc_RNA (1)...(19): siRNA sense strand
acaaaguaaacgccaguua

SEQ ID NO: 2510077 - RNA, 19 nt, Homo sapiens
  misc_RNA (1)...(19): siRNA sense strand
gcgaagaguaguaaugcuu

SEQ ID NO: 2510078 - RNA, 19 nt, Homo sapiens
  misc_RNA (1)...(19): siRNA sense strand
gggacaaauuacuacugaa

SEQ ID NO: 2510079 - RNA, 19 nt, Homo sapiens
  misc_RNA (1)...(19): siRNA sense strand
caggaaacaaugugcucua

SEQ ID NO: 2510080 - RNA, 19 nt, Homo sapiens
  misc_RNA (1)...(19): siRNA sense strand
ucaacaagugugaugcaaa

SEQ ID NO: 2510081 - RNA, 19 nt, Homo sapiens
  misc_RNA (1)...(19): siRNA sense strand
gggacuuuguauauaagaa

SEQ ID NO: 2510082 - RNA, 19 nt, Homo sapiens
  misc_RNA (1)...(19): siRNA sense strand
gaggaaacuauaucuguaa

SEQ ID NO: 2510083 - RNA, 19 nt, Homo sapiens
  misc_RNA (1)...(19): siRNA sense strand
aaucaaagagccugacuau

SEQ ID NO: 2510084 - RNA, 19 nt, Homo sapiens
  misc_RNA (1)...(19): siRNA sense strand
aggauucacugcugguuaa

SEQ ID NO: 2510085 - RNA, 19 nt, Homo sapiens
  misc_RNA (1)...(19): siRNA sense strand
acagaaagaucuauggaga

SEQ ID NO: 2510086 - RNA, 19 nt, Homo sapiens
  misc_RNA (1)...(19): siRNA sense strand
caacuaaggcgaagcccaa

SEQ ID NO: 2510087 - RNA, 19 nt, Homo sapiens
  misc_RNA (1)...(19): siRNA sense strand
uggagaaugauguggaaca

SEQ ID NO: 2510088 - RNA, 19 nt, Homo sapiens
  misc_RNA (1)...(19): siRNA sense strand
aggagaaaucgcagauaca

SEQ ID NO: 2510089 - RNA, 19 nt, Homo sapiens
  misc_RNA (1)...(19): siRNA sense strand
agcccaaaguucaggaaga

SEQ ID NO: 2510090 - RNA, 19 nt, Homo sapiens
  misc_RNA (1)...(19): siRNA sense strand
agaacaaagaccagcuaga

SEQ ID NO: 2510091 - RNA, 19 nt, Homo sapiens
  misc_RNA (1)...(19): siRNA sense strand
agaaguugcugcaggagga

SEQ ID NO: 2510092 - RNA, 19 nt, Homo sapiens
  misc_RNA (1)...(19): siRNA sense strand
aggagcagcuggagcgcau

SEQ ID NO: 2510093 - RNA, 19 nt, Homo sapiens
  misc_RNA (1)...(19): siRNA sense strand
gaaugggacugguggguac

SEQ ID NO: 2510094 - RNA, 19 nt, Homo sapiens
  misc_RNA (1)...(19): siRNA sense strand
cccaacgggcagagaagaa

SEQ ID NO: 2510095 - RNA, 19 nt, Homo sapiens
  misc_RNA (1)...(19): siRNA sense strand
agacaagauacgagcccuu

SEQ ID NO: 2510096 - RNA, 19 nt, Homo sapiens
  misc_RNA (1)...(19): siRNA sense strand
gcaagaggacacugggcca

SEQ ID NO: 2510097 - RNA, 19 nt, Homo sapiens
  misc_RNA (1)...(19): siRNA sense strand
ggcagucagacgagaggaa

SEQ ID NO: 2510098 - RNA, 19 nt, Homo sapiens
  misc_RNA (1)...(19): siRNA sense strand
cagacgagaggaagcgaga

SEQ ID NO: 2510099 - RNA, 19 nt, Homo sapiens
  misc_RNA (1)...(19): siRNA sense strand
gucugaagccugugaagau

SEQ ID NO: 2510100 - RNA, 19 nt, Homo sapiens
  misc_RNA (1)...(19): siRNA sense strand
agccaaaggaagagcaauc

SEQ ID NO: 2510101 - RNA, 19 nt, Homo sapiens
  misc_RNA (1)...(19): siRNA sense strand
cgucaaggcuccagcaguc

SEQ ID NO: 2510102 - RNA, 19 nt, Homo sapiens
  misc_RNA (1)...(19): siRNA sense strand
gagugcaaauaaagagaac

SEQ ID NO: 2510103 - RNA, 19 nt, Homo sapiens
  misc_RNA (1)...(19): siRNA sense strand
gugcagaggagcagcugga

SEQ ID NO: 2510104 - RNA, 19 nt, Homo sapiens
  misc_RNA (1)...(19): siRNA sense strand
cagguggagcacugggcaa

SEQ ID NO: 2510105 - RNA, 19 nt, Homo sapiens
  misc_RNA (1)...(19): siRNA sense strand
cucauauggcccaggagaa

SEQ ID NO: 2510106 - RNA, 19 nt, Homo sapiens
  misc_RNA (1)...(19): siRNA sense strand
agauggagcaguaccgaga

SEQ ID NO: 2510107 - RNA, 19 nt, Homo sapiens
  misc_RNA (1)...(19): siRNA sense strand
caagaugagugcagaggag

SEQ ID NO: 2510108 - RNA, 19 nt, Homo sapiens
  misc_RNA (1)...(19): siRNA sense strand
acacacaccagcagagcga

SEQ ID NO: 2510109 - RNA, 19 nt, Homo sapiens
  misc_RNA (1)...(19): siRNA sense strand
uuaaagagaacaaagacca

SEQ ID NO: 2510110 - RNA, 19 nt, Homo sapiens
  misc_RNA (1)...(19): siRNA sense strand
ugaagaagaaguugggaga

SEQ ID NO: 2510111 - RNA, 19 nt, Homo sapiens
  misc_RNA (1)...(19): siRNA sense strand
uggaauuguugauggguga

SEQ ID NO: 2510112 - RNA, 19 nt, Homo sapiens
  misc_RNA (1)...(19): siRNA sense strand
agaauaagacauuaggaga

SEQ ID NO: 2510113 - RNA, 19 nt, Homo sapiens
  misc_RNA (1)...(19): siRNA sense strand
uggaaaugaaacggagaaa

SEQ ID NO: 2510114 - RNA, 19 nt, Homo sapiens
  misc_RNA (1)...(19): siRNA sense strand
guggaaaugaaacggagaa

SEQ ID NO: 2510115 - RNA, 19 nt, Homo sapiens
  misc_RNA (1)...(19): siRNA sense strand
ccaccaugucuuugaugaa

SEQ ID NO: 2510116 - RNA, 19 nt, Homo sapiens
  misc_RNA (1)...(19): siRNA sense strand
aguguguggugguugguaa

SEQ ID NO: 2510117 - RNA, 19 nt, Homo sapiens
  misc_RNA (1)...(19): siRNA sense strand
cccuaugggaugagaacau

SEQ ID NO: 2510118 - RNA, 19 nt, Homo sapiens
  misc_RNA (1)...(19): siRNA sense strand
gaaauaagauccagccuug

SEQ ID NO: 2510119 - RNA, 19 nt, Homo sapiens
  misc_RNA (1)...(19): siRNA sense strand
gaggguaucuuguggccau

SEQ ID NO: 2510120 - RNA, 19 nt, Homo sapiens
  misc_RNA (1)...(19): siRNA sense strand
agaaguugggagaaggaca

SEQ ID NO: 2510121 - RNA, 19 nt, Homo sapiens
  misc_RNA (1)...(19): siRNA sense strand
acacccaacaacaggaauu

SEQ ID NO: 2510122 - RNA, 19 nt, Homo sapiens
  misc_RNA (1)...(19): siRNA sense strand
ggugguugguaauggagga

SEQ ID NO: 2510123 - RNA, 19 nt, Homo sapiens
  misc_RNA (1)...(19): siRNA sense strand
caacaggaauuauugccau

SEQ ID NO: 2510124 - RNA, 19 nt, Homo sapiens
  misc_RNA (1)...(19): siRNA sense strand
cccuaauacgacagugauu

SEQ ID NO: 2510125 - RNA, 19 nt, Homo sapiens
  misc_RNA (1)...(19): siRNA sense strand
aagcguaaucagaagacua

SEQ ID NO: 2510126 - RNA, 19 nt, Homo sapiens
  misc_RNA (1)...(19): siRNA sense strand
gaauaauacugcugccacu

SEQ ID NO: 2510127 - RNA, 19 nt, Homo sapiens
  misc_RNA (1)...(19): siRNA sense strand
aaguauaagcuguggauug

SEQ ID NO: 2510128 - RNA, 19 nt, Homo sapiens
  misc_RNA (1)...(19): siRNA sense strand
cugcagaaguauaagcugu

SEQ ID NO: 2510129 - RNA, 19 nt, Homo sapiens
  misc_RNA (1)...(19): siRNA sense strand
agaaaacagacuugaagaa

SEQ ID NO: 2510130 - RNA, 19 nt, Homo sapiens
  misc_RNA (1)...(19): siRNA sense strand
cauacaagugucugcagaa

SEQ ID NO: 2510131 - RNA, 19 nt, Homo sapiens
  misc_RNA (1)...(19): siRNA sense strand
acagaagaagauauagcaa

SEQ ID NO: 2510132 - RNA, 19 nt, Homo sapiens
  misc_RNA (1)...(19): siRNA sense strand
guguauugcauuugucauu

SEQ ID NO: 2510133 - RNA, 19 nt, Homo sapiens
  misc_RNA (1)...(19): siRNA sense strand
cagaauacuuccagaaaac

SEQ ID NO: 2510134 - RNA, 19 nt, Homo sapiens
  misc_RNA (1)...(19): siRNA sense strand
cuucaaugugugucaguuu

SEQ ID NO: 2510135 - RNA, 19 nt, Homo sapiens
  misc_RNA (1)...(19): siRNA sense strand
gacacuugccacagagaau

SEQ ID NO: 2510136 - RNA, 19 nt, Homo sapiens
  misc_RNA (1)...(19): siRNA sense strand
ugagauaaaaccugaagaa

SEQ ID NO: 2510137 - RNA, 19 nt, Homo sapiens
  misc_RNA (1)...(19): siRNA sense strand
gaagaaaaugagaugauca

SEQ ID NO: 2510138 - RNA, 19 nt, Homo sapiens
  misc_RNA (1)...(19): siRNA sense strand
agaagauauagcaagaaga

SEQ ID NO: 2510139 - RNA, 19 nt, Homo sapiens
  misc_RNA (1)...(19): siRNA sense strand
gagauaaaaccugaagaaa

SEQ ID NO: 2510140 - RNA, 19 nt, Homo sapiens
  misc_RNA (1)...(19): siRNA sense strand
agauauagcaagaagacag

SEQ ID NO: 2510141 - RNA, 19 nt, Homo sapiens
  misc_RNA (1)...(19): siRNA sense strand
ucgacgaguauuauaacaa

SEQ ID NO: 2510142 - RNA, 19 nt, Homo sapiens
  misc_RNA (1)...(19): siRNA sense strand
uaaacuuccucauaggcaa

SEQ ID NO: 2510143 - RNA, 19 nt, Homo sapiens
  misc_RNA (1)...(19): siRNA sense strand
cgucugucuugcuggauca

SEQ ID NO: 2510144 - RNA, 19 nt, Homo sapiens
  misc_RNA (1)...(19): siRNA sense strand
cuggaugaaaugagacaaa

SEQ ID NO: 2510145 - RNA, 19 nt, Homo sapiens
  misc_RNA (1)...(19): siRNA sense strand
ccugaauauacacgagaaa

SEQ ID NO: 2510146 - RNA, 19 nt, Homo sapiens
  misc_RNA (1)...(19): siRNA sense strand
auuacaaggcagaggaaga

SEQ ID NO: 2510147 - RNA, 19 nt, Homo sapiens
  misc_RNA (1)...(19): siRNA sense strand
ugaaacgggugguggcgaa

SEQ ID NO: 2510148 - RNA, 19 nt, Homo sapiens
  misc_RNA (1)...(19): siRNA sense strand
gcaaggauuacaaggcaga

SEQ ID NO: 2510149 - RNA, 19 nt, Homo sapiens
  misc_RNA (1)...(19): siRNA sense strand
agaggaagacccagcaaaa

SEQ ID NO: 2510150 - RNA, 19 nt, Homo sapiens
  misc_RNA (1)...(19): siRNA sense strand
cauacaaacuggugaccgu

SEQ ID NO: 2510151 - RNA, 19 nt, Homo sapiens
  misc_RNA (1)...(19): siRNA sense strand
gugaaugagcccuacgaga

SEQ ID NO: 2510152 - RNA, 19 nt, Homo sapiens
  misc_RNA (1)...(19): siRNA sense strand
ugcauaagcuggagccuga

SEQ ID NO: 2510153 - RNA, 19 nt, Homo sapiens
  misc_RNA (1)...(19): siRNA sense strand
ccuacgagaaggacgguga

SEQ ID NO: 2510154 - RNA, 19 nt, Homo sapiens
  misc_RNA (1)...(19): siRNA sense strand
cguuauuacaaaugaguac

SEQ ID NO: 2510155 - RNA, 19 nt, Homo sapiens
  misc_RNA (1)...(19): siRNA sense strand
cauugcagaucgaagccaa

SEQ ID NO: 2510156 - RNA, 19 nt, Homo sapiens
  misc_RNA (1)...(19): siRNA sense strand
ggaaacacguggaagccgu

SEQ ID NO: 2510157 - RNA, 19 nt, Homo sapiens
  misc_RNA (1)...(19): siRNA sense strand
uuacaaacuuccacaggca

SEQ ID NO: 2510158 - RNA, 19 nt, Homo sapiens
  misc_RNA (1)...(19): siRNA sense strand
ggacgacauucgaaggaug

SEQ ID NO: 2510159 - RNA, 19 nt, Homo sapiens
  misc_RNA (1)...(19): siRNA sense strand
cagcaaggauuacaaggca

SEQ ID NO: 2510160 - RNA, 19 nt, Homo sapiens
  misc_RNA (1)...(19): siRNA sense strand
ugcagaacaaaguggagaa

SEQ ID NO: 2510161 - RNA, 19 nt, Homo sapiens
  misc_RNA (1)...(19): siRNA sense strand
gcaagaagaacaauggcaa

SEQ ID NO: 2510162 - RNA, 19 nt, Homo sapiens
  misc_RNA (1)...(19): siRNA sense strand
gcagugaggacgaggccaa

SEQ ID NO: 2510163 - RNA, 19 nt, Homo sapiens
  misc_RNA (1)...(19): siRNA sense strand
ccacaagguccugggcaaa

SEQ ID NO: 2510164 - RNA, 19 nt, Homo sapiens
  misc_RNA (1)...(19): siRNA sense strand
ccucagagccuguugggau

SEQ ID NO: 2510165 - RNA, 19 nt, Homo sapiens
  misc_RNA (1)...(19): siRNA sense strand
cgacaagaucaucggcaga

SEQ ID NO: 2510166 - RNA, 19 nt, Homo sapiens
  misc_RNA (1)...(19): siRNA sense strand
caccauaaaugccgggaga

SEQ ID NO: 2510167 - RNA, 19 nt, Homo sapiens
  misc_RNA (1)...(19): siRNA sense strand
ggaaggugcugcuuggaga

SEQ ID NO: 2510168 - RNA, 19 nt, Homo sapiens
  misc_RNA (1)...(19): siRNA sense strand
uccacaagguccugggcaa

SEQ ID NO: 2510169 - RNA, 19 nt, Homo sapiens
  misc_RNA (1)...(19): siRNA sense strand
ggcuacaaaugcaggcaau

SEQ ID NO: 2510170 - RNA, 19 nt, Homo sapiens
  misc_RNA (1)...(19): siRNA sense strand
guuuuaugccgcugagaua

SEQ ID NO: 2510171 - RNA, 19 nt, Homo sapiens
  misc_RNA (1)...(19): siRNA sense strand
ccauggugaugaugaggau

SEQ ID NO: 2510172 - RNA, 19 nt, Homo sapiens
  misc_RNA (1)...(19): siRNA sense strand
acaagaaaugcaucgacaa

SEQ ID NO: 2510173 - RNA, 19 nt, Homo sapiens
  misc_RNA (1)...(19): siRNA sense strand
gcaaaggcagcuucgggaa

SEQ ID NO: 2510174 - RNA, 19 nt, Homo sapiens
  misc_RNA (1)...(19): siRNA sense strand
gacacuugccgcagagaau

SEQ ID NO: 2510175 - RNA, 19 nt, Homo sapiens
  misc_RNA (1)...(19): siRNA sense strand
cacaagaaaugcaucgaca

SEQ ID NO: 2510176 - RNA, 19 nt, Homo sapiens
  misc_RNA (1)...(19): siRNA sense strand
uggcugaggccuugaacca

SEQ ID NO: 2510177 - RNA, 19 nt, Homo sapiens
  misc_RNA (1)...(19): siRNA sense strand
uguaccacauccaggacaa

SEQ ID NO: 2510178 - RNA, 19 nt, Homo sapiens
  misc_RNA (1)...(19): siRNA sense strand
caaccaagaggcugggagu

SEQ ID NO: 2510179 - RNA, 19 nt, Homo sapiens
  misc_RNA (1)...(19): siRNA sense strand
agaacaauggcaaggcuga

SEQ ID NO: 2510180 - RNA, 19 nt, Homo sapiens
  misc_RNA (1)...(19): siRNA sense strand
ccauaaaugccgggagaag

SEQ ID NO: 2510181 - RNA, 19 nt, Homo sapiens
  misc_RNA (1)...(19): siRNA sense strand
cacccagagacuacaguaa

SEQ ID NO: 2510182 - RNA, 19 nt, Homo sapiens
  misc_RNA (1)...(19): siRNA sense strand
ccaaaauccacuacaucaa

SEQ ID NO: 2510183 - RNA, 19 nt, Homo sapiens
  misc_RNA (1)...(19): siRNA sense strand
gggauuaaagugugaagac

SEQ ID NO: 2510184 - RNA, 19 nt, Homo sapiens
  misc_RNA (1)...(19): siRNA sense strand
gcugaagggcagaggagag

SEQ ID NO: 2510185 - RNA, 19 nt, Homo sapiens
  misc_RNA (1)...(19): siRNA sense strand
guguuuaagcagaggaaaa

SEQ ID NO: 2510186 - RNA, 19 nt, Homo sapiens
  misc_RNA (1)...(19): siRNA sense strand
ggacgaaauagaaaagaaa

SEQ ID NO: 2510187 - RNA, 19 nt, Homo sapiens
  misc_RNA (1)...(19): siRNA sense strand
aguugaaagagaagaagaa

SEQ ID NO: 2510188 - RNA, 19 nt, Homo sapiens
  misc_RNA (1)...(19): siRNA sense strand
agacugaacaaaaggaaaa

SEQ ID NO: 2510189 - RNA, 19 nt, Homo sapiens
  misc_RNA (1)...(19): siRNA sense strand
acugauaacaggccagaaa

SEQ ID NO: 2510190 - RNA, 19 nt, Homo sapiens
  misc_RNA (1)...(19): siRNA sense strand
agaaagauugccaggaaga

SEQ ID NO: 2510191 - RNA, 19 nt, Homo sapiens
  misc_RNA (1)...(19): siRNA sense strand
gguuaaacuaagaauccaa

SEQ ID NO: 2510192 - RNA, 19 nt, Homo sapiens
  misc_RNA (1)...(19): siRNA sense strand
ccaaaacagaagucagaua

SEQ ID NO: 2510193 - RNA, 19 nt, Homo sapiens
  misc_RNA (1)...(19): siRNA sense strand
agauauuugggaagaggaa

SEQ ID NO: 2510194 - RNA, 19 nt, Homo sapiens
  misc_RNA (1)...(19): siRNA sense strand
uauaaagagacccaggaaa

SEQ ID NO: 2510195 - RNA, 19 nt, Homo sapiens
  misc_RNA (1)...(19): siRNA sense strand
agggcgaguugaagaauuu

SEQ ID NO: 2510196 - RNA, 19 nt, Homo sapiens
  misc_RNA (1)...(19): siRNA sense strand
gggagggcgaguugaagaa

SEQ ID NO: 2510197 - RNA, 19 nt, Homo sapiens
  misc_RNA (1)...(19): siRNA sense strand
ucaaauaagaaggaagcua

SEQ ID NO: 2510198 - RNA, 19 nt, Homo sapiens
  misc_RNA (1)...(19): siRNA sense strand
cauguuaaguacagcugaa

SEQ ID NO: 2510199 - RNA, 19 nt, Homo sapiens
  misc_RNA (1)...(19): siRNA sense strand
gcaccuaacuguucaggca

SEQ ID NO: 2510200 - RNA, 19 nt, Homo sapiens
  misc_RNA (1)...(19): siRNA sense strand
aguugguaguggugcacaa

SEQ ID NO: 2510201 - RNA, 19 nt, Homo sapiens
  misc_RNA (1)...(19): siRNA sense strand
gggcaaaagaguugguagu

SEQ ID NO: 2510202 - RNA, 19 nt, Homo sapiens
  misc_RNA (1)...(19): siRNA sense strand
uucacaagcuacacagaaa

SEQ ID NO: 2510203 - RNA, 19 nt, Homo sapiens
  misc_RNA (1)...(19): siRNA sense strand
guauaaagagacccaggaa

SEQ ID NO: 2510204 - RNA, 19 nt, Homo sapiens
  misc_RNA (1)...(19): siRNA sense strand
auaaagagacccaggaaac

SEQ ID NO: 2510205 - RNA, 19 nt, Homo sapiens
  misc_RNA (1)...(19): siRNA sense strand
cugaagaugacauaagaca

SEQ ID NO: 2510206 - RNA, 19 nt, Homo sapiens
  misc_RNA (1)...(19): siRNA sense strand
aagaacaggaagacucaaa

SEQ ID NO: 2510207 - RNA, 19 nt, Homo sapiens
  misc_RNA (1)...(19): siRNA sense strand
gauccacaguaaaggacau

SEQ ID NO: 2510208 - RNA, 19 nt, Homo sapiens
  misc_RNA (1)...(19): siRNA sense strand
guuaaguacagcugaagau

SEQ ID NO: 2510209 - RNA, 19 nt, Homo sapiens
  misc_RNA (1)...(19): siRNA sense strand
auauuugggaagaggaaaa

SEQ ID NO: 2510210 - RNA, 19 nt, Homo sapiens
  misc_RNA (1)...(19): siRNA sense strand
auacaacagugaaggagca

SEQ ID NO: 2510211 - RNA, 19 nt, Homo sapiens
  misc_RNA (1)...(19): siRNA sense strand
aggacgaaauagaaaagaa

SEQ ID NO: 2510212 - RNA, 19 nt, Homo sapiens
  misc_RNA (1)...(19): siRNA sense strand
aaagagugguauaugcaau

SEQ ID NO: 2510213 - RNA, 19 nt, Homo sapiens
  misc_RNA (1)...(19): siRNA sense strand
caguugaaagagaagaaga

SEQ ID NO: 2510214 - RNA, 19 nt, Homo sapiens
  misc_RNA (1)...(19): siRNA sense strand
gugaaaaugacuuagaaga

SEQ ID NO: 2510215 - RNA, 19 nt, Homo sapiens
  misc_RNA (1)...(19): siRNA sense strand
agcaaaggaucucaaggaa

SEQ ID NO: 2510216 - RNA, 19 nt, Homo sapiens
  misc_RNA (1)...(19): siRNA sense strand
gauucuggucugauaacaa

SEQ ID NO: 2510217 - RNA, 19 nt, Homo sapiens
  misc_RNA (1)...(19): siRNA sense strand
guugaaagagaagaagaaa

SEQ ID NO: 2510218 - RNA, 19 nt, Homo sapiens
  misc_RNA (1)...(19): siRNA sense strand
agugaagagaaaucagaau

SEQ ID NO: 2510219 - RNA, 19 nt, Homo sapiens
  misc_RNA (1)...(19): siRNA sense strand
ggcgauaaguaugguggaa

SEQ ID NO: 2510220 - RNA, 19 nt, Homo sapiens
  misc_RNA (1)...(19): siRNA sense strand
aacuaaggguagaucacua

SEQ ID NO: 2510221 - RNA, 19 nt, Homo sapiens
  misc_RNA (1)...(19): siRNA sense strand
cugcaguccauuugaugua

SEQ ID NO: 2510222 - RNA, 19 nt, Homo sapiens
  misc_RNA (1)...(19): siRNA sense strand
gaagaggaaaauucagaua

SEQ ID NO: 2510223 - RNA, 19 nt, Homo sapiens
  misc_RNA (1)...(19): siRNA sense strand
ggaagcuaaauuugcacaa

SEQ ID NO: 2510224 - RNA, 19 nt, Homo sapiens
  misc_RNA (1)...(19): siRNA sense strand
gugaauguugcuugcagaa

SEQ ID NO: 2510225 - RNA, 19 nt, Homo sapiens
  misc_RNA (1)...(19): siRNA sense strand
aaaugaauugagagggcuu

SEQ ID NO: 2510226 - RNA, 19 nt, Homo sapiens
  misc_RNA (1)...(19): siRNA sense strand
ucauuuaagucaccagaca

SEQ ID NO: 2510227 - RNA, 19 nt, Homo sapiens
  misc_RNA (1)...(19): siRNA sense strand
ccgaacacacauuaaguga

SEQ ID NO: 2510228 - RNA, 19 nt, Homo sapiens
  misc_RNA (1)...(19): siRNA sense strand
accuaacuguucaggcaaa

SEQ ID NO: 2510229 - RNA, 19 nt, Homo sapiens
  misc_RNA (1)...(19): siRNA sense strand
gagccaacuuuauaggcca

SEQ ID NO: 2510230 - RNA, 19 nt, Homo sapiens
  misc_RNA (1)...(19): siRNA sense strand
cgauaaguaugguggaacc

SEQ ID NO: 2510231 - RNA, 19 nt, Homo sapiens
  misc_RNA (1)...(19): siRNA sense strand
cgaacacacauuaagugaa

SEQ ID NO: 2510232 - RNA, 19 nt, Homo sapiens
  misc_RNA (1)...(19): siRNA sense strand
acuaagaauccaaacagau

SEQ ID NO: 2510233 - RNA, 19 nt, Homo sapiens
  misc_RNA (1)...(19): siRNA sense strand
aaguggaauugcaacauau

SEQ ID NO: 2510234 - RNA, 19 nt, Homo sapiens
  misc_RNA (1)...(19): siRNA sense strand
cugguaaaauacaucgaaa

SEQ ID NO: 2510235 - RNA, 19 nt, Homo sapiens
  misc_RNA (1)...(19): siRNA sense strand
ggaacauaucagagagaga

SEQ ID NO: 2510236 - RNA, 19 nt, Homo sapiens
  misc_RNA (1)...(19): siRNA sense strand
aguaauaggcagaggagca

SEQ ID NO: 2510237 - RNA, 19 nt, Homo sapiens
  misc_RNA (1)...(19): siRNA sense strand
aagaaauagacgucagcua

SEQ ID NO: 2510238 - RNA, 19 nt, Homo sapiens
  misc_RNA (1)...(19): siRNA sense strand
gccuaaaagaugaggagaa

SEQ ID NO: 2510239 - RNA, 19 nt, Homo sapiens
  misc_RNA (1)...(19): siRNA sense strand
gugaaugggaacauagaau

SEQ ID NO: 2510240 - RNA, 19 nt, Homo sapiens
  misc_RNA (1)...(19): siRNA sense strand
agaagaaagauacgggaca

SEQ ID NO: 2510241 - RNA, 19 nt, Homo sapiens
  misc_RNA (1)...(19): siRNA sense strand
agacugacuacaagaacaa

SEQ ID NO: 2510242 - RNA, 19 nt, Homo sapiens
  misc_RNA (1)...(19): siRNA sense strand
gauggaagaagaaggccua

SEQ ID NO: 2510243 - RNA, 19 nt, Homo sapiens
  misc_RNA (1)...(19): siRNA sense strand
cuacaugaaagcagcaaaa

SEQ ID NO: 2510244 - RNA, 19 nt, Homo sapiens
  misc_RNA (1)...(19): siRNA sense strand
aggagcauuuggugaggua

SEQ ID NO: 2510245 - RNA, 19 nt, Homo sapiens
  misc_RNA (1)...(19): siRNA sense strand
gcagacaguuuguggguug

SEQ ID NO: 2510246 - RNA, 19 nt, Homo sapiens
  misc_RNA (1)...(19): siRNA sense strand
cuuaaaaguaauaggcaga

SEQ ID NO: 2510247 - RNA, 19 nt, Homo sapiens
  misc_RNA (1)...(19): siRNA sense strand
cugagaaagccaaggaucu

SEQ ID NO: 2510248 - RNA, 19 nt, Homo sapiens
  misc_RNA (1)...(19): siRNA sense strand
agacauauaagaaggugau

SEQ ID NO: 2510249 - RNA, 19 nt, Homo sapiens
  misc_RNA (1)...(19): siRNA sense strand
guuuguggguugugaaaau

SEQ ID NO: 2510250 - RNA, 19 nt, Homo sapiens
  misc_RNA (1)...(19): siRNA sense strand
gagacauauaagaagguga

SEQ ID NO: 2510251 - RNA, 19 nt, Homo sapiens
  misc_RNA (1)...(19): siRNA sense strand
acaugaagaacgagaaaug

SEQ ID NO: 2510252 - RNA, 19 nt, Homo sapiens
  misc_RNA (1)...(19): siRNA sense strand
gcagaggagcauuugguga

SEQ ID NO: 2510253 - RNA, 19 nt, Homo sapiens
  misc_RNA (1)...(19): siRNA sense strand
acaugaaagcagcaaaaua

SEQ ID NO: 2510254 - RNA, 19 nt, Homo sapiens
  misc_RNA (1)...(19): siRNA sense strand
cuggaguugaggaaauaaa

SEQ ID NO: 2510255 - RNA, 19 nt, Homo sapiens
  misc_RNA (1)...(19): siRNA sense strand
cagaaacaguauuagccau

SEQ ID NO: 2510256 - RNA, 19 nt, Homo sapiens
  misc_RNA (1)...(19): siRNA sense strand
aguaaccacacaaaggaaa

SEQ ID NO: 2510257 - RNA, 19 nt, Homo sapiens
  misc_RNA (1)...(19): siRNA sense strand
uaguggaggcagacaguuu

SEQ ID NO: 2510258 - RNA, 19 nt, Homo sapiens
  misc_RNA (1)...(19): siRNA sense strand
gugacaaugaccaaaguga

SEQ ID NO: 2510259 - RNA, 19 nt, Homo sapiens
  misc_RNA (1)...(19): siRNA sense strand
cacacaaaggaaaggguga

SEQ ID NO: 2510260 - RNA, 19 nt, Homo sapiens
  misc_RNA (1)...(19): siRNA sense strand
acauagaauuggagcuccu

SEQ ID NO: 2510261 - RNA, 19 nt, Homo sapiens
  misc_RNA (1)...(19): siRNA sense strand
caguuuguggguugugaaa

SEQ ID NO: 2510262 - RNA, 19 nt, Homo sapiens
  misc_RNA (1)...(19): siRNA sense strand
gaguaaccacacaaaggaa

SEQ ID NO: 2510263 - RNA, 19 nt, Homo sapiens
  misc_RNA (1)...(19): siRNA sense strand
aaguaaucauccugagacu

SEQ ID NO: 2510264 - RNA, 19 nt, Homo sapiens
  misc_RNA (1)...(19): siRNA sense strand
cgggacauguguaugcaau

SEQ ID NO: 2510265 - RNA, 19 nt, Homo sapiens
  misc_RNA (1)...(19): siRNA sense strand
agcuaaaccucuaccuaau

SEQ ID NO: 2510266 - RNA, 19 nt, Homo sapiens
  misc_RNA (1)...(19): siRNA sense strand
gaaaccuggaaaagaaaua

SEQ ID NO: 2510267 - RNA, 19 nt, Homo sapiens
  misc_RNA (1)...(19): siRNA sense strand
gagaaaugagacaaaagaa

SEQ ID NO: 2510268 - RNA, 19 nt, Homo sapiens
  misc_RNA (1)...(19): siRNA sense strand
aguauuagccauagacucu

SEQ ID NO: 2510269 - RNA, 19 nt, Homo sapiens
  misc_RNA (1)...(19): siRNA sense strand
cgaugaguuuccagaaucu

SEQ ID NO: 2510270 - RNA, 19 nt, Homo sapiens
  misc_RNA (1)...(19): siRNA sense strand
aagaacgagaaaugagaca

SEQ ID NO: 2510271 - RNA, 19 nt, Homo sapiens
  misc_RNA (1)...(19): siRNA sense strand
ccuacaugaaagcagcaaa

SEQ ID NO: 2510272 - RNA, 19 nt, Homo sapiens
  misc_RNA (1)...(19): siRNA sense strand
agaagaaggccuaaaagau

SEQ ID NO: 2510273 - RNA, 19 nt, Homo sapiens
  misc_RNA (1)...(19): siRNA sense strand
acauucuaguggaggcaga

SEQ ID NO: 2510274 - RNA, 19 nt, Homo sapiens
  misc_RNA (1)...(19): siRNA sense strand
ugggaacauaucagagaga

SEQ ID NO: 2510275 - RNA, 19 nt, Homo sapiens
  misc_RNA (1)...(19): siRNA sense strand
uggaagaagaaggccuaaa

SEQ ID NO: 2510276 - RNA, 19 nt, Homo sapiens
  misc_RNA (1)...(19): siRNA sense strand
cuuguucagaagaaagaua

SEQ ID NO: 2510277 - RNA, 19 nt, Homo sapiens
  misc_RNA (1)...(19): siRNA sense strand
cuacauugcuccugaggug

SEQ ID NO: 2510278 - RNA, 19 nt, Homo sapiens
  misc_RNA (1)...(19): siRNA sense strand
uauaagaaggugaugaacu

SEQ ID NO: 2510279 - RNA, 19 nt, Homo sapiens
  misc_RNA (1)...(19): siRNA sense strand
ugacgaaaggagagauuaa

SEQ ID NO: 2510280 - RNA, 19 nt, Homo sapiens
  misc_RNA (1)...(19): siRNA sense strand
cugaagagaaagagaauga

SEQ ID NO: 2510281 - RNA, 19 nt, Homo sapiens
  misc_RNA (1)...(19): siRNA sense strand
gaaaagagggagagggaga

SEQ ID NO: 2510282 - RNA, 19 nt, Homo sapiens
  misc_RNA (1)...(19): siRNA sense strand
aggaagaggaugaagaaga

SEQ ID NO: 2510283 - RNA, 19 nt, Homo sapiens
  misc_RNA (1)...(19): siRNA sense strand
agguacaaccagagaaauu

SEQ ID NO: 2510284 - RNA, 19 nt, Homo sapiens
  misc_RNA (1)...(19): siRNA sense strand
gguccuugccagugaacaa

SEQ ID NO: 2510285 - RNA, 19 nt, Homo sapiens
  misc_RNA (1)...(19): siRNA sense strand
auacagaggaacagaucaa

SEQ ID NO: 2510286 - RNA, 19 nt, Homo sapiens
  misc_RNA (1)...(19): siRNA sense strand
acaccagagcagagaguau

SEQ ID NO: 2510287 - RNA, 19 nt, Homo sapiens
  misc_RNA (1)...(19): siRNA sense strand
ccaaagaagaagcuggaga

SEQ ID NO: 2510288 - RNA, 19 nt, Homo sapiens
  misc_RNA (1)...(19): siRNA sense strand
agaauuaacaacugggaca

SEQ ID NO: 2510289 - RNA, 19 nt, Homo sapiens
  misc_RNA (1)...(19): siRNA sense strand
aguugaagguggauaugaa

SEQ ID NO: 2510290 - RNA, 19 nt, Homo sapiens
  misc_RNA (1)...(19): siRNA sense strand
cguaauaaccagacaaucu

SEQ ID NO: 2510291 - RNA, 19 nt, Homo sapiens
  misc_RNA (1)...(19): siRNA sense strand
ccagacaaucuuugaacaa

SEQ ID NO: 2510292 - RNA, 19 nt, Homo sapiens
  misc_RNA (1)...(19): siRNA sense strand
agaggagaaugcagagcaa

SEQ ID NO: 2510293 - RNA, 19 nt, Homo sapiens
  misc_RNA (1)...(19): siRNA sense strand
caaaauauacagaggaaca

SEQ ID NO: 2510294 - RNA, 19 nt, Homo sapiens
  misc_RNA (1)...(19): siRNA sense strand
agaggaggcaagaaggaaa

SEQ ID NO: 2510295 - RNA, 19 nt, Homo sapiens
  misc_RNA (1)...(19): siRNA sense strand
cgggaauaucuaucaguaa

SEQ ID NO: 2510296 - RNA, 19 nt, Homo sapiens
  misc_RNA (1)...(19): siRNA sense strand
agacagagaagaucagaau

SEQ ID NO: 2510297 - RNA, 19 nt, Homo sapiens
  misc_RNA (1)...(19): siRNA sense strand
aggaaaaugaggaggaaga

SEQ ID NO: 2510298 - RNA, 19 nt, Homo sapiens
  misc_RNA (1)...(19): siRNA sense strand
acagagaagaagaaaucaa

SEQ ID NO: 2510299 - RNA, 19 nt, Homo sapiens
  misc_RNA (1)...(19): siRNA sense strand
gaaacaauucaauggaaca

SEQ ID NO: 2510300 - RNA, 19 nt, Homo sapiens
  misc_RNA (1)...(19): siRNA sense strand
gcagaaacaaagccagcaa

SEQ ID NO: 2510301 - RNA, 19 nt, Homo sapiens
  misc_RNA (1)...(19): siRNA sense strand
acaaaucacauaugggcua

SEQ ID NO: 2510302 - RNA, 19 nt, Homo sapiens
  misc_RNA (1)...(19): siRNA sense strand
caaacuuaccagaagagaa

SEQ ID NO: 2510303 - RNA, 19 nt, Homo sapiens
  misc_RNA (1)...(19): siRNA sense strand
agaggaagcaaaagaauua

SEQ ID NO: 2510304 - RNA, 19 nt, Homo sapiens
  misc_RNA (1)...(19): siRNA sense strand
auuauuaccugaagcgcaa

SEQ ID NO: 2510305 - RNA, 19 nt, Homo sapiens
  misc_RNA (1)...(19): siRNA sense strand
ggaaacaauucaauggaac

SEQ ID NO: 2510306 - RNA, 19 nt, Homo sapiens
  misc_RNA (1)...(19): siRNA sense strand
ccccaaaaguuuaaagaga

SEQ ID NO: 2510307 - RNA, 19 nt, Homo sapiens
  misc_RNA (1)...(19): siRNA sense strand
ccgugaagaaauuguagaa

SEQ ID NO: 2510308 - RNA, 19 nt, Homo sapiens
  misc_RNA (1)...(19): siRNA sense strand
ggauuggcacagaugauaa

SEQ ID NO: 2510309 - RNA, 19 nt, Homo sapiens
  misc_RNA (1)...(19): siRNA sense strand
gguuuacagagaagaagaa

SEQ ID NO: 2510310 - RNA, 19 nt, Homo sapiens
  misc_RNA (1)...(19): siRNA sense strand
aggaagagaaaauggaaau

SEQ ID NO: 2510311 - RNA, 19 nt, Homo sapiens
  misc_RNA (1)...(19): siRNA sense strand
agcuuuaaaggaagagaaa

SEQ ID NO: 2510312 - RNA, 19 nt, Homo sapiens
  misc_RNA (1)...(19): siRNA sense strand
agguaguuccaaagaagaa

SEQ ID NO: 2510313 - RNA, 19 nt, Homo sapiens
  misc_RNA (1)...(19): siRNA sense strand
agaaagacagagaagauca

SEQ ID NO: 2510314 - RNA, 19 nt, Homo sapiens
  misc_RNA (1)...(19): siRNA sense strand
caugaaacugcauugguaa

SEQ ID NO: 2510315 - RNA, 19 nt, Homo sapiens
  misc_RNA (1)...(19): siRNA sense strand
cccaaaaguuuaaagagaa

SEQ ID NO: 2510316 - RNA, 19 nt, Homo sapiens
  misc_RNA (1)...(19): siRNA sense strand
caccagaagaguaugacaa

SEQ ID NO: 2510317 - RNA, 19 nt, Homo sapiens
  misc_RNA (1)...(19): siRNA sense strand
agagcaacuggcagaauua

SEQ ID NO: 2510318 - RNA, 19 nt, Homo sapiens
  misc_RNA (1)...(19): siRNA sense strand
gaacaaacaccuugccagu

SEQ ID NO: 2510319 - RNA, 19 nt, Homo sapiens
  misc_RNA (1)...(19): siRNA sense strand
caaguuucuuaaugagcaa

SEQ ID NO: 2510320 - RNA, 19 nt, Homo sapiens
  misc_RNA (1)...(19): siRNA sense strand
augaaacugcauugguaaa

SEQ ID NO: 2510321 - RNA, 19 nt, Homo sapiens
  misc_RNA (1)...(19): siRNA sense strand
ugaaaguaaugcagguagu

SEQ ID NO: 2510322 - RNA, 19 nt, Homo sapiens
  misc_RNA (1)...(19): siRNA sense strand
agggaguacaggcaagaua

SEQ ID NO: 2510323 - RNA, 19 nt, Homo sapiens
  misc_RNA (1)...(19): siRNA sense strand
aggaggaagaugaaguuau

SEQ ID NO: 2510324 - RNA, 19 nt, Homo sapiens
  misc_RNA (1)...(19): siRNA sense strand
agcaaaauauacagaggaa

SEQ ID NO: 2510325 - RNA, 19 nt, Homo sapiens
  misc_RNA (1)...(19): siRNA sense strand
aggaaacaauucaauggaa

SEQ ID NO: 2510326 - RNA, 19 nt, Homo sapiens
  misc_RNA (1)...(19): siRNA sense strand
aggaaaagagggagaggga

SEQ ID NO: 2510327 - RNA, 19 nt, Homo sapiens
  misc_RNA (1)...(19): siRNA sense strand
caaaagagcaacuggcaga

SEQ ID NO: 2510328 - RNA, 19 nt, Homo sapiens
  misc_RNA (1)...(19): siRNA sense strand
agggagagggagacccaaa

SEQ ID NO: 2510329 - RNA, 19 nt, Homo sapiens
  misc_RNA (1)...(19): siRNA sense strand
agagagugguuugcagaaa

SEQ ID NO: 2510330 - RNA, 19 nt, Homo sapiens
  misc_RNA (1)...(19): siRNA sense strand
agaagaaacagaugauagu

SEQ ID NO: 2510331 - RNA, 19 nt, Homo sapiens
  misc_RNA (1)...(19): siRNA sense strand
agguggauaugaauguaaa

SEQ ID NO: 2510332 - RNA, 19 nt, Homo sapiens
  misc_RNA (1)...(19): siRNA sense strand
gaggcaagaaggaaacaau

SEQ ID NO: 2510333 - RNA, 19 nt, Homo sapiens
  misc_RNA (1)...(19): siRNA sense strand
ccugacgaaaggagagauu

SEQ ID NO: 2510334 - RNA, 19 nt, Homo sapiens
  misc_RNA (1)...(19): siRNA sense strand
cagaauacauccaaguacu

SEQ ID NO: 2510335 - RNA, 19 nt, Homo sapiens
  misc_RNA (1)...(19): siRNA sense strand
aggaugaagaagaaacaga

SEQ ID NO: 2510336 - RNA, 19 nt, Homo sapiens
  misc_RNA (1)...(19): siRNA sense strand
ugaagaagaaacagaugau

SEQ ID NO: 2510337 - RNA, 19 nt, Homo sapiens
  misc_RNA (1)...(19): siRNA sense strand
gaaacagaugauagugaca

SEQ ID NO: 2510338 - RNA, 19 nt, Homo sapiens
  misc_RNA (1)...(19): siRNA sense strand
acccaggagaagagaauuu

SEQ ID NO: 2510339 - RNA, 19 nt, Homo sapiens
  misc_RNA (1)...(19): siRNA sense strand
gcuucugaaucuaauacaa

SEQ ID NO: 2510340 - RNA, 19 nt, Homo sapiens
  misc_RNA (1)...(19): siRNA sense strand
ugauaucagauuuggauga

SEQ ID NO: 2510341 - RNA, 19 nt, Homo sapiens
  misc_RNA (1)...(19): siRNA sense strand
gugcaugaauggaggggaa

SEQ ID NO: 2510342 - RNA, 19 nt, Homo sapiens
  misc_RNA (1)...(19): siRNA sense strand
agaagaagauucagccgaa

SEQ ID NO: 2510343 - RNA, 19 nt, Homo sapiens
  misc_RNA (1)...(19): siRNA sense strand
ugugaauggcauaaaguau

SEQ ID NO: 2510344 - RNA, 19 nt, Homo sapiens
  misc_RNA (1)...(19): siRNA sense strand
cgauacagauccacggguu

SEQ ID NO: 2510345 - RNA, 19 nt, Homo sapiens
  misc_RNA (1)...(19): siRNA sense strand
acaagaaugugaauggcau

SEQ ID NO: 2510346 - RNA, 19 nt, Homo sapiens
  misc_RNA (1)...(19): siRNA sense strand
ggcauaaaguaucacgcua

SEQ ID NO: 2510347 - RNA, 19 nt, Homo sapiens
  misc_RNA (1)...(19): siRNA sense strand
cccuaaagaagaagauuca

SEQ ID NO: 2510348 - RNA, 19 nt, Homo sapiens
  misc_RNA (1)...(19): siRNA sense strand
gggaagaguuacaagacag

SEQ ID NO: 2510349 - RNA, 19 nt, Homo sapiens
  misc_RNA (1)...(19): siRNA sense strand
gcgaguauggcgaggagga

SEQ ID NO: 2510350 - RNA, 19 nt, Homo sapiens
  misc_RNA (1)...(19): siRNA sense strand
cucagugucucgagggaau

SEQ ID NO: 2510351 - RNA, 19 nt, Homo sapiens
  misc_RNA (1)...(19): siRNA sense strand
cggugucggcugagauuau

SEQ ID NO: 2510352 - RNA, 19 nt, Homo sapiens
  misc_RNA (1)...(19): siRNA sense strand
cgcuaagaauggucacaga

SEQ ID NO: 2510353 - RNA, 19 nt, Homo sapiens
  misc_RNA (1)...(19): siRNA sense strand
cagggaaauaggagacaaa

SEQ ID NO: 2510354 - RNA, 19 nt, Homo sapiens
  misc_RNA (1)...(19): siRNA sense strand
gggaaauaggagacaaaca

SEQ ID NO: 2510355 - RNA, 19 nt, Homo sapiens
  misc_RNA (1)...(19): siRNA sense strand
guucagaaauggcugggaa

SEQ ID NO: 2510356 - RNA, 19 nt, Homo sapiens
  misc_RNA (1)...(19): siRNA sense strand
ccaccagccgcaugggaaa

SEQ ID NO: 2510357 - RNA, 19 nt, Homo sapiens
  misc_RNA (1)...(19): siRNA sense strand
uggaaguaccaaucaguaa

SEQ ID NO: 2510358 - RNA, 19 nt, Homo sapiens
  misc_RNA (1)...(19): siRNA sense strand
uggaaagccaccugaggaa

SEQ ID NO: 2510359 - RNA, 19 nt, Homo sapiens
  misc_RNA (1)...(19): siRNA sense strand
agauguggcaggagaaaga

SEQ ID NO: 2510360 - RNA, 19 nt, Homo sapiens
  misc_RNA (1)...(19): siRNA sense strand
acaaggaggcagaagguga

SEQ ID NO: 2510361 - RNA, 19 nt, Homo sapiens
  misc_RNA (1)...(19): siRNA sense strand
cugaagagcccuagugcca

SEQ ID NO: 2510362 - RNA, 19 nt, Homo sapiens
  misc_RNA (1)...(19): siRNA sense strand
ccaagagagcacugaugaa

SEQ ID NO: 2510363 - RNA, 19 nt, Homo sapiens
  misc_RNA (1)...(19): siRNA sense strand
acgaagacaaggaggcaga

SEQ ID NO: 2510364 - RNA, 19 nt, Homo sapiens
  misc_RNA (1)...(19): siRNA sense strand
ccaggagacaacagaacaa

SEQ ID NO: 2510365 - RNA, 19 nt, Homo sapiens
  misc_RNA (1)...(19): siRNA sense strand
gagagaagcgggaggucca

SEQ ID NO: 2510366 - RNA, 19 nt, Homo sapiens
  misc_RNA (1)...(19): siRNA sense strand
acaaggagcaucuggaaaa

SEQ ID NO: 2510367 - RNA, 19 nt, Homo sapiens
  misc_RNA (1)...(19): siRNA sense strand
gggaggaagaggagcagca

SEQ ID NO: 2510368 - RNA, 19 nt, Homo sapiens
  misc_RNA (1)...(19): siRNA sense strand
ggacaaauccugguggaca

SEQ ID NO: 2510369 - RNA, 19 nt, Homo sapiens
  misc_RNA (1)...(19): siRNA sense strand
ucagcagaguugugggaca

SEQ ID NO: 2510370 - RNA, 19 nt, Homo sapiens
  misc_RNA (1)...(19): siRNA sense strand
ggagccagugugagggcaa

SEQ ID NO: 2510371 - RNA, 19 nt, Homo sapiens
  misc_RNA (1)...(19): siRNA sense strand
cgggaaguguucaggagga

SEQ ID NO: 2510372 - RNA, 19 nt, Homo sapiens
  misc_RNA (1)...(19): siRNA sense strand
augaagauguggcaggaga

SEQ ID NO: 2510373 - RNA, 19 nt, Homo sapiens
  misc_RNA (1)...(19): siRNA sense strand
acucuguaccacuggauaa

SEQ ID NO: 2510374 - RNA, 19 nt, Homo sapiens
  misc_RNA (1)...(19): siRNA sense strand
gaacaggggagcagggaca

SEQ ID NO: 2510375 - RNA, 19 nt, Homo sapiens
  misc_RNA (1)...(19): siRNA sense strand
ccggaagguucucugacaa

SEQ ID NO: 2510376 - RNA, 19 nt, Homo sapiens
  misc_RNA (1)...(19): siRNA sense strand
gggaagggcaggaaggaug

SEQ ID NO: 2510377 - RNA, 19 nt, Homo sapiens
  misc_RNA (1)...(19): siRNA sense strand
cagugaaggcucuggacga

SEQ ID NO: 2510378 - RNA, 19 nt, Homo sapiens
  misc_RNA (1)...(19): siRNA sense strand
cuucugaauuugcagggaa

SEQ ID NO: 2510379 - RNA, 19 nt, Homo sapiens
  misc_RNA (1)...(19): siRNA sense strand
gggaaaacguccucagagu

SEQ ID NO: 2510380 - RNA, 19 nt, Homo sapiens
  misc_RNA (1)...(19): siRNA sense strand
ccaccaagaacguagcaga

SEQ ID NO: 2510381 - RNA, 19 nt, Homo sapiens
  misc_RNA (1)...(19): siRNA sense strand
ugaagauguggcaggagaa

SEQ ID NO: 2510382 - RNA, 19 nt, Homo sapiens
  misc_RNA (1)...(19): siRNA sense strand
gggaaguguucaggaggau

SEQ ID NO: 2510383 - RNA, 19 nt, Homo sapiens
  misc_RNA (1)...(19): siRNA sense strand
gagaaagaucagucaccau

SEQ ID NO: 2510384 - RNA, 19 nt, Homo sapiens
  misc_RNA (1)...(19): siRNA sense strand
ggagguagguggcugcaca

SEQ ID NO: 2510385 - RNA, 19 nt, Homo sapiens
  misc_RNA (1)...(19): siRNA sense strand
gcccauaaaugucugguca

SEQ ID NO: 2510386 - RNA, 19 nt, Homo sapiens
  misc_RNA (1)...(19): siRNA sense strand
ccaccuacucacauggcaa

SEQ ID NO: 2510387 - RNA, 19 nt, Homo sapiens
  misc_RNA (1)...(19): siRNA sense strand
ggaagguaggggagaucaa

SEQ ID NO: 2510388 - RNA, 19 nt, Homo sapiens
  misc_RNA (1)...(19): siRNA sense strand
cagaaauggcugggaacga

SEQ ID NO: 2510389 - RNA, 19 nt, Homo sapiens
  misc_RNA (1)...(19): siRNA sense strand
gacaaacaagaaaggaaau

SEQ ID NO: 2510390 - RNA, 19 nt, Homo sapiens
  misc_RNA (1)...(19): siRNA sense strand
gcuacagccugauggggaa

SEQ ID NO: 2510391 - RNA, 19 nt, Homo sapiens
  misc_RNA (1)...(19): siRNA sense strand
cagaacaacaagcaaguca

SEQ ID NO: 2510392 - RNA, 19 nt, Homo sapiens
  misc_RNA (1)...(19): siRNA sense strand
ccaaaugugcuguucccaa

SEQ ID NO: 2510393 - RNA, 19 nt, Homo sapiens
  misc_RNA (1)...(19): siRNA sense strand
ggcuugagagugagagcau

SEQ ID NO: 2510394 - RNA, 19 nt, Homo sapiens
  misc_RNA (1)...(19): siRNA sense strand
gcgcagguggucagugaga

SEQ ID NO: 2510395 - RNA, 19 nt, Homo sapiens
  misc_RNA (1)...(19): siRNA sense strand
ccagaaagccacuuccaga

SEQ ID NO: 2510396 - RNA, 19 nt, Homo sapiens
  misc_RNA (1)...(19): siRNA sense strand
cugaacuaccuucuggaaa

SEQ ID NO: 2510397 - RNA, 19 nt, Homo sapiens
  misc_RNA (1)...(19): siRNA sense strand
gggacagacaccaccagaa

SEQ ID NO: 2510398 - RNA, 19 nt, Homo sapiens
  misc_RNA (1)...(19): siRNA sense strand
caggaggaucugaggagca

SEQ ID NO: 2510399 - RNA, 19 nt, Homo sapiens
  misc_RNA (1)...(19): siRNA sense strand
gcaggagaaagaaagaaaa

SEQ ID NO: 2510400 - RNA, 19 nt, Homo sapiens
  misc_RNA (1)...(19): siRNA sense strand
ugcccaagccagggaaaua

SEQ ID NO: 2510401 - RNA, 19 nt, Homo sapiens
  misc_RNA (1)...(19): siRNA sense strand
agugaaggcucuggacgaa

SEQ ID NO: 2510402 - RNA, 19 nt, Homo sapiens
  misc_RNA (1)...(19): siRNA sense strand
uggaaaacaagcugcaaau

SEQ ID NO: 2510403 - RNA, 19 nt, Homo sapiens
  misc_RNA (1)...(19): siRNA sense strand
uguccuggaauccgggaaa

SEQ ID NO: 2510404 - RNA, 19 nt, Homo sapiens
  misc_RNA (1)...(19): siRNA sense strand
gcacauucauccacccuga

SEQ ID NO: 2510405 - RNA, 19 nt, Homo sapiens
  misc_RNA (1)...(19): siRNA sense strand
uggcugagauccagaccca

SEQ ID NO: 2510406 - RNA, 19 nt, Homo sapiens
  misc_RNA (1)...(19): siRNA sense strand
ccagggaaauaggagacaa

SEQ ID NO: 2510407 - RNA, 19 nt, Homo sapiens
  misc_RNA (1)...(19): siRNA sense strand
aaauaggagacaaacaaga

SEQ ID NO: 2510408 - RNA, 19 nt, Homo sapiens
  misc_RNA (1)...(19): siRNA sense strand
ccacuaaagcagaagaaua

SEQ ID NO: 2510409 - RNA, 19 nt, Homo sapiens
  misc_RNA (1)...(19): siRNA sense strand
gaacuuaagcucuggguaa

SEQ ID NO: 2510410 - RNA, 19 nt, Homo sapiens
  misc_RNA (1)...(19): siRNA sense strand
cgguugaguuccugagaaa

SEQ ID NO: 2510411 - RNA, 19 nt, Homo sapiens
  misc_RNA (1)...(19): siRNA sense strand
gcccaaagauggagcacua

SEQ ID NO: 2510412 - RNA, 19 nt, Homo sapiens
  misc_RNA (1)...(19): siRNA sense strand
ggacaaagacaaacaccaa

SEQ ID NO: 2510413 - RNA, 19 nt, Homo sapiens
  misc_RNA (1)...(19): siRNA sense strand
ggagaaaagagaugugaaa

SEQ ID NO: 2510414 - RNA, 19 nt, Homo sapiens
  misc_RNA (1)...(19): siRNA sense strand
cuucaaggacaaagacaaa

SEQ ID NO: 2510415 - RNA, 19 nt, Homo sapiens
  misc_RNA (1)...(19): siRNA sense strand
cacuaaagcagaagaauau

SEQ ID NO: 2510416 - RNA, 19 nt, Homo sapiens
  misc_RNA (1)...(19): siRNA sense strand
ggagauuuccacagagauu

SEQ ID NO: 2510417 - RNA, 19 nt, Homo sapiens
  misc_RNA (1)...(19): siRNA sense strand
ccagggagauggaggugua

SEQ ID NO: 2510418 - RNA, 19 nt, Homo sapiens
  misc_RNA (1)...(19): siRNA sense strand
gcucaguguacaagaagua

SEQ ID NO: 2510419 - RNA, 19 nt, Homo sapiens
  misc_RNA (1)...(19): siRNA sense strand
cagaguggcuuaaggucaa

SEQ ID NO: 2510420 - RNA, 19 nt, Homo sapiens
  misc_RNA (1)...(19): siRNA sense strand
cagcaguggcccucagaaa

SEQ ID NO: 2510421 - RNA, 19 nt, Homo sapiens
  misc_RNA (1)...(19): siRNA sense strand
cugaaagccaagaaauuaa

SEQ ID NO: 2510422 - RNA, 19 nt, Homo sapiens
  misc_RNA (1)...(19): siRNA sense strand
ucauaagccucuugccuaa

SEQ ID NO: 2510423 - RNA, 19 nt, Homo sapiens
  misc_RNA (1)...(19): siRNA sense strand
gaucccaacuccagaagaa

SEQ ID NO: 2510424 - RNA, 19 nt, Homo sapiens
  misc_RNA (1)...(19): siRNA sense strand
gccaagaaauuaagucuau

SEQ ID NO: 2510425 - RNA, 19 nt, Homo sapiens
  misc_RNA (1)...(19): siRNA sense strand
cuacacagagaaagggaau

SEQ ID NO: 2510426 - RNA, 19 nt, Homo sapiens
  misc_RNA (1)...(19): siRNA sense strand
gcggaaggcuguggaagua

SEQ ID NO: 2510427 - RNA, 19 nt, Homo sapiens
  misc_RNA (1)...(19): siRNA sense strand
gaagaaccauucaggaaaa

SEQ ID NO: 2510428 - RNA, 19 nt, Homo sapiens
  misc_RNA (1)...(19): siRNA sense strand
ccaaagacacuucagcuaa

SEQ ID NO: 2510429 - RNA, 19 nt, Homo sapiens
  misc_RNA (1)...(19): siRNA sense strand
cgaaagaagggaugaugga

SEQ ID NO: 2510430 - RNA, 19 nt, Homo sapiens
  misc_RNA (1)...(19): siRNA sense strand
cuggaaaaccauugcauua

SEQ ID NO: 2510431 - RNA, 19 nt, Homo sapiens
  misc_RNA (1)...(19): siRNA sense strand
uaugaauggacuugggcaa

SEQ ID NO: 2510432 - RNA, 19 nt, Homo sapiens
  misc_RNA (1)...(19): siRNA sense strand
aagucuaucaagagagaau

SEQ ID NO: 2510433 - RNA, 19 nt, Homo sapiens
  misc_RNA (1)...(19): siRNA sense strand
agaaagaagaguuccaaaa

SEQ ID NO: 2510434 - RNA, 19 nt, Homo sapiens
  misc_RNA (1)...(19): siRNA sense strand
cuacaagcucugaagaaga

SEQ ID NO: 2510435 - RNA, 19 nt, Homo sapiens
  misc_RNA (1)...(19): siRNA sense strand
gaggagauuuccacagaga

SEQ ID NO: 2510436 - RNA, 19 nt, Homo sapiens
  misc_RNA (1)...(19): siRNA sense strand
auucaguggcucacagaaa

SEQ ID NO: 2510437 - RNA, 19 nt, Homo sapiens
  misc_RNA (1)...(19): siRNA sense strand
uggaugagcuccuggcaga

SEQ ID NO: 2510438 - RNA, 19 nt, Homo sapiens
  misc_RNA (1)...(19): siRNA sense strand
gucugaaagccaagaaauu

SEQ ID NO: 2510439 - RNA, 19 nt, Homo sapiens
  misc_RNA (1)...(19): siRNA sense strand
gcagaguggcuuaagguca

SEQ ID NO: 2510440 - RNA, 19 nt, Homo sapiens
  misc_RNA (1)...(19): siRNA sense strand
ccugaagaaccuugcagaa

SEQ ID NO: 2510441 - RNA, 19 nt, Homo sapiens
  misc_RNA (1)...(19): siRNA sense strand
agaaacacuggcagagauu

SEQ ID NO: 2510442 - RNA, 19 nt, Homo sapiens
  misc_RNA (1)...(19): siRNA sense strand
cagaaagaagaguuccaaa

SEQ ID NO: 2510443 - RNA, 19 nt, Homo sapiens
  misc_RNA (1)...(19): siRNA sense strand
gaacugaggaggaagacca

SEQ ID NO: 2510444 - RNA, 19 nt, Homo sapiens
  misc_RNA (1)...(19): siRNA sense strand
gggagauggagguguacau

SEQ ID NO: 2510445 - RNA, 19 nt, Homo sapiens
  misc_RNA (1)...(19): siRNA sense strand
cagcugagccacaaggaga

SEQ ID NO: 2510446 - RNA, 19 nt, Homo sapiens
  misc_RNA (1)...(19): siRNA sense strand
ggucugaaagccaagaaau

SEQ ID NO: 2510447 - RNA, 19 nt, Homo sapiens
  misc_RNA (1)...(19): siRNA sense strand
gagagaauucaguggcuca

SEQ ID NO: 2510448 - RNA, 19 nt, Homo sapiens
  misc_RNA (1)...(19): siRNA sense strand
ggaaggggcuugagaagga

SEQ ID NO: 2510449 - RNA, 19 nt, Homo sapiens
  misc_RNA (1)...(19): siRNA sense strand
cugcggaagugcugugaca

SEQ ID NO: 2510450 - RNA, 19 nt, Homo sapiens
  misc_RNA (1)...(19): siRNA sense strand
gagaaacacuggcagagau

SEQ ID NO: 2510451 - RNA, 19 nt, Homo sapiens
  misc_RNA (1)...(19): siRNA sense strand
cugaaauccugucugacua

SEQ ID NO: 2510452 - RNA, 19 nt, Homo sapiens
  misc_RNA (1)...(19): siRNA sense strand
ccgcugaaaucucugaaau

SEQ ID NO: 2510453 - RNA, 19 nt, Homo sapiens
  misc_RNA (1)...(19): siRNA sense strand
acaucaggcacuuggagaa

SEQ ID NO: 2510454 - RNA, 19 nt, Homo sapiens
  misc_RNA (1)...(19): siRNA sense strand
gauucaaagaagccacuaa

SEQ ID NO: 2510455 - RNA, 19 nt, Homo sapiens
  misc_RNA (1)...(19): siRNA sense strand
acuucaaggacaaagacaa

SEQ ID NO: 2510456 - RNA, 19 nt, Homo sapiens
  misc_RNA (1)...(19): siRNA sense strand
aaccauugcauuaggagaa

SEQ ID NO: 2510457 - RNA, 19 nt, Homo sapiens
  misc_RNA (1)...(19): siRNA sense strand
ccacugguuuggagacaca

SEQ ID NO: 2510458 - RNA, 19 nt, Homo sapiens
  misc_RNA (1)...(19): siRNA sense strand
uggaaaaggcucucaacua

SEQ ID NO: 2510459 - RNA, 19 nt, Homo sapiens
  misc_RNA (1)...(19): siRNA sense strand
gcauuaaagaugacccuga

SEQ ID NO: 2510460 - RNA, 19 nt, Homo sapiens
  misc_RNA (1)...(19): siRNA sense strand
aauugaagcuggagauuuc

SEQ ID NO: 2510461 - RNA, 19 nt, Homo sapiens
  misc_RNA (1)...(19): siRNA sense strand
gcaccguuuuggagagcaa

SEQ ID NO: 2510462 - RNA, 19 nt, Homo sapiens
  misc_RNA (1)...(19): siRNA sense strand
gaagaauaugaauggacuu

SEQ ID NO: 2510463 - RNA, 19 nt, Homo sapiens
  misc_RNA (1)...(19): siRNA sense strand
acaaaugggccacucauaa

SEQ ID NO: 2510464 - RNA, 19 nt, Homo sapiens
  misc_RNA (1)...(19): siRNA sense strand
ggacaagacuucugcagag

SEQ ID NO: 2510465 - RNA, 19 nt, Homo sapiens
  misc_RNA (1)...(19): siRNA sense strand
augagaaggcaaugauaca

SEQ ID NO: 2510466 - RNA, 19 nt, Homo sapiens
  misc_RNA (1)...(19): siRNA sense strand
aagaagggaugauggaacu

SEQ ID NO: 2510467 - RNA, 19 nt, Homo sapiens
  misc_RNA (1)...(19): siRNA sense strand
acacagagaaagggaauga

SEQ ID NO: 2510468 - RNA, 19 nt, Homo sapiens
  misc_RNA (1)...(19): siRNA sense strand
uggcagagauucaaagaag

SEQ ID NO: 2510469 - RNA, 19 nt, Homo sapiens
  misc_RNA (1)...(19): siRNA sense strand
cgacggaaagccagacaca

SEQ ID NO: 2510470 - RNA, 19 nt, Homo sapiens
  misc_RNA (1)...(19): siRNA sense strand
uguccuaaaugaaguccaa

SEQ ID NO: 2510471 - RNA, 19 nt, Homo sapiens
  misc_RNA (1)...(19): siRNA sense strand
agaaaagagaugugaaagu

SEQ ID NO: 2510472 - RNA, 19 nt, Homo sapiens
  misc_RNA (1)...(19): siRNA sense strand
cuauugacuuacccagaaa

SEQ ID NO: 2510473 - RNA, 19 nt, Homo sapiens
  misc_RNA (1)...(19): siRNA sense strand
ccaaugucgugcagaaaau

SEQ ID NO: 2510474 - RNA, 19 nt, Homo sapiens
  misc_RNA (1)...(19): siRNA sense strand
ggaggaauuuguaccuauu

SEQ ID NO: 2510475 - RNA, 19 nt, Homo sapiens
  misc_RNA (1)...(19): siRNA sense strand
gagaaggcaaugauacaau

SEQ ID NO: 2510476 - RNA, 19 nt, Homo sapiens
  misc_RNA (1)...(19): siRNA sense strand
ugauggaacugaggaggaa

SEQ ID NO: 2510477 - RNA, 19 nt, Homo sapiens
  misc_RNA (1)...(19): siRNA sense strand
ucuauaaguaccagcaaca

SEQ ID NO: 2510478 - RNA, 19 nt, Homo sapiens
  misc_RNA (1)...(19): siRNA sense strand
cuuccauggucaagaaaau

SEQ ID NO: 2510479 - RNA, 19 nt, Homo sapiens
  misc_RNA (1)...(19): siRNA sense strand
ggagagcaaaguaugcaua

SEQ ID NO: 2510480 - RNA, 19 nt, Homo sapiens
  misc_RNA (1)...(19): siRNA sense strand
gaaaacagcaagaaggcau

SEQ ID NO: 2510481 - RNA, 19 nt, Homo sapiens
  misc_RNA (1)...(19): siRNA sense strand
caaagaagccacuaaagca

SEQ ID NO: 2510482 - RNA, 19 nt, Homo sapiens
  misc_RNA (1)...(19): siRNA sense strand
acgacgggacagugaagaa

SEQ ID NO: 2510483 - RNA, 19 nt, Homo sapiens
  misc_RNA (1)...(19): siRNA sense strand
guuuggagacacaggcauu

SEQ ID NO: 2510484 - RNA, 19 nt, Homo sapiens
  misc_RNA (1)...(19): siRNA sense strand
aagaugacccugacagaga

SEQ ID NO: 2510485 - RNA, 19 nt, Homo sapiens
  misc_RNA (1)...(19): siRNA sense strand
aggaggaagaccaagucaa

SEQ ID NO: 2510486 - RNA, 19 nt, Homo sapiens
  misc_RNA (1)...(19): siRNA sense strand
ccaugagaaggcaaugaua

SEQ ID NO: 2510487 - RNA, 19 nt, Homo sapiens
  misc_RNA (1)...(19): siRNA sense strand
ugacuuacccagaaaggau

SEQ ID NO: 2510488 - RNA, 19 nt, Homo sapiens
  misc_RNA (1)...(19): siRNA sense strand
gcguugagauccauggagu

SEQ ID NO: 2510489 - RNA, 19 nt, Homo sapiens
  misc_RNA (1)...(19): siRNA sense strand
ggagaaacacuggcagaga

SEQ ID NO: 2510490 - RNA, 19 nt, Homo sapiens
  misc_RNA (1)...(19): siRNA sense strand
cauuugaaggagaugauuu

SEQ ID NO: 2510491 - RNA, 19 nt, Homo sapiens
  misc_RNA (1)...(19): siRNA sense strand
aagaaguacccucaaggaa

SEQ ID NO: 2510492 - RNA, 19 nt, Homo sapiens
  misc_RNA (1)...(19): siRNA sense strand
aaacacuggcagagauuca

SEQ ID NO: 2510493 - RNA, 19 nt, Homo sapiens
  misc_RNA (1)...(19): siRNA sense strand
caggaaaaguacugggaag

SEQ ID NO: 2510494 - RNA, 19 nt, Homo sapiens
  misc_RNA (1)...(19): siRNA sense strand
agaagaauaugaauggacu

SEQ ID NO: 2510495 - RNA, 19 nt, Homo sapiens
  misc_RNA (1)...(19): siRNA sense strand
aggcaaugauacaauuuga

SEQ ID NO: 2510496 - RNA, 19 nt, Homo sapiens
  misc_RNA (1)...(19): siRNA sense strand
gcucucaacuacucccaaa

SEQ ID NO: 2510497 - RNA, 19 nt, Homo sapiens
  misc_RNA (1)...(19): siRNA sense strand
gcaaaauaugggcucaaaa

SEQ ID NO: 2510498 - RNA, 19 nt, Homo sapiens
  misc_RNA (1)...(19): siRNA sense strand
ugaagucuaucaagagaga

SEQ ID NO: 2510499 - RNA, 19 nt, Homo sapiens
  misc_RNA (1)...(19): siRNA sense strand
gcaguggcccucagaaaga

SEQ ID NO: 2510500 - RNA, 19 nt, Homo sapiens
  misc_RNA (1)...(19): siRNA sense strand
cagcaguccaccaugggaa

SEQ ID NO: 2510501 - RNA, 19 nt, Homo sapiens
  misc_RNA (1)...(19): siRNA sense strand
ggaaggcuguggaaguaga

SEQ ID NO: 2510502 - RNA, 19 nt, Homo sapiens
  misc_RNA (1)...(19): siRNA sense strand
gucaagggaagcagagaca

SEQ ID NO: 2510503 - RNA, 19 nt, Homo sapiens
  misc_RNA (1)...(19): siRNA sense strand
aacuuaagcucuggguaaa

SEQ ID NO: 2510504 - RNA, 19 nt, Homo sapiens
  misc_RNA (1)...(19): siRNA sense strand
ucugaaagccaagaaauua

SEQ ID NO: 2510505 - RNA, 19 nt, Homo sapiens
  misc_RNA (1)...(19): siRNA sense strand
gaggcuaugcaauggguga

SEQ ID NO: 2510506 - RNA, 19 nt, Homo sapiens
  misc_RNA (1)...(19): siRNA sense strand
gauuguaccuccugaccga

SEQ ID NO: 2510507 - RNA, 19 nt, Homo sapiens
  misc_RNA (1)...(19): siRNA sense strand
ugaccaaaggcuucaucaa

SEQ ID NO: 2510508 - RNA, 19 nt, Homo sapiens
  misc_RNA (1)...(19): siRNA sense strand
agaucuuccuggagagaaa

SEQ ID NO: 2510509 - RNA, 19 nt, Homo sapiens
  misc_RNA (1)...(19): siRNA sense strand
ccgaaaaugaauuggaaaa

SEQ ID NO: 2510510 - RNA, 19 nt, Homo sapiens
  misc_RNA (1)...(19): siRNA sense strand
aggaaugacaccaggguuu

SEQ ID NO: 2510511 - RNA, 19 nt, Homo sapiens
  misc_RNA (1)...(19): siRNA sense strand
ucaagaugguggagggcuu

SEQ ID NO: 2510512 - RNA, 19 nt, Homo sapiens
  misc_RNA (1)...(19): siRNA sense strand
ccagcaucguggaggacaa

SEQ ID NO: 2510513 - RNA, 19 nt, Homo sapiens
  misc_RNA (1)...(19): siRNA sense strand
gcgaggagcagaagcggaa

SEQ ID NO: 2510514 - RNA, 19 nt, Homo sapiens
  misc_RNA (1)...(19): siRNA sense strand
aggaaagcgaggagcagaa

SEQ ID NO: 2510515 - RNA, 19 nt, Homo sapiens
  misc_RNA (1)...(19): siRNA sense strand
cugagaagcaguugaccaa

SEQ ID NO: 2510516 - RNA, 19 nt, Homo sapiens
  misc_RNA (1)...(19): siRNA sense strand
gggaggucaucgaaggcua

SEQ ID NO: 2510517 - RNA, 19 nt, Homo sapiens
  misc_RNA (1)...(19): siRNA sense strand
gagucaaagccaagaucau

SEQ ID NO: 2510518 - RNA, 19 nt, Homo sapiens
  misc_RNA (1)...(19): siRNA sense strand
gauaagaucuuccuggaga

SEQ ID NO: 2510519 - RNA, 19 nt, Homo sapiens
  misc_RNA (1)...(19): siRNA sense strand
uggaaagcaugguggaacu

SEQ ID NO: 2510520 - RNA, 19 nt, Homo sapiens
  misc_RNA (1)...(19): siRNA sense strand
acccaaaggaacuggaaga

SEQ ID NO: 2510521 - RNA, 19 nt, Homo sapiens
  misc_RNA (1)...(19): siRNA sense strand
cauuuguuguucagggauu

SEQ ID NO: 2510522 - RNA, 19 nt, Homo sapiens
  misc_RNA (1)...(19): siRNA sense strand
ugaugggaguauauggaau

SEQ ID NO: 2510523 - RNA, 19 nt, Homo sapiens
  misc_RNA (1)...(19): siRNA sense strand
gcuucuuacaugagcauuu

SEQ ID NO: 2510524 - RNA, 19 nt, Homo sapiens
  misc_RNA (1)...(19): siRNA sense strand
ugguauugacccaaaggaa

SEQ ID NO: 2510525 - RNA, 19 nt, Homo sapiens
  misc_RNA (1)...(19): siRNA sense strand
guguuaagaucaaucccaa

SEQ ID NO: 2510526 - RNA, 19 nt, Homo sapiens
  misc_RNA (1)...(19): siRNA sense strand
ugaguguagaugaaguaaa

SEQ ID NO: 2510527 - RNA, 19 nt, Homo sapiens
  misc_RNA (1)...(19): siRNA sense strand
agaaagacauugugcacuc

SEQ ID NO: 2510528 - RNA, 19 nt, Homo sapiens
  misc_RNA (1)...(19): siRNA sense strand
cuuuauugguccuggcguu

SEQ ID NO: 2510529 - RNA, 19 nt, Homo sapiens
  misc_RNA (1)...(19): siRNA sense strand
cggcagaguuccaagacag

SEQ ID NO: 2510530 - RNA, 19 nt, Homo sapiens
  misc_RNA (1)...(19): siRNA sense strand
cagaguuccaagacaguau

SEQ ID NO: 2510531 - RNA, 19 nt, Homo sapiens
  misc_RNA (1)...(19): siRNA sense strand
ugguaaacccaucagccaa

SEQ ID NO: 2510532 - RNA, 19 nt, Homo sapiens
  misc_RNA (1)...(19): siRNA sense strand
guauugacccaaaggaacu

SEQ ID NO: 2510533 - RNA, 19 nt, Homo sapiens
  misc_RNA (1)...(19): siRNA sense strand
augaaagggauucuaacua

SEQ ID NO: 2510534 - RNA, 19 nt, Homo sapiens
  misc_RNA (1)...(19): siRNA sense strand
cuacacucuaugagauauu

SEQ ID NO: 2510535 - RNA, 19 nt, Homo sapiens
  misc_RNA (1)...(19): siRNA sense strand
ugugaguguagaugaagua

SEQ ID NO: 2510536 - RNA, 19 nt, Homo sapiens
  misc_RNA (1)...(19): siRNA sense strand
gagucugaugggaguauau

SEQ ID NO: 2510537 - RNA, 19 nt, Homo sapiens
  misc_RNA (1)...(19): siRNA sense strand
cuacuugaaugcuggagga

SEQ ID NO: 2510538 - RNA, 19 nt, Homo sapiens
  misc_RNA (1)...(19): siRNA sense strand
acuuugaguggcugaagaa

SEQ ID NO: 2510539 - RNA, 19 nt, Homo sapiens
  misc_RNA (1)...(19): siRNA sense strand
cuucaucaucauagggaau

SEQ ID NO: 2510540 - RNA, 19 nt, Homo sapiens
  misc_RNA (1)...(19): siRNA sense strand
ccagaauugugguggcagu

SEQ ID NO: 2510541 - RNA, 19 nt, Homo sapiens
  misc_RNA (1)...(19): siRNA sense strand
ugaucuauaccaugaggaa

SEQ ID NO: 2510542 - RNA, 19 nt, Homo sapiens
  misc_RNA (1)...(19): siRNA sense strand
ucuucaauccugugaucua

SEQ ID NO: 2510543 - RNA, 19 nt, Homo sapiens
  misc_RNA (1)...(19): siRNA sense strand
aucuauaccaugaggaaca

SEQ ID NO: 2510544 - RNA, 19 nt, Homo sapiens
  misc_RNA (1)...(19): siRNA sense strand
gauuauuguagcagugguu

SEQ ID NO: 2510545 - RNA, 19 nt, Homo sapiens
  misc_RNA (1)...(19): siRNA sense strand
ucucuggauuugugguaga

SEQ ID NO: 2510546 - RNA, 19 nt, Homo sapiens
  misc_RNA (1)...(19): siRNA sense strand
gauuugugguagauggacu

SEQ ID NO: 2510547 - RNA, 19 nt, Homo sapiens
  misc_RNA (1)...(19): siRNA sense strand
cugaagaagaccugggcca

SEQ ID NO: 2510548 - RNA, 19 nt, Homo sapiens
  misc_RNA (1)...(19): siRNA sense strand
aggcauaccggaagaggau

SEQ ID NO: 2510549 - RNA, 19 nt, Homo sapiens
  misc_RNA (1)...(19): siRNA sense strand
ggaaacaaguggagugucc

SEQ ID NO: 2510550 - RNA, 19 nt, Homo sapiens
  misc_RNA (1)...(19): siRNA sense strand
aaagaaagauggaaagcuc

SEQ ID NO: 2510551 - RNA, 19 nt, Homo sapiens
  misc_RNA (1)...(19): siRNA sense strand
ccacagacgcugagugccu

SEQ ID NO: 2510552 - RNA, 19 nt, Homo sapiens
  misc_RNA (1)...(19): siRNA sense strand
gugacgaggcauaccggaa

SEQ ID NO: 2510553 - RNA, 19 nt, Homo sapiens
  misc_RNA (1)...(19): siRNA sense strand
gugagagcccagagaacca

SEQ ID NO: 2510554 - RNA, 19 nt, Homo sapiens
  misc_RNA (1)...(19): siRNA sense strand
ccaaagugaggacggccaa

SEQ ID NO: 2510555 - RNA, 19 nt, Homo sapiens
  misc_RNA (1)...(19): siRNA sense strand
ccgaguggaccgagaccuu

SEQ ID NO: 2510556 - RNA, 19 nt, Homo sapiens
  misc_RNA (1)...(19): siRNA sense strand
uggaaagcucuaagaucuu

SEQ ID NO: 2510557 - RNA, 19 nt, Homo sapiens
  misc_RNA (1)...(19): siRNA sense strand
ugaagaagaccugggccaa

SEQ ID NO: 2510558 - RNA, 19 nt, Homo sapiens
  misc_RNA (1)...(19): siRNA sense strand
aauucaugcuagagagaaa

SEQ ID NO: 2510559 - RNA, 19 nt, Homo sapiens
  misc_RNA (1)...(19): siRNA sense strand
aauucauacuggugagaaa

SEQ ID NO: 2510560 - RNA, 19 nt, Homo sapiens
  misc_RNA (1)...(19): siRNA sense strand
auguaaagaauguggcaaa

SEQ ID NO: 2510561 - RNA, 19 nt, Homo sapiens
  misc_RNA (1)...(19): siRNA sense strand
aauucauacuggagacaaa

SEQ ID NO: 2510562 - RNA, 19 nt, Homo sapiens
  misc_RNA (1)...(19): siRNA sense strand
aaccaauguuugagaacua

SEQ ID NO: 2510563 - RNA, 19 nt, Homo sapiens
  misc_RNA (1)...(19): siRNA sense strand
aagugauguuugagaacua

SEQ ID NO: 2510564 - RNA, 19 nt, Homo sapiens
  misc_RNA (1)...(19): siRNA sense strand
augugaagaauguggcaaa

SEQ ID NO: 2510565 - RNA, 19 nt, Homo sapiens
  misc_RNA (1)...(19): siRNA sense strand
augugaagaauguggcaaa

SEQ ID NO: 2510566 - RNA, 19 nt, Homo sapiens
  misc_RNA (1)...(19): siRNA sense strand
augugaagaauguggcaaa

SEQ ID NO: 2510567 - RNA, 19 nt, Homo sapiens
  misc_RNA (1)...(19): siRNA sense strand
augugaagaauguggcaaa

SEQ ID NO: 2510568 - RNA, 19 nt, Homo sapiens
  misc_RNA (1)...(19): siRNA sense strand
augugaagaauguggcaaa

SEQ ID NO: 2510569 - RNA, 19 nt, Homo sapiens
  misc_RNA (1)...(19): siRNA sense strand
augugaagaauguggcaaa

SEQ ID NO: 2510570 - RNA, 19 nt, Homo sapiens
  misc_RNA (1)...(19): siRNA sense strand
gugauaaauacgugaaagu

SEQ ID NO: 2510571 - RNA, 19 nt, Homo sapiens
  misc_RNA (1)...(19): siRNA sense strand
aauucauaugggagagaaa

SEQ ID NO: 2510572 - RNA, 19 nt, Homo sapiens
  misc_RNA (1)...(19): siRNA sense strand
uggccagagcauagcauaa

SEQ ID NO: 2510573 - RNA, 19 nt, Homo sapiens
  misc_RNA (1)...(19): siRNA sense strand
aagaaauacuggaaagaag

SEQ ID NO: 2510574 - RNA, 19 nt, Homo sapiens
  misc_RNA (1)...(19): siRNA sense strand
uguuugagaacuacagaaa

SEQ ID NO: 2510575 - RNA, 19 nt, Homo sapiens
  misc_RNA (1)...(19): siRNA sense strand
agaacuacccagagcaaaa

SEQ ID NO: 2510576 - RNA, 19 nt, Homo sapiens
  misc_RNA (1)...(19): siRNA sense strand
cggaauuuauauaggaaag

SEQ ID NO: 2510577 - RNA, 19 nt, Homo sapiens
  misc_RNA (1)...(19): siRNA sense strand
agugauacugagaggauau

SEQ ID NO: 2510578 - RNA, 19 nt, Homo sapiens
  misc_RNA (1)...(19): siRNA sense strand
ggacacugcacaacggaau

SEQ ID NO: 2510579 - RNA, 19 nt, Homo sapiens
  misc_RNA (1)...(19): siRNA sense strand
acugagaggauauggaaaa

SEQ ID NO: 2510580 - RNA, 19 nt, Homo sapiens
  misc_RNA (1)...(19): siRNA sense strand
gauaaauacgugaaagucu

SEQ ID NO: 2510581 - RNA, 19 nt, Homo sapiens
  misc_RNA (1)...(19): siRNA sense strand
agaauucacacuagagaga

SEQ ID NO: 2510582 - RNA, 19 nt, Homo sapiens
  misc_RNA (1)...(19): siRNA sense strand
ccacugacauuuagggaug

SEQ ID NO: 2510583 - RNA, 19 nt, Homo sapiens
  misc_RNA (1)...(19): siRNA sense strand
agaauucacacuagagaga

SEQ ID NO: 2510584 - RNA, 19 nt, Homo sapiens
  misc_RNA (1)...(19): siRNA sense strand
augugaagaaugcggcaaa

SEQ ID NO: 2510585 - RNA, 19 nt, Homo sapiens
  misc_RNA (1)...(19): siRNA sense strand
ccuguuuggagcaaggaaa

SEQ ID NO: 2510586 - RNA, 19 nt, Homo sapiens
  misc_RNA (1)...(19): siRNA sense strand
uguaaagaauguggcaaau

SEQ ID NO: 2510587 - RNA, 19 nt, Homo sapiens
  misc_RNA (1)...(19): siRNA sense strand
augugaggaauguggcaaa

SEQ ID NO: 2510588 - RNA, 19 nt, Homo sapiens
  misc_RNA (1)...(19): siRNA sense strand
augugaggaauguggcaaa

SEQ ID NO: 2510589 - RNA, 19 nt, Homo sapiens
  misc_RNA (1)...(19): siRNA sense strand
gacaggagaugguagccaa

SEQ ID NO: 2510590 - RNA, 19 nt, Homo sapiens
  misc_RNA (1)...(19): siRNA sense strand
guggaugagucuaaggugu

SEQ ID NO: 2510591 - RNA, 19 nt, Homo sapiens
  misc_RNA (1)...(19): siRNA sense strand
agagagaaacccuacaaau

SEQ ID NO: 2510592 - RNA, 19 nt, Homo sapiens
  misc_RNA (1)...(19): siRNA sense strand
agggaauucauaugggaga

SEQ ID NO: 2510593 - RNA, 19 nt, Homo sapiens
  misc_RNA (1)...(19): siRNA sense strand
agaaaugggaccacugaca

SEQ ID NO: 2510594 - RNA, 19 nt, Homo sapiens
  misc_RNA (1)...(19): siRNA sense strand
ggaagagacaggagauggu

SEQ ID NO: 2510595 - RNA, 19 nt, Homo sapiens
  misc_RNA (1)...(19): siRNA sense strand
ccuacaaaugugaggaaug

SEQ ID NO: 2510596 - RNA, 19 nt, Homo sapiens
  misc_RNA (1)...(19): siRNA sense strand
agagagaauaccuacaaau

SEQ ID NO: 2510597 - RNA, 19 nt, Homo sapiens
  misc_RNA (1)...(19): siRNA sense strand
gcuaaucauaagagaauuc

SEQ ID NO: 2510598 - RNA, 19 nt, Homo sapiens
  misc_RNA (1)...(19): siRNA sense strand
agguguucaaagaagguua

SEQ ID NO: 2510599 - RNA, 19 nt, Homo sapiens
  misc_RNA (1)...(19): siRNA sense strand
ugagaacuacccagagcaa

SEQ ID NO: 2510600 - RNA, 19 nt, Homo sapiens
  misc_RNA (1)...(19): siRNA sense strand
gggagagaaacccuacaaa

SEQ ID NO: 2510601 - RNA, 19 nt, Homo sapiens
  misc_RNA (1)...(19): siRNA sense strand
ggaauguggcaaaguucuu

SEQ ID NO: 2510602 - RNA, 19 nt, Homo sapiens
  misc_RNA (1)...(19): siRNA sense strand
acaaaugugaugaauguca

SEQ ID NO: 2510603 - RNA, 19 nt, Homo sapiens
  misc_RNA (1)...(19): siRNA sense strand
agaauucaugcuagagaga

SEQ ID NO: 2510604 - RNA, 19 nt, Homo sapiens
  misc_RNA (1)...(19): siRNA sense strand
cugucaaggaagagcgcaa

SEQ ID NO: 2510605 - RNA, 19 nt, Homo sapiens
  misc_RNA (1)...(19): siRNA sense strand
gcaucgacgugcagggugu

SEQ ID NO: 2510606 - RNA, 19 nt, Homo sapiens
  misc_RNA (1)...(19): siRNA sense strand
ccaaggagcaggagagccu

SEQ ID NO: 2510607 - RNA, 19 nt, Homo sapiens
  misc_RNA (1)...(19): siRNA sense strand
gaaaacagcugauggguac

SEQ ID NO: 2510608 - RNA, 19 nt, Homo sapiens
  misc_RNA (1)...(19): siRNA sense strand
uaacugugucagaaggaau

SEQ ID NO: 2510609 - RNA, 19 nt, Homo sapiens
  misc_RNA (1)...(19): siRNA sense strand
agaaaacagcugaugggua

SEQ ID NO: 2510610 - RNA, 19 nt, Homo sapiens
  misc_RNA (1)...(19): siRNA sense strand
gcgcagaaagcaacgagga

SEQ ID NO: 2510611 - RNA, 19 nt, Homo sapiens
  misc_RNA (1)...(19): siRNA sense strand
gggaagauccagcugcuca

SEQ ID NO: 2510612 - RNA, 19 nt, Homo sapiens
  misc_RNA (1)...(19): siRNA sense strand
acgaggaggcccuguccaa

SEQ ID NO: 2510613 - RNA, 19 nt, Homo sapiens
  misc_RNA (1)...(19): siRNA sense strand
aggaaagaaacuaaggaaa

SEQ ID NO: 2510614 - RNA, 19 nt, Homo sapiens
  misc_RNA (1)...(19): siRNA sense strand
uugaaugggccaaggaaaa

SEQ ID NO: 2510615 - RNA, 19 nt, Homo sapiens
  misc_RNA (1)...(19): siRNA sense strand
cugaaaacucugcaagaaa

SEQ ID NO: 2510616 - RNA, 19 nt, Homo sapiens
  misc_RNA (1)...(19): siRNA sense strand
auaucgaguuaguggcaau

SEQ ID NO: 2510617 - RNA, 19 nt, Homo sapiens
  misc_RNA (1)...(19): siRNA sense strand
ugcagauggaggaaagaaa

SEQ ID NO: 2510618 - RNA, 19 nt, Homo sapiens
  misc_RNA (1)...(19): siRNA sense strand
gugcaaaugagaaucaaaa

SEQ ID NO: 2510619 - RNA, 19 nt, Homo sapiens
  misc_RNA (1)...(19): siRNA sense strand
auugaaugggccaaggaaa

SEQ ID NO: 2510620 - RNA, 19 nt, Homo sapiens
  misc_RNA (1)...(19): siRNA sense strand
aagcaagacaacaacacaa

SEQ ID NO: 2510621 - RNA, 19 nt, Homo sapiens
  misc_RNA (1)...(19): siRNA sense strand
acacaagaauugaagcugu

SEQ ID NO: 2510622 - RNA, 19 nt, Homo sapiens
  misc_RNA (1)...(19): siRNA sense strand
cacaacaguaucaggaaau

SEQ ID NO: 2510623 - RNA, 19 nt, Homo sapiens
  misc_RNA (1)...(19): siRNA sense strand
cugaaaaugaaacaggaaa

SEQ ID NO: 2510624 - RNA, 19 nt, Homo sapiens
  misc_RNA (1)...(19): siRNA sense strand
agaaaccagagcacagaaa

SEQ ID NO: 2510625 - RNA, 19 nt, Homo sapiens
  misc_RNA (1)...(19): siRNA sense strand
caagaauugaagcuguaaa

SEQ ID NO: 2510626 - RNA, 19 nt, Homo sapiens
  misc_RNA (1)...(19): siRNA sense strand
gucuagauguggaugcaau

SEQ ID NO: 2510627 - RNA, 19 nt, Homo sapiens
  misc_RNA (1)...(19): siRNA sense strand
uggcaaucugcaaacaaua

SEQ ID NO: 2510628 - RNA, 19 nt, Homo sapiens
  misc_RNA (1)...(19): siRNA sense strand
ggcacaaaccagaaagugu

SEQ ID NO: 2510629 - RNA, 19 nt, Homo sapiens
  misc_RNA (1)...(19): siRNA sense strand
accaagaagagaagcugaa

SEQ ID NO: 2510630 - RNA, 19 nt, Homo sapiens
  misc_RNA (1)...(19): siRNA sense strand
ucuagauguggaugcaaua

SEQ ID NO: 2510631 - RNA, 19 nt, Homo sapiens
  misc_RNA (1)...(19): siRNA sense strand
acaaagugugugaacguga

SEQ ID NO: 2510632 - RNA, 19 nt, Homo sapiens
  misc_RNA (1)...(19): siRNA sense strand
gcugaaaaugaaacaggaa

SEQ ID NO: 2510633 - RNA, 19 nt, Homo sapiens
  misc_RNA (1)...(19): siRNA sense strand
caguaagaucuucggcuca

SEQ ID NO: 2510634 - RNA, 19 nt, Homo sapiens
  misc_RNA (1)...(19): siRNA sense strand
ccaucaagaaaccuggaau

SEQ ID NO: 2510635 - RNA, 19 nt, Homo sapiens
  misc_RNA (1)...(19): siRNA sense strand
uggccaaagccuccaagaa

SEQ ID NO: 2510636 - RNA, 19 nt, Homo sapiens
  misc_RNA (1)...(19): siRNA sense strand
ggaauuaucugaugcccua

SEQ ID NO: 2510637 - RNA, 19 nt, Homo sapiens
  misc_RNA (1)...(19): siRNA sense strand
uggccaggagagagagaaa

SEQ ID NO: 2510638 - RNA, 19 nt, Homo sapiens
  misc_RNA (1)...(19): siRNA sense strand
acugguagcaagacagaau

SEQ ID NO: 2510639 - RNA, 19 nt, Homo sapiens
  misc_RNA (1)...(19): siRNA sense strand
agagagaaaagcagcuaaa

SEQ ID NO: 2510640 - RNA, 19 nt, Homo sapiens
  misc_RNA (1)...(19): siRNA sense strand
ucagagaguuacaaagcca

SEQ ID NO: 2510641 - RNA, 19 nt, Homo sapiens
  misc_RNA (1)...(19): siRNA sense strand
ggaauuugcaucagcgugu

SEQ ID NO: 2510642 - RNA, 19 nt, Homo sapiens
  misc_RNA (1)...(19): siRNA sense strand
agaguggccaggagagaga

SEQ ID NO: 2510643 - RNA, 19 nt, Homo sapiens
  misc_RNA (1)...(19): siRNA sense strand
cgacagguacauugcgguu

SEQ ID NO: 2510644 - RNA, 19 nt, Homo sapiens
  misc_RNA (1)...(19): siRNA sense strand
ggcuagacgacaggcgaaa

SEQ ID NO: 2510645 - RNA, 19 nt, Homo sapiens
  misc_RNA (1)...(19): siRNA sense strand
ccaugguuuaggaaagcaa

SEQ ID NO: 2510646 - RNA, 19 nt, Homo sapiens
  misc_RNA (1)...(19): siRNA sense strand
ccguaucugugucaggaau

SEQ ID NO: 2510647 - RNA, 19 nt, Homo sapiens
  misc_RNA (1)...(19): siRNA sense strand
ccacggaacccuugggcua

SEQ ID NO: 2510648 - RNA, 19 nt, Homo sapiens
  misc_RNA (1)...(19): siRNA sense strand
gugcagaagagcagagcca

SEQ ID NO: 2510649 - RNA, 19 nt, Homo sapiens
  misc_RNA (1)...(19): siRNA sense strand
ggggcaauguggaggcuga

SEQ ID NO: 2510650 - RNA, 19 nt, Homo sapiens
  misc_RNA (1)...(19): siRNA sense strand
gggcagugggcauggugaa

SEQ ID NO: 2510651 - RNA, 19 nt, Homo sapiens
  misc_RNA (1)...(19): siRNA sense strand
cagugugggcagugggcau

SEQ ID NO: 2510652 - RNA, 19 nt, Homo sapiens
  misc_RNA (1)...(19): siRNA sense strand
caauggacgagccgggaau

SEQ ID NO: 2510653 - RNA, 19 nt, Homo sapiens
  misc_RNA (1)...(19): siRNA sense strand
guacagagcugcuugacac

SEQ ID NO: 2510654 - RNA, 19 nt, Homo sapiens
  misc_RNA (1)...(19): siRNA sense strand
uugcagacuugauggcuca

SEQ ID NO: 2510655 - RNA, 19 nt, Homo sapiens
  misc_RNA (1)...(19): siRNA sense strand
gggcagaggucaaaggcaa

SEQ ID NO: 2510656 - RNA, 19 nt, Homo sapiens
  misc_RNA (1)...(19): siRNA sense strand
agaaaagggcagaggucaa

SEQ ID NO: 2510657 - RNA, 19 nt, Homo sapiens
  misc_RNA (1)...(19): siRNA sense strand
agaaaguuaaugagagcau

SEQ ID NO: 2510658 - RNA, 19 nt, Homo sapiens
  misc_RNA (1)...(19): siRNA sense strand
gcagaaaguuaaugagagc

SEQ ID NO: 2510659 - RNA, 19 nt, Homo sapiens
  misc_RNA (1)...(19): siRNA sense strand
gcacagacaaggaagagga

SEQ ID NO: 2510660 - RNA, 19 nt, Homo sapiens
  misc_RNA (1)...(19): siRNA sense strand
ccaucugggaagagacaau

SEQ ID NO: 2510661 - RNA, 19 nt, Homo sapiens
  misc_RNA (1)...(19): siRNA sense strand
caacaaugcaagcagccaa

SEQ ID NO: 2510662 - RNA, 19 nt, Homo sapiens
  misc_RNA (1)...(19): siRNA sense strand
gugagaagccaucugggaa

SEQ ID NO: 2510663 - RNA, 19 nt, Homo sapiens
  misc_RNA (1)...(19): siRNA sense strand
ugggaagagacaaugcaaa

SEQ ID NO: 2510664 - RNA, 19 nt, Homo sapiens
  misc_RNA (1)...(19): siRNA sense strand
uugagaaugcugauggcaa

SEQ ID NO: 2510665 - RNA, 19 nt, Homo sapiens
  misc_RNA (1)...(19): siRNA sense strand
acagaagcugguuggaaga

SEQ ID NO: 2510666 - RNA, 19 nt, Homo sapiens
  misc_RNA (1)...(19): siRNA sense strand
ucuuaaacccagugacaac

SEQ ID NO: 2510667 - RNA, 19 nt, Homo sapiens
  misc_RNA (1)...(19): siRNA sense strand
cagacaaggaagaggagug

SEQ ID NO: 2510668 - RNA, 19 nt, Homo sapiens
  misc_RNA (1)...(19): siRNA sense strand
ccuccauccucgagaucaa

SEQ ID NO: 2510669 - RNA, 19 nt, Homo sapiens
  misc_RNA (1)...(19): siRNA sense strand
cagagaaacuggaugagga

SEQ ID NO: 2510670 - RNA, 19 nt, Homo sapiens
  misc_RNA (1)...(19): siRNA sense strand
aauacagagcuuagaacaa

SEQ ID NO: 2510671 - RNA, 19 nt, Homo sapiens
  misc_RNA (1)...(19): siRNA sense strand
cuggagagggagaaggcua

SEQ ID NO: 2510672 - RNA, 19 nt, Homo sapiens
  misc_RNA (1)...(19): siRNA sense strand
acggcaagcuggagaggga

SEQ ID NO: 2510673 - RNA, 19 nt, Homo sapiens
  misc_RNA (1)...(19): siRNA sense strand
aggacgaggaggaggcuau

SEQ ID NO: 2510674 - RNA, 19 nt, Homo sapiens
  misc_RNA (1)...(19): siRNA sense strand
agguggagcucgagcacga

SEQ ID NO: 2510675 - RNA, 19 nt, Homo sapiens
  misc_RNA (1)...(19): siRNA sense strand
gcuuagaacaacagugacu

SEQ ID NO: 2510676 - RNA, 19 nt, Homo sapiens
  misc_RNA (1)...(19): siRNA sense strand
aggagcaggaggagaucaa

SEQ ID NO: 2510677 - RNA, 19 nt, Homo sapiens
  misc_RNA (1)...(19): siRNA sense strand
uggaaaagaaggugacaga

SEQ ID NO: 2510678 - RNA, 19 nt, Homo sapiens
  misc_RNA (1)...(19): siRNA sense strand
aguacauggacaagauuau

SEQ ID NO: 2510679 - RNA, 19 nt, Homo sapiens
  misc_RNA (1)...(19): siRNA sense strand
aauuauaagcugcgggauc

SEQ ID NO: 2510680 - RNA, 19 nt, Homo sapiens
  misc_RNA (1)...(19): siRNA sense strand
ccgaagaccuguuccggga

SEQ ID NO: 2510681 - RNA, 19 nt, Homo sapiens
  misc_RNA (1)...(19): siRNA sense strand
ucaucgaggacuugcggaa

SEQ ID NO: 2510682 - RNA, 19 nt, Homo sapiens
  misc_RNA (1)...(19): siRNA sense strand
gaugaugagaccaggacca

SEQ ID NO: 2510683 - RNA, 19 nt, Homo sapiens
  misc_RNA (1)...(19): siRNA sense strand
uguacaagcuggacugcga

SEQ ID NO: 2510684 - RNA, 19 nt, Homo sapiens
  misc_RNA (1)...(19): siRNA sense strand
ccucgagaucaaacacuaa

SEQ ID NO: 2510685 - RNA, 19 nt, Homo sapiens
  misc_RNA (1)...(19): siRNA sense strand
gcgaugagcuaauggaagc

SEQ ID NO: 2510686 - RNA, 19 nt, Homo sapiens
  misc_RNA (1)...(19): siRNA sense strand
ugcagcaguuggaggaaga

SEQ ID NO: 2510687 - RNA, 19 nt, Homo sapiens
  misc_RNA (1)...(19): siRNA sense strand
caggaguuguacacagaca

SEQ ID NO: 2510688 - RNA, 19 nt, Homo sapiens
  misc_RNA (1)...(19): siRNA sense strand
cagcaauggcagcaccgaa

SEQ ID NO: 2510689 - RNA, 19 nt, Homo sapiens
  misc_RNA (1)...(19): siRNA sense strand
gagaucaacuuccggcuga

SEQ ID NO: 2510690 - RNA, 19 nt, Homo sapiens
  misc_RNA (1)...(19): siRNA sense strand
agaaagagaaggagccaga

SEQ ID NO: 2510691 - RNA, 19 nt, Homo sapiens
  misc_RNA (1)...(19): siRNA sense strand
agcgaaaguucaaggccaa

SEQ ID NO: 2510692 - RNA, 19 nt, Homo sapiens
  misc_RNA (1)...(19): siRNA sense strand
ccgaauuguacacgaguau

SEQ ID NO: 2510693 - RNA, 19 nt, Homo sapiens
  misc_RNA (1)...(19): siRNA sense strand
cagcgaaaguucaaggcca

SEQ ID NO: 2510694 - RNA, 19 nt, Homo sapiens
  misc_RNA (1)...(19): siRNA sense strand
aagaaggagaagaagaaga

SEQ ID NO: 2510695 - RNA, 19 nt, Homo sapiens
  misc_RNA (1)...(19): siRNA sense strand
aagacgagauccugggcau

SEQ ID NO: 2510696 - RNA, 19 nt, Homo sapiens
  misc_RNA (1)...(19): siRNA sense strand
uggauguggcccugagcaa

SEQ ID NO: 2510697 - RNA, 19 nt, Homo sapiens
  misc_RNA (1)...(19): siRNA sense strand
ccaccaucccagagcucaa

SEQ ID NO: 2510698 - RNA, 19 nt, Homo sapiens
  misc_RNA (1)...(19): siRNA sense strand
ucccagagcucaaggacca

SEQ ID NO: 2510699 - RNA, 19 nt, Homo sapiens
  misc_RNA (1)...(19): siRNA sense strand
agauuguggagcagaucaa

SEQ ID NO: 2510700 - RNA, 19 nt, Homo sapiens
  misc_RNA (1)...(19): siRNA sense strand
gcuucaaguacuacagcuu

SEQ ID NO: 2510701 - RNA, 19 nt, Homo sapiens
  misc_RNA (1)...(19): siRNA sense strand
ugacacagcuguaugagca

SEQ ID NO: 2510702 - RNA, 19 nt, Homo sapiens
  misc_RNA (1)...(19): siRNA sense strand
ggugggaacagaagaggca

SEQ ID NO: 2510703 - RNA, 19 nt, Homo sapiens
  misc_RNA (1)...(19): siRNA sense strand
agaaagagaaggagccaga

SEQ ID NO: 2510704 - RNA, 19 nt, Homo sapiens
  misc_RNA (1)...(19): siRNA sense strand
agcgaaaguucaaggccaa

SEQ ID NO: 2510705 - RNA, 19 nt, Homo sapiens
  misc_RNA (1)...(19): siRNA sense strand
ccgaauuguacacgaguau

SEQ ID NO: 2510706 - RNA, 19 nt, Homo sapiens
  misc_RNA (1)...(19): siRNA sense strand
cagcgaaaguucaaggcca

SEQ ID NO: 2510707 - RNA, 19 nt, Homo sapiens
  misc_RNA (1)...(19): siRNA sense strand
aagaaggagaagaagaaga

SEQ ID NO: 2510708 - RNA, 19 nt, Homo sapiens
  misc_RNA (1)...(19): siRNA sense strand
aagacgagauccugggcau

SEQ ID NO: 2510709 - RNA, 19 nt, Homo sapiens
  misc_RNA (1)...(19): siRNA sense strand
uggauguggcccugagcaa

SEQ ID NO: 2510710 - RNA, 19 nt, Homo sapiens
  misc_RNA (1)...(19): siRNA sense strand
ccaccaucccagagcucaa

SEQ ID NO: 2510711 - RNA, 19 nt, Homo sapiens
  misc_RNA (1)...(19): siRNA sense strand
ucccagagcucaaggacca

SEQ ID NO: 2510712 - RNA, 19 nt, Homo sapiens
  misc_RNA (1)...(19): siRNA sense strand
agauuguggagcagaucaa

SEQ ID NO: 2510713 - RNA, 19 nt, Homo sapiens
  misc_RNA (1)...(19): siRNA sense strand
gcuucaaguacuacagcuu

SEQ ID NO: 2510714 - RNA, 19 nt, Homo sapiens
  misc_RNA (1)...(19): siRNA sense strand
ugacacagcuguaugagca

SEQ ID NO: 2510715 - RNA, 19 nt, Homo sapiens
  misc_RNA (1)...(19): siRNA sense strand
ggugggaacagaagaggca

SEQ ID NO: 2510716 - RNA, 19 nt, Homo sapiens
  misc_RNA (1)...(19): siRNA sense strand
aguaauagcaagaggacca

SEQ ID NO: 2510717 - RNA, 19 nt, Homo sapiens
  misc_RNA (1)...(19): siRNA sense strand
uggagaaggagaagaggaa

SEQ ID NO: 2510718 - RNA, 19 nt, Homo sapiens
  misc_RNA (1)...(19): siRNA sense strand
gaauuaaaugugagggagu

SEQ ID NO: 2510719 - RNA, 19 nt, Homo sapiens
  misc_RNA (1)...(19): siRNA sense strand
gaaagaaagaugauggacu

SEQ ID NO: 2510720 - RNA, 19 nt, Homo sapiens
  misc_RNA (1)...(19): siRNA sense strand
cuguaaagaagauggagau

SEQ ID NO: 2510721 - RNA, 19 nt, Homo sapiens
  misc_RNA (1)...(19): siRNA sense strand
cagaauuaaaugugaggga

SEQ ID NO: 2510722 - RNA, 19 nt, Homo sapiens
  misc_RNA (1)...(19): siRNA sense strand
aggagaagaggaaggguca

SEQ ID NO: 2510723 - RNA, 19 nt, Homo sapiens
  misc_RNA (1)...(19): siRNA sense strand
gacacuaguuuguugggaa

SEQ ID NO: 2510724 - RNA, 19 nt, Homo sapiens
  misc_RNA (1)...(19): siRNA sense strand
gcggcaaaggcaagagcau

SEQ ID NO: 2510725 - RNA, 19 nt, Homo sapiens
  misc_RNA (1)...(19): siRNA sense strand
aagaagauggagaugguuu

SEQ ID NO: 2510726 - RNA, 19 nt, Homo sapiens
  misc_RNA (1)...(19): siRNA sense strand
uguaagcaccagaaagaga

SEQ ID NO: 2510727 - RNA, 19 nt, Homo sapiens
  misc_RNA (1)...(19): siRNA sense strand
agaugauggacuacaauau

SEQ ID NO: 2510728 - RNA, 19 nt, Homo sapiens
  misc_RNA (1)...(19): siRNA sense strand
gugaugaagaugcagaaaa

SEQ ID NO: 2510729 - RNA, 19 nt, Homo sapiens
  misc_RNA (1)...(19): siRNA sense strand
ggucauuuuacuucagaua

SEQ ID NO: 2510730 - RNA, 19 nt, Homo sapiens
  misc_RNA (1)...(19): siRNA sense strand
auaucgaccagaugugaaa

SEQ ID NO: 2510731 - RNA, 19 nt, Homo sapiens
  misc_RNA (1)...(19): siRNA sense strand
ugaucaaagagaagauguu

SEQ ID NO: 2510732 - RNA, 19 nt, Homo sapiens
  misc_RNA (1)...(19): siRNA sense strand
uagcaauuguaaugugcau

SEQ ID NO: 2510733 - RNA, 19 nt, Homo sapiens
  misc_RNA (1)...(19): siRNA sense strand
aagaguuugugaugaguca

SEQ ID NO: 2510734 - RNA, 19 nt, Homo sapiens
  misc_RNA (1)...(19): siRNA sense strand
ucuguaaagaagauggaga

SEQ ID NO: 2510735 - RNA, 19 nt, Homo sapiens
  misc_RNA (1)...(19): siRNA sense strand
guuuguugggaaagaaaga

SEQ ID NO: 2510736 - RNA, 19 nt, Homo sapiens
  misc_RNA (1)...(19): siRNA sense strand
auguaaauauggaggaguc

SEQ ID NO: 2510737 - RNA, 19 nt, Homo sapiens
  misc_RNA (1)...(19): siRNA sense strand
uuucagugccauacaaauu

SEQ ID NO: 2510738 - RNA, 19 nt, Homo sapiens
  misc_RNA (1)...(19): siRNA sense strand
aaacaauagaggacgucga

SEQ ID NO: 2510739 - RNA, 19 nt, Homo sapiens
  misc_RNA (1)...(19): siRNA sense strand
uaauauagauugcagugga

SEQ ID NO: 2510740 - RNA, 19 nt, Homo sapiens
  misc_RNA (1)...(19): siRNA sense strand
gugaaagaugcuagugauc

SEQ ID NO: 2510741 - RNA, 19 nt, Homo sapiens
  misc_RNA (1)...(19): siRNA sense strand
gagaaggagaagaggaagg

SEQ ID NO: 2510742 - RNA, 19 nt, Homo sapiens
  misc_RNA (1)...(19): siRNA sense strand
aauauagauugcaguggau

SEQ ID NO: 2510743 - RNA, 19 nt, Homo sapiens
  misc_RNA (1)...(19): siRNA sense strand
aaucagaaucagagagcaa

SEQ ID NO: 2510744 - RNA, 19 nt, Homo sapiens
  misc_RNA (1)...(19): siRNA sense strand
gugugaagagcgagaacaa

SEQ ID NO: 2510745 - RNA, 19 nt, Homo sapiens
  misc_RNA (1)...(19): siRNA sense strand
aggaaaagaaacaaggaaa

SEQ ID NO: 2510746 - RNA, 19 nt, Homo sapiens
  misc_RNA (1)...(19): siRNA sense strand
aggaugaaacagagaaaga

SEQ ID NO: 2510747 - RNA, 19 nt, Homo sapiens
  misc_RNA (1)...(19): siRNA sense strand
gagaaggugugaagagcga

SEQ ID NO: 2510748 - RNA, 19 nt, Homo sapiens
  misc_RNA (1)...(19): siRNA sense strand
ccaccugggaagaaguaaa

SEQ ID NO: 2510749 - RNA, 19 nt, Homo sapiens
  misc_RNA (1)...(19): siRNA sense strand
aaaggaugaaacagagaaa

SEQ ID NO: 2510750 - RNA, 19 nt, Homo sapiens
  misc_RNA (1)...(19): siRNA sense strand
ggaucaagucacaagucaa

SEQ ID NO: 2510751 - RNA, 19 nt, Homo sapiens
  misc_RNA (1)...(19): siRNA sense strand
auucugaggaugaggaaaa

SEQ ID NO: 2510752 - RNA, 19 nt, Homo sapiens
  misc_RNA (1)...(19): siRNA sense strand
ggauaaucggguagccuau

SEQ ID NO: 2510753 - RNA, 19 nt, Homo sapiens
  misc_RNA (1)...(19): siRNA sense strand
gggauaaucggguagccua

SEQ ID NO: 2510754 - RNA, 19 nt, Homo sapiens
  misc_RNA (1)...(19): siRNA sense strand
aagaagaagaagaagaaac

SEQ ID NO: 2510755 - RNA, 19 nt, Homo sapiens
  misc_RNA (1)...(19): siRNA sense strand
ccugggaagaaguaaagaa

SEQ ID NO: 2510756 - RNA, 19 nt, Homo sapiens
  misc_RNA (1)...(19): siRNA sense strand
aaaagaagucaaaggauga

SEQ ID NO: 2510757 - RNA, 19 nt, Homo sapiens
  misc_RNA (1)...(19): siRNA sense strand
agcacaagaaacauaguaa

SEQ ID NO: 2510758 - RNA, 19 nt, Homo sapiens
  misc_RNA (1)...(19): siRNA sense strand
agcaauggccagauggaga

SEQ ID NO: 2510759 - RNA, 19 nt, Homo sapiens
  misc_RNA (1)...(19): siRNA sense strand
aggaugaggaaaagaaaca

SEQ ID NO: 2510760 - RNA, 19 nt, Homo sapiens
  misc_RNA (1)...(19): siRNA sense strand
agagcaaggagucuguaaa

SEQ ID NO: 2510761 - RNA, 19 nt, Homo sapiens
  misc_RNA (1)...(19): siRNA sense strand
gaaaauuggaagaaagaac

SEQ ID NO: 2510762 - RNA, 19 nt, Homo sapiens
  misc_RNA (1)...(19): siRNA sense strand
gaaggugugaagagcgaga

SEQ ID NO: 2510763 - RNA, 19 nt, Homo sapiens
  misc_RNA (1)...(19): siRNA sense strand
gaggaaaagaaacaaggaa

SEQ ID NO: 2510764 - RNA, 19 nt, Homo sapiens
  misc_RNA (1)...(19): siRNA sense strand
guucaaaagcauuagcuga

SEQ ID NO: 2510765 - RNA, 19 nt, Homo sapiens
  misc_RNA (1)...(19): siRNA sense strand
aguugaaggcagagaagaa

SEQ ID NO: 2510766 - RNA, 19 nt, Homo sapiens
  misc_RNA (1)...(19): siRNA sense strand
aagaagaguugaaggcaga

SEQ ID NO: 2510767 - RNA, 19 nt, Homo sapiens
  misc_RNA (1)...(19): siRNA sense strand
uaacaaagaugaugagcag

SEQ ID NO: 2510768 - RNA, 19 nt, Homo sapiens
  misc_RNA (1)...(19): siRNA sense strand
acaaagaugaugagcagca

SEQ ID NO: 2510769 - RNA, 19 nt, Homo sapiens
  misc_RNA (1)...(19): siRNA sense strand
cagaugaaauugaagguug

SEQ ID NO: 2510770 - RNA, 19 nt, Homo sapiens
  misc_RNA (1)...(19): siRNA sense strand
gcgcagguucagggagcaa

SEQ ID NO: 2510771 - RNA, 19 nt, Homo sapiens
  misc_RNA (1)...(19): siRNA sense strand
gcugggaggaugacgccaa

SEQ ID NO: 2510772 - RNA, 19 nt, Homo sapiens
  misc_RNA (1)...(19): siRNA sense strand
acgccaagggcucgaccaa

SEQ ID NO: 2510773 - RNA, 19 nt, Homo sapiens
  misc_RNA (1)...(19): siRNA sense strand
agccagaagccuuugaaau

SEQ ID NO: 2510774 - RNA, 19 nt, Homo sapiens
  misc_RNA (1)...(19): siRNA sense strand
gugaaaaugacacgaaaga

SEQ ID NO: 2510775 - RNA, 19 nt, Homo sapiens
  misc_RNA (1)...(19): siRNA sense strand
uggaagaagaggacaccga

SEQ ID NO: 2510776 - RNA, 19 nt, Homo sapiens
  misc_RNA (1)...(19): siRNA sense strand
cuggcaucgugcaggagaa

SEQ ID NO: 2510777 - RNA, 19 nt, Homo sapiens
  misc_RNA (1)...(19): siRNA sense strand
gaagaagaggacaccgaga

SEQ ID NO: 2510778 - RNA, 19 nt, Homo sapiens
  misc_RNA (1)...(19): siRNA sense strand
cucucaaagugcugggauu

SEQ ID NO: 2510779 - RNA, 19 nt, Homo sapiens
  misc_RNA (1)...(19): siRNA sense strand
gccuaagagccuggagauu

SEQ ID NO: 2510780 - RNA, 19 nt, Homo sapiens
  misc_RNA (1)...(19): siRNA sense strand
ccaagaacaucaugaggga

SEQ ID NO: 2510781 - RNA, 19 nt, Homo sapiens
  misc_RNA (1)...(19): siRNA sense strand
agagagagcucaagcagga

SEQ ID NO: 2510782 - RNA, 19 nt, Homo sapiens
  misc_RNA (1)...(19): siRNA sense strand
cuagagagagagagcucaa

SEQ ID NO: 2510783 - RNA, 19 nt, Homo sapiens
  misc_RNA (1)...(19): siRNA sense strand
caggaggggccuagagauu

SEQ ID NO: 2510784 - RNA, 19 nt, Homo sapiens
  misc_RNA (1)...(19): siRNA sense strand
cuauaauguuucagaagca

SEQ ID NO: 2510785 - RNA, 19 nt, Homo sapiens
  misc_RNA (1)...(19): siRNA sense strand
acaucaggacagaggaaau

SEQ ID NO: 2510786 - RNA, 19 nt, Homo sapiens
  misc_RNA (1)...(19): siRNA sense strand
aggaaaucucauuggugaa

SEQ ID NO: 2510787 - RNA, 19 nt, Homo sapiens
  misc_RNA (1)...(19): siRNA sense strand
guuagaaauaucugcucaa

SEQ ID NO: 2510788 - RNA, 19 nt, Homo sapiens
  misc_RNA (1)...(19): siRNA sense strand
aaggaaaucucauugguga

SEQ ID NO: 2510789 - RNA, 19 nt, Homo sapiens
  misc_RNA (1)...(19): siRNA sense strand
ucuuugacugccagagaaa

SEQ ID NO: 2510790 - RNA, 19 nt, Homo sapiens
  misc_RNA (1)...(19): siRNA sense strand
uggaaagucauaugguuau

SEQ ID NO: 2510791 - RNA, 19 nt, Homo sapiens
  misc_RNA (1)...(19): siRNA sense strand
uucaggaagacaagaguua

SEQ ID NO: 2510792 - RNA, 19 nt, Homo sapiens
  misc_RNA (1)...(19): siRNA sense strand
guaugauauaguccagaaa

SEQ ID NO: 2510793 - RNA, 19 nt, Homo sapiens
  misc_RNA (1)...(19): siRNA sense strand
agagauuacuccaggccca

SEQ ID NO: 2510794 - RNA, 19 nt, Homo sapiens
  misc_RNA (1)...(19): siRNA sense strand
cccacgacuauaugaaaua

SEQ ID NO: 2510795 - RNA, 19 nt, Homo sapiens
  misc_RNA (1)...(19): siRNA sense strand
augagauaucccaggagaa

SEQ ID NO: 2510796 - RNA, 19 nt, Homo sapiens
  misc_RNA (1)...(19): siRNA sense strand
ugaugauggcaguauuaua

SEQ ID NO: 2510797 - RNA, 19 nt, Homo sapiens
  misc_RNA (1)...(19): siRNA sense strand
guuaacaucaagagagauc

SEQ ID NO: 2510798 - RNA, 19 nt, Homo sapiens
  misc_RNA (1)...(19): siRNA sense strand
gaaagaagcuugugcuacc

SEQ ID NO: 2510799 - RNA, 19 nt, Homo sapiens
  misc_RNA (1)...(19): siRNA sense strand
ccaaaagaacuaugaaagu

SEQ ID NO: 2510800 - RNA, 19 nt, Homo sapiens
  misc_RNA (1)...(19): siRNA sense strand
aagacaagaguuaccuaaa

SEQ ID NO: 2510801 - RNA, 19 nt, Homo sapiens
  misc_RNA (1)...(19): siRNA sense strand
uugaagaguccaaagagau

SEQ ID NO: 2510802 - RNA, 19 nt, Homo sapiens
  misc_RNA (1)...(19): siRNA sense strand
aaacagaagaaaagugcau

SEQ ID NO: 2510803 - RNA, 19 nt, Homo sapiens
  misc_RNA (1)...(19): siRNA sense strand
aaccaaugccaaagaacaa

SEQ ID NO: 2510804 - RNA, 19 nt, Homo sapiens
  misc_RNA (1)...(19): siRNA sense strand
cggaagucugguacauuaa

SEQ ID NO: 2510805 - RNA, 19 nt, Homo sapiens
  misc_RNA (1)...(19): siRNA sense strand
ucucagacgccgaacgaca

SEQ ID NO: 2510806 - RNA, 19 nt, Homo sapiens
  misc_RNA (1)...(19): siRNA sense strand
ugccaaagaacaaacgcaa

SEQ ID NO: 2510807 - RNA, 19 nt, Homo sapiens
  misc_RNA (1)...(19): siRNA sense strand
aaacgcaaacucaggaaaa

SEQ ID NO: 2510808 - RNA, 19 nt, Homo sapiens
  misc_RNA (1)...(19): siRNA sense strand
aggacaaguguaaagugaa

SEQ ID NO: 2510809 - RNA, 19 nt, Homo sapiens
  misc_RNA (1)...(19): siRNA sense strand
gugaagaaagagauccuga

SEQ ID NO: 2510810 - RNA, 19 nt, Homo sapiens
  misc_RNA (1)...(19): siRNA sense strand
aggaagaaucgcuggcaaa

SEQ ID NO: 2510811 - RNA, 19 nt, Homo sapiens
  misc_RNA (1)...(19): siRNA sense strand
cuuccaagguuuauggcaa

SEQ ID NO: 2510812 - RNA, 19 nt, Homo sapiens
  misc_RNA (1)...(19): siRNA sense strand
cgaagaaacgacaggcuga

SEQ ID NO: 2510813 - RNA, 19 nt, Homo sapiens
  misc_RNA (1)...(19): siRNA sense strand
caaaauaucaagauggcaa

SEQ ID NO: 2510814 - RNA, 19 nt, Homo sapiens
  misc_RNA (1)...(19): siRNA sense strand
gaccaucuauccagggcaa

SEQ ID NO: 2510815 - RNA, 19 nt, Homo sapiens
  misc_RNA (1)...(19): siRNA sense strand
uaggaagaaucgcuggcaa

SEQ ID NO: 2510816 - RNA, 19 nt, Homo sapiens
  misc_RNA (1)...(19): siRNA sense strand
aguuuuggcugaugugaaa

SEQ ID NO: 2510817 - RNA, 19 nt, Homo sapiens
  misc_RNA (1)...(19): siRNA sense strand
auggaaacgcagagcgcca

SEQ ID NO: 2510818 - RNA, 19 nt, Homo sapiens
  misc_RNA (1)...(19): siRNA sense strand
gcauuuaagaagaaaggaa

SEQ ID NO: 2510819 - RNA, 19 nt, Homo sapiens
  misc_RNA (1)...(19): siRNA sense strand
ggugauuggguuagggcua

SEQ ID NO: 2510820 - RNA, 19 nt, Homo sapiens
  misc_RNA (1)...(19): siRNA sense strand
ggauuuuaguuuuggacaa

SEQ ID NO: 2510821 - RNA, 19 nt, Homo sapiens
  misc_RNA (1)...(19): siRNA sense strand
ccuuaaugguugccgggua

SEQ ID NO: 2510822 - RNA, 19 nt, Homo sapiens
  misc_RNA (1)...(19): siRNA sense strand
ucgaagaggaagaggaacu

SEQ ID NO: 2510823 - RNA, 19 nt, Homo sapiens
  misc_RNA (1)...(19): siRNA sense strand
acccagaggcuaauagaaa

SEQ ID NO: 2510824 - RNA, 19 nt, Homo sapiens
  misc_RNA (1)...(19): siRNA sense strand
ggugaauaccaaugaaagu

SEQ ID NO: 2510825 - RNA, 19 nt, Homo sapiens
  misc_RNA (1)...(19): siRNA sense strand
caggaaacucagcaacaaa

SEQ ID NO: 2510826 - RNA, 19 nt, Homo sapiens
  misc_RNA (1)...(19): siRNA sense strand
gcgcagauauugacgccuu

SEQ ID NO: 2510827 - RNA, 19 nt, Homo sapiens
  misc_RNA (1)...(19): siRNA sense strand
ccaucaaacugugggccaa

SEQ ID NO: 2510828 - RNA, 19 nt, Homo sapiens
  misc_RNA (1)...(19): siRNA sense strand
cgucaacucuuguacggaa

SEQ ID NO: 2510829 - RNA, 19 nt, Homo sapiens
  misc_RNA (1)...(19): siRNA sense strand
aaggaauggauacgcgaaa

SEQ ID NO: 2510830 - RNA, 19 nt, Homo sapiens
  misc_RNA (1)...(19): siRNA sense strand
aaacguuggaggaaagauu

SEQ ID NO: 2510831 - RNA, 19 nt, Homo sapiens
  misc_RNA (1)...(19): siRNA sense strand
ugggauagagauugauauu

SEQ ID NO: 2510832 - RNA, 19 nt, Homo sapiens
  misc_RNA (1)...(19): siRNA sense strand
gggccaagugccacaauau

SEQ ID NO: 2510833 - RNA, 19 nt, Homo sapiens
  misc_RNA (1)...(19): siRNA sense strand
cauccagaccuucaggaaa

SEQ ID NO: 2510834 - RNA, 19 nt, Homo sapiens
  misc_RNA (1)...(19): siRNA sense strand
ggagcuuggagaagaauga

SEQ ID NO: 2510835 - RNA, 19 nt, Homo sapiens
  misc_RNA (1)...(19): siRNA sense strand
gugaaagauuuaagggcug

SEQ ID NO: 2510836 - RNA, 19 nt, Homo sapiens
  misc_RNA (1)...(19): siRNA sense strand
gggcuguccaggaggcauu

SEQ ID NO: 2510837 - RNA, 19 nt, Homo sapiens
  misc_RNA (1)...(19): siRNA sense strand
acuacaggaggaagugaaa

SEQ ID NO: 2510838 - RNA, 19 nt, Homo sapiens
  misc_RNA (1)...(19): siRNA sense strand
uggucaugauugaggaguu

SEQ ID NO: 2510839 - RNA, 19 nt, Homo sapiens
  misc_RNA (1)...(19): siRNA sense strand
agauacuguuuauaggcaa

SEQ ID NO: 2510840 - RNA, 19 nt, Homo sapiens
  misc_RNA (1)...(19): siRNA sense strand
caacaugucucauaagcca

SEQ ID NO: 2510841 - RNA, 19 nt, Homo sapiens
  misc_RNA (1)...(19): siRNA sense strand
caggaggaagugaaagauu

SEQ ID NO: 2510842 - RNA, 19 nt, Homo sapiens
  misc_RNA (1)...(19): siRNA sense strand
agacuauuccagaagauuu

SEQ ID NO: 2510843 - RNA, 19 nt, Homo sapiens
  misc_RNA (1)...(19): siRNA sense strand
acagaagguagaagauuga

SEQ ID NO: 2510844 - RNA, 19 nt, Homo sapiens
  misc_RNA (1)...(19): siRNA sense strand
cagaaugggaauggccaaa

SEQ ID NO: 2510845 - RNA, 19 nt, Homo sapiens
  misc_RNA (1)...(19): siRNA sense strand
caggugaauaccaaugaaa

SEQ ID NO: 2510846 - RNA, 19 nt, Homo sapiens
  misc_RNA (1)...(19): siRNA sense strand
uugaaaacguuggaggaaa

SEQ ID NO: 2510847 - RNA, 19 nt, Homo sapiens
  misc_RNA (1)...(19): siRNA sense strand
ugaaacuacaggaggaagu

SEQ ID NO: 2510848 - RNA, 19 nt, Homo sapiens
  misc_RNA (1)...(19): siRNA sense strand
auuuagaaugggugggcuu

SEQ ID NO: 2510849 - RNA, 19 nt, Homo sapiens
  misc_RNA (1)...(19): siRNA sense strand
acugaaggagccugaagaa

SEQ ID NO: 2510850 - RNA, 19 nt, Homo sapiens
  misc_RNA (1)...(19): siRNA sense strand
ucaugauugaggaguuuaa

SEQ ID NO: 2510851 - RNA, 19 nt, Homo sapiens
  misc_RNA (1)...(19): siRNA sense strand
auggaagaauuucguacaa

SEQ ID NO: 2510852 - RNA, 19 nt, Homo sapiens
  misc_RNA (1)...(19): siRNA sense strand
agugaaagauuuaagggcu

SEQ ID NO: 2510853 - RNA, 19 nt, Homo sapiens
  misc_RNA (1)...(19): siRNA sense strand
ucagaaugggaauggccaa

SEQ ID NO: 2510854 - RNA, 19 nt, Homo sapiens
  misc_RNA (1)...(19): siRNA sense strand
uugaugggauagagauuga

SEQ ID NO: 2510855 - RNA, 19 nt, Homo sapiens
  misc_RNA (1)...(19): siRNA sense strand
guuugagauggguaugaaa

SEQ ID NO: 2510856 - RNA, 19 nt, Homo sapiens
  misc_RNA (1)...(19): siRNA sense strand
ucuacuagcacuaugaaga

SEQ ID NO: 2510857 - RNA, 19 nt, Homo sapiens
  misc_RNA (1)...(19): siRNA sense strand
auuaggaguacauacgaaa

SEQ ID NO: 2510858 - RNA, 19 nt, Homo sapiens
  misc_RNA (1)...(19): siRNA sense strand
uuacagauuaggaguacau

SEQ ID NO: 2510859 - RNA, 19 nt, Homo sapiens
  misc_RNA (1)...(19): siRNA sense strand
augcuaaacugaaacuaca

SEQ ID NO: 2510860 - RNA, 19 nt, Homo sapiens
  misc_RNA (1)...(19): siRNA sense strand
agacauuagaugcauaaga

SEQ ID NO: 2510861 - RNA, 19 nt, Homo sapiens
  misc_RNA (1)...(19): siRNA sense strand
gucaacucuuguacggaaa

SEQ ID NO: 2510862 - RNA, 19 nt, Homo sapiens
  misc_RNA (1)...(19): siRNA sense strand
ugauugaggaguuuaaaca

SEQ ID NO: 2510863 - RNA, 19 nt, Homo sapiens
  misc_RNA (1)...(19): siRNA sense strand
uugggagcuuggagaagaa

SEQ ID NO: 2510864 - RNA, 19 nt, Homo sapiens
  misc_RNA (1)...(19): siRNA sense strand
agaaaauccugauauggaa

SEQ ID NO: 2510865 - RNA, 19 nt, Homo sapiens
  misc_RNA (1)...(19): siRNA sense strand
uacaggaggaagugaaaga

SEQ ID NO: 2510866 - RNA, 19 nt, Homo sapiens
  misc_RNA (1)...(19): siRNA sense strand
ggcaagugcaucaacagaa

SEQ ID NO: 2510867 - RNA, 19 nt, Homo sapiens
  misc_RNA (1)...(19): siRNA sense strand
acaauaaaggaguggcuga

SEQ ID NO: 2510868 - RNA, 19 nt, Homo sapiens
  misc_RNA (1)...(19): siRNA sense strand
ccaagaaagccaauggagu

SEQ ID NO: 2510869 - RNA, 19 nt, Homo sapiens
  misc_RNA (1)...(19): siRNA sense strand
gguauuauggucuggguga

SEQ ID NO: 2510870 - RNA, 19 nt, Homo sapiens
  misc_RNA (1)...(19): siRNA sense strand
gucucuugguacuggauua

SEQ ID NO: 2510871 - RNA, 19 nt, Homo sapiens
  misc_RNA (1)...(19): siRNA sense strand
ucuuccugcucaugagaaa

SEQ ID NO: 2510872 - RNA, 19 nt, Homo sapiens
  misc_RNA (1)...(19): siRNA sense strand
gaacaauaaaggaguggcu

SEQ ID NO: 2510873 - RNA, 19 nt, Homo sapiens
  misc_RNA (1)...(19): siRNA sense strand
guguccugauggugggcaa

SEQ ID NO: 2510874 - RNA, 19 nt, Homo sapiens
  misc_RNA (1)...(19): siRNA sense strand
caagaaagccaauggaguc

SEQ ID NO: 2510875 - RNA, 19 nt, Homo sapiens
  misc_RNA (1)...(19): siRNA sense strand
ggcugaaagcugcagagaa

SEQ ID NO: 2510876 - RNA, 19 nt, Homo sapiens
  misc_RNA (1)...(19): siRNA sense strand
acggaauauuucacugcua

SEQ ID NO: 2510877 - RNA, 19 nt, Homo sapiens
  misc_RNA (1)...(19): siRNA sense strand
ugauucuggugcugggcua

SEQ ID NO: 2510878 - RNA, 19 nt, Homo sapiens
  misc_RNA (1)...(19): siRNA sense strand
cgggaaacacggaacgcca

SEQ ID NO: 2510879 - RNA, 19 nt, Homo sapiens
  misc_RNA (1)...(19): siRNA sense strand
guaucaggaucgugcagga

SEQ ID NO: 2510880 - RNA, 19 nt, Homo sapiens
  misc_RNA (1)...(19): siRNA sense strand
gcagagaacaaguuugcca

SEQ ID NO: 2510881 - RNA, 19 nt, Homo sapiens
  misc_RNA (1)...(19): siRNA sense strand
cugcccauuuacugcgaaa

SEQ ID NO: 2510882 - RNA, 19 nt, Homo sapiens
  misc_RNA (1)...(19): siRNA sense strand
uggcugaggugcuucgaga

SEQ ID NO: 2510883 - RNA, 19 nt, Homo sapiens
  misc_RNA (1)...(19): siRNA sense strand
ccacagaauuucauagcug

SEQ ID NO: 2510884 - RNA, 19 nt, Homo sapiens
  misc_RNA (1)...(19): siRNA sense strand
uggaaagcuugcaggaaaa

SEQ ID NO: 2510885 - RNA, 19 nt, Homo sapiens
  misc_RNA (1)...(19): siRNA sense strand
ggagacaagucgagcggca

SEQ ID NO: 2510886 - RNA, 19 nt, Homo sapiens
  misc_RNA (1)...(19): siRNA sense strand
cggaggaaccugagcuaca

SEQ ID NO: 2510887 - RNA, 19 nt, Homo sapiens
  misc_RNA (1)...(19): siRNA sense strand
gcgacaagcagcagcagca

SEQ ID NO: 2510888 - RNA, 19 nt, Homo sapiens
  misc_RNA (1)...(19): siRNA sense strand
gccaaugcaugcagcccaa

SEQ ID NO: 2510889 - RNA, 19 nt, Homo sapiens
  misc_RNA (1)...(19): siRNA sense strand
aagaauacguuaggagcca

SEQ ID NO: 2510890 - RNA, 19 nt, Homo sapiens
  misc_RNA (1)...(19): siRNA sense strand
cguccguuugguagguaaa

SEQ ID NO: 2510891 - RNA, 19 nt, Homo sapiens
  misc_RNA (1)...(19): siRNA sense strand
agaggaaaguggugggcua

SEQ ID NO: 2510892 - RNA, 19 nt, Homo sapiens
  misc_RNA (1)...(19): siRNA sense strand
acuuagaagaggugccaaa

SEQ ID NO: 2510893 - RNA, 19 nt, Homo sapiens
  misc_RNA (1)...(19): siRNA sense strand
cggcugaagaaguggaaga

SEQ ID NO: 2510894 - RNA, 19 nt, Homo sapiens
  misc_RNA (1)...(19): siRNA sense strand
ggacaagcauggugggaag

SEQ ID NO: 2510895 - RNA, 19 nt, Homo sapiens
  misc_RNA (1)...(19): siRNA sense strand
aagccgagguggaggguga

SEQ ID NO: 2510896 - RNA, 19 nt, Homo sapiens
  misc_RNA (1)...(19): siRNA sense strand
caaagaucaaggagaggaa

SEQ ID NO: 2510897 - RNA, 19 nt, Homo sapiens
  misc_RNA (1)...(19): siRNA sense strand
gggcauuucuagauggcuu

SEQ ID NO: 2510898 - RNA, 19 nt, Homo sapiens
  misc_RNA (1)...(19): siRNA sense strand
cugaggaggaggugggaga

SEQ ID NO: 2510899 - RNA, 19 nt, Homo sapiens
  misc_RNA (1)...(19): siRNA sense strand
cccucaagguccacggaaa

SEQ ID NO: 2510900 - RNA, 19 nt, Homo sapiens
  misc_RNA (1)...(19): siRNA sense strand
auggaauguuggaggauga

SEQ ID NO: 2510901 - RNA, 19 nt, Homo sapiens
  misc_RNA (1)...(19): siRNA sense strand
acaccaaauacaagcgcaa

SEQ ID NO: 2510902 - RNA, 19 nt, Homo sapiens
  misc_RNA (1)...(19): siRNA sense strand
gaagaagaggagagaggca

SEQ ID NO: 2510903 - RNA, 19 nt, Homo sapiens
  misc_RNA (1)...(19): siRNA sense strand
ccucuaaucuggagcggga

SEQ ID NO: 2510904 - RNA, 19 nt, Homo sapiens
  misc_RNA (1)...(19): siRNA sense strand
agccagaaggcaagaacaa

SEQ ID NO: 2510905 - RNA, 19 nt, Homo sapiens
  misc_RNA (1)...(19): siRNA sense strand
acuuauuccuggauggauu

SEQ ID NO: 2510906 - RNA, 19 nt, Homo sapiens
  misc_RNA (1)...(19): siRNA sense strand
gauuacaccuacauggcua

SEQ ID NO: 2510907 - RNA, 19 nt, Homo sapiens
  misc_RNA (1)...(19): siRNA sense strand
cgucaggagaggaggaaac

SEQ ID NO: 2510908 - RNA, 19 nt, Homo sapiens
  misc_RNA (1)...(19): siRNA sense strand
agggugaagcucaggaaau

SEQ ID NO: 2510909 - RNA, 19 nt, Homo sapiens
  misc_RNA (1)...(19): siRNA sense strand
auguaaauucuguguggaa

SEQ ID NO: 2510910 - RNA, 19 nt, Homo sapiens
  misc_RNA (1)...(19): siRNA sense strand
ccucaagguccacggaaaa

SEQ ID NO: 2510911 - RNA, 19 nt, Homo sapiens
  misc_RNA (1)...(19): siRNA sense strand
gugccaaagaucaaggaga

SEQ ID NO: 2510912 - RNA, 19 nt, Homo sapiens
  misc_RNA (1)...(19): siRNA sense strand
cagaagaagcaccgagacu

SEQ ID NO: 2510913 - RNA, 19 nt, Homo sapiens
  misc_RNA (1)...(19): siRNA sense strand
uggacaucaucaaggagaa

SEQ ID NO: 2510914 - RNA, 19 nt, Homo sapiens
  misc_RNA (1)...(19): siRNA sense strand
gagcccagccagaaggcaa

SEQ ID NO: 2510915 - RNA, 19 nt, Homo sapiens
  misc_RNA (1)...(19): siRNA sense strand
gagcaggaucuucaagcaa

SEQ ID NO: 2510916 - RNA, 19 nt, Homo sapiens
  misc_RNA (1)...(19): siRNA sense strand
cugaagaaguggaagacuc

SEQ ID NO: 2510917 - RNA, 19 nt, Homo sapiens
  misc_RNA (1)...(19): siRNA sense strand
cugugaaggaggcggauga

SEQ ID NO: 2510918 - RNA, 19 nt, Homo sapiens
  misc_RNA (1)...(19): siRNA sense strand
ggaagaagcacccuggcau

SEQ ID NO: 2510919 - RNA, 19 nt, Homo sapiens
  misc_RNA (1)...(19): siRNA sense strand
gcacugugauuaugggaac

SEQ ID NO: 2510920 - RNA, 19 nt, Homo sapiens
  misc_RNA (1)...(19): siRNA sense strand
ggagaaagaugcuguggag

SEQ ID NO: 2510921 - RNA, 19 nt, Homo sapiens
  misc_RNA (1)...(19): siRNA sense strand
gcacucaaauguaggcagu

SEQ ID NO: 2510922 - RNA, 19 nt, Homo sapiens
  misc_RNA (1)...(19): siRNA sense strand
ccaaagaagcagcacgcca

SEQ ID NO: 2510923 - RNA, 19 nt, Homo sapiens
  misc_RNA (1)...(19): siRNA sense strand
ccggcuacauccagagcau

SEQ ID NO: 2510924 - RNA, 19 nt, Homo sapiens
  misc_RNA (1)...(19): siRNA sense strand
gggacaagcauggugggaa

SEQ ID NO: 2510925 - RNA, 19 nt, Homo sapiens
  misc_RNA (1)...(19): siRNA sense strand
gcaggaagcugaaugucca

SEQ ID NO: 2510926 - RNA, 19 nt, Homo sapiens
  misc_RNA (1)...(19): siRNA sense strand
guaaauucuguguggaagu

SEQ ID NO: 2510927 - RNA, 19 nt, Homo sapiens
  misc_RNA (1)...(19): siRNA sense strand
cugacauaucccagaauga

SEQ ID NO: 2510928 - RNA, 19 nt, Homo sapiens
  misc_RNA (1)...(19): siRNA sense strand
agaaugacguggaggagac

SEQ ID NO: 2510929 - RNA, 19 nt, Homo sapiens
  misc_RNA (1)...(19): siRNA sense strand
aagaggugccaaagaucaa

SEQ ID NO: 2510930 - RNA, 19 nt, Homo sapiens
  misc_RNA (1)...(19): siRNA sense strand
cuucaaggccaaugcagau

SEQ ID NO: 2510931 - RNA, 19 nt, Homo sapiens
  misc_RNA (1)...(19): siRNA sense strand
acaucaucaaggagaaaga

SEQ ID NO: 2510932 - RNA, 19 nt, Homo sapiens
  misc_RNA (1)...(19): siRNA sense strand
uggaagaagaggagagagg

SEQ ID NO: 2510933 - RNA, 19 nt, Homo sapiens
  misc_RNA (1)...(19): siRNA sense strand
gaggagacgagcaggaucu

SEQ ID NO: 2510934 - RNA, 19 nt, Homo sapiens
  misc_RNA (1)...(19): siRNA sense strand
uugagaaagccgaggugga

SEQ ID NO: 2510935 - RNA, 19 nt, Homo sapiens
  misc_RNA (1)...(19): siRNA sense strand
acuucaucauacugggcaa

SEQ ID NO: 2510936 - RNA, 19 nt, Homo sapiens
  misc_RNA (1)...(19): siRNA sense strand
ccgaaagcacguccaguau

SEQ ID NO: 2510937 - RNA, 19 nt, Homo sapiens
  misc_RNA (1)...(19): siRNA sense strand
acuucuaugcacugaggaa

SEQ ID NO: 2510938 - RNA, 19 nt, Homo sapiens
  misc_RNA (1)...(19): siRNA sense strand
gugaauugugcaaacagua

SEQ ID NO: 2510939 - RNA, 19 nt, Homo sapiens
  misc_RNA (1)...(19): siRNA sense strand
acaaugaggaauuccagaa

SEQ ID NO: 2510940 - RNA, 19 nt, Homo sapiens
  misc_RNA (1)...(19): siRNA sense strand
acugcuugcuugauggaau

SEQ ID NO: 2510941 - RNA, 19 nt, Homo sapiens
  misc_RNA (1)...(19): siRNA sense strand
ugugauagcaaacugcaaa

SEQ ID NO: 2510942 - RNA, 19 nt, Homo sapiens
  misc_RNA (1)...(19): siRNA sense strand
acauauacucaaagcucau

SEQ ID NO: 2510943 - RNA, 19 nt, Homo sapiens
  misc_RNA (1)...(19): siRNA sense strand
acucaaagcucaugcuggu

SEQ ID NO: 2510944 - RNA, 19 nt, Homo sapiens
  misc_RNA (1)...(19): siRNA sense strand
aaauguaggcagugcucau

SEQ ID NO: 2510945 - RNA, 19 nt, Homo sapiens
  misc_RNA (1)...(19): siRNA sense strand
acgagaaguaucacaauca

SEQ ID NO: 2510946 - RNA, 19 nt, Homo sapiens
  misc_RNA (1)...(19): siRNA sense strand
cugaggaagcauaucaaga

SEQ ID NO: 2510947 - RNA, 19 nt, Homo sapiens
  misc_RNA (1)...(19): siRNA sense strand
gcaugaaagugaaggcugc

SEQ ID NO: 2510948 - RNA, 19 nt, Homo sapiens
  misc_RNA (1)...(19): siRNA sense strand
cugaggacuuugugcacga

SEQ ID NO: 2510949 - RNA, 19 nt, Homo sapiens
  misc_RNA (1)...(19): siRNA sense strand
aagaagaggagagaggcaa

SEQ ID NO: 2510950 - RNA, 19 nt, Homo sapiens
  misc_RNA (1)...(19): siRNA sense strand
ggagaggaggaaacagcuu

SEQ ID NO: 2510951 - RNA, 19 nt, Homo sapiens
  misc_RNA (1)...(19): siRNA sense strand
ccuucaaguccuccuauaa

SEQ ID NO: 2510952 - RNA, 19 nt, Homo sapiens
  misc_RNA (1)...(19): siRNA sense strand
ggucaaagggguacucauu

SEQ ID NO: 2510953 - RNA, 19 nt, Homo sapiens
  misc_RNA (1)...(19): siRNA sense strand
auuucuagauggcuugaua

SEQ ID NO: 2510954 - RNA, 19 nt, Homo sapiens
  misc_RNA (1)...(19): siRNA sense strand
ggaagcagccaaagacgca

SEQ ID NO: 2510955 - RNA, 19 nt, Homo sapiens
  misc_RNA (1)...(19): siRNA sense strand
ccauggugaaugugggaaa

SEQ ID NO: 2510956 - RNA, 19 nt, Homo sapiens
  misc_RNA (1)...(19): siRNA sense strand
gcuacuaagcuaaggccaa

SEQ ID NO: 2510957 - RNA, 19 nt, Homo sapiens
  misc_RNA (1)...(19): siRNA sense strand
aaaugaaaacagugggaaa

SEQ ID NO: 2510958 - RNA, 19 nt, Homo sapiens
  misc_RNA (1)...(19): siRNA sense strand
ugauauuguugguggcgua

SEQ ID NO: 2510959 - RNA, 19 nt, Homo sapiens
  misc_RNA (1)...(19): siRNA sense strand
aguaaaugaauguggugaa

SEQ ID NO: 2510960 - RNA, 19 nt, Homo sapiens
  misc_RNA (1)...(19): siRNA sense strand
gaauguaagcaaagcgaca

SEQ ID NO: 2510961 - RNA, 19 nt, Homo sapiens
  misc_RNA (1)...(19): siRNA sense strand
uggugaaaguauugacaga

SEQ ID NO: 2510962 - RNA, 19 nt, Homo sapiens
  misc_RNA (1)...(19): siRNA sense strand
gacauaaugaugagggaca

SEQ ID NO: 2510963 - RNA, 19 nt, Homo sapiens
  misc_RNA (1)...(19): siRNA sense strand
cucagaaagaagaaguaaa

SEQ ID NO: 2510964 - RNA, 19 nt, Homo sapiens
  misc_RNA (1)...(19): siRNA sense strand
acauaaugaugagggacaa

SEQ ID NO: 2510965 - RNA, 19 nt, Homo sapiens
  misc_RNA (1)...(19): siRNA sense strand
ggaccuaguggaaugggua

SEQ ID NO: 2510966 - RNA, 19 nt, Homo sapiens
  misc_RNA (1)...(19): siRNA sense strand
gcgacauaaugaugaggga

SEQ ID NO: 2510967 - RNA, 19 nt, Homo sapiens
  misc_RNA (1)...(19): siRNA sense strand
ccuaagucgccauggugaa

SEQ ID NO: 2510968 - RNA, 19 nt, Homo sapiens
  misc_RNA (1)...(19): siRNA sense strand
ucgugugguacauggauaa

SEQ ID NO: 2510969 - RNA, 19 nt, Homo sapiens
  misc_RNA (1)...(19): siRNA sense strand
cacuuaaagagguucauaa

SEQ ID NO: 2510970 - RNA, 19 nt, Homo sapiens
  misc_RNA (1)...(19): siRNA sense strand
aguccaggaauguaagcaa

SEQ ID NO: 2510971 - RNA, 19 nt, Homo sapiens
  misc_RNA (1)...(19): siRNA sense strand
cauggagaagcgaggauuu

SEQ ID NO: 2510972 - RNA, 19 nt, Homo sapiens
  misc_RNA (1)...(19): siRNA sense strand
aacaaggagcagugaugaa

SEQ ID NO: 2510973 - RNA, 19 nt, Homo sapiens
  misc_RNA (1)...(19): siRNA sense strand
uguuaugaaugcaggaaug

SEQ ID NO: 2510974 - RNA, 19 nt, Homo sapiens
  misc_RNA (1)...(19): siRNA sense strand
augaauguggugaaaguau

SEQ ID NO: 2510975 - RNA, 19 nt, Homo sapiens
  misc_RNA (1)...(19): siRNA sense strand
ccucaagauagugcgguua

SEQ ID NO: 2510976 - RNA, 19 nt, Homo sapiens
  misc_RNA (1)...(19): siRNA sense strand
gaaauuucuucgaagguac

SEQ ID NO: 2510977 - RNA, 19 nt, Homo sapiens
  misc_RNA (1)...(19): siRNA sense strand
agaaauaaucugaaacggu

SEQ ID NO: 2510978 - RNA, 19 nt, Homo sapiens
  misc_RNA (1)...(19): siRNA sense strand
acacaauaggcuacuucaa

SEQ ID NO: 2510979 - RNA, 19 nt, Homo sapiens
  misc_RNA (1)...(19): siRNA sense strand
acuucaagguccagacugu

SEQ ID NO: 2510980 - RNA, 19 nt, Homo sapiens
  misc_RNA (1)...(19): siRNA sense strand
uuccaaagugacugaacaa

SEQ ID NO: 2510981 - RNA, 19 nt, Homo sapiens
  misc_RNA (1)...(19): siRNA sense strand
agggacaaccucuuugaaa

SEQ ID NO: 2510982 - RNA, 19 nt, Homo sapiens
  misc_RNA (1)...(19): siRNA sense strand
agagaugcacaguuggauu

SEQ ID NO: 2510983 - RNA, 19 nt, Homo sapiens
  misc_RNA (1)...(19): siRNA sense strand
aaaauggcccucaggaaaa

SEQ ID NO: 2510984 - RNA, 19 nt, Homo sapiens
  misc_RNA (1)...(19): siRNA sense strand
gaccuaguggaauggguaa

SEQ ID NO: 2510985 - RNA, 19 nt, Homo sapiens
  misc_RNA (1)...(19): siRNA sense strand
cuuccaaagugacugaaca

SEQ ID NO: 2510986 - RNA, 19 nt, Homo sapiens
  misc_RNA (1)...(19): siRNA sense strand
auaccagagaagauaguuu

SEQ ID NO: 2510987 - RNA, 19 nt, Homo sapiens
  misc_RNA (1)...(19): siRNA sense strand
ccuaauucugauaaccuaa

SEQ ID NO: 2510988 - RNA, 19 nt, Homo sapiens
  misc_RNA (1)...(19): siRNA sense strand
cuuucuaugugcaggcuga

SEQ ID NO: 2510989 - RNA, 19 nt, Homo sapiens
  misc_RNA (1)...(19): siRNA sense strand
uaucagaaccgcagcccua

SEQ ID NO: 2510990 - RNA, 19 nt, Homo sapiens
  misc_RNA (1)...(19): siRNA sense strand
ucaucauggccaagaucaa

SEQ ID NO: 2510991 - RNA, 19 nt, Homo sapiens
  misc_RNA (1)...(19): siRNA sense strand
gguucuacaaggaggaugu

SEQ ID NO: 2510992 - RNA, 19 nt, Homo sapiens
  misc_RNA (1)...(19): siRNA sense strand
ucagagaagcggauggugu

SEQ ID NO: 2510993 - RNA, 19 nt, Homo sapiens
  misc_RNA (1)...(19): siRNA sense strand
ggacagaagucuaaggaac

SEQ ID NO: 2510994 - RNA, 19 nt, Homo sapiens
  misc_RNA (1)...(19): siRNA sense strand
augcagagaaggcgggaaa

SEQ ID NO: 2510995 - RNA, 19 nt, Homo sapiens
  misc_RNA (1)...(19): siRNA sense strand
cgagauguucagcgggaaa

SEQ ID NO: 2510996 - RNA, 19 nt, Homo sapiens
  misc_RNA (1)...(19): siRNA sense strand
agugaaggagagaagaaau

SEQ ID NO: 2510997 - RNA, 19 nt, Homo sapiens
  misc_RNA (1)...(19): siRNA sense strand
guggcaaagacauggugaa

SEQ ID NO: 2510998 - RNA, 19 nt, Homo sapiens
  misc_RNA (1)...(19): siRNA sense strand
ccuccauacugcugggacu

SEQ ID NO: 2510999 - RNA, 19 nt, Homo sapiens
  misc_RNA (1)...(19): siRNA sense strand
ggcgggaaagcguggcaaa

SEQ ID NO: 2511000 - RNA, 19 nt, Homo sapiens
  misc_RNA (1)...(19): siRNA sense strand
cgggaaagugaaggagaga

SEQ ID NO: 2511001 - RNA, 19 nt, Homo sapiens
  misc_RNA (1)...(19): siRNA sense strand
gggaaagugaaggagagaa

SEQ ID NO: 2511002 - RNA, 19 nt, Homo sapiens
  misc_RNA (1)...(19): siRNA sense strand
gcgugcacgucaagcucua

SEQ ID NO: 2511003 - RNA, 19 nt, Homo sapiens
  misc_RNA (1)...(19): siRNA sense strand
gcgggaaagugaaggagag

SEQ ID NO: 2511004 - RNA, 19 nt, Homo sapiens
  misc_RNA (1)...(19): siRNA sense strand
cgggaaacacacaugcaga

SEQ ID NO: 2511005 - RNA, 19 nt, Homo sapiens
  misc_RNA (1)...(19): siRNA sense strand
cgucauugccuucggguac

SEQ ID NO: 2511006 - RNA, 19 nt, Homo sapiens
  misc_RNA (1)...(19): siRNA sense strand
cagaggaugaagaaauaca

SEQ ID NO: 2511007 - RNA, 19 nt, Homo sapiens
  misc_RNA (1)...(19): siRNA sense strand
aagugaaggagagaagaaa

SEQ ID NO: 2511008 - RNA, 19 nt, Homo sapiens
  misc_RNA (1)...(19): siRNA sense strand
uggccuucuccgugggcaa

SEQ ID NO: 2511009 - RNA, 19 nt, Homo sapiens
  misc_RNA (1)...(19): siRNA sense strand
aagaagaagaagagggaga

SEQ ID NO: 2511010 - RNA, 19 nt, Homo sapiens
  misc_RNA (1)...(19): siRNA sense strand
ggaagaagaagaagaggga

SEQ ID NO: 2511011 - RNA, 19 nt, Homo sapiens
  misc_RNA (1)...(19): siRNA sense strand
auauagaaguguuaggaga

SEQ ID NO: 2511012 - RNA, 19 nt, Homo sapiens
  misc_RNA (1)...(19): siRNA sense strand
augaaugugaggaaagaaa

SEQ ID NO: 2511013 - RNA, 19 nt, Homo sapiens
  misc_RNA (1)...(19): siRNA sense strand
ccgugaugaaugugaggaa

SEQ ID NO: 2511014 - RNA, 19 nt, Homo sapiens
  misc_RNA (1)...(19): siRNA sense strand
cguaaaggcucuugaggac

SEQ ID NO: 2511015 - RNA, 19 nt, Homo sapiens
  misc_RNA (1)...(19): siRNA sense strand
caacagaagaaguggcaac

SEQ ID NO: 2511016 - RNA, 19 nt, Homo sapiens
  misc_RNA (1)...(19): siRNA sense strand
agaugaagcugcuacguga

SEQ ID NO: 2511017 - RNA, 19 nt, Homo sapiens
  misc_RNA (1)...(19): siRNA sense strand
aagaggaagaagaagaaga

SEQ ID NO: 2511018 - RNA, 19 nt, Homo sapiens
  misc_RNA (1)...(19): siRNA sense strand
agaaguguuaggagagaga

SEQ ID NO: 2511019 - RNA, 19 nt, Homo sapiens
  misc_RNA (1)...(19): siRNA sense strand
aagagggagaagaggaaga

SEQ ID NO: 2511020 - RNA, 19 nt, Homo sapiens
  misc_RNA (1)...(19): siRNA sense strand
uucaagaacaacagaagaa

SEQ ID NO: 2511021 - RNA, 19 nt, Homo sapiens
  misc_RNA (1)...(19): siRNA sense strand
aagaagagggagaagagga

SEQ ID NO: 2511022 - RNA, 19 nt, Homo sapiens
  misc_RNA (1)...(19): siRNA sense strand
acgagcagaaagaggaaga

SEQ ID NO: 2511023 - RNA, 19 nt, Homo sapiens
  misc_RNA (1)...(19): siRNA sense strand
agcagaaagaggaagaaga

SEQ ID NO: 2511024 - RNA, 19 nt, Homo sapiens
  misc_RNA (1)...(19): siRNA sense strand
guuaggagagagaggcuga

SEQ ID NO: 2511025 - RNA, 19 nt, Homo sapiens
  misc_RNA (1)...(19): siRNA sense strand
agacgagcagaaagaggaa

SEQ ID NO: 2511026 - RNA, 19 nt, Homo sapiens
  misc_RNA (1)...(19): siRNA sense strand
agggagaagaggaagaacu

SEQ ID NO: 2511027 - RNA, 19 nt, Homo sapiens
  misc_RNA (1)...(19): siRNA sense strand
gaaaggauccaguccguga

SEQ ID NO: 2511028 - RNA, 19 nt, Homo sapiens
  misc_RNA (1)...(19): siRNA sense strand
gugaugaaugugaggaaag

SEQ ID NO: 2511029 - RNA, 19 nt, Homo sapiens
  misc_RNA (1)...(19): siRNA sense strand
ugaaagagaugaagcugcu

SEQ ID NO: 2511030 - RNA, 19 nt, Homo sapiens
  misc_RNA (1)...(19): siRNA sense strand
aggcccaguuggaggcuca

SEQ ID NO: 2511031 - RNA, 19 nt, Homo sapiens
  misc_RNA (1)...(19): siRNA sense strand
aagaagaagagggagaaga

SEQ ID NO: 2511032 - RNA, 19 nt, Homo sapiens
  misc_RNA (1)...(19): siRNA sense strand
ggauggaucugcauggcaa

SEQ ID NO: 2511033 - RNA, 19 nt, Homo sapiens
  misc_RNA (1)...(19): siRNA sense strand
gcaucaucgccgaggucaa

SEQ ID NO: 2511034 - RNA, 19 nt, Homo sapiens
  misc_RNA (1)...(19): siRNA sense strand
cagaauaaggugcuggaga

SEQ ID NO: 2511035 - RNA, 19 nt, Homo sapiens
  misc_RNA (1)...(19): siRNA sense strand
aguacgaggaugaaaucaa

SEQ ID NO: 2511036 - RNA, 19 nt, Homo sapiens
  misc_RNA (1)...(19): siRNA sense strand
uggacagacuucagagcga

SEQ ID NO: 2511037 - RNA, 19 nt, Homo sapiens
  misc_RNA (1)...(19): siRNA sense strand
agaucaagacccucaacaa

SEQ ID NO: 2511038 - RNA, 19 nt, Homo sapiens
  misc_RNA (1)...(19): siRNA sense strand
agaauaaggugcuggagac

SEQ ID NO: 2511039 - RNA, 19 nt, Homo sapiens
  misc_RNA (1)...(19): siRNA sense strand
aggucaaggcccaguauga

SEQ ID NO: 2511040 - RNA, 19 nt, Homo sapiens
  misc_RNA (1)...(19): siRNA sense strand
gcagacggccauugcggaa

SEQ ID NO: 2511041 - RNA, 19 nt, Homo sapiens
  misc_RNA (1)...(19): siRNA sense strand
gcaagcuucuggagagcga

SEQ ID NO: 2511042 - RNA, 19 nt, Homo sapiens
  misc_RNA (1)...(19): siRNA sense strand
uccuggagcaacagaauaa

SEQ ID NO: 2511043 - RNA, 19 nt, Homo sapiens
  misc_RNA (1)...(19): siRNA sense strand
gucaagacguccagccaga

SEQ ID NO: 2511044 - RNA, 19 nt, Homo sapiens
  misc_RNA (1)...(19): siRNA sense strand
gaugaaaucaacaagcaca

SEQ ID NO: 2511045 - RNA, 19 nt, Homo sapiens
  misc_RNA (1)...(19): siRNA sense strand
augaaauggagcugagcca

SEQ ID NO: 2511046 - RNA, 19 nt, Homo sapiens
  misc_RNA (1)...(19): siRNA sense strand
acgaguuuguggugcucaa

SEQ ID NO: 2511047 - RNA, 19 nt, Homo sapiens
  misc_RNA (1)...(19): siRNA sense strand
gcagggcauuuaugggaca

SEQ ID NO: 2511048 - RNA, 19 nt, Homo sapiens
  misc_RNA (1)...(19): siRNA sense strand
agaccaaguaugaggagcu

SEQ ID NO: 2511049 - RNA, 19 nt, Homo sapiens
  misc_RNA (1)...(19): siRNA sense strand
gagcagaucaagacccuca

SEQ ID NO: 2511050 - RNA, 19 nt, Homo sapiens
  misc_RNA (1)...(19): siRNA sense strand
acguccagccagagguauu

SEQ ID NO: 2511051 - RNA, 19 nt, Homo sapiens
  misc_RNA (1)...(19): siRNA sense strand
cuggaaaggauauggagaa

SEQ ID NO: 2511052 - RNA, 19 nt, Homo sapiens
  misc_RNA (1)...(19): siRNA sense strand
cuacagaaugggagaaaau

SEQ ID NO: 2511053 - RNA, 19 nt, Homo sapiens
  misc_RNA (1)...(19): siRNA sense strand
cuauaaagacacaugcaca

SEQ ID NO: 2511054 - RNA, 19 nt, Homo sapiens
  misc_RNA (1)...(19): siRNA sense strand
auaagugggcaaaggauau

SEQ ID NO: 2511055 - RNA, 19 nt, Homo sapiens
  misc_RNA (1)...(19): siRNA sense strand
ccaucagagaaaugcaaau

SEQ ID NO: 2511056 - RNA, 19 nt, Homo sapiens
  misc_RNA (1)...(19): siRNA sense strand
auauggagaaauaggaaca

SEQ ID NO: 2511057 - RNA, 19 nt, Homo sapiens
  misc_RNA (1)...(19): siRNA sense strand
acuaaaacaccaaaagcaa

SEQ ID NO: 2511058 - RNA, 19 nt, Homo sapiens
  misc_RNA (1)...(19): siRNA sense strand
gcuggaaaggauauggaga

SEQ ID NO: 2511059 - RNA, 19 nt, Homo sapiens
  misc_RNA (1)...(19): siRNA sense strand
caucagaaugaacaggcaa

SEQ ID NO: 2511060 - RNA, 19 nt, Homo sapiens
  misc_RNA (1)...(19): siRNA sense strand
cuaaagagcuucugcacag

SEQ ID NO: 2511061 - RNA, 19 nt, Homo sapiens
  misc_RNA (1)...(19): siRNA sense strand
caaccuacagaaugggaga

SEQ ID NO: 2511062 - RNA, 19 nt, Homo sapiens
  misc_RNA (1)...(19): siRNA sense strand
caaugauagacuggauuaa

SEQ ID NO: 2511063 - RNA, 19 nt, Homo sapiens
  misc_RNA (1)...(19): siRNA sense strand
uggagaaauaggaacacuu

SEQ ID NO: 2511064 - RNA, 19 nt, Homo sapiens
  misc_RNA (1)...(19): siRNA sense strand
gugaaacaucagaggaaga

SEQ ID NO: 2511065 - RNA, 19 nt, Homo sapiens
  misc_RNA (1)...(19): siRNA sense strand
aagugaaacaucagaggaa

SEQ ID NO: 2511066 - RNA, 19 nt, Homo sapiens
  misc_RNA (1)...(19): siRNA sense strand
cgacaugugauauggaaaa

SEQ ID NO: 2511067 - RNA, 19 nt, Homo sapiens
  misc_RNA (1)...(19): siRNA sense strand
cugaagaguaucugcacaa

SEQ ID NO: 2511068 - RNA, 19 nt, Homo sapiens
  misc_RNA (1)...(19): siRNA sense strand
cuuauuuauuggaguggaa

SEQ ID NO: 2511069 - RNA, 19 nt, Homo sapiens
  misc_RNA (1)...(19): siRNA sense strand
ucucaaugcucaaggagga

SEQ ID NO: 2511070 - RNA, 19 nt, Homo sapiens
  misc_RNA (1)...(19): siRNA sense strand
cuuaagaagacuagagaug

SEQ ID NO: 2511071 - RNA, 19 nt, Homo sapiens
  misc_RNA (1)...(19): siRNA sense strand
gagcaaacgggcauggaca

SEQ ID NO: 2511072 - RNA, 19 nt, Homo sapiens
  misc_RNA (1)...(19): siRNA sense strand
cuuaguuggaugaacauaa

SEQ ID NO: 2511073 - RNA, 19 nt, Homo sapiens
  misc_RNA (1)...(19): siRNA sense strand
acauacaccacuagcaaau

SEQ ID NO: 2511074 - RNA, 19 nt, Homo sapiens
  misc_RNA (1)...(19): siRNA sense strand
agaggaagaucaugggucu

SEQ ID NO: 2511075 - RNA, 19 nt, Homo sapiens
  misc_RNA (1)...(19): siRNA sense strand
aggaaggaacaaaggcaca

SEQ ID NO: 2511076 - RNA, 19 nt, Homo sapiens
  misc_RNA (1)...(19): siRNA sense strand
gaguggaaguacugccuga

SEQ ID NO: 2511077 - RNA, 19 nt, Homo sapiens
  misc_RNA (1)...(19): siRNA sense strand
gcaaauucaaugaugcuga

SEQ ID NO: 2511078 - RNA, 19 nt, Homo sapiens
  misc_RNA (1)...(19): siRNA sense strand
gaagauuauaagaggugga

SEQ ID NO: 2511079 - RNA, 19 nt, Homo sapiens
  misc_RNA (1)...(19): siRNA sense strand
cugaaccugcaaagggaaa

SEQ ID NO: 2511080 - RNA, 19 nt, Homo sapiens
  misc_RNA (1)...(19): siRNA sense strand
ugcuugaaccagaagauua

SEQ ID NO: 2511081 - RNA, 19 nt, Homo sapiens
  misc_RNA (1)...(19): siRNA sense strand
gccagaacaaagagacaga

SEQ ID NO: 2511082 - RNA, 19 nt, Homo sapiens
  misc_RNA (1)...(19): siRNA sense strand
uggccagaacaaagagaca

SEQ ID NO: 2511083 - RNA, 19 nt, Homo sapiens
  misc_RNA (1)...(19): siRNA sense strand
agaacaaagagacagaaga

SEQ ID NO: 2511084 - RNA, 19 nt, Homo sapiens
  misc_RNA (1)...(19): siRNA sense strand
ggaaguacugccugaaaau

SEQ ID NO: 2511085 - RNA, 19 nt, Homo sapiens
  misc_RNA (1)...(19): siRNA sense strand
uggaaauacaggugugucu

SEQ ID NO: 2511086 - RNA, 19 nt, Homo sapiens
  misc_RNA (1)...(19): siRNA sense strand
ggagauggaugcaggaguc

SEQ ID NO: 2511087 - RNA, 19 nt, Homo sapiens
  misc_RNA (1)...(19): siRNA sense strand
ucgacaugugauauggaaa

SEQ ID NO: 2511088 - RNA, 19 nt, Homo sapiens
  misc_RNA (1)...(19): siRNA sense strand
cuggauaagcaaaacauua

SEQ ID NO: 2511089 - RNA, 19 nt, Homo sapiens
  misc_RNA (1)...(19): siRNA sense strand
acuuugacguggaaauaca

SEQ ID NO: 2511090 - RNA, 19 nt, Homo sapiens
  misc_RNA (1)...(19): siRNA sense strand
ggucucuggaaaaggaaaa

SEQ ID NO: 2511091 - RNA, 19 nt, Homo sapiens
  misc_RNA (1)...(19): siRNA sense strand
uggaaguacugccugaaaa

SEQ ID NO: 2511092 - RNA, 19 nt, Homo sapiens
  misc_RNA (1)...(19): siRNA sense strand
ggacuuucucaaugcucaa

SEQ ID NO: 2511093 - RNA, 19 nt, Homo sapiens
  misc_RNA (1)...(19): siRNA sense strand
gacuauaagaagggaugua

SEQ ID NO: 2511094 - RNA, 19 nt, Homo sapiens
  misc_RNA (1)...(19): siRNA sense strand
ccagaagauuauaagaggu

SEQ ID NO: 2511095 - RNA, 19 nt, Homo sapiens
  misc_RNA (1)...(19): siRNA sense strand
caaaauaauugacgggaga

SEQ ID NO: 2511096 - RNA, 19 nt, Homo sapiens
  misc_RNA (1)...(19): siRNA sense strand
aggagaaggaagagacuca

SEQ ID NO: 2511097 - RNA, 19 nt, Homo sapiens
  misc_RNA (1)...(19): siRNA sense strand
ugaagaaagcacaggagga

SEQ ID NO: 2511098 - RNA, 19 nt, Homo sapiens
  misc_RNA (1)...(19): siRNA sense strand
caacaaagacuugaggaga

SEQ ID NO: 2511099 - RNA, 19 nt, Homo sapiens
  misc_RNA (1)...(19): siRNA sense strand
gggauaauuucaugcagca

SEQ ID NO: 2511100 - RNA, 19 nt, Homo sapiens
  misc_RNA (1)...(19): siRNA sense strand
acacgaugcuggaaaggga

SEQ ID NO: 2511101 - RNA, 19 nt, Homo sapiens
  misc_RNA (1)...(19): siRNA sense strand
cuuccuggcaacaaagaaa

SEQ ID NO: 2511102 - RNA, 19 nt, Homo sapiens
  misc_RNA (1)...(19): siRNA sense strand
ugaagagauggaugaagaa

SEQ ID NO: 2511103 - RNA, 19 nt, Homo sapiens
  misc_RNA (1)...(19): siRNA sense strand
aagaaauaguccuuggcca

SEQ ID NO: 2511104 - RNA, 19 nt, Homo sapiens
  misc_RNA (1)...(19): siRNA sense strand
guguagugacucuggcauu

SEQ ID NO: 2511105 - RNA, 19 nt, Homo sapiens
  misc_RNA (1)...(19): siRNA sense strand
uguuugaagagauggauga

SEQ ID NO: 2511106 - RNA, 19 nt, Homo sapiens
  misc_RNA (1)...(19): siRNA sense strand
ccauuagaaauuaccacaa

SEQ ID NO: 2511107 - RNA, 19 nt, Homo sapiens
  misc_RNA (1)...(19): siRNA sense strand
uuagcaucacaaagagaaa

SEQ ID NO: 2511108 - RNA, 19 nt, Homo sapiens
  misc_RNA (1)...(19): siRNA sense strand
uggaaagggagauugcauu

SEQ ID NO: 2511109 - RNA, 19 nt, Homo sapiens
  misc_RNA (1)...(19): siRNA sense strand
ugauacuaccauuaagcua

SEQ ID NO: 2511110 - RNA, 19 nt, Homo sapiens
  misc_RNA (1)...(19): siRNA sense strand
ccauuaagcuaccgccgau

SEQ ID NO: 2511111 - RNA, 19 nt, Homo sapiens
  misc_RNA (1)...(19): siRNA sense strand
cuggaaagggagauugcau

SEQ ID NO: 2511112 - RNA, 19 nt, Homo sapiens
  misc_RNA (1)...(19): siRNA sense strand
aagcacaggaggaguuuca

SEQ ID NO: 2511113 - RNA, 19 nt, Homo sapiens
  misc_RNA (1)...(19): siRNA sense strand
auaauugacgggagacaga

SEQ ID NO: 2511114 - RNA, 19 nt, Homo sapiens
  misc_RNA (1)...(19): siRNA sense strand
aguacaugucagugauuca

SEQ ID NO: 2511115 - RNA, 19 nt, Homo sapiens
  misc_RNA (1)...(19): siRNA sense strand
cuacuauauccuugagaca

SEQ ID NO: 2511116 - RNA, 19 nt, Homo sapiens
  misc_RNA (1)...(19): siRNA sense strand
gaaacauucaagaugggua

SEQ ID NO: 2511117 - RNA, 19 nt, Homo sapiens
  misc_RNA (1)...(19): siRNA sense strand
guagguacgaugugggcau

SEQ ID NO: 2511118 - RNA, 19 nt, Homo sapiens
  misc_RNA (1)...(19): siRNA sense strand
gggaucagugagaggcaga

SEQ ID NO: 2511119 - RNA, 19 nt, Homo sapiens
  misc_RNA (1)...(19): siRNA sense strand
acaccaugguaaaggaaac

SEQ ID NO: 2511120 - RNA, 19 nt, Homo sapiens
  misc_RNA (1)...(19): siRNA sense strand
gcaugguguaccuggaaaa

SEQ ID NO: 2511121 - RNA, 19 nt, Homo sapiens
  misc_RNA (1)...(19): siRNA sense strand
ugguguaccuggaaaacua

SEQ ID NO: 2511122 - RNA, 19 nt, Homo sapiens
  misc_RNA (1)...(19): siRNA sense strand
ccgcuucaucagcaagaaa

SEQ ID NO: 2511123 - RNA, 19 nt, Homo sapiens
  misc_RNA (1)...(19): siRNA sense strand
cagacuuaaacaacaacaa

SEQ ID NO: 2511124 - RNA, 19 nt, Homo sapiens
  misc_RNA (1)...(19): siRNA sense strand
cuacuauauccuugagaca

SEQ ID NO: 2511125 - RNA, 19 nt, Homo sapiens
  misc_RNA (1)...(19): siRNA sense strand
gaaacauucaagaugggua

SEQ ID NO: 2511126 - RNA, 19 nt, Homo sapiens
  misc_RNA (1)...(19): siRNA sense strand
guagguacgaugugggcau

SEQ ID NO: 2511127 - RNA, 19 nt, Homo sapiens
  misc_RNA (1)...(19): siRNA sense strand
gggaucagugagaggcaga

SEQ ID NO: 2511128 - RNA, 19 nt, Homo sapiens
  misc_RNA (1)...(19): siRNA sense strand
acaccaugguaaaggaaac

SEQ ID NO: 2511129 - RNA, 19 nt, Homo sapiens
  misc_RNA (1)...(19): siRNA sense strand
gcaugguguaccuggaaaa

SEQ ID NO: 2511130 - RNA, 19 nt, Homo sapiens
  misc_RNA (1)...(19): siRNA sense strand
ugguguaccuggaaaacua

SEQ ID NO: 2511131 - RNA, 19 nt, Homo sapiens
  misc_RNA (1)...(19): siRNA sense strand
ccgcuucaucagcaagaaa

SEQ ID NO: 2511132 - RNA, 19 nt, Homo sapiens
  misc_RNA (1)...(19): siRNA sense strand
cagacuuaaacaacaacaa

SEQ ID NO: 2511133 - RNA, 19 nt, Homo sapiens
  misc_RNA (1)...(19): siRNA sense strand
gcaauaccaucaugcguga

SEQ ID NO: 2511134 - RNA, 19 nt, Homo sapiens
  misc_RNA (1)...(19): siRNA sense strand
uaaaugaaucuguucgcaa

SEQ ID NO: 2511135 - RNA, 19 nt, Homo sapiens
  misc_RNA (1)...(19): siRNA sense strand
ggcugaaggaggaggacaa

SEQ ID NO: 2511136 - RNA, 19 nt, Homo sapiens
  misc_RNA (1)...(19): siRNA sense strand
gggaagaacaugugugcca

SEQ ID NO: 2511137 - RNA, 19 nt, Homo sapiens
  misc_RNA (1)...(19): siRNA sense strand
aagcaagagcaaugggaau

SEQ ID NO: 2511138 - RNA, 19 nt, Homo sapiens
  misc_RNA (1)...(19): siRNA sense strand
gagcaaugggaauggaaga

SEQ ID NO: 2511139 - RNA, 19 nt, Homo sapiens
  misc_RNA (1)...(19): siRNA sense strand
aggaggaggacaaggauau

SEQ ID NO: 2511140 - RNA, 19 nt, Homo sapiens
  misc_RNA (1)...(19): siRNA sense strand
ccgugaaauugaaggaugu

SEQ ID NO: 2511141 - RNA, 19 nt, Homo sapiens
  misc_RNA (1)...(19): siRNA sense strand
aggagaauggacaaaguaa

SEQ ID NO: 2511142 - RNA, 19 nt, Homo sapiens
  misc_RNA (1)...(19): siRNA sense strand
acaauaagauccaggccga

SEQ ID NO: 2511143 - RNA, 19 nt, Homo sapiens
  misc_RNA (1)...(19): siRNA sense strand
ccuggagagcagagggaga

SEQ ID NO: 2511144 - RNA, 19 nt, Homo sapiens
  misc_RNA (1)...(19): siRNA sense strand
agggaaggcugaaggagga

SEQ ID NO: 2511145 - RNA, 19 nt, Homo sapiens
  misc_RNA (1)...(19): siRNA sense strand
cgugaggaagcaagagcaa

SEQ ID NO: 2511146 - RNA, 19 nt, Homo sapiens
  misc_RNA (1)...(19): siRNA sense strand
uggcaggccucgugcucaa

SEQ ID NO: 2511147 - RNA, 19 nt, Homo sapiens
  misc_RNA (1)...(19): siRNA sense strand
auauaaggagaauggacaa

SEQ ID NO: 2511148 - RNA, 19 nt, Homo sapiens
  misc_RNA (1)...(19): siRNA sense strand
cugaagaaggauuugauuu

SEQ ID NO: 2511149 - RNA, 19 nt, Homo sapiens
  misc_RNA (1)...(19): siRNA sense strand
uggacuagugaaagaguau

SEQ ID NO: 2511150 - RNA, 19 nt, Homo sapiens
  misc_RNA (1)...(19): siRNA sense strand
caucaaugcuuuugcguca

SEQ ID NO: 2511151 - RNA, 19 nt, Homo sapiens
  misc_RNA (1)...(19): siRNA sense strand
agaaacugaagaaggauuu

SEQ ID NO: 2511152 - RNA, 19 nt, Homo sapiens
  misc_RNA (1)...(19): siRNA sense strand
auuacuuggacuagugaaa

SEQ ID NO: 2511153 - RNA, 19 nt, Homo sapiens
  misc_RNA (1)...(19): siRNA sense strand
aagaugaagaugaugaaga

SEQ ID NO: 2511154 - RNA, 19 nt, Homo sapiens
  misc_RNA (1)...(19): siRNA sense strand
cggacaaagaggagcugga

SEQ ID NO: 2511155 - RNA, 19 nt, Homo sapiens
  misc_RNA (1)...(19): siRNA sense strand
cuccagaguuaaaguugaa

SEQ ID NO: 2511156 - RNA, 19 nt, Homo sapiens
  misc_RNA (1)...(19): siRNA sense strand
cgaucuggacaaagacgaa

SEQ ID NO: 2511157 - RNA, 19 nt, Homo sapiens
  misc_RNA (1)...(19): siRNA sense strand
ggcucaugaaucugaauua

SEQ ID NO: 2511158 - RNA, 19 nt, Homo sapiens
  misc_RNA (1)...(19): siRNA sense strand
augaaaaccaugagauaca

SEQ ID NO: 2511159 - RNA, 19 nt, Homo sapiens
  misc_RNA (1)...(19): siRNA sense strand
gaagcaagagcaaugggaa

SEQ ID NO: 2511160 - RNA, 19 nt, Homo sapiens
  misc_RNA (1)...(19): siRNA sense strand
uauauaaggagaauggaca

SEQ ID NO: 2511161 - RNA, 19 nt, Homo sapiens
  misc_RNA (1)...(19): siRNA sense strand
aaggaggaggacaaggaua

SEQ ID NO: 2511162 - RNA, 19 nt, Homo sapiens
  misc_RNA (1)...(19): siRNA sense strand
augaugaagaugaagauga

SEQ ID NO: 2511163 - RNA, 19 nt, Homo sapiens
  misc_RNA (1)...(19): siRNA sense strand
augaagaugaagaugauga

SEQ ID NO: 2511164 - RNA, 19 nt, Homo sapiens
  misc_RNA (1)...(19): siRNA sense strand
gcaaugaccucuuggacug

SEQ ID NO: 2511165 - RNA, 19 nt, Homo sapiens
  misc_RNA (1)...(19): siRNA sense strand
gauaucaucaccagggaga

SEQ ID NO: 2511166 - RNA, 19 nt, Homo sapiens
  misc_RNA (1)...(19): siRNA sense strand
cugacuacacgcuggagua

SEQ ID NO: 2511167 - RNA, 19 nt, Homo sapiens
  misc_RNA (1)...(19): siRNA sense strand
ggaucuugucgcugcauuu

SEQ ID NO: 2511168 - RNA, 19 nt, Homo sapiens
  misc_RNA (1)...(19): siRNA sense strand
ccuuggcacccgugaaauu

SEQ ID NO: 2511169 - RNA, 19 nt, Homo sapiens
  misc_RNA (1)...(19): siRNA sense strand
uggaguacucgguggcuuu

SEQ ID NO: 2511170 - RNA, 19 nt, Homo sapiens
  misc_RNA (1)...(19): siRNA sense strand
cugaugaugaugaagauga

SEQ ID NO: 2511171 - RNA, 19 nt, Homo sapiens
  misc_RNA (1)...(19): siRNA sense strand
augaagaggaccaugacau

SEQ ID NO: 2511172 - RNA, 19 nt, Homo sapiens
  misc_RNA (1)...(19): siRNA sense strand
gacuagugaaagaguauuu

SEQ ID NO: 2511173 - RNA, 19 nt, Homo sapiens
  misc_RNA (1)...(19): siRNA sense strand
acaaagacgaacugaucca

SEQ ID NO: 2511174 - RNA, 19 nt, Homo sapiens
  misc_RNA (1)...(19): siRNA sense strand
ugacaauucagaaggaucu

SEQ ID NO: 2511175 - RNA, 19 nt, Homo sapiens
  misc_RNA (1)...(19): siRNA sense strand
cugaguaccuccagagcgu

SEQ ID NO: 2511176 - RNA, 19 nt, Homo sapiens
  misc_RNA (1)...(19): siRNA sense strand
ggaagaacaugugugccaa

SEQ ID NO: 2511177 - RNA, 19 nt, Homo sapiens
  misc_RNA (1)...(19): siRNA sense strand
ucaaagaaggcaaugcuga

SEQ ID NO: 2511178 - RNA, 19 nt, Homo sapiens
  misc_RNA (1)...(19): siRNA sense strand
uguuauagccacaaccaga

SEQ ID NO: 2511179 - RNA, 19 nt, Homo sapiens
  misc_RNA (1)...(19): siRNA sense strand
guguaaaacaguaggcgga

SEQ ID NO: 2511180 - RNA, 19 nt, Homo sapiens
  misc_RNA (1)...(19): siRNA sense strand
aagaugaugaagaggacca

SEQ ID NO: 2511181 - RNA, 19 nt, Homo sapiens
  misc_RNA (1)...(19): siRNA sense strand
cagaguuaaaguugaaguu

SEQ ID NO: 2511182 - RNA, 19 nt, Homo sapiens
  misc_RNA (1)...(19): siRNA sense strand
uauaaggagaauggacaaa

SEQ ID NO: 2511183 - RNA, 19 nt, Homo sapiens
  misc_RNA (1)...(19): siRNA sense strand
ggagaauggacaaaguaac

SEQ ID NO: 2511184 - RNA, 19 nt, Homo sapiens
  misc_RNA (1)...(19): siRNA sense strand
ccuccuuggauuaugagaa

SEQ ID NO: 2511185 - RNA, 19 nt, Homo sapiens
  misc_RNA (1)...(19): siRNA sense strand
aggaagaggaagaggagga

SEQ ID NO: 2511186 - RNA, 19 nt, Homo sapiens
  misc_RNA (1)...(19): siRNA sense strand
aggaggaggaggaggaaga

SEQ ID NO: 2511187 - RNA, 19 nt, Homo sapiens
  misc_RNA (1)...(19): siRNA sense strand
aggaggaggaagaggaaga

SEQ ID NO: 2511188 - RNA, 19 nt, Homo sapiens
  misc_RNA (1)...(19): siRNA sense strand
cccuagagcaggaggaaga

SEQ ID NO: 2511189 - RNA, 19 nt, Homo sapiens
  misc_RNA (1)...(19): siRNA sense strand
aagaggaagaggaggaaga

SEQ ID NO: 2511190 - RNA, 19 nt, Homo sapiens
  misc_RNA (1)...(19): siRNA sense strand
aggaagagguggaccagca

SEQ ID NO: 2511191 - RNA, 19 nt, Homo sapiens
  misc_RNA (1)...(19): siRNA sense strand
caguggugcccaagaggaa

SEQ ID NO: 2511192 - RNA, 19 nt, Homo sapiens
  misc_RNA (1)...(19): siRNA sense strand
gcucagaggagaagcccuu

SEQ ID NO: 2511193 - RNA, 19 nt, Homo sapiens
  misc_RNA (1)...(19): siRNA sense strand
ggccaagaauagccgggaa

SEQ ID NO: 2511194 - RNA, 19 nt, Homo sapiens
  misc_RNA (1)...(19): siRNA sense strand
gccaagaauagccgggaau

SEQ ID NO: 2511195 - RNA, 19 nt, Homo sapiens
  misc_RNA (1)...(19): siRNA sense strand
aggaggaggaggaggagga

SEQ ID NO: 2511196 - RNA, 19 nt, Homo sapiens
  misc_RNA (1)...(19): siRNA sense strand
aggaggaggaggaggagga

SEQ ID NO: 2511197 - RNA, 19 nt, Homo sapiens
  misc_RNA (1)...(19): siRNA sense strand
aggaggaggaggaggagga

SEQ ID NO: 2511198 - RNA, 19 nt, Homo sapiens
  misc_RNA (1)...(19): siRNA sense strand
aggaggaggaggaggagga

SEQ ID NO: 2511199 - RNA, 19 nt, Homo sapiens
  misc_RNA (1)...(19): siRNA sense strand
ccacguugaagaagcgcua

SEQ ID NO: 2511200 - RNA, 19 nt, Homo sapiens
  misc_RNA (1)...(19): siRNA sense strand
ggaagaggaggaagaggga

SEQ ID NO: 2511201 - RNA, 19 nt, Homo sapiens
  misc_RNA (1)...(19): siRNA sense strand
aggaggaagagguggacca

SEQ ID NO: 2511202 - RNA, 19 nt, Homo sapiens
  misc_RNA (1)...(19): siRNA sense strand
gauccggcucagaggagaa

SEQ ID NO: 2511203 - RNA, 19 nt, Homo sapiens
  misc_RNA (1)...(19): siRNA sense strand
aagaggaggaagagggauc

SEQ ID NO: 2511204 - RNA, 19 nt, Homo sapiens
  misc_RNA (1)...(19): siRNA sense strand
ggaagagggauccggcuca

SEQ ID NO: 2511205 - RNA, 19 nt, Homo sapiens
  misc_RNA (1)...(19): siRNA sense strand
aggaggaggaggaagagga

SEQ ID NO: 2511206 - RNA, 19 nt, Homo sapiens
  misc_RNA (1)...(19): siRNA sense strand
aggaggaagaggaagagga

SEQ ID NO: 2511207 - RNA, 19 nt, Homo sapiens
  misc_RNA (1)...(19): siRNA sense strand
ccuucacaguggugcccaa

SEQ ID NO: 2511208 - RNA, 19 nt, Homo sapiens
  misc_RNA (1)...(19): siRNA sense strand
gcaaggacgucuacggcua

SEQ ID NO: 2511209 - RNA, 19 nt, Homo sapiens
  misc_RNA (1)...(19): siRNA sense strand
gcacggaguucaugagcuc

SEQ ID NO: 2511210 - RNA, 19 nt, Homo sapiens
  misc_RNA (1)...(19): siRNA sense strand
gagugaaccuggaacccau

SEQ ID NO: 2511211 - RNA, 19 nt, Homo sapiens
  misc_RNA (1)...(19): siRNA sense strand
gggaugaaacaguggagaa

SEQ ID NO: 2511212 - RNA, 19 nt, Homo sapiens
  misc_RNA (1)...(19): siRNA sense strand
gcgcagaggccuaugggaa

SEQ ID NO: 2511213 - RNA, 19 nt, Homo sapiens
  misc_RNA (1)...(19): siRNA sense strand
ggacagaagcaguggcagu

SEQ ID NO: 2511214 - RNA, 19 nt, Homo sapiens
  misc_RNA (1)...(19): siRNA sense strand
uuguaaaggaucugguaaa

SEQ ID NO: 2511215 - RNA, 19 nt, Homo sapiens
  misc_RNA (1)...(19): siRNA sense strand
ccacagggagagaggaaaa

SEQ ID NO: 2511216 - RNA, 19 nt, Homo sapiens
  misc_RNA (1)...(19): siRNA sense strand
gcguauaagaauuucacaa

SEQ ID NO: 2511217 - RNA, 19 nt, Homo sapiens
  misc_RNA (1)...(19): siRNA sense strand
cgcagaggccuaugggaaa

SEQ ID NO: 2511218 - RNA, 19 nt, Homo sapiens
  misc_RNA (1)...(19): siRNA sense strand
ggaugaaacaguggagaau

SEQ ID NO: 2511219 - RNA, 19 nt, Homo sapiens
  misc_RNA (1)...(19): siRNA sense strand
guucaauagaucaggcauu

SEQ ID NO: 2511220 - RNA, 19 nt, Homo sapiens
  misc_RNA (1)...(19): siRNA sense strand
acgaaauuauccagaauca

SEQ ID NO: 2511221 - RNA, 19 nt, Homo sapiens
  misc_RNA (1)...(19): siRNA sense strand
aggaauugucagaugaaau

SEQ ID NO: 2511222 - RNA, 19 nt, Homo sapiens
  misc_RNA (1)...(19): siRNA sense strand
gaucaaucucagcgaggua

SEQ ID NO: 2511223 - RNA, 19 nt, Homo sapiens
  misc_RNA (1)...(19): siRNA sense strand
cuggcaaauaggagaaauu

SEQ ID NO: 2511224 - RNA, 19 nt, Homo sapiens
  misc_RNA (1)...(19): siRNA sense strand
gucuaauaguguugcguau

SEQ ID NO: 2511225 - RNA, 19 nt, Homo sapiens
  misc_RNA (1)...(19): siRNA sense strand
gguuaagagauuugccaca

SEQ ID NO: 2511226 - RNA, 19 nt, Homo sapiens
  misc_RNA (1)...(19): siRNA sense strand
ugguaaaggaauugucaga

SEQ ID NO: 2511227 - RNA, 19 nt, Homo sapiens
  misc_RNA (1)...(19): siRNA sense strand
aaucagucccacaaggaaa

SEQ ID NO: 2511228 - RNA, 19 nt, Homo sapiens
  misc_RNA (1)...(19): siRNA sense strand
aagcaugcgcagaggccua

SEQ ID NO: 2511229 - RNA, 19 nt, Homo sapiens
  misc_RNA (1)...(19): siRNA sense strand
gcaaucagacagagaucau

SEQ ID NO: 2511230 - RNA, 19 nt, Homo sapiens
  misc_RNA (1)...(19): siRNA sense strand
aggaucugguaaaggaauu

SEQ ID NO: 2511231 - RNA, 19 nt, Homo sapiens
  misc_RNA (1)...(19): siRNA sense strand
agggcaugauugugggaca

SEQ ID NO: 2511232 - RNA, 19 nt, Homo sapiens
  misc_RNA (1)...(19): siRNA sense strand
ccgauuuaauacugaagau

SEQ ID NO: 2511233 - RNA, 19 nt, Homo sapiens
  misc_RNA (1)...(19): siRNA sense strand
gcgcuggcaaauaggagaa

SEQ ID NO: 2511234 - RNA, 19 nt, Homo sapiens
  misc_RNA (1)...(19): siRNA sense strand
aagccuacuagacgagaaa

SEQ ID NO: 2511235 - RNA, 19 nt, Homo sapiens
  misc_RNA (1)...(19): siRNA sense strand
uggagaaaccgccucgaaa

SEQ ID NO: 2511236 - RNA, 19 nt, Homo sapiens
  misc_RNA (1)...(19): siRNA sense strand
ugggaaaagugucaagaau

SEQ ID NO: 2511237 - RNA, 19 nt, Homo sapiens
  misc_RNA (1)...(19): siRNA sense strand
cauuauuacuuacgcacau

SEQ ID NO: 2511238 - RNA, 19 nt, Homo sapiens
  misc_RNA (1)...(19): siRNA sense strand
cgaaaacggagaagcagua

SEQ ID NO: 2511239 - RNA, 19 nt, Homo sapiens
  misc_RNA (1)...(19): siRNA sense strand
guucaauggguuaagagau

SEQ ID NO: 2511240 - RNA, 19 nt, Homo sapiens
  misc_RNA (1)...(19): siRNA sense strand
cugaagaucaaguggaaug

SEQ ID NO: 2511241 - RNA, 19 nt, Homo sapiens
  misc_RNA (1)...(19): siRNA sense strand
aaucuaagcaacuguucaa

SEQ ID NO: 2511242 - RNA, 19 nt, Homo sapiens
  misc_RNA (1)...(19): siRNA sense strand
ugacaagccuacuagacga

SEQ ID NO: 2511243 - RNA, 19 nt, Homo sapiens
  misc_RNA (1)...(19): siRNA sense strand
guuguaaaggaucugguaa

SEQ ID NO: 2511244 - RNA, 19 nt, Homo sapiens
  misc_RNA (1)...(19): siRNA sense strand
uacugaagaucaaguggaa

SEQ ID NO: 2511245 - RNA, 19 nt, Homo sapiens
  misc_RNA (1)...(19): siRNA sense strand
gcagaggccuaugggaaaa

SEQ ID NO: 2511246 - RNA, 19 nt, Homo sapiens
  misc_RNA (1)...(19): siRNA sense strand
aggaaaacaguuacagauu

SEQ ID NO: 2511247 - RNA, 19 nt, Homo sapiens
  misc_RNA (1)...(19): siRNA sense strand
uggauaaaucuaagcaacu

SEQ ID NO: 2511248 - RNA, 19 nt, Homo sapiens
  misc_RNA (1)...(19): siRNA sense strand
gagaugaauuucuucgcuu

SEQ ID NO: 2511249 - RNA, 19 nt, Homo sapiens
  misc_RNA (1)...(19): siRNA sense strand
ucgggaaacacgaaauuau

SEQ ID NO: 2511250 - RNA, 19 nt, Homo sapiens
  misc_RNA (1)...(19): siRNA sense strand
uggaggugcugaagaugau

SEQ ID NO: 2511251 - RNA, 19 nt, Homo sapiens
  misc_RNA (1)...(19): siRNA sense strand
caauauggacagaagcagu

SEQ ID NO: 2511252 - RNA, 19 nt, Homo sapiens
  misc_RNA (1)...(19): siRNA sense strand
agucuuggauaaucgguau

SEQ ID NO: 2511253 - RNA, 19 nt, Homo sapiens
  misc_RNA (1)...(19): siRNA sense strand
acgcacucauuauugguaa

SEQ ID NO: 2511254 - RNA, 19 nt, Homo sapiens
  misc_RNA (1)...(19): siRNA sense strand
gaucaaguggaauggaacu

SEQ ID NO: 2511255 - RNA, 19 nt, Homo sapiens
  misc_RNA (1)...(19): siRNA sense strand
cuggaaagggagccaauga

SEQ ID NO: 2511256 - RNA, 19 nt, Homo sapiens
  misc_RNA (1)...(19): siRNA sense strand
cgggcaagucgaagcggaa

SEQ ID NO: 2511257 - RNA, 19 nt, Homo sapiens
  misc_RNA (1)...(19): siRNA sense strand
agucgaagcggaaggugaa

SEQ ID NO: 2511258 - RNA, 19 nt, Homo sapiens
  misc_RNA (1)...(19): siRNA sense strand
ccuucggagcccuggacaa

SEQ ID NO: 2511259 - RNA, 19 nt, Homo sapiens
  misc_RNA (1)...(19): siRNA sense strand
aagucgaagcggaagguga

SEQ ID NO: 2511260 - RNA, 19 nt, Homo sapiens
  misc_RNA (1)...(19): siRNA sense strand
cggucaugguggagagaac

SEQ ID NO: 2511261 - RNA, 19 nt, Homo sapiens
  misc_RNA (1)...(19): siRNA sense strand
guacaucggucauggugga

SEQ ID NO: 2511262 - RNA, 19 nt, Homo sapiens
  misc_RNA (1)...(19): siRNA sense strand
caguacagaccucgauaca

SEQ ID NO: 2511263 - RNA, 19 nt, Homo sapiens
  misc_RNA (1)...(19): siRNA sense strand
cgcaaugacaccaaggaaa

SEQ ID NO: 2511264 - RNA, 19 nt, Homo sapiens
  misc_RNA (1)...(19): siRNA sense strand
gugaggaagauguggauga

SEQ ID NO: 2511265 - RNA, 19 nt, Homo sapiens
  misc_RNA (1)...(19): siRNA sense strand
uaacaguauuccugaguga

SEQ ID NO: 2511266 - RNA, 19 nt, Homo sapiens
  misc_RNA (1)...(19): siRNA sense strand
gcacugagguuucgcacca

SEQ ID NO: 2511267 - RNA, 19 nt, Homo sapiens
  misc_RNA (1)...(19): siRNA sense strand
aggaagauguggaugaaug

SEQ ID NO: 2511268 - RNA, 19 nt, Homo sapiens
  misc_RNA (1)...(19): siRNA sense strand
gacaugaggaggacaguuu

SEQ ID NO: 2511269 - RNA, 19 nt, Homo sapiens
  misc_RNA (1)...(19): siRNA sense strand
gcaaugacaccaaggaaag

SEQ ID NO: 2511270 - RNA, 19 nt, Homo sapiens
  misc_RNA (1)...(19): siRNA sense strand
gcuacugcgugccggguuu

SEQ ID NO: 2511271 - RNA, 19 nt, Homo sapiens
  misc_RNA (1)...(19): siRNA sense strand
cugccaggucuguggauga

SEQ ID NO: 2511272 - RNA, 19 nt, Homo sapiens
  misc_RNA (1)...(19): siRNA sense strand
caugaggaggacaguuuaa

SEQ ID NO: 2511273 - RNA, 19 nt, Homo sapiens
  misc_RNA (1)...(19): siRNA sense strand
ccaauggcuuccaguguca

SEQ ID NO: 2511274 - RNA, 19 nt, Homo sapiens
  misc_RNA (1)...(19): siRNA sense strand
ggcggaaccugcagugaca

SEQ ID NO: 2511275 - RNA, 19 nt, Homo sapiens
  misc_RNA (1)...(19): siRNA sense strand
gcagcuggccuaacaguau

SEQ ID NO: 2511276 - RNA, 19 nt, Homo sapiens
  misc_RNA (1)...(19): siRNA sense strand
gcauagugcuagugggaga

SEQ ID NO: 2511277 - RNA, 19 nt, Homo sapiens
  misc_RNA (1)...(19): siRNA sense strand
cugaaguggauaagggaga

SEQ ID NO: 2511278 - RNA, 19 nt, Homo sapiens
  misc_RNA (1)...(19): siRNA sense strand
ucagagugguuguggcgaa

SEQ ID NO: 2511279 - RNA, 19 nt, Homo sapiens
  misc_RNA (1)...(19): siRNA sense strand
agaugcugguggagcuaaa

SEQ ID NO: 2511280 - RNA, 19 nt, Homo sapiens
  misc_RNA (1)...(19): siRNA sense strand
cugcauagugcuaguggga

SEQ ID NO: 2511281 - RNA, 19 nt, Homo sapiens
  misc_RNA (1)...(19): siRNA sense strand
gcgaaaucaacgacagucu

SEQ ID NO: 2511282 - RNA, 19 nt, Homo sapiens
  misc_RNA (1)...(19): siRNA sense strand
caacuuguaugcagagcca

SEQ ID NO: 2511283 - RNA, 19 nt, Homo sapiens
  misc_RNA (1)...(19): siRNA sense strand
ugcagaagccauaaggaga

SEQ ID NO: 2511284 - RNA, 19 nt, Homo sapiens
  misc_RNA (1)...(19): siRNA sense strand
aguggauaagggagaauau

SEQ ID NO: 2511285 - RNA, 19 nt, Homo sapiens
  misc_RNA (1)...(19): siRNA sense strand
auucauaaagaacggaaga

SEQ ID NO: 2511286 - RNA, 19 nt, Homo sapiens
  misc_RNA (1)...(19): siRNA sense strand
cuucucaaauucagggcuu

SEQ ID NO: 2511287 - RNA, 19 nt, Homo sapiens
  misc_RNA (1)...(19): siRNA sense strand
gcuucagcuagccgaguua

SEQ ID NO: 2511288 - RNA, 19 nt, Homo sapiens
  misc_RNA (1)...(19): siRNA sense strand
gauaagagccgguccccaa

SEQ ID NO: 2511289 - RNA, 19 nt, Homo sapiens
  misc_RNA (1)...(19): siRNA sense strand
cucuauagcaggugcggau

SEQ ID NO: 2511290 - RNA, 19 nt, Homo sapiens
  misc_RNA (1)...(19): siRNA sense strand
cuccaaaauacgaguaauu

SEQ ID NO: 2511291 - RNA, 19 nt, Homo sapiens
  misc_RNA (1)...(19): siRNA sense strand
aagaagaagaagaaaggaa

SEQ ID NO: 2511292 - RNA, 19 nt, Homo sapiens
  misc_RNA (1)...(19): siRNA sense strand
agacauggcaccagaggau

SEQ ID NO: 2511293 - RNA, 19 nt, Homo sapiens
  misc_RNA (1)...(19): siRNA sense strand
cagucgauaugaagggauu

SEQ ID NO: 2511294 - RNA, 19 nt, Homo sapiens
  misc_RNA (1)...(19): siRNA sense strand
guagagacguagcaggaga

SEQ ID NO: 2511295 - RNA, 19 nt, Homo sapiens
  misc_RNA (1)...(19): siRNA sense strand
agaaagaagaagaagaaag

SEQ ID NO: 2511296 - RNA, 19 nt, Homo sapiens
  misc_RNA (1)...(19): siRNA sense strand
gguugggagauuuggauau

SEQ ID NO: 2511297 - RNA, 19 nt, Homo sapiens
  misc_RNA (1)...(19): siRNA sense strand
ccucauggcagucggucaa

SEQ ID NO: 2511298 - RNA, 19 nt, Homo sapiens
  misc_RNA (1)...(19): siRNA sense strand
ggauaguggcacaaugaca

SEQ ID NO: 2511299 - RNA, 19 nt, Homo sapiens
  misc_RNA (1)...(19): siRNA sense strand
aaaagguguuucaggguaa

SEQ ID NO: 2511300 - RNA, 19 nt, Homo sapiens
  misc_RNA (1)...(19): siRNA sense strand
agacaauuacaguaccaaa

SEQ ID NO: 2511301 - RNA, 19 nt, Homo sapiens
  misc_RNA (1)...(19): siRNA sense strand
aagacagaauacagcaaau

SEQ ID NO: 2511302 - RNA, 19 nt, Homo sapiens
  misc_RNA (1)...(19): siRNA sense strand
aggagacauuucugggaau

SEQ ID NO: 2511303 - RNA, 19 nt, Homo sapiens
  misc_RNA (1)...(19): siRNA sense strand
augaagggauucuggccaa

SEQ ID NO: 2511304 - RNA, 19 nt, Homo sapiens
  misc_RNA (1)...(19): siRNA sense strand
ucuaaguggaagaccuaua

SEQ ID NO: 2511305 - RNA, 19 nt, Homo sapiens
  misc_RNA (1)...(19): siRNA sense strand
gaauaauugcugaugaacu

SEQ ID NO: 2511306 - RNA, 19 nt, Homo sapiens
  misc_RNA (1)...(19): siRNA sense strand
auucugagguugggagauu

SEQ ID NO: 2511307 - RNA, 19 nt, Homo sapiens
  misc_RNA (1)...(19): siRNA sense strand
aaucacacuguuugcgaaa

SEQ ID NO: 2511308 - RNA, 19 nt, Homo sapiens
  misc_RNA (1)...(19): siRNA sense strand
cgaaaagacaauuacagua

SEQ ID NO: 2511309 - RNA, 19 nt, Homo sapiens
  misc_RNA (1)...(19): siRNA sense strand
caggagacauuucugggaa

SEQ ID NO: 2511310 - RNA, 19 nt, Homo sapiens
  misc_RNA (1)...(19): siRNA sense strand
caucaugggcuucgggcga

SEQ ID NO: 2511311 - RNA, 19 nt, Homo sapiens
  misc_RNA (1)...(19): siRNA sense strand
uaugauaaugagaaggaga

SEQ ID NO: 2511312 - RNA, 19 nt, Homo sapiens
  misc_RNA (1)...(19): siRNA sense strand
ucagugugcuucagcgcaa

SEQ ID NO: 2511313 - RNA, 19 nt, Homo sapiens
  misc_RNA (1)...(19): siRNA sense strand
agggaucagucgauaugaa

SEQ ID NO: 2511314 - RNA, 19 nt, Homo sapiens
  misc_RNA (1)...(19): siRNA sense strand
cagcuaugauaaugagaag

SEQ ID NO: 2511315 - RNA, 19 nt, Homo sapiens
  misc_RNA (1)...(19): siRNA sense strand
augagaaggagaugacaca

SEQ ID NO: 2511316 - RNA, 19 nt, Homo sapiens
  misc_RNA (1)...(19): siRNA sense strand
cacaaugacaucuaagaau

SEQ ID NO: 2511317 - RNA, 19 nt, Homo sapiens
  misc_RNA (1)...(19): siRNA sense strand
ccuauaaaggaauugugaa

SEQ ID NO: 2511318 - RNA, 19 nt, Homo sapiens
  misc_RNA (1)...(19): siRNA sense strand
caaagggaucagucgauau

SEQ ID NO: 2511319 - RNA, 19 nt, Homo sapiens
  misc_RNA (1)...(19): siRNA sense strand
ggaagaccuauaaaggaau

SEQ ID NO: 2511320 - RNA, 19 nt, Homo sapiens
  misc_RNA (1)...(19): siRNA sense strand
ugguagauggauauagaga

SEQ ID NO: 2511321 - RNA, 19 nt, Homo sapiens
  misc_RNA (1)...(19): siRNA sense strand
cagcagaggcucagaaaac

SEQ ID NO: 2511322 - RNA, 19 nt, Homo sapiens
  misc_RNA (1)...(19): siRNA sense strand
ccaaaggggaaaagacuga

SEQ ID NO: 2511323 - RNA, 19 nt, Homo sapiens
  misc_RNA (1)...(19): siRNA sense strand
ggagauuuggauaucgaau

SEQ ID NO: 2511324 - RNA, 19 nt, Homo sapiens
  misc_RNA (1)...(19): siRNA sense strand
ugaagacagaauacagcaa

SEQ ID NO: 2511325 - RNA, 19 nt, Homo sapiens
  misc_RNA (1)...(19): siRNA sense strand
gcgcaaagggaucagucga

SEQ ID NO: 2511326 - RNA, 19 nt, Homo sapiens
  misc_RNA (1)...(19): siRNA sense strand
auucuaaguggaagaccua

SEQ ID NO: 2511327 - RNA, 19 nt, Homo sapiens
  misc_RNA (1)...(19): siRNA sense strand
aagugauauggcagguuaa

SEQ ID NO: 2511328 - RNA, 19 nt, Homo sapiens
  misc_RNA (1)...(19): siRNA sense strand
gguagauggauauagagau

SEQ ID NO: 2511329 - RNA, 19 nt, Homo sapiens
  misc_RNA (1)...(19): siRNA sense strand
augauaaugagaaggagau

SEQ ID NO: 2511330 - RNA, 19 nt, Homo sapiens
  misc_RNA (1)...(19): siRNA sense strand
uuacaguaccaaaggggaa

SEQ ID NO: 2511331 - RNA, 19 nt, Homo sapiens
  misc_RNA (1)...(19): siRNA sense strand
auucauugguguggcgcaa

SEQ ID NO: 2511332 - RNA, 19 nt, Homo sapiens
  misc_RNA (1)...(19): siRNA sense strand
uggcgcaagacaagucaaa

SEQ ID NO: 2511333 - RNA, 19 nt, Homo sapiens
  misc_RNA (1)...(19): siRNA sense strand
gagacaaucacaaggccca

SEQ ID NO: 2511334 - RNA, 19 nt, Homo sapiens
  misc_RNA (1)...(19): siRNA sense strand
agaagaagaagaaaggaag

SEQ ID NO: 2511335 - RNA, 19 nt, Homo sapiens
  misc_RNA (1)...(19): siRNA sense strand
aggaaguccguauggauca

SEQ ID NO: 2511336 - RNA, 19 nt, Homo sapiens
  misc_RNA (1)...(19): siRNA sense strand
uguuggaagcagauuaaau

SEQ ID NO: 2511337 - RNA, 19 nt, Homo sapiens
  misc_RNA (1)...(19): siRNA sense strand
aggagagaaaggagagaaa

SEQ ID NO: 2511338 - RNA, 19 nt, Homo sapiens
  misc_RNA (1)...(19): siRNA sense strand
gggauaugguguuggcaca

SEQ ID NO: 2511339 - RNA, 19 nt, Homo sapiens
  misc_RNA (1)...(19): siRNA sense strand
ccacaggaccaaugggcau

SEQ ID NO: 2511340 - RNA, 19 nt, Homo sapiens
  misc_RNA (1)...(19): siRNA sense strand
agaaaggagagaaaggaga

SEQ ID NO: 2511341 - RNA, 19 nt, Homo sapiens
  misc_RNA (1)...(19): siRNA sense strand
agcugcagguggagagcaa

SEQ ID NO: 2511342 - RNA, 19 nt, Homo sapiens
  misc_RNA (1)...(19): siRNA sense strand
aggagagaaaggagacaga

SEQ ID NO: 2511343 - RNA, 19 nt, Homo sapiens
  misc_RNA (1)...(19): siRNA sense strand
ugguguuggcacagggcua

SEQ ID NO: 2511344 - RNA, 19 nt, Homo sapiens
  misc_RNA (1)...(19): siRNA sense strand
aggcccaaaaggagagaaa

SEQ ID NO: 2511345 - RNA, 19 nt, Homo sapiens
  misc_RNA (1)...(19): siRNA sense strand
ccaagggcgaugaugggaa

SEQ ID NO: 2511346 - RNA, 19 nt, Homo sapiens
  misc_RNA (1)...(19): siRNA sense strand
caaaaggagagaaaggaga

SEQ ID NO: 2511347 - RNA, 19 nt, Homo sapiens
  misc_RNA (1)...(19): siRNA sense strand
aaugagagcuuccgggacu

SEQ ID NO: 2511348 - RNA, 19 nt, Homo sapiens
  misc_RNA (1)...(19): siRNA sense strand
guugagagacagaugggaa

SEQ ID NO: 2511349 - RNA, 19 nt, Homo sapiens
  misc_RNA (1)...(19): siRNA sense strand
uugagagacagaugggaaa

SEQ ID NO: 2511350 - RNA, 19 nt, Homo sapiens
  misc_RNA (1)...(19): siRNA sense strand
ggaaaauagccgugagaag

SEQ ID NO: 2511351 - RNA, 19 nt, Homo sapiens
  misc_RNA (1)...(19): siRNA sense strand
ggagaagcauccucagcca

SEQ ID NO: 2511352 - RNA, 19 nt, Homo sapiens
  misc_RNA (1)...(19): siRNA sense strand
ccacaauaccugacagcug

SEQ ID NO: 2511353 - RNA, 19 nt, Homo sapiens
  misc_RNA (1)...(19): siRNA sense strand
aggaccaagaggaaagaaa

SEQ ID NO: 2511354 - RNA, 19 nt, Homo sapiens
  misc_RNA (1)...(19): siRNA sense strand
ggaaagaaacagaagcuuc

SEQ ID NO: 2511355 - RNA, 19 nt, Homo sapiens
  misc_RNA (1)...(19): siRNA sense strand
ugauauaggaccaagagga

SEQ ID NO: 2511356 - RNA, 19 nt, Homo sapiens
  misc_RNA (1)...(19): siRNA sense strand
cugguggauuuuagagaaa

SEQ ID NO: 2511357 - RNA, 19 nt, Homo sapiens
  misc_RNA (1)...(19): siRNA sense strand
gcuucuucuuccuggacua

SEQ ID NO: 2511358 - RNA, 19 nt, Homo sapiens
  misc_RNA (1)...(19): siRNA sense strand
cugcauuccuccugagcca

SEQ ID NO: 2511359 - RNA, 19 nt, Homo sapiens
  misc_RNA (1)...(19): siRNA sense strand
aggcuguggcacuggacua

SEQ ID NO: 2511360 - RNA, 19 nt, Homo sapiens
  misc_RNA (1)...(19): siRNA sense strand
cguacaucuaugcgggcua

SEQ ID NO: 2511361 - RNA, 19 nt, Homo sapiens
  misc_RNA (1)...(19): siRNA sense strand
gauaaaugugggaggaaaa

SEQ ID NO: 2511362 - RNA, 19 nt, Homo sapiens
  misc_RNA (1)...(19): siRNA sense strand
uugcaaaguugaaaggaga

SEQ ID NO: 2511363 - RNA, 19 nt, Homo sapiens
  misc_RNA (1)...(19): siRNA sense strand
gagaagauuacgaagaaaa

SEQ ID NO: 2511364 - RNA, 19 nt, Homo sapiens
  misc_RNA (1)...(19): siRNA sense strand
cauuguugauaguggauau

SEQ ID NO: 2511365 - RNA, 19 nt, Homo sapiens
  misc_RNA (1)...(19): siRNA sense strand
guugaaaggagaagaaaau

SEQ ID NO: 2511366 - RNA, 19 nt, Homo sapiens
  misc_RNA (1)...(19): siRNA sense strand
ggugguaacaagagaagau

SEQ ID NO: 2511367 - RNA, 19 nt, Homo sapiens
  misc_RNA (1)...(19): siRNA sense strand
ggagaagaaaauacaguaa

SEQ ID NO: 2511368 - RNA, 19 nt, Homo sapiens
  misc_RNA (1)...(19): siRNA sense strand
cggauaaaugugggaggaa

SEQ ID NO: 2511369 - RNA, 19 nt, Homo sapiens
  misc_RNA (1)...(19): siRNA sense strand
gagauuugcuguuccggaa

SEQ ID NO: 2511370 - RNA, 19 nt, Homo sapiens
  misc_RNA (1)...(19): siRNA sense strand
gcgucugugaagagaaauu

SEQ ID NO: 2511371 - RNA, 19 nt, Homo sapiens
  misc_RNA (1)...(19): siRNA sense strand
agagaagauuacgaagaaa

SEQ ID NO: 2511372 - RNA, 19 nt, Homo sapiens
  misc_RNA (1)...(19): siRNA sense strand
aagaaauguaucagguuga

SEQ ID NO: 2511373 - RNA, 19 nt, Homo sapiens
  misc_RNA (1)...(19): siRNA sense strand
aguugaaaggagaagaaaa

SEQ ID NO: 2511374 - RNA, 19 nt, Homo sapiens
  misc_RNA (1)...(19): siRNA sense strand
ugguaacaagagaagauua

SEQ ID NO: 2511375 - RNA, 19 nt, Homo sapiens
  misc_RNA (1)...(19): siRNA sense strand
gagacauggauauugcaaa

SEQ ID NO: 2511376 - RNA, 19 nt, Homo sapiens
  misc_RNA (1)...(19): siRNA sense strand
caugaaaaugugucgguua

SEQ ID NO: 2511377 - RNA, 19 nt, Homo sapiens
  misc_RNA (1)...(19): siRNA sense strand
auacaaaucuggggaacaa

SEQ ID NO: 2511378 - RNA, 19 nt, Homo sapiens
  misc_RNA (1)...(19): siRNA sense strand
ggaaaauugauaucagaga

SEQ ID NO: 2511379 - RNA, 19 nt, Homo sapiens
  misc_RNA (1)...(19): siRNA sense strand
caaaagggcuacuugguga

SEQ ID NO: 2511380 - RNA, 19 nt, Homo sapiens
  misc_RNA (1)...(19): siRNA sense strand
cagagacaaguuugggauu

SEQ ID NO: 2511381 - RNA, 19 nt, Homo sapiens
  misc_RNA (1)...(19): siRNA sense strand
augaaaaugugucgguuau

SEQ ID NO: 2511382 - RNA, 19 nt, Homo sapiens
  misc_RNA (1)...(19): siRNA sense strand
ucucagugcacauagguau

SEQ ID NO: 2511383 - RNA, 19 nt, Homo sapiens
  misc_RNA (1)...(19): siRNA sense strand
gcuacauguuauggaugaa

SEQ ID NO: 2511384 - RNA, 19 nt, Homo sapiens
  misc_RNA (1)...(19): siRNA sense strand
ucguuuggccaaugagaga

SEQ ID NO: 2511385 - RNA, 19 nt, Homo sapiens
  misc_RNA (1)...(19): siRNA sense strand
uugaagauauggugguaac

SEQ ID NO: 2511386 - RNA, 19 nt, Homo sapiens
  misc_RNA (1)...(19): siRNA sense strand
agauauggugguaacaaga

SEQ ID NO: 2511387 - RNA, 19 nt, Homo sapiens
  misc_RNA (1)...(19): siRNA sense strand
agggcuaugaugaggaaua

SEQ ID NO: 2511388 - RNA, 19 nt, Homo sapiens
  misc_RNA (1)...(19): siRNA sense strand
gugugaagguagaccguga

SEQ ID NO: 2511389 - RNA, 19 nt, Homo sapiens
  misc_RNA (1)...(19): siRNA sense strand
uggaauggcuugauggugu

SEQ ID NO: 2511390 - RNA, 19 nt, Homo sapiens
  misc_RNA (1)...(19): siRNA sense strand
gcuugauggugucaggcua

SEQ ID NO: 2511391 - RNA, 19 nt, Homo sapiens
  misc_RNA (1)...(19): siRNA sense strand
cacaaggacuggauggaca

SEQ ID NO: 2511392 - RNA, 19 nt, Homo sapiens
  misc_RNA (1)...(19): siRNA sense strand
ucaaagagguucagcagcu

SEQ ID NO: 2511393 - RNA, 19 nt, Homo sapiens
  misc_RNA (1)...(19): siRNA sense strand
agaagaugcucuaugacca

SEQ ID NO: 2511394 - RNA, 19 nt, Homo sapiens
  misc_RNA (1)...(19): siRNA sense strand
cagcagacccucaagcaga

SEQ ID NO: 2511395 - RNA, 19 nt, Homo sapiens
  misc_RNA (1)...(19): siRNA sense strand
guggagaccgucaggccaa

SEQ ID NO: 2511396 - RNA, 19 nt, Homo sapiens
  misc_RNA (1)...(19): siRNA sense strand
acaaggacuggauggacaa

SEQ ID NO: 2511397 - RNA, 19 nt, Homo sapiens
  misc_RNA (1)...(19): siRNA sense strand
cauaugugugugagaauca

SEQ ID NO: 2511398 - RNA, 19 nt, Homo sapiens
  misc_RNA (1)...(19): siRNA sense strand
caguggaaacagaacaaga

SEQ ID NO: 2511399 - RNA, 19 nt, Homo sapiens
  misc_RNA (1)...(19): siRNA sense strand
gcugagaauacgagaacag

SEQ ID NO: 2511400 - RNA, 19 nt, Homo sapiens
  misc_RNA (1)...(19): siRNA sense strand
ggacggucaaagagguuca

SEQ ID NO: 2511401 - RNA, 19 nt, Homo sapiens
  misc_RNA (1)...(19): siRNA sense strand
cagagaucagcguggguga

SEQ ID NO: 2511402 - RNA, 19 nt, Homo sapiens
  misc_RNA (1)...(19): siRNA sense strand
ggacaagugugugugccua

SEQ ID NO: 2511403 - RNA, 19 nt, Homo sapiens
  misc_RNA (1)...(19): siRNA sense strand
uggaaacagaacaagaaca

SEQ ID NO: 2511404 - RNA, 19 nt, Homo sapiens
  misc_RNA (1)...(19): siRNA sense strand
cccugaaaaugauggcuaa

SEQ ID NO: 2511405 - RNA, 19 nt, Homo sapiens
  misc_RNA (1)...(19): siRNA sense strand
ccaaguuccugaagcggca

SEQ ID NO: 2511406 - RNA, 19 nt, Homo sapiens
  misc_RNA (1)...(19): siRNA sense strand
ccacaaauccagcaggcaa

SEQ ID NO: 2511407 - RNA, 19 nt, Homo sapiens
  misc_RNA (1)...(19): siRNA sense strand
cugcaaagugugagaagau

SEQ ID NO: 2511408 - RNA, 19 nt, Homo sapiens
  misc_RNA (1)...(19): siRNA sense strand
agucaagccgaaagcgaaa

SEQ ID NO: 2511409 - RNA, 19 nt, Homo sapiens
  misc_RNA (1)...(19): siRNA sense strand
ugauaagcauugaucgcua

SEQ ID NO: 2511410 - RNA, 19 nt, Homo sapiens
  misc_RNA (1)...(19): siRNA sense strand
aucagaaccaggagugaaa

SEQ ID NO: 2511411 - RNA, 19 nt, Homo sapiens
  misc_RNA (1)...(19): siRNA sense strand
cagucaagccgaaagcgaa

SEQ ID NO: 2511412 - RNA, 19 nt, Homo sapiens
  misc_RNA (1)...(19): siRNA sense strand
agacaggcuuuuagaugaa

SEQ ID NO: 2511413 - RNA, 19 nt, Homo sapiens
  misc_RNA (1)...(19): siRNA sense strand
cugcaaagaaauuacacuu

SEQ ID NO: 2511414 - RNA, 19 nt, Homo sapiens
  misc_RNA (1)...(19): siRNA sense strand
cggccaagagagucacaau

SEQ ID NO: 2511415 - RNA, 19 nt, Homo sapiens
  misc_RNA (1)...(19): siRNA sense strand
ucgaauaguccaugaugca

SEQ ID NO: 2511416 - RNA, 19 nt, Homo sapiens
  misc_RNA (1)...(19): siRNA sense strand
cacaaauccagcaggcaau

SEQ ID NO: 2511417 - RNA, 19 nt, Homo sapiens
  misc_RNA (1)...(19): siRNA sense strand
gcuucauauucuaucucaa

SEQ ID NO: 2511418 - RNA, 19 nt, Homo sapiens
  misc_RNA (1)...(19): siRNA sense strand
augagaaugagguaggcaa

SEQ ID NO: 2511419 - RNA, 19 nt, Homo sapiens
  misc_RNA (1)...(19): siRNA sense strand
cagucaacaagcagcacua

SEQ ID NO: 2511420 - RNA, 19 nt, Homo sapiens
  misc_RNA (1)...(19): siRNA sense strand
aggaggucauggagaaguu

SEQ ID NO: 2511421 - RNA, 19 nt, Homo sapiens
  misc_RNA (1)...(19): siRNA sense strand
gguaccaggaccuagacaa

SEQ ID NO: 2511422 - RNA, 19 nt, Homo sapiens
  misc_RNA (1)...(19): siRNA sense strand
ccaccaucucagucaacaa

SEQ ID NO: 2511423 - RNA, 19 nt, Homo sapiens
  misc_RNA (1)...(19): siRNA sense strand
agauguggguggaggaggu

SEQ ID NO: 2511424 - RNA, 19 nt, Homo sapiens
  misc_RNA (1)...(19): siRNA sense strand
gggaaggagccaagagccu

SEQ ID NO: 2511425 - RNA, 19 nt, Homo sapiens
  misc_RNA (1)...(19): siRNA sense strand
gaggauaguucgccagcca

SEQ ID NO: 2511426 - RNA, 19 nt, Homo sapiens
  misc_RNA (1)...(19): siRNA sense strand
cagaauacgcagaacacca

SEQ ID NO: 2511427 - RNA, 19 nt, Homo sapiens
  misc_RNA (1)...(19): siRNA sense strand
uggugaugcuggaagacau

SEQ ID NO: 2511428 - RNA, 19 nt, Homo sapiens
  misc_RNA (1)...(19): siRNA sense strand
ccucaaaggaccaggugcu

SEQ ID NO: 2511429 - RNA, 19 nt, Homo sapiens
  misc_RNA (1)...(19): siRNA sense strand
aguucagcuuggaagaaau

SEQ ID NO: 2511430 - RNA, 19 nt, Homo sapiens
  misc_RNA (1)...(19): siRNA sense strand
uggaggagcuagaugccuu

SEQ ID NO: 2511431 - RNA, 19 nt, Homo sapiens
  misc_RNA (1)...(19): siRNA sense strand
cuucaucaucccagcacaa

SEQ ID NO: 2511432 - RNA, 19 nt, Homo sapiens
  misc_RNA (1)...(19): siRNA sense strand
ccacaauaccccagcacuu

SEQ ID NO: 2511433 - RNA, 19 nt, Homo sapiens
  misc_RNA (1)...(19): siRNA sense strand
uagaagaugucauggcugu

SEQ ID NO: 2511434 - RNA, 19 nt, Homo sapiens
  misc_RNA (1)...(19): siRNA sense strand
ugguggugaugcuggaaga

SEQ ID NO: 2511435 - RNA, 19 nt, Homo sapiens
  misc_RNA (1)...(19): siRNA sense strand
cacaaagagcugagcccau

SEQ ID NO: 2511436 - RNA, 19 nt, Homo sapiens
  misc_RNA (1)...(19): siRNA sense strand
gcuguggaauuucgggaca

SEQ ID NO: 2511437 - RNA, 19 nt, Homo sapiens
  misc_RNA (1)...(19): siRNA sense strand
gagaccaagaccaugggaa

SEQ ID NO: 2511438 - RNA, 19 nt, Homo sapiens
  misc_RNA (1)...(19): siRNA sense strand
agguugaacaagaaggagu

SEQ ID NO: 2511439 - RNA, 19 nt, Homo sapiens
  misc_RNA (1)...(19): siRNA sense strand
aguuugaagaugaggauuu

SEQ ID NO: 2511440 - RNA, 19 nt, Homo sapiens
  misc_RNA (1)...(19): siRNA sense strand
cacagaaccuagaggcaga

SEQ ID NO: 2511441 - RNA, 19 nt, Homo sapiens
  misc_RNA (1)...(19): siRNA sense strand
caaucagagaagagugaca

SEQ ID NO: 2511442 - RNA, 19 nt, Homo sapiens
  misc_RNA (1)...(19): siRNA sense strand
agaagugcucagagagaca

SEQ ID NO: 2511443 - RNA, 19 nt, Homo sapiens
  misc_RNA (1)...(19): siRNA sense strand
cugcaaagcccgaggaagg

SEQ ID NO: 2511444 - RNA, 19 nt, Homo sapiens
  misc_RNA (1)...(19): siRNA sense strand
ccaacauggcggugaugau

SEQ ID NO: 2511445 - RNA, 19 nt, Homo sapiens
  misc_RNA (1)...(19): siRNA sense strand
cagaugaccuggauggacu

SEQ ID NO: 2511446 - RNA, 19 nt, Homo sapiens
  misc_RNA (1)...(19): siRNA sense strand
gggagaagucuggaggaca

SEQ ID NO: 2511447 - RNA, 19 nt, Homo sapiens
  misc_RNA (1)...(19): siRNA sense strand
aggcaucuguggaggagga

SEQ ID NO: 2511448 - RNA, 19 nt, Homo sapiens
  misc_RNA (1)...(19): siRNA sense strand
aggguucaguauuggcuaa

SEQ ID NO: 2511449 - RNA, 19 nt, Homo sapiens
  misc_RNA (1)...(19): siRNA sense strand
guuaaguggcaaagcucau

SEQ ID NO: 2511450 - RNA, 19 nt, Homo sapiens
  misc_RNA (1)...(19): siRNA sense strand
aaggacuagcucuggauua

SEQ ID NO: 2511451 - RNA, 19 nt, Homo sapiens
  misc_RNA (1)...(19): siRNA sense strand
cugcagacacccauaguca

SEQ ID NO: 2511452 - RNA, 19 nt, Homo sapiens
  misc_RNA (1)...(19): siRNA sense strand
agacagagauuguugcuag

SEQ ID NO: 2511453 - RNA, 19 nt, Homo sapiens
  misc_RNA (1)...(19): siRNA sense strand
cagcagagugggagaaguc

SEQ ID NO: 2511454 - RNA, 19 nt, Homo sapiens
  misc_RNA (1)...(19): siRNA sense strand
cuguggaagaggaguuuga

SEQ ID NO: 2511455 - RNA, 19 nt, Homo sapiens
  misc_RNA (1)...(19): siRNA sense strand
gcagcuacgaggaggucaa

SEQ ID NO: 2511456 - RNA, 19 nt, Homo sapiens
  misc_RNA (1)...(19): siRNA sense strand
caguguuucuggaggccaa

SEQ ID NO: 2511457 - RNA, 19 nt, Homo sapiens
  misc_RNA (1)...(19): siRNA sense strand
ccaucgagcgagagugcau

SEQ ID NO: 2511458 - RNA, 19 nt, Homo sapiens
  misc_RNA (1)...(19): siRNA sense strand
ccccaaaguacgaggagau

SEQ ID NO: 2511459 - RNA, 19 nt, Homo sapiens
  misc_RNA (1)...(19): siRNA sense strand
gggcggaucuuuaagcaca

SEQ ID NO: 2511460 - RNA, 19 nt, Homo sapiens
  misc_RNA (1)...(19): siRNA sense strand
augcacgcacugugggaaa

SEQ ID NO: 2511461 - RNA, 19 nt, Homo sapiens
  misc_RNA (1)...(19): siRNA sense strand
ggaagaaacccuaugagug

SEQ ID NO: 2511462 - RNA, 19 nt, Homo sapiens
  misc_RNA (1)...(19): siRNA sense strand
ggggagaagcccuacgaau

SEQ ID NO: 2511463 - RNA, 19 nt, Homo sapiens
  misc_RNA (1)...(19): siRNA sense strand
ugcaaagggacguuggaga

SEQ ID NO: 2511464 - RNA, 19 nt, Homo sapiens
  misc_RNA (1)...(19): siRNA sense strand
gagcugggagagagggcaa

SEQ ID NO: 2511465 - RNA, 19 nt, Homo sapiens
  misc_RNA (1)...(19): siRNA sense strand
cagcaagagaucugggagu

SEQ ID NO: 2511466 - RNA, 19 nt, Homo sapiens
  misc_RNA (1)...(19): siRNA sense strand
ccaagcagcuggugacgca

SEQ ID NO: 2511467 - RNA, 19 nt, Homo sapiens
  misc_RNA (1)...(19): siRNA sense strand
cugaaaagccacaccagaa

SEQ ID NO: 2511468 - RNA, 19 nt, Homo sapiens
  misc_RNA (1)...(19): siRNA sense strand
agagggagcuguacgcaca

SEQ ID NO: 2511469 - RNA, 19 nt, Homo sapiens
  misc_RNA (1)...(19): siRNA sense strand
ccagggacucacugccaaa

SEQ ID NO: 2511470 - RNA, 19 nt, Homo sapiens
  misc_RNA (1)...(19): siRNA sense strand
gggaaagccuucaagcaga

SEQ ID NO: 2511471 - RNA, 19 nt, Homo sapiens
  misc_RNA (1)...(19): siRNA sense strand
cagaaaggacagacgccaa

SEQ ID NO: 2511472 - RNA, 19 nt, Homo sapiens
  misc_RNA (1)...(19): siRNA sense strand
cuucaaaccugcagcgcca

SEQ ID NO: 2511473 - RNA, 19 nt, Homo sapiens
  misc_RNA (1)...(19): siRNA sense strand
cgagaaagagccagggaag

SEQ ID NO: 2511474 - RNA, 19 nt, Homo sapiens
  misc_RNA (1)...(19): siRNA sense strand
gguugaagaccgggagaga

SEQ ID NO: 2511475 - RNA, 19 nt, Homo sapiens
  misc_RNA (1)...(19): siRNA sense strand
gcgagaaagagccagggaa

SEQ ID NO: 2511476 - RNA, 19 nt, Homo sapiens
  misc_RNA (1)...(19): siRNA sense strand
guguggcgacugugggaaa

SEQ ID NO: 2511477 - RNA, 19 nt, Homo sapiens
  misc_RNA (1)...(19): siRNA sense strand
acgaagagguucuacgagu

SEQ ID NO: 2511478 - RNA, 19 nt, Homo sapiens
  misc_RNA (1)...(19): siRNA sense strand
gggagagaccugaguucca

SEQ ID NO: 2511479 - RNA, 19 nt, Homo sapiens
  misc_RNA (1)...(19): siRNA sense strand
acgugaugcuggacaacuu

SEQ ID NO: 2511480 - RNA, 19 nt, Homo sapiens
  misc_RNA (1)...(19): siRNA sense strand
gggcaaggaagucugcaga

SEQ ID NO: 2511481 - RNA, 19 nt, Homo sapiens
  misc_RNA (1)...(19): siRNA sense strand
ccacagaauugucggccau

SEQ ID NO: 2511482 - RNA, 19 nt, Homo sapiens
  misc_RNA (1)...(19): siRNA sense strand
ccauuuauuugcaggccuu

SEQ ID NO: 2511483 - RNA, 19 nt, Homo sapiens
  misc_RNA (1)...(19): siRNA sense strand
ucagcuaagugcagaggca

SEQ ID NO: 2511484 - RNA, 19 nt, Homo sapiens
  misc_RNA (1)...(19): siRNA sense strand
agcuaagugcagaggcauu

SEQ ID NO: 2511485 - RNA, 19 nt, Homo sapiens
  misc_RNA (1)...(19): siRNA sense strand
cuauuuauuugcaggccuu

SEQ ID NO: 2511486 - RNA, 19 nt, Homo sapiens
  misc_RNA (1)...(19): siRNA sense strand
gcuuagggaaacagaguca

SEQ ID NO: 2511487 - RNA, 19 nt, Homo sapiens
  misc_RNA (1)...(19): siRNA sense strand
gguuggaauucuugggucu

SEQ ID NO: 2511488 - RNA, 19 nt, Homo sapiens
  misc_RNA (1)...(19): siRNA sense strand
augaggaggcuauaggaau

SEQ ID NO: 2511489 - RNA, 19 nt, Homo sapiens
  misc_RNA (1)...(19): siRNA sense strand
cggcaaaagcgcagucaga

SEQ ID NO: 2511490 - RNA, 19 nt, Homo sapiens
  misc_RNA (1)...(19): siRNA sense strand
gcaaaagcgcagucagaca

SEQ ID NO: 2511491 - RNA, 19 nt, Homo sapiens
  misc_RNA (1)...(19): siRNA sense strand
ggauuacaggcgugagcca

SEQ ID NO: 2511492 - RNA, 19 nt, Homo sapiens
  misc_RNA (1)...(19): siRNA sense strand
aggcaaaagcggaagaaaa

SEQ ID NO: 2511493 - RNA, 19 nt, Homo sapiens
  misc_RNA (1)...(19): siRNA sense strand
augauugaguccaggcaaa

SEQ ID NO: 2511494 - RNA, 19 nt, Homo sapiens
  misc_RNA (1)...(19): siRNA sense strand
cuucagugguguagagucu

SEQ ID NO: 2511495 - RNA, 19 nt, Homo sapiens
  misc_RNA (1)...(19): siRNA sense strand
ccauuacaaaggaggaaau

SEQ ID NO: 2511496 - RNA, 19 nt, Homo sapiens
  misc_RNA (1)...(19): siRNA sense strand
cggaacagaaggaguggau

SEQ ID NO: 2511497 - RNA, 19 nt, Homo sapiens
  misc_RNA (1)...(19): siRNA sense strand
aaugaagaagccagugaaa

SEQ ID NO: 2511498 - RNA, 19 nt, Homo sapiens
  misc_RNA (1)...(19): siRNA sense strand
uggacaaggcaaugguuga

SEQ ID NO: 2511499 - RNA, 19 nt, Homo sapiens
  misc_RNA (1)...(19): siRNA sense strand
aguuuaaacaacagcugaa

SEQ ID NO: 2511500 - RNA, 19 nt, Homo sapiens
  misc_RNA (1)...(19): siRNA sense strand
aaggaguggaugaagauau

SEQ ID NO: 2511501 - RNA, 19 nt, Homo sapiens
  misc_RNA (1)...(19): siRNA sense strand
acugaagugaguagugaau

SEQ ID NO: 2511502 - RNA, 19 nt, Homo sapiens
  misc_RNA (1)...(19): siRNA sense strand
acagagaagcugacggaac

SEQ ID NO: 2511503 - RNA, 19 nt, Homo sapiens
  misc_RNA (1)...(19): siRNA sense strand
gaguggaugaagauauaau

SEQ ID NO: 2511504 - RNA, 19 nt, Homo sapiens
  misc_RNA (1)...(19): siRNA sense strand
aagauauaauugugaccca

SEQ ID NO: 2511505 - RNA, 19 nt, Homo sapiens
  misc_RNA (1)...(19): siRNA sense strand
acaacagcugaaagaacua

SEQ ID NO: 2511506 - RNA, 19 nt, Homo sapiens
  misc_RNA (1)...(19): siRNA sense strand
ugacagagaagcugacgga

SEQ ID NO: 2511507 - RNA, 19 nt, Homo sapiens
  misc_RNA (1)...(19): siRNA sense strand
agugaauauaguauggaca

SEQ ID NO: 2511508 - RNA, 19 nt, Homo sapiens
  misc_RNA (1)...(19): siRNA sense strand
uagaagggcaauugagaac

SEQ ID NO: 2511509 - RNA, 19 nt, Homo sapiens
  misc_RNA (1)...(19): siRNA sense strand
agggugagauggagggaga

SEQ ID NO: 2511510 - RNA, 19 nt, Homo sapiens
  misc_RNA (1)...(19): siRNA sense strand
aggacagcuccaagagauu

SEQ ID NO: 2511511 - RNA, 19 nt, Homo sapiens
  misc_RNA (1)...(19): siRNA sense strand
ucaucaaauaaccaggaaa

SEQ ID NO: 2511512 - RNA, 19 nt, Homo sapiens
  misc_RNA (1)...(19): siRNA sense strand
acagagaagagacuggaau

SEQ ID NO: 2511513 - RNA, 19 nt, Homo sapiens
  misc_RNA (1)...(19): siRNA sense strand
cccuaagugucaagaagca

SEQ ID NO: 2511514 - RNA, 19 nt, Homo sapiens
  misc_RNA (1)...(19): siRNA sense strand
ggguauauuucaugagaca

SEQ ID NO: 2511515 - RNA, 19 nt, Homo sapiens
  misc_RNA (1)...(19): siRNA sense strand
agaagaagaaacagggaau

SEQ ID NO: 2511516 - RNA, 19 nt, Homo sapiens
  misc_RNA (1)...(19): siRNA sense strand
ggaaagugguccucggcau

SEQ ID NO: 2511517 - RNA, 19 nt, Homo sapiens
  misc_RNA (1)...(19): siRNA sense strand
gggaagaccaccuuggcaa

SEQ ID NO: 2511518 - RNA, 19 nt, Homo sapiens
  misc_RNA (1)...(19): siRNA sense strand
agaagaaaauacagagaga

SEQ ID NO: 2511519 - RNA, 19 nt, Homo sapiens
  misc_RNA (1)...(19): siRNA sense strand
gagagaacaugaaggcuga

SEQ ID NO: 2511520 - RNA, 19 nt, Homo sapiens
  misc_RNA (1)...(19): siRNA sense strand
agaccugguuugugagaga

SEQ ID NO: 2511521 - RNA, 19 nt, Homo sapiens
  misc_RNA (1)...(19): siRNA sense strand
ccaggguaauggaggaauu

SEQ ID NO: 2511522 - RNA, 19 nt, Homo sapiens
  misc_RNA (1)...(19): siRNA sense strand
uugaaagggacuuggaaau

SEQ ID NO: 2511523 - RNA, 19 nt, Homo sapiens
  misc_RNA (1)...(19): siRNA sense strand
gcucuaacaagcugggaau

SEQ ID NO: 2511524 - RNA, 19 nt, Homo sapiens
  misc_RNA (1)...(19): siRNA sense strand
cuugaaagggacuuggaaa

SEQ ID NO: 2511525 - RNA, 19 nt, Homo sapiens
  misc_RNA (1)...(19): siRNA sense strand
ggggagaagaguuagguaa

SEQ ID NO: 2511526 - RNA, 19 nt, Homo sapiens
  misc_RNA (1)...(19): siRNA sense strand
gcgaaaugcaaucugacaa

SEQ ID NO: 2511527 - RNA, 19 nt, Homo sapiens
  misc_RNA (1)...(19): siRNA sense strand
auaagguacaugaaggaaa

SEQ ID NO: 2511528 - RNA, 19 nt, Homo sapiens
  misc_RNA (1)...(19): siRNA sense strand
ccacaagagaugaagaugu

SEQ ID NO: 2511529 - RNA, 19 nt, Homo sapiens
  misc_RNA (1)...(19): siRNA sense strand
cgagcuagaagaagaaaca

SEQ ID NO: 2511530 - RNA, 19 nt, Homo sapiens
  misc_RNA (1)...(19): siRNA sense strand
gaaaauacagagagaacau

SEQ ID NO: 2511531 - RNA, 19 nt, Homo sapiens
  misc_RNA (1)...(19): siRNA sense strand
gcauaaagcuauugugugc

SEQ ID NO: 2511532 - RNA, 19 nt, Homo sapiens
  misc_RNA (1)...(19): siRNA sense strand
agaagcagcagcagggaau

SEQ ID NO: 2511533 - RNA, 19 nt, Homo sapiens
  misc_RNA (1)...(19): siRNA sense strand
cagccgaaggugagguauu

SEQ ID NO: 2511534 - RNA, 19 nt, Homo sapiens
  misc_RNA (1)...(19): siRNA sense strand
agaugauggcauaaagcua

SEQ ID NO: 2511535 - RNA, 19 nt, Homo sapiens
  misc_RNA (1)...(19): siRNA sense strand
uagcaagagaacuggaaga

SEQ ID NO: 2511536 - RNA, 19 nt, Homo sapiens
  misc_RNA (1)...(19): siRNA sense strand
ggccuaaagaccacguaua

SEQ ID NO: 2511537 - RNA, 19 nt, Homo sapiens
  misc_RNA (1)...(19): siRNA sense strand
gcaguaagagccuggucaa

SEQ ID NO: 2511538 - RNA, 19 nt, Homo sapiens
  misc_RNA (1)...(19): siRNA sense strand
aaguuagagccgagaugaa

SEQ ID NO: 2511539 - RNA, 19 nt, Homo sapiens
  misc_RNA (1)...(19): siRNA sense strand
agaagaacuagacgagcua

SEQ ID NO: 2511540 - RNA, 19 nt, Homo sapiens
  misc_RNA (1)...(19): siRNA sense strand
ucuuugaaguugaccuuaa

SEQ ID NO: 2511541 - RNA, 19 nt, Homo sapiens
  misc_RNA (1)...(19): siRNA sense strand
cagaaacugacgugcaaau

SEQ ID NO: 2511542 - RNA, 19 nt, Homo sapiens
  misc_RNA (1)...(19): siRNA sense strand
cuuaaagcuuugagacacu

SEQ ID NO: 2511543 - RNA, 19 nt, Homo sapiens
  misc_RNA (1)...(19): siRNA sense strand
aggacgaacaugaggaacu

SEQ ID NO: 2511544 - RNA, 19 nt, Homo sapiens
  misc_RNA (1)...(19): siRNA sense strand
agacgagcuagaagaagaa

SEQ ID NO: 2511545 - RNA, 19 nt, Homo sapiens
  misc_RNA (1)...(19): siRNA sense strand
uauugauggcuuugaggaa

SEQ ID NO: 2511546 - RNA, 19 nt, Homo sapiens
  misc_RNA (1)...(19): siRNA sense strand
uggaaauucuggagacaag

SEQ ID NO: 2511547 - RNA, 19 nt, Homo sapiens
  misc_RNA (1)...(19): siRNA sense strand
ccgagaugaaagagaaugu

SEQ ID NO: 2511548 - RNA, 19 nt, Homo sapiens
  misc_RNA (1)...(19): siRNA sense strand
uagaagaagaaacagggaa

SEQ ID NO: 2511549 - RNA, 19 nt, Homo sapiens
  misc_RNA (1)...(19): siRNA sense strand
uugauggcuuugaggaaau

SEQ ID NO: 2511550 - RNA, 19 nt, Homo sapiens
  misc_RNA (1)...(19): siRNA sense strand
gggagaagaguuagguaag

SEQ ID NO: 2511551 - RNA, 19 nt, Homo sapiens
  misc_RNA (1)...(19): siRNA sense strand
aagaagaacuagacgagcu

SEQ ID NO: 2511552 - RNA, 19 nt, Homo sapiens
  misc_RNA (1)...(19): siRNA sense strand
acagcuuguugaagaaaga

SEQ ID NO: 2511553 - RNA, 19 nt, Homo sapiens
  misc_RNA (1)...(19): siRNA sense strand
agguagauuuggcagauga

SEQ ID NO: 2511554 - RNA, 19 nt, Homo sapiens
  misc_RNA (1)...(19): siRNA sense strand
augccaagauccaaaccaa

SEQ ID NO: 2511555 - RNA, 19 nt, Homo sapiens
  misc_RNA (1)...(19): siRNA sense strand
agauccaaaccaagaagaa

SEQ ID NO: 2511556 - RNA, 19 nt, Homo sapiens
  misc_RNA (1)...(19): siRNA sense strand
augccaagauccaaaccaa

SEQ ID NO: 2511557 - RNA, 19 nt, Homo sapiens
  misc_RNA (1)...(19): siRNA sense strand
agauccaaaccaagaagaa

SEQ ID NO: 2511558 - RNA, 19 nt, Homo sapiens
  misc_RNA (1)...(19): siRNA sense strand
cugaagcagccgaagguga

SEQ ID NO: 2511559 - RNA, 19 nt, Homo sapiens
  misc_RNA (1)...(19): siRNA sense strand
aagaagaaccagagaugcu

SEQ ID NO: 2511560 - RNA, 19 nt, Homo sapiens
  misc_RNA (1)...(19): siRNA sense strand
aaauaagguacaugaagga

SEQ ID NO: 2511561 - RNA, 19 nt, Homo sapiens
  misc_RNA (1)...(19): siRNA sense strand
ugagaaucugcaugagcua

SEQ ID NO: 2511562 - RNA, 19 nt, Homo sapiens
  misc_RNA (1)...(19): siRNA sense strand
agaccugaguaacagcaaa

SEQ ID NO: 2511563 - RNA, 19 nt, Homo sapiens
  misc_RNA (1)...(19): siRNA sense strand
cgauugugccugggauuua

SEQ ID NO: 2511564 - RNA, 19 nt, Homo sapiens
  misc_RNA (1)...(19): siRNA sense strand
cuacuggagacaugggaca

SEQ ID NO: 2511565 - RNA, 19 nt, Homo sapiens
  misc_RNA (1)...(19): siRNA sense strand
ggaagaccaccuuggcaau

SEQ ID NO: 2511566 - RNA, 19 nt, Homo sapiens
  misc_RNA (1)...(19): siRNA sense strand
ccaccagucuguaugccua

SEQ ID NO: 2511567 - RNA, 19 nt, Homo sapiens
  misc_RNA (1)...(19): siRNA sense strand
gggcuguggucuaugaacu

SEQ ID NO: 2511568 - RNA, 19 nt, Homo sapiens
  misc_RNA (1)...(19): siRNA sense strand
gagcaagaacagccugaga

SEQ ID NO: 2511569 - RNA, 19 nt, Homo sapiens
  misc_RNA (1)...(19): siRNA sense strand
uggaugaacacuucccaaa

SEQ ID NO: 2511570 - RNA, 19 nt, Homo sapiens
  misc_RNA (1)...(19): siRNA sense strand
cagagaugcuagaggaagc

SEQ ID NO: 2511571 - RNA, 19 nt, Homo sapiens
  misc_RNA (1)...(19): siRNA sense strand
aagcagaccacagaagaaa

SEQ ID NO: 2511572 - RNA, 19 nt, Homo sapiens
  misc_RNA (1)...(19): siRNA sense strand
aaaauaucucccaggguaa

SEQ ID NO: 2511573 - RNA, 19 nt, Homo sapiens
  misc_RNA (1)...(19): siRNA sense strand
caaagaagauguugggucg

SEQ ID NO: 2511574 - RNA, 19 nt, Homo sapiens
  misc_RNA (1)...(19): siRNA sense strand
agaaaaugaucuucaggau

SEQ ID NO: 2511575 - RNA, 19 nt, Homo sapiens
  misc_RNA (1)...(19): siRNA sense strand
cggaacaacaggaggaucu

SEQ ID NO: 2511576 - RNA, 19 nt, Homo sapiens
  misc_RNA (1)...(19): siRNA sense strand
augaauaugcagacgucaa

SEQ ID NO: 2511577 - RNA, 19 nt, Homo sapiens
  misc_RNA (1)...(19): siRNA sense strand
gggacgacaagaagagcau

SEQ ID NO: 2511578 - RNA, 19 nt, Homo sapiens
  misc_RNA (1)...(19): siRNA sense strand
ccgcaguaggcauucgaua

SEQ ID NO: 2511579 - RNA, 19 nt, Homo sapiens
  misc_RNA (1)...(19): siRNA sense strand
ugguagggaucguguacau

SEQ ID NO: 2511580 - RNA, 19 nt, Homo sapiens
  misc_RNA (1)...(19): siRNA sense strand
caacauggugguagggauc

SEQ ID NO: 2511581 - RNA, 19 nt, Homo sapiens
  misc_RNA (1)...(19): siRNA sense strand
gcauauuauacgauagucu

SEQ ID NO: 2511582 - RNA, 19 nt, Homo sapiens
  misc_RNA (1)...(19): siRNA sense strand
ucaacauggugguagggau

SEQ ID NO: 2511583 - RNA, 19 nt, Homo sapiens
  misc_RNA (1)...(19): siRNA sense strand
uguccaagugggaggagau

SEQ ID NO: 2511584 - RNA, 19 nt, Homo sapiens
  misc_RNA (1)...(19): siRNA sense strand
gggccaucauccaggucuu

SEQ ID NO: 2511585 - RNA, 19 nt, Homo sapiens
  misc_RNA (1)...(19): siRNA sense strand
ugacaugccaagaaagcga

SEQ ID NO: 2511586 - RNA, 19 nt, Homo sapiens
  misc_RNA (1)...(19): siRNA sense strand
acuccagggacgacaagaa

SEQ ID NO: 2511587 - RNA, 19 nt, Homo sapiens
  misc_RNA (1)...(19): siRNA sense strand
acgauagucuugaccgaga

SEQ ID NO: 2511588 - RNA, 19 nt, Homo sapiens
  misc_RNA (1)...(19): siRNA sense strand
gguuuaacgucaaggaagg

SEQ ID NO: 2511589 - RNA, 19 nt, Homo sapiens
  misc_RNA (1)...(19): siRNA sense strand
agaaagaagaggaggacga

SEQ ID NO: 2511590 - RNA, 19 nt, Homo sapiens
  misc_RNA (1)...(19): siRNA sense strand
gagaagaguuugacgagga

SEQ ID NO: 2511591 - RNA, 19 nt, Homo sapiens
  misc_RNA (1)...(19): siRNA sense strand
acaugaaggaauuggagaa

SEQ ID NO: 2511592 - RNA, 19 nt, Homo sapiens
  misc_RNA (1)...(19): siRNA sense strand
agaagaaagaagaggagga

SEQ ID NO: 2511593 - RNA, 19 nt, Homo sapiens
  misc_RNA (1)...(19): siRNA sense strand
ggaaaucaguggacccgaa

SEQ ID NO: 2511594 - RNA, 19 nt, Homo sapiens
  misc_RNA (1)...(19): siRNA sense strand
ccaagaagaaagaagagga

SEQ ID NO: 2511595 - RNA, 19 nt, Homo sapiens
  misc_RNA (1)...(19): siRNA sense strand
cggaauuagaagaacuaga

SEQ ID NO: 2511596 - RNA, 19 nt, Homo sapiens
  misc_RNA (1)...(19): siRNA sense strand
uagaagaacuagaacagga

SEQ ID NO: 2511597 - RNA, 19 nt, Homo sapiens
  misc_RNA (1)...(19): siRNA sense strand
aggaacuagacaagaauuu

SEQ ID NO: 2511598 - RNA, 19 nt, Homo sapiens
  misc_RNA (1)...(19): siRNA sense strand
ccgccaagaagaaagaaga

SEQ ID NO: 2511599 - RNA, 19 nt, Homo sapiens
  misc_RNA (1)...(19): siRNA sense strand
aagaagaggaggacgacga

SEQ ID NO: 2511600 - RNA, 19 nt, Homo sapiens
  misc_RNA (1)...(19): siRNA sense strand
caucaaaacccgccaagaa

SEQ ID NO: 2511601 - RNA, 19 nt, Homo sapiens
  misc_RNA (1)...(19): siRNA sense strand
agaagaaaaucgagcagga

SEQ ID NO: 2511602 - RNA, 19 nt, Homo sapiens
  misc_RNA (1)...(19): siRNA sense strand
agaagagguaugagaagca

SEQ ID NO: 2511603 - RNA, 19 nt, Homo sapiens
  misc_RNA (1)...(19): siRNA sense strand
agagauguuaagcaagaaa

SEQ ID NO: 2511604 - RNA, 19 nt, Homo sapiens
  misc_RNA (1)...(19): siRNA sense strand
ccaucgaguuccagcggga

SEQ ID NO: 2511605 - RNA, 19 nt, Homo sapiens
  misc_RNA (1)...(19): siRNA sense strand
aggguuuggagaagaguuu

SEQ ID NO: 2511606 - RNA, 19 nt, Homo sapiens
  misc_RNA (1)...(19): siRNA sense strand
uggcggaauuagaagaacu

SEQ ID NO: 2511607 - RNA, 19 nt, Homo sapiens
  misc_RNA (1)...(19): siRNA sense strand
gggacacggaagagauguu

SEQ ID NO: 2511608 - RNA, 19 nt, Homo sapiens
  misc_RNA (1)...(19): siRNA sense strand
aagaguuugacgaggauga

SEQ ID NO: 2511609 - RNA, 19 nt, Homo sapiens
  misc_RNA (1)...(19): siRNA sense strand
aagaggaggacgacgacau

SEQ ID NO: 2511610 - RNA, 19 nt, Homo sapiens
  misc_RNA (1)...(19): siRNA sense strand
gcucaagaacaugggcuau

SEQ ID NO: 2511611 - RNA, 19 nt, Homo sapiens
  misc_RNA (1)...(19): siRNA sense strand
augaguuaaugcaggacau

SEQ ID NO: 2511612 - RNA, 19 nt, Homo sapiens
  misc_RNA (1)...(19): siRNA sense strand
agaacuagaacaggaggaa

SEQ ID NO: 2511613 - RNA, 19 nt, Homo sapiens
  misc_RNA (1)...(19): siRNA sense strand
aacuagaacaggaggaacu

SEQ ID NO: 2511614 - RNA, 19 nt, Homo sapiens
  misc_RNA (1)...(19): siRNA sense strand
aggaggacgacgacaugaa

SEQ ID NO: 2511615 - RNA, 19 nt, Homo sapiens
  misc_RNA (1)...(19): siRNA sense strand
gguuuggagaagaguuuga

SEQ ID NO: 2511616 - RNA, 19 nt, Homo sapiens
  misc_RNA (1)...(19): siRNA sense strand
uggagaaugccaacaccaa

SEQ ID NO: 2511617 - RNA, 19 nt, Homo sapiens
  misc_RNA (1)...(19): siRNA sense strand
caggauuuaguaagggaaa

SEQ ID NO: 2511618 - RNA, 19 nt, Homo sapiens
  misc_RNA (1)...(19): siRNA sense strand
agucaaucaggaagagaau

SEQ ID NO: 2511619 - RNA, 19 nt, Homo sapiens
  misc_RNA (1)...(19): siRNA sense strand
agggaaagucaaucaggaa

SEQ ID NO: 2511620 - RNA, 19 nt, Homo sapiens
  misc_RNA (1)...(19): siRNA sense strand
caugaaacagaaacagcaa

SEQ ID NO: 2511621 - RNA, 19 nt, Homo sapiens
  misc_RNA (1)...(19): siRNA sense strand
gggaaccaugaaacagaaa

SEQ ID NO: 2511622 - RNA, 19 nt, Homo sapiens
  misc_RNA (1)...(19): siRNA sense strand
aagucaaucaggaagagaa

SEQ ID NO: 2511623 - RNA, 19 nt, Homo sapiens
  misc_RNA (1)...(19): siRNA sense strand
uggaaaacuuauacagcuu

SEQ ID NO: 2511624 - RNA, 19 nt, Homo sapiens
  misc_RNA (1)...(19): siRNA sense strand
aguaagggaaagucaauca

SEQ ID NO: 2511625 - RNA, 19 nt, Homo sapiens
  misc_RNA (1)...(19): siRNA sense strand
ucaggaagagaauggaaaa

SEQ ID NO: 2511626 - RNA, 19 nt, Homo sapiens
  misc_RNA (1)...(19): siRNA sense strand
agauggaggcagccagaca

SEQ ID NO: 2511627 - RNA, 19 nt, Homo sapiens
  misc_RNA (1)...(19): siRNA sense strand
ggauuuaguaagggaaagu

SEQ ID NO: 2511628 - RNA, 19 nt, Homo sapiens
  misc_RNA (1)...(19): siRNA sense strand
aguuaaagucccugagaau

SEQ ID NO: 2511629 - RNA, 19 nt, Homo sapiens
  misc_RNA (1)...(19): siRNA sense strand
gcuaaggacaggagggcca

SEQ ID NO: 2511630 - RNA, 19 nt, Homo sapiens
  misc_RNA (1)...(19): siRNA sense strand
agguaggaauugaagauau

SEQ ID NO: 2511631 - RNA, 19 nt, Homo sapiens
  misc_RNA (1)...(19): siRNA sense strand
ggguguaagcuaugugauu

SEQ ID NO: 2511632 - RNA, 19 nt, Homo sapiens
  misc_RNA (1)...(19): siRNA sense strand
gugaagaauccaaaaguua

SEQ ID NO: 2511633 - RNA, 19 nt, Homo sapiens
  misc_RNA (1)...(19): siRNA sense strand
acaaaguaagguaggaauu

SEQ ID NO: 2511634 - RNA, 19 nt, Homo sapiens
  misc_RNA (1)...(19): siRNA sense strand
ggaacagggaaguugggaa

SEQ ID NO: 2511635 - RNA, 19 nt, Homo sapiens
  misc_RNA (1)...(19): siRNA sense strand
uuuaauaggacuuggauca

SEQ ID NO: 2511636 - RNA, 19 nt, Homo sapiens
  misc_RNA (1)...(19): siRNA sense strand
uggcauuggaaaagaguua

SEQ ID NO: 2511637 - RNA, 19 nt, Homo sapiens
  misc_RNA (1)...(19): siRNA sense strand
cagauguaacugugaagaa

SEQ ID NO: 2511638 - RNA, 19 nt, Homo sapiens
  misc_RNA (1)...(19): siRNA sense strand
ccagaauggcuauggacuu

SEQ ID NO: 2511639 - RNA, 19 nt, Homo sapiens
  misc_RNA (1)...(19): siRNA sense strand
gagaaguuggcauuggaaa

SEQ ID NO: 2511640 - RNA, 19 nt, Homo sapiens
  misc_RNA (1)...(19): siRNA sense strand
agaaguuggcauuggaaaa

SEQ ID NO: 2511641 - RNA, 19 nt, Homo sapiens
  misc_RNA (1)...(19): siRNA sense strand
uuggauaugcucuggguua

SEQ ID NO: 2511642 - RNA, 19 nt, Homo sapiens
  misc_RNA (1)...(19): siRNA sense strand
ccauugagaaguuggcauu

SEQ ID NO: 2511643 - RNA, 19 nt, Homo sapiens
  misc_RNA (1)...(19): siRNA sense strand
gcuaugugauuuugagaau

SEQ ID NO: 2511644 - RNA, 19 nt, Homo sapiens
  misc_RNA (1)...(19): siRNA sense strand
gggcagacugugcagggaa

SEQ ID NO: 2511645 - RNA, 19 nt, Homo sapiens
  misc_RNA (1)...(19): siRNA sense strand
gggaauagcaggaaugccu

SEQ ID NO: 2511646 - RNA, 19 nt, Homo sapiens
  misc_RNA (1)...(19): siRNA sense strand
ugucaaaagcuacagaaua

SEQ ID NO: 2511647 - RNA, 19 nt, Homo sapiens
  misc_RNA (1)...(19): siRNA sense strand
ccgggaaaugugaugcaaa

SEQ ID NO: 2511648 - RNA, 19 nt, Homo sapiens
  misc_RNA (1)...(19): siRNA sense strand
uugccagagcagugguaua

SEQ ID NO: 2511649 - RNA, 19 nt, Homo sapiens
  misc_RNA (1)...(19): siRNA sense strand
guugcaugguguacauuaa

SEQ ID NO: 2511650 - RNA, 19 nt, Homo sapiens
  misc_RNA (1)...(19): siRNA sense strand
ugaagauuaugauggaaca

SEQ ID NO: 2511651 - RNA, 19 nt, Homo sapiens
  misc_RNA (1)...(19): siRNA sense strand
guacauauucuaaagcaca

SEQ ID NO: 2511652 - RNA, 19 nt, Homo sapiens
  misc_RNA (1)...(19): siRNA sense strand
cgggaaaugugaugcaaag

SEQ ID NO: 2511653 - RNA, 19 nt, Homo sapiens
  misc_RNA (1)...(19): siRNA sense strand
ucugaaacuuggaacuaau

SEQ ID NO: 2511654 - RNA, 19 nt, Homo sapiens
  misc_RNA (1)...(19): siRNA sense strand
cuuuaaaaugucaggagaa

SEQ ID NO: 2511655 - RNA, 19 nt, Homo sapiens
  misc_RNA (1)...(19): siRNA sense strand
aaacaaaguaagguaggaa

SEQ ID NO: 2511656 - RNA, 19 nt, Homo sapiens
  misc_RNA (1)...(19): siRNA sense strand
uuguaaagcccuuaugaga

SEQ ID NO: 2511657 - RNA, 19 nt, Homo sapiens
  misc_RNA (1)...(19): siRNA sense strand
agauguaacugugaagaau

SEQ ID NO: 2511658 - RNA, 19 nt, Homo sapiens
  misc_RNA (1)...(19): siRNA sense strand
uaggaaacguaaacagcuu

SEQ ID NO: 2511659 - RNA, 19 nt, Homo sapiens
  misc_RNA (1)...(19): siRNA sense strand
acgcuguaauccagugcaa

SEQ ID NO: 2511660 - RNA, 19 nt, Homo sapiens
  misc_RNA (1)...(19): siRNA sense strand
ggaagagaugauauugaau

SEQ ID NO: 2511661 - RNA, 19 nt, Homo sapiens
  misc_RNA (1)...(19): siRNA sense strand
cuucacuacuauugcauuu

SEQ ID NO: 2511662 - RNA, 19 nt, Homo sapiens
  misc_RNA (1)...(19): siRNA sense strand
ggaucaaugaagauuauga

SEQ ID NO: 2511663 - RNA, 19 nt, Homo sapiens
  misc_RNA (1)...(19): siRNA sense strand
aaacaauaugccagguuca

SEQ ID NO: 2511664 - RNA, 19 nt, Homo sapiens
  misc_RNA (1)...(19): siRNA sense strand
ugcugugaguguugcaaua

SEQ ID NO: 2511665 - RNA, 19 nt, Homo sapiens
  misc_RNA (1)...(19): siRNA sense strand
ggcagacugugcagggaau

SEQ ID NO: 2511666 - RNA, 19 nt, Homo sapiens
  misc_RNA (1)...(19): siRNA sense strand
agucaauaaugguagucca

SEQ ID NO: 2511667 - RNA, 19 nt, Homo sapiens
  misc_RNA (1)...(19): siRNA sense strand
cuuucuuauugguaggaau

SEQ ID NO: 2511668 - RNA, 19 nt, Homo sapiens
  misc_RNA (1)...(19): siRNA sense strand
gggagaaguggaugacagu

SEQ ID NO: 2511669 - RNA, 19 nt, Homo sapiens
  misc_RNA (1)...(19): siRNA sense strand
guggaagagaugauauuga

SEQ ID NO: 2511670 - RNA, 19 nt, Homo sapiens
  misc_RNA (1)...(19): siRNA sense strand
gcucauaugucaaggugug

SEQ ID NO: 2511671 - RNA, 19 nt, Homo sapiens
  misc_RNA (1)...(19): siRNA sense strand
uggaaaagaguuacgauau

SEQ ID NO: 2511672 - RNA, 19 nt, Homo sapiens
  misc_RNA (1)...(19): siRNA sense strand
uggacuugguggauuaauu

SEQ ID NO: 2511673 - RNA, 19 nt, Homo sapiens
  misc_RNA (1)...(19): siRNA sense strand
acggauaaaagcuaggaaa

SEQ ID NO: 2511674 - RNA, 19 nt, Homo sapiens
  misc_RNA (1)...(19): siRNA sense strand
cgggagaaguggaugacag

SEQ ID NO: 2511675 - RNA, 19 nt, Homo sapiens
  misc_RNA (1)...(19): siRNA sense strand
gugauuuucagaaggaaua

SEQ ID NO: 2511676 - RNA, 19 nt, Homo sapiens
  misc_RNA (1)...(19): siRNA sense strand
aggagcaccacuaguuaaa

SEQ ID NO: 2511677 - RNA, 19 nt, Homo sapiens
  misc_RNA (1)...(19): siRNA sense strand
acuuauacugcuuguguuu

SEQ ID NO: 2511678 - RNA, 19 nt, Homo sapiens
  misc_RNA (1)...(19): siRNA sense strand
uaguuaaagucccugagaa

SEQ ID NO: 2511679 - RNA, 19 nt, Homo sapiens
  misc_RNA (1)...(19): siRNA sense strand
ugauaagguucggcgguuu

SEQ ID NO: 2511680 - RNA, 19 nt, Homo sapiens
  misc_RNA (1)...(19): siRNA sense strand
agaaauaaagguugucagu

SEQ ID NO: 2511681 - RNA, 19 nt, Homo sapiens
  misc_RNA (1)...(19): siRNA sense strand
aaauaaagguugucagugg

SEQ ID NO: 2511682 - RNA, 19 nt, Homo sapiens
  misc_RNA (1)...(19): siRNA sense strand
ugaugagaauguugcuaca

SEQ ID NO: 2511683 - RNA, 19 nt, Homo sapiens
  misc_RNA (1)...(19): siRNA sense strand
ugaagaauccagugcucau

SEQ ID NO: 2511684 - RNA, 19 nt, Homo sapiens
  misc_RNA (1)...(19): siRNA sense strand
ugagaauauuugggacuau

SEQ ID NO: 2511685 - RNA, 19 nt, Homo sapiens
  misc_RNA (1)...(19): siRNA sense strand
cagcagaagaggugaagaa

SEQ ID NO: 2511686 - RNA, 19 nt, Homo sapiens
  misc_RNA (1)...(19): siRNA sense strand
ggacagaagguuuggaaaa

SEQ ID NO: 2511687 - RNA, 19 nt, Homo sapiens
  misc_RNA (1)...(19): siRNA sense strand
cagaaaaugucucgagaaa

SEQ ID NO: 2511688 - RNA, 19 nt, Homo sapiens
  misc_RNA (1)...(19): siRNA sense strand
ggauggaggacaagagcaa

SEQ ID NO: 2511689 - RNA, 19 nt, Homo sapiens
  misc_RNA (1)...(19): siRNA sense strand
ggcugaacaugcagagaaa

SEQ ID NO: 2511690 - RNA, 19 nt, Homo sapiens
  misc_RNA (1)...(19): siRNA sense strand
gugaagaggacuugugcaa

SEQ ID NO: 2511691 - RNA, 19 nt, Homo sapiens
  misc_RNA (1)...(19): siRNA sense strand
caauggaaguggaaggaga

SEQ ID NO: 2511692 - RNA, 19 nt, Homo sapiens
  misc_RNA (1)...(19): siRNA sense strand
aagaaagauuugaggagau

SEQ ID NO: 2511693 - RNA, 19 nt, Homo sapiens
  misc_RNA (1)...(19): siRNA sense strand
cuacaaaaggcaagcaaaa

SEQ ID NO: 2511694 - RNA, 19 nt, Homo sapiens
  misc_RNA (1)...(19): siRNA sense strand
gguacagaguggagggugu

SEQ ID NO: 2511695 - RNA, 19 nt, Homo sapiens
  misc_RNA (1)...(19): siRNA sense strand
uugcagaacugauggaaca

SEQ ID NO: 2511696 - RNA, 19 nt, Homo sapiens
  misc_RNA (1)...(19): siRNA sense strand
ggauauggacacugcacua

SEQ ID NO: 2511697 - RNA, 19 nt, Homo sapiens
  misc_RNA (1)...(19): siRNA sense strand
gauaaaauggcaaaggaaa

SEQ ID NO: 2511698 - RNA, 19 nt, Homo sapiens
  misc_RNA (1)...(19): siRNA sense strand
agauaagccauuucagaua

SEQ ID NO: 2511699 - RNA, 19 nt, Homo sapiens
  misc_RNA (1)...(19): siRNA sense strand
acauaggagaugagaauga

SEQ ID NO: 2511700 - RNA, 19 nt, Homo sapiens
  misc_RNA (1)...(19): siRNA sense strand
ggacagaauauuauggguu

SEQ ID NO: 2511701 - RNA, 19 nt, Homo sapiens
  misc_RNA (1)...(19): siRNA sense strand
cugaacaugcagagaaauu

SEQ ID NO: 2511702 - RNA, 19 nt, Homo sapiens
  misc_RNA (1)...(19): siRNA sense strand
cgaagaagaagaaggcuga

SEQ ID NO: 2511703 - RNA, 19 nt, Homo sapiens
  misc_RNA (1)...(19): siRNA sense strand
aaauagauggcuugagcaa

SEQ ID NO: 2511704 - RNA, 19 nt, Homo sapiens
  misc_RNA (1)...(19): siRNA sense strand
augugcaguuauagagaaa

SEQ ID NO: 2511705 - RNA, 19 nt, Homo sapiens
  misc_RNA (1)...(19): siRNA sense strand
gaggaggacuucagggcau

SEQ ID NO: 2511706 - RNA, 19 nt, Homo sapiens
  misc_RNA (1)...(19): siRNA sense strand
guauagggccacaggucaa

SEQ ID NO: 2511707 - RNA, 19 nt, Homo sapiens
  misc_RNA (1)...(19): siRNA sense strand
uggcagugcgaauggauaa

SEQ ID NO: 2511708 - RNA, 19 nt, Homo sapiens
  misc_RNA (1)...(19): siRNA sense strand
uggccaagucuuuguguua

SEQ ID NO: 2511709 - RNA, 19 nt, Homo sapiens
  misc_RNA (1)...(19): siRNA sense strand
gcgaagaggagucggacga

SEQ ID NO: 2511710 - RNA, 19 nt, Homo sapiens
  misc_RNA (1)...(19): siRNA sense strand
ccccaaauuuauagcaaaa

SEQ ID NO: 2511711 - RNA, 19 nt, Homo sapiens
  misc_RNA (1)...(19): siRNA sense strand
ccaaauuguagcugacgaa

SEQ ID NO: 2511712 - RNA, 19 nt, Homo sapiens
  misc_RNA (1)...(19): siRNA sense strand
ugucauaauggaagugcaa

SEQ ID NO: 2511713 - RNA, 19 nt, Homo sapiens
  misc_RNA (1)...(19): siRNA sense strand
gcauagaagucuuacagca

SEQ ID NO: 2511714 - RNA, 19 nt, Homo sapiens
  misc_RNA (1)...(19): siRNA sense strand
gcagagaaauuuugggcuu

SEQ ID NO: 2511715 - RNA, 19 nt, Homo sapiens
  misc_RNA (1)...(19): siRNA sense strand
uaugaaagacagugacgaa

SEQ ID NO: 2511716 - RNA, 19 nt, Homo sapiens
  misc_RNA (1)...(19): siRNA sense strand
ugaauuugcuaauggccaa

SEQ ID NO: 2511717 - RNA, 19 nt, Homo sapiens
  misc_RNA (1)...(19): siRNA sense strand
gagaaaaggucaaugagga

SEQ ID NO: 2511718 - RNA, 19 nt, Homo sapiens
  misc_RNA (1)...(19): siRNA sense strand
gcggaguuugccagaaaua

SEQ ID NO: 2511719 - RNA, 19 nt, Homo sapiens
  misc_RNA (1)...(19): siRNA sense strand
uguuaaagaaggagauacu

SEQ ID NO: 2511720 - RNA, 19 nt, Homo sapiens
  misc_RNA (1)...(19): siRNA sense strand
agaaaaggucaaugaggaa

SEQ ID NO: 2511721 - RNA, 19 nt, Homo sapiens
  misc_RNA (1)...(19): siRNA sense strand
acaaacacuugcaagaaau

SEQ ID NO: 2511722 - RNA, 19 nt, Homo sapiens
  misc_RNA (1)...(19): siRNA sense strand
uagcaaaagauauggagaa

SEQ ID NO: 2511723 - RNA, 19 nt, Homo sapiens
  misc_RNA (1)...(19): siRNA sense strand
gucugaaccacaagaauua

SEQ ID NO: 2511724 - RNA, 19 nt, Homo sapiens
  misc_RNA (1)...(19): siRNA sense strand
uguauuagucgaugccaaa

SEQ ID NO: 2511725 - RNA, 19 nt, Homo sapiens
  misc_RNA (1)...(19): siRNA sense strand
uaaugcagcuugaaggcua

SEQ ID NO: 2511726 - RNA, 19 nt, Homo sapiens
  misc_RNA (1)...(19): siRNA sense strand
augcaugucagcuggauaa

SEQ ID NO: 2511727 - RNA, 19 nt, Homo sapiens
  misc_RNA (1)...(19): siRNA sense strand
ccaaaauagaagagaccau

SEQ ID NO: 2511728 - RNA, 19 nt, Homo sapiens
  misc_RNA (1)...(19): siRNA sense strand
auguauuagucgaugccaa

SEQ ID NO: 2511729 - RNA, 19 nt, Homo sapiens
  misc_RNA (1)...(19): siRNA sense strand
ugugaaagcagcugcaaaa

SEQ ID NO: 2511730 - RNA, 19 nt, Homo sapiens
  misc_RNA (1)...(19): siRNA sense strand
ugaaagacagugacgaaga

SEQ ID NO: 2511731 - RNA, 19 nt, Homo sapiens
  misc_RNA (1)...(19): siRNA sense strand
cagcugaauuacaccgaau

SEQ ID NO: 2511732 - RNA, 19 nt, Homo sapiens
  misc_RNA (1)...(19): siRNA sense strand
augaugaacaggacagaau

SEQ ID NO: 2511733 - RNA, 19 nt, Homo sapiens
  misc_RNA (1)...(19): siRNA sense strand
gaagaaaguggucagaaaa

SEQ ID NO: 2511734 - RNA, 19 nt, Homo sapiens
  misc_RNA (1)...(19): siRNA sense strand
uagaaagcuggaagagauu

SEQ ID NO: 2511735 - RNA, 19 nt, Homo sapiens
  misc_RNA (1)...(19): siRNA sense strand
agagcaaagacuuaaacua

SEQ ID NO: 2511736 - RNA, 19 nt, Homo sapiens
  misc_RNA (1)...(19): siRNA sense strand
ggucaaugaggaaauguau

SEQ ID NO: 2511737 - RNA, 19 nt, Homo sapiens
  misc_RNA (1)...(19): siRNA sense strand
aagaauuaaugcagcuuga

SEQ ID NO: 2511738 - RNA, 19 nt, Homo sapiens
  misc_RNA (1)...(19): siRNA sense strand
ugguaaagaugcagaucgu

SEQ ID NO: 2511739 - RNA, 19 nt, Homo sapiens
  misc_RNA (1)...(19): siRNA sense strand
uagaagagaccaugaacca

SEQ ID NO: 2511740 - RNA, 19 nt, Homo sapiens
  misc_RNA (1)...(19): siRNA sense strand
uggauaacgcagaugaaca

SEQ ID NO: 2511741 - RNA, 19 nt, Homo sapiens
  misc_RNA (1)...(19): siRNA sense strand
agucugaaccacaagaauu

SEQ ID NO: 2511742 - RNA, 19 nt, Homo sapiens
  misc_RNA (1)...(19): siRNA sense strand
aaggcuauacuguggauua

SEQ ID NO: 2511743 - RNA, 19 nt, Homo sapiens
  misc_RNA (1)...(19): siRNA sense strand
aagaaaaccuacagggacu

SEQ ID NO: 2511744 - RNA, 19 nt, Homo sapiens
  misc_RNA (1)...(19): siRNA sense strand
ugacaauggcggaggcuga

SEQ ID NO: 2511745 - RNA, 19 nt, Homo sapiens
  misc_RNA (1)...(19): siRNA sense strand
uggauguagucgagaugaa

SEQ ID NO: 2511746 - RNA, 19 nt, Homo sapiens
  misc_RNA (1)...(19): siRNA sense strand
uggcggaggcugaaggcaa

SEQ ID NO: 2511747 - RNA, 19 nt, Homo sapiens
  misc_RNA (1)...(19): siRNA sense strand
gagaacugcaccuggacaa

SEQ ID NO: 2511748 - RNA, 19 nt, Homo sapiens
  misc_RNA (1)...(19): siRNA sense strand
aaauagacaaacagugcaa

SEQ ID NO: 2511749 - RNA, 19 nt, Homo sapiens
  misc_RNA (1)...(19): siRNA sense strand
agguagaagaucagucaau

SEQ ID NO: 2511750 - RNA, 19 nt, Homo sapiens
  misc_RNA (1)...(19): siRNA sense strand
gaugaaacuuguaaggugu

SEQ ID NO: 2511751 - RNA, 19 nt, Homo sapiens
  misc_RNA (1)...(19): siRNA sense strand
ucgaagugcaaguggcaau

SEQ ID NO: 2511752 - RNA, 19 nt, Homo sapiens
  misc_RNA (1)...(19): siRNA sense strand
cagaagcaaacgagacauu

SEQ ID NO: 2511753 - RNA, 19 nt, Homo sapiens
  misc_RNA (1)...(19): siRNA sense strand
agauggaagcugugaaagu

SEQ ID NO: 2511754 - RNA, 19 nt, Homo sapiens
  misc_RNA (1)...(19): siRNA sense strand
aaucagaaagguagaagau

SEQ ID NO: 2511755 - RNA, 19 nt, Homo sapiens
  misc_RNA (1)...(19): siRNA sense strand
ggcacauacaaguggagaa

SEQ ID NO: 2511756 - RNA, 19 nt, Homo sapiens
  misc_RNA (1)...(19): siRNA sense strand
ccaauauggcagagaccca

SEQ ID NO: 2511757 - RNA, 19 nt, Homo sapiens
  misc_RNA (1)...(19): siRNA sense strand
agaaagaccagaaaacaaa

SEQ ID NO: 2511758 - RNA, 19 nt, Homo sapiens
  misc_RNA (1)...(19): siRNA sense strand
ucuuaauggaugugguaca

SEQ ID NO: 2511759 - RNA, 19 nt, Homo sapiens
  misc_RNA (1)...(19): siRNA sense strand
agugaucacccgucagaaa

SEQ ID NO: 2511760 - RNA, 19 nt, Homo sapiens
  misc_RNA (1)...(19): siRNA sense strand
ggacauaauucuacagugg

SEQ ID NO: 2511761 - RNA, 19 nt, Homo sapiens
  misc_RNA (1)...(19): siRNA sense strand
ugguacaaucagaaaggua

SEQ ID NO: 2511762 - RNA, 19 nt, Homo sapiens
  misc_RNA (1)...(19): siRNA sense strand
ggaagcugugaaagugaaa

SEQ ID NO: 2511763 - RNA, 19 nt, Homo sapiens
  misc_RNA (1)...(19): siRNA sense strand
uagaaagaccagaaaacaa

SEQ ID NO: 2511764 - RNA, 19 nt, Homo sapiens
  misc_RNA (1)...(19): siRNA sense strand
auacaaguggagaaagauu

SEQ ID NO: 2511765 - RNA, 19 nt, Homo sapiens
  misc_RNA (1)...(19): siRNA sense strand
guacaaucagaaagguaga

SEQ ID NO: 2511766 - RNA, 19 nt, Homo sapiens
  misc_RNA (1)...(19): siRNA sense strand
ccagaaaacaaaagcauca

SEQ ID NO: 2511767 - RNA, 19 nt, Homo sapiens
  misc_RNA (1)...(19): siRNA sense strand
auucuacaguggagauaau

SEQ ID NO: 2511768 - RNA, 19 nt, Homo sapiens
  misc_RNA (1)...(19): siRNA sense strand
gacccaacuugcagaccaa

SEQ ID NO: 2511769 - RNA, 19 nt, Homo sapiens
  misc_RNA (1)...(19): siRNA sense strand
agauuauugugaaguguga

SEQ ID NO: 2511770 - RNA, 19 nt, Homo sapiens
  misc_RNA (1)...(19): siRNA sense strand
aaguaugagcucuguguau

SEQ ID NO: 2511771 - RNA, 19 nt, Homo sapiens
  misc_RNA (1)...(19): siRNA sense strand
uccuagaaauagacaaaca

SEQ ID NO: 2511772 - RNA, 19 nt, Homo sapiens
  misc_RNA (1)...(19): siRNA sense strand
aaucaagaguggauguagu

SEQ ID NO: 2511773 - RNA, 19 nt, Homo sapiens
  misc_RNA (1)...(19): siRNA sense strand
acaauagaaagaccagaaa

SEQ ID NO: 2511774 - RNA, 19 nt, Homo sapiens
  misc_RNA (1)...(19): siRNA sense strand
gugugaaaugggacauaau

SEQ ID NO: 2511775 - RNA, 19 nt, Homo sapiens
  misc_RNA (1)...(19): siRNA sense strand
cuugauaccuguagagccu

SEQ ID NO: 2511776 - RNA, 19 nt, Homo sapiens
  misc_RNA (1)...(19): siRNA sense strand
gcagagacccacaaagcca

SEQ ID NO: 2511777 - RNA, 19 nt, Homo sapiens
  misc_RNA (1)...(19): siRNA sense strand
uggagaaagauuacaagau

SEQ ID NO: 2511778 - RNA, 19 nt, Homo sapiens
  misc_RNA (1)...(19): siRNA sense strand
ugacaggaugagaguuauu

SEQ ID NO: 2511779 - RNA, 19 nt, Homo sapiens
  misc_RNA (1)...(19): siRNA sense strand
ccucuuaauggauguggua

SEQ ID NO: 2511780 - RNA, 19 nt, Homo sapiens
  misc_RNA (1)...(19): siRNA sense strand
auucaggauuucagcauga

SEQ ID NO: 2511781 - RNA, 19 nt, Homo sapiens
  misc_RNA (1)...(19): siRNA sense strand
guaagaaggcucaugccau

SEQ ID NO: 2511782 - RNA, 19 nt, Homo sapiens
  misc_RNA (1)...(19): siRNA sense strand
ggaagaaacuccaaaccag

SEQ ID NO: 2511783 - RNA, 19 nt, Homo sapiens
  misc_RNA (1)...(19): siRNA sense strand
agggcaagucugcaguaaa

SEQ ID NO: 2511784 - RNA, 19 nt, Homo sapiens
  misc_RNA (1)...(19): siRNA sense strand
auagacaaacagugcaaau

SEQ ID NO: 2511785 - RNA, 19 nt, Homo sapiens
  misc_RNA (1)...(19): siRNA sense strand
caaucagaaagguagaaga

SEQ ID NO: 2511786 - RNA, 19 nt, Homo sapiens
  misc_RNA (1)...(19): siRNA sense strand
gucaaaaugcacugggcaa

SEQ ID NO: 2511787 - RNA, 19 nt, Homo sapiens
  misc_RNA (1)...(19): siRNA sense strand
gaguggauguagucgagau

SEQ ID NO: 2511788 - RNA, 19 nt, Homo sapiens
  misc_RNA (1)...(19): siRNA sense strand
augaaacacaugcggaaga

SEQ ID NO: 2511789 - RNA, 19 nt, Homo sapiens
  misc_RNA (1)...(19): siRNA sense strand
caauagaaagaccagaaaa

SEQ ID NO: 2511790 - RNA, 19 nt, Homo sapiens
  misc_RNA (1)...(19): siRNA sense strand
gaaucaucauccaguacau

SEQ ID NO: 2511791 - RNA, 19 nt, Homo sapiens
  misc_RNA (1)...(19): siRNA sense strand
caucaaacucucugacugu

SEQ ID NO: 2511792 - RNA, 19 nt, Homo sapiens
  misc_RNA (1)...(19): siRNA sense strand
gguugugucuccagaagca

SEQ ID NO: 2511793 - RNA, 19 nt, Homo sapiens
  misc_RNA (1)...(19): siRNA sense strand
cggaagaaacuccaaacca

SEQ ID NO: 2511794 - RNA, 19 nt, Homo sapiens
  misc_RNA (1)...(19): siRNA sense strand
agcaagaauucaaagaacu

SEQ ID NO: 2511795 - RNA, 19 nt, Homo sapiens
  misc_RNA (1)...(19): siRNA sense strand
uguggugacuguagcgaca

SEQ ID NO: 2511796 - RNA, 19 nt, Homo sapiens
  misc_RNA (1)...(19): siRNA sense strand
agucaauuacuuacaccaa

SEQ ID NO: 2511797 - RNA, 19 nt, Homo sapiens
  misc_RNA (1)...(19): siRNA sense strand
caaccuacgaccuaaucaa

SEQ ID NO: 2511798 - RNA, 19 nt, Homo sapiens
  misc_RNA (1)...(19): siRNA sense strand
acaaauaccagaagcugca

SEQ ID NO: 2511799 - RNA, 19 nt, Homo sapiens
  misc_RNA (1)...(19): siRNA sense strand
ccaugauccugcaacucaa

SEQ ID NO: 2511800 - RNA, 19 nt, Homo sapiens
  misc_RNA (1)...(19): siRNA sense strand
gaaaagagcugucuggcaa

SEQ ID NO: 2511801 - RNA, 19 nt, Homo sapiens
  misc_RNA (1)...(19): siRNA sense strand
caccaaugcuggauggaca

SEQ ID NO: 2511802 - RNA, 19 nt, Homo sapiens
  misc_RNA (1)...(19): siRNA sense strand
ccgugauggugaaugacaa

SEQ ID NO: 2511803 - RNA, 19 nt, Homo sapiens
  misc_RNA (1)...(19): siRNA sense strand
gaggaguggaagaggcaga

SEQ ID NO: 2511804 - RNA, 19 nt, Homo sapiens
  misc_RNA (1)...(19): siRNA sense strand
ccacaaaccuucaggcccu

SEQ ID NO: 2511805 - RNA, 19 nt, Homo sapiens
  misc_RNA (1)...(19): siRNA sense strand
aggcacaggucaagccaga

SEQ ID NO: 2511806 - RNA, 19 nt, Homo sapiens
  misc_RNA (1)...(19): siRNA sense strand
ccaucaccguggagaucaa

SEQ ID NO: 2511807 - RNA, 19 nt, Homo sapiens
  misc_RNA (1)...(19): siRNA sense strand
cugagaggauuguggcuga

SEQ ID NO: 2511808 - RNA, 19 nt, Homo sapiens
  misc_RNA (1)...(19): siRNA sense strand
ccagagcgggagaggagaa

SEQ ID NO: 2511809 - RNA, 19 nt, Homo sapiens
  misc_RNA (1)...(19): siRNA sense strand
ccuacaggaugcugggcuu

SEQ ID NO: 2511810 - RNA, 19 nt, Homo sapiens
  misc_RNA (1)...(19): siRNA sense strand
ggucagucuacgugcauga

SEQ ID NO: 2511811 - RNA, 19 nt, Homo sapiens
  misc_RNA (1)...(19): siRNA sense strand
agaaugggaacuuggaaaa

SEQ ID NO: 2511812 - RNA, 19 nt, Homo sapiens
  misc_RNA (1)...(19): siRNA sense strand
gagauggacaugaggagca

SEQ ID NO: 2511813 - RNA, 19 nt, Homo sapiens
  misc_RNA (1)...(19): siRNA sense strand
ucucuaagaaggugcccaa

SEQ ID NO: 2511814 - RNA, 19 nt, Homo sapiens
  misc_RNA (1)...(19): siRNA sense strand
gaagaugcuacgagggucu

SEQ ID NO: 2511815 - RNA, 19 nt, Homo sapiens
  misc_RNA (1)...(19): siRNA sense strand
ggaagaggcagaugcagga

SEQ ID NO: 2511816 - RNA, 19 nt, Homo sapiens
  misc_RNA (1)...(19): siRNA sense strand
augcugggcuugaggcaca

SEQ ID NO: 2511817 - RNA, 19 nt, Homo sapiens
  misc_RNA (1)...(19): siRNA sense strand
guugagaguugauggugca

SEQ ID NO: 2511818 - RNA, 19 nt, Homo sapiens
  misc_RNA (1)...(19): siRNA sense strand
cuacaagcuggguaagaca

SEQ ID NO: 2511819 - RNA, 19 nt, Homo sapiens
  misc_RNA (1)...(19): siRNA sense strand
uggccugaggguacagaua

SEQ ID NO: 2511820 - RNA, 19 nt, Homo sapiens
  misc_RNA (1)...(19): siRNA sense strand
ugacuggaauguauggaca

SEQ ID NO: 2511821 - RNA, 19 nt, Homo sapiens
  misc_RNA (1)...(19): siRNA sense strand
ggugacaaguguagccgga

SEQ ID NO: 2511822 - RNA, 19 nt, Homo sapiens
  misc_RNA (1)...(19): siRNA sense strand
ggacaggacugagcgguca

SEQ ID NO: 2511823 - RNA, 19 nt, Homo sapiens
  misc_RNA (1)...(19): siRNA sense strand
cugugaaggagaucaucaa

SEQ ID NO: 2511824 - RNA, 19 nt, Homo sapiens
  misc_RNA (1)...(19): siRNA sense strand
ggagugacaugcugggaug

SEQ ID NO: 2511825 - RNA, 19 nt, Homo sapiens
  misc_RNA (1)...(19): siRNA sense strand
agacaucgcuggaggagug

SEQ ID NO: 2511826 - RNA, 19 nt, Homo sapiens
  misc_RNA (1)...(19): siRNA sense strand
aagccauacuucuggacaa

SEQ ID NO: 2511827 - RNA, 19 nt, Homo sapiens
  misc_RNA (1)...(19): siRNA sense strand
acaucaagaaugacagcua

SEQ ID NO: 2511828 - RNA, 19 nt, Homo sapiens
  misc_RNA (1)...(19): siRNA sense strand
ggacaagacucugaggaag

SEQ ID NO: 2511829 - RNA, 19 nt, Homo sapiens
  misc_RNA (1)...(19): siRNA sense strand
uguauaugacagacaucaa

SEQ ID NO: 2511830 - RNA, 19 nt, Homo sapiens
  misc_RNA (1)...(19): siRNA sense strand
ccagguguuccaugagcaa

SEQ ID NO: 2511831 - RNA, 19 nt, Homo sapiens
  misc_RNA (1)...(19): siRNA sense strand
ggcaagagcuucagccaga

SEQ ID NO: 2511832 - RNA, 19 nt, Homo sapiens
  misc_RNA (1)...(19): siRNA sense strand
gggaagagguucagcuggu

SEQ ID NO: 2511833 - RNA, 19 nt, Homo sapiens
  misc_RNA (1)...(19): siRNA sense strand
ugaugaaggucaagcagga

SEQ ID NO: 2511834 - RNA, 19 nt, Homo sapiens
  misc_RNA (1)...(19): siRNA sense strand
agaaggacaaggagaacau

SEQ ID NO: 2511835 - RNA, 19 nt, Homo sapiens
  misc_RNA (1)...(19): siRNA sense strand
guggagaaggacaaggaga

SEQ ID NO: 2511836 - RNA, 19 nt, Homo sapiens
  misc_RNA (1)...(19): siRNA sense strand
ggcuggugaugaaggucaa

SEQ ID NO: 2511837 - RNA, 19 nt, Homo sapiens
  misc_RNA (1)...(19): siRNA sense strand
gggcuggugaugaagguca

SEQ ID NO: 2511838 - RNA, 19 nt, Homo sapiens
  misc_RNA (1)...(19): siRNA sense strand
gaguguggcaagagcuuca

SEQ ID NO: 2511839 - RNA, 19 nt, Homo sapiens
  misc_RNA (1)...(19): siRNA sense strand
gggaagggaagggaagaca

SEQ ID NO: 2511840 - RNA, 19 nt, Homo sapiens
  misc_RNA (1)...(19): siRNA sense strand
cugcuuaagaucagaaaca

SEQ ID NO: 2511841 - RNA, 19 nt, Homo sapiens
  misc_RNA (1)...(19): siRNA sense strand
uuuacaagcugaagggcca

SEQ ID NO: 2511842 - RNA, 19 nt, Homo sapiens
  misc_RNA (1)...(19): siRNA sense strand
gagccagcuggaaggacua

SEQ ID NO: 2511843 - RNA, 19 nt, Homo sapiens
  misc_RNA (1)...(19): siRNA sense strand
ucugaaagcuccugggcac

SEQ ID NO: 2511844 - RNA, 19 nt, Homo sapiens
  misc_RNA (1)...(19): siRNA sense strand
uagagagauuccaggacca

SEQ ID NO: 2511845 - RNA, 19 nt, Homo sapiens
  misc_RNA (1)...(19): siRNA sense strand
ggacuaucuggaaggcaca

SEQ ID NO: 2511846 - RNA, 19 nt, Homo sapiens
  misc_RNA (1)...(19): siRNA sense strand
ggcccaggacacagagcaa

SEQ ID NO: 2511847 - RNA, 19 nt, Homo sapiens
  misc_RNA (1)...(19): siRNA sense strand
agcaacggcaggaguguaa

SEQ ID NO: 2511848 - RNA, 19 nt, Homo sapiens
  misc_RNA (1)...(19): siRNA sense strand
ggcccaggacacagagcaa

SEQ ID NO: 2511849 - RNA, 19 nt, Homo sapiens
  misc_RNA (1)...(19): siRNA sense strand
agcaacggcaggaguguaa

SEQ ID NO: 2511850 - RNA, 19 nt, Homo sapiens
  misc_RNA (1)...(19): siRNA sense strand
ugucaagaucagauggaaa

SEQ ID NO: 2511851 - RNA, 19 nt, Homo sapiens
  misc_RNA (1)...(19): siRNA sense strand
gcagcaaauuagaagguga

SEQ ID NO: 2511852 - RNA, 19 nt, Homo sapiens
  misc_RNA (1)...(19): siRNA sense strand
cagcaaauuagaaggugaa

SEQ ID NO: 2511853 - RNA, 19 nt, Homo sapiens
  misc_RNA (1)...(19): siRNA sense strand
gucgauauuaagagggaaa

SEQ ID NO: 2511854 - RNA, 19 nt, Homo sapiens
  misc_RNA (1)...(19): siRNA sense strand
aagcuaaaggacaaagaua

SEQ ID NO: 2511855 - RNA, 19 nt, Homo sapiens
  misc_RNA (1)...(19): siRNA sense strand
uguuuaaggaccagaaauu

SEQ ID NO: 2511856 - RNA, 19 nt, Homo sapiens
  misc_RNA (1)...(19): siRNA sense strand
aagacuuaguagagaaaca

SEQ ID NO: 2511857 - RNA, 19 nt, Homo sapiens
  misc_RNA (1)...(19): siRNA sense strand
agaacaagcucuuacgaca

SEQ ID NO: 2511858 - RNA, 19 nt, Homo sapiens
  misc_RNA (1)...(19): siRNA sense strand
aaugaaaagacgacagaaa

SEQ ID NO: 2511859 - RNA, 19 nt, Homo sapiens
  misc_RNA (1)...(19): siRNA sense strand
ccauguugguucagcaaaa

SEQ ID NO: 2511860 - RNA, 19 nt, Homo sapiens
  misc_RNA (1)...(19): siRNA sense strand
caaagauauuauugaggca

SEQ ID NO: 2511861 - RNA, 19 nt, Homo sapiens
  misc_RNA (1)...(19): siRNA sense strand
aaucaaauggaaugccaaa

SEQ ID NO: 2511862 - RNA, 19 nt, Homo sapiens
  misc_RNA (1)...(19): siRNA sense strand
augaaugcaaagagaagaa

SEQ ID NO: 2511863 - RNA, 19 nt, Homo sapiens
  misc_RNA (1)...(19): siRNA sense strand
ccuugaggcuagaaacgaa

SEQ ID NO: 2511864 - RNA, 19 nt, Homo sapiens
  misc_RNA (1)...(19): siRNA sense strand
acccaaaagucgauauuaa

SEQ ID NO: 2511865 - RNA, 19 nt, Homo sapiens
  misc_RNA (1)...(19): siRNA sense strand
aagaaacaacagaucgaua

SEQ ID NO: 2511866 - RNA, 19 nt, Homo sapiens
  misc_RNA (1)...(19): siRNA sense strand
ggaaaacaacccucagaaa

SEQ ID NO: 2511867 - RNA, 19 nt, Homo sapiens
  misc_RNA (1)...(19): siRNA sense strand
guucaaaacauccagaaaa

SEQ ID NO: 2511868 - RNA, 19 nt, Homo sapiens
  misc_RNA (1)...(19): siRNA sense strand
cuuccaaaaugcagagaau

SEQ ID NO: 2511869 - RNA, 19 nt, Homo sapiens
  misc_RNA (1)...(19): siRNA sense strand
gggaagaggaucggcagaa

SEQ ID NO: 2511870 - RNA, 19 nt, Homo sapiens
  misc_RNA (1)...(19): siRNA sense strand
aagcaagauuauaagcaga

SEQ ID NO: 2511871 - RNA, 19 nt, Homo sapiens
  misc_RNA (1)...(19): siRNA sense strand
cagcaacacguuaguggaa

SEQ ID NO: 2511872 - RNA, 19 nt, Homo sapiens
  misc_RNA (1)...(19): siRNA sense strand
ugaaaagacgacagaaaau

SEQ ID NO: 2511873 - RNA, 19 nt, Homo sapiens
  misc_RNA (1)...(19): siRNA sense strand
gacagaaaauaaugagcaa

SEQ ID NO: 2511874 - RNA, 19 nt, Homo sapiens
  misc_RNA (1)...(19): siRNA sense strand
gcgaugaaugcaaagagaa

SEQ ID NO: 2511875 - RNA, 19 nt, Homo sapiens
  misc_RNA (1)...(19): siRNA sense strand
agaagaaacaacagaucga

SEQ ID NO: 2511876 - RNA, 19 nt, Homo sapiens
  misc_RNA (1)...(19): siRNA sense strand
ggaaauggcucaaaaggca

SEQ ID NO: 2511877 - RNA, 19 nt, Homo sapiens
  misc_RNA (1)...(19): siRNA sense strand
cugaagaccuugaggcuag

SEQ ID NO: 2511878 - RNA, 19 nt, Homo sapiens
  misc_RNA (1)...(19): siRNA sense strand
agcuaaaggacaaagauau

SEQ ID NO: 2511879 - RNA, 19 nt, Homo sapiens
  misc_RNA (1)...(19): siRNA sense strand
aacuacagcuucaggaaau

SEQ ID NO: 2511880 - RNA, 19 nt, Homo sapiens
  misc_RNA (1)...(19): siRNA sense strand
ccacuuuaucugaugagaa

SEQ ID NO: 2511881 - RNA, 19 nt, Homo sapiens
  misc_RNA (1)...(19): siRNA sense strand
guggaguggaugaguauuu

SEQ ID NO: 2511882 - RNA, 19 nt, Homo sapiens
  misc_RNA (1)...(19): siRNA sense strand
augauaaagcuaaaggaca

SEQ ID NO: 2511883 - RNA, 19 nt, Homo sapiens
  misc_RNA (1)...(19): siRNA sense strand
cuuaauauugcgaagucaa

SEQ ID NO: 2511884 - RNA, 19 nt, Homo sapiens
  misc_RNA (1)...(19): siRNA sense strand
cuacaaagaugcaccagca

SEQ ID NO: 2511885 - RNA, 19 nt, Homo sapiens
  misc_RNA (1)...(19): siRNA sense strand
aagcaagaacgcacaaauu

SEQ ID NO: 2511886 - RNA, 19 nt, Homo sapiens
  misc_RNA (1)...(19): siRNA sense strand
gcaacacguuaguggaacu

SEQ ID NO: 2511887 - RNA, 19 nt, Homo sapiens
  misc_RNA (1)...(19): siRNA sense strand
gaucauucgccucaagcaa

SEQ ID NO: 2511888 - RNA, 19 nt, Homo sapiens
  misc_RNA (1)...(19): siRNA sense strand
cagcaaaauaggucagaca

SEQ ID NO: 2511889 - RNA, 19 nt, Homo sapiens
  misc_RNA (1)...(19): siRNA sense strand
cgaugaaugcaaagagaag

SEQ ID NO: 2511890 - RNA, 19 nt, Homo sapiens
  misc_RNA (1)...(19): siRNA sense strand
agaaggugaacuacauaaa

SEQ ID NO: 2511891 - RNA, 19 nt, Homo sapiens
  misc_RNA (1)...(19): siRNA sense strand
gcgaaaguggcauguguga

SEQ ID NO: 2511892 - RNA, 19 nt, Homo sapiens
  misc_RNA (1)...(19): siRNA sense strand
ugagagaagaugagacgga

SEQ ID NO: 2511893 - RNA, 19 nt, Homo sapiens
  misc_RNA (1)...(19): siRNA sense strand
agaaauugaaggcacuuaa

SEQ ID NO: 2511894 - RNA, 19 nt, Homo sapiens
  misc_RNA (1)...(19): siRNA sense strand
agaaaagaggaaagaugaa

SEQ ID NO: 2511895 - RNA, 19 nt, Homo sapiens
  misc_RNA (1)...(19): siRNA sense strand
gcccaucagccaugagaau

SEQ ID NO: 2511896 - RNA, 19 nt, Homo sapiens
  misc_RNA (1)...(19): siRNA sense strand
auguaaaacaacagaguga

SEQ ID NO: 2511897 - RNA, 19 nt, Homo sapiens
  misc_RNA (1)...(19): siRNA sense strand
aaugcaaagagaagaaaca

SEQ ID NO: 2511898 - RNA, 19 nt, Homo sapiens
  misc_RNA (1)...(19): siRNA sense strand
agauugaacccgaaaacaa

SEQ ID NO: 2511899 - RNA, 19 nt, Homo sapiens
  misc_RNA (1)...(19): siRNA sense strand
cagauggaaagguccgaaa

SEQ ID NO: 2511900 - RNA, 19 nt, Homo sapiens
  misc_RNA (1)...(19): siRNA sense strand
ucacucacgaagaagguaa

SEQ ID NO: 2511901 - RNA, 19 nt, Homo sapiens
  misc_RNA (1)...(19): siRNA sense strand
acgacaaugauaaagcuaa

SEQ ID NO: 2511902 - RNA, 19 nt, Homo sapiens
  misc_RNA (1)...(19): siRNA sense strand
gauaaagcuaaaggacaaa

SEQ ID NO: 2511903 - RNA, 19 nt, Homo sapiens
  misc_RNA (1)...(19): siRNA sense strand
augaaaagacgacagaaaa

SEQ ID NO: 2511904 - RNA, 19 nt, Homo sapiens
  misc_RNA (1)...(19): siRNA sense strand
ugucugacguggaguggau

SEQ ID NO: 2511905 - RNA, 19 nt, Homo sapiens
  misc_RNA (1)...(19): siRNA sense strand
uugcagauuguucggguaa

SEQ ID NO: 2511906 - RNA, 19 nt, Homo sapiens
  misc_RNA (1)...(19): siRNA sense strand
aaauaaugagcaacgagaa

SEQ ID NO: 2511907 - RNA, 19 nt, Homo sapiens
  misc_RNA (1)...(19): siRNA sense strand
gcucauuggagaauuaaaa

SEQ ID NO: 2511908 - RNA, 19 nt, Homo sapiens
  misc_RNA (1)...(19): siRNA sense strand
aagcagaaauugaaggcac

SEQ ID NO: 2511909 - RNA, 19 nt, Homo sapiens
  misc_RNA (1)...(19): siRNA sense strand
aggaaagaugaauugcuua

SEQ ID NO: 2511910 - RNA, 19 nt, Homo sapiens
  misc_RNA (1)...(19): siRNA sense strand
gcacaaauucagaacugca

SEQ ID NO: 2511911 - RNA, 19 nt, Homo sapiens
  misc_RNA (1)...(19): siRNA sense strand
ugucaagaucagauggaaa

SEQ ID NO: 2511912 - RNA, 19 nt, Homo sapiens
  misc_RNA (1)...(19): siRNA sense strand
gcagcaaauuagaagguga

SEQ ID NO: 2511913 - RNA, 19 nt, Homo sapiens
  misc_RNA (1)...(19): siRNA sense strand
cagcaaauuagaaggugaa

SEQ ID NO: 2511914 - RNA, 19 nt, Homo sapiens
  misc_RNA (1)...(19): siRNA sense strand
gucgauauuaagagggaaa

SEQ ID NO: 2511915 - RNA, 19 nt, Homo sapiens
  misc_RNA (1)...(19): siRNA sense strand
aagcuaaaggacaaagaua

SEQ ID NO: 2511916 - RNA, 19 nt, Homo sapiens
  misc_RNA (1)...(19): siRNA sense strand
uguuuaaggaccagaaauu

SEQ ID NO: 2511917 - RNA, 19 nt, Homo sapiens
  misc_RNA (1)...(19): siRNA sense strand
aagacuuaguagagaaaca

SEQ ID NO: 2511918 - RNA, 19 nt, Homo sapiens
  misc_RNA (1)...(19): siRNA sense strand
agaacaagcucuuacgaca

SEQ ID NO: 2511919 - RNA, 19 nt, Homo sapiens
  misc_RNA (1)...(19): siRNA sense strand
aaugaaaagacgacagaaa

SEQ ID NO: 2511920 - RNA, 19 nt, Homo sapiens
  misc_RNA (1)...(19): siRNA sense strand
ccauguugguucagcaaaa

SEQ ID NO: 2511921 - RNA, 19 nt, Homo sapiens
  misc_RNA (1)...(19): siRNA sense strand
caaagauauuauugaggca

SEQ ID NO: 2511922 - RNA, 19 nt, Homo sapiens
  misc_RNA (1)...(19): siRNA sense strand
aaucaaauggaaugccaaa

SEQ ID NO: 2511923 - RNA, 19 nt, Homo sapiens
  misc_RNA (1)...(19): siRNA sense strand
augaaugcaaagagaagaa

SEQ ID NO: 2511924 - RNA, 19 nt, Homo sapiens
  misc_RNA (1)...(19): siRNA sense strand
ccuugaggcuagaaacgaa

SEQ ID NO: 2511925 - RNA, 19 nt, Homo sapiens
  misc_RNA (1)...(19): siRNA sense strand
acccaaaagucgauauuaa

SEQ ID NO: 2511926 - RNA, 19 nt, Homo sapiens
  misc_RNA (1)...(19): siRNA sense strand
aagaaacaacagaucgaua

SEQ ID NO: 2511927 - RNA, 19 nt, Homo sapiens
  misc_RNA (1)...(19): siRNA sense strand
ggaaaacaacccucagaaa

SEQ ID NO: 2511928 - RNA, 19 nt, Homo sapiens
  misc_RNA (1)...(19): siRNA sense strand
guucaaaacauccagaaaa

SEQ ID NO: 2511929 - RNA, 19 nt, Homo sapiens
  misc_RNA (1)...(19): siRNA sense strand
cuuccaaaaugcagagaau

SEQ ID NO: 2511930 - RNA, 19 nt, Homo sapiens
  misc_RNA (1)...(19): siRNA sense strand
gggaagaggaucggcagaa

SEQ ID NO: 2511931 - RNA, 19 nt, Homo sapiens
  misc_RNA (1)...(19): siRNA sense strand
aagcaagauuauaagcaga

SEQ ID NO: 2511932 - RNA, 19 nt, Homo sapiens
  misc_RNA (1)...(19): siRNA sense strand
cagcaacacguuaguggaa

SEQ ID NO: 2511933 - RNA, 19 nt, Homo sapiens
  misc_RNA (1)...(19): siRNA sense strand
ugaaaagacgacagaaaau

SEQ ID NO: 2511934 - RNA, 19 nt, Homo sapiens
  misc_RNA (1)...(19): siRNA sense strand
gacagaaaauaaugagcaa

SEQ ID NO: 2511935 - RNA, 19 nt, Homo sapiens
  misc_RNA (1)...(19): siRNA sense strand
gcgaugaaugcaaagagaa

SEQ ID NO: 2511936 - RNA, 19 nt, Homo sapiens
  misc_RNA (1)...(19): siRNA sense strand
agaagaaacaacagaucga

SEQ ID NO: 2511937 - RNA, 19 nt, Homo sapiens
  misc_RNA (1)...(19): siRNA sense strand
ggaaauggcucaaaaggca

SEQ ID NO: 2511938 - RNA, 19 nt, Homo sapiens
  misc_RNA (1)...(19): siRNA sense strand
cugaagaccuugaggcuag

SEQ ID NO: 2511939 - RNA, 19 nt, Homo sapiens
  misc_RNA (1)...(19): siRNA sense strand
agcuaaaggacaaagauau

SEQ ID NO: 2511940 - RNA, 19 nt, Homo sapiens
  misc_RNA (1)...(19): siRNA sense strand
aacuacagcuucaggaaau

SEQ ID NO: 2511941 - RNA, 19 nt, Homo sapiens
  misc_RNA (1)...(19): siRNA sense strand
ccacuuuaucugaugagaa

SEQ ID NO: 2511942 - RNA, 19 nt, Homo sapiens
  misc_RNA (1)...(19): siRNA sense strand
guggaguggaugaguauuu

SEQ ID NO: 2511943 - RNA, 19 nt, Homo sapiens
  misc_RNA (1)...(19): siRNA sense strand
augauaaagcuaaaggaca

SEQ ID NO: 2511944 - RNA, 19 nt, Homo sapiens
  misc_RNA (1)...(19): siRNA sense strand
cuuaauauugcgaagucaa

SEQ ID NO: 2511945 - RNA, 19 nt, Homo sapiens
  misc_RNA (1)...(19): siRNA sense strand
cuacaaagaugcaccagca

SEQ ID NO: 2511946 - RNA, 19 nt, Homo sapiens
  misc_RNA (1)...(19): siRNA sense strand
aagcaagaacgcacaaauu

SEQ ID NO: 2511947 - RNA, 19 nt, Homo sapiens
  misc_RNA (1)...(19): siRNA sense strand
gcaacacguuaguggaacu

SEQ ID NO: 2511948 - RNA, 19 nt, Homo sapiens
  misc_RNA (1)...(19): siRNA sense strand
gaucauucgccucaagcaa

SEQ ID NO: 2511949 - RNA, 19 nt, Homo sapiens
  misc_RNA (1)...(19): siRNA sense strand
cagcaaaauaggucagaca

SEQ ID NO: 2511950 - RNA, 19 nt, Homo sapiens
  misc_RNA (1)...(19): siRNA sense strand
cgaugaaugcaaagagaag

SEQ ID NO: 2511951 - RNA, 19 nt, Homo sapiens
  misc_RNA (1)...(19): siRNA sense strand
agaaggugaacuacauaaa

SEQ ID NO: 2511952 - RNA, 19 nt, Homo sapiens
  misc_RNA (1)...(19): siRNA sense strand
gcgaaaguggcauguguga

SEQ ID NO: 2511953 - RNA, 19 nt, Homo sapiens
  misc_RNA (1)...(19): siRNA sense strand
ugagagaagaugagacgga

SEQ ID NO: 2511954 - RNA, 19 nt, Homo sapiens
  misc_RNA (1)...(19): siRNA sense strand
agaaauugaaggcacuuaa

SEQ ID NO: 2511955 - RNA, 19 nt, Homo sapiens
  misc_RNA (1)...(19): siRNA sense strand
agaaaagaggaaagaugaa

SEQ ID NO: 2511956 - RNA, 19 nt, Homo sapiens
  misc_RNA (1)...(19): siRNA sense strand
gcccaucagccaugagaau

SEQ ID NO: 2511957 - RNA, 19 nt, Homo sapiens
  misc_RNA (1)...(19): siRNA sense strand
auguaaaacaacagaguga

SEQ ID NO: 2511958 - RNA, 19 nt, Homo sapiens
  misc_RNA (1)...(19): siRNA sense strand
aaugcaaagagaagaaaca

SEQ ID NO: 2511959 - RNA, 19 nt, Homo sapiens
  misc_RNA (1)...(19): siRNA sense strand
agauugaacccgaaaacaa

SEQ ID NO: 2511960 - RNA, 19 nt, Homo sapiens
  misc_RNA (1)...(19): siRNA sense strand
cagauggaaagguccgaaa

SEQ ID NO: 2511961 - RNA, 19 nt, Homo sapiens
  misc_RNA (1)...(19): siRNA sense strand
ucacucacgaagaagguaa

SEQ ID NO: 2511962 - RNA, 19 nt, Homo sapiens
  misc_RNA (1)...(19): siRNA sense strand
acgacaaugauaaagcuaa

SEQ ID NO: 2511963 - RNA, 19 nt, Homo sapiens
  misc_RNA (1)...(19): siRNA sense strand
gauaaagcuaaaggacaaa

SEQ ID NO: 2511964 - RNA, 19 nt, Homo sapiens
  misc_RNA (1)...(19): siRNA sense strand
augaaaagacgacagaaaa

SEQ ID NO: 2511965 - RNA, 19 nt, Homo sapiens
  misc_RNA (1)...(19): siRNA sense strand
ugucugacguggaguggau

SEQ ID NO: 2511966 - RNA, 19 nt, Homo sapiens
  misc_RNA (1)...(19): siRNA sense strand
uugcagauuguucggguaa

SEQ ID NO: 2511967 - RNA, 19 nt, Homo sapiens
  misc_RNA (1)...(19): siRNA sense strand
aaauaaugagcaacgagaa

SEQ ID NO: 2511968 - RNA, 19 nt, Homo sapiens
  misc_RNA (1)...(19): siRNA sense strand
gcucauuggagaauuaaaa

SEQ ID NO: 2511969 - RNA, 19 nt, Homo sapiens
  misc_RNA (1)...(19): siRNA sense strand
aagcagaaauugaaggcac

SEQ ID NO: 2511970 - RNA, 19 nt, Homo sapiens
  misc_RNA (1)...(19): siRNA sense strand
aggaaagaugaauugcuua

SEQ ID NO: 2511971 - RNA, 19 nt, Homo sapiens
  misc_RNA (1)...(19): siRNA sense strand
gcacaaauucagaacugca

SEQ ID NO: 2511972 - RNA, 19 nt, Homo sapiens
  misc_RNA (1)...(19): siRNA sense strand
cguccaaggaggagcucau

SEQ ID NO: 2511973 - RNA, 19 nt, Homo sapiens
  misc_RNA (1)...(19): siRNA sense strand
gugcagaugaugaggcagu

SEQ ID NO: 2511974 - RNA, 19 nt, Homo sapiens
  misc_RNA (1)...(19): siRNA sense strand
ggguggaaguguacugcca

SEQ ID NO: 2511975 - RNA, 19 nt, Homo sapiens
  misc_RNA (1)...(19): siRNA sense strand
uucaagaagaacaagcaaa

SEQ ID NO: 2511976 - RNA, 19 nt, Homo sapiens
  misc_RNA (1)...(19): siRNA sense strand
gcuuaacggacggggaaaa

SEQ ID NO: 2511977 - RNA, 19 nt, Homo sapiens
  misc_RNA (1)...(19): siRNA sense strand
acagagaaguucaagacca

SEQ ID NO: 2511978 - RNA, 19 nt, Homo sapiens
  misc_RNA (1)...(19): siRNA sense strand
ggucagaaggggaggccau

SEQ ID NO: 2511979 - RNA, 19 nt, Homo sapiens
  misc_RNA (1)...(19): siRNA sense strand
aagcagaagcccagccuca

SEQ ID NO: 2511980 - RNA, 19 nt, Homo sapiens
  misc_RNA (1)...(19): siRNA sense strand
cagagaaguucaagaccag

SEQ ID NO: 2511981 - RNA, 19 nt, Homo sapiens
  misc_RNA (1)...(19): siRNA sense strand
caggcagaggugugaagaa

SEQ ID NO: 2511982 - RNA, 19 nt, Homo sapiens
  misc_RNA (1)...(19): siRNA sense strand
gggcagaagcugagcgaga

SEQ ID NO: 2511983 - RNA, 19 nt, Homo sapiens
  misc_RNA (1)...(19): siRNA sense strand
cagaaagauugcaugggaa

SEQ ID NO: 2511984 - RNA, 19 nt, Homo sapiens
  misc_RNA (1)...(19): siRNA sense strand
ggguuaaauuauucccaaa

SEQ ID NO: 2511985 - RNA, 19 nt, Homo sapiens
  misc_RNA (1)...(19): siRNA sense strand
ugauagaugccuugagaga

SEQ ID NO: 2511986 - RNA, 19 nt, Homo sapiens
  misc_RNA (1)...(19): siRNA sense strand
gcagaaaggcugagcugga

SEQ ID NO: 2511987 - RNA, 19 nt, Homo sapiens
  misc_RNA (1)...(19): siRNA sense strand
agcaaaagcagcuggaaaa

SEQ ID NO: 2511988 - RNA, 19 nt, Homo sapiens
  misc_RNA (1)...(19): siRNA sense strand
gcugaaaguucgugcuacu

SEQ ID NO: 2511989 - RNA, 19 nt, Homo sapiens
  misc_RNA (1)...(19): siRNA sense strand
cagucgaaggagagagaga

SEQ ID NO: 2511990 - RNA, 19 nt, Homo sapiens
  misc_RNA (1)...(19): siRNA sense strand
gguuuaugggagauauaua

SEQ ID NO: 2511991 - RNA, 19 nt, Homo sapiens
  misc_RNA (1)...(19): siRNA sense strand
aagcaaaagcagcuggaaa

SEQ ID NO: 2511992 - RNA, 19 nt, Homo sapiens
  misc_RNA (1)...(19): siRNA sense strand
gugugaaauuuaugcccua

SEQ ID NO: 2511993 - RNA, 19 nt, Homo sapiens
  misc_RNA (1)...(19): siRNA sense strand
ugugauaagacaagcaaaa

SEQ ID NO: 2511994 - RNA, 19 nt, Homo sapiens
  misc_RNA (1)...(19): siRNA sense strand
aaggaagaccaaugagaga

SEQ ID NO: 2511995 - RNA, 19 nt, Homo sapiens
  misc_RNA (1)...(19): siRNA sense strand
gacuguacuuggaggaaaa

SEQ ID NO: 2511996 - RNA, 19 nt, Homo sapiens
  misc_RNA (1)...(19): siRNA sense strand
gugauguccuggagcgaga

SEQ ID NO: 2511997 - RNA, 19 nt, Homo sapiens
  misc_RNA (1)...(19): siRNA sense strand
acacgaugcagcugagauu

SEQ ID NO: 2511998 - RNA, 19 nt, Homo sapiens
  misc_RNA (1)...(19): siRNA sense strand
guucaaaaugucagaaaga

SEQ ID NO: 2511999 - RNA, 19 nt, Homo sapiens
  misc_RNA (1)...(19): siRNA sense strand
agacagugugauaagacaa

SEQ ID NO: 2512000 - RNA, 19 nt, Homo sapiens
  misc_RNA (1)...(19): siRNA sense strand
agacuguacuuggaggaaa

SEQ ID NO: 2512001 - RNA, 19 nt, Homo sapiens
  misc_RNA (1)...(19): siRNA sense strand
cgaucgaggugcuagggau

SEQ ID NO: 2512002 - RNA, 19 nt, Homo sapiens
  misc_RNA (1)...(19): siRNA sense strand
agaaacacgcagugguuca

SEQ ID NO: 2512003 - RNA, 19 nt, Homo sapiens
  misc_RNA (1)...(19): siRNA sense strand
cugcagacuucaaacucaa

SEQ ID NO: 2512004 - RNA, 19 nt, Homo sapiens
  misc_RNA (1)...(19): siRNA sense strand
ggaucaaaccagacucaca

SEQ ID NO: 2512005 - RNA, 19 nt, Homo sapiens
  misc_RNA (1)...(19): siRNA sense strand
auuacacagagguggauaa

SEQ ID NO: 2512006 - RNA, 19 nt, Homo sapiens
  misc_RNA (1)...(19): siRNA sense strand
acauauuaauccuccacua

SEQ ID NO: 2512007 - RNA, 19 nt, Homo sapiens
  misc_RNA (1)...(19): siRNA sense strand
gcuccaagguucucaggca

SEQ ID NO: 2512008 - RNA, 19 nt, Homo sapiens
  misc_RNA (1)...(19): siRNA sense strand
auucagaaguccuauucaa

SEQ ID NO: 2512009 - RNA, 19 nt, Homo sapiens
  misc_RNA (1)...(19): siRNA sense strand
ccacaggcacugcgcagaa

SEQ ID NO: 2512010 - RNA, 19 nt, Homo sapiens
  misc_RNA (1)...(19): siRNA sense strand
gcauuauugguuuggucaa

SEQ ID NO: 2512011 - RNA, 19 nt, Homo sapiens
  misc_RNA (1)...(19): siRNA sense strand
gucacgaggcauuuggaua

SEQ ID NO: 2512012 - RNA, 19 nt, Homo sapiens
  misc_RNA (1)...(19): siRNA sense strand
acuguagguuuaugggaga

SEQ ID NO: 2512013 - RNA, 19 nt, Homo sapiens
  misc_RNA (1)...(19): siRNA sense strand
gcagcuucguggaggagga

SEQ ID NO: 2512014 - RNA, 19 nt, Homo sapiens
  misc_RNA (1)...(19): siRNA sense strand
uguggaauaugauggaaca

SEQ ID NO: 2512015 - RNA, 19 nt, Homo sapiens
  misc_RNA (1)...(19): siRNA sense strand
aggcauuuggauaaaguau

SEQ ID NO: 2512016 - RNA, 19 nt, Homo sapiens
  misc_RNA (1)...(19): siRNA sense strand
ugggagauauauaguggau

SEQ ID NO: 2512017 - RNA, 19 nt, Homo sapiens
  misc_RNA (1)...(19): siRNA sense strand
guguauucuucacggcaau

SEQ ID NO: 2512018 - RNA, 19 nt, Homo sapiens
  misc_RNA (1)...(19): siRNA sense strand
aggacauuuccaaggguau

SEQ ID NO: 2512019 - RNA, 19 nt, Homo sapiens
  misc_RNA (1)...(19): siRNA sense strand
acuucaaacucaagacugu

SEQ ID NO: 2512020 - RNA, 19 nt, Homo sapiens
  misc_RNA (1)...(19): siRNA sense strand
cagauuacacagaggugga

SEQ ID NO: 2512021 - RNA, 19 nt, Homo sapiens
  misc_RNA (1)...(19): siRNA sense strand
cugaagacgcugagcuugu

SEQ ID NO: 2512022 - RNA, 19 nt, Homo sapiens
  misc_RNA (1)...(19): siRNA sense strand
gggagaugacggugagccu

SEQ ID NO: 2512023 - RNA, 19 nt, Homo sapiens
  misc_RNA (1)...(19): siRNA sense strand
ucacugcagucgaaggaga

SEQ ID NO: 2512024 - RNA, 19 nt, Homo sapiens
  misc_RNA (1)...(19): siRNA sense strand
gaauagucuuuuauggaga

SEQ ID NO: 2512025 - RNA, 19 nt, Homo sapiens
  misc_RNA (1)...(19): siRNA sense strand
agaaagauugcaugggaac

SEQ ID NO: 2512026 - RNA, 19 nt, Homo sapiens
  misc_RNA (1)...(19): siRNA sense strand
ggacauuuccaaggguauu

SEQ ID NO: 2512027 - RNA, 19 nt, Homo sapiens
  misc_RNA (1)...(19): siRNA sense strand
ccacauaaucuuccggucu

SEQ ID NO: 2512028 - RNA, 19 nt, Homo sapiens
  misc_RNA (1)...(19): siRNA sense strand
auucagacucuaaugacua

SEQ ID NO: 2512029 - RNA, 19 nt, Homo sapiens
  misc_RNA (1)...(19): siRNA sense strand
ggcaauggaucaaaccaga

SEQ ID NO: 2512030 - RNA, 19 nt, Homo sapiens
  misc_RNA (1)...(19): siRNA sense strand
aagcugagcgagauggaca

SEQ ID NO: 2512031 - RNA, 19 nt, Homo sapiens
  misc_RNA (1)...(19): siRNA sense strand
uagguuuaugggagauaua

SEQ ID NO: 2512032 - RNA, 19 nt, Homo sapiens
  misc_RNA (1)...(19): siRNA sense strand
guuacuaugccucgaauca

SEQ ID NO: 2512033 - RNA, 19 nt, Homo sapiens
  misc_RNA (1)...(19): siRNA sense strand
auaauaaugucacgaggca

SEQ ID NO: 2512034 - RNA, 19 nt, Homo sapiens
  misc_RNA (1)...(19): siRNA sense strand
uugcaugggaacuggauca

SEQ ID NO: 2512035 - RNA, 19 nt, Homo sapiens
  misc_RNA (1)...(19): siRNA sense strand
ggguauuauugaagcucgu

SEQ ID NO: 2512036 - RNA, 19 nt, Homo sapiens
  misc_RNA (1)...(19): siRNA sense strand
cccaaaggcuguuagggaa

SEQ ID NO: 2512037 - RNA, 19 nt, Homo sapiens
  misc_RNA (1)...(19): siRNA sense strand
cugugaagucugaaaggaa

SEQ ID NO: 2512038 - RNA, 19 nt, Homo sapiens
  misc_RNA (1)...(19): siRNA sense strand
gugaagucugaaaggaaga

SEQ ID NO: 2512039 - RNA, 19 nt, Homo sapiens
  misc_RNA (1)...(19): siRNA sense strand
aggacaaauuacaaugcau

SEQ ID NO: 2512040 - RNA, 19 nt, Homo sapiens
  misc_RNA (1)...(19): siRNA sense strand
gggaagagaaccagggucc

SEQ ID NO: 2512041 - RNA, 19 nt, Homo sapiens
  misc_RNA (1)...(19): siRNA sense strand
cuguuagggaagagaacca

SEQ ID NO: 2512042 - RNA, 19 nt, Homo sapiens
  misc_RNA (1)...(19): siRNA sense strand
cuauauuucaucagcaaca

SEQ ID NO: 2512043 - RNA, 19 nt, Homo sapiens
  misc_RNA (1)...(19): siRNA sense strand
uggauucacagaaggacaa

SEQ ID NO: 2512044 - RNA, 19 nt, Homo sapiens
  misc_RNA (1)...(19): siRNA sense strand
cagugggauugcuggauca

SEQ ID NO: 2512045 - RNA, 19 nt, Homo sapiens
  misc_RNA (1)...(19): siRNA sense strand
cuggugaggacauggagaa

SEQ ID NO: 2512046 - RNA, 19 nt, Homo sapiens
  misc_RNA (1)...(19): siRNA sense strand
agcaaugaggaaagaaaca

SEQ ID NO: 2512047 - RNA, 19 nt, Homo sapiens
  misc_RNA (1)...(19): siRNA sense strand
uugcuuuaaccgugaagaa

SEQ ID NO: 2512048 - RNA, 19 nt, Homo sapiens
  misc_RNA (1)...(19): siRNA sense strand
acacagaaugaaagaccaa

SEQ ID NO: 2512049 - RNA, 19 nt, Homo sapiens
  misc_RNA (1)...(19): siRNA sense strand
ggucuugugcacaggaaaa

SEQ ID NO: 2512050 - RNA, 19 nt, Homo sapiens
  misc_RNA (1)...(19): siRNA sense strand
guauggaaaaggagauaau

SEQ ID NO: 2512051 - RNA, 19 nt, Homo sapiens
  misc_RNA (1)...(19): siRNA sense strand
aaggaacagaagugcuuaa

SEQ ID NO: 2512052 - RNA, 19 nt, Homo sapiens
  misc_RNA (1)...(19): siRNA sense strand
caucaauaucuacaggaga

SEQ ID NO: 2512053 - RNA, 19 nt, Homo sapiens
  misc_RNA (1)...(19): siRNA sense strand
gaaaaggagauaauggaga

SEQ ID NO: 2512054 - RNA, 19 nt, Homo sapiens
  misc_RNA (1)...(19): siRNA sense strand
gauacaaggaggggauaua

SEQ ID NO: 2512055 - RNA, 19 nt, Homo sapiens
  misc_RNA (1)...(19): siRNA sense strand
ucaagaauuugcauggcau

SEQ ID NO: 2512056 - RNA, 19 nt, Homo sapiens
  misc_RNA (1)...(19): siRNA sense strand
ucaucgaauaguacagaau

SEQ ID NO: 2512057 - RNA, 19 nt, Homo sapiens
  misc_RNA (1)...(19): siRNA sense strand
ucaacguggcauaagacua

SEQ ID NO: 2512058 - RNA, 19 nt, Homo sapiens
  misc_RNA (1)...(19): siRNA sense strand
ccaucaucaucgugggcaa

SEQ ID NO: 2512059 - RNA, 19 nt, Homo sapiens
  misc_RNA (1)...(19): siRNA sense strand
gagacgagggugaucggaa

SEQ ID NO: 2512060 - RNA, 19 nt, Homo sapiens
  misc_RNA (1)...(19): siRNA sense strand
acgccuacauccuggucua

SEQ ID NO: 2512061 - RNA, 19 nt, Homo sapiens
  misc_RNA (1)...(19): siRNA sense strand
cagcuaaaguuaugggaga

SEQ ID NO: 2512062 - RNA, 19 nt, Homo sapiens
  misc_RNA (1)...(19): siRNA sense strand
ucaaggaacuagaggcaga

SEQ ID NO: 2512063 - RNA, 19 nt, Homo sapiens
  misc_RNA (1)...(19): siRNA sense strand
gcacaagugaugacggaca

SEQ ID NO: 2512064 - RNA, 19 nt, Homo sapiens
  misc_RNA (1)...(19): siRNA sense strand
cuguaugacacguggacuu

SEQ ID NO: 2512065 - RNA, 19 nt, Homo sapiens
  misc_RNA (1)...(19): siRNA sense strand
cagacgaaggacagaaaca

SEQ ID NO: 2512066 - RNA, 19 nt, Homo sapiens
  misc_RNA (1)...(19): siRNA sense strand
cagagaagccagaggcauc

SEQ ID NO: 2512067 - RNA, 19 nt, Homo sapiens
  misc_RNA (1)...(19): siRNA sense strand
augaggaagccuugaguga

SEQ ID NO: 2512068 - RNA, 19 nt, Homo sapiens
  misc_RNA (1)...(19): siRNA sense strand
uagcaauacauuuggacuu

SEQ ID NO: 2512069 - RNA, 19 nt, Homo sapiens
  misc_RNA (1)...(19): siRNA sense strand
ggaggacaguggucgggua

SEQ ID NO: 2512070 - RNA, 19 nt, Homo sapiens
  misc_RNA (1)...(19): siRNA sense strand
ccuauuucauuaaggccua

SEQ ID NO: 2512071 - RNA, 19 nt, Homo sapiens
  misc_RNA (1)...(19): siRNA sense strand
uagccauuacauugagaaa

SEQ ID NO: 2512072 - RNA, 19 nt, Homo sapiens
  misc_RNA (1)...(19): siRNA sense strand
gggaguauguccagaggcu

SEQ ID NO: 2512073 - RNA, 19 nt, Homo sapiens
  misc_RNA (1)...(19): siRNA sense strand
ccccaaagcccuagagcau

SEQ ID NO: 2512074 - RNA, 19 nt, Homo sapiens
  misc_RNA (1)...(19): siRNA sense strand
ucacaagggcagacggcca

SEQ ID NO: 2512075 - RNA, 19 nt, Homo sapiens
  misc_RNA (1)...(19): siRNA sense strand
agauagaacgucagcggga

SEQ ID NO: 2512076 - RNA, 19 nt, Homo sapiens
  misc_RNA (1)...(19): siRNA sense strand
ucucaaggaacuagaggca

SEQ ID NO: 2512077 - RNA, 19 nt, Homo sapiens
  misc_RNA (1)...(19): siRNA sense strand
acaguuacuuugaagccua

SEQ ID NO: 2512078 - RNA, 19 nt, Homo sapiens
  misc_RNA (1)...(19): siRNA sense strand
aaguggagaaccaggauga

SEQ ID NO: 2512079 - RNA, 19 nt, Homo sapiens
  misc_RNA (1)...(19): siRNA sense strand
gacccugaggagagguuua

SEQ ID NO: 2512080 - RNA, 19 nt, Homo sapiens
  misc_RNA (1)...(19): siRNA sense strand
aaagaauuggcaugggaga

SEQ ID NO: 2512081 - RNA, 19 nt, Homo sapiens
  misc_RNA (1)...(19): siRNA sense strand
auucaggaguggaaaauau

SEQ ID NO: 2512082 - RNA, 19 nt, Homo sapiens
  misc_RNA (1)...(19): siRNA sense strand
gaggaaugcaccugccuga

SEQ ID NO: 2512083 - RNA, 19 nt, Homo sapiens
  misc_RNA (1)...(19): siRNA sense strand
gcgccauccugaagcggaa

SEQ ID NO: 2512084 - RNA, 19 nt, Homo sapiens
  misc_RNA (1)...(19): siRNA sense strand
ccucugagcuccaggcagu

SEQ ID NO: 2512085 - RNA, 19 nt, Homo sapiens
  misc_RNA (1)...(19): siRNA sense strand
cugacaaggaggccaggaa

SEQ ID NO: 2512086 - RNA, 19 nt, Homo sapiens
  misc_RNA (1)...(19): siRNA sense strand
cgaccugggaggaccgauu

SEQ ID NO: 2512087 - RNA, 19 nt, Homo sapiens
  misc_RNA (1)...(19): siRNA sense strand
ggauccgggcacagaagaa

SEQ ID NO: 2512088 - RNA, 19 nt, Homo sapiens
  misc_RNA (1)...(19): siRNA sense strand
cggagaagcuggauguggu

SEQ ID NO: 2512089 - RNA, 19 nt, Homo sapiens
  misc_RNA (1)...(19): siRNA sense strand
aggggaagguggagagugu

SEQ ID NO: 2512090 - RNA, 19 nt, Homo sapiens
  misc_RNA (1)...(19): siRNA sense strand
ggaacaacauaccaaggca

SEQ ID NO: 2512091 - RNA, 19 nt, Homo sapiens
  misc_RNA (1)...(19): siRNA sense strand
gggcaugagcuggugaaca

SEQ ID NO: 2512092 - RNA, 19 nt, Homo sapiens
  misc_RNA (1)...(19): siRNA sense strand
cagggaagaggcugcggaa

SEQ ID NO: 2512093 - RNA, 19 nt, Homo sapiens
  misc_RNA (1)...(19): siRNA sense strand
agcuggauguggugguaau

SEQ ID NO: 2512094 - RNA, 19 nt, Homo sapiens
  misc_RNA (1)...(19): siRNA sense strand
auucagggccucaaggaga

SEQ ID NO: 2512095 - RNA, 19 nt, Homo sapiens
  misc_RNA (1)...(19): siRNA sense strand
aggaggagguggugcgcaa

SEQ ID NO: 2512096 - RNA, 19 nt, Homo sapiens
  misc_RNA (1)...(19): siRNA sense strand
cgucaaugggagugggcau

SEQ ID NO: 2512097 - RNA, 19 nt, Homo sapiens
  misc_RNA (1)...(19): siRNA sense strand
ccagagaacaaaaggacaa

SEQ ID NO: 2512098 - RNA, 19 nt, Homo sapiens
  misc_RNA (1)...(19): siRNA sense strand
cugcaaaaccacagccuaa

SEQ ID NO: 2512099 - RNA, 19 nt, Homo sapiens
  misc_RNA (1)...(19): siRNA sense strand
acaaugacuuugagcccua

SEQ ID NO: 2512100 - RNA, 19 nt, Homo sapiens
  misc_RNA (1)...(19): siRNA sense strand
cagucaaaucagaguaaca

SEQ ID NO: 2512101 - RNA, 19 nt, Homo sapiens
  misc_RNA (1)...(19): siRNA sense strand
gcucaguaacggagaccau

SEQ ID NO: 2512102 - RNA, 19 nt, Homo sapiens
  misc_RNA (1)...(19): siRNA sense strand
gggucuggucucaggacaa

SEQ ID NO: 2512103 - RNA, 19 nt, Homo sapiens
  misc_RNA (1)...(19): siRNA sense strand
acggcagagucgaaacaaa

SEQ ID NO: 2512104 - RNA, 19 nt, Homo sapiens
  misc_RNA (1)...(19): siRNA sense strand
uggagaauaacgacaacaa

SEQ ID NO: 2512105 - RNA, 19 nt, Homo sapiens
  misc_RNA (1)...(19): siRNA sense strand
gcguaugggagcagcuaca

SEQ ID NO: 2512106 - RNA, 19 nt, Homo sapiens
  misc_RNA (1)...(19): siRNA sense strand
uguucaucaucaagagcua

SEQ ID NO: 2512107 - RNA, 19 nt, Homo sapiens
  misc_RNA (1)...(19): siRNA sense strand
gcacggugguugaugggca

SEQ ID NO: 2512108 - RNA, 19 nt, Homo sapiens
  misc_RNA (1)...(19): siRNA sense strand
gucacaaacucccgggaca

SEQ ID NO: 2512109 - RNA, 19 nt, Homo sapiens
  misc_RNA (1)...(19): siRNA sense strand
ggaacaacaucuaucagca

SEQ ID NO: 2512110 - RNA, 19 nt, Homo sapiens
  misc_RNA (1)...(19): siRNA sense strand
ucguuacaucagaaggaua

SEQ ID NO: 2512111 - RNA, 19 nt, Homo sapiens
  misc_RNA (1)...(19): siRNA sense strand
acgagaagcgccaggagga

SEQ ID NO: 2512112 - RNA, 19 nt, Homo sapiens
  misc_RNA (1)...(19): siRNA sense strand
cagccuaaaaugaaaacaa

SEQ ID NO: 2512113 - RNA, 19 nt, Homo sapiens
  misc_RNA (1)...(19): siRNA sense strand
ggacauuggcaccugggau

SEQ ID NO: 2512114 - RNA, 19 nt, Homo sapiens
  misc_RNA (1)...(19): siRNA sense strand
aggacaaguggaaggggaa

SEQ ID NO: 2512115 - RNA, 19 nt, Homo sapiens
  misc_RNA (1)...(19): siRNA sense strand
cggcagagucgaaacaaac

SEQ ID NO: 2512116 - RNA, 19 nt, Homo sapiens
  misc_RNA (1)...(19): siRNA sense strand
gguccaaaguuguaccaga

SEQ ID NO: 2512117 - RNA, 19 nt, Homo sapiens
  misc_RNA (1)...(19): siRNA sense strand
gaggaggaccugaaggaca

SEQ ID NO: 2512118 - RNA, 19 nt, Homo sapiens
  misc_RNA (1)...(19): siRNA sense strand
agaaggagaaugaggagga

SEQ ID NO: 2512119 - RNA, 19 nt, Homo sapiens
  misc_RNA (1)...(19): siRNA sense strand
cgacugaucucaugccgua

SEQ ID NO: 2512120 - RNA, 19 nt, Homo sapiens
  misc_RNA (1)...(19): siRNA sense strand
gcacaggagacgauggacu

SEQ ID NO: 2512121 - RNA, 19 nt, Homo sapiens
  misc_RNA (1)...(19): siRNA sense strand
uggccaugguggagggugu

SEQ ID NO: 2512122 - RNA, 19 nt, Homo sapiens
  misc_RNA (1)...(19): siRNA sense strand
gggacaaggcacaggagac

SEQ ID NO: 2512123 - RNA, 19 nt, Homo sapiens
  misc_RNA (1)...(19): siRNA sense strand
uguccaacgaugugaggau

SEQ ID NO: 2512124 - RNA, 19 nt, Homo sapiens
  misc_RNA (1)...(19): siRNA sense strand
ccacaggcgcagugaucca

SEQ ID NO: 2512125 - RNA, 19 nt, Homo sapiens
  misc_RNA (1)...(19): siRNA sense strand
gccaggaccucuaccgcaa

SEQ ID NO: 2512126 - RNA, 19 nt, Homo sapiens
  misc_RNA (1)...(19): siRNA sense strand
cggcagagcagauacggga

SEQ ID NO: 2512127 - RNA, 19 nt, Homo sapiens
  misc_RNA (1)...(19): siRNA sense strand
accucgagacggugacaaa

SEQ ID NO: 2512128 - RNA, 19 nt, Homo sapiens
  misc_RNA (1)...(19): siRNA sense strand
gccuagaugacguguccaa

SEQ ID NO: 2512129 - RNA, 19 nt, Homo sapiens
  misc_RNA (1)...(19): siRNA sense strand
agacggugacaaaggacau

SEQ ID NO: 2512130 - RNA, 19 nt, Homo sapiens
  misc_RNA (1)...(19): siRNA sense strand
cuaaaggucuccagggaca

SEQ ID NO: 2512131 - RNA, 19 nt, Homo sapiens
  misc_RNA (1)...(19): siRNA sense strand
aggccaaggcugugcucaa

SEQ ID NO: 2512132 - RNA, 19 nt, Homo sapiens
  misc_RNA (1)...(19): siRNA sense strand
gggcagguucagagaagca

SEQ ID NO: 2512133 - RNA, 19 nt, Homo sapiens
  misc_RNA (1)...(19): siRNA sense strand
gcccaggcacagagagaga

SEQ ID NO: 2512134 - RNA, 19 nt, Homo sapiens
  misc_RNA (1)...(19): siRNA sense strand
caucaaggacguugccaga

SEQ ID NO: 2512135 - RNA, 19 nt, Homo sapiens
  misc_RNA (1)...(19): siRNA sense strand
aggacaugaaggaccguua

SEQ ID NO: 2512136 - RNA, 19 nt, Homo sapiens
  misc_RNA (1)...(19): siRNA sense strand
cguugaagcugcagucgga

SEQ ID NO: 2512137 - RNA, 19 nt, Homo sapiens
  misc_RNA (1)...(19): siRNA sense strand
aggugaaggacaugaagga

SEQ ID NO: 2512138 - RNA, 19 nt, Homo sapiens
  misc_RNA (1)...(19): siRNA sense strand
guguagacguggaguggac

SEQ ID NO: 2512139 - RNA, 19 nt, Homo sapiens
  misc_RNA (1)...(19): siRNA sense strand
aggcccaggcacagagaga

SEQ ID NO: 2512140 - RNA, 19 nt, Homo sapiens
  misc_RNA (1)...(19): siRNA sense strand
ccugagagccaaagcguga

SEQ ID NO: 2512141 - RNA, 19 nt, Homo sapiens
  misc_RNA (1)...(19): siRNA sense strand
cuacuaagagcaaggcaga

SEQ ID NO: 2512142 - RNA, 19 nt, Homo sapiens
  misc_RNA (1)...(19): siRNA sense strand
cuguguuuguggaggugaa

SEQ ID NO: 2512143 - RNA, 19 nt, Homo sapiens
  misc_RNA (1)...(19): siRNA sense strand
aggaaguggaugucgccaa

SEQ ID NO: 2512144 - RNA, 19 nt, Homo sapiens
  misc_RNA (1)...(19): siRNA sense strand
agaccuuuguggugcucua

SEQ ID NO: 2512145 - RNA, 19 nt, Homo sapiens
  misc_RNA (1)...(19): siRNA sense strand
aggcagagcuggguggcau

SEQ ID NO: 2512146 - RNA, 19 nt, Homo sapiens
  misc_RNA (1)...(19): siRNA sense strand
uguuuguggaggugaaaga

SEQ ID NO: 2512147 - RNA, 19 nt, Homo sapiens
  misc_RNA (1)...(19): siRNA sense strand
ucauaaacagccagaccuu

SEQ ID NO: 2512148 - RNA, 19 nt, Homo sapiens
  misc_RNA (1)...(19): siRNA sense strand
caggagcagcacagaguca

SEQ ID NO: 2512149 - RNA, 19 nt, Homo sapiens
  misc_RNA (1)...(19): siRNA sense strand
ggguuaugguuuugugaaa

SEQ ID NO: 2512150 - RNA, 19 nt, Homo sapiens
  misc_RNA (1)...(19): siRNA sense strand
ccuacauggaugagaacuu

SEQ ID NO: 2512151 - RNA, 19 nt, Homo sapiens
  misc_RNA (1)...(19): siRNA sense strand
cauaugaagaaguuggaga

SEQ ID NO: 2512152 - RNA, 19 nt, Homo sapiens
  misc_RNA (1)...(19): siRNA sense strand
gcgucaaaauuauccgaaa

SEQ ID NO: 2512153 - RNA, 19 nt, Homo sapiens
  misc_RNA (1)...(19): siRNA sense strand
caggcgugucuaaggguua

SEQ ID NO: 2512154 - RNA, 19 nt, Homo sapiens
  misc_RNA (1)...(19): siRNA sense strand
ccguguaaagccaguggaa

SEQ ID NO: 2512155 - RNA, 19 nt, Homo sapiens
  misc_RNA (1)...(19): siRNA sense strand
uggaugugacugaggccaa

SEQ ID NO: 2512156 - RNA, 19 nt, Homo sapiens
  misc_RNA (1)...(19): siRNA sense strand
ggcuauacccagagcacca

SEQ ID NO: 2512157 - RNA, 19 nt, Homo sapiens
  misc_RNA (1)...(19): siRNA sense strand
auaugaagaaguuggagau

SEQ ID NO: 2512158 - RNA, 19 nt, Homo sapiens
  misc_RNA (1)...(19): siRNA sense strand
cgggaaacaaccagauaac

SEQ ID NO: 2512159 - RNA, 19 nt, Homo sapiens
  misc_RNA (1)...(19): siRNA sense strand
aguuauagcuacaaccagu

SEQ ID NO: 2512160 - RNA, 19 nt, Homo sapiens
  misc_RNA (1)...(19): siRNA sense strand
acgggaaacaaccagauaa

SEQ ID NO: 2512161 - RNA, 19 nt, Homo sapiens
  misc_RNA (1)...(19): siRNA sense strand
ggagaucacugguggguac

SEQ ID NO: 2512162 - RNA, 19 nt, Homo sapiens
  misc_RNA (1)...(19): siRNA sense strand
ucuccuuccacgaggguua

SEQ ID NO: 2512163 - RNA, 19 nt, Homo sapiens
  misc_RNA (1)...(19): siRNA sense strand
ccuuggaaucauuggauca

SEQ ID NO: 2512164 - RNA, 19 nt, Homo sapiens
  misc_RNA (1)...(19): siRNA sense strand
agaaggaagcugaggaggu

SEQ ID NO: 2512165 - RNA, 19 nt, Homo sapiens
  misc_RNA (1)...(19): siRNA sense strand
gaaugugacuguaggaggu

SEQ ID NO: 2512166 - RNA, 19 nt, Homo sapiens
  misc_RNA (1)...(19): siRNA sense strand
cuuggaggcuuuaaggaca

SEQ ID NO: 2512167 - RNA, 19 nt, Homo sapiens
  misc_RNA (1)...(19): siRNA sense strand
gcauucaaucggaggaaac

SEQ ID NO: 2512168 - RNA, 19 nt, Homo sapiens
  misc_RNA (1)...(19): siRNA sense strand
aggcagcuagagagguuaa

SEQ ID NO: 2512169 - RNA, 19 nt, Homo sapiens
  misc_RNA (1)...(19): siRNA sense strand
gguuauuaccccggaguua

SEQ ID NO: 2512170 - RNA, 19 nt, Homo sapiens
  misc_RNA (1)...(19): siRNA sense strand
caucacagaaggaagcuga

SEQ ID NO: 2512171 - RNA, 19 nt, Homo sapiens
  misc_RNA (1)...(19): siRNA sense strand
cugaaacaaaugaaggaaa

SEQ ID NO: 2512172 - RNA, 19 nt, Homo sapiens
  misc_RNA (1)...(19): siRNA sense strand
cugcugaggacaagauuaa

SEQ ID NO: 2512173 - RNA, 19 nt, Homo sapiens
  misc_RNA (1)...(19): siRNA sense strand
agagaagcaacuagaauau

SEQ ID NO: 2512174 - RNA, 19 nt, Homo sapiens
  misc_RNA (1)...(19): siRNA sense strand
cuaaaggaucaaagaacau

SEQ ID NO: 2512175 - RNA, 19 nt, Homo sapiens
  misc_RNA (1)...(19): siRNA sense strand
cagaugaagcuguaugcaa

SEQ ID NO: 2512176 - RNA, 19 nt, Homo sapiens
  misc_RNA (1)...(19): siRNA sense strand
aguaggaagcuaucauaaa

SEQ ID NO: 2512177 - RNA, 19 nt, Homo sapiens
  misc_RNA (1)...(19): siRNA sense strand
aagaacaagaucagaugaa

SEQ ID NO: 2512178 - RNA, 19 nt, Homo sapiens
  misc_RNA (1)...(19): siRNA sense strand
cugaagaagcaucaagaca

SEQ ID NO: 2512179 - RNA, 19 nt, Homo sapiens
  misc_RNA (1)...(19): siRNA sense strand
gcccagcuucagagggaaa

SEQ ID NO: 2512180 - RNA, 19 nt, Homo sapiens
  misc_RNA (1)...(19): siRNA sense strand
acuuacaacaacucagaaa

SEQ ID NO: 2512181 - RNA, 19 nt, Homo sapiens
  misc_RNA (1)...(19): siRNA sense strand
ucuguaaacugcagcaaaa

SEQ ID NO: 2512182 - RNA, 19 nt, Homo sapiens
  misc_RNA (1)...(19): siRNA sense strand
acuuaaggaagaagaacau

SEQ ID NO: 2512183 - RNA, 19 nt, Homo sapiens
  misc_RNA (1)...(19): siRNA sense strand
agaaaacugcugaggacaa

SEQ ID NO: 2512184 - RNA, 19 nt, Homo sapiens
  misc_RNA (1)...(19): siRNA sense strand
cugaagauaaccugaacau

SEQ ID NO: 2512185 - RNA, 19 nt, Homo sapiens
  misc_RNA (1)...(19): siRNA sense strand
cccaagccuucuagaacaa

SEQ ID NO: 2512186 - RNA, 19 nt, Homo sapiens
  misc_RNA (1)...(19): siRNA sense strand
agaaaauguuugacugaca

SEQ ID NO: 2512187 - RNA, 19 nt, Homo sapiens
  misc_RNA (1)...(19): siRNA sense strand
agaacaugauccuagaaca

SEQ ID NO: 2512188 - RNA, 19 nt, Homo sapiens
  misc_RNA (1)...(19): siRNA sense strand
acuccaaggaaaagaagaa

SEQ ID NO: 2512189 - RNA, 19 nt, Homo sapiens
  misc_RNA (1)...(19): siRNA sense strand
acguagagcgagaaaagaa

SEQ ID NO: 2512190 - RNA, 19 nt, Homo sapiens
  misc_RNA (1)...(19): siRNA sense strand
gagacgaccaccuuggcaa

SEQ ID NO: 2512191 - RNA, 19 nt, Homo sapiens
  misc_RNA (1)...(19): siRNA sense strand
ggccuuagagaaugaaaca

SEQ ID NO: 2512192 - RNA, 19 nt, Homo sapiens
  misc_RNA (1)...(19): siRNA sense strand
guaagcuauuucaagacaa

SEQ ID NO: 2512193 - RNA, 19 nt, Homo sapiens
  misc_RNA (1)...(19): siRNA sense strand
agacgaccaccuuggcaaa

SEQ ID NO: 2512194 - RNA, 19 nt, Homo sapiens
  misc_RNA (1)...(19): siRNA sense strand
uugaaaagcuugaugucuu

SEQ ID NO: 2512195 - RNA, 19 nt, Homo sapiens
  misc_RNA (1)...(19): siRNA sense strand
cccacauauccuucagaaa

SEQ ID NO: 2512196 - RNA, 19 nt, Homo sapiens
  misc_RNA (1)...(19): siRNA sense strand
ccaaacugaagaagcauca

SEQ ID NO: 2512197 - RNA, 19 nt, Homo sapiens
  misc_RNA (1)...(19): siRNA sense strand
acaugauccuagaacaaca

SEQ ID NO: 2512198 - RNA, 19 nt, Homo sapiens
  misc_RNA (1)...(19): siRNA sense strand
gaggcaacaucgugaccca

SEQ ID NO: 2512199 - RNA, 19 nt, Homo sapiens
  misc_RNA (1)...(19): siRNA sense strand
gcauggagcaccaagaacu

SEQ ID NO: 2512200 - RNA, 19 nt, Homo sapiens
  misc_RNA (1)...(19): siRNA sense strand
cauggagcaccaagaacua

SEQ ID NO: 2512201 - RNA, 19 nt, Homo sapiens
  misc_RNA (1)...(19): siRNA sense strand
gcugaaaagaugaggcaac

SEQ ID NO: 2512202 - RNA, 19 nt, Homo sapiens
  misc_RNA (1)...(19): siRNA sense strand
ggaagaagaacaucagcgu

SEQ ID NO: 2512203 - RNA, 19 nt, Homo sapiens
  misc_RNA (1)...(19): siRNA sense strand
agaaugugaacuagagugu

SEQ ID NO: 2512204 - RNA, 19 nt, Homo sapiens
  misc_RNA (1)...(19): siRNA sense strand
ccagaaaauguuugacuga

SEQ ID NO: 2512205 - RNA, 19 nt, Homo sapiens
  misc_RNA (1)...(19): siRNA sense strand
cuaucaaacuuguaggaga

SEQ ID NO: 2512206 - RNA, 19 nt, Homo sapiens
  misc_RNA (1)...(19): siRNA sense strand
ugauaaagcaggaagcaga

SEQ ID NO: 2512207 - RNA, 19 nt, Homo sapiens
  misc_RNA (1)...(19): siRNA sense strand
guuaagaaacuaaaggaca

SEQ ID NO: 2512208 - RNA, 19 nt, Homo sapiens
  misc_RNA (1)...(19): siRNA sense strand
agcuugaagaagagaguaa

SEQ ID NO: 2512209 - RNA, 19 nt, Homo sapiens
  misc_RNA (1)...(19): siRNA sense strand
uguaaaugaagcaggaaaa

SEQ ID NO: 2512210 - RNA, 19 nt, Homo sapiens
  misc_RNA (1)...(19): siRNA sense strand
auguaaaugaagcaggaaa

SEQ ID NO: 2512211 - RNA, 19 nt, Homo sapiens
  misc_RNA (1)...(19): siRNA sense strand
agaugaggaaguuaagaaa

SEQ ID NO: 2512212 - RNA, 19 nt, Homo sapiens
  misc_RNA (1)...(19): siRNA sense strand
acuaaaggacauuaaggaa

SEQ ID NO: 2512213 - RNA, 19 nt, Homo sapiens
  misc_RNA (1)...(19): siRNA sense strand
caguugaauacgaaaggaa

SEQ ID NO: 2512214 - RNA, 19 nt, Homo sapiens
  misc_RNA (1)...(19): siRNA sense strand
ugaaaguggacauggccaa

SEQ ID NO: 2512215 - RNA, 19 nt, Homo sapiens
  misc_RNA (1)...(19): siRNA sense strand
gggaauggcugcuggcucu

SEQ ID NO: 2512216 - RNA, 19 nt, Homo sapiens
  misc_RNA (1)...(19): siRNA sense strand
cagaaaacagcuugaagaa

SEQ ID NO: 2512217 - RNA, 19 nt, Homo sapiens
  misc_RNA (1)...(19): siRNA sense strand
guugaauacgaaaggaaga

SEQ ID NO: 2512218 - RNA, 19 nt, Homo sapiens
  misc_RNA (1)...(19): siRNA sense strand
aagaagagaguaaaggaga

SEQ ID NO: 2512219 - RNA, 19 nt, Homo sapiens
  misc_RNA (1)...(19): siRNA sense strand
aggagaaaucaaagagacu

SEQ ID NO: 2512220 - RNA, 19 nt, Homo sapiens
  misc_RNA (1)...(19): siRNA sense strand
caauguaaaugaagcagga

SEQ ID NO: 2512221 - RNA, 19 nt, Homo sapiens
  misc_RNA (1)...(19): siRNA sense strand
cuuaugacucagaaguaua

SEQ ID NO: 2512222 - RNA, 19 nt, Homo sapiens
  misc_RNA (1)...(19): siRNA sense strand
cuuugugacaguagaagaa

SEQ ID NO: 2512223 - RNA, 19 nt, Homo sapiens
  misc_RNA (1)...(19): siRNA sense strand
auccaaugauucugaggaa

SEQ ID NO: 2512224 - RNA, 19 nt, Homo sapiens
  misc_RNA (1)...(19): siRNA sense strand
uugacaaguccaauguaaa

SEQ ID NO: 2512225 - RNA, 19 nt, Homo sapiens
  misc_RNA (1)...(19): siRNA sense strand
agaccgugcucaagggcca

SEQ ID NO: 2512226 - RNA, 19 nt, Homo sapiens
  misc_RNA (1)...(19): siRNA sense strand
cagaauucauuauuggcau

SEQ ID NO: 2512227 - RNA, 19 nt, Homo sapiens
  misc_RNA (1)...(19): siRNA sense strand
aaagcaggaagcagagaau

SEQ ID NO: 2512228 - RNA, 19 nt, Homo sapiens
  misc_RNA (1)...(19): siRNA sense strand
aguaaaggagauuguacau

SEQ ID NO: 2512229 - RNA, 19 nt, Homo sapiens
  misc_RNA (1)...(19): siRNA sense strand
caaacuuguaggagaaauc

SEQ ID NO: 2512230 - RNA, 19 nt, Homo sapiens
  misc_RNA (1)...(19): siRNA sense strand
acuuguaggagaaaucaaa

SEQ ID NO: 2512231 - RNA, 19 nt, Homo sapiens
  misc_RNA (1)...(19): siRNA sense strand
ccagaaaacagcuugaaga

SEQ ID NO: 2512232 - RNA, 19 nt, Homo sapiens
  misc_RNA (1)...(19): siRNA sense strand
cugaugaagccuuacaaaa

SEQ ID NO: 2512233 - RNA, 19 nt, Homo sapiens
  misc_RNA (1)...(19): siRNA sense strand
gcuuugugacaguagaaga

SEQ ID NO: 2512234 - RNA, 19 nt, Homo sapiens
  misc_RNA (1)...(19): siRNA sense strand
caguugaauuaccagaaaa

SEQ ID NO: 2512235 - RNA, 19 nt, Homo sapiens
  misc_RNA (1)...(19): siRNA sense strand
uggucauacuagacugaga

SEQ ID NO: 2512236 - RNA, 19 nt, Homo sapiens
  misc_RNA (1)...(19): siRNA sense strand
aggaagaagaggaagcgaa

SEQ ID NO: 2512237 - RNA, 19 nt, Homo sapiens
  misc_RNA (1)...(19): siRNA sense strand
ggaagaagaggaagcgaag

SEQ ID NO: 2512238 - RNA, 19 nt, Homo sapiens
  misc_RNA (1)...(19): siRNA sense strand
uuucaguucaagugacaaa

SEQ ID NO: 2512239 - RNA, 19 nt, Homo sapiens
  misc_RNA (1)...(19): siRNA sense strand
cagaaaugcaccacggacu

SEQ ID NO: 2512240 - RNA, 19 nt, Homo sapiens
  misc_RNA (1)...(19): siRNA sense strand
ccaaugucgaauccagaaa

SEQ ID NO: 2512241 - RNA, 19 nt, Homo sapiens
  misc_RNA (1)...(19): siRNA sense strand
gguuauguuuaaugggaaa

SEQ ID NO: 2512242 - RNA, 19 nt, Homo sapiens
  misc_RNA (1)...(19): siRNA sense strand
ugaaggaaggagagagaaa

SEQ ID NO: 2512243 - RNA, 19 nt, Homo sapiens
  misc_RNA (1)...(19): siRNA sense strand
ccuccagagcauagagaaa

SEQ ID NO: 2512244 - RNA, 19 nt, Homo sapiens
  misc_RNA (1)...(19): siRNA sense strand
ggugaaggaaggagagaga

SEQ ID NO: 2512245 - RNA, 19 nt, Homo sapiens
  misc_RNA (1)...(19): siRNA sense strand
agucaugucuaaugcgaaa

SEQ ID NO: 2512246 - RNA, 19 nt, Homo sapiens
  misc_RNA (1)...(19): siRNA sense strand
ccaugagaagcaagagaaa

SEQ ID NO: 2512247 - RNA, 19 nt, Homo sapiens
  misc_RNA (1)...(19): siRNA sense strand
ggaagaaguaauaaggcau

SEQ ID NO: 2512248 - RNA, 19 nt, Homo sapiens
  misc_RNA (1)...(19): siRNA sense strand
agaagaauaaaguggagaa

SEQ ID NO: 2512249 - RNA, 19 nt, Homo sapiens
  misc_RNA (1)...(19): siRNA sense strand
gagaaugcuuauaacgcaa

SEQ ID NO: 2512250 - RNA, 19 nt, Homo sapiens
  misc_RNA (1)...(19): siRNA sense strand
gaagaauaaaguggagaaa

SEQ ID NO: 2512251 - RNA, 19 nt, Homo sapiens
  misc_RNA (1)...(19): siRNA sense strand
cagcaaaaccagacaagaa

SEQ ID NO: 2512252 - RNA, 19 nt, Homo sapiens
  misc_RNA (1)...(19): siRNA sense strand
cguaagaagaugcaccaaa

SEQ ID NO: 2512253 - RNA, 19 nt, Homo sapiens
  misc_RNA (1)...(19): siRNA sense strand
cuucccagauggagacaaa

SEQ ID NO: 2512254 - RNA, 19 nt, Homo sapiens
  misc_RNA (1)...(19): siRNA sense strand
uuucuaaaguucagaguca

SEQ ID NO: 2512255 - RNA, 19 nt, Homo sapiens
  misc_RNA (1)...(19): siRNA sense strand
gcaggugcugagagagaaa

SEQ ID NO: 2512256 - RNA, 19 nt, Homo sapiens
  misc_RNA (1)...(19): siRNA sense strand
acuaaggauuugagagugu

SEQ ID NO: 2512257 - RNA, 19 nt, Homo sapiens
  misc_RNA (1)...(19): siRNA sense strand
acaaauugaccaacagaau

SEQ ID NO: 2512258 - RNA, 19 nt, Homo sapiens
  misc_RNA (1)...(19): siRNA sense strand
gagacagaguuuaugguga

SEQ ID NO: 2512259 - RNA, 19 nt, Homo sapiens
  misc_RNA (1)...(19): siRNA sense strand
gcgaaagggaauccaggaa

SEQ ID NO: 2512260 - RNA, 19 nt, Homo sapiens
  misc_RNA (1)...(19): siRNA sense strand
aggaagaaguaauaaggca

SEQ ID NO: 2512261 - RNA, 19 nt, Homo sapiens
  misc_RNA (1)...(19): siRNA sense strand
aagucuaucuguuggcuaa

SEQ ID NO: 2512262 - RNA, 19 nt, Homo sapiens
  misc_RNA (1)...(19): siRNA sense strand
agaauaaaguggagaaacc

SEQ ID NO: 2512263 - RNA, 19 nt, Homo sapiens
  misc_RNA (1)...(19): siRNA sense strand
agagaaaacagcagaauuu

SEQ ID NO: 2512264 - RNA, 19 nt, Homo sapiens
  misc_RNA (1)...(19): siRNA sense strand
auugaaagguggucagcau

SEQ ID NO: 2512265 - RNA, 19 nt, Homo sapiens
  misc_RNA (1)...(19): siRNA sense strand
agaagauggaucacauaaa

SEQ ID NO: 2512266 - RNA, 19 nt, Homo sapiens
  misc_RNA (1)...(19): siRNA sense strand
ccauuugaccucuggagaa

SEQ ID NO: 2512267 - RNA, 19 nt, Homo sapiens
  misc_RNA (1)...(19): siRNA sense strand
guacuuacaaagagacaga

SEQ ID NO: 2512268 - RNA, 19 nt, Homo sapiens
  misc_RNA (1)...(19): siRNA sense strand
cgauuggcucggauggaaa

SEQ ID NO: 2512269 - RNA, 19 nt, Homo sapiens
  misc_RNA (1)...(19): siRNA sense strand
agaaaccauucgagaugaa

SEQ ID NO: 2512270 - RNA, 19 nt, Homo sapiens
  misc_RNA (1)...(19): siRNA sense strand
agcccaugcugaagugaaa

SEQ ID NO: 2512271 - RNA, 19 nt, Homo sapiens
  misc_RNA (1)...(19): siRNA sense strand
agagaacugagauggaaua

SEQ ID NO: 2512272 - RNA, 19 nt, Homo sapiens
  misc_RNA (1)...(19): siRNA sense strand
aagaaaugcguaagaagau

SEQ ID NO: 2512273 - RNA, 19 nt, Homo sapiens
  misc_RNA (1)...(19): siRNA sense strand
ggcaucaacaucagauaaa

SEQ ID NO: 2512274 - RNA, 19 nt, Homo sapiens
  misc_RNA (1)...(19): siRNA sense strand
aucuaagggcagagaagaa

SEQ ID NO: 2512275 - RNA, 19 nt, Homo sapiens
  misc_RNA (1)...(19): siRNA sense strand
uggaaaucuuauaccacua

SEQ ID NO: 2512276 - RNA, 19 nt, Homo sapiens
  misc_RNA (1)...(19): siRNA sense strand
gucuaaugcgaaagggaau

SEQ ID NO: 2512277 - RNA, 19 nt, Homo sapiens
  misc_RNA (1)...(19): siRNA sense strand
ccaguagauacaucagaaa

SEQ ID NO: 2512278 - RNA, 19 nt, Homo sapiens
  misc_RNA (1)...(19): siRNA sense strand
ucuuauaccacuaguucaa

SEQ ID NO: 2512279 - RNA, 19 nt, Homo sapiens
  misc_RNA (1)...(19): siRNA sense strand
cgucauuuaugcuagaaaa

SEQ ID NO: 2512280 - RNA, 19 nt, Homo sapiens
  misc_RNA (1)...(19): siRNA sense strand
acuaauaagaagauggauc

SEQ ID NO: 2512281 - RNA, 19 nt, Homo sapiens
  misc_RNA (1)...(19): siRNA sense strand
ucagagaccaagaaccaaa

SEQ ID NO: 2512282 - RNA, 19 nt, Homo sapiens
  misc_RNA (1)...(19): siRNA sense strand
agaagaaaccauucgagau

SEQ ID NO: 2512283 - RNA, 19 nt, Homo sapiens
  misc_RNA (1)...(19): siRNA sense strand
aaguccagucacagaaaua

SEQ ID NO: 2512284 - RNA, 19 nt, Homo sapiens
  misc_RNA (1)...(19): siRNA sense strand
aaggaagaaaugacaagaa

SEQ ID NO: 2512285 - RNA, 19 nt, Homo sapiens
  misc_RNA (1)...(19): siRNA sense strand
uuacuaaggauuugagagu

SEQ ID NO: 2512286 - RNA, 19 nt, Homo sapiens
  misc_RNA (1)...(19): siRNA sense strand
ugucuaaugcgaaagggaa

SEQ ID NO: 2512287 - RNA, 19 nt, Homo sapiens
  misc_RNA (1)...(19): siRNA sense strand
aaguaacagccgucauuua

SEQ ID NO: 2512288 - RNA, 19 nt, Homo sapiens
  misc_RNA (1)...(19): siRNA sense strand
ucugaagagugaugcugaa

SEQ ID NO: 2512289 - RNA, 19 nt, Homo sapiens
  misc_RNA (1)...(19): siRNA sense strand
ugguuauguuuaaugggaa

SEQ ID NO: 2512290 - RNA, 19 nt, Homo sapiens
  misc_RNA (1)...(19): siRNA sense strand
gcugagagagaaagaagca

SEQ ID NO: 2512291 - RNA, 19 nt, Homo sapiens
  misc_RNA (1)...(19): siRNA sense strand
gggaagagaagaggggaaa

SEQ ID NO: 2512292 - RNA, 19 nt, Homo sapiens
  misc_RNA (1)...(19): siRNA sense strand
cagaauagccaccggggua

SEQ ID NO: 2512293 - RNA, 19 nt, Homo sapiens
  misc_RNA (1)...(19): siRNA sense strand
gggagaggaaggagggaag

SEQ ID NO: 2512294 - RNA, 19 nt, Homo sapiens
  misc_RNA (1)...(19): siRNA sense strand
agggaagagaagaggggaa

SEQ ID NO: 2512295 - RNA, 19 nt, Homo sapiens
  misc_RNA (1)...(19): siRNA sense strand
ccuguuggcaagagggaca

SEQ ID NO: 2512296 - RNA, 19 nt, Homo sapiens
  misc_RNA (1)...(19): siRNA sense strand
aggaaggagggaagagaag

SEQ ID NO: 2512297 - RNA, 19 nt, Homo sapiens
  misc_RNA (1)...(19): siRNA sense strand
acauaugagccucgggauu

SEQ ID NO: 2512298 - RNA, 19 nt, Homo sapiens
  misc_RNA (1)...(19): siRNA sense strand
aaagaaaguauuugcccaa

SEQ ID NO: 2512299 - RNA, 19 nt, Homo sapiens
  misc_RNA (1)...(19): siRNA sense strand
cucucaagcacuaaagaaa

SEQ ID NO: 2512300 - RNA, 19 nt, Homo sapiens
  misc_RNA (1)...(19): siRNA sense strand
acaagaaauggcucagaau

SEQ ID NO: 2512301 - RNA, 19 nt, Homo sapiens
  misc_RNA (1)...(19): siRNA sense strand
acuuauucagucagagcua

SEQ ID NO: 2512302 - RNA, 19 nt, Homo sapiens
  misc_RNA (1)...(19): siRNA sense strand
augcaugaaaccacugaua

SEQ ID NO: 2512303 - RNA, 19 nt, Homo sapiens
  misc_RNA (1)...(19): siRNA sense strand
cugacauagcuggaagaua

SEQ ID NO: 2512304 - RNA, 19 nt, Homo sapiens
  misc_RNA (1)...(19): siRNA sense strand
uuauucagucagagcuaua

SEQ ID NO: 2512305 - RNA, 19 nt, Homo sapiens
  misc_RNA (1)...(19): siRNA sense strand
gaggaaaagaagaaagaaa

SEQ ID NO: 2512306 - RNA, 19 nt, Homo sapiens
  misc_RNA (1)...(19): siRNA sense strand
cugaauaaauugcaggcau

SEQ ID NO: 2512307 - RNA, 19 nt, Homo sapiens
  misc_RNA (1)...(19): siRNA sense strand
gaauaaaugaagaagagga

SEQ ID NO: 2512308 - RNA, 19 nt, Homo sapiens
  misc_RNA (1)...(19): siRNA sense strand
aagaagaggaaaagaagaa

SEQ ID NO: 2512309 - RNA, 19 nt, Homo sapiens
  misc_RNA (1)...(19): siRNA sense strand
cagcaguacaaguagugaa

SEQ ID NO: 2512310 - RNA, 19 nt, Homo sapiens
  misc_RNA (1)...(19): siRNA sense strand
ccuaaaagggacauaguuu

SEQ ID NO: 2512311 - RNA, 19 nt, Homo sapiens
  misc_RNA (1)...(19): siRNA sense strand
augaagaagaggaaaagaa

SEQ ID NO: 2512312 - RNA, 19 nt, Homo sapiens
  misc_RNA (1)...(19): siRNA sense strand
augaagagaaugaagaacu

SEQ ID NO: 2512313 - RNA, 19 nt, Homo sapiens
  misc_RNA (1)...(19): siRNA sense strand
aguacaaguagugaagaua

SEQ ID NO: 2512314 - RNA, 19 nt, Homo sapiens
  misc_RNA (1)...(19): siRNA sense strand
aagauagcgaugaagagaa

SEQ ID NO: 2512315 - RNA, 19 nt, Homo sapiens
  misc_RNA (1)...(19): siRNA sense strand
aggaaaaggucuuacucau

SEQ ID NO: 2512316 - RNA, 19 nt, Homo sapiens
  misc_RNA (1)...(19): siRNA sense strand
agagaaugaagaacugaau

SEQ ID NO: 2512317 - RNA, 19 nt, Homo sapiens
  misc_RNA (1)...(19): siRNA sense strand
agaacggagcagagagaca

SEQ ID NO: 2512318 - RNA, 19 nt, Homo sapiens
  misc_RNA (1)...(19): siRNA sense strand
ccucaauuaggcagaacaa

SEQ ID NO: 2512319 - RNA, 19 nt, Homo sapiens
  misc_RNA (1)...(19): siRNA sense strand
gacaaauagaggaacggaa

SEQ ID NO: 2512320 - RNA, 19 nt, Homo sapiens
  misc_RNA (1)...(19): siRNA sense strand
gagacagaguucaagcaga

SEQ ID NO: 2512321 - RNA, 19 nt, Homo sapiens
  misc_RNA (1)...(19): siRNA sense strand
uccaaaauguguaggagaa

SEQ ID NO: 2512322 - RNA, 19 nt, Homo sapiens
  misc_RNA (1)...(19): siRNA sense strand
ccaaaagcuuccagagaau

SEQ ID NO: 2512323 - RNA, 19 nt, Homo sapiens
  misc_RNA (1)...(19): siRNA sense strand
uggaaaugcagaagaagau

SEQ ID NO: 2512324 - RNA, 19 nt, Homo sapiens
  misc_RNA (1)...(19): siRNA sense strand
cuggaaaugcagaagaaga

SEQ ID NO: 2512325 - RNA, 19 nt, Homo sapiens
  misc_RNA (1)...(19): siRNA sense strand
ggggaaaauuacagacuca

SEQ ID NO: 2512326 - RNA, 19 nt, Homo sapiens
  misc_RNA (1)...(19): siRNA sense strand
cuguguuggaugugacaaa

SEQ ID NO: 2512327 - RNA, 19 nt, Homo sapiens
  misc_RNA (1)...(19): siRNA sense strand
cuguggaaaccaagggaga

SEQ ID NO: 2512328 - RNA, 19 nt, Homo sapiens
  misc_RNA (1)...(19): siRNA sense strand
agucacuaaaggaggaauu

SEQ ID NO: 2512329 - RNA, 19 nt, Homo sapiens
  misc_RNA (1)...(19): siRNA sense strand
auguagaccuauugcugaa

SEQ ID NO: 2512330 - RNA, 19 nt, Homo sapiens
  misc_RNA (1)...(19): siRNA sense strand
aauuacagacucaggguuu

SEQ ID NO: 2512331 - RNA, 19 nt, Homo sapiens
  misc_RNA (1)...(19): siRNA sense strand
cugcauggagaguguggaa

SEQ ID NO: 2512332 - RNA, 19 nt, Homo sapiens
  misc_RNA (1)...(19): siRNA sense strand
ugcugaacccagagcguua

SEQ ID NO: 2512333 - RNA, 19 nt, Homo sapiens
  misc_RNA (1)...(19): siRNA sense strand
gaggcgaagaugauggaga

SEQ ID NO: 2512334 - RNA, 19 nt, Homo sapiens
  misc_RNA (1)...(19): siRNA sense strand
gggcaagauaugaugauuc

SEQ ID NO: 2512335 - RNA, 19 nt, Homo sapiens
  misc_RNA (1)...(19): siRNA sense strand
agguuugugucuggagaaa

SEQ ID NO: 2512336 - RNA, 19 nt, Homo sapiens
  misc_RNA (1)...(19): siRNA sense strand
ccaagucacuaaaggagga

SEQ ID NO: 2512337 - RNA, 19 nt, Homo sapiens
  misc_RNA (1)...(19): siRNA sense strand
uggaagaaaccugggguaa

SEQ ID NO: 2512338 - RNA, 19 nt, Homo sapiens
  misc_RNA (1)...(19): siRNA sense strand
agcccuguccagagaguaa

SEQ ID NO: 2512339 - RNA, 19 nt, Homo sapiens
  misc_RNA (1)...(19): siRNA sense strand
gggaccuaauauuaaagaa

SEQ ID NO: 2512340 - RNA, 19 nt, Homo sapiens
  misc_RNA (1)...(19): siRNA sense strand
gcuuugacccuguggaaac

SEQ ID NO: 2512341 - RNA, 19 nt, Homo sapiens
  misc_RNA (1)...(19): siRNA sense strand
gggagaagguccaagaagg

SEQ ID NO: 2512342 - RNA, 19 nt, Homo sapiens
  misc_RNA (1)...(19): siRNA sense strand
augcagaagaagaugcuga

SEQ ID NO: 2512343 - RNA, 19 nt, Homo sapiens
  misc_RNA (1)...(19): siRNA sense strand
aggcuuucuacaaguauaa

SEQ ID NO: 2512344 - RNA, 19 nt, Homo sapiens
  misc_RNA (1)...(19): siRNA sense strand
uggaauaaaagcugggcau

SEQ ID NO: 2512345 - RNA, 19 nt, Homo sapiens
  misc_RNA (1)...(19): siRNA sense strand
cgaucuuuacacuggaaau

SEQ ID NO: 2512346 - RNA, 19 nt, Homo sapiens
  misc_RNA (1)...(19): siRNA sense strand
ucuacaaguauaagagacu

SEQ ID NO: 2512347 - RNA, 19 nt, Homo sapiens
  misc_RNA (1)...(19): siRNA sense strand
ccgcuuugacccuguggaa

SEQ ID NO: 2512348 - RNA, 19 nt, Homo sapiens
  misc_RNA (1)...(19): siRNA sense strand
gggccaagucacuaaagga

SEQ ID NO: 2512349 - RNA, 19 nt, Homo sapiens
  misc_RNA (1)...(19): siRNA sense strand
ggaugugacaaaugcagau

SEQ ID NO: 2512350 - RNA, 19 nt, Homo sapiens
  misc_RNA (1)...(19): siRNA sense strand
cagugaaggagaagggaca

SEQ ID NO: 2512351 - RNA, 19 nt, Homo sapiens
  misc_RNA (1)...(19): siRNA sense strand
aggacacaguagagaggau

SEQ ID NO: 2512352 - RNA, 19 nt, Homo sapiens
  misc_RNA (1)...(19): siRNA sense strand
aggacgaugacaugaauga

SEQ ID NO: 2512353 - RNA, 19 nt, Homo sapiens
  misc_RNA (1)...(19): siRNA sense strand
ugcucaagaagaagggcua

SEQ ID NO: 2512354 - RNA, 19 nt, Homo sapiens
  misc_RNA (1)...(19): siRNA sense strand
agaaugaagccaaugcuga

SEQ ID NO: 2512355 - RNA, 19 nt, Homo sapiens
  misc_RNA (1)...(19): siRNA sense strand
cagaauaaacuguuggcua

SEQ ID NO: 2512356 - RNA, 19 nt, Homo sapiens
  misc_RNA (1)...(19): siRNA sense strand
cagcaagcauagaggagca

SEQ ID NO: 2512357 - RNA, 19 nt, Homo sapiens
  misc_RNA (1)...(19): siRNA sense strand
auguaauagcucauggaua

SEQ ID NO: 2512358 - RNA, 19 nt, Homo sapiens
  misc_RNA (1)...(19): siRNA sense strand
ccuucuuacaacagagauu

SEQ ID NO: 2512359 - RNA, 19 nt, Homo sapiens
  misc_RNA (1)...(19): siRNA sense strand
acuuggaguuugagcagau

SEQ ID NO: 2512360 - RNA, 19 nt, Homo sapiens
  misc_RNA (1)...(19): siRNA sense strand
gagcaaauuacaaagccau

SEQ ID NO: 2512361 - RNA, 19 nt, Homo sapiens
  misc_RNA (1)...(19): siRNA sense strand
gauaauuccucuauggaug

SEQ ID NO: 2512362 - RNA, 19 nt, Homo sapiens
  misc_RNA (1)...(19): siRNA sense strand
uuaaagagauacaguccga

SEQ ID NO: 2512363 - RNA, 19 nt, Homo sapiens
  misc_RNA (1)...(19): siRNA sense strand
cucauggagacuugauaaa

SEQ ID NO: 2512364 - RNA, 19 nt, Homo sapiens
  misc_RNA (1)...(19): siRNA sense strand
agcaaauuacaaagccaua

SEQ ID NO: 2512365 - RNA, 19 nt, Homo sapiens
  misc_RNA (1)...(19): siRNA sense strand
aagaugaccuucugggcaa

SEQ ID NO: 2512366 - RNA, 19 nt, Homo sapiens
  misc_RNA (1)...(19): siRNA sense strand
ugucagagccucauggagu

SEQ ID NO: 2512367 - RNA, 19 nt, Homo sapiens
  misc_RNA (1)...(19): siRNA sense strand
ggaaggaguuugugagcga

SEQ ID NO: 2512368 - RNA, 19 nt, Homo sapiens
  misc_RNA (1)...(19): siRNA sense strand
ccaaggacuuugaggugga

SEQ ID NO: 2512369 - RNA, 19 nt, Homo sapiens
  misc_RNA (1)...(19): siRNA sense strand
uggaagaccuggaggagca

SEQ ID NO: 2512370 - RNA, 19 nt, Homo sapiens
  misc_RNA (1)...(19): siRNA sense strand
uggaagaccuggaggagca

SEQ ID NO: 2512371 - RNA, 19 nt, Homo sapiens
  misc_RNA (1)...(19): siRNA sense strand
uggaagaccuggaggagca

SEQ ID NO: 2512372 - RNA, 19 nt, Homo sapiens
  misc_RNA (1)...(19): siRNA sense strand
ccaaaguggaagaggaagu

SEQ ID NO: 2512373 - RNA, 19 nt, Homo sapiens
  misc_RNA (1)...(19): siRNA sense strand
agaccaaaguggaagagga

SEQ ID NO: 2512374 - RNA, 19 nt, Homo sapiens
  misc_RNA (1)...(19): siRNA sense strand
cagaagaagcaacagaaaa

SEQ ID NO: 2512375 - RNA, 19 nt, Homo sapiens
  misc_RNA (1)...(19): siRNA sense strand
aguggaagaggaagugaaa

SEQ ID NO: 2512376 - RNA, 19 nt, Homo sapiens
  misc_RNA (1)...(19): siRNA sense strand
agaaaagaccaaaguggaa

SEQ ID NO: 2512377 - RNA, 19 nt, Homo sapiens
  misc_RNA (1)...(19): siRNA sense strand
agaaguaccaagaggcgau

SEQ ID NO: 2512378 - RNA, 19 nt, Homo sapiens
  misc_RNA (1)...(19): siRNA sense strand
guuacaacggcgaggagga

SEQ ID NO: 2512379 - RNA, 19 nt, Homo sapiens
  misc_RNA (1)...(19): siRNA sense strand
ggaguuuauagcagaacau

SEQ ID NO: 2512380 - RNA, 19 nt, Homo sapiens
  misc_RNA (1)...(19): siRNA sense strand
cugcagaagaagcaacaga

SEQ ID NO: 2512381 - RNA, 19 nt, Homo sapiens
  misc_RNA (1)...(19): siRNA sense strand
ccagaggaggugaagacau

SEQ ID NO: 2512382 - RNA, 19 nt, Homo sapiens
  misc_RNA (1)...(19): siRNA sense strand
uggaggagcaugugccaga

SEQ ID NO: 2512383 - RNA, 19 nt, Homo sapiens
  misc_RNA (1)...(19): siRNA sense strand
aaguggaagaggaagugaa

SEQ ID NO: 2512384 - RNA, 19 nt, Homo sapiens
  misc_RNA (1)...(19): siRNA sense strand
agaaagcccaagaagaaaa

SEQ ID NO: 2512385 - RNA, 19 nt, Homo sapiens
  misc_RNA (1)...(19): siRNA sense strand
gggauguacuucaggagcu

SEQ ID NO: 2512386 - RNA, 19 nt, Homo sapiens
  misc_RNA (1)...(19): siRNA sense strand
ccacgcuggcaaagaguga

SEQ ID NO: 2512387 - RNA, 19 nt, Homo sapiens
  misc_RNA (1)...(19): siRNA sense strand
aaagacacagagagagaca

SEQ ID NO: 2512388 - RNA, 19 nt, Homo sapiens
  misc_RNA (1)...(19): siRNA sense strand
uggaagaggaagugaaaac

SEQ ID NO: 2512389 - RNA, 19 nt, Homo sapiens
  misc_RNA (1)...(19): siRNA sense strand
acaaggagcuuaucggaca

SEQ ID NO: 2512390 - RNA, 19 nt, Homo sapiens
  misc_RNA (1)...(19): siRNA sense strand
auacaaagcuuucugcaga

SEQ ID NO: 2512391 - RNA, 19 nt, Homo sapiens
  misc_RNA (1)...(19): siRNA sense strand
guugauuugaagaggauga

SEQ ID NO: 2512392 - RNA, 19 nt, Homo sapiens
  misc_RNA (1)...(19): siRNA sense strand
cagcaggagaggauguaca

SEQ ID NO: 2512393 - RNA, 19 nt, Homo sapiens
  misc_RNA (1)...(19): siRNA sense strand
ggacaauaucugugcaguc

SEQ ID NO: 2512394 - RNA, 19 nt, Homo sapiens
  misc_RNA (1)...(19): siRNA sense strand
cugcaaagagaaaguugau

SEQ ID NO: 2512395 - RNA, 19 nt, Homo sapiens
  misc_RNA (1)...(19): siRNA sense strand
aaguugauuugaagaggau

SEQ ID NO: 2512396 - RNA, 19 nt, Homo sapiens
  misc_RNA (1)...(19): siRNA sense strand
agaucauuguggagcuuga

SEQ ID NO: 2512397 - RNA, 19 nt, Homo sapiens
  misc_RNA (1)...(19): siRNA sense strand
cugcagaagacacauggaa

SEQ ID NO: 2512398 - RNA, 19 nt, Homo sapiens
  misc_RNA (1)...(19): siRNA sense strand
aguaauggggagagacuuu

SEQ ID NO: 2512399 - RNA, 19 nt, Homo sapiens
  misc_RNA (1)...(19): siRNA sense strand
gugagaaucccuugggcau

SEQ ID NO: 2512400 - RNA, 19 nt, Homo sapiens
  misc_RNA (1)...(19): siRNA sense strand
augcagaggaugcugggua

SEQ ID NO: 2512401 - RNA, 19 nt, Homo sapiens
  misc_RNA (1)...(19): siRNA sense strand
acacacagagucagcgaca

SEQ ID NO: 2512402 - RNA, 19 nt, Homo sapiens
  misc_RNA (1)...(19): siRNA sense strand
acacacaugcacagacaca

SEQ ID NO: 2512403 - RNA, 19 nt, Homo sapiens
  misc_RNA (1)...(19): siRNA sense strand
acacacaugcacagacaca

SEQ ID NO: 2512404 - RNA, 19 nt, Homo sapiens
  misc_RNA (1)...(19): siRNA sense strand
cagaaugaauuaaagggaa

SEQ ID NO: 2512405 - RNA, 19 nt, Homo sapiens
  misc_RNA (1)...(19): siRNA sense strand
caauaaauguggaaaggca

SEQ ID NO: 2512406 - RNA, 19 nt, Homo sapiens
  misc_RNA (1)...(19): siRNA sense strand
cauugaaacacgaaagaau

SEQ ID NO: 2512407 - RNA, 19 nt, Homo sapiens
  misc_RNA (1)...(19): siRNA sense strand
acgaaagaauccaaaccaa

SEQ ID NO: 2512408 - RNA, 19 nt, Homo sapiens
  misc_RNA (1)...(19): siRNA sense strand
ugagauuguuacagaugaa

SEQ ID NO: 2512409 - RNA, 19 nt, Homo sapiens
  misc_RNA (1)...(19): siRNA sense strand
gcuagaacccauagaaacu

SEQ ID NO: 2512410 - RNA, 19 nt, Homo sapiens
  misc_RNA (1)...(19): siRNA sense strand
agaaugaauuaaagggaac

SEQ ID NO: 2512411 - RNA, 19 nt, Homo sapiens
  misc_RNA (1)...(19): siRNA sense strand
cgaaaaguacacaagaaaa

SEQ ID NO: 2512412 - RNA, 19 nt, Homo sapiens
  misc_RNA (1)...(19): siRNA sense strand
ccaacaguucagaaauaaa

SEQ ID NO: 2512413 - RNA, 19 nt, Homo sapiens
  misc_RNA (1)...(19): siRNA sense strand
cuucagaggauuaccaaau

SEQ ID NO: 2512414 - RNA, 19 nt, Homo sapiens
  misc_RNA (1)...(19): siRNA sense strand
aguuuagagaucagagcua

SEQ ID NO: 2512415 - RNA, 19 nt, Homo sapiens
  misc_RNA (1)...(19): siRNA sense strand
caauauauuucgaggacug

SEQ ID NO: 2512416 - RNA, 19 nt, Homo sapiens
  misc_RNA (1)...(19): siRNA sense strand
ggccgaaguacaagaucua

SEQ ID NO: 2512417 - RNA, 19 nt, Homo sapiens
  misc_RNA (1)...(19): siRNA sense strand
aagcuagaacccauagaaa

SEQ ID NO: 2512418 - RNA, 19 nt, Homo sapiens
  misc_RNA (1)...(19): siRNA sense strand
ucgaaaaguacacaagaaa

SEQ ID NO: 2512419 - RNA, 19 nt, Homo sapiens
  misc_RNA (1)...(19): siRNA sense strand
ccucuuugcacuuaugaaa

SEQ ID NO: 2512420 - RNA, 19 nt, Homo sapiens
  misc_RNA (1)...(19): siRNA sense strand
gcuuaaaagacauaugcaa

SEQ ID NO: 2512421 - RNA, 19 nt, Homo sapiens
  misc_RNA (1)...(19): siRNA sense strand
aagaaaacucauaaggcaa

SEQ ID NO: 2512422 - RNA, 19 nt, Homo sapiens
  misc_RNA (1)...(19): siRNA sense strand
cgucgguauugaaguaaaa

SEQ ID NO: 2512423 - RNA, 19 nt, Homo sapiens
  misc_RNA (1)...(19): siRNA sense strand
aaccaaaggccgaaguaca

SEQ ID NO: 2512424 - RNA, 19 nt, Homo sapiens
  misc_RNA (1)...(19): siRNA sense strand
accaaaggccgaaguacaa

SEQ ID NO: 2512425 - RNA, 19 nt, Homo sapiens
  misc_RNA (1)...(19): siRNA sense strand
uauugaagucacagaguca

SEQ ID NO: 2512426 - RNA, 19 nt, Homo sapiens
  misc_RNA (1)...(19): siRNA sense strand
gauaacucuuucuggaaca

SEQ ID NO: 2512427 - RNA, 19 nt, Homo sapiens
  misc_RNA (1)...(19): siRNA sense strand
ggaaaauaacagccaguuu

SEQ ID NO: 2512428 - RNA, 19 nt, Homo sapiens
  misc_RNA (1)...(19): siRNA sense strand
uuuagagaucagagcuaua

SEQ ID NO: 2512429 - RNA, 19 nt, Homo sapiens
  misc_RNA (1)...(19): siRNA sense strand
gaauguaaguuaugccgca

SEQ ID NO: 2512430 - RNA, 19 nt, Homo sapiens
  misc_RNA (1)...(19): siRNA sense strand
aguuaaaguugaaccagca

SEQ ID NO: 2512431 - RNA, 19 nt, Homo sapiens
  misc_RNA (1)...(19): siRNA sense strand
guacaagaucuaaggcucu

SEQ ID NO: 2512432 - RNA, 19 nt, Homo sapiens
  misc_RNA (1)...(19): siRNA sense strand
uggacaaacgagaauauau

SEQ ID NO: 2512433 - RNA, 19 nt, Homo sapiens
  misc_RNA (1)...(19): siRNA sense strand
gucacagagucaagcagua

SEQ ID NO: 2512434 - RNA, 19 nt, Homo sapiens
  misc_RNA (1)...(19): siRNA sense strand
cuuugcaagaggaaauaua

SEQ ID NO: 2512435 - RNA, 19 nt, Homo sapiens
  misc_RNA (1)...(19): siRNA sense strand
gaagcaaaacauagugauu

SEQ ID NO: 2512436 - RNA, 19 nt, Homo sapiens
  misc_RNA (1)...(19): siRNA sense strand
agaaaacucauaaggcaaa

SEQ ID NO: 2512437 - RNA, 19 nt, Homo sapiens
  misc_RNA (1)...(19): siRNA sense strand
cuguaaacuuuguaaacgu

SEQ ID NO: 2512438 - RNA, 19 nt, Homo sapiens
  misc_RNA (1)...(19): siRNA sense strand
aaacaaaaccaaaggccga

SEQ ID NO: 2512439 - RNA, 19 nt, Homo sapiens
  misc_RNA (1)...(19): siRNA sense strand
ccauaaaugaucuccuaga

SEQ ID NO: 2512440 - RNA, 19 nt, Homo sapiens
  misc_RNA (1)...(19): siRNA sense strand
agaugaaguugcaccuaca

SEQ ID NO: 2512441 - RNA, 19 nt, Homo sapiens
  misc_RNA (1)...(19): siRNA sense strand
ccuagaagccauauaucca

SEQ ID NO: 2512442 - RNA, 19 nt, Homo sapiens
  misc_RNA (1)...(19): siRNA sense strand
acgucgguauugaaguaaa

SEQ ID NO: 2512443 - RNA, 19 nt, Homo sapiens
  misc_RNA (1)...(19): siRNA sense strand
gguuacagauacagaggug

SEQ ID NO: 2512444 - RNA, 19 nt, Homo sapiens
  misc_RNA (1)...(19): siRNA sense strand
aguugcacacagauggaaa

SEQ ID NO: 2512445 - RNA, 19 nt, Homo sapiens
  misc_RNA (1)...(19): siRNA sense strand
ccaguauguuguaaaucau

SEQ ID NO: 2512446 - RNA, 19 nt, Homo sapiens
  misc_RNA (1)...(19): siRNA sense strand
guuaaacaagacucugaaa

SEQ ID NO: 2512447 - RNA, 19 nt, Homo sapiens
  misc_RNA (1)...(19): siRNA sense strand
acauauaacugugguucau

SEQ ID NO: 2512448 - RNA, 19 nt, Homo sapiens
  misc_RNA (1)...(19): siRNA sense strand
aggaaguggaugagcugua

SEQ ID NO: 2512449 - RNA, 19 nt, Homo sapiens
  misc_RNA (1)...(19): siRNA sense strand
ggugagaaguuaaauggca

SEQ ID NO: 2512450 - RNA, 19 nt, Homo sapiens
  misc_RNA (1)...(19): siRNA sense strand
gcaaagaccaagaccacca

SEQ ID NO: 2512451 - RNA, 19 nt, Homo sapiens
  misc_RNA (1)...(19): siRNA sense strand
aggaagauuaccuaagaga

SEQ ID NO: 2512452 - RNA, 19 nt, Homo sapiens
  misc_RNA (1)...(19): siRNA sense strand
gguuuacagaugaggaagu

SEQ ID NO: 2512453 - RNA, 19 nt, Homo sapiens
  misc_RNA (1)...(19): siRNA sense strand
aggcaaagaccaagaccac

SEQ ID NO: 2512454 - RNA, 19 nt, Homo sapiens
  misc_RNA (1)...(19): siRNA sense strand
ggcuaauuucagagcuaua

SEQ ID NO: 2512455 - RNA, 19 nt, Homo sapiens
  misc_RNA (1)...(19): siRNA sense strand
ccaucgaccaagucagauu

SEQ ID NO: 2512456 - RNA, 19 nt, Homo sapiens
  misc_RNA (1)...(19): siRNA sense strand
gugcaaugucgguguugau

SEQ ID NO: 2512457 - RNA, 19 nt, Homo sapiens
  misc_RNA (1)...(19): siRNA sense strand
aguggagauuugugcucua

SEQ ID NO: 2512458 - RNA, 19 nt, Homo sapiens
  misc_RNA (1)...(19): siRNA sense strand
uggaaaauuugcagccaga

SEQ ID NO: 2512459 - RNA, 19 nt, Homo sapiens
  misc_RNA (1)...(19): siRNA sense strand
gcuuauuagaagaagacaa

SEQ ID NO: 2512460 - RNA, 19 nt, Homo sapiens
  misc_RNA (1)...(19): siRNA sense strand
acagaagagcuaugugaau

SEQ ID NO: 2512461 - RNA, 19 nt, Homo sapiens
  misc_RNA (1)...(19): siRNA sense strand
acucgaaccaccagaagaa

SEQ ID NO: 2512462 - RNA, 19 nt, Homo sapiens
  misc_RNA (1)...(19): siRNA sense strand
acugaggagagcagacaaa

SEQ ID NO: 2512463 - RNA, 19 nt, Homo sapiens
  misc_RNA (1)...(19): siRNA sense strand
agaagagcuaugugaauau

SEQ ID NO: 2512464 - RNA, 19 nt, Homo sapiens
  misc_RNA (1)...(19): siRNA sense strand
ugggagaauaguaguguau

SEQ ID NO: 2512465 - RNA, 19 nt, Homo sapiens
  misc_RNA (1)...(19): siRNA sense strand
aguggaugacccagauaaa

SEQ ID NO: 2512466 - RNA, 19 nt, Homo sapiens
  misc_RNA (1)...(19): siRNA sense strand
cuggaaugugccauggaaa

SEQ ID NO: 2512467 - RNA, 19 nt, Homo sapiens
  misc_RNA (1)...(19): siRNA sense strand
ucaagaaaggcaagggcca

SEQ ID NO: 2512468 - RNA, 19 nt, Homo sapiens
  misc_RNA (1)...(19): siRNA sense strand
gagaagaauuacacgagcu

SEQ ID NO: 2512469 - RNA, 19 nt, Homo sapiens
  misc_RNA (1)...(19): siRNA sense strand
ccugaaggcaaugggcaaa

SEQ ID NO: 2512470 - RNA, 19 nt, Homo sapiens
  misc_RNA (1)...(19): siRNA sense strand
gauucaauggccuggaaaa

SEQ ID NO: 2512471 - RNA, 19 nt, Homo sapiens
  misc_RNA (1)...(19): siRNA sense strand
uccugaaggcaaugggcaa

SEQ ID NO: 2512472 - RNA, 19 nt, Homo sapiens
  misc_RNA (1)...(19): siRNA sense strand
aagacauuccaaagaagua

SEQ ID NO: 2512473 - RNA, 19 nt, Homo sapiens
  misc_RNA (1)...(19): siRNA sense strand
caggcuuauuagaagaaga

SEQ ID NO: 2512474 - RNA, 19 nt, Homo sapiens
  misc_RNA (1)...(19): siRNA sense strand
aggcaaugggcaaaacaaa

SEQ ID NO: 2512475 - RNA, 19 nt, Homo sapiens
  misc_RNA (1)...(19): siRNA sense strand
aucuaugaguucugggaga

SEQ ID NO: 2512476 - RNA, 19 nt, Homo sapiens
  misc_RNA (1)...(19): siRNA sense strand
uauuagaagaagacaacca

SEQ ID NO: 2512477 - RNA, 19 nt, Homo sapiens
  misc_RNA (1)...(19): siRNA sense strand
aagaagacaaccaguggau

SEQ ID NO: 2512478 - RNA, 19 nt, Homo sapiens
  misc_RNA (1)...(19): siRNA sense strand
uggaaaagaaggaucucaa

SEQ ID NO: 2512479 - RNA, 19 nt, Homo sapiens
  misc_RNA (1)...(19): siRNA sense strand
ugaacaagccacagggucu

SEQ ID NO: 2512480 - RNA, 19 nt, Homo sapiens
  misc_RNA (1)...(19): siRNA sense strand
cgagcaucugggaaagaaa

SEQ ID NO: 2512481 - RNA, 19 nt, Homo sapiens
  misc_RNA (1)...(19): siRNA sense strand
cccugaaacuggaacacau

SEQ ID NO: 2512482 - RNA, 19 nt, Homo sapiens
  misc_RNA (1)...(19): siRNA sense strand
cucuagugacguugaacaa

SEQ ID NO: 2512483 - RNA, 19 nt, Homo sapiens
  misc_RNA (1)...(19): siRNA sense strand
acgugaagaaggaggagga

SEQ ID NO: 2512484 - RNA, 19 nt, Homo sapiens
  misc_RNA (1)...(19): siRNA sense strand
aagaaaauccagaagguga

SEQ ID NO: 2512485 - RNA, 19 nt, Homo sapiens
  misc_RNA (1)...(19): siRNA sense strand
agaaaauccagaaggugaa

SEQ ID NO: 2512486 - RNA, 19 nt, Homo sapiens
  misc_RNA (1)...(19): siRNA sense strand
ugaagaaggaggaggaguc

SEQ ID NO: 2512487 - RNA, 19 nt, Homo sapiens
  misc_RNA (1)...(19): siRNA sense strand
ccguagaaagggaaaucaa

SEQ ID NO: 2512488 - RNA, 19 nt, Homo sapiens
  misc_RNA (1)...(19): siRNA sense strand
ugggaaaagugcuguuaaa

SEQ ID NO: 2512489 - RNA, 19 nt, Homo sapiens
  misc_RNA (1)...(19): siRNA sense strand
gaacaugaaaagaaaggaa

SEQ ID NO: 2512490 - RNA, 19 nt, Homo sapiens
  misc_RNA (1)...(19): siRNA sense strand
aguauugacacuugaagaa

SEQ ID NO: 2512491 - RNA, 19 nt, Homo sapiens
  misc_RNA (1)...(19): siRNA sense strand
aggcaucaacaaagaaauu

SEQ ID NO: 2512492 - RNA, 19 nt, Homo sapiens
  misc_RNA (1)...(19): siRNA sense strand
gcucagcaggcaagagaga

SEQ ID NO: 2512493 - RNA, 19 nt, Homo sapiens
  misc_RNA (1)...(19): siRNA sense strand
gaacaagucucgagagugg

SEQ ID NO: 2512494 - RNA, 19 nt, Homo sapiens
  misc_RNA (1)...(19): siRNA sense strand
gcaagagagaacaugaaaa

SEQ ID NO: 2512495 - RNA, 19 nt, Homo sapiens
  misc_RNA (1)...(19): siRNA sense strand
ggaauuggaagaauggaga

SEQ ID NO: 2512496 - RNA, 19 nt, Homo sapiens
  misc_RNA (1)...(19): siRNA sense strand
agagagaacaugaaaagaa

SEQ ID NO: 2512497 - RNA, 19 nt, Homo sapiens
  misc_RNA (1)...(19): siRNA sense strand
aggcaagagagaacaugaa

SEQ ID NO: 2512498 - RNA, 19 nt, Homo sapiens
  misc_RNA (1)...(19): siRNA sense strand
ucagauaucagguggcaga

SEQ ID NO: 2512499 - RNA, 19 nt, Homo sapiens
  misc_RNA (1)...(19): siRNA sense strand
cggauuucgagcagucaaa

SEQ ID NO: 2512500 - RNA, 19 nt, Homo sapiens
  misc_RNA (1)...(19): siRNA sense strand
ccaugugaugcuaggaaca

SEQ ID NO: 2512501 - RNA, 19 nt, Homo sapiens
  misc_RNA (1)...(19): siRNA sense strand
ccuagaaaaccuccagaaa

SEQ ID NO: 2512502 - RNA, 19 nt, Homo sapiens
  misc_RNA (1)...(19): siRNA sense strand
ucgaaguuugcgugguuua

SEQ ID NO: 2512503 - RNA, 19 nt, Homo sapiens
  misc_RNA (1)...(19): siRNA sense strand
acucugugauccagcaaau

SEQ ID NO: 2512504 - RNA, 19 nt, Homo sapiens
  misc_RNA (1)...(19): siRNA sense strand
gaauuggaagaauggagaa

SEQ ID NO: 2512505 - RNA, 19 nt, Homo sapiens
  misc_RNA (1)...(19): siRNA sense strand
gcaugagugcagugggcca

SEQ ID NO: 2512506 - RNA, 19 nt, Homo sapiens
  misc_RNA (1)...(19): siRNA sense strand
cguagaaagggaaaucaau

SEQ ID NO: 2512507 - RNA, 19 nt, Homo sapiens
  misc_RNA (1)...(19): siRNA sense strand
cucacauccugguuagaua

SEQ ID NO: 2512508 - RNA, 19 nt, Homo sapiens
  misc_RNA (1)...(19): siRNA sense strand
gauccuuaacagugacaga

SEQ ID NO: 2512509 - RNA, 19 nt, Homo sapiens
  misc_RNA (1)...(19): siRNA sense strand
acaguuugccacuuagaaa

SEQ ID NO: 2512510 - RNA, 19 nt, Homo sapiens
  misc_RNA (1)...(19): siRNA sense strand
uagaacaaucacugccuua

SEQ ID NO: 2512511 - RNA, 19 nt, Homo sapiens
  misc_RNA (1)...(19): siRNA sense strand
cuguuaugcaagauggaga

SEQ ID NO: 2512512 - RNA, 19 nt, Homo sapiens
  misc_RNA (1)...(19): siRNA sense strand
gcuaaagaacaguuugcca

SEQ ID NO: 2512513 - RNA, 19 nt, Homo sapiens
  misc_RNA (1)...(19): siRNA sense strand
caguauugacacuugaaga

SEQ ID NO: 2512514 - RNA, 19 nt, Homo sapiens
  misc_RNA (1)...(19): siRNA sense strand
gcuaaaaggaugccugaca

SEQ ID NO: 2512515 - RNA, 19 nt, Homo sapiens
  misc_RNA (1)...(19): siRNA sense strand
uugaacaagucucgagagu

SEQ ID NO: 2512516 - RNA, 19 nt, Homo sapiens
  misc_RNA (1)...(19): siRNA sense strand
ccuuggaauuggaagaaug

SEQ ID NO: 2512517 - RNA, 19 nt, Homo sapiens
  misc_RNA (1)...(19): siRNA sense strand
ucaaagaagcuaaaaggau

SEQ ID NO: 2512518 - RNA, 19 nt, Homo sapiens
  misc_RNA (1)...(19): siRNA sense strand
caaagaagcuaaaaggaug

SEQ ID NO: 2512519 - RNA, 19 nt, Homo sapiens
  misc_RNA (1)...(19): siRNA sense strand
gaacaaagcagaagccaca

SEQ ID NO: 2512520 - RNA, 19 nt, Homo sapiens
  misc_RNA (1)...(19): siRNA sense strand
cgagaaaucaagaagaaaa

SEQ ID NO: 2512521 - RNA, 19 nt, Homo sapiens
  misc_RNA (1)...(19): siRNA sense strand
agagagagagagaggagaa

SEQ ID NO: 2512522 - RNA, 19 nt, Homo sapiens
  misc_RNA (1)...(19): siRNA sense strand
agguauagauuuuggggaa

SEQ ID NO: 2512523 - RNA, 19 nt, Homo sapiens
  misc_RNA (1)...(19): siRNA sense strand
agaaggacaaagagagaga

SEQ ID NO: 2512524 - RNA, 19 nt, Homo sapiens
  misc_RNA (1)...(19): siRNA sense strand
aggaagaaagucaguggaa

SEQ ID NO: 2512525 - RNA, 19 nt, Homo sapiens
  misc_RNA (1)...(19): siRNA sense strand
uguaaagaguaucgcguga

SEQ ID NO: 2512526 - RNA, 19 nt, Homo sapiens
  misc_RNA (1)...(19): siRNA sense strand
gagagagagagaggagaaa

SEQ ID NO: 2512527 - RNA, 19 nt, Homo sapiens
  misc_RNA (1)...(19): siRNA sense strand
agaagaacaugucggccua

SEQ ID NO: 2512528 - RNA, 19 nt, Homo sapiens
  misc_RNA (1)...(19): siRNA sense strand
aaggagaagcauaaagaga

SEQ ID NO: 2512529 - RNA, 19 nt, Homo sapiens
  misc_RNA (1)...(19): siRNA sense strand
ucaccaaaggagaagggaa

SEQ ID NO: 2512530 - RNA, 19 nt, Homo sapiens
  misc_RNA (1)...(19): siRNA sense strand
aagucaaagaagagcaaaa

SEQ ID NO: 2512531 - RNA, 19 nt, Homo sapiens
  misc_RNA (1)...(19): siRNA sense strand
ccgagaaaucaagaagaaa

SEQ ID NO: 2512532 - RNA, 19 nt, Homo sapiens
  misc_RNA (1)...(19): siRNA sense strand
aagaagaaagacaaggaga

SEQ ID NO: 2512533 - RNA, 19 nt, Homo sapiens
  misc_RNA (1)...(19): siRNA sense strand
gaagaaagucaguggaagc

SEQ ID NO: 2512534 - RNA, 19 nt, Homo sapiens
  misc_RNA (1)...(19): siRNA sense strand
caguggaagcaguggggaa

SEQ ID NO: 2512535 - RNA, 19 nt, Homo sapiens
  misc_RNA (1)...(19): siRNA sense strand
ggaacuaccccuagaggau

SEQ ID NO: 2512536 - RNA, 19 nt, Homo sapiens
  misc_RNA (1)...(19): siRNA sense strand
caccaaaggagaagggaag

SEQ ID NO: 2512537 - RNA, 19 nt, Homo sapiens
  misc_RNA (1)...(19): siRNA sense strand
agaagucaaagaagagcaa

SEQ ID NO: 2512538 - RNA, 19 nt, Homo sapiens
  misc_RNA (1)...(19): siRNA sense strand
ugcaggaaacugaggguau

SEQ ID NO: 2512539 - RNA, 19 nt, Homo sapiens
  misc_RNA (1)...(19): siRNA sense strand
cugaaaacagcccggaaaa

SEQ ID NO: 2512540 - RNA, 19 nt, Homo sapiens
  misc_RNA (1)...(19): siRNA sense strand
gugcuuuacuccuaggaca

SEQ ID NO: 2512541 - RNA, 19 nt, Homo sapiens
  misc_RNA (1)...(19): siRNA sense strand
ggagaaauccucuggcucu

SEQ ID NO: 2512542 - RNA, 19 nt, Homo sapiens
  misc_RNA (1)...(19): siRNA sense strand
aaggacaaagagagagaga

SEQ ID NO: 2512543 - RNA, 19 nt, Homo sapiens
  misc_RNA (1)...(19): siRNA sense strand
ccuugaucuuucagggcuu

SEQ ID NO: 2512544 - RNA, 19 nt, Homo sapiens
  misc_RNA (1)...(19): siRNA sense strand
agcauaaagagaagcgaca

SEQ ID NO: 2512545 - RNA, 19 nt, Homo sapiens
  misc_RNA (1)...(19): siRNA sense strand
cauaaagagaagcgacacu

SEQ ID NO: 2512546 - RNA, 19 nt, Homo sapiens
  misc_RNA (1)...(19): siRNA sense strand
agccaaagccccugagaca

SEQ ID NO: 2512547 - RNA, 19 nt, Homo sapiens
  misc_RNA (1)...(19): siRNA sense strand
acuagaggcuggggaguua

SEQ ID NO: 2512548 - RNA, 19 nt, Homo sapiens
  misc_RNA (1)...(19): siRNA sense strand
acaaagagagagagagagg

SEQ ID NO: 2512549 - RNA, 19 nt, Homo sapiens
  misc_RNA (1)...(19): siRNA sense strand
acaaacagaacaaagcaga

SEQ ID NO: 2512550 - RNA, 19 nt, Homo sapiens
  misc_RNA (1)...(19): siRNA sense strand
auguaaagagugugggaaa

SEQ ID NO: 2512551 - RNA, 19 nt, Homo sapiens
  misc_RNA (1)...(19): siRNA sense strand
auguaaugaaugugggaaa

SEQ ID NO: 2512552 - RNA, 19 nt, Homo sapiens
  misc_RNA (1)...(19): siRNA sense strand
acuucaucguagagagaaa

SEQ ID NO: 2512553 - RNA, 19 nt, Homo sapiens
  misc_RNA (1)...(19): siRNA sense strand
aguucacacuggagagaaa

SEQ ID NO: 2512554 - RNA, 19 nt, Homo sapiens
  misc_RNA (1)...(19): siRNA sense strand
gcgaaugcacagaggaaaa

SEQ ID NO: 2512555 - RNA, 19 nt, Homo sapiens
  misc_RNA (1)...(19): siRNA sense strand
gggaaaaccuucaggcaga

SEQ ID NO: 2512556 - RNA, 19 nt, Homo sapiens
  misc_RNA (1)...(19): siRNA sense strand
augcagugaaugugggaaa

SEQ ID NO: 2512557 - RNA, 19 nt, Homo sapiens
  misc_RNA (1)...(19): siRNA sense strand
auguaaggagugugggaaa

SEQ ID NO: 2512558 - RNA, 19 nt, Homo sapiens
  misc_RNA (1)...(19): siRNA sense strand
auacaaagauuauggacca

SEQ ID NO: 2512559 - RNA, 19 nt, Homo sapiens
  misc_RNA (1)...(19): siRNA sense strand
cagcgaaugcacagaggaa

SEQ ID NO: 2512560 - RNA, 19 nt, Homo sapiens
  misc_RNA (1)...(19): siRNA sense strand
ucacaguacaugagcgaau

SEQ ID NO: 2512561 - RNA, 19 nt, Homo sapiens
  misc_RNA (1)...(19): siRNA sense strand
uuguauugagugugggaaa

SEQ ID NO: 2512562 - RNA, 19 nt, Homo sapiens
  misc_RNA (1)...(19): siRNA sense strand
guguaaggaguguggaaaa

SEQ ID NO: 2512563 - RNA, 19 nt, Homo sapiens
  misc_RNA (1)...(19): siRNA sense strand
auguagugagugugggaaa

SEQ ID NO: 2512564 - RNA, 19 nt, Homo sapiens
  misc_RNA (1)...(19): siRNA sense strand
aauccacacgggagagaaa

SEQ ID NO: 2512565 - RNA, 19 nt, Homo sapiens
  misc_RNA (1)...(19): siRNA sense strand
cccuauaaguguaaggagu

SEQ ID NO: 2512566 - RNA, 19 nt, Homo sapiens
  misc_RNA (1)...(19): siRNA sense strand
gccuuuagucagagugcaa

SEQ ID NO: 2512567 - RNA, 19 nt, Homo sapiens
  misc_RNA (1)...(19): siRNA sense strand
cccuauaaauguagugagu

SEQ ID NO: 2512568 - RNA, 19 nt, Homo sapiens
  misc_RNA (1)...(19): siRNA sense strand
cacagaagggagugaccaa

SEQ ID NO: 2512569 - RNA, 19 nt, Homo sapiens
  misc_RNA (1)...(19): siRNA sense strand
cugcaacaaaugagagagu

SEQ ID NO: 2512570 - RNA, 19 nt, Homo sapiens
  misc_RNA (1)...(19): siRNA sense strand
aaguguaaggaguguggaa

SEQ ID NO: 2512571 - RNA, 19 nt, Homo sapiens
  misc_RNA (1)...(19): siRNA sense strand
aacauaaugaggagaaaga

SEQ ID NO: 2512572 - RNA, 19 nt, Homo sapiens
  misc_RNA (1)...(19): siRNA sense strand
acacuggacugaagcccua

SEQ ID NO: 2512573 - RNA, 19 nt, Homo sapiens
  misc_RNA (1)...(19): siRNA sense strand
uguaaggagugugggaaaa

SEQ ID NO: 2512574 - RNA, 19 nt, Homo sapiens
  misc_RNA (1)...(19): siRNA sense strand
gaaugugaugaguguggaa

SEQ ID NO: 2512575 - RNA, 19 nt, Homo sapiens
  misc_RNA (1)...(19): siRNA sense strand
uguaaugaaugugggaaaa

SEQ ID NO: 2512576 - RNA, 19 nt, Homo sapiens
  misc_RNA (1)...(19): siRNA sense strand
agacuucaucguagagaga

SEQ ID NO: 2512577 - RNA, 19 nt, Homo sapiens
  misc_RNA (1)...(19): siRNA sense strand
gugggaaagccuaucggua

SEQ ID NO: 2512578 - RNA, 19 nt, Homo sapiens
  misc_RNA (1)...(19): siRNA sense strand
acacuaaggagaaacccua

SEQ ID NO: 2512579 - RNA, 19 nt, Homo sapiens
  misc_RNA (1)...(19): siRNA sense strand
gaggaaacauaaugaggag

SEQ ID NO: 2512580 - RNA, 19 nt, Homo sapiens
  misc_RNA (1)...(19): siRNA sense strand
gaauguaaagaguguggga

SEQ ID NO: 2512581 - RNA, 19 nt, Homo sapiens
  misc_RNA (1)...(19): siRNA sense strand
guggaaagucacaucuuau

SEQ ID NO: 2512582 - RNA, 19 nt, Homo sapiens
  misc_RNA (1)...(19): siRNA sense strand
uuaaugaacaccagagacu

SEQ ID NO: 2512583 - RNA, 19 nt, Homo sapiens
  misc_RNA (1)...(19): siRNA sense strand
ccguaaagauggcaggcua

SEQ ID NO: 2512584 - RNA, 19 nt, Homo sapiens
  misc_RNA (1)...(19): siRNA sense strand
agggagaggacuacgaaaa

SEQ ID NO: 2512585 - RNA, 19 nt, Homo sapiens
  misc_RNA (1)...(19): siRNA sense strand
cggaaaugagggagaggac

SEQ ID NO: 2512586 - RNA, 19 nt, Homo sapiens
  misc_RNA (1)...(19): siRNA sense strand
ccugcggaaaugagggaga

SEQ ID NO: 2512587 - RNA, 19 nt, Homo sapiens
  misc_RNA (1)...(19): siRNA sense strand
augcaaagaaugugggaaa

SEQ ID NO: 2512588 - RNA, 19 nt, Homo sapiens
  misc_RNA (1)...(19): siRNA sense strand
auguaaggaaugugggaaa

SEQ ID NO: 2512589 - RNA, 19 nt, Homo sapiens
  misc_RNA (1)...(19): siRNA sense strand
caucaauggaacagggcua

SEQ ID NO: 2512590 - RNA, 19 nt, Homo sapiens
  misc_RNA (1)...(19): siRNA sense strand
gcuacaugauacagggaau

SEQ ID NO: 2512591 - RNA, 19 nt, Homo sapiens
  misc_RNA (1)...(19): siRNA sense strand
guguaaggagugcgggaaa

SEQ ID NO: 2512592 - RNA, 19 nt, Homo sapiens
  misc_RNA (1)...(19): siRNA sense strand
agacugagaaugaggaaaa

SEQ ID NO: 2512593 - RNA, 19 nt, Homo sapiens
  misc_RNA (1)...(19): siRNA sense strand
cagcaucagaaguggcaua

SEQ ID NO: 2512594 - RNA, 19 nt, Homo sapiens
  misc_RNA (1)...(19): siRNA sense strand
ucauagugcaucagagaau

SEQ ID NO: 2512595 - RNA, 19 nt, Homo sapiens
  misc_RNA (1)...(19): siRNA sense strand
ccacugaaagggaggagau

SEQ ID NO: 2512596 - RNA, 19 nt, Homo sapiens
  misc_RNA (1)...(19): siRNA sense strand
ccuuaugaauguaaagagu

SEQ ID NO: 2512597 - RNA, 19 nt, Homo sapiens
  misc_RNA (1)...(19): siRNA sense strand
cuacaugauacagggaaua

SEQ ID NO: 2512598 - RNA, 19 nt, Homo sapiens
  misc_RNA (1)...(19): siRNA sense strand
gguaaaaccaagacugaga

SEQ ID NO: 2512599 - RNA, 19 nt, Homo sapiens
  misc_RNA (1)...(19): siRNA sense strand
cuaaagaaucagaguccca

SEQ ID NO: 2512600 - RNA, 19 nt, Homo sapiens
  misc_RNA (1)...(19): siRNA sense strand
cugccuuccaggugguaaa

SEQ ID NO: 2512601 - RNA, 19 nt, Homo sapiens
  misc_RNA (1)...(19): siRNA sense strand
ggaggagauagccaggaaa

SEQ ID NO: 2512602 - RNA, 19 nt, Homo sapiens
  misc_RNA (1)...(19): siRNA sense strand
cgguauuucuucagcacca

SEQ ID NO: 2512603 - RNA, 19 nt, Homo sapiens
  misc_RNA (1)...(19): siRNA sense strand
cuucauagugcaucagaga

SEQ ID NO: 2512604 - RNA, 19 nt, Homo sapiens
  misc_RNA (1)...(19): siRNA sense strand
uguaaggagugugggaaga

SEQ ID NO: 2512605 - RNA, 19 nt, Homo sapiens
  misc_RNA (1)...(19): siRNA sense strand
gacugauaguggagggacu

SEQ ID NO: 2512606 - RNA, 19 nt, Homo sapiens
  misc_RNA (1)...(19): siRNA sense strand
agaaaguagugucagcaca

SEQ ID NO: 2512607 - RNA, 19 nt, Homo sapiens
  misc_RNA (1)...(19): siRNA sense strand
auguacugacugugguaaa

SEQ ID NO: 2512608 - RNA, 19 nt, Homo sapiens
  misc_RNA (1)...(19): siRNA sense strand
ggaagaaaguagugucagc

SEQ ID NO: 2512609 - RNA, 19 nt, Homo sapiens
  misc_RNA (1)...(19): siRNA sense strand
augugaggaauguggacaa

SEQ ID NO: 2512610 - RNA, 19 nt, Homo sapiens
  misc_RNA (1)...(19): siRNA sense strand
gaauguaaggaguguggga

SEQ ID NO: 2512611 - RNA, 19 nt, Homo sapiens
  misc_RNA (1)...(19): siRNA sense strand
cauacuaggaagaaacuca

SEQ ID NO: 2512612 - RNA, 19 nt, Homo sapiens
  misc_RNA (1)...(19): siRNA sense strand
ggagcaaggagaagcagca

SEQ ID NO: 2512613 - RNA, 19 nt, Homo sapiens
  misc_RNA (1)...(19): siRNA sense strand
acacuaaugagaagcccua

SEQ ID NO: 2512614 - RNA, 19 nt, Homo sapiens
  misc_RNA (1)...(19): siRNA sense strand
caggaaauuggaagaaagu

SEQ ID NO: 2512615 - RNA, 19 nt, Homo sapiens
  misc_RNA (1)...(19): siRNA sense strand
guggcauacuaggaagaaa

SEQ ID NO: 2512616 - RNA, 19 nt, Homo sapiens
  misc_RNA (1)...(19): siRNA sense strand
cggcaucagagaauccaua

SEQ ID NO: 2512617 - RNA, 19 nt, Homo sapiens
  misc_RNA (1)...(19): siRNA sense strand
agaaaccuuaugaguguaa

SEQ ID NO: 2512618 - RNA, 19 nt, Homo sapiens
  misc_RNA (1)...(19): siRNA sense strand
gugggaaaaccuucagaua

SEQ ID NO: 2512619 - RNA, 19 nt, Homo sapiens
  misc_RNA (1)...(19): siRNA sense strand
gaguguaaggagugcggga

SEQ ID NO: 2512620 - RNA, 19 nt, Homo sapiens
  misc_RNA (1)...(19): siRNA sense strand
gaucaugaaucuuccacca

SEQ ID NO: 2512621 - RNA, 19 nt, Homo sapiens
  misc_RNA (1)...(19): siRNA sense strand
uggacaagccuucagucaa

SEQ ID NO: 2512622 - RNA, 19 nt, Homo sapiens
  misc_RNA (1)...(19): siRNA sense strand
gagugugggaagaguuuga

SEQ ID NO: 2512623 - RNA, 19 nt, Homo sapiens
  misc_RNA (1)...(19): siRNA sense strand
gaaacucaucaauggaaca

SEQ ID NO: 2512624 - RNA, 19 nt, Homo sapiens
  misc_RNA (1)...(19): siRNA sense strand
uagagaagucacagcuaca

SEQ ID NO: 2512625 - RNA, 19 nt, Homo sapiens
  misc_RNA (1)...(19): siRNA sense strand
gugguaaaaccuucaguua

SEQ ID NO: 2512626 - RNA, 19 nt, Homo sapiens
  misc_RNA (1)...(19): siRNA sense strand
ggggagaaaccuuaugaau

SEQ ID NO: 2512627 - RNA, 19 nt, Homo sapiens
  misc_RNA (1)...(19): siRNA sense strand
gaauguaaagaguguggca

SEQ ID NO: 2512628 - RNA, 19 nt, Homo sapiens
  misc_RNA (1)...(19): siRNA sense strand
cagcaaaagaagaaggaaa

SEQ ID NO: 2512629 - RNA, 19 nt, Homo sapiens
  misc_RNA (1)...(19): siRNA sense strand
cuaucagucaagagaguaa

SEQ ID NO: 2512630 - RNA, 19 nt, Homo sapiens
  misc_RNA (1)...(19): siRNA sense strand
agcaaaagaagaaggaaaa

SEQ ID NO: 2512631 - RNA, 19 nt, Homo sapiens
  misc_RNA (1)...(19): siRNA sense strand
aggagaagaaacaggaaaa

SEQ ID NO: 2512632 - RNA, 19 nt, Homo sapiens
  misc_RNA (1)...(19): siRNA sense strand
cauacaaggcccagcaaaa

SEQ ID NO: 2512633 - RNA, 19 nt, Homo sapiens
  misc_RNA (1)...(19): siRNA sense strand
ugaacgaaccugcggaaaa

SEQ ID NO: 2512634 - RNA, 19 nt, Homo sapiens
  misc_RNA (1)...(19): siRNA sense strand
uguuaguagcaaagaugaa

SEQ ID NO: 2512635 - RNA, 19 nt, Homo sapiens
  misc_RNA (1)...(19): siRNA sense strand
agacauugguccagagcag

SEQ ID NO: 2512636 - RNA, 19 nt, Homo sapiens
  misc_RNA (1)...(19): siRNA sense strand
cagugaaccuggaccgcau

SEQ ID NO: 2512637 - RNA, 19 nt, Homo sapiens
  misc_RNA (1)...(19): siRNA sense strand
acacagaagaagaagguug

SEQ ID NO: 2512638 - RNA, 19 nt, Homo sapiens
  misc_RNA (1)...(19): siRNA sense strand
gguucaaguacauggagca

SEQ ID NO: 2512639 - RNA, 19 nt, Homo sapiens
  misc_RNA (1)...(19): siRNA sense strand
ggucaauuuuggaaacaca

SEQ ID NO: 2512640 - RNA, 19 nt, Homo sapiens
  misc_RNA (1)...(19): siRNA sense strand
cgggagaauguguuggcau

SEQ ID NO: 2512641 - RNA, 19 nt, Homo sapiens
  misc_RNA (1)...(19): siRNA sense strand
caaugaaacucgaugcuug

SEQ ID NO: 2512642 - RNA, 19 nt, Homo sapiens
  misc_RNA (1)...(19): siRNA sense strand
cuucagcaacacagaaaca

SEQ ID NO: 2512643 - RNA, 19 nt, Homo sapiens
  misc_RNA (1)...(19): siRNA sense strand
cuggagagaaauauggaaa

SEQ ID NO: 2512644 - RNA, 19 nt, Homo sapiens
  misc_RNA (1)...(19): siRNA sense strand
acugagaaugguuuagaaa

SEQ ID NO: 2512645 - RNA, 19 nt, Homo sapiens
  misc_RNA (1)...(19): siRNA sense strand
uguuaaacuacguggacga

SEQ ID NO: 2512646 - RNA, 19 nt, Homo sapiens
  misc_RNA (1)...(19): siRNA sense strand
gguuaaguuggcuggagua

SEQ ID NO: 2512647 - RNA, 19 nt, Homo sapiens
  misc_RNA (1)...(19): siRNA sense strand
gguggauauuucagcguga

SEQ ID NO: 2512648 - RNA, 19 nt, Homo sapiens
  misc_RNA (1)...(19): siRNA sense strand
gcugaaacugggaaggcau

SEQ ID NO: 2512649 - RNA, 19 nt, Homo sapiens
  misc_RNA (1)...(19): siRNA sense strand
gaaacuuacuuaaagcuga

SEQ ID NO: 2512650 - RNA, 19 nt, Homo sapiens
  misc_RNA (1)...(19): siRNA sense strand
auucaaagauuccuggaga

SEQ ID NO: 2512651 - RNA, 19 nt, Homo sapiens
  misc_RNA (1)...(19): siRNA sense strand
uggaaagacaacaugaaca

SEQ ID NO: 2512652 - RNA, 19 nt, Homo sapiens
  misc_RNA (1)...(19): siRNA sense strand
acgccgaauaacugagaau

SEQ ID NO: 2512653 - RNA, 19 nt, Homo sapiens
  misc_RNA (1)...(19): siRNA sense strand
cgugaaucugaaugaagaa

SEQ ID NO: 2512654 - RNA, 19 nt, Homo sapiens
  misc_RNA (1)...(19): siRNA sense strand
gaaggaauauggaaggaag

SEQ ID NO: 2512655 - RNA, 19 nt, Homo sapiens
  misc_RNA (1)...(19): siRNA sense strand
aaggaauauggaaggaaga

SEQ ID NO: 2512656 - RNA, 19 nt, Homo sapiens
  misc_RNA (1)...(19): siRNA sense strand
cugagaaugguuuagaaau

SEQ ID NO: 2512657 - RNA, 19 nt, Homo sapiens
  misc_RNA (1)...(19): siRNA sense strand
uggagagaaauauggaaaa

SEQ ID NO: 2512658 - RNA, 19 nt, Homo sapiens
  misc_RNA (1)...(19): siRNA sense strand
ugagaagaggccuuggcaa

SEQ ID NO: 2512659 - RNA, 19 nt, Homo sapiens
  misc_RNA (1)...(19): siRNA sense strand
acucagagaacaacagaaa

SEQ ID NO: 2512660 - RNA, 19 nt, Homo sapiens
  misc_RNA (1)...(19): siRNA sense strand
gcuagaagugaaagagaca

SEQ ID NO: 2512661 - RNA, 19 nt, Homo sapiens
  misc_RNA (1)...(19): siRNA sense strand
ccagcaacucagagaacaa

SEQ ID NO: 2512662 - RNA, 19 nt, Homo sapiens
  misc_RNA (1)...(19): siRNA sense strand
gggccuuguuaauggaauu

SEQ ID NO: 2512663 - RNA, 19 nt, Homo sapiens
  misc_RNA (1)...(19): siRNA sense strand
acaaauaagagcagcuaca

SEQ ID NO: 2512664 - RNA, 19 nt, Homo sapiens
  misc_RNA (1)...(19): siRNA sense strand
cacuaaagagccaggaauu

SEQ ID NO: 2512665 - RNA, 19 nt, Homo sapiens
  misc_RNA (1)...(19): siRNA sense strand
agagaggccacaagugaaa

SEQ ID NO: 2512666 - RNA, 19 nt, Homo sapiens
  misc_RNA (1)...(19): siRNA sense strand
gugaaagaagggauuuaaa

SEQ ID NO: 2512667 - RNA, 19 nt, Homo sapiens
  misc_RNA (1)...(19): siRNA sense strand
aggauguacagaaggcaaa

SEQ ID NO: 2512668 - RNA, 19 nt, Homo sapiens
  misc_RNA (1)...(19): siRNA sense strand
acuaaagagccaggaauua

SEQ ID NO: 2512669 - RNA, 19 nt, Homo sapiens
  misc_RNA (1)...(19): siRNA sense strand
ccauaaugagcuaucuaaa

SEQ ID NO: 2512670 - RNA, 19 nt, Homo sapiens
  misc_RNA (1)...(19): siRNA sense strand
cagacaaaaccuaugaaaa

SEQ ID NO: 2512671 - RNA, 19 nt, Homo sapiens
  misc_RNA (1)...(19): siRNA sense strand
accauuaagaagugagaau

SEQ ID NO: 2512672 - RNA, 19 nt, Homo sapiens
  misc_RNA (1)...(19): siRNA sense strand
ucauaaggaaacagaccua

SEQ ID NO: 2512673 - RNA, 19 nt, Homo sapiens
  misc_RNA (1)...(19): siRNA sense strand
acaagugaaagaagggauu

SEQ ID NO: 2512674 - RNA, 19 nt, Homo sapiens
  misc_RNA (1)...(19): siRNA sense strand
ucagaaauucagagguuga

SEQ ID NO: 2512675 - RNA, 19 nt, Homo sapiens
  misc_RNA (1)...(19): siRNA sense strand
aaccauagagccagacaaa

SEQ ID NO: 2512676 - RNA, 19 nt, Homo sapiens
  misc_RNA (1)...(19): siRNA sense strand
ucugaugaagggagugaaa

SEQ ID NO: 2512677 - RNA, 19 nt, Homo sapiens
  misc_RNA (1)...(19): siRNA sense strand
cagugaaggauguacagaa

SEQ ID NO: 2512678 - RNA, 19 nt, Homo sapiens
  misc_RNA (1)...(19): siRNA sense strand
cuucaaagaacaucccuaa

SEQ ID NO: 2512679 - RNA, 19 nt, Homo sapiens
  misc_RNA (1)...(19): siRNA sense strand
cagaaauggccuugcggca

SEQ ID NO: 2512680 - RNA, 19 nt, Homo sapiens
  misc_RNA (1)...(19): siRNA sense strand
uagcagaacaagaggauuc

SEQ ID NO: 2512681 - RNA, 19 nt, Homo sapiens
  misc_RNA (1)...(19): siRNA sense strand
gacucgacuaagagaauua

SEQ ID NO: 2512682 - RNA, 19 nt, Homo sapiens
  misc_RNA (1)...(19): siRNA sense strand
ugaggaaaccauagagcca

SEQ ID NO: 2512683 - RNA, 19 nt, Homo sapiens
  misc_RNA (1)...(19): siRNA sense strand
cagagguugauuacagaaa

SEQ ID NO: 2512684 - RNA, 19 nt, Homo sapiens
  misc_RNA (1)...(19): siRNA sense strand
uuacgaaggcaguugagaa

SEQ ID NO: 2512685 - RNA, 19 nt, Homo sapiens
  misc_RNA (1)...(19): siRNA sense strand
uuacagaaauggaggcaug

SEQ ID NO: 2512686 - RNA, 19 nt, Homo sapiens
  misc_RNA (1)...(19): siRNA sense strand
cagaaauggaggcauguau

SEQ ID NO: 2512687 - RNA, 19 nt, Homo sapiens
  misc_RNA (1)...(19): siRNA sense strand
caccaaggagccagaggaa

SEQ ID NO: 2512688 - RNA, 19 nt, Homo sapiens
  misc_RNA (1)...(19): siRNA sense strand
uagaagugaaagagacaca

SEQ ID NO: 2512689 - RNA, 19 nt, Homo sapiens
  misc_RNA (1)...(19): siRNA sense strand
guacugauguucuacggaa

SEQ ID NO: 2512690 - RNA, 19 nt, Homo sapiens
  misc_RNA (1)...(19): siRNA sense strand
aaaaugugccagagagcaa

SEQ ID NO: 2512691 - RNA, 19 nt, Homo sapiens
  misc_RNA (1)...(19): siRNA sense strand
aggaaaccauagagccaga

SEQ ID NO: 2512692 - RNA, 19 nt, Homo sapiens
  misc_RNA (1)...(19): siRNA sense strand
ugaugaagggagugaaacu

SEQ ID NO: 2512693 - RNA, 19 nt, Homo sapiens
  misc_RNA (1)...(19): siRNA sense strand
uggcuuuaauagaagauga

SEQ ID NO: 2512694 - RNA, 19 nt, Homo sapiens
  misc_RNA (1)...(19): siRNA sense strand
gcaucugauaugaaggaca

SEQ ID NO: 2512695 - RNA, 19 nt, Homo sapiens
  misc_RNA (1)...(19): siRNA sense strand
gguagcagaacaagaggau

SEQ ID NO: 2512696 - RNA, 19 nt, Homo sapiens
  misc_RNA (1)...(19): siRNA sense strand
aagugaaagaagggauuua

SEQ ID NO: 2512697 - RNA, 19 nt, Homo sapiens
  misc_RNA (1)...(19): siRNA sense strand
ccucaagaaaauaaaggaa

SEQ ID NO: 2512698 - RNA, 19 nt, Homo sapiens
  misc_RNA (1)...(19): siRNA sense strand
gagaaugcucaguuacgaa

SEQ ID NO: 2512699 - RNA, 19 nt, Homo sapiens
  misc_RNA (1)...(19): siRNA sense strand
ccacuuucuaagagacuau

SEQ ID NO: 2512700 - RNA, 19 nt, Homo sapiens
  misc_RNA (1)...(19): siRNA sense strand
aggaaacagaccuacuaaa

SEQ ID NO: 2512701 - RNA, 19 nt, Homo sapiens
  misc_RNA (1)...(19): siRNA sense strand
aaguggaaacacagauauu

SEQ ID NO: 2512702 - RNA, 19 nt, Homo sapiens
  misc_RNA (1)...(19): siRNA sense strand
uaacauuacgucagcguga

SEQ ID NO: 2512703 - RNA, 19 nt, Homo sapiens
  misc_RNA (1)...(19): siRNA sense strand
gugacucgacuaagagaau

SEQ ID NO: 2512704 - RNA, 19 nt, Homo sapiens
  misc_RNA (1)...(19): siRNA sense strand
cacaucagaccuagagcaa

SEQ ID NO: 2512705 - RNA, 19 nt, Homo sapiens
  misc_RNA (1)...(19): siRNA sense strand
cauacaugugcgagauaca

SEQ ID NO: 2512706 - RNA, 19 nt, Homo sapiens
  misc_RNA (1)...(19): siRNA sense strand
guggaaacacagauauuca

SEQ ID NO: 2512707 - RNA, 19 nt, Homo sapiens
  misc_RNA (1)...(19): siRNA sense strand
ucacuaaagagccaggaau

SEQ ID NO: 2512708 - RNA, 19 nt, Homo sapiens
  misc_RNA (1)...(19): siRNA sense strand
guuugcaucacaagguaaa

SEQ ID NO: 2512709 - RNA, 19 nt, Homo sapiens
  misc_RNA (1)...(19): siRNA sense strand
agcccuagucaaugugaaa

SEQ ID NO: 2512710 - RNA, 19 nt, Homo sapiens
  misc_RNA (1)...(19): siRNA sense strand
gcugaggugacucgacuaa

SEQ ID NO: 2512711 - RNA, 19 nt, Homo sapiens
  misc_RNA (1)...(19): siRNA sense strand
cggaauucauuuaauacca

SEQ ID NO: 2512712 - RNA, 19 nt, Homo sapiens
  misc_RNA (1)...(19): siRNA sense strand
ggauucugaugaagggagu

SEQ ID NO: 2512713 - RNA, 19 nt, Homo sapiens
  misc_RNA (1)...(19): siRNA sense strand
gaugagcauaauuuggaua

SEQ ID NO: 2512714 - RNA, 19 nt, Homo sapiens
  misc_RNA (1)...(19): siRNA sense strand
agaacaucccuaauggaau

SEQ ID NO: 2512715 - RNA, 19 nt, Homo sapiens
  misc_RNA (1)...(19): siRNA sense strand
ugaacaagacagcugaaaa

SEQ ID NO: 2512716 - RNA, 19 nt, Homo sapiens
  misc_RNA (1)...(19): siRNA sense strand
agaaacugcugaaaaggaa

SEQ ID NO: 2512717 - RNA, 19 nt, Homo sapiens
  misc_RNA (1)...(19): siRNA sense strand
aggucauagagaagagaua

SEQ ID NO: 2512718 - RNA, 19 nt, Homo sapiens
  misc_RNA (1)...(19): siRNA sense strand
cuggagucuuggugacaaa

SEQ ID NO: 2512719 - RNA, 19 nt, Homo sapiens
  misc_RNA (1)...(19): siRNA sense strand
agguacugguguugggaga

SEQ ID NO: 2512720 - RNA, 19 nt, Homo sapiens
  misc_RNA (1)...(19): siRNA sense strand
ugauaaggucauagagaag

SEQ ID NO: 2512721 - RNA, 19 nt, Homo sapiens
  misc_RNA (1)...(19): siRNA sense strand
augucagaguucaugauua

SEQ ID NO: 2512722 - RNA, 19 nt, Homo sapiens
  misc_RNA (1)...(19): siRNA sense strand
ugucaagcucaguagguuu

SEQ ID NO: 2512723 - RNA, 19 nt, Homo sapiens
  misc_RNA (1)...(19): siRNA sense strand
gcucaguggaugucagagu

SEQ ID NO: 2512724 - RNA, 19 nt, Homo sapiens
  misc_RNA (1)...(19): siRNA sense strand
ggucauuggaagcucucaa

SEQ ID NO: 2512725 - RNA, 19 nt, Homo sapiens
  misc_RNA (1)...(19): siRNA sense strand
gcacagaagccaaagacca

SEQ ID NO: 2512726 - RNA, 19 nt, Homo sapiens
  misc_RNA (1)...(19): siRNA sense strand
gggaagaauaccagaaccu

SEQ ID NO: 2512727 - RNA, 19 nt, Homo sapiens
  misc_RNA (1)...(19): siRNA sense strand
ggaagaaggcccaggagac

SEQ ID NO: 2512728 - RNA, 19 nt, Homo sapiens
  misc_RNA (1)...(19): siRNA sense strand
acacagagacagagcccuu

SEQ ID NO: 2512729 - RNA, 19 nt, Homo sapiens
  misc_RNA (1)...(19): siRNA sense strand
gcugauauguacucgguca

SEQ ID NO: 2512730 - RNA, 19 nt, Homo sapiens
  misc_RNA (1)...(19): siRNA sense strand
ggaugaauaucgucggaac

SEQ ID NO: 2512731 - RNA, 19 nt, Homo sapiens
  misc_RNA (1)...(19): siRNA sense strand
gcgccauugaggaguggaa

SEQ ID NO: 2512732 - RNA, 19 nt, Homo sapiens
  misc_RNA (1)...(19): siRNA sense strand
gaugaauaucgucggaaca

SEQ ID NO: 2512733 - RNA, 19 nt, Homo sapiens
  misc_RNA (1)...(19): siRNA sense strand
ugaugaaccugaugggugu

SEQ ID NO: 2512734 - RNA, 19 nt, Homo sapiens
  misc_RNA (1)...(19): siRNA sense strand
aggaagaauaaaucugaga

SEQ ID NO: 2512735 - RNA, 19 nt, Homo sapiens
  misc_RNA (1)...(19): siRNA sense strand
agauaagaaccaaugcaga

SEQ ID NO: 2512736 - RNA, 19 nt, Homo sapiens
  misc_RNA (1)...(19): siRNA sense strand
ggaacaucuggaagggcuu

SEQ ID NO: 2512737 - RNA, 19 nt, Homo sapiens
  misc_RNA (1)...(19): siRNA sense strand
ccaaaggcugugaggaauc

SEQ ID NO: 2512738 - RNA, 19 nt, Homo sapiens
  misc_RNA (1)...(19): siRNA sense strand
uggaagaaggcccaggaga

SEQ ID NO: 2512739 - RNA, 19 nt, Homo sapiens
  misc_RNA (1)...(19): siRNA sense strand
ggcuggaggaagaauaaau

SEQ ID NO: 2512740 - RNA, 19 nt, Homo sapiens
  misc_RNA (1)...(19): siRNA sense strand
aguacuuccucgacaccaa

SEQ ID NO: 2512741 - RNA, 19 nt, Homo sapiens
  misc_RNA (1)...(19): siRNA sense strand
gagcagaaaucgugagccu

SEQ ID NO: 2512742 - RNA, 19 nt, Homo sapiens
  misc_RNA (1)...(19): siRNA sense strand
guggagaauacuuggaaaa

SEQ ID NO: 2512743 - RNA, 19 nt, Homo sapiens
  misc_RNA (1)...(19): siRNA sense strand
gguuggaguugcugggacu

SEQ ID NO: 2512744 - RNA, 19 nt, Homo sapiens
  misc_RNA (1)...(19): siRNA sense strand
gaaggaaacgccagagcca

SEQ ID NO: 2512745 - RNA, 19 nt, Homo sapiens
  misc_RNA (1)...(19): siRNA sense strand
guagaaaaguccaccgaga

SEQ ID NO: 2512746 - RNA, 19 nt, Homo sapiens
  misc_RNA (1)...(19): siRNA sense strand
acacaaucuuauucagcau

SEQ ID NO: 2512747 - RNA, 19 nt, Homo sapiens
  misc_RNA (1)...(19): siRNA sense strand
uggacaacgacgagaucau

SEQ ID NO: 2512748 - RNA, 19 nt, Homo sapiens
  misc_RNA (1)...(19): siRNA sense strand
gaaaauuaugggagagagu

SEQ ID NO: 2512749 - RNA, 19 nt, Homo sapiens
  misc_RNA (1)...(19): siRNA sense strand
uuucagagauggagggcug

SEQ ID NO: 2512750 - RNA, 19 nt, Homo sapiens
  misc_RNA (1)...(19): siRNA sense strand
uguuauaccuccagcuacu

SEQ ID NO: 2512751 - RNA, 19 nt, Homo sapiens
  misc_RNA (1)...(19): siRNA sense strand
aaagugaucuagaggccuu

SEQ ID NO: 2512752 - RNA, 19 nt, Homo sapiens
  misc_RNA (1)...(19): siRNA sense strand
auacagucaaagugcagaa

SEQ ID NO: 2512753 - RNA, 19 nt, Homo sapiens
  misc_RNA (1)...(19): siRNA sense strand
gguuaugguuggaguugcu

SEQ ID NO: 2512754 - RNA, 19 nt, Homo sapiens
  misc_RNA (1)...(19): siRNA sense strand
gagaaagacaguaucgcaa

SEQ ID NO: 2512755 - RNA, 19 nt, Homo sapiens
  misc_RNA (1)...(19): siRNA sense strand
uggacuucagggaggguua

SEQ ID NO: 2512756 - RNA, 19 nt, Homo sapiens
  misc_RNA (1)...(19): siRNA sense strand
aggguuaucuggaggagga

SEQ ID NO: 2512757 - RNA, 19 nt, Homo sapiens
  misc_RNA (1)...(19): siRNA sense strand
aaguacaacacaggagaaa

SEQ ID NO: 2512758 - RNA, 19 nt, Homo sapiens
  misc_RNA (1)...(19): siRNA sense strand
gcuaauuugcaauacggaa

SEQ ID NO: 2512759 - RNA, 19 nt, Homo sapiens
  misc_RNA (1)...(19): siRNA sense strand
ggagaaagacaguaucgca

SEQ ID NO: 2512760 - RNA, 19 nt, Homo sapiens
  misc_RNA (1)...(19): siRNA sense strand
augcaaaaguggaacaaaa

SEQ ID NO: 2512761 - RNA, 19 nt, Homo sapiens
  misc_RNA (1)...(19): siRNA sense strand
ggaacaaaagagagagcaa

SEQ ID NO: 2512762 - RNA, 19 nt, Homo sapiens
  misc_RNA (1)...(19): siRNA sense strand
gagagcaacaugaggaaaa

SEQ ID NO: 2512763 - RNA, 19 nt, Homo sapiens
  misc_RNA (1)...(19): siRNA sense strand
guuaguauauacaagggua

SEQ ID NO: 2512764 - RNA, 19 nt, Homo sapiens
  misc_RNA (1)...(19): siRNA sense strand
ccaucacaacauuaagaaa

SEQ ID NO: 2512765 - RNA, 19 nt, Homo sapiens
  misc_RNA (1)...(19): siRNA sense strand
aaggaagauacuuggaaaa

SEQ ID NO: 2512766 - RNA, 19 nt, Homo sapiens
  misc_RNA (1)...(19): siRNA sense strand
ccgaaaaguccuugauguu

SEQ ID NO: 2512767 - RNA, 19 nt, Homo sapiens
  misc_RNA (1)...(19): siRNA sense strand
caauguauuucaaaggcau

SEQ ID NO: 2512768 - RNA, 19 nt, Homo sapiens
  misc_RNA (1)...(19): siRNA sense strand
ggccauucucauugaaaga

SEQ ID NO: 2512769 - RNA, 19 nt, Homo sapiens
  misc_RNA (1)...(19): siRNA sense strand
ggaucagaaacuuagauga

SEQ ID NO: 2512770 - RNA, 19 nt, Homo sapiens
  misc_RNA (1)...(19): siRNA sense strand
ccauguauuuagcguccaa

SEQ ID NO: 2512771 - RNA, 19 nt, Homo sapiens
  misc_RNA (1)...(19): siRNA sense strand
ucacaauuuauauggccaa

SEQ ID NO: 2512772 - RNA, 19 nt, Homo sapiens
  misc_RNA (1)...(19): siRNA sense strand
gcuugaaaggauuuacauu

SEQ ID NO: 2512773 - RNA, 19 nt, Homo sapiens
  misc_RNA (1)...(19): siRNA sense strand
guugcaaacauuaugaaga

SEQ ID NO: 2512774 - RNA, 19 nt, Homo sapiens
  misc_RNA (1)...(19): siRNA sense strand
caaacauggaccaaggcau

SEQ ID NO: 2512775 - RNA, 19 nt, Homo sapiens
  misc_RNA (1)...(19): siRNA sense strand
aggauggcuugaaaggauu

SEQ ID NO: 2512776 - RNA, 19 nt, Homo sapiens
  misc_RNA (1)...(19): siRNA sense strand
uuguagggaaggaagaaau

SEQ ID NO: 2512777 - RNA, 19 nt, Homo sapiens
  misc_RNA (1)...(19): siRNA sense strand
cagaaacuuagaugaugaa

SEQ ID NO: 2512778 - RNA, 19 nt, Homo sapiens
  misc_RNA (1)...(19): siRNA sense strand
uggaggagucccugaagau

SEQ ID NO: 2512779 - RNA, 19 nt, Homo sapiens
  misc_RNA (1)...(19): siRNA sense strand
ggguguagcaagaggaacc

SEQ ID NO: 2512780 - RNA, 19 nt, Homo sapiens
  misc_RNA (1)...(19): siRNA sense strand
aggaaguggcugagaaauu

SEQ ID NO: 2512781 - RNA, 19 nt, Homo sapiens
  misc_RNA (1)...(19): siRNA sense strand
caucaaauggaaagagaau

SEQ ID NO: 2512782 - RNA, 19 nt, Homo sapiens
  misc_RNA (1)...(19): siRNA sense strand
ugaauaugccagugguaaa

SEQ ID NO: 2512783 - RNA, 19 nt, Homo sapiens
  misc_RNA (1)...(19): siRNA sense strand
uaauuuaggucaagggaca

SEQ ID NO: 2512784 - RNA, 19 nt, Homo sapiens
  misc_RNA (1)...(19): siRNA sense strand
ugaggaaguggcugagaaa

SEQ ID NO: 2512785 - RNA, 19 nt, Homo sapiens
  misc_RNA (1)...(19): siRNA sense strand
cacaaaucucugagguuaa

SEQ ID NO: 2512786 - RNA, 19 nt, Homo sapiens
  misc_RNA (1)...(19): siRNA sense strand
auggaaaccuugaggaagu

SEQ ID NO: 2512787 - RNA, 19 nt, Homo sapiens
  misc_RNA (1)...(19): siRNA sense strand
ucauggaaaccuugaggaa

SEQ ID NO: 2512788 - RNA, 19 nt, Homo sapiens
  misc_RNA (1)...(19): siRNA sense strand
aagaagaagaagccacuaa

SEQ ID NO: 2512789 - RNA, 19 nt, Homo sapiens
  misc_RNA (1)...(19): siRNA sense strand
ccuaagucaggaagagcaa

SEQ ID NO: 2512790 - RNA, 19 nt, Homo sapiens
  misc_RNA (1)...(19): siRNA sense strand
uagcuugaccagugagauu

SEQ ID NO: 2512791 - RNA, 19 nt, Homo sapiens
  misc_RNA (1)...(19): siRNA sense strand
ugccagugguaaagggaga

SEQ ID NO: 2512792 - RNA, 19 nt, Homo sapiens
  misc_RNA (1)...(19): siRNA sense strand
uuaagaaagcaucgggaca

SEQ ID NO: 2512793 - RNA, 19 nt, Homo sapiens
  misc_RNA (1)...(19): siRNA sense strand
uggcugagaaauugaaaca

SEQ ID NO: 2512794 - RNA, 19 nt, Homo sapiens
  misc_RNA (1)...(19): siRNA sense strand
gggacaaauccacugguau

SEQ ID NO: 2512795 - RNA, 19 nt, Homo sapiens
  misc_RNA (1)...(19): siRNA sense strand
cagcaagacaagaguuagu

SEQ ID NO: 2512796 - RNA, 19 nt, Homo sapiens
  misc_RNA (1)...(19): siRNA sense strand
gagucaaggaauucuaaau

SEQ ID NO: 2512797 - RNA, 19 nt, Homo sapiens
  misc_RNA (1)...(19): siRNA sense strand
acaugaaguaguugaaagu

SEQ ID NO: 2512798 - RNA, 19 nt, Homo sapiens
  misc_RNA (1)...(19): siRNA sense strand
acaccaucuauuugugaua

SEQ ID NO: 2512799 - RNA, 19 nt, Homo sapiens
  misc_RNA (1)...(19): siRNA sense strand
uggagaauuuagaaacuca

SEQ ID NO: 2512800 - RNA, 19 nt, Homo sapiens
  misc_RNA (1)...(19): siRNA sense strand
ugaugauguucuucagaca

SEQ ID NO: 2512801 - RNA, 19 nt, Homo sapiens
  misc_RNA (1)...(19): siRNA sense strand
aaacaguucuuucagggua

SEQ ID NO: 2512802 - RNA, 19 nt, Homo sapiens
  misc_RNA (1)...(19): siRNA sense strand
gcaugaagucaaguauaaa

SEQ ID NO: 2512803 - RNA, 19 nt, Homo sapiens
  misc_RNA (1)...(19): siRNA sense strand
acaucaaauggaaagagaa

SEQ ID NO: 2512804 - RNA, 19 nt, Homo sapiens
  misc_RNA (1)...(19): siRNA sense strand
agauuaaggcuguuagucu

SEQ ID NO: 2512805 - RNA, 19 nt, Homo sapiens
  misc_RNA (1)...(19): siRNA sense strand
augaaguaguugaaaguuc

SEQ ID NO: 2512806 - RNA, 19 nt, Homo sapiens
  misc_RNA (1)...(19): siRNA sense strand
gagggagagaauaagaaaa

SEQ ID NO: 2512807 - RNA, 19 nt, Homo sapiens
  misc_RNA (1)...(19): siRNA sense strand
cggaauaaggauguggaca

SEQ ID NO: 2512808 - RNA, 19 nt, Homo sapiens
  misc_RNA (1)...(19): siRNA sense strand
aauucgagcaugaagucaa

SEQ ID NO: 2512809 - RNA, 19 nt, Homo sapiens
  misc_RNA (1)...(19): siRNA sense strand
uugaggaaguggcugagaa

SEQ ID NO: 2512810 - RNA, 19 nt, Homo sapiens
  misc_RNA (1)...(19): siRNA sense strand
aguaucugcucaagaacau

SEQ ID NO: 2512811 - RNA, 19 nt, Homo sapiens
  misc_RNA (1)...(19): siRNA sense strand
gccacaaaucucugagguu

SEQ ID NO: 2512812 - RNA, 19 nt, Homo sapiens
  misc_RNA (1)...(19): siRNA sense strand
ccuugaggagagacgacua

SEQ ID NO: 2512813 - RNA, 19 nt, Homo sapiens
  misc_RNA (1)...(19): siRNA sense strand
uuuuggagggagagaauaa

SEQ ID NO: 2512814 - RNA, 19 nt, Homo sapiens
  misc_RNA (1)...(19): siRNA sense strand
ggagaauuuagaaacucaa

SEQ ID NO: 2512815 - RNA, 19 nt, Homo sapiens
  misc_RNA (1)...(19): siRNA sense strand
ggauaaaagcacaaacaaa

SEQ ID NO: 2512816 - RNA, 19 nt, Homo sapiens
  misc_RNA (1)...(19): siRNA sense strand
aauuuauggccgagggaua

SEQ ID NO: 2512817 - RNA, 19 nt, Homo sapiens
  misc_RNA (1)...(19): siRNA sense strand
caacaaugcuucaggagga

SEQ ID NO: 2512818 - RNA, 19 nt, Homo sapiens
  misc_RNA (1)...(19): siRNA sense strand
uugcagaacagaagagauu

SEQ ID NO: 2512819 - RNA, 19 nt, Homo sapiens
  misc_RNA (1)...(19): siRNA sense strand
aaaagaaguagcaggaaaa

SEQ ID NO: 2512820 - RNA, 19 nt, Homo sapiens
  misc_RNA (1)...(19): siRNA sense strand
aguuaaauggagaaggauu

SEQ ID NO: 2512821 - RNA, 19 nt, Homo sapiens
  misc_RNA (1)...(19): siRNA sense strand
ccugaguaucuuaaaguaa

SEQ ID NO: 2512822 - RNA, 19 nt, Homo sapiens
  misc_RNA (1)...(19): siRNA sense strand
acacaaaguagaagaccuu

SEQ ID NO: 2512823 - RNA, 19 nt, Homo sapiens
  misc_RNA (1)...(19): siRNA sense strand
gggcaggcauauagagaac

SEQ ID NO: 2512824 - RNA, 19 nt, Homo sapiens
  misc_RNA (1)...(19): siRNA sense strand
cauauagagaacugggcaa

SEQ ID NO: 2512825 - RNA, 19 nt, Homo sapiens
  misc_RNA (1)...(19): siRNA sense strand
ucauagaagacuacgaaga

SEQ ID NO: 2512826 - RNA, 19 nt, Homo sapiens
  misc_RNA (1)...(19): siRNA sense strand
aagagaauacacagagcua

SEQ ID NO: 2512827 - RNA, 19 nt, Homo sapiens
  misc_RNA (1)...(19): siRNA sense strand
gggacgaauuaaugaagca

SEQ ID NO: 2512828 - RNA, 19 nt, Homo sapiens
  misc_RNA (1)...(19): siRNA sense strand
acucaaaccacggaagaaa

SEQ ID NO: 2512829 - RNA, 19 nt, Homo sapiens
  misc_RNA (1)...(19): siRNA sense strand
cgaugauugaggugcuaaa

SEQ ID NO: 2512830 - RNA, 19 nt, Homo sapiens
  misc_RNA (1)...(19): siRNA sense strand
cacgauuacaggagacaaa

SEQ ID NO: 2512831 - RNA, 19 nt, Homo sapiens
  misc_RNA (1)...(19): siRNA sense strand
cgauuaugaagcaguuuaa

SEQ ID NO: 2512832 - RNA, 19 nt, Homo sapiens
  misc_RNA (1)...(19): siRNA sense strand
cguuaagaucgaugauuga

SEQ ID NO: 2512833 - RNA, 19 nt, Homo sapiens
  misc_RNA (1)...(19): siRNA sense strand
caaccaaaaucaugugcaa

SEQ ID NO: 2512834 - RNA, 19 nt, Homo sapiens
  misc_RNA (1)...(19): siRNA sense strand
acaaaugaagaguuagcua

SEQ ID NO: 2512835 - RNA, 19 nt, Homo sapiens
  misc_RNA (1)...(19): siRNA sense strand
aggugaucaacaugagaua

SEQ ID NO: 2512836 - RNA, 19 nt, Homo sapiens
  misc_RNA (1)...(19): siRNA sense strand
acugauggcaaguggaaaa

SEQ ID NO: 2512837 - RNA, 19 nt, Homo sapiens
  misc_RNA (1)...(19): siRNA sense strand
acuucauaucagaggacua

SEQ ID NO: 2512838 - RNA, 19 nt, Homo sapiens
  misc_RNA (1)...(19): siRNA sense strand
aagaccaagggaaggaaua

SEQ ID NO: 2512839 - RNA, 19 nt, Homo sapiens
  misc_RNA (1)...(19): siRNA sense strand
ugaucugguuagugcaauu

SEQ ID NO: 2512840 - RNA, 19 nt, Homo sapiens
  misc_RNA (1)...(19): siRNA sense strand
uuuaaggaccacugggcua

SEQ ID NO: 2512841 - RNA, 19 nt, Homo sapiens
  misc_RNA (1)...(19): siRNA sense strand
gagaaggauugcugaccca

SEQ ID NO: 2512842 - RNA, 19 nt, Homo sapiens
  misc_RNA (1)...(19): siRNA sense strand
caggagacaaaguuggcaa

SEQ ID NO: 2512843 - RNA, 19 nt, Homo sapiens
  misc_RNA (1)...(19): siRNA sense strand
cugaaauagaugcacuuua

SEQ ID NO: 2512844 - RNA, 19 nt, Homo sapiens
  misc_RNA (1)...(19): siRNA sense strand
acugauaaugacagcacaa

SEQ ID NO: 2512845 - RNA, 19 nt, Homo sapiens
  misc_RNA (1)...(19): siRNA sense strand
aaacaagagaauacacaga

SEQ ID NO: 2512846 - RNA, 19 nt, Homo sapiens
  misc_RNA (1)...(19): siRNA sense strand
cugccaaacaagagaauac

SEQ ID NO: 2512847 - RNA, 19 nt, Homo sapiens
  misc_RNA (1)...(19): siRNA sense strand
guuaaauggagaaggauug

SEQ ID NO: 2512848 - RNA, 19 nt, Homo sapiens
  misc_RNA (1)...(19): siRNA sense strand
gaguuauaagccugaagua

SEQ ID NO: 2512849 - RNA, 19 nt, Homo sapiens
  misc_RNA (1)...(19): siRNA sense strand
acaugagauaccuagaaua

SEQ ID NO: 2512850 - RNA, 19 nt, Homo sapiens
  misc_RNA (1)...(19): siRNA sense strand
ccgauuaugaagcaguuua

SEQ ID NO: 2512851 - RNA, 19 nt, Homo sapiens
  misc_RNA (1)...(19): siRNA sense strand
ugaugaagcaauacggcau

SEQ ID NO: 2512852 - RNA, 19 nt, Homo sapiens
  misc_RNA (1)...(19): siRNA sense strand
guuugacauugcaguuaaa

SEQ ID NO: 2512853 - RNA, 19 nt, Homo sapiens
  misc_RNA (1)...(19): siRNA sense strand
ccaaacaagagaauacaca

SEQ ID NO: 2512854 - RNA, 19 nt, Homo sapiens
  misc_RNA (1)...(19): siRNA sense strand
uggaaaagguacacaaagu

SEQ ID NO: 2512855 - RNA, 19 nt, Homo sapiens
  misc_RNA (1)...(19): siRNA sense strand
gccaaaagcuggaugaacu

SEQ ID NO: 2512856 - RNA, 19 nt, Homo sapiens
  misc_RNA (1)...(19): siRNA sense strand
cagcaaaaggaaaaguauu

SEQ ID NO: 2512857 - RNA, 19 nt, Homo sapiens
  misc_RNA (1)...(19): siRNA sense strand
aguccuuagaacugaacaa

SEQ ID NO: 2512858 - RNA, 19 nt, Homo sapiens
  misc_RNA (1)...(19): siRNA sense strand
gucugcagcuagagccaua

SEQ ID NO: 2512859 - RNA, 19 nt, Homo sapiens
  misc_RNA (1)...(19): siRNA sense strand
uugaugcaguggagagaca

SEQ ID NO: 2512860 - RNA, 19 nt, Homo sapiens
  misc_RNA (1)...(19): siRNA sense strand
ugauaaugacagcacaaau

SEQ ID NO: 2512861 - RNA, 19 nt, Homo sapiens
  misc_RNA (1)...(19): siRNA sense strand
ggacuaugcaacagcccau

SEQ ID NO: 2512862 - RNA, 19 nt, Homo sapiens
  misc_RNA (1)...(19): siRNA sense strand
uguuuaucauggagcuaau

SEQ ID NO: 2512863 - RNA, 19 nt, Homo sapiens
  misc_RNA (1)...(19): siRNA sense strand
cauauaaugaagugugcca

SEQ ID NO: 2512864 - RNA, 19 nt, Homo sapiens
  misc_RNA (1)...(19): siRNA sense strand
cuggaagcuuuaaggacca

SEQ ID NO: 2512865 - RNA, 19 nt, Homo sapiens
  misc_RNA (1)...(19): siRNA sense strand
cugaaguacaggagcugau

SEQ ID NO: 2512866 - RNA, 19 nt, Homo sapiens
  misc_RNA (1)...(19): siRNA sense strand
ccuaaaggauugcuggaag

SEQ ID NO: 2512867 - RNA, 19 nt, Homo sapiens
  misc_RNA (1)...(19): siRNA sense strand
accagaucguccagaggua

SEQ ID NO: 2512868 - RNA, 19 nt, Homo sapiens
  misc_RNA (1)...(19): siRNA sense strand
gaaugaugcucuaccacca

SEQ ID NO: 2512869 - RNA, 19 nt, Homo sapiens
  misc_RNA (1)...(19): siRNA sense strand
ggcaaguggaaaagaagua

SEQ ID NO: 2512870 - RNA, 19 nt, Homo sapiens
  misc_RNA (1)...(19): siRNA sense strand
agcuagagccauauaauga

SEQ ID NO: 2512871 - RNA, 19 nt, Homo sapiens
  misc_RNA (1)...(19): siRNA sense strand
agaagggacuacaugacau

SEQ ID NO: 2512872 - RNA, 19 nt, Homo sapiens
  misc_RNA (1)...(19): siRNA sense strand
ccgaguaauuaccuuggaa

SEQ ID NO: 2512873 - RNA, 19 nt, Homo sapiens
  misc_RNA (1)...(19): siRNA sense strand
auauaaaagucuagggcag

SEQ ID NO: 2512874 - RNA, 19 nt, Homo sapiens
  misc_RNA (1)...(19): siRNA sense strand
ccugaugcaauaugaaaca

SEQ ID NO: 2512875 - RNA, 19 nt, Homo sapiens
  misc_RNA (1)...(19): siRNA sense strand
gaucaacaugagauaccua

SEQ ID NO: 2512876 - RNA, 19 nt, Homo sapiens
  misc_RNA (1)...(19): siRNA sense strand
acaguuuuaugaagggaua

SEQ ID NO: 2512877 - RNA, 19 nt, Homo sapiens
  misc_RNA (1)...(19): siRNA sense strand
acggaagaaaggacacaau

SEQ ID NO: 2512878 - RNA, 19 nt, Homo sapiens
  misc_RNA (1)...(19): siRNA sense strand
ggugaauggaauaaggaaa

SEQ ID NO: 2512879 - RNA, 19 nt, Homo sapiens
  misc_RNA (1)...(19): siRNA sense strand
gauacagagacaagagaua

SEQ ID NO: 2512880 - RNA, 19 nt, Homo sapiens
  misc_RNA (1)...(19): siRNA sense strand
aaaugaaauccgagacuua

SEQ ID NO: 2512881 - RNA, 19 nt, Homo sapiens
  misc_RNA (1)...(19): siRNA sense strand
ggaaauaaucuuaaggcca

SEQ ID NO: 2512882 - RNA, 19 nt, Homo sapiens
  misc_RNA (1)...(19): siRNA sense strand
caaauaacgagcaggacaa

SEQ ID NO: 2512883 - RNA, 19 nt, Homo sapiens
  misc_RNA (1)...(19): siRNA sense strand
uggauaaggaagaggaaca

SEQ ID NO: 2512884 - RNA, 19 nt, Homo sapiens
  misc_RNA (1)...(19): siRNA sense strand
cggaugaggacaaguuaaa

SEQ ID NO: 2512885 - RNA, 19 nt, Homo sapiens
  misc_RNA (1)...(19): siRNA sense strand
gagaaggaucaguggucaa

SEQ ID NO: 2512886 - RNA, 19 nt, Homo sapiens
  misc_RNA (1)...(19): siRNA sense strand
gaaauaaucuuaaggccau

SEQ ID NO: 2512887 - RNA, 19 nt, Homo sapiens
  misc_RNA (1)...(19): siRNA sense strand
aagccaaagaugugcguua

SEQ ID NO: 2512888 - RNA, 19 nt, Homo sapiens
  misc_RNA (1)...(19): siRNA sense strand
acccagaagucuugcuaua

SEQ ID NO: 2512889 - RNA, 19 nt, Homo sapiens
  misc_RNA (1)...(19): siRNA sense strand
aagaagaagcuuucagauu

SEQ ID NO: 2512890 - RNA, 19 nt, Homo sapiens
  misc_RNA (1)...(19): siRNA sense strand
augccaaacuagagaagau

SEQ ID NO: 2512891 - RNA, 19 nt, Homo sapiens
  misc_RNA (1)...(19): siRNA sense strand
gcagaaugcaagagcacau

SEQ ID NO: 2512892 - RNA, 19 nt, Homo sapiens
  misc_RNA (1)...(19): siRNA sense strand
acgaaaagaaagagaugaa

SEQ ID NO: 2512893 - RNA, 19 nt, Homo sapiens
  misc_RNA (1)...(19): siRNA sense strand
gcuaaaggaacuaguacau

SEQ ID NO: 2512894 - RNA, 19 nt, Homo sapiens
  misc_RNA (1)...(19): siRNA sense strand
aggacagggacuacagaaa

SEQ ID NO: 2512895 - RNA, 19 nt, Homo sapiens
  misc_RNA (1)...(19): siRNA sense strand
uguucaagauugccagaua

SEQ ID NO: 2512896 - RNA, 19 nt, Homo sapiens
  misc_RNA (1)...(19): siRNA sense strand
agaacauggugaauggaau

SEQ ID NO: 2512897 - RNA, 19 nt, Homo sapiens
  misc_RNA (1)...(19): siRNA sense strand
uggaauaaggaaagcucaa

SEQ ID NO: 2512898 - RNA, 19 nt, Homo sapiens
  misc_RNA (1)...(19): siRNA sense strand
gagcagaaacaaucagaca

SEQ ID NO: 2512899 - RNA, 19 nt, Homo sapiens
  misc_RNA (1)...(19): siRNA sense strand
ggaugauggguguggccaa

SEQ ID NO: 2512900 - RNA, 19 nt, Homo sapiens
  misc_RNA (1)...(19): siRNA sense strand
uagagaagauuuugagcaa

SEQ ID NO: 2512901 - RNA, 19 nt, Homo sapiens
  misc_RNA (1)...(19): siRNA sense strand
guacacacuacgagauauu

SEQ ID NO: 2512902 - RNA, 19 nt, Homo sapiens
  misc_RNA (1)...(19): siRNA sense strand
cagauauggcaaagaauca

SEQ ID NO: 2512903 - RNA, 19 nt, Homo sapiens
  misc_RNA (1)...(19): siRNA sense strand
uggaagggcuaaaggaacu

SEQ ID NO: 2512904 - RNA, 19 nt, Homo sapiens
  misc_RNA (1)...(19): siRNA sense strand
uagcauuggcuguguggaa

SEQ ID NO: 2512905 - RNA, 19 nt, Homo sapiens
  misc_RNA (1)...(19): siRNA sense strand
aggaagaggaacagccuuu

SEQ ID NO: 2512906 - RNA, 19 nt, Homo sapiens
  misc_RNA (1)...(19): siRNA sense strand
ggcugaauuuggcaggaaa

SEQ ID NO: 2512907 - RNA, 19 nt, Homo sapiens
  misc_RNA (1)...(19): siRNA sense strand
ccucagaguccuagaugga

SEQ ID NO: 2512908 - RNA, 19 nt, Homo sapiens
  misc_RNA (1)...(19): siRNA sense strand
ccaacaauaaucagugcua

SEQ ID NO: 2512909 - RNA, 19 nt, Homo sapiens
  misc_RNA (1)...(19): siRNA sense strand
ucuucaaacugcagaggau

SEQ ID NO: 2512910 - RNA, 19 nt, Homo sapiens
  misc_RNA (1)...(19): siRNA sense strand
caguacaguuagauacauu

SEQ ID NO: 2512911 - RNA, 19 nt, Homo sapiens
  misc_RNA (1)...(19): siRNA sense strand
uguagcuccucaagagaaa

SEQ ID NO: 2512912 - RNA, 19 nt, Homo sapiens
  misc_RNA (1)...(19): siRNA sense strand
cugcacagcucuacagcau

SEQ ID NO: 2512913 - RNA, 19 nt, Homo sapiens
  misc_RNA (1)...(19): siRNA sense strand
ucaaauaacgagcaggaca

SEQ ID NO: 2512914 - RNA, 19 nt, Homo sapiens
  misc_RNA (1)...(19): siRNA sense strand
gaaaagaaagagaugaaga

SEQ ID NO: 2512915 - RNA, 19 nt, Homo sapiens
  misc_RNA (1)...(19): siRNA sense strand
gugcuaucuugaaggauga

SEQ ID NO: 2512916 - RNA, 19 nt, Homo sapiens
  misc_RNA (1)...(19): siRNA sense strand
agacauaaagaaaccagaa

SEQ ID NO: 2512917 - RNA, 19 nt, Homo sapiens
  misc_RNA (1)...(19): siRNA sense strand
uggaaaaucuggagaaaug

SEQ ID NO: 2512918 - RNA, 19 nt, Homo sapiens
  misc_RNA (1)...(19): siRNA sense strand
uggaacaguugucgauuau

SEQ ID NO: 2512919 - RNA, 19 nt, Homo sapiens
  misc_RNA (1)...(19): siRNA sense strand
gacauaaagaaaccagaaa

SEQ ID NO: 2512920 - RNA, 19 nt, Homo sapiens
  misc_RNA (1)...(19): siRNA sense strand
ucagaaggaaaguuugaaa

SEQ ID NO: 2512921 - RNA, 19 nt, Homo sapiens
  misc_RNA (1)...(19): siRNA sense strand
uugaugaaccaaagccaaa

SEQ ID NO: 2512922 - RNA, 19 nt, Homo sapiens
  misc_RNA (1)...(19): siRNA sense strand
ccuagauggauaugugauu

SEQ ID NO: 2512923 - RNA, 19 nt, Homo sapiens
  misc_RNA (1)...(19): siRNA sense strand
agagaaaucauuaccagaa

SEQ ID NO: 2512924 - RNA, 19 nt, Homo sapiens
  misc_RNA (1)...(19): siRNA sense strand
uagccagacacaagagaau

SEQ ID NO: 2512925 - RNA, 19 nt, Homo sapiens
  misc_RNA (1)...(19): siRNA sense strand
ggaacuaguacaucuggaa

SEQ ID NO: 2512926 - RNA, 19 nt, Homo sapiens
  misc_RNA (1)...(19): siRNA sense strand
cuguacacacuacgagaua

SEQ ID NO: 2512927 - RNA, 19 nt, Homo sapiens
  misc_RNA (1)...(19): siRNA sense strand
gaauaaggaaagcucaaau

SEQ ID NO: 2512928 - RNA, 19 nt, Homo sapiens
  misc_RNA (1)...(19): siRNA sense strand
gcugaugagaggaccaauu

SEQ ID NO: 2512929 - RNA, 19 nt, Homo sapiens
  misc_RNA (1)...(19): siRNA sense strand
aggugaaauuagccagaca

SEQ ID NO: 2512930 - RNA, 19 nt, Homo sapiens
  misc_RNA (1)...(19): siRNA sense strand
agaugaugguguugcagau

SEQ ID NO: 2512931 - RNA, 19 nt, Homo sapiens
  misc_RNA (1)...(19): siRNA sense strand
gagaaaaguuccacagaag

SEQ ID NO: 2512932 - RNA, 19 nt, Homo sapiens
  misc_RNA (1)...(19): siRNA sense strand
augcagaaguucaagggca

SEQ ID NO: 2512933 - RNA, 19 nt, Homo sapiens
  misc_RNA (1)...(19): siRNA sense strand
ggaaaguuugaaagcugaa

SEQ ID NO: 2512934 - RNA, 19 nt, Homo sapiens
  misc_RNA (1)...(19): siRNA sense strand
uggaagacauacagacgga

SEQ ID NO: 2512935 - RNA, 19 nt, Homo sapiens
  misc_RNA (1)...(19): siRNA sense strand
cugaugaaauaaggagauu

SEQ ID NO: 2512936 - RNA, 19 nt, Homo sapiens
  misc_RNA (1)...(19): siRNA sense strand
gagauuacgaaaagaaaga

SEQ ID NO: 2512937 - RNA, 19 nt, Homo sapiens
  misc_RNA (1)...(19): siRNA sense strand
agagacaagagauagcaaa

SEQ ID NO: 2512938 - RNA, 19 nt, Homo sapiens
  misc_RNA (1)...(19): siRNA sense strand
cuucuguagaugagaguca

SEQ ID NO: 2512939 - RNA, 19 nt, Homo sapiens
  misc_RNA (1)...(19): siRNA sense strand
aggccauggaacagaucaa

SEQ ID NO: 2512940 - RNA, 19 nt, Homo sapiens
  misc_RNA (1)...(19): siRNA sense strand
gaacagaucaauagcugca

SEQ ID NO: 2512941 - RNA, 19 nt, Homo sapiens
  misc_RNA (1)...(19): siRNA sense strand
agacagaagagaaaggaga

SEQ ID NO: 2512942 - RNA, 19 nt, Homo sapiens
  misc_RNA (1)...(19): siRNA sense strand
auuagagacagaagagaaa

SEQ ID NO: 2512943 - RNA, 19 nt, Homo sapiens
  misc_RNA (1)...(19): siRNA sense strand
agucaaacuucuaugcaca

SEQ ID NO: 2512944 - RNA, 19 nt, Homo sapiens
  misc_RNA (1)...(19): siRNA sense strand
gcuugaacuucuaugccaa

SEQ ID NO: 2512945 - RNA, 19 nt, Homo sapiens
  misc_RNA (1)...(19): siRNA sense strand
acagaagagaaaggagaaa

SEQ ID NO: 2512946 - RNA, 19 nt, Homo sapiens
  misc_RNA (1)...(19): siRNA sense strand
acaguaaugcugagaacau

SEQ ID NO: 2512947 - RNA, 19 nt, Homo sapiens
  misc_RNA (1)...(19): siRNA sense strand
aaguaaauggaaaggagau

SEQ ID NO: 2512948 - RNA, 19 nt, Homo sapiens
  misc_RNA (1)...(19): siRNA sense strand
aguaaauggaaaggagauu

SEQ ID NO: 2512949 - RNA, 19 nt, Homo sapiens
  misc_RNA (1)...(19): siRNA sense strand
caaugaagcugccaagcca

SEQ ID NO: 2512950 - RNA, 19 nt, Homo sapiens
  misc_RNA (1)...(19): siRNA sense strand
agguggaaaugauaaccaa

SEQ ID NO: 2512951 - RNA, 19 nt, Homo sapiens
  misc_RNA (1)...(19): siRNA sense strand
cugccaaaccaaagagaag

SEQ ID NO: 2512952 - RNA, 19 nt, Homo sapiens
  misc_RNA (1)...(19): siRNA sense strand
aagaacagucggagggaag

SEQ ID NO: 2512953 - RNA, 19 nt, Homo sapiens
  misc_RNA (1)...(19): siRNA sense strand
gccaagaaauacagaggac

SEQ ID NO: 2512954 - RNA, 19 nt, Homo sapiens
  misc_RNA (1)...(19): siRNA sense strand
ggaaauacaaauugccaug

SEQ ID NO: 2512955 - RNA, 19 nt, Homo sapiens
  misc_RNA (1)...(19): siRNA sense strand
cacugaagcaacugccaaa

SEQ ID NO: 2512956 - RNA, 19 nt, Homo sapiens
  misc_RNA (1)...(19): siRNA sense strand
cugccagggauuuguacaa

SEQ ID NO: 2512957 - RNA, 19 nt, Homo sapiens
  misc_RNA (1)...(19): siRNA sense strand
caagaaauacagaggacag

SEQ ID NO: 2512958 - RNA, 19 nt, Homo sapiens
  misc_RNA (1)...(19): siRNA sense strand
augauaaccaagacaauga

SEQ ID NO: 2512959 - RNA, 19 nt, Homo sapiens
  misc_RNA (1)...(19): siRNA sense strand
cauucaagccagauggugu

SEQ ID NO: 2512960 - RNA, 19 nt, Homo sapiens
  misc_RNA (1)...(19): siRNA sense strand
gaauaacgaagaaggugga

SEQ ID NO: 2512961 - RNA, 19 nt, Homo sapiens
  misc_RNA (1)...(19): siRNA sense strand
auggaaaggagauuaugaa

SEQ ID NO: 2512962 - RNA, 19 nt, Homo sapiens
  misc_RNA (1)...(19): siRNA sense strand
cagaaacacuacacgccuu

SEQ ID NO: 2512963 - RNA, 19 nt, Homo sapiens
  misc_RNA (1)...(19): siRNA sense strand
guacaaaccuccagggaac

SEQ ID NO: 2512964 - RNA, 19 nt, Homo sapiens
  misc_RNA (1)...(19): siRNA sense strand
ccuaugaguuacauggaga

SEQ ID NO: 2512965 - RNA, 19 nt, Homo sapiens
  misc_RNA (1)...(19): siRNA sense strand
ugggaagugaagacaauaa

SEQ ID NO: 2512966 - RNA, 19 nt, Homo sapiens
  misc_RNA (1)...(19): siRNA sense strand
acacaaacugccagagaag

SEQ ID NO: 2512967 - RNA, 19 nt, Homo sapiens
  misc_RNA (1)...(19): siRNA sense strand
ucaaaucacuccaagcaga

SEQ ID NO: 2512968 - RNA, 19 nt, Homo sapiens
  misc_RNA (1)...(19): siRNA sense strand
aaacaguauuugaggaguc

SEQ ID NO: 2512969 - RNA, 19 nt, Homo sapiens
  misc_RNA (1)...(19): siRNA sense strand
cugcagauugggaagugaa

SEQ ID NO: 2512970 - RNA, 19 nt, Homo sapiens
  misc_RNA (1)...(19): siRNA sense strand
gauugggaagugaagacaa

SEQ ID NO: 2512971 - RNA, 19 nt, Homo sapiens
  misc_RNA (1)...(19): siRNA sense strand
ccacagucuccaaccacaa

SEQ ID NO: 2512972 - RNA, 19 nt, Homo sapiens
  misc_RNA (1)...(19): siRNA sense strand
uguacaaaccuccagggaa

SEQ ID NO: 2512973 - RNA, 19 nt, Homo sapiens
  misc_RNA (1)...(19): siRNA sense strand
ggcugauuccacagaacua

SEQ ID NO: 2512974 - RNA, 19 nt, Homo sapiens
  misc_RNA (1)...(19): siRNA sense strand
auguagaaguggaaagauu

SEQ ID NO: 2512975 - RNA, 19 nt, Homo sapiens
  misc_RNA (1)...(19): siRNA sense strand
ggaaagauucacaagggaa

SEQ ID NO: 2512976 - RNA, 19 nt, Homo sapiens
  misc_RNA (1)...(19): siRNA sense strand
augcaguaaaugugggaaa

SEQ ID NO: 2512977 - RNA, 19 nt, Homo sapiens
  misc_RNA (1)...(19): siRNA sense strand
gugagaaccaggagggaca

SEQ ID NO: 2512978 - RNA, 19 nt, Homo sapiens
  misc_RNA (1)...(19): siRNA sense strand
ggcaaagccuucagggaca

SEQ ID NO: 2512979 - RNA, 19 nt, Homo sapiens
  misc_RNA (1)...(19): siRNA sense strand
gcaaaugcuucaaacggaa

SEQ ID NO: 2512980 - RNA, 19 nt, Homo sapiens
  misc_RNA (1)...(19): siRNA sense strand
caaugaugccuguggaaaa

SEQ ID NO: 2512981 - RNA, 19 nt, Homo sapiens
  misc_RNA (1)...(19): siRNA sense strand
auguaacgaaugugggaaa

SEQ ID NO: 2512982 - RNA, 19 nt, Homo sapiens
  misc_RNA (1)...(19): siRNA sense strand
guguaaucaguguggcaaa

SEQ ID NO: 2512983 - RNA, 19 nt, Homo sapiens
  misc_RNA (1)...(19): siRNA sense strand
cccuaugaguguagcaaau

SEQ ID NO: 2512984 - RNA, 19 nt, Homo sapiens
  misc_RNA (1)...(19): siRNA sense strand
ccuaaaaguuaugcagaua

SEQ ID NO: 2512985 - RNA, 19 nt, Homo sapiens
  misc_RNA (1)...(19): siRNA sense strand
cccuaugaauguaaagaau

SEQ ID NO: 2512986 - RNA, 19 nt, Homo sapiens
  misc_RNA (1)...(19): siRNA sense strand
agcuuuaacucuggagaaa

SEQ ID NO: 2512987 - RNA, 19 nt, Homo sapiens
  misc_RNA (1)...(19): siRNA sense strand
agaaauccagugagagaga

SEQ ID NO: 2512988 - RNA, 19 nt, Homo sapiens
  misc_RNA (1)...(19): siRNA sense strand
agagagaagcccuacaaau

SEQ ID NO: 2512989 - RNA, 19 nt, Homo sapiens
  misc_RNA (1)...(19): siRNA sense strand
cccuaugaaugcaguaaau

SEQ ID NO: 2512990 - RNA, 19 nt, Homo sapiens
  misc_RNA (1)...(19): siRNA sense strand
aaugaaaagaggcaagaaa

SEQ ID NO: 2512991 - RNA, 19 nt, Homo sapiens
  misc_RNA (1)...(19): siRNA sense strand
aguaaaugugggaaagcuu

SEQ ID NO: 2512992 - RNA, 19 nt, Homo sapiens
  misc_RNA (1)...(19): siRNA sense strand
cagcuuuaacucuggagaa

SEQ ID NO: 2512993 - RNA, 19 nt, Homo sapiens
  misc_RNA (1)...(19): siRNA sense strand
acacaggagagaagcccua

SEQ ID NO: 2512994 - RNA, 19 nt, Homo sapiens
  misc_RNA (1)...(19): siRNA sense strand
ccuuauacuuguaaugagu

SEQ ID NO: 2512995 - RNA, 19 nt, Homo sapiens
  misc_RNA (1)...(19): siRNA sense strand
gcaccaaagaacucauaca

SEQ ID NO: 2512996 - RNA, 19 nt, Homo sapiens
  misc_RNA (1)...(19): siRNA sense strand
gugugcagagugcgggaaa

SEQ ID NO: 2512997 - RNA, 19 nt, Homo sapiens
  misc_RNA (1)...(19): siRNA sense strand
ggcaagacuuucaucgaga

SEQ ID NO: 2512998 - RNA, 19 nt, Homo sapiens
  misc_RNA (1)...(19): siRNA sense strand
caggaagcaauuugugaau

SEQ ID NO: 2512999 - RNA, 19 nt, Homo sapiens
  misc_RNA (1)...(19): siRNA sense strand
uagcaaauguggaaaggcu

SEQ ID NO: 2513000 - RNA, 19 nt, Homo sapiens
  misc_RNA (1)...(19): siRNA sense strand
cugcaaccagugucagaaa

SEQ ID NO: 2513001 - RNA, 19 nt, Homo sapiens
  misc_RNA (1)...(19): siRNA sense strand
aauucacacaggcgagaaa

SEQ ID NO: 2513002 - RNA, 19 nt, Homo sapiens
  misc_RNA (1)...(19): siRNA sense strand
uguaaagaauguggcaaga

SEQ ID NO: 2513003 - RNA, 19 nt, Homo sapiens
  misc_RNA (1)...(19): siRNA sense strand
gcucaucccuuguucgaca

SEQ ID NO: 2513004 - RNA, 19 nt, Homo sapiens
  misc_RNA (1)...(19): siRNA sense strand
auguacugaauguggcaaa

SEQ ID NO: 2513005 - RNA, 19 nt, Homo sapiens
  misc_RNA (1)...(19): siRNA sense strand
ggcaaaugcuucaaacgga

SEQ ID NO: 2513006 - RNA, 19 nt, Homo sapiens
  misc_RNA (1)...(19): siRNA sense strand
acuuguaaugaguguggaa

SEQ ID NO: 2513007 - RNA, 19 nt, Homo sapiens
  misc_RNA (1)...(19): siRNA sense strand
augccuagaguguggaaaa

SEQ ID NO: 2513008 - RNA, 19 nt, Homo sapiens
  misc_RNA (1)...(19): siRNA sense strand
gaguguaaucaguguggca

SEQ ID NO: 2513009 - RNA, 19 nt, Homo sapiens
  misc_RNA (1)...(19): siRNA sense strand
ccugaaaguguuaagucuu

SEQ ID NO: 2513010 - RNA, 19 nt, Homo sapiens
  misc_RNA (1)...(19): siRNA sense strand
ucguaugaagguaagaauu

SEQ ID NO: 2513011 - RNA, 19 nt, Homo sapiens
  misc_RNA (1)...(19): siRNA sense strand
ggcgagaaaccuuaugaau

SEQ ID NO: 2513012 - RNA, 19 nt, Homo sapiens
  misc_RNA (1)...(19): siRNA sense strand
aggcaucagaggauucaua

SEQ ID NO: 2513013 - RNA, 19 nt, Homo sapiens
  misc_RNA (1)...(19): siRNA sense strand
gauucauacuggcgagaag

SEQ ID NO: 2513014 - RNA, 19 nt, Homo sapiens
  misc_RNA (1)...(19): siRNA sense strand
gcauuugauugcaagcuca

SEQ ID NO: 2513015 - RNA, 19 nt, Homo sapiens
  misc_RNA (1)...(19): siRNA sense strand
gaaaaugacgacucggaau

SEQ ID NO: 2513016 - RNA, 19 nt, Homo sapiens
  misc_RNA (1)...(19): siRNA sense strand
gaaagauucacaagggaag

SEQ ID NO: 2513017 - RNA, 19 nt, Homo sapiens
  misc_RNA (1)...(19): siRNA sense strand
cagugagagagaagcccua

SEQ ID NO: 2513018 - RNA, 19 nt, Homo sapiens
  misc_RNA (1)...(19): siRNA sense strand
aagaaaucguaugaaggua

SEQ ID NO: 2513019 - RNA, 19 nt, Homo sapiens
  misc_RNA (1)...(19): siRNA sense strand
agguaagaauuuugagaac

SEQ ID NO: 2513020 - RNA, 19 nt, Homo sapiens
  misc_RNA (1)...(19): siRNA sense strand
aagaauguggcaagacuuu

SEQ ID NO: 2513021 - RNA, 19 nt, Homo sapiens
  misc_RNA (1)...(19): siRNA sense strand
agaugaagucagaagagaa

SEQ ID NO: 2513022 - RNA, 19 nt, Homo sapiens
  misc_RNA (1)...(19): siRNA sense strand
uuugaagacaccagggaaa

SEQ ID NO: 2513023 - RNA, 19 nt, Homo sapiens
  misc_RNA (1)...(19): siRNA sense strand
acauaaaagccaagaugaa

SEQ ID NO: 2513024 - RNA, 19 nt, Homo sapiens
  misc_RNA (1)...(19): siRNA sense strand
caguaaugauuguggugga

SEQ ID NO: 2513025 - RNA, 19 nt, Homo sapiens
  misc_RNA (1)...(19): siRNA sense strand
gggagaugucagugguaca

SEQ ID NO: 2513026 - RNA, 19 nt, Homo sapiens
  misc_RNA (1)...(19): siRNA sense strand
agucagaagagaagagaag

SEQ ID NO: 2513027 - RNA, 19 nt, Homo sapiens
  misc_RNA (1)...(19): siRNA sense strand
gggcaggugaauuuggaga

SEQ ID NO: 2513028 - RNA, 19 nt, Homo sapiens
  misc_RNA (1)...(19): siRNA sense strand
ugguggaauauauggagaa

SEQ ID NO: 2513029 - RNA, 19 nt, Homo sapiens
  misc_RNA (1)...(19): siRNA sense strand
cuccauuucaagugacaaa

SEQ ID NO: 2513030 - RNA, 19 nt, Homo sapiens
  misc_RNA (1)...(19): siRNA sense strand
cuguacuggcuuaaugaaa

SEQ ID NO: 2513031 - RNA, 19 nt, Homo sapiens
  misc_RNA (1)...(19): siRNA sense strand
auauacuggucaauagcaa

SEQ ID NO: 2513032 - RNA, 19 nt, Homo sapiens
  misc_RNA (1)...(19): siRNA sense strand
aguaaugauugugguggaa

SEQ ID NO: 2513033 - RNA, 19 nt, Homo sapiens
  misc_RNA (1)...(19): siRNA sense strand
ccacuuacagaaugggcau

SEQ ID NO: 2513034 - RNA, 19 nt, Homo sapiens
  misc_RNA (1)...(19): siRNA sense strand
agaccuagcggcucggaau

SEQ ID NO: 2513035 - RNA, 19 nt, Homo sapiens
  misc_RNA (1)...(19): siRNA sense strand
uuauguucaucgagaccua

SEQ ID NO: 2513036 - RNA, 19 nt, Homo sapiens
  misc_RNA (1)...(19): siRNA sense strand
ggcaggugaauuuggagaa

SEQ ID NO: 2513037 - RNA, 19 nt, Homo sapiens
  misc_RNA (1)...(19): siRNA sense strand
gcucagaguuugauggcua

SEQ ID NO: 2513038 - RNA, 19 nt, Homo sapiens
  misc_RNA (1)...(19): siRNA sense strand
ggcagaaggaggugcgacu

SEQ ID NO: 2513039 - RNA, 19 nt, Homo sapiens
  misc_RNA (1)...(19): siRNA sense strand
ccacauggcccuaggagug

SEQ ID NO: 2513040 - RNA, 19 nt, Homo sapiens
  misc_RNA (1)...(19): siRNA sense strand
ccacaagaaugaugguguc

SEQ ID NO: 2513041 - RNA, 19 nt, Homo sapiens
  misc_RNA (1)...(19): siRNA sense strand
accuagugcuggaacggua

SEQ ID NO: 2513042 - RNA, 19 nt, Homo sapiens
  misc_RNA (1)...(19): siRNA sense strand
caguaaauguccugaggga

SEQ ID NO: 2513043 - RNA, 19 nt, Homo sapiens
  misc_RNA (1)...(19): siRNA sense strand
uauaauaagaagcggccaa

SEQ ID NO: 2513044 - RNA, 19 nt, Homo sapiens
  misc_RNA (1)...(19): siRNA sense strand
guaaauguccugagggaac

SEQ ID NO: 2513045 - RNA, 19 nt, Homo sapiens
  misc_RNA (1)...(19): siRNA sense strand
cggccaaauaaucuaguaa

SEQ ID NO: 2513046 - RNA, 19 nt, Homo sapiens
  misc_RNA (1)...(19): siRNA sense strand
ccgaugaccuuuauacauu

SEQ ID NO: 2513047 - RNA, 19 nt, Homo sapiens
  misc_RNA (1)...(19): siRNA sense strand
aagccaaagaagaagaaaa

SEQ ID NO: 2513048 - RNA, 19 nt, Homo sapiens
  misc_RNA (1)...(19): siRNA sense strand
agaagauuacagaagacua

SEQ ID NO: 2513049 - RNA, 19 nt, Homo sapiens
  misc_RNA (1)...(19): siRNA sense strand
cucucaagccaaagaagaa

SEQ ID NO: 2513050 - RNA, 19 nt, Homo sapiens
  misc_RNA (1)...(19): siRNA sense strand
uugagaagagagaaccaaa

SEQ ID NO: 2513051 - RNA, 19 nt, Homo sapiens
  misc_RNA (1)...(19): siRNA sense strand
caaugauacuuuugguaca

SEQ ID NO: 2513052 - RNA, 19 nt, Homo sapiens
  misc_RNA (1)...(19): siRNA sense strand
cgaugaccuuuauacauua

SEQ ID NO: 2513053 - RNA, 19 nt, Homo sapiens
  misc_RNA (1)...(19): siRNA sense strand
ggaaaguacuacagccauc

SEQ ID NO: 2513054 - RNA, 19 nt, Homo sapiens
  misc_RNA (1)...(19): siRNA sense strand
cucugaaugucgaggaguu

SEQ ID NO: 2513055 - RNA, 19 nt, Homo sapiens
  misc_RNA (1)...(19): siRNA sense strand
caucauucguccaggcugu

SEQ ID NO: 2513056 - RNA, 19 nt, Homo sapiens
  misc_RNA (1)...(19): siRNA sense strand
cuggaaaguacuacagcca

SEQ ID NO: 2513057 - RNA, 19 nt, Homo sapiens
  misc_RNA (1)...(19): siRNA sense strand
ucuuguaggcauucggauu

SEQ ID NO: 2513058 - RNA, 19 nt, Homo sapiens
  misc_RNA (1)...(19): siRNA sense strand
ggagaacagccuugggagu

SEQ ID NO: 2513059 - RNA, 19 nt, Homo sapiens
  misc_RNA (1)...(19): siRNA sense strand
cuaaaguacgacugagcuu

SEQ ID NO: 2513060 - RNA, 19 nt, Homo sapiens
  misc_RNA (1)...(19): siRNA sense strand
gggaaugagaacgaggaaa

SEQ ID NO: 2513061 - RNA, 19 nt, Homo sapiens
  misc_RNA (1)...(19): siRNA sense strand
gauuugagcuaucugggaa

SEQ ID NO: 2513062 - RNA, 19 nt, Homo sapiens
  misc_RNA (1)...(19): siRNA sense strand
ggagaugacgcaauggaca

SEQ ID NO: 2513063 - RNA, 19 nt, Homo sapiens
  misc_RNA (1)...(19): siRNA sense strand
cagagacgauucaaggcaa

SEQ ID NO: 2513064 - RNA, 19 nt, Homo sapiens
  misc_RNA (1)...(19): siRNA sense strand
agagacgauucaaggcaau

SEQ ID NO: 2513065 - RNA, 19 nt, Homo sapiens
  misc_RNA (1)...(19): siRNA sense strand
agugauaagauuugcacca

SEQ ID NO: 2513066 - RNA, 19 nt, Homo sapiens
  misc_RNA (1)...(19): siRNA sense strand
cuaauacugugguugggaa

SEQ ID NO: 2513067 - RNA, 19 nt, Homo sapiens
  misc_RNA (1)...(19): siRNA sense strand
cuuuauugcccuugagaag

SEQ ID NO: 2513068 - RNA, 19 nt, Homo sapiens
  misc_RNA (1)...(19): siRNA sense strand
auuugagcuaucugggaaa

SEQ ID NO: 2513069 - RNA, 19 nt, Homo sapiens
  misc_RNA (1)...(19): siRNA sense strand
gaacagaacuugaucggaa

SEQ ID NO: 2513070 - RNA, 19 nt, Homo sapiens
  misc_RNA (1)...(19): siRNA sense strand
aggaagucuuuguggauau

SEQ ID NO: 2513071 - RNA, 19 nt, Homo sapiens
  misc_RNA (1)...(19): siRNA sense strand
auggagaagaagaagauaa

SEQ ID NO: 2513072 - RNA, 19 nt, Homo sapiens
  misc_RNA (1)...(19): siRNA sense strand
ccuuggaguauaugauaaa

SEQ ID NO: 2513073 - RNA, 19 nt, Homo sapiens
  misc_RNA (1)...(19): siRNA sense strand
uggagagaacaguaggaaa

SEQ ID NO: 2513074 - RNA, 19 nt, Homo sapiens
  misc_RNA (1)...(19): siRNA sense strand
acaugaaggacuuaagcaa

SEQ ID NO: 2513075 - RNA, 19 nt, Homo sapiens
  misc_RNA (1)...(19): siRNA sense strand
augcaaauuccuuggagua

SEQ ID NO: 2513076 - RNA, 19 nt, Homo sapiens
  misc_RNA (1)...(19): siRNA sense strand
ccucgaugacuuagaaaga

SEQ ID NO: 2513077 - RNA, 19 nt, Homo sapiens
  misc_RNA (1)...(19): siRNA sense strand
ccagaaaaccuuugcagaa

SEQ ID NO: 2513078 - RNA, 19 nt, Homo sapiens
  misc_RNA (1)...(19): siRNA sense strand
acuuagacuucaugcagaa

SEQ ID NO: 2513079 - RNA, 19 nt, Homo sapiens
  misc_RNA (1)...(19): siRNA sense strand
augaggaguuuaaaggcua

SEQ ID NO: 2513080 - RNA, 19 nt, Homo sapiens
  misc_RNA (1)...(19): siRNA sense strand
cuuacaacaugaaggacuu

SEQ ID NO: 2513081 - RNA, 19 nt, Homo sapiens
  misc_RNA (1)...(19): siRNA sense strand
aggauuguaaacugagaaa

SEQ ID NO: 2513082 - RNA, 19 nt, Homo sapiens
  misc_RNA (1)...(19): siRNA sense strand
ucgaugacuuagaaagaga

SEQ ID NO: 2513083 - RNA, 19 nt, Homo sapiens
  misc_RNA (1)...(19): siRNA sense strand
caguugaccaggaaggaau

SEQ ID NO: 2513084 - RNA, 19 nt, Homo sapiens
  misc_RNA (1)...(19): siRNA sense strand
gaaaaguccauuaggaaga

SEQ ID NO: 2513085 - RNA, 19 nt, Homo sapiens
  misc_RNA (1)...(19): siRNA sense strand
aguucaugguggaggcuga

SEQ ID NO: 2513086 - RNA, 19 nt, Homo sapiens
  misc_RNA (1)...(19): siRNA sense strand
ccguguugauauacaagaa

SEQ ID NO: 2513087 - RNA, 19 nt, Homo sapiens
  misc_RNA (1)...(19): siRNA sense strand
gguucuagaugugggaaga

SEQ ID NO: 2513088 - RNA, 19 nt, Homo sapiens
  misc_RNA (1)...(19): siRNA sense strand
aggaauggauccaguucau

SEQ ID NO: 2513089 - RNA, 19 nt, Homo sapiens
  misc_RNA (1)...(19): siRNA sense strand
ugguacaggaugaggaguu

SEQ ID NO: 2513090 - RNA, 19 nt, Homo sapiens
  misc_RNA (1)...(19): siRNA sense strand
ggaguauaugauaaaggaa

SEQ ID NO: 2513091 - RNA, 19 nt, Homo sapiens
  misc_RNA (1)...(19): siRNA sense strand
aacagaacuugaucggaaa

SEQ ID NO: 2513092 - RNA, 19 nt, Homo sapiens
  misc_RNA (1)...(19): siRNA sense strand
guguugauuuggaaacgaa

SEQ ID NO: 2513093 - RNA, 19 nt, Homo sapiens
  misc_RNA (1)...(19): siRNA sense strand
caugaaggacuuaagcaau

SEQ ID NO: 2513094 - RNA, 19 nt, Homo sapiens
  misc_RNA (1)...(19): siRNA sense strand
aaaagauggaauaggacua

SEQ ID NO: 2513095 - RNA, 19 nt, Homo sapiens
  misc_RNA (1)...(19): siRNA sense strand
guuuaaaggcuauucuaca

SEQ ID NO: 2513096 - RNA, 19 nt, Homo sapiens
  misc_RNA (1)...(19): siRNA sense strand
gaugacuuagaaagagaaa

SEQ ID NO: 2513097 - RNA, 19 nt, Homo sapiens
  misc_RNA (1)...(19): siRNA sense strand
agaaaaccuuugcagaaaa

SEQ ID NO: 2513098 - RNA, 19 nt, Homo sapiens
  misc_RNA (1)...(19): siRNA sense strand
cugaaauugagaaugaaga

SEQ ID NO: 2513099 - RNA, 19 nt, Homo sapiens
  misc_RNA (1)...(19): siRNA sense strand
guguugauauacaagaaga

SEQ ID NO: 2513100 - RNA, 19 nt, Homo sapiens
  misc_RNA (1)...(19): siRNA sense strand
gaaaauaacaugaaggccu

SEQ ID NO: 2513101 - RNA, 19 nt, Homo sapiens
  misc_RNA (1)...(19): siRNA sense strand
acuucaugcagaaugguaa

SEQ ID NO: 2513102 - RNA, 19 nt, Homo sapiens
  misc_RNA (1)...(19): siRNA sense strand
ugcaaauacugauggagga

SEQ ID NO: 2513103 - RNA, 19 nt, Homo sapiens
  misc_RNA (1)...(19): siRNA sense strand
ucgaaaaguccauuaggaa

SEQ ID NO: 2513104 - RNA, 19 nt, Homo sapiens
  misc_RNA (1)...(19): siRNA sense strand
acaucacuguccagggcua

SEQ ID NO: 2513105 - RNA, 19 nt, Homo sapiens
  misc_RNA (1)...(19): siRNA sense strand
cgacagaaaaguuguuaca

SEQ ID NO: 2513106 - RNA, 19 nt, Homo sapiens
  misc_RNA (1)...(19): siRNA sense strand
gcaaauacugauggaggau

SEQ ID NO: 2513107 - RNA, 19 nt, Homo sapiens
  misc_RNA (1)...(19): siRNA sense strand
gaguauaugauaaaggaag

SEQ ID NO: 2513108 - RNA, 19 nt, Homo sapiens
  misc_RNA (1)...(19): siRNA sense strand
ggucuguggaucugggcuu

SEQ ID NO: 2513109 - RNA, 19 nt, Homo sapiens
  misc_RNA (1)...(19): siRNA sense strand
aagcagaaugaaagggucu

SEQ ID NO: 2513110 - RNA, 19 nt, Homo sapiens
  misc_RNA (1)...(19): siRNA sense strand
augaaggauuguaaacuga

SEQ ID NO: 2513111 - RNA, 19 nt, Homo sapiens
  misc_RNA (1)...(19): siRNA sense strand
gugaaagauaaccguguga

SEQ ID NO: 2513112 - RNA, 19 nt, Homo sapiens
  misc_RNA (1)...(19): siRNA sense strand
aggaaauacuugcugaaag

SEQ ID NO: 2513113 - RNA, 19 nt, Homo sapiens
  misc_RNA (1)...(19): siRNA sense strand
gacuagagggagauuguau

SEQ ID NO: 2513114 - RNA, 19 nt, Homo sapiens
  misc_RNA (1)...(19): siRNA sense strand
ucuguauggagaagaagaa

SEQ ID NO: 2513115 - RNA, 19 nt, Homo sapiens
  misc_RNA (1)...(19): siRNA sense strand
gcccuaaccuuaaagcaga

SEQ ID NO: 2513116 - RNA, 19 nt, Homo sapiens
  misc_RNA (1)...(19): siRNA sense strand
caucacuucuguauggaga

SEQ ID NO: 2513117 - RNA, 19 nt, Homo sapiens
  misc_RNA (1)...(19): siRNA sense strand
cugugaugcucuucugauu

SEQ ID NO: 2513118 - RNA, 19 nt, Homo sapiens
  misc_RNA (1)...(19): siRNA sense strand
uguauggagaagaagaaga

SEQ ID NO: 2513119 - RNA, 19 nt, Homo sapiens
  misc_RNA (1)...(19): siRNA sense strand
ggggagugaucaaggcuga

SEQ ID NO: 2513120 - RNA, 19 nt, Homo sapiens
  misc_RNA (1)...(19): siRNA sense strand
agaaggaaauacuugcuga

SEQ ID NO: 2513121 - RNA, 19 nt, Homo sapiens
  misc_RNA (1)...(19): siRNA sense strand
ggacaugacugaagaggag

SEQ ID NO: 2513122 - RNA, 19 nt, Homo sapiens
  misc_RNA (1)...(19): siRNA sense strand
aagaggagcucaugggcau

SEQ ID NO: 2513123 - RNA, 19 nt, Homo sapiens
  misc_RNA (1)...(19): siRNA sense strand
cugaagaggaggugcagau

SEQ ID NO: 2513124 - RNA, 19 nt, Homo sapiens
  misc_RNA (1)...(19): siRNA sense strand
cuacauucccugaaggaga

SEQ ID NO: 2513125 - RNA, 19 nt, Homo sapiens
  misc_RNA (1)...(19): siRNA sense strand
gggaggaggaggaagagga

SEQ ID NO: 2513126 - RNA, 19 nt, Homo sapiens
  misc_RNA (1)...(19): siRNA sense strand
gccuaaugguccugggugu

SEQ ID NO: 2513127 - RNA, 19 nt, Homo sapiens
  misc_RNA (1)...(19): siRNA sense strand
caaagguuccuguggccaa

SEQ ID NO: 2513128 - RNA, 19 nt, Homo sapiens
  misc_RNA (1)...(19): siRNA sense strand
ccaucagagagcagugaga

SEQ ID NO: 2513129 - RNA, 19 nt, Homo sapiens
  misc_RNA (1)...(19): siRNA sense strand
gagaagaugaagaaagggu

SEQ ID NO: 2513130 - RNA, 19 nt, Homo sapiens
  misc_RNA (1)...(19): siRNA sense strand
aggaggaagaggagcucau

SEQ ID NO: 2513131 - RNA, 19 nt, Homo sapiens
  misc_RNA (1)...(19): siRNA sense strand
cagagagcagugagagcau

SEQ ID NO: 2513132 - RNA, 19 nt, Homo sapiens
  misc_RNA (1)...(19): siRNA sense strand
uggcuguggauguggguga

SEQ ID NO: 2513133 - RNA, 19 nt, Homo sapiens
  misc_RNA (1)...(19): siRNA sense strand
ucggauagugggaagucua

SEQ ID NO: 2513134 - RNA, 19 nt, Homo sapiens
  misc_RNA (1)...(19): siRNA sense strand
ugacugaagaggaggugca

SEQ ID NO: 2513135 - RNA, 19 nt, Homo sapiens
  misc_RNA (1)...(19): siRNA sense strand
ccucaggagcaacagagaa

SEQ ID NO: 2513136 - RNA, 19 nt, Homo sapiens
  misc_RNA (1)...(19): siRNA sense strand
cuaaagaggagguggaaau

SEQ ID NO: 2513137 - RNA, 19 nt, Homo sapiens
  misc_RNA (1)...(19): siRNA sense strand
acuuagagggugagaguaa

SEQ ID NO: 2513138 - RNA, 19 nt, Homo sapiens
  misc_RNA (1)...(19): siRNA sense strand
gaguaauaguucagagaca

SEQ ID NO: 2513139 - RNA, 19 nt, Homo sapiens
  misc_RNA (1)...(19): siRNA sense strand
acuaaagcccagagagcaa

SEQ ID NO: 2513140 - RNA, 19 nt, Homo sapiens
  misc_RNA (1)...(19): siRNA sense strand
caaaugagaagcagggcaa

SEQ ID NO: 2513141 - RNA, 19 nt, Homo sapiens
  misc_RNA (1)...(19): siRNA sense strand
gagcaagacaguugggcuu

SEQ ID NO: 2513142 - RNA, 19 nt, Homo sapiens
  misc_RNA (1)...(19): siRNA sense strand
uauugaauggcgagagaaa

SEQ ID NO: 2513143 - RNA, 19 nt, Homo sapiens
  misc_RNA (1)...(19): siRNA sense strand
ggauauaggaguggggaaa

SEQ ID NO: 2513144 - RNA, 19 nt, Homo sapiens
  misc_RNA (1)...(19): siRNA sense strand
ccagcaacuuagaggguga

SEQ ID NO: 2513145 - RNA, 19 nt, Homo sapiens
  misc_RNA (1)...(19): siRNA sense strand
aggaaggaauggagaaaau

SEQ ID NO: 2513146 - RNA, 19 nt, Homo sapiens
  misc_RNA (1)...(19): siRNA sense strand
ggcaauuaaccguggagaa

SEQ ID NO: 2513147 - RNA, 19 nt, Homo sapiens
  misc_RNA (1)...(19): siRNA sense strand
aagaagaugacaaggaaga

SEQ ID NO: 2513148 - RNA, 19 nt, Homo sapiens
  misc_RNA (1)...(19): siRNA sense strand
guggaaaugaauugggaca

SEQ ID NO: 2513149 - RNA, 19 nt, Homo sapiens
  misc_RNA (1)...(19): siRNA sense strand
gagcgaaaguacaggucca

SEQ ID NO: 2513150 - RNA, 19 nt, Homo sapiens
  misc_RNA (1)...(19): siRNA sense strand
aggaagagaaugacgauga

SEQ ID NO: 2513151 - RNA, 19 nt, Homo sapiens
  misc_RNA (1)...(19): siRNA sense strand
aaauuaagaaggaagggaa

SEQ ID NO: 2513152 - RNA, 19 nt, Homo sapiens
  misc_RNA (1)...(19): siRNA sense strand
ggacaguucuuacaggcaa

SEQ ID NO: 2513153 - RNA, 19 nt, Homo sapiens
  misc_RNA (1)...(19): siRNA sense strand
ggaagaugucugagugcuu

SEQ ID NO: 2513154 - RNA, 19 nt, Homo sapiens
  misc_RNA (1)...(19): siRNA sense strand
cagugaagcaggagcauca

SEQ ID NO: 2513155 - RNA, 19 nt, Homo sapiens
  misc_RNA (1)...(19): siRNA sense strand
cugcuuuagaagacagaaa

SEQ ID NO: 2513156 - RNA, 19 nt, Homo sapiens
  misc_RNA (1)...(19): siRNA sense strand
ggucaauauuucugaugga

SEQ ID NO: 2513157 - RNA, 19 nt, Homo sapiens
  misc_RNA (1)...(19): siRNA sense strand
aggccaaauucaaggaguu

SEQ ID NO: 2513158 - RNA, 19 nt, Homo sapiens
  misc_RNA (1)...(19): siRNA sense strand
ccucugaagaagaugacaa

SEQ ID NO: 2513159 - RNA, 19 nt, Homo sapiens
  misc_RNA (1)...(19): siRNA sense strand
guacaugcaagaaggaaga

SEQ ID NO: 2513160 - RNA, 19 nt, Homo sapiens
  misc_RNA (1)...(19): siRNA sense strand
guacuaaagaggaggugga

SEQ ID NO: 2513161 - RNA, 19 nt, Homo sapiens
  misc_RNA (1)...(19): siRNA sense strand
ugucaaguuuccagcaaau

SEQ ID NO: 2513162 - RNA, 19 nt, Homo sapiens
  misc_RNA (1)...(19): siRNA sense strand
ccaaggaauccaaaccaaa

SEQ ID NO: 2513163 - RNA, 19 nt, Homo sapiens
  misc_RNA (1)...(19): siRNA sense strand
augcaagaaggaagagaau

SEQ ID NO: 2513164 - RNA, 19 nt, Homo sapiens
  misc_RNA (1)...(19): siRNA sense strand
aggaugugguacugaaaga

SEQ ID NO: 2513165 - RNA, 19 nt, Homo sapiens
  misc_RNA (1)...(19): siRNA sense strand
cugauggagugaaggauga

SEQ ID NO: 2513166 - RNA, 19 nt, Homo sapiens
  misc_RNA (1)...(19): siRNA sense strand
uagagaauucagagccaaa

SEQ ID NO: 2513167 - RNA, 19 nt, Homo sapiens
  misc_RNA (1)...(19): siRNA sense strand
gcugauuccuugagagaag

SEQ ID NO: 2513168 - RNA, 19 nt, Homo sapiens
  misc_RNA (1)...(19): siRNA sense strand
acauuaggccugacguuaa

SEQ ID NO: 2513169 - RNA, 19 nt, Homo sapiens
  misc_RNA (1)...(19): siRNA sense strand
gguaaaugagaaagauguu

SEQ ID NO: 2513170 - RNA, 19 nt, Homo sapiens
  misc_RNA (1)...(19): siRNA sense strand
ggagaaaauuugaagguac

SEQ ID NO: 2513171 - RNA, 19 nt, Homo sapiens
  misc_RNA (1)...(19): siRNA sense strand
ugaaaacagccaagacaaa

SEQ ID NO: 2513172 - RNA, 19 nt, Homo sapiens
  misc_RNA (1)...(19): siRNA sense strand
agcugaaaguugaagaaga

SEQ ID NO: 2513173 - RNA, 19 nt, Homo sapiens
  misc_RNA (1)...(19): siRNA sense strand
gagaguaauaguucagaga

SEQ ID NO: 2513174 - RNA, 19 nt, Homo sapiens
  misc_RNA (1)...(19): siRNA sense strand
caacuuagagggugagagu

SEQ ID NO: 2513175 - RNA, 19 nt, Homo sapiens
  misc_RNA (1)...(19): siRNA sense strand
uagugaaaauugagccaaa

SEQ ID NO: 2513176 - RNA, 19 nt, Homo sapiens
  misc_RNA (1)...(19): siRNA sense strand
aaaggaaggaauggagaaa

SEQ ID NO: 2513177 - RNA, 19 nt, Homo sapiens
  misc_RNA (1)...(19): siRNA sense strand
cugaagaagaugacaagga

SEQ ID NO: 2513178 - RNA, 19 nt, Homo sapiens
  misc_RNA (1)...(19): siRNA sense strand
guuaaggaggagcugaaua

SEQ ID NO: 2513179 - RNA, 19 nt, Homo sapiens
  misc_RNA (1)...(19): siRNA sense strand
gguacugaaagaugaauuu

SEQ ID NO: 2513180 - RNA, 19 nt, Homo sapiens
  misc_RNA (1)...(19): siRNA sense strand
uugcaaggccagaguuaau

SEQ ID NO: 2513181 - RNA, 19 nt, Homo sapiens
  misc_RNA (1)...(19): siRNA sense strand
gagaagaagccuuggacug

SEQ ID NO: 2513182 - RNA, 19 nt, Homo sapiens
  misc_RNA (1)...(19): siRNA sense strand
gaagaaaccagcaaagcca

SEQ ID NO: 2513183 - RNA, 19 nt, Homo sapiens
  misc_RNA (1)...(19): siRNA sense strand
ugagagaaguucagcaaac

SEQ ID NO: 2513184 - RNA, 19 nt, Homo sapiens
  misc_RNA (1)...(19): siRNA sense strand
ggacuaaagcccagagagc

SEQ ID NO: 2513185 - RNA, 19 nt, Homo sapiens
  misc_RNA (1)...(19): siRNA sense strand
caugcaagaaggaagagaa

SEQ ID NO: 2513186 - RNA, 19 nt, Homo sapiens
  misc_RNA (1)...(19): siRNA sense strand
ucauaguacaauccagaaa

SEQ ID NO: 2513187 - RNA, 19 nt, Homo sapiens
  misc_RNA (1)...(19): siRNA sense strand
cagcagacguugaggucac

SEQ ID NO: 2513188 - RNA, 19 nt, Homo sapiens
  misc_RNA (1)...(19): siRNA sense strand
acauacaguucgaaggacu

SEQ ID NO: 2513189 - RNA, 19 nt, Homo sapiens
  misc_RNA (1)...(19): siRNA sense strand
agagaaugacgaugacuuu

SEQ ID NO: 2513190 - RNA, 19 nt, Homo sapiens
  misc_RNA (1)...(19): siRNA sense strand
gggacaugguacagguuuu

SEQ ID NO: 2513191 - RNA, 19 nt, Homo sapiens
  misc_RNA (1)...(19): siRNA sense strand
gagaaaauuugaagguacu

SEQ ID NO: 2513192 - RNA, 19 nt, Homo sapiens
  misc_RNA (1)...(19): siRNA sense strand
gcuuugugggaguggauau

SEQ ID NO: 2513193 - RNA, 19 nt, Homo sapiens
  misc_RNA (1)...(19): siRNA sense strand
caagaagagcgaaaguaca

SEQ ID NO: 2513194 - RNA, 19 nt, Homo sapiens
  misc_RNA (1)...(19): siRNA sense strand
cuugagagaaguucagcaa

SEQ ID NO: 2513195 - RNA, 19 nt, Homo sapiens
  misc_RNA (1)...(19): siRNA sense strand
uugauaaguuucugcucua

SEQ ID NO: 2513196 - RNA, 19 nt, Homo sapiens
  misc_RNA (1)...(19): siRNA sense strand
cagaguuaaugaagaucuu

SEQ ID NO: 2513197 - RNA, 19 nt, Homo sapiens
  misc_RNA (1)...(19): siRNA sense strand
aaguacagguccaggaugu

SEQ ID NO: 2513198 - RNA, 19 nt, Homo sapiens
  misc_RNA (1)...(19): siRNA sense strand
gcugauucccauacgaaau

SEQ ID NO: 2513199 - RNA, 19 nt, Homo sapiens
  misc_RNA (1)...(19): siRNA sense strand
ggauuuacuugcuggccaa

SEQ ID NO: 2513200 - RNA, 19 nt, Homo sapiens
  misc_RNA (1)...(19): siRNA sense strand
ggagauaagccuuggaccu

SEQ ID NO: 2513201 - RNA, 19 nt, Homo sapiens
  misc_RNA (1)...(19): siRNA sense strand
cugacaaagugaagcgguu

SEQ ID NO: 2513202 - RNA, 19 nt, Homo sapiens
  misc_RNA (1)...(19): siRNA sense strand
cguaccacgccgagaacua

SEQ ID NO: 2513203 - RNA, 19 nt, Homo sapiens
  misc_RNA (1)...(19): siRNA sense strand
acuacagcccugaggacaa

SEQ ID NO: 2513204 - RNA, 19 nt, Homo sapiens
  misc_RNA (1)...(19): siRNA sense strand
ccagagugaagguggacuu

SEQ ID NO: 2513205 - RNA, 19 nt, Homo sapiens
  misc_RNA (1)...(19): siRNA sense strand
cugcauuggaagugagauc

SEQ ID NO: 2513206 - RNA, 19 nt, Homo sapiens
  misc_RNA (1)...(19): siRNA sense strand
agaccgacgaggaagauau

SEQ ID NO: 2513207 - RNA, 19 nt, Homo sapiens
  misc_RNA (1)...(19): siRNA sense strand
cggaagcgucuuugcucaa

SEQ ID NO: 2513208 - RNA, 19 nt, Homo sapiens
  misc_RNA (1)...(19): siRNA sense strand
ccaacguggaugagagucu

SEQ ID NO: 2513209 - RNA, 19 nt, Homo sapiens
  misc_RNA (1)...(19): siRNA sense strand
cauuauuacgagucggaca

SEQ ID NO: 2513210 - RNA, 19 nt, Homo sapiens
  misc_RNA (1)...(19): siRNA sense strand
uggaggaagcagcagggaa

SEQ ID NO: 2513211 - RNA, 19 nt, Homo sapiens
  misc_RNA (1)...(19): siRNA sense strand
ugacaaagcaggaaaccgu

SEQ ID NO: 2513212 - RNA, 19 nt, Homo sapiens
  misc_RNA (1)...(19): siRNA sense strand
ggccgugaggaguggaaau

SEQ ID NO: 2513213 - RNA, 19 nt, Homo sapiens
  misc_RNA (1)...(19): siRNA sense strand
augaggaagugcuggcuga

SEQ ID NO: 2513214 - RNA, 19 nt, Homo sapiens
  misc_RNA (1)...(19): siRNA sense strand
ggaaauaugcggcuacgga

SEQ ID NO: 2513215 - RNA, 19 nt, Homo sapiens
  misc_RNA (1)...(19): siRNA sense strand
uggauggcguggagaucau

SEQ ID NO: 2513216 - RNA, 19 nt, Homo sapiens
  misc_RNA (1)...(19): siRNA sense strand
gggauuuacuugcuggcca

SEQ ID NO: 2513217 - RNA, 19 nt, Homo sapiens
  misc_RNA (1)...(19): siRNA sense strand
gggaaaaccuggcgcugca

SEQ ID NO: 2513218 - RNA, 19 nt, Homo sapiens
  misc_RNA (1)...(19): siRNA sense strand
ccauaggcgggaucagcaa

SEQ ID NO: 2513219 - RNA, 19 nt, Homo sapiens
  misc_RNA (1)...(19): siRNA sense strand
gagcccaucgaguggaaau

SEQ ID NO: 2513220 - RNA, 19 nt, Homo sapiens
  misc_RNA (1)...(19): siRNA sense strand
gcuccagugcggacaucaa

SEQ ID NO: 2513221 - RNA, 19 nt, Homo sapiens
  misc_RNA (1)...(19): siRNA sense strand
guucaguacguauggcaca

SEQ ID NO: 2513222 - RNA, 19 nt, Homo sapiens
  misc_RNA (1)...(19): siRNA sense strand
guucaguacguauggcaca

SEQ ID NO: 2513223 - RNA, 19 nt, Homo sapiens
  misc_RNA (1)...(19): siRNA sense strand
gcaugaaacuggaggagca

SEQ ID NO: 2513224 - RNA, 19 nt, Homo sapiens
  misc_RNA (1)...(19): siRNA sense strand
gguauuuggaggaggaaca

SEQ ID NO: 2513225 - RNA, 19 nt, Homo sapiens
  misc_RNA (1)...(19): siRNA sense strand
gagaaauaagucagcacaa

SEQ ID NO: 2513226 - RNA, 19 nt, Homo sapiens
  misc_RNA (1)...(19): siRNA sense strand
cugcaucgucauaggguua

SEQ ID NO: 2513227 - RNA, 19 nt, Homo sapiens
  misc_RNA (1)...(19): siRNA sense strand
gguuaauaucacugaccaa

SEQ ID NO: 2513228 - RNA, 19 nt, Homo sapiens
  misc_RNA (1)...(19): siRNA sense strand
cagaaaaggaugaguauca

SEQ ID NO: 2513229 - RNA, 19 nt, Homo sapiens
  misc_RNA (1)...(19): siRNA sense strand
acacagaaucucagcccaa

SEQ ID NO: 2513230 - RNA, 19 nt, Homo sapiens
  misc_RNA (1)...(19): siRNA sense strand
gcguggaccuggaugaaaa

SEQ ID NO: 2513231 - RNA, 19 nt, Homo sapiens
  misc_RNA (1)...(19): siRNA sense strand
gguauagcuuugaccacaa

SEQ ID NO: 2513232 - RNA, 19 nt, Homo sapiens
  misc_RNA (1)...(19): siRNA sense strand
ucaucaaggaaaugcuaua

SEQ ID NO: 2513233 - RNA, 19 nt, Homo sapiens
  misc_RNA (1)...(19): siRNA sense strand
ccauaaauuaccaggagca

SEQ ID NO: 2513234 - RNA, 19 nt, Homo sapiens
  misc_RNA (1)...(19): siRNA sense strand
ccuuauaaugggacuaauu

SEQ ID NO: 2513235 - RNA, 19 nt, Homo sapiens
  misc_RNA (1)...(19): siRNA sense strand
gggacuaauuuuacgauau

SEQ ID NO: 2513236 - RNA, 19 nt, Homo sapiens
  misc_RNA (1)...(19): siRNA sense strand
ccaucaacucugcugguua

SEQ ID NO: 2513237 - RNA, 19 nt, Homo sapiens
  misc_RNA (1)...(19): siRNA sense strand
ccaggaugaacuagccaua

SEQ ID NO: 2513238 - RNA, 19 nt, Homo sapiens
  misc_RNA (1)...(19): siRNA sense strand
gagcaaugguguauggccu

SEQ ID NO: 2513239 - RNA, 19 nt, Homo sapiens
  misc_RNA (1)...(19): siRNA sense strand
ggaaaacauuuaugaggga

SEQ ID NO: 2513240 - RNA, 19 nt, Homo sapiens
  misc_RNA (1)...(19): siRNA sense strand
gcauuguaaaccaggauga

SEQ ID NO: 2513241 - RNA, 19 nt, Homo sapiens
  misc_RNA (1)...(19): siRNA sense strand
ugauauugaaaguggaacu

SEQ ID NO: 2513242 - RNA, 19 nt, Homo sapiens
  misc_RNA (1)...(19): siRNA sense strand
uggccauaguccuuacaua

SEQ ID NO: 2513243 - RNA, 19 nt, Homo sapiens
  misc_RNA (1)...(19): siRNA sense strand
gcacauuauaccuacaaca

SEQ ID NO: 2513244 - RNA, 19 nt, Homo sapiens
  misc_RNA (1)...(19): siRNA sense strand
acguaugccuucuugggaa

SEQ ID NO: 2513245 - RNA, 19 nt, Homo sapiens
  misc_RNA (1)...(19): siRNA sense strand
aggauauagucuaaagaag

SEQ ID NO: 2513246 - RNA, 19 nt, Homo sapiens
  misc_RNA (1)...(19): siRNA sense strand
acaaguaucugaaaccaau

SEQ ID NO: 2513247 - RNA, 19 nt, Homo sapiens
  misc_RNA (1)...(19): siRNA sense strand
aggaugauguggaaugcau

SEQ ID NO: 2513248 - RNA, 19 nt, Homo sapiens
  misc_RNA (1)...(19): siRNA sense strand
augaaaaucugaaggagga

SEQ ID NO: 2513249 - RNA, 19 nt, Homo sapiens
  misc_RNA (1)...(19): siRNA sense strand
cacaacaccaggaagcaaa

SEQ ID NO: 2513250 - RNA, 19 nt, Homo sapiens
  misc_RNA (1)...(19): siRNA sense strand
cauaaauuaccaggagcaa

SEQ ID NO: 2513251 - RNA, 19 nt, Homo sapiens
  misc_RNA (1)...(19): siRNA sense strand
uggaaugcauuguaaacca

SEQ ID NO: 2513252 - RNA, 19 nt, Homo sapiens
  misc_RNA (1)...(19): siRNA sense strand
ccuggaacuuucagcacau

SEQ ID NO: 2513253 - RNA, 19 nt, Homo sapiens
  misc_RNA (1)...(19): siRNA sense strand
gggaacagcuaaaagagga

SEQ ID NO: 2513254 - RNA, 19 nt, Homo sapiens
  misc_RNA (1)...(19): siRNA sense strand
ugaaaguggaacugucuau

SEQ ID NO: 2513255 - RNA, 19 nt, Homo sapiens
  misc_RNA (1)...(19): siRNA sense strand
cuggaggagcaauggugua

SEQ ID NO: 2513256 - RNA, 19 nt, Homo sapiens
  misc_RNA (1)...(19): siRNA sense strand
ucaaggguuaugucagaaa

SEQ ID NO: 2513257 - RNA, 19 nt, Homo sapiens
  misc_RNA (1)...(19): siRNA sense strand
ugucuaugacuguguaaaa

SEQ ID NO: 2513258 - RNA, 19 nt, Homo sapiens
  misc_RNA (1)...(19): siRNA sense strand
uugugaaggcuaugauaca

SEQ ID NO: 2513259 - RNA, 19 nt, Homo sapiens
  misc_RNA (1)...(19): siRNA sense strand
ugaaugaugcaguggccau

SEQ ID NO: 2513260 - RNA, 19 nt, Homo sapiens
  misc_RNA (1)...(19): siRNA sense strand
ggagagacagucaaggguu

SEQ ID NO: 2513261 - RNA, 19 nt, Homo sapiens
  misc_RNA (1)...(19): siRNA sense strand
ugucagaaaaggaugagua

SEQ ID NO: 2513262 - RNA, 19 nt, Homo sapiens
  misc_RNA (1)...(19): siRNA sense strand
cuggguauuuggaggagga

SEQ ID NO: 2513263 - RNA, 19 nt, Homo sapiens
  misc_RNA (1)...(19): siRNA sense strand
gaucagaguuggcguggac

SEQ ID NO: 2513264 - RNA, 19 nt, Homo sapiens
  misc_RNA (1)...(19): siRNA sense strand
ugacgaaagcagagagugc

SEQ ID NO: 2513265 - RNA, 19 nt, Homo sapiens
  misc_RNA (1)...(19): siRNA sense strand
cacaaguaucugaaaccaa

SEQ ID NO: 2513266 - RNA, 19 nt, Homo sapiens
  misc_RNA (1)...(19): siRNA sense strand
aagaaauggaagaggaaaa

SEQ ID NO: 2513267 - RNA, 19 nt, Homo sapiens
  misc_RNA (1)...(19): siRNA sense strand
gugaagaaauggaagagga

SEQ ID NO: 2513268 - RNA, 19 nt, Homo sapiens
  misc_RNA (1)...(19): siRNA sense strand
agguggagcuggaggcaga

SEQ ID NO: 2513269 - RNA, 19 nt, Homo sapiens
  misc_RNA (1)...(19): siRNA sense strand
agaccaaggagcaggagau

SEQ ID NO: 2513270 - RNA, 19 nt, Homo sapiens
  misc_RNA (1)...(19): siRNA sense strand
ugaagaagcugaaggaggu

SEQ ID NO: 2513271 - RNA, 19 nt, Homo sapiens
  misc_RNA (1)...(19): siRNA sense strand
aggaggugguggacaaaca

SEQ ID NO: 2513272 - RNA, 19 nt, Homo sapiens
  misc_RNA (1)...(19): siRNA sense strand
cggugggagaggagagcau

SEQ ID NO: 2513273 - RNA, 19 nt, Homo sapiens
  misc_RNA (1)...(19): siRNA sense strand
acgcagagaagguggccau

SEQ ID NO: 2513274 - RNA, 19 nt, Homo sapiens
  misc_RNA (1)...(19): siRNA sense strand
agagugaagaaauggaaga

SEQ ID NO: 2513275 - RNA, 19 nt, Homo sapiens
  misc_RNA (1)...(19): siRNA sense strand
aggaggagccugagacgga

SEQ ID NO: 2513276 - RNA, 19 nt, Homo sapiens
  misc_RNA (1)...(19): siRNA sense strand
acgagaggaacgagcucaa

SEQ ID NO: 2513277 - RNA, 19 nt, Homo sapiens
  misc_RNA (1)...(19): siRNA sense strand
gggaaagcccugaucgaac

SEQ ID NO: 2513278 - RNA, 19 nt, Homo sapiens
  misc_RNA (1)...(19): siRNA sense strand
ggaaguugcgagagaggcu

SEQ ID NO: 2513279 - RNA, 19 nt, Homo sapiens
  misc_RNA (1)...(19): siRNA sense strand
aagaaauggaagaggaaaa

SEQ ID NO: 2513280 - RNA, 19 nt, Homo sapiens
  misc_RNA (1)...(19): siRNA sense strand
gugaagaaauggaagagga

SEQ ID NO: 2513281 - RNA, 19 nt, Homo sapiens
  misc_RNA (1)...(19): siRNA sense strand
agguggagcuggaggcaga

SEQ ID NO: 2513282 - RNA, 19 nt, Homo sapiens
  misc_RNA (1)...(19): siRNA sense strand
agaccaaggagcaggagau

SEQ ID NO: 2513283 - RNA, 19 nt, Homo sapiens
  misc_RNA (1)...(19): siRNA sense strand
ugaagaagcugaaggaggu

SEQ ID NO: 2513284 - RNA, 19 nt, Homo sapiens
  misc_RNA (1)...(19): siRNA sense strand
aggaggugguggacaaaca

SEQ ID NO: 2513285 - RNA, 19 nt, Homo sapiens
  misc_RNA (1)...(19): siRNA sense strand
cggugggagaggagagcau

SEQ ID NO: 2513286 - RNA, 19 nt, Homo sapiens
  misc_RNA (1)...(19): siRNA sense strand
acgcagagaagguggccau

SEQ ID NO: 2513287 - RNA, 19 nt, Homo sapiens
  misc_RNA (1)...(19): siRNA sense strand
agagugaagaaauggaaga

SEQ ID NO: 2513288 - RNA, 19 nt, Homo sapiens
  misc_RNA (1)...(19): siRNA sense strand
aggaggagccugagacgga

SEQ ID NO: 2513289 - RNA, 19 nt, Homo sapiens
  misc_RNA (1)...(19): siRNA sense strand
acgagaggaacgagcucaa

SEQ ID NO: 2513290 - RNA, 19 nt, Homo sapiens
  misc_RNA (1)...(19): siRNA sense strand
gggaaagcccugaucgaac

SEQ ID NO: 2513291 - RNA, 19 nt, Homo sapiens
  misc_RNA (1)...(19): siRNA sense strand
ggaaguugcgagagaggcu

SEQ ID NO: 2513292 - RNA, 19 nt, Homo sapiens
  misc_RNA (1)...(19): siRNA sense strand
ccagaauugauguggguuu

SEQ ID NO: 2513293 - RNA, 19 nt, Homo sapiens
  misc_RNA (1)...(19): siRNA sense strand
agccaaggauaaagaaaca

SEQ ID NO: 2513294 - RNA, 19 nt, Homo sapiens
  misc_RNA (1)...(19): siRNA sense strand
ccuuaaaguugaagucacu

SEQ ID NO: 2513295 - RNA, 19 nt, Homo sapiens
  misc_RNA (1)...(19): siRNA sense strand
gagaaggugcugagggugu

SEQ ID NO: 2513296 - RNA, 19 nt, Homo sapiens
  misc_RNA (1)...(19): siRNA sense strand
uggaaaucgcugauaaaga

SEQ ID NO: 2513297 - RNA, 19 nt, Homo sapiens
  misc_RNA (1)...(19): siRNA sense strand
cugauaaagaugggaacaa

SEQ ID NO: 2513298 - RNA, 19 nt, Homo sapiens
  misc_RNA (1)...(19): siRNA sense strand
gaaagaacucuguggucga

SEQ ID NO: 2513299 - RNA, 19 nt, Homo sapiens
  misc_RNA (1)...(19): siRNA sense strand
ggauaaagaaacagccucu

SEQ ID NO: 2513300 - RNA, 19 nt, Homo sapiens
  misc_RNA (1)...(19): siRNA sense strand
gggcauugugucagcauga

SEQ ID NO: 2513301 - RNA, 19 nt, Homo sapiens
  misc_RNA (1)...(19): siRNA sense strand
gccgagacagacagaguaa

SEQ ID NO: 2513302 - RNA, 19 nt, Homo sapiens
  misc_RNA (1)...(19): siRNA sense strand
ucauagauggagaagagaa

SEQ ID NO: 2513303 - RNA, 19 nt, Homo sapiens
  misc_RNA (1)...(19): siRNA sense strand
ggguguaaauggaggagag

SEQ ID NO: 2513304 - RNA, 19 nt, Homo sapiens
  misc_RNA (1)...(19): siRNA sense strand
gaggggaagcuuaaggaaa

SEQ ID NO: 2513305 - RNA, 19 nt, Homo sapiens
  misc_RNA (1)...(19): siRNA sense strand
gggcguucagccaaggaua

SEQ ID NO: 2513306 - RNA, 19 nt, Homo sapiens
  misc_RNA (1)...(19): siRNA sense strand
gagauucaguaguucgcaa

SEQ ID NO: 2513307 - RNA, 19 nt, Homo sapiens
  misc_RNA (1)...(19): siRNA sense strand
guuucaauaugcagcuaau

SEQ ID NO: 2513308 - RNA, 19 nt, Homo sapiens
  misc_RNA (1)...(19): siRNA sense strand
gaaaguagcaacugggcgu

SEQ ID NO: 2513309 - RNA, 19 nt, Homo sapiens
  misc_RNA (1)...(19): siRNA sense strand
uggcgaagguaaagagcuc

SEQ ID NO: 2513310 - RNA, 19 nt, Homo sapiens
  misc_RNA (1)...(19): siRNA sense strand
uuuggaaaucgcugauaaa

SEQ ID NO: 2513311 - RNA, 19 nt, Homo sapiens
  misc_RNA (1)...(19): siRNA sense strand
aagagaaggugcugagggu

SEQ ID NO: 2513312 - RNA, 19 nt, Homo sapiens
  misc_RNA (1)...(19): siRNA sense strand
cugucagucugcaggaaga

SEQ ID NO: 2513313 - RNA, 19 nt, Homo sapiens
  misc_RNA (1)...(19): siRNA sense strand
caucaaauccagugagagc

SEQ ID NO: 2513314 - RNA, 19 nt, Homo sapiens
  misc_RNA (1)...(19): siRNA sense strand
ucaagcuggcgaagguaaa

SEQ ID NO: 2513315 - RNA, 19 nt, Homo sapiens
  misc_RNA (1)...(19): siRNA sense strand
aggcauuaccugacacuca

SEQ ID NO: 2513316 - RNA, 19 nt, Homo sapiens
  misc_RNA (1)...(19): siRNA sense strand
cacaagaaggccagaaagu

SEQ ID NO: 2513317 - RNA, 19 nt, Homo sapiens
  misc_RNA (1)...(19): siRNA sense strand
cugaauuuauggugcaacu

SEQ ID NO: 2513318 - RNA, 19 nt, Homo sapiens
  misc_RNA (1)...(19): siRNA sense strand
uguaaauggaggagaggag

SEQ ID NO: 2513319 - RNA, 19 nt, Homo sapiens
  misc_RNA (1)...(19): siRNA sense strand
cauagauggagaagagaag

SEQ ID NO: 2513320 - RNA, 19 nt, Homo sapiens
  misc_RNA (1)...(19): siRNA sense strand
ucucagaggggaagcuuaa

SEQ ID NO: 2513321 - RNA, 19 nt, Homo sapiens
  misc_RNA (1)...(19): siRNA sense strand
uguaaauggcagucaagca

SEQ ID NO: 2513322 - RNA, 19 nt, Homo sapiens
  misc_RNA (1)...(19): siRNA sense strand
ggcguucagccaaggauaa

SEQ ID NO: 2513323 - RNA, 19 nt, Homo sapiens
  misc_RNA (1)...(19): siRNA sense strand
caguaguucgcaagcagua

SEQ ID NO: 2513324 - RNA, 19 nt, Homo sapiens
  misc_RNA (1)...(19): siRNA sense strand
ugaagaaacaccugagccu

SEQ ID NO: 2513325 - RNA, 19 nt, Homo sapiens
  misc_RNA (1)...(19): siRNA sense strand
gcuuagagaauguggacaa

SEQ ID NO: 2513326 - RNA, 19 nt, Homo sapiens
  misc_RNA (1)...(19): siRNA sense strand
gcucauaagacaggagaaa

SEQ ID NO: 2513327 - RNA, 19 nt, Homo sapiens
  misc_RNA (1)...(19): siRNA sense strand
gagacuuggcugagcgaaa

SEQ ID NO: 2513328 - RNA, 19 nt, Homo sapiens
  misc_RNA (1)...(19): siRNA sense strand
cugcauugaacuugggaaa

SEQ ID NO: 2513329 - RNA, 19 nt, Homo sapiens
  misc_RNA (1)...(19): siRNA sense strand
ccgacgagguagacagcaa

SEQ ID NO: 2513330 - RNA, 19 nt, Homo sapiens
  misc_RNA (1)...(19): siRNA sense strand
gguauaaggagguggcaga

SEQ ID NO: 2513331 - RNA, 19 nt, Homo sapiens
  misc_RNA (1)...(19): siRNA sense strand
gcaccagaucuuagaacaa

SEQ ID NO: 2513332 - RNA, 19 nt, Homo sapiens
  misc_RNA (1)...(19): siRNA sense strand
ccaaugaggagaagaucaa

SEQ ID NO: 2513333 - RNA, 19 nt, Homo sapiens
  misc_RNA (1)...(19): siRNA sense strand
gcgcagacagcaagaggaa

SEQ ID NO: 2513334 - RNA, 19 nt, Homo sapiens
  misc_RNA (1)...(19): siRNA sense strand
aagaggaagaggagaggaa

SEQ ID NO: 2513335 - RNA, 19 nt, Homo sapiens
  misc_RNA (1)...(19): siRNA sense strand
aggagaaggccaaggauga

SEQ ID NO: 2513336 - RNA, 19 nt, Homo sapiens
  misc_RNA (1)...(19): siRNA sense strand
gaggaagaggagaggaaga

SEQ ID NO: 2513337 - RNA, 19 nt, Homo sapiens
  misc_RNA (1)...(19): siRNA sense strand
cugaggagaucaaggaaaa

SEQ ID NO: 2513338 - RNA, 19 nt, Homo sapiens
  misc_RNA (1)...(19): siRNA sense strand
acggaaaagaggaaagaaa

SEQ ID NO: 2513339 - RNA, 19 nt, Homo sapiens
  misc_RNA (1)...(19): siRNA sense strand
acaacuacgaggaggacua

SEQ ID NO: 2513340 - RNA, 19 nt, Homo sapiens
  misc_RNA (1)...(19): siRNA sense strand
ugaugagguugaaggacaa

SEQ ID NO: 2513341 - RNA, 19 nt, Homo sapiens
  misc_RNA (1)...(19): siRNA sense strand
agaccuugcugaagagaga

SEQ ID NO: 2513342 - RNA, 19 nt, Homo sapiens
  misc_RNA (1)...(19): siRNA sense strand
uaggaagaaucgugagaca

SEQ ID NO: 2513343 - RNA, 19 nt, Homo sapiens
  misc_RNA (1)...(19): siRNA sense strand
ugucagaggagaaggccaa

SEQ ID NO: 2513344 - RNA, 19 nt, Homo sapiens
  misc_RNA (1)...(19): siRNA sense strand
gugacaaggccgacgauau

SEQ ID NO: 2513345 - RNA, 19 nt, Homo sapiens
  misc_RNA (1)...(19): siRNA sense strand
ggauacgggagaaggagaa

SEQ ID NO: 2513346 - RNA, 19 nt, Homo sapiens
  misc_RNA (1)...(19): siRNA sense strand
agacggaagcuguggugaa

SEQ ID NO: 2513347 - RNA, 19 nt, Homo sapiens
  misc_RNA (1)...(19): siRNA sense strand
ccugaaagugagcgcauua

SEQ ID NO: 2513348 - RNA, 19 nt, Homo sapiens
  misc_RNA (1)...(19): siRNA sense strand
cauugaggagacagagaaa

SEQ ID NO: 2513349 - RNA, 19 nt, Homo sapiens
  misc_RNA (1)...(19): siRNA sense strand
cugugcagaucuagacaaa

SEQ ID NO: 2513350 - RNA, 19 nt, Homo sapiens
  misc_RNA (1)...(19): siRNA sense strand
ggaagugcgcagacagcaa

SEQ ID NO: 2513351 - RNA, 19 nt, Homo sapiens
  misc_RNA (1)...(19): siRNA sense strand
aagacaacaaagagaagaa

SEQ ID NO: 2513352 - RNA, 19 nt, Homo sapiens
  misc_RNA (1)...(19): siRNA sense strand
agaccaaguucauggaguu

SEQ ID NO: 2513353 - RNA, 19 nt, Homo sapiens
  misc_RNA (1)...(19): siRNA sense strand
agaucgaggcccaggagaa

SEQ ID NO: 2513354 - RNA, 19 nt, Homo sapiens
  misc_RNA (1)...(19): siRNA sense strand
gcguggacgagguggagaa

SEQ ID NO: 2513355 - RNA, 19 nt, Homo sapiens
  misc_RNA (1)...(19): siRNA sense strand
caacagacggggaagguua

SEQ ID NO: 2513356 - RNA, 19 nt, Homo sapiens
  misc_RNA (1)...(19): siRNA sense strand
ggaagaagcgccuggagga

SEQ ID NO: 2513357 - RNA, 19 nt, Homo sapiens
  misc_RNA (1)...(19): siRNA sense strand
ugggaagaccgaugggaau

SEQ ID NO: 2513358 - RNA, 19 nt, Homo sapiens
  misc_RNA (1)...(19): siRNA sense strand
ccacacagucucuggucaa

SEQ ID NO: 2513359 - RNA, 19 nt, Homo sapiens
  misc_RNA (1)...(19): siRNA sense strand
gaugacagacauaggaaga

SEQ ID NO: 2513360 - RNA, 19 nt, Homo sapiens
  misc_RNA (1)...(19): siRNA sense strand
ucgaagagcuccaaagcca

SEQ ID NO: 2513361 - RNA, 19 nt, Homo sapiens
  misc_RNA (1)...(19): siRNA sense strand
guguggaaacugaagacaa

SEQ ID NO: 2513362 - RNA, 19 nt, Homo sapiens
  misc_RNA (1)...(19): siRNA sense strand
ccaucaucauucugaacaa

SEQ ID NO: 2513363 - RNA, 19 nt, Homo sapiens
  misc_RNA (1)...(19): siRNA sense strand
ucauaagacaggagaaacu

SEQ ID NO: 2513364 - RNA, 19 nt, Homo sapiens
  misc_RNA (1)...(19): siRNA sense strand
uugaugagguugaaggaca

SEQ ID NO: 2513365 - RNA, 19 nt, Homo sapiens
  misc_RNA (1)...(19): siRNA sense strand
aagcuguggugaaggagaa

SEQ ID NO: 2513366 - RNA, 19 nt, Homo sapiens
  misc_RNA (1)...(19): siRNA sense strand
cggaaaagaggaaagaaau

SEQ ID NO: 2513367 - RNA, 19 nt, Homo sapiens
  misc_RNA (1)...(19): siRNA sense strand
cacgaagguuucagaggaa

SEQ ID NO: 2513368 - RNA, 19 nt, Homo sapiens
  misc_RNA (1)...(19): siRNA sense strand
ggaugagagacacagguua

SEQ ID NO: 2513369 - RNA, 19 nt, Homo sapiens
  misc_RNA (1)...(19): siRNA sense strand
ugggaaugguuaagacuga

SEQ ID NO: 2513370 - RNA, 19 nt, Homo sapiens
  misc_RNA (1)...(19): siRNA sense strand
uuggaaaggugcuugacaa

SEQ ID NO: 2513371 - RNA, 19 nt, Homo sapiens
  misc_RNA (1)...(19): siRNA sense strand
ccgcauacgaggagcgugu

SEQ ID NO: 2513372 - RNA, 19 nt, Homo sapiens
  misc_RNA (1)...(19): siRNA sense strand
gccuagaaccagaaaugaa

SEQ ID NO: 2513373 - RNA, 19 nt, Homo sapiens
  misc_RNA (1)...(19): siRNA sense strand
aggagaagguggacucuau

SEQ ID NO: 2513374 - RNA, 19 nt, Homo sapiens
  misc_RNA (1)...(19): siRNA sense strand
aagaauggcuugacaaaau

SEQ ID NO: 2513375 - RNA, 19 nt, Homo sapiens
  misc_RNA (1)...(19): siRNA sense strand
gcaagcuggaugagagaca

SEQ ID NO: 2513376 - RNA, 19 nt, Homo sapiens
  misc_RNA (1)...(19): siRNA sense strand
gagaacuggcuuugcggaa

SEQ ID NO: 2513377 - RNA, 19 nt, Homo sapiens
  misc_RNA (1)...(19): siRNA sense strand
cagcaguuccucagagaca

SEQ ID NO: 2513378 - RNA, 19 nt, Homo sapiens
  misc_RNA (1)...(19): siRNA sense strand
cagaaauuccugcaagauu

SEQ ID NO: 2513379 - RNA, 19 nt, Homo sapiens
  misc_RNA (1)...(19): siRNA sense strand
cagaaaagccugagacgga

SEQ ID NO: 2513380 - RNA, 19 nt, Homo sapiens
  misc_RNA (1)...(19): siRNA sense strand
gcacgaagguuucagagga

SEQ ID NO: 2513381 - RNA, 19 nt, Homo sapiens
  misc_RNA (1)...(19): siRNA sense strand
cugaagacaacaaagagaa

SEQ ID NO: 2513382 - RNA, 19 nt, Homo sapiens
  misc_RNA (1)...(19): siRNA sense strand
agaaagaaauccaggggca

SEQ ID NO: 2513383 - RNA, 19 nt, Homo sapiens
  misc_RNA (1)...(19): siRNA sense strand
gcucauugacacaagaaca

SEQ ID NO: 2513384 - RNA, 19 nt, Homo sapiens
  misc_RNA (1)...(19): siRNA sense strand
gcacacuacauuugagcau

SEQ ID NO: 2513385 - RNA, 19 nt, Homo sapiens
  misc_RNA (1)...(19): siRNA sense strand
cguaaugacaguuucacaa

SEQ ID NO: 2513386 - RNA, 19 nt, Homo sapiens
  misc_RNA (1)...(19): siRNA sense strand
uggaaaggugcuugacaau

SEQ ID NO: 2513387 - RNA, 19 nt, Homo sapiens
  misc_RNA (1)...(19): siRNA sense strand
agaauuaccacgacaucaa

SEQ ID NO: 2513388 - RNA, 19 nt, Homo sapiens
  misc_RNA (1)...(19): siRNA sense strand
cacccaagugagaaggaaa

SEQ ID NO: 2513389 - RNA, 19 nt, Homo sapiens
  misc_RNA (1)...(19): siRNA sense strand
gggacaggacuaugagcau

SEQ ID NO: 2513390 - RNA, 19 nt, Homo sapiens
  misc_RNA (1)...(19): siRNA sense strand
cugaggagcuugggagaga

SEQ ID NO: 2513391 - RNA, 19 nt, Homo sapiens
  misc_RNA (1)...(19): siRNA sense strand
gugggaagaccgaugggaa

SEQ ID NO: 2513392 - RNA, 19 nt, Homo sapiens
  misc_RNA (1)...(19): siRNA sense strand
cggccugaccugauagauu

SEQ ID NO: 2513393 - RNA, 19 nt, Homo sapiens
  misc_RNA (1)...(19): siRNA sense strand
gcuuagagaauguggacaa

SEQ ID NO: 2513394 - RNA, 19 nt, Homo sapiens
  misc_RNA (1)...(19): siRNA sense strand
gcucauaagacaggagaaa

SEQ ID NO: 2513395 - RNA, 19 nt, Homo sapiens
  misc_RNA (1)...(19): siRNA sense strand
gagacuuggcugagcgaaa

SEQ ID NO: 2513396 - RNA, 19 nt, Homo sapiens
  misc_RNA (1)...(19): siRNA sense strand
cugcauugaacuugggaaa

SEQ ID NO: 2513397 - RNA, 19 nt, Homo sapiens
  misc_RNA (1)...(19): siRNA sense strand
ccgacgagguagacagcaa

SEQ ID NO: 2513398 - RNA, 19 nt, Homo sapiens
  misc_RNA (1)...(19): siRNA sense strand
gguauaaggagguggcaga

SEQ ID NO: 2513399 - RNA, 19 nt, Homo sapiens
  misc_RNA (1)...(19): siRNA sense strand
gcaccagaucuuagaacaa

SEQ ID NO: 2513400 - RNA, 19 nt, Homo sapiens
  misc_RNA (1)...(19): siRNA sense strand
ccaaugaggagaagaucaa

SEQ ID NO: 2513401 - RNA, 19 nt, Homo sapiens
  misc_RNA (1)...(19): siRNA sense strand
gcgcagacagcaagaggaa

SEQ ID NO: 2513402 - RNA, 19 nt, Homo sapiens
  misc_RNA (1)...(19): siRNA sense strand
aagaggaagaggagaggaa

SEQ ID NO: 2513403 - RNA, 19 nt, Homo sapiens
  misc_RNA (1)...(19): siRNA sense strand
aggagaaggccaaggauga

SEQ ID NO: 2513404 - RNA, 19 nt, Homo sapiens
  misc_RNA (1)...(19): siRNA sense strand
gaggaagaggagaggaaga

SEQ ID NO: 2513405 - RNA, 19 nt, Homo sapiens
  misc_RNA (1)...(19): siRNA sense strand
cugaggagaucaaggaaaa

SEQ ID NO: 2513406 - RNA, 19 nt, Homo sapiens
  misc_RNA (1)...(19): siRNA sense strand
acggaaaagaggaaagaaa

SEQ ID NO: 2513407 - RNA, 19 nt, Homo sapiens
  misc_RNA (1)...(19): siRNA sense strand
acaacuacgaggaggacua

SEQ ID NO: 2513408 - RNA, 19 nt, Homo sapiens
  misc_RNA (1)...(19): siRNA sense strand
ugaugagguugaaggacaa

SEQ ID NO: 2513409 - RNA, 19 nt, Homo sapiens
  misc_RNA (1)...(19): siRNA sense strand
agaccuugcugaagagaga

SEQ ID NO: 2513410 - RNA, 19 nt, Homo sapiens
  misc_RNA (1)...(19): siRNA sense strand
uaggaagaaucgugagaca

SEQ ID NO: 2513411 - RNA, 19 nt, Homo sapiens
  misc_RNA (1)...(19): siRNA sense strand
ugucagaggagaaggccaa

SEQ ID NO: 2513412 - RNA, 19 nt, Homo sapiens
  misc_RNA (1)...(19): siRNA sense strand
gugacaaggccgacgauau

SEQ ID NO: 2513413 - RNA, 19 nt, Homo sapiens
  misc_RNA (1)...(19): siRNA sense strand
ggauacgggagaaggagaa

SEQ ID NO: 2513414 - RNA, 19 nt, Homo sapiens
  misc_RNA (1)...(19): siRNA sense strand
agacggaagcuguggugaa

SEQ ID NO: 2513415 - RNA, 19 nt, Homo sapiens
  misc_RNA (1)...(19): siRNA sense strand
ccugaaagugagcgcauua

SEQ ID NO: 2513416 - RNA, 19 nt, Homo sapiens
  misc_RNA (1)...(19): siRNA sense strand
cauugaggagacagagaaa

SEQ ID NO: 2513417 - RNA, 19 nt, Homo sapiens
  misc_RNA (1)...(19): siRNA sense strand
cugugcagaucuagacaaa

SEQ ID NO: 2513418 - RNA, 19 nt, Homo sapiens
  misc_RNA (1)...(19): siRNA sense strand
ggaagugcgcagacagcaa

SEQ ID NO: 2513419 - RNA, 19 nt, Homo sapiens
  misc_RNA (1)...(19): siRNA sense strand
aagacaacaaagagaagaa

SEQ ID NO: 2513420 - RNA, 19 nt, Homo sapiens
  misc_RNA (1)...(19): siRNA sense strand
agaccaaguucauggaguu

SEQ ID NO: 2513421 - RNA, 19 nt, Homo sapiens
  misc_RNA (1)...(19): siRNA sense strand
agaucgaggcccaggagaa

SEQ ID NO: 2513422 - RNA, 19 nt, Homo sapiens
  misc_RNA (1)...(19): siRNA sense strand
gcguggacgagguggagaa

SEQ ID NO: 2513423 - RNA, 19 nt, Homo sapiens
  misc_RNA (1)...(19): siRNA sense strand
caacagacggggaagguua

SEQ ID NO: 2513424 - RNA, 19 nt, Homo sapiens
  misc_RNA (1)...(19): siRNA sense strand
ggaagaagcgccuggagga

SEQ ID NO: 2513425 - RNA, 19 nt, Homo sapiens
  misc_RNA (1)...(19): siRNA sense strand
ugggaagaccgaugggaau

SEQ ID NO: 2513426 - RNA, 19 nt, Homo sapiens
  misc_RNA (1)...(19): siRNA sense strand
ccacacagucucuggucaa

SEQ ID NO: 2513427 - RNA, 19 nt, Homo sapiens
  misc_RNA (1)...(19): siRNA sense strand
gaugacagacauaggaaga

SEQ ID NO: 2513428 - RNA, 19 nt, Homo sapiens
  misc_RNA (1)...(19): siRNA sense strand
ucgaagagcuccaaagcca

SEQ ID NO: 2513429 - RNA, 19 nt, Homo sapiens
  misc_RNA (1)...(19): siRNA sense strand
guguggaaacugaagacaa

SEQ ID NO: 2513430 - RNA, 19 nt, Homo sapiens
  misc_RNA (1)...(19): siRNA sense strand
ccaucaucauucugaacaa

SEQ ID NO: 2513431 - RNA, 19 nt, Homo sapiens
  misc_RNA (1)...(19): siRNA sense strand
ucauaagacaggagaaacu

SEQ ID NO: 2513432 - RNA, 19 nt, Homo sapiens
  misc_RNA (1)...(19): siRNA sense strand
uugaugagguugaaggaca

SEQ ID NO: 2513433 - RNA, 19 nt, Homo sapiens
  misc_RNA (1)...(19): siRNA sense strand
aagcuguggugaaggagaa

SEQ ID NO: 2513434 - RNA, 19 nt, Homo sapiens
  misc_RNA (1)...(19): siRNA sense strand
cggaaaagaggaaagaaau

SEQ ID NO: 2513435 - RNA, 19 nt, Homo sapiens
  misc_RNA (1)...(19): siRNA sense strand
cacgaagguuucagaggaa

SEQ ID NO: 2513436 - RNA, 19 nt, Homo sapiens
  misc_RNA (1)...(19): siRNA sense strand
ggaugagagacacagguua

SEQ ID NO: 2513437 - RNA, 19 nt, Homo sapiens
  misc_RNA (1)...(19): siRNA sense strand
ugggaaugguuaagacuga

SEQ ID NO: 2513438 - RNA, 19 nt, Homo sapiens
  misc_RNA (1)...(19): siRNA sense strand
uuggaaaggugcuugacaa

SEQ ID NO: 2513439 - RNA, 19 nt, Homo sapiens
  misc_RNA (1)...(19): siRNA sense strand
ccgcauacgaggagcgugu

SEQ ID NO: 2513440 - RNA, 19 nt, Homo sapiens
  misc_RNA (1)...(19): siRNA sense strand
gccuagaaccagaaaugaa

SEQ ID NO: 2513441 - RNA, 19 nt, Homo sapiens
  misc_RNA (1)...(19): siRNA sense strand
aggagaagguggacucuau

SEQ ID NO: 2513442 - RNA, 19 nt, Homo sapiens
  misc_RNA (1)...(19): siRNA sense strand
aagaauggcuugacaaaau

SEQ ID NO: 2513443 - RNA, 19 nt, Homo sapiens
  misc_RNA (1)...(19): siRNA sense strand
gcaagcuggaugagagaca

SEQ ID NO: 2513444 - RNA, 19 nt, Homo sapiens
  misc_RNA (1)...(19): siRNA sense strand
gagaacuggcuuugcggaa

SEQ ID NO: 2513445 - RNA, 19 nt, Homo sapiens
  misc_RNA (1)...(19): siRNA sense strand
cagcaguuccucagagaca

SEQ ID NO: 2513446 - RNA, 19 nt, Homo sapiens
  misc_RNA (1)...(19): siRNA sense strand
cagaaauuccugcaagauu

SEQ ID NO: 2513447 - RNA, 19 nt, Homo sapiens
  misc_RNA (1)...(19): siRNA sense strand
cagaaaagccugagacgga

SEQ ID NO: 2513448 - RNA, 19 nt, Homo sapiens
  misc_RNA (1)...(19): siRNA sense strand
gcacgaagguuucagagga

SEQ ID NO: 2513449 - RNA, 19 nt, Homo sapiens
  misc_RNA (1)...(19): siRNA sense strand
cugaagacaacaaagagaa

SEQ ID NO: 2513450 - RNA, 19 nt, Homo sapiens
  misc_RNA (1)...(19): siRNA sense strand
agaaagaaauccaggggca

SEQ ID NO: 2513451 - RNA, 19 nt, Homo sapiens
  misc_RNA (1)...(19): siRNA sense strand
gcucauugacacaagaaca

SEQ ID NO: 2513452 - RNA, 19 nt, Homo sapiens
  misc_RNA (1)...(19): siRNA sense strand
gcacacuacauuugagcau

SEQ ID NO: 2513453 - RNA, 19 nt, Homo sapiens
  misc_RNA (1)...(19): siRNA sense strand
cguaaugacaguuucacaa

SEQ ID NO: 2513454 - RNA, 19 nt, Homo sapiens
  misc_RNA (1)...(19): siRNA sense strand
uggaaaggugcuugacaau

SEQ ID NO: 2513455 - RNA, 19 nt, Homo sapiens
  misc_RNA (1)...(19): siRNA sense strand
agaauuaccacgacaucaa

SEQ ID NO: 2513456 - RNA, 19 nt, Homo sapiens
  misc_RNA (1)...(19): siRNA sense strand
cacccaagugagaaggaaa

SEQ ID NO: 2513457 - RNA, 19 nt, Homo sapiens
  misc_RNA (1)...(19): siRNA sense strand
gggacaggacuaugagcau

SEQ ID NO: 2513458 - RNA, 19 nt, Homo sapiens
  misc_RNA (1)...(19): siRNA sense strand
cugaggagcuugggagaga

SEQ ID NO: 2513459 - RNA, 19 nt, Homo sapiens
  misc_RNA (1)...(19): siRNA sense strand
gugggaagaccgaugggaa

SEQ ID NO: 2513460 - RNA, 19 nt, Homo sapiens
  misc_RNA (1)...(19): siRNA sense strand
cggccugaccugauagauu

SEQ ID NO: 2513461 - RNA, 19 nt, Homo sapiens
  misc_RNA (1)...(19): siRNA sense strand
agaaauggaaacugggaga

SEQ ID NO: 2513462 - RNA, 19 nt, Homo sapiens
  misc_RNA (1)...(19): siRNA sense strand
agguaggguuggaacagaa

SEQ ID NO: 2513463 - RNA, 19 nt, Homo sapiens
  misc_RNA (1)...(19): siRNA sense strand
uggaaguucaagcgacuaa

SEQ ID NO: 2513464 - RNA, 19 nt, Homo sapiens
  misc_RNA (1)...(19): siRNA sense strand
cuaauagggcauuggaagu

SEQ ID NO: 2513465 - RNA, 19 nt, Homo sapiens
  misc_RNA (1)...(19): siRNA sense strand
aagcaauagaaauggaaac

SEQ ID NO: 2513466 - RNA, 19 nt, Homo sapiens
  misc_RNA (1)...(19): siRNA sense strand
cagagguaggguuggaaca

SEQ ID NO: 2513467 - RNA, 19 nt, Homo sapiens
  misc_RNA (1)...(19): siRNA sense strand
caagcgacuaacuaggaaa

SEQ ID NO: 2513468 - RNA, 19 nt, Homo sapiens
  misc_RNA (1)...(19): siRNA sense strand
ucccaguauucuugaccaa

SEQ ID NO: 2513469 - RNA, 19 nt, Homo sapiens
  misc_RNA (1)...(19): siRNA sense strand
acggagaagauauaggaaa

SEQ ID NO: 2513470 - RNA, 19 nt, Homo sapiens
  misc_RNA (1)...(19): siRNA sense strand
agaagagaggauagaagaa

SEQ ID NO: 2513471 - RNA, 19 nt, Homo sapiens
  misc_RNA (1)...(19): siRNA sense strand
ggauagagaagaaagacga

SEQ ID NO: 2513472 - RNA, 19 nt, Homo sapiens
  misc_RNA (1)...(19): siRNA sense strand
agagaggauagaagaacaa

SEQ ID NO: 2513473 - RNA, 19 nt, Homo sapiens
  misc_RNA (1)...(19): siRNA sense strand
gcuuuaacggagaagauau

SEQ ID NO: 2513474 - RNA, 19 nt, Homo sapiens
  misc_RNA (1)...(19): siRNA sense strand
ggaacacacaagaagaaaa

SEQ ID NO: 2513475 - RNA, 19 nt, Homo sapiens
  misc_RNA (1)...(19): siRNA sense strand
agauggaacacauggugaa

SEQ ID NO: 2513476 - RNA, 19 nt, Homo sapiens
  misc_RNA (1)...(19): siRNA sense strand
ggauagaagaacaacagca

SEQ ID NO: 2513477 - RNA, 19 nt, Homo sapiens
  misc_RNA (1)...(19): siRNA sense strand
aggucaagauggaacacau

SEQ ID NO: 2513478 - RNA, 19 nt, Homo sapiens
  misc_RNA (1)...(19): siRNA sense strand
acuugaacgcacagcagaa

SEQ ID NO: 2513479 - RNA, 19 nt, Homo sapiens
  misc_RNA (1)...(19): siRNA sense strand
auagaagaggaauggaaga

SEQ ID NO: 2513480 - RNA, 19 nt, Homo sapiens
  misc_RNA (1)...(19): siRNA sense strand
uuaaaagagaagagaggau

SEQ ID NO: 2513481 - RNA, 19 nt, Homo sapiens
  misc_RNA (1)...(19): siRNA sense strand
agaacaacuugaacgcaca

SEQ ID NO: 2513482 - RNA, 19 nt, Homo sapiens
  misc_RNA (1)...(19): siRNA sense strand
agagagugacaggaagaaa

SEQ ID NO: 2513483 - RNA, 19 nt, Homo sapiens
  misc_RNA (1)...(19): siRNA sense strand
uggcuuuaacggagaagau

SEQ ID NO: 2513484 - RNA, 19 nt, Homo sapiens
  misc_RNA (1)...(19): siRNA sense strand
uagaaacagagaagagagu

SEQ ID NO: 2513485 - RNA, 19 nt, Homo sapiens
  misc_RNA (1)...(19): siRNA sense strand
aggaugaggccgagagcuu

SEQ ID NO: 2513486 - RNA, 19 nt, Homo sapiens
  misc_RNA (1)...(19): siRNA sense strand
acacaggagacgauggcua

SEQ ID NO: 2513487 - RNA, 19 nt, Homo sapiens
  misc_RNA (1)...(19): siRNA sense strand
cggaccacaacauggauaa

SEQ ID NO: 2513488 - RNA, 19 nt, Homo sapiens
  misc_RNA (1)...(19): siRNA sense strand
ccucagucguauggaacaa

SEQ ID NO: 2513489 - RNA, 19 nt, Homo sapiens
  misc_RNA (1)...(19): siRNA sense strand
cgcuuguguuugaggauga

SEQ ID NO: 2513490 - RNA, 19 nt, Homo sapiens
  misc_RNA (1)...(19): siRNA sense strand
ugugcaacaaggaggagua

SEQ ID NO: 2513491 - RNA, 19 nt, Homo sapiens
  misc_RNA (1)...(19): siRNA sense strand
caacauggauaacacguca

SEQ ID NO: 2513492 - RNA, 19 nt, Homo sapiens
  misc_RNA (1)...(19): siRNA sense strand
gaaugacuucccagggcua

SEQ ID NO: 2513493 - RNA, 19 nt, Homo sapiens
  misc_RNA (1)...(19): siRNA sense strand
agcuggaggucauggugaa

SEQ ID NO: 2513494 - RNA, 19 nt, Homo sapiens
  misc_RNA (1)...(19): siRNA sense strand
acccaguguccgaguacaa

SEQ ID NO: 2513495 - RNA, 19 nt, Homo sapiens
  misc_RNA (1)...(19): siRNA sense strand
gcaaacugcuggcugcuga

SEQ ID NO: 2513496 - RNA, 19 nt, Homo sapiens
  misc_RNA (1)...(19): siRNA sense strand
cagcauggcucauugggaa

SEQ ID NO: 2513497 - RNA, 19 nt, Homo sapiens
  misc_RNA (1)...(19): siRNA sense strand
ggaaacuggccuugcggua

SEQ ID NO: 2513498 - RNA, 19 nt, Homo sapiens
  misc_RNA (1)...(19): siRNA sense strand
caggauagugggagaaaau

SEQ ID NO: 2513499 - RNA, 19 nt, Homo sapiens
  misc_RNA (1)...(19): siRNA sense strand
ggaaaauagcgaagaugau

SEQ ID NO: 2513500 - RNA, 19 nt, Homo sapiens
  misc_RNA (1)...(19): siRNA sense strand
ugagcaggauagugggaga

SEQ ID NO: 2513501 - RNA, 19 nt, Homo sapiens
  misc_RNA (1)...(19): siRNA sense strand
ggauagugggagaaaauau

SEQ ID NO: 2513502 - RNA, 19 nt, Homo sapiens
  misc_RNA (1)...(19): siRNA sense strand
ccgacaagaauccagggaa

SEQ ID NO: 2513503 - RNA, 19 nt, Homo sapiens
  misc_RNA (1)...(19): siRNA sense strand
gagcaggauagugggagaa

SEQ ID NO: 2513504 - RNA, 19 nt, Homo sapiens
  misc_RNA (1)...(19): siRNA sense strand
gagucagccuccaagguca

SEQ ID NO: 2513505 - RNA, 19 nt, Homo sapiens
  misc_RNA (1)...(19): siRNA sense strand
cgaggaaaauagcgaagau

SEQ ID NO: 2513506 - RNA, 19 nt, Homo sapiens
  misc_RNA (1)...(19): siRNA sense strand
cacaaagacuugagggccu

SEQ ID NO: 2513507 - RNA, 19 nt, Homo sapiens
  misc_RNA (1)...(19): siRNA sense strand
ggaggaauauccaugccaa

SEQ ID NO: 2513508 - RNA, 19 nt, Homo sapiens
  misc_RNA (1)...(19): siRNA sense strand
cugcugauguccaaggcaa

SEQ ID NO: 2513509 - RNA, 19 nt, Homo sapiens
  misc_RNA (1)...(19): siRNA sense strand
cugagguggcugaaggcaa

SEQ ID NO: 2513510 - RNA, 19 nt, Homo sapiens
  misc_RNA (1)...(19): siRNA sense strand
gcuauuaccagaagaggca

SEQ ID NO: 2513511 - RNA, 19 nt, Homo sapiens
  misc_RNA (1)...(19): siRNA sense strand
gcaaugaccaggugcccau

SEQ ID NO: 2513512 - RNA, 19 nt, Homo sapiens
  misc_RNA (1)...(19): siRNA sense strand
cugacaucacugaaggcaa

SEQ ID NO: 2513513 - RNA, 19 nt, Homo sapiens
  misc_RNA (1)...(19): siRNA sense strand
cugaaggcaaagagaagga

SEQ ID NO: 2513514 - RNA, 19 nt, Homo sapiens
  misc_RNA (1)...(19): siRNA sense strand
gcaaagagaaggaaggugg

SEQ ID NO: 2513515 - RNA, 19 nt, Homo sapiens
  misc_RNA (1)...(19): siRNA sense strand
ucgaugucauaaagcgcaa

SEQ ID NO: 2513516 - RNA, 19 nt, Homo sapiens
  misc_RNA (1)...(19): siRNA sense strand
uggcugaaggcaacgggaa

SEQ ID NO: 2513517 - RNA, 19 nt, Homo sapiens
  misc_RNA (1)...(19): siRNA sense strand
ggaucacagguuacagaaa

SEQ ID NO: 2513518 - RNA, 19 nt, Homo sapiens
  misc_RNA (1)...(19): siRNA sense strand
gaguacaaucacaagcuaa

SEQ ID NO: 2513519 - RNA, 19 nt, Homo sapiens
  misc_RNA (1)...(19): siRNA sense strand
uguuaguaauccaguagaa

SEQ ID NO: 2513520 - RNA, 19 nt, Homo sapiens
  misc_RNA (1)...(19): siRNA sense strand
cgaaaagucggcacagaaa

SEQ ID NO: 2513521 - RNA, 19 nt, Homo sapiens
  misc_RNA (1)...(19): siRNA sense strand
uccagaaacaguuaggaaa

SEQ ID NO: 2513522 - RNA, 19 nt, Homo sapiens
  misc_RNA (1)...(19): siRNA sense strand
uguccgagucugaggauca

SEQ ID NO: 2513523 - RNA, 19 nt, Homo sapiens
  misc_RNA (1)...(19): siRNA sense strand
ccagaaacaguuaggaaac

SEQ ID NO: 2513524 - RNA, 19 nt, Homo sapiens
  misc_RNA (1)...(19): siRNA sense strand
ggacaaccuuacagcggga

SEQ ID NO: 2513525 - RNA, 19 nt, Homo sapiens
  misc_RNA (1)...(19): siRNA sense strand
gccucuguccggugggaaa

SEQ ID NO: 2513526 - RNA, 19 nt, Homo sapiens
  misc_RNA (1)...(19): siRNA sense strand
aguauuuguguguggagua

SEQ ID NO: 2513527 - RNA, 19 nt, Homo sapiens
  misc_RNA (1)...(19): siRNA sense strand
gaugaugucuuaaugguca

SEQ ID NO: 2513528 - RNA, 19 nt, Homo sapiens
  misc_RNA (1)...(19): siRNA sense strand
aggacuggguguuaguaau

SEQ ID NO: 2513529 - RNA, 19 nt, Homo sapiens
  misc_RNA (1)...(19): siRNA sense strand
cuuaaucaaguaugggaau

SEQ ID NO: 2513530 - RNA, 19 nt, Homo sapiens
  misc_RNA (1)...(19): siRNA sense strand
cagaaguucaagaaguaga

SEQ ID NO: 2513531 - RNA, 19 nt, Homo sapiens
  misc_RNA (1)...(19): siRNA sense strand
gaggcaucucaguggacaa

SEQ ID NO: 2513532 - RNA, 19 nt, Homo sapiens
  misc_RNA (1)...(19): siRNA sense strand
ggguguuaguaauccagua

SEQ ID NO: 2513533 - RNA, 19 nt, Homo sapiens
  misc_RNA (1)...(19): siRNA sense strand
uuugaagagaagaggcuau

SEQ ID NO: 2513534 - RNA, 19 nt, Homo sapiens
  misc_RNA (1)...(19): siRNA sense strand
caauacagguucaugguac

SEQ ID NO: 2513535 - RNA, 19 nt, Homo sapiens
  misc_RNA (1)...(19): siRNA sense strand
aauacagguucaugguaca

SEQ ID NO: 2513536 - RNA, 19 nt, Homo sapiens
  misc_RNA (1)...(19): siRNA sense strand
caggacuggguguuaguaa

SEQ ID NO: 2513537 - RNA, 19 nt, Homo sapiens
  misc_RNA (1)...(19): siRNA sense strand
cagguuacagaaaguuaaa

SEQ ID NO: 2513538 - RNA, 19 nt, Homo sapiens
  misc_RNA (1)...(19): siRNA sense strand
gagaaggaugguggagaau

SEQ ID NO: 2513539 - RNA, 19 nt, Homo sapiens
  misc_RNA (1)...(19): siRNA sense strand
acaaagaugcauuggaaaa

SEQ ID NO: 2513540 - RNA, 19 nt, Homo sapiens
  misc_RNA (1)...(19): siRNA sense strand
acacaguugcagagaacaa

SEQ ID NO: 2513541 - RNA, 19 nt, Homo sapiens
  misc_RNA (1)...(19): siRNA sense strand
uggaagagugggaagaaau

SEQ ID NO: 2513542 - RNA, 19 nt, Homo sapiens
  misc_RNA (1)...(19): siRNA sense strand
ggguaauggcucaauacaa

SEQ ID NO: 2513543 - RNA, 19 nt, Homo sapiens
  misc_RNA (1)...(19): siRNA sense strand
guggaagagugggaagaaa

SEQ ID NO: 2513544 - RNA, 19 nt, Homo sapiens
  misc_RNA (1)...(19): siRNA sense strand
uuauaagaacaguggagaa

SEQ ID NO: 2513545 - RNA, 19 nt, Homo sapiens
  misc_RNA (1)...(19): siRNA sense strand
cacaaauauuagacgguau

SEQ ID NO: 2513546 - RNA, 19 nt, Homo sapiens
  misc_RNA (1)...(19): siRNA sense strand
ccauggaaggcauuggaaa

SEQ ID NO: 2513547 - RNA, 19 nt, Homo sapiens
  misc_RNA (1)...(19): siRNA sense strand
cauggaaggcauuggaaaa

SEQ ID NO: 2513548 - RNA, 19 nt, Homo sapiens
  misc_RNA (1)...(19): siRNA sense strand
ggauuauggaaaagacaaa

SEQ ID NO: 2513549 - RNA, 19 nt, Homo sapiens
  misc_RNA (1)...(19): siRNA sense strand
uuggaaagaaacaggcuaa

SEQ ID NO: 2513550 - RNA, 19 nt, Homo sapiens
  misc_RNA (1)...(19): siRNA sense strand
gcgaauggugauaguaaca

SEQ ID NO: 2513551 - RNA, 19 nt, Homo sapiens
  misc_RNA (1)...(19): siRNA sense strand
guguuuaucaucagaagaa

SEQ ID NO: 2513552 - RNA, 19 nt, Homo sapiens
  misc_RNA (1)...(19): siRNA sense strand
gauccuuugaugugugaaa

SEQ ID NO: 2513553 - RNA, 19 nt, Homo sapiens
  misc_RNA (1)...(19): siRNA sense strand
ccauuugcuuagaggacuu

SEQ ID NO: 2513554 - RNA, 19 nt, Homo sapiens
  misc_RNA (1)...(19): siRNA sense strand
agaacaguggagaaaguua

SEQ ID NO: 2513555 - RNA, 19 nt, Homo sapiens
  misc_RNA (1)...(19): siRNA sense strand
acauguuugucuuuggaaa

SEQ ID NO: 2513556 - RNA, 19 nt, Homo sapiens
  misc_RNA (1)...(19): siRNA sense strand
acaucuacauagucagaau

SEQ ID NO: 2513557 - RNA, 19 nt, Homo sapiens
  misc_RNA (1)...(19): siRNA sense strand
augcgaauggugauaguaa

SEQ ID NO: 2513558 - RNA, 19 nt, Homo sapiens
  misc_RNA (1)...(19): siRNA sense strand
gacacaaaccaaugaccaa

SEQ ID NO: 2513559 - RNA, 19 nt, Homo sapiens
  misc_RNA (1)...(19): siRNA sense strand
guuucagauuccaggauca

SEQ ID NO: 2513560 - RNA, 19 nt, Homo sapiens
  misc_RNA (1)...(19): siRNA sense strand
gcauggucucauugaacaa

SEQ ID NO: 2513561 - RNA, 19 nt, Homo sapiens
  misc_RNA (1)...(19): siRNA sense strand
ggagaaaguuaucaagcac

SEQ ID NO: 2513562 - RNA, 19 nt, Homo sapiens
  misc_RNA (1)...(19): siRNA sense strand
ggaaucaguaauggguaaa

SEQ ID NO: 2513563 - RNA, 19 nt, Homo sapiens
  misc_RNA (1)...(19): siRNA sense strand
cagagaacaaagaugcauu

SEQ ID NO: 2513564 - RNA, 19 nt, Homo sapiens
  misc_RNA (1)...(19): siRNA sense strand
ccagauguagaauuagaaa

SEQ ID NO: 2513565 - RNA, 19 nt, Homo sapiens
  misc_RNA (1)...(19): siRNA sense strand
agaaaguuaucaagcacca

SEQ ID NO: 2513566 - RNA, 19 nt, Homo sapiens
  misc_RNA (1)...(19): siRNA sense strand
caacaaggggaaauagaau

SEQ ID NO: 2513567 - RNA, 19 nt, Homo sapiens
  misc_RNA (1)...(19): siRNA sense strand
uggaaaagacaaaagcaau

SEQ ID NO: 2513568 - RNA, 19 nt, Homo sapiens
  misc_RNA (1)...(19): siRNA sense strand
gcucaauacaaaggccuua

SEQ ID NO: 2513569 - RNA, 19 nt, Homo sapiens
  misc_RNA (1)...(19): siRNA sense strand
agucagacagguuuggaau

SEQ ID NO: 2513570 - RNA, 19 nt, Homo sapiens
  misc_RNA (1)...(19): siRNA sense strand
augcaaucacagacagaga

SEQ ID NO: 2513571 - RNA, 19 nt, Homo sapiens
  misc_RNA (1)...(19): siRNA sense strand
gcuuauucaacaaggggaa

SEQ ID NO: 2513572 - RNA, 19 nt, Homo sapiens
  misc_RNA (1)...(19): siRNA sense strand
aagagugggaagaaauaau

SEQ ID NO: 2513573 - RNA, 19 nt, Homo sapiens
  misc_RNA (1)...(19): siRNA sense strand
cauugaacaacaugaggau

SEQ ID NO: 2513574 - RNA, 19 nt, Homo sapiens
  misc_RNA (1)...(19): siRNA sense strand
caguggagaaaguuaucaa

SEQ ID NO: 2513575 - RNA, 19 nt, Homo sapiens
  misc_RNA (1)...(19): siRNA sense strand
aacaggagauggugcaaaa

SEQ ID NO: 2513576 - RNA, 19 nt, Homo sapiens
  misc_RNA (1)...(19): siRNA sense strand
gcuaaagagagaacauugu

SEQ ID NO: 2513577 - RNA, 19 nt, Homo sapiens
  misc_RNA (1)...(19): siRNA sense strand
aguuaguggaugaccauuu

SEQ ID NO: 2513578 - RNA, 19 nt, Homo sapiens
  misc_RNA (1)...(19): siRNA sense strand
ugacaugcgaauggugaua

SEQ ID NO: 2513579 - RNA, 19 nt, Homo sapiens
  misc_RNA (1)...(19): siRNA sense strand
auggaaaagacaaaagcaa

SEQ ID NO: 2513580 - RNA, 19 nt, Homo sapiens
  misc_RNA (1)...(19): siRNA sense strand
guugaaacgcugacauguu

SEQ ID NO: 2513581 - RNA, 19 nt, Homo sapiens
  misc_RNA (1)...(19): siRNA sense strand
auucagaagcacaguuuca

SEQ ID NO: 2513582 - RNA, 19 nt, Homo sapiens
  misc_RNA (1)...(19): siRNA sense strand
ccucuuauccuuagaucca

SEQ ID NO: 2513583 - RNA, 19 nt, Homo sapiens
  misc_RNA (1)...(19): siRNA sense strand
aacaaagaugcauuggaaa

SEQ ID NO: 2513584 - RNA, 19 nt, Homo sapiens
  misc_RNA (1)...(19): siRNA sense strand
uuugguaauuccagaugua

SEQ ID NO: 2513585 - RNA, 19 nt, Homo sapiens
  misc_RNA (1)...(19): siRNA sense strand
accagugagcuguaaguua

SEQ ID NO: 2513586 - RNA, 19 nt, Homo sapiens
  misc_RNA (1)...(19): siRNA sense strand
aagugggauugguguauuu

SEQ ID NO: 2513587 - RNA, 19 nt, Homo sapiens
  misc_RNA (1)...(19): siRNA sense strand
augaaaaguugaugggaaa

SEQ ID NO: 2513588 - RNA, 19 nt, Homo sapiens
  misc_RNA (1)...(19): siRNA sense strand
gaugaaaaguugaugggaa

SEQ ID NO: 2513589 - RNA, 19 nt, Homo sapiens
  misc_RNA (1)...(19): siRNA sense strand
caaacuacuccgugaacaa

SEQ ID NO: 2513590 - RNA, 19 nt, Homo sapiens
  misc_RNA (1)...(19): siRNA sense strand
gccugagaguacugagaua

SEQ ID NO: 2513591 - RNA, 19 nt, Homo sapiens
  misc_RNA (1)...(19): siRNA sense strand
gcuaaguuuuggagugaua

SEQ ID NO: 2513592 - RNA, 19 nt, Homo sapiens
  misc_RNA (1)...(19): siRNA sense strand
gcaagaaauaugaccaaaa

SEQ ID NO: 2513593 - RNA, 19 nt, Homo sapiens
  misc_RNA (1)...(19): siRNA sense strand
ugcaaugggucaugggauu

SEQ ID NO: 2513594 - RNA, 19 nt, Homo sapiens
  misc_RNA (1)...(19): siRNA sense strand
ugaaaaggaaagucagaaa

SEQ ID NO: 2513595 - RNA, 19 nt, Homo sapiens
  misc_RNA (1)...(19): siRNA sense strand
aggaaggauuucuuagcaa

SEQ ID NO: 2513596 - RNA, 19 nt, Homo sapiens
  misc_RNA (1)...(19): siRNA sense strand
cguugaagcuacuaaacau

SEQ ID NO: 2513597 - RNA, 19 nt, Homo sapiens
  misc_RNA (1)...(19): siRNA sense strand
ggaugaaacaaguaaucuu

SEQ ID NO: 2513598 - RNA, 19 nt, Homo sapiens
  misc_RNA (1)...(19): siRNA sense strand
caaaauuaucagaggauca

SEQ ID NO: 2513599 - RNA, 19 nt, Homo sapiens
  misc_RNA (1)...(19): siRNA sense strand
cuacuaaacauaaggacca

SEQ ID NO: 2513600 - RNA, 19 nt, Homo sapiens
  misc_RNA (1)...(19): siRNA sense strand
ccaaaauaagaaaggagaa

SEQ ID NO: 2513601 - RNA, 19 nt, Homo sapiens
  misc_RNA (1)...(19): siRNA sense strand
caggaaagucagaugcaga

SEQ ID NO: 2513602 - RNA, 19 nt, Homo sapiens
  misc_RNA (1)...(19): siRNA sense strand
aguaauagaugaaauggga

SEQ ID NO: 2513603 - RNA, 19 nt, Homo sapiens
  misc_RNA (1)...(19): siRNA sense strand
augaugggcuugugcgaau

SEQ ID NO: 2513604 - RNA, 19 nt, Homo sapiens
  misc_RNA (1)...(19): siRNA sense strand
gggaaccauuacagcaaau

SEQ ID NO: 2513605 - RNA, 19 nt, Homo sapiens
  misc_RNA (1)...(19): siRNA sense strand
gccugauguugaagaagua

SEQ ID NO: 2513606 - RNA, 19 nt, Homo sapiens
  misc_RNA (1)...(19): siRNA sense strand
ggccaagggcuguggaacu

SEQ ID NO: 2513607 - RNA, 19 nt, Homo sapiens
  misc_RNA (1)...(19): siRNA sense strand
aaacaaaagaacaaggaga

SEQ ID NO: 2513608 - RNA, 19 nt, Homo sapiens
  misc_RNA (1)...(19): siRNA sense strand
aggaaagucagaugcagaa

SEQ ID NO: 2513609 - RNA, 19 nt, Homo sapiens
  misc_RNA (1)...(19): siRNA sense strand
aaagaagaaacuuggccaa

SEQ ID NO: 2513610 - RNA, 19 nt, Homo sapiens
  misc_RNA (1)...(19): siRNA sense strand
uagcaagaaauaugaccaa

SEQ ID NO: 2513611 - RNA, 19 nt, Homo sapiens
  misc_RNA (1)...(19): siRNA sense strand
cgacauauggggaauuaua

SEQ ID NO: 2513612 - RNA, 19 nt, Homo sapiens
  misc_RNA (1)...(19): siRNA sense strand
ccuccaaccacuacaaauu

SEQ ID NO: 2513613 - RNA, 19 nt, Homo sapiens
  misc_RNA (1)...(19): siRNA sense strand
aggaaagucagaaagaaga

SEQ ID NO: 2513614 - RNA, 19 nt, Homo sapiens
  misc_RNA (1)...(19): siRNA sense strand
cuucuggagcaaugugaaa

SEQ ID NO: 2513615 - RNA, 19 nt, Homo sapiens
  misc_RNA (1)...(19): siRNA sense strand
uaccaagacucgaggacca

SEQ ID NO: 2513616 - RNA, 19 nt, Homo sapiens
  misc_RNA (1)...(19): siRNA sense strand
agaccaaaguacugcagca

SEQ ID NO: 2513617 - RNA, 19 nt, Homo sapiens
  misc_RNA (1)...(19): siRNA sense strand
uauacaugcaucugacaaa

SEQ ID NO: 2513618 - RNA, 19 nt, Homo sapiens
  misc_RNA (1)...(19): siRNA sense strand
gaaagagagacucgcucaa

SEQ ID NO: 2513619 - RNA, 19 nt, Homo sapiens
  misc_RNA (1)...(19): siRNA sense strand
cugagaguacugagauaau

SEQ ID NO: 2513620 - RNA, 19 nt, Homo sapiens
  misc_RNA (1)...(19): siRNA sense strand
uaagaaaggagaaaagcaa

SEQ ID NO: 2513621 - RNA, 19 nt, Homo sapiens
  misc_RNA (1)...(19): siRNA sense strand
cagaaauggugguaaagac

SEQ ID NO: 2513622 - RNA, 19 nt, Homo sapiens
  misc_RNA (1)...(19): siRNA sense strand
guugaagcuacuaaacaua

SEQ ID NO: 2513623 - RNA, 19 nt, Homo sapiens
  misc_RNA (1)...(19): siRNA sense strand
aagaagaaacuuggccaaa

SEQ ID NO: 2513624 - RNA, 19 nt, Homo sapiens
  misc_RNA (1)...(19): siRNA sense strand
gcuucauauuggcucauaa

SEQ ID NO: 2513625 - RNA, 19 nt, Homo sapiens
  misc_RNA (1)...(19): siRNA sense strand
guucuaugccugagaguac

SEQ ID NO: 2513626 - RNA, 19 nt, Homo sapiens
  misc_RNA (1)...(19): siRNA sense strand
gagauaaugaaaagaccaa

SEQ ID NO: 2513627 - RNA, 19 nt, Homo sapiens
  misc_RNA (1)...(19): siRNA sense strand
ugguaaagacccugauugu

SEQ ID NO: 2513628 - RNA, 19 nt, Homo sapiens
  misc_RNA (1)...(19): siRNA sense strand
ggauagaaaacuaaagcca

SEQ ID NO: 2513629 - RNA, 19 nt, Homo sapiens
  misc_RNA (1)...(19): siRNA sense strand
acgagaagaacaugaaaau

SEQ ID NO: 2513630 - RNA, 19 nt, Homo sapiens
  misc_RNA (1)...(19): siRNA sense strand
acaaaugauaucuguguca

SEQ ID NO: 2513631 - RNA, 19 nt, Homo sapiens
  misc_RNA (1)...(19): siRNA sense strand
cugacaaacuacuccguga

SEQ ID NO: 2513632 - RNA, 19 nt, Homo sapiens
  misc_RNA (1)...(19): siRNA sense strand
gcuaaaugcguugaagcua

SEQ ID NO: 2513633 - RNA, 19 nt, Homo sapiens
  misc_RNA (1)...(19): siRNA sense strand
agaaggaguuauucaggga

SEQ ID NO: 2513634 - RNA, 19 nt, Homo sapiens
  misc_RNA (1)...(19): siRNA sense strand
agugacagcaguuaugaua

SEQ ID NO: 2513635 - RNA, 19 nt, Homo sapiens
  misc_RNA (1)...(19): siRNA sense strand
gcggaaagaagaguugaaa

SEQ ID NO: 2513636 - RNA, 19 nt, Homo sapiens
  misc_RNA (1)...(19): siRNA sense strand
gaguacugagauaaugaaa

SEQ ID NO: 2513637 - RNA, 19 nt, Homo sapiens
  misc_RNA (1)...(19): siRNA sense strand
cuaacaagucagaccuuau

SEQ ID NO: 2513638 - RNA, 19 nt, Homo sapiens
  misc_RNA (1)...(19): siRNA sense strand
cuucauauuggcucauaaa

SEQ ID NO: 2513639 - RNA, 19 nt, Homo sapiens
  misc_RNA (1)...(19): siRNA sense strand
uggaacuguuucugugauu

SEQ ID NO: 2513640 - RNA, 19 nt, Homo sapiens
  misc_RNA (1)...(19): siRNA sense strand
aaggaaagucagaaagaag

SEQ ID NO: 2513641 - RNA, 19 nt, Homo sapiens
  misc_RNA (1)...(19): siRNA sense strand
gaaacuuggccaaacaaaa

SEQ ID NO: 2513642 - RNA, 19 nt, Homo sapiens
  misc_RNA (1)...(19): siRNA sense strand
ggcggaaagaagaguugaa

SEQ ID NO: 2513643 - RNA, 19 nt, Homo sapiens
  misc_RNA (1)...(19): siRNA sense strand
gaaaacaaguauucguaca

SEQ ID NO: 2513644 - RNA, 19 nt, Homo sapiens
  misc_RNA (1)...(19): siRNA sense strand
gugcgaauggguacagaga

SEQ ID NO: 2513645 - RNA, 19 nt, Homo sapiens
  misc_RNA (1)...(19): siRNA sense strand
agaagaguugaaagagaga

SEQ ID NO: 2513646 - RNA, 19 nt, Homo sapiens
  misc_RNA (1)...(19): siRNA sense strand
cugauguugaagaaguaaa

SEQ ID NO: 2513647 - RNA, 19 nt, Homo sapiens
  misc_RNA (1)...(19): siRNA sense strand
agaauuccuucaagcaaau

SEQ ID NO: 2513648 - RNA, 19 nt, Homo sapiens
  misc_RNA (1)...(19): siRNA sense strand
acugggaacagcagagaca

SEQ ID NO: 2513649 - RNA, 19 nt, Homo sapiens
  misc_RNA (1)...(19): siRNA sense strand
gcucaaguacgaaagcaga

SEQ ID NO: 2513650 - RNA, 19 nt, Homo sapiens
  misc_RNA (1)...(19): siRNA sense strand
agaucaacaacgaggaaau

SEQ ID NO: 2513651 - RNA, 19 nt, Homo sapiens
  misc_RNA (1)...(19): siRNA sense strand
caguacaugugguggacuu

SEQ ID NO: 2513652 - RNA, 19 nt, Homo sapiens
  misc_RNA (1)...(19): siRNA sense strand
agguauucaacaaggacaa

SEQ ID NO: 2513653 - RNA, 19 nt, Homo sapiens
  misc_RNA (1)...(19): siRNA sense strand
aaagaaaugacgagcagga

SEQ ID NO: 2513654 - RNA, 19 nt, Homo sapiens
  misc_RNA (1)...(19): siRNA sense strand
gcacaaacgggcucaggca

SEQ ID NO: 2513655 - RNA, 19 nt, Homo sapiens
  misc_RNA (1)...(19): siRNA sense strand
gaaauuugaaccuggcaca

SEQ ID NO: 2513656 - RNA, 19 nt, Homo sapiens
  misc_RNA (1)...(19): siRNA sense strand
ugaaagaaaugacgagcag

SEQ ID NO: 2513657 - RNA, 19 nt, Homo sapiens
  misc_RNA (1)...(19): siRNA sense strand
ccgcaaggagcuagagccu

SEQ ID NO: 2513658 - RNA, 19 nt, Homo sapiens
  misc_RNA (1)...(19): siRNA sense strand
agauaaaggagaagaaaca

SEQ ID NO: 2513659 - RNA, 19 nt, Homo sapiens
  misc_RNA (1)...(19): siRNA sense strand
cugaaauguugcaggauau

SEQ ID NO: 2513660 - RNA, 19 nt, Homo sapiens
  misc_RNA (1)...(19): siRNA sense strand
gguaaaucacgaaguauua

SEQ ID NO: 2513661 - RNA, 19 nt, Homo sapiens
  misc_RNA (1)...(19): siRNA sense strand
gcugaguguuacaggaauu

SEQ ID NO: 2513662 - RNA, 19 nt, Homo sapiens
  misc_RNA (1)...(19): siRNA sense strand
gaggaaaggaucugcucaa

SEQ ID NO: 2513663 - RNA, 19 nt, Homo sapiens
  misc_RNA (1)...(19): siRNA sense strand
agguaaaucacgaaguauu

SEQ ID NO: 2513664 - RNA, 19 nt, Homo sapiens
  misc_RNA (1)...(19): siRNA sense strand
gagcaaaagauaaaggaga

SEQ ID NO: 2513665 - RNA, 19 nt, Homo sapiens
  misc_RNA (1)...(19): siRNA sense strand
agcaaaagauaaaggagaa

SEQ ID NO: 2513666 - RNA, 19 nt, Homo sapiens
  misc_RNA (1)...(19): siRNA sense strand
cggaacuucuaauuggaaa

SEQ ID NO: 2513667 - RNA, 19 nt, Homo sapiens
  misc_RNA (1)...(19): siRNA sense strand
cauuugaagucauuggaau

SEQ ID NO: 2513668 - RNA, 19 nt, Homo sapiens
  misc_RNA (1)...(19): siRNA sense strand
guuagaaaugagagcaaaa

SEQ ID NO: 2513669 - RNA, 19 nt, Homo sapiens
  misc_RNA (1)...(19): siRNA sense strand
aguaaagcuaagauggaau

SEQ ID NO: 2513670 - RNA, 19 nt, Homo sapiens
  misc_RNA (1)...(19): siRNA sense strand
gugcagauuuugaguguuu

SEQ ID NO: 2513671 - RNA, 19 nt, Homo sapiens
  misc_RNA (1)...(19): siRNA sense strand
ucaaagaguauuacagcau

SEQ ID NO: 2513672 - RNA, 19 nt, Homo sapiens
  misc_RNA (1)...(19): siRNA sense strand
aguuaaagguaaaucacga

SEQ ID NO: 2513673 - RNA, 19 nt, Homo sapiens
  misc_RNA (1)...(19): siRNA sense strand
acagauugagggaaauaaa

SEQ ID NO: 2513674 - RNA, 19 nt, Homo sapiens
  misc_RNA (1)...(19): siRNA sense strand
aguccaugaucguacauua

SEQ ID NO: 2513675 - RNA, 19 nt, Homo sapiens
  misc_RNA (1)...(19): siRNA sense strand
ccucagaugaaaugauuga

SEQ ID NO: 2513676 - RNA, 19 nt, Homo sapiens
  misc_RNA (1)...(19): siRNA sense strand
aaagaagaaccaagagcuu

SEQ ID NO: 2513677 - RNA, 19 nt, Homo sapiens
  misc_RNA (1)...(19): siRNA sense strand
caguaaugcuguugcuagu

SEQ ID NO: 2513678 - RNA, 19 nt, Homo sapiens
  misc_RNA (1)...(19): siRNA sense strand
aaacagauugagggaaaua

SEQ ID NO: 2513679 - RNA, 19 nt, Homo sapiens
  misc_RNA (1)...(19): siRNA sense strand
gcuuucaauuuguguaaga

SEQ ID NO: 2513680 - RNA, 19 nt, Homo sapiens
  misc_RNA (1)...(19): siRNA sense strand
ucgaaacauuuauaggcua

SEQ ID NO: 2513681 - RNA, 19 nt, Homo sapiens
  misc_RNA (1)...(19): siRNA sense strand
ccgacaaugcucaagagua

SEQ ID NO: 2513682 - RNA, 19 nt, Homo sapiens
  misc_RNA (1)...(19): siRNA sense strand
cugcauacaguaaagcuaa

SEQ ID NO: 2513683 - RNA, 19 nt, Homo sapiens
  misc_RNA (1)...(19): siRNA sense strand
aaagguaaaucacgaagua

SEQ ID NO: 2513684 - RNA, 19 nt, Homo sapiens
  misc_RNA (1)...(19): siRNA sense strand
auggaaucuucuucaguaa

SEQ ID NO: 2513685 - RNA, 19 nt, Homo sapiens
  misc_RNA (1)...(19): siRNA sense strand
gauuuugaguguuuggaaa

SEQ ID NO: 2513686 - RNA, 19 nt, Homo sapiens
  misc_RNA (1)...(19): siRNA sense strand
uuguuagaaaugagagcaa

SEQ ID NO: 2513687 - RNA, 19 nt, Homo sapiens
  misc_RNA (1)...(19): siRNA sense strand
ggaacuucuaauuggaaaa

SEQ ID NO: 2513688 - RNA, 19 nt, Homo sapiens
  misc_RNA (1)...(19): siRNA sense strand
augaaaugauugagacuac

SEQ ID NO: 2513689 - RNA, 19 nt, Homo sapiens
  misc_RNA (1)...(19): siRNA sense strand
aguccagaacucaggagaa

SEQ ID NO: 2513690 - RNA, 19 nt, Homo sapiens
  misc_RNA (1)...(19): siRNA sense strand
agacugaaauguugcagga

SEQ ID NO: 2513691 - RNA, 19 nt, Homo sapiens
  misc_RNA (1)...(19): siRNA sense strand
gcuagaugaaauuaagaca

SEQ ID NO: 2513692 - RNA, 19 nt, Homo sapiens
  misc_RNA (1)...(19): siRNA sense strand
ggauauugugaaugagauc

SEQ ID NO: 2513693 - RNA, 19 nt, Homo sapiens
  misc_RNA (1)...(19): siRNA sense strand
cagcuuucaauuuguguaa

SEQ ID NO: 2513694 - RNA, 19 nt, Homo sapiens
  misc_RNA (1)...(19): siRNA sense strand
cagaauucaagaaagaaga

SEQ ID NO: 2513695 - RNA, 19 nt, Homo sapiens
  misc_RNA (1)...(19): siRNA sense strand
gacacuaccucuugcaaaa

SEQ ID NO: 2513696 - RNA, 19 nt, Homo sapiens
  misc_RNA (1)...(19): siRNA sense strand
guugcaggauauugugaau

SEQ ID NO: 2513697 - RNA, 19 nt, Homo sapiens
  misc_RNA (1)...(19): siRNA sense strand
gugcugaguguuacaggaa

SEQ ID NO: 2513698 - RNA, 19 nt, Homo sapiens
  misc_RNA (1)...(19): siRNA sense strand
gcuuaucagaggaaaggau

SEQ ID NO: 2513699 - RNA, 19 nt, Homo sapiens
  misc_RNA (1)...(19): siRNA sense strand
uguuuacccuuaagaggaa

SEQ ID NO: 2513700 - RNA, 19 nt, Homo sapiens
  misc_RNA (1)...(19): siRNA sense strand
cuuccagagauuauugaaa

SEQ ID NO: 2513701 - RNA, 19 nt, Homo sapiens
  misc_RNA (1)...(19): siRNA sense strand
agaugaaaugauugagacu

SEQ ID NO: 2513702 - RNA, 19 nt, Homo sapiens
  misc_RNA (1)...(19): siRNA sense strand
uguuagaaaugagagcaaa

SEQ ID NO: 2513703 - RNA, 19 nt, Homo sapiens
  misc_RNA (1)...(19): siRNA sense strand
gagacaaucaauagugcca

SEQ ID NO: 2513704 - RNA, 19 nt, Homo sapiens
  misc_RNA (1)...(19): siRNA sense strand
uggaguugauauggauaaa

SEQ ID NO: 2513705 - RNA, 19 nt, Homo sapiens
  misc_RNA (1)...(19): siRNA sense strand
aggcuaagucaaaacaaaa

SEQ ID NO: 2513706 - RNA, 19 nt, Homo sapiens
  misc_RNA (1)...(19): siRNA sense strand
gugacaaggcaguggcauc

SEQ ID NO: 2513707 - RNA, 19 nt, Homo sapiens
  misc_RNA (1)...(19): siRNA sense strand
agaguauugucauaggcaa

SEQ ID NO: 2513708 - RNA, 19 nt, Homo sapiens
  misc_RNA (1)...(19): siRNA sense strand
gggcaaacugcuuaucaga

SEQ ID NO: 2513709 - RNA, 19 nt, Homo sapiens
  misc_RNA (1)...(19): siRNA sense strand
gcauauaagcagaaaccug

SEQ ID NO: 2513710 - RNA, 19 nt, Homo sapiens
  misc_RNA (1)...(19): siRNA sense strand
auugagacuacgagugauu

SEQ ID NO: 2513711 - RNA, 19 nt, Homo sapiens
  misc_RNA (1)...(19): siRNA sense strand
guuaaagguaaaucacgaa

SEQ ID NO: 2513712 - RNA, 19 nt, Homo sapiens
  misc_RNA (1)...(19): siRNA sense strand
uagcuguggaagagaguca

SEQ ID NO: 2513713 - RNA, 19 nt, Homo sapiens
  misc_RNA (1)...(19): siRNA sense strand
cuggggaaauguuggcaaa

SEQ ID NO: 2513714 - RNA, 19 nt, Homo sapiens
  misc_RNA (1)...(19): siRNA sense strand
cuucaucaguauucaguca

SEQ ID NO: 2513715 - RNA, 19 nt, Homo sapiens
  misc_RNA (1)...(19): siRNA sense strand
gaguauugucauaggcaac

SEQ ID NO: 2513716 - RNA, 19 nt, Homo sapiens
  misc_RNA (1)...(19): siRNA sense strand
ugauugagacuacgaguga

SEQ ID NO: 2513717 - RNA, 19 nt, Homo sapiens
  misc_RNA (1)...(19): siRNA sense strand
aguaacagcaacagcagau

SEQ ID NO: 2513718 - RNA, 19 nt, Homo sapiens
  misc_RNA (1)...(19): siRNA sense strand
gaugaaauuaagacagaac

SEQ ID NO: 2513719 - RNA, 19 nt, Homo sapiens
  misc_RNA (1)...(19): siRNA sense strand
uguuagaagucgggauuaa

SEQ ID NO: 2513720 - RNA, 19 nt, Homo sapiens
  misc_RNA (1)...(19): siRNA sense strand
acggaagacuggagcguga

SEQ ID NO: 2513721 - RNA, 19 nt, Homo sapiens
  misc_RNA (1)...(19): siRNA sense strand
ccauaaugccucagagaac

SEQ ID NO: 2513722 - RNA, 19 nt, Homo sapiens
  misc_RNA (1)...(19): siRNA sense strand
aggcauaguuacaccaaaa

SEQ ID NO: 2513723 - RNA, 19 nt, Homo sapiens
  misc_RNA (1)...(19): siRNA sense strand
ccagaaagggauaaugaca

SEQ ID NO: 2513724 - RNA, 19 nt, Homo sapiens
  misc_RNA (1)...(19): siRNA sense strand
cguguggagugcugaacaa

SEQ ID NO: 2513725 - RNA, 19 nt, Homo sapiens
  misc_RNA (1)...(19): siRNA sense strand
gaauugugaauguggaaga

SEQ ID NO: 2513726 - RNA, 19 nt, Homo sapiens
  misc_RNA (1)...(19): siRNA sense strand
ccauuaugacuguaaagaa

SEQ ID NO: 2513727 - RNA, 19 nt, Homo sapiens
  misc_RNA (1)...(19): siRNA sense strand
cacagagauuuguaguaaa

SEQ ID NO: 2513728 - RNA, 19 nt, Homo sapiens
  misc_RNA (1)...(19): siRNA sense strand
gcucgaaauaauacgugua

SEQ ID NO: 2513729 - RNA, 19 nt, Homo sapiens
  misc_RNA (1)...(19): siRNA sense strand
ccucagagaacgugacugu

SEQ ID NO: 2513730 - RNA, 19 nt, Homo sapiens
  misc_RNA (1)...(19): siRNA sense strand
ugacuguaaagaaggcaua

SEQ ID NO: 2513731 - RNA, 19 nt, Homo sapiens
  misc_RNA (1)...(19): siRNA sense strand
augcgaagauaaagaaugu

SEQ ID NO: 2513732 - RNA, 19 nt, Homo sapiens
  misc_RNA (1)...(19): siRNA sense strand
agauaaagaauguugccuu

SEQ ID NO: 2513733 - RNA, 19 nt, Homo sapiens
  misc_RNA (1)...(19): siRNA sense strand
gugguaaugaagaagaauu

SEQ ID NO: 2513734 - RNA, 19 nt, Homo sapiens
  misc_RNA (1)...(19): siRNA sense strand
gggauuacucagcaggaga

SEQ ID NO: 2513735 - RNA, 19 nt, Homo sapiens
  misc_RNA (1)...(19): siRNA sense strand
uagugguaaugaagaagaa

SEQ ID NO: 2513736 - RNA, 19 nt, Homo sapiens
  misc_RNA (1)...(19): siRNA sense strand
aguaugacugcaacagaaa

SEQ ID NO: 2513737 - RNA, 19 nt, Homo sapiens
  misc_RNA (1)...(19): siRNA sense strand
gugacagugagguggaaga

SEQ ID NO: 2513738 - RNA, 19 nt, Homo sapiens
  misc_RNA (1)...(19): siRNA sense strand
ugaggaagcaacugaccua

SEQ ID NO: 2513739 - RNA, 19 nt, Homo sapiens
  misc_RNA (1)...(19): siRNA sense strand
uugugaauguggaagaaca

SEQ ID NO: 2513740 - RNA, 19 nt, Homo sapiens
  misc_RNA (1)...(19): siRNA sense strand
cauuaauacaagcgacuca

SEQ ID NO: 2513741 - RNA, 19 nt, Homo sapiens
  misc_RNA (1)...(19): siRNA sense strand
ccuguuagaagucgggauu

SEQ ID NO: 2513742 - RNA, 19 nt, Homo sapiens
  misc_RNA (1)...(19): siRNA sense strand
cuguaaagaaggcauauuu

SEQ ID NO: 2513743 - RNA, 19 nt, Homo sapiens
  misc_RNA (1)...(19): siRNA sense strand
aaguggaaauuuaugccaa

SEQ ID NO: 2513744 - RNA, 19 nt, Homo sapiens
  misc_RNA (1)...(19): siRNA sense strand
cuuaggaggcauaguuaca

SEQ ID NO: 2513745 - RNA, 19 nt, Homo sapiens
  misc_RNA (1)...(19): siRNA sense strand
ugaacaaugagacggaaga

SEQ ID NO: 2513746 - RNA, 19 nt, Homo sapiens
  misc_RNA (1)...(19): siRNA sense strand
agggauaaugacacagaga

SEQ ID NO: 2513747 - RNA, 19 nt, Homo sapiens
  misc_RNA (1)...(19): siRNA sense strand
gacuuuacaucuuuggcaa

SEQ ID NO: 2513748 - RNA, 19 nt, Homo sapiens
  misc_RNA (1)...(19): siRNA sense strand
ccagaauaugcaaagccua

SEQ ID NO: 2513749 - RNA, 19 nt, Homo sapiens
  misc_RNA (1)...(19): siRNA sense strand
ggucuguguacaucagcaa

SEQ ID NO: 2513750 - RNA, 19 nt, Homo sapiens
  misc_RNA (1)...(19): siRNA sense strand
cguuacuaauuuggaacua

SEQ ID NO: 2513751 - RNA, 19 nt, Homo sapiens
  misc_RNA (1)...(19): siRNA sense strand
gggagaaugcuguugaaag

SEQ ID NO: 2513752 - RNA, 19 nt, Homo sapiens
  misc_RNA (1)...(19): siRNA sense strand
agauuaaugcccaccagaa

SEQ ID NO: 2513753 - RNA, 19 nt, Homo sapiens
  misc_RNA (1)...(19): siRNA sense strand
gcuccagggacucgagaaa

SEQ ID NO: 2513754 - RNA, 19 nt, Homo sapiens
  misc_RNA (1)...(19): siRNA sense strand
gagaaggagaggaaggaca

SEQ ID NO: 2513755 - RNA, 19 nt, Homo sapiens
  misc_RNA (1)...(19): siRNA sense strand
uggaagaggcggagaugau

SEQ ID NO: 2513756 - RNA, 19 nt, Homo sapiens
  misc_RNA (1)...(19): siRNA sense strand
gagcagggguaccgggaaa

SEQ ID NO: 2513757 - RNA, 19 nt, Homo sapiens
  misc_RNA (1)...(19): siRNA sense strand
aggacaagcuggagccaca

SEQ ID NO: 2513758 - RNA, 19 nt, Homo sapiens
  misc_RNA (1)...(19): siRNA sense strand
gagaaggaugacauggaaa

SEQ ID NO: 2513759 - RNA, 19 nt, Homo sapiens
  misc_RNA (1)...(19): siRNA sense strand
uggauaagcugaaggagca

SEQ ID NO: 2513760 - RNA, 19 nt, Homo sapiens
  misc_RNA (1)...(19): siRNA sense strand
ugaugauggagcagguaaa

SEQ ID NO: 2513761 - RNA, 19 nt, Homo sapiens
  misc_RNA (1)...(19): siRNA sense strand
acuuugagaaggagaggaa

SEQ ID NO: 2513762 - RNA, 19 nt, Homo sapiens
  misc_RNA (1)...(19): siRNA sense strand
cugaaggagcaguuugaaa

SEQ ID NO: 2513763 - RNA, 19 nt, Homo sapiens
  misc_RNA (1)...(19): siRNA sense strand
guauagaaacggagcugau

SEQ ID NO: 2513764 - RNA, 19 nt, Homo sapiens
  misc_RNA (1)...(19): siRNA sense strand
uuguggaagugguggaaaa

SEQ ID NO: 2513765 - RNA, 19 nt, Homo sapiens
  misc_RNA (1)...(19): siRNA sense strand
cguccgggcucuggagaaa

SEQ ID NO: 2513766 - RNA, 19 nt, Homo sapiens
  misc_RNA (1)...(19): siRNA sense strand
agaaaguggauaagcugaa

SEQ ID NO: 2513767 - RNA, 19 nt, Homo sapiens
  misc_RNA (1)...(19): siRNA sense strand
ugaaggaauacgagcucaa

SEQ ID NO: 2513768 - RNA, 19 nt, Homo sapiens
  misc_RNA (1)...(19): siRNA sense strand
gcuccagugaguauagaaa

SEQ ID NO: 2513769 - RNA, 19 nt, Homo sapiens
  misc_RNA (1)...(19): siRNA sense strand
aggaugacauggaaaccaa

SEQ ID NO: 2513770 - RNA, 19 nt, Homo sapiens
  misc_RNA (1)...(19): siRNA sense strand
agacagaaucagaacuaca

SEQ ID NO: 2513771 - RNA, 19 nt, Homo sapiens
  misc_RNA (1)...(19): siRNA sense strand
gagaaacagcugaaagcca

SEQ ID NO: 2513772 - RNA, 19 nt, Homo sapiens
  misc_RNA (1)...(19): siRNA sense strand
cagcuggagaccaagguaa

SEQ ID NO: 2513773 - RNA, 19 nt, Homo sapiens
  misc_RNA (1)...(19): siRNA sense strand
aauuacuacgaaagggaaa

SEQ ID NO: 2513774 - RNA, 19 nt, Homo sapiens
  misc_RNA (1)...(19): siRNA sense strand
gcuacaggccauucaggaa

SEQ ID NO: 2513775 - RNA, 19 nt, Homo sapiens
  misc_RNA (1)...(19): siRNA sense strand
aggaauuuaaggaagguuu

SEQ ID NO: 2513776 - RNA, 19 nt, Homo sapiens
  misc_RNA (1)...(19): siRNA sense strand
gcguggacgagaaggugaa

SEQ ID NO: 2513777 - RNA, 19 nt, Homo sapiens
  misc_RNA (1)...(19): siRNA sense strand
gaugcacagaggaaggaaa

SEQ ID NO: 2513778 - RNA, 19 nt, Homo sapiens
  misc_RNA (1)...(19): siRNA sense strand
aaucagaacuacaaggauc

SEQ ID NO: 2513779 - RNA, 19 nt, Homo sapiens
  misc_RNA (1)...(19): siRNA sense strand
uggagagagagaaggauga

SEQ ID NO: 2513780 - RNA, 19 nt, Homo sapiens
  misc_RNA (1)...(19): siRNA sense strand
agagagagaaggaugacau

SEQ ID NO: 2513781 - RNA, 19 nt, Homo sapiens
  misc_RNA (1)...(19): siRNA sense strand
ggguggaagaggcggagau

SEQ ID NO: 2513782 - RNA, 19 nt, Homo sapiens
  misc_RNA (1)...(19): siRNA sense strand
augaagaggccgagagcac

SEQ ID NO: 2513783 - RNA, 19 nt, Homo sapiens
  misc_RNA (1)...(19): siRNA sense strand
agaaggagaggaaggacau

SEQ ID NO: 2513784 - RNA, 19 nt, Homo sapiens
  misc_RNA (1)...(19): siRNA sense strand
augaagaagagaaccacua

SEQ ID NO: 2513785 - RNA, 19 nt, Homo sapiens
  misc_RNA (1)...(19): siRNA sense strand
cacuaaagaagcucagaau

SEQ ID NO: 2513786 - RNA, 19 nt, Homo sapiens
  misc_RNA (1)...(19): siRNA sense strand
gcacaaggacagcugcaga

SEQ ID NO: 2513787 - RNA, 19 nt, Homo sapiens
  misc_RNA (1)...(19): siRNA sense strand
accuggaguuugugaaaga

SEQ ID NO: 2513788 - RNA, 19 nt, Homo sapiens
  misc_RNA (1)...(19): siRNA sense strand
agcuggagaccaagguaaa

SEQ ID NO: 2513789 - RNA, 19 nt, Homo sapiens
  misc_RNA (1)...(19): siRNA sense strand
cgaaagggaaauugcggca

SEQ ID NO: 2513790 - RNA, 19 nt, Homo sapiens
  misc_RNA (1)...(19): siRNA sense strand
gacccagacccuugaggaa

SEQ ID NO: 2513791 - RNA, 19 nt, Homo sapiens
  misc_RNA (1)...(19): siRNA sense strand
agucagaugaagaggccga

SEQ ID NO: 2513792 - RNA, 19 nt, Homo sapiens
  misc_RNA (1)...(19): siRNA sense strand
caggguuaacuuugaggaa

SEQ ID NO: 2513793 - RNA, 19 nt, Homo sapiens
  misc_RNA (1)...(19): siRNA sense strand
augcacagaggaaggaaau

SEQ ID NO: 2513794 - RNA, 19 nt, Homo sapiens
  misc_RNA (1)...(19): siRNA sense strand
ugaaggagcaguuugaaaa

SEQ ID NO: 2513795 - RNA, 19 nt, Homo sapiens
  misc_RNA (1)...(19): siRNA sense strand
ugaaagagauggacgacug

SEQ ID NO: 2513796 - RNA, 19 nt, Homo sapiens
  misc_RNA (1)...(19): siRNA sense strand
acagaaggagauuguggaa

SEQ ID NO: 2513797 - RNA, 19 nt, Homo sapiens
  misc_RNA (1)...(19): siRNA sense strand
gggacucgagaaagaggaa

SEQ ID NO: 2513798 - RNA, 19 nt, Homo sapiens
  misc_RNA (1)...(19): siRNA sense strand
gcucugagauggaggugcu

SEQ ID NO: 2513799 - RNA, 19 nt, Homo sapiens
  misc_RNA (1)...(19): siRNA sense strand
gggaaauugcggcacugaa

SEQ ID NO: 2513800 - RNA, 19 nt, Homo sapiens
  misc_RNA (1)...(19): siRNA sense strand
aggugauggcagagagucu

SEQ ID NO: 2513801 - RNA, 19 nt, Homo sapiens
  misc_RNA (1)...(19): siRNA sense strand
caaaauagcgcuggagaga

SEQ ID NO: 2513802 - RNA, 19 nt, Homo sapiens
  misc_RNA (1)...(19): siRNA sense strand
uggaggugcucaacagaca

SEQ ID NO: 2513803 - RNA, 19 nt, Homo sapiens
  misc_RNA (1)...(19): siRNA sense strand
caaacuggaucaagacgga

SEQ ID NO: 2513804 - RNA, 19 nt, Homo sapiens
  misc_RNA (1)...(19): siRNA sense strand
gaguuugugcugaaggaca

SEQ ID NO: 2513805 - RNA, 19 nt, Homo sapiens
  misc_RNA (1)...(19): siRNA sense strand
gagaaaguggauaagcuga

SEQ ID NO: 2513806 - RNA, 19 nt, Homo sapiens
  misc_RNA (1)...(19): siRNA sense strand
cugaugauggagcagguaa

SEQ ID NO: 2513807 - RNA, 19 nt, Homo sapiens
  misc_RNA (1)...(19): siRNA sense strand
ugagagagaacgacagacu

SEQ ID NO: 2513808 - RNA, 19 nt, Homo sapiens
  misc_RNA (1)...(19): siRNA sense strand
cagagugaccaaauccaaa

SEQ ID NO: 2513809 - RNA, 19 nt, Homo sapiens
  misc_RNA (1)...(19): siRNA sense strand
aaagaagcucagaaugaau

SEQ ID NO: 2513810 - RNA, 19 nt, Homo sapiens
  misc_RNA (1)...(19): siRNA sense strand
acuucagcguggacgagaa

SEQ ID NO: 2513811 - RNA, 19 nt, Homo sapiens
  misc_RNA (1)...(19): siRNA sense strand
gagaagaggaaccuggagu

SEQ ID NO: 2513812 - RNA, 19 nt, Homo sapiens
  misc_RNA (1)...(19): siRNA sense strand
agaacuacaaggaucaauu

SEQ ID NO: 2513813 - RNA, 19 nt, Homo sapiens
  misc_RNA (1)...(19): siRNA sense strand
ggaaagcagcugugagaaa

SEQ ID NO: 2513814 - RNA, 19 nt, Homo sapiens
  misc_RNA (1)...(19): siRNA sense strand
ggaaacaauaggagaggaa

SEQ ID NO: 2513815 - RNA, 19 nt, Homo sapiens
  misc_RNA (1)...(19): siRNA sense strand
gaucaaagccgauaugaaa

SEQ ID NO: 2513816 - RNA, 19 nt, Homo sapiens
  misc_RNA (1)...(19): siRNA sense strand
cuuuauaugaaguggguaa

SEQ ID NO: 2513817 - RNA, 19 nt, Homo sapiens
  misc_RNA (1)...(19): siRNA sense strand
aaacaauaggagaggaaau

SEQ ID NO: 2513818 - RNA, 19 nt, Homo sapiens
  misc_RNA (1)...(19): siRNA sense strand
ggauauuccugaaaagaaa

SEQ ID NO: 2513819 - RNA, 19 nt, Homo sapiens
  misc_RNA (1)...(19): siRNA sense strand
cuacagagcagaauggcua

SEQ ID NO: 2513820 - RNA, 19 nt, Homo sapiens
  misc_RNA (1)...(19): siRNA sense strand
gaggaaagcagcugugaga

SEQ ID NO: 2513821 - RNA, 19 nt, Homo sapiens
  misc_RNA (1)...(19): siRNA sense strand
gagaaaggcugucagguca

SEQ ID NO: 2513822 - RNA, 19 nt, Homo sapiens
  misc_RNA (1)...(19): siRNA sense strand
augaaagcagcuagggaua

SEQ ID NO: 2513823 - RNA, 19 nt, Homo sapiens
  misc_RNA (1)...(19): siRNA sense strand
acucagacgaggagaauga

SEQ ID NO: 2513824 - RNA, 19 nt, Homo sapiens
  misc_RNA (1)...(19): siRNA sense strand
ggagaaugacuuucggcaa

SEQ ID NO: 2513825 - RNA, 19 nt, Homo sapiens
  misc_RNA (1)...(19): siRNA sense strand
ccgccagcacagugggaaa

SEQ ID NO: 2513826 - RNA, 19 nt, Homo sapiens
  misc_RNA (1)...(19): siRNA sense strand
cgauaauaaugcccagaau

SEQ ID NO: 2513827 - RNA, 19 nt, Homo sapiens
  misc_RNA (1)...(19): siRNA sense strand
cagaauggcuaaugcggau

SEQ ID NO: 2513828 - RNA, 19 nt, Homo sapiens
  misc_RNA (1)...(19): siRNA sense strand
ggagggagaugcagagagu

SEQ ID NO: 2513829 - RNA, 19 nt, Homo sapiens
  misc_RNA (1)...(19): siRNA sense strand
ccaagaagauggagaggug

SEQ ID NO: 2513830 - RNA, 19 nt, Homo sapiens
  misc_RNA (1)...(19): siRNA sense strand
gaaugccacccgagagaaa

SEQ ID NO: 2513831 - RNA, 19 nt, Homo sapiens
  misc_RNA (1)...(19): siRNA sense strand
caggaaucccaaaggagaa

SEQ ID NO: 2513832 - RNA, 19 nt, Homo sapiens
  misc_RNA (1)...(19): siRNA sense strand
uggccaguuuauugaauua

SEQ ID NO: 2513833 - RNA, 19 nt, Homo sapiens
  misc_RNA (1)...(19): siRNA sense strand
gagugaugaugaagaagau

SEQ ID NO: 2513834 - RNA, 19 nt, Homo sapiens
  misc_RNA (1)...(19): siRNA sense strand
acgaaagaaaagugugaaa

SEQ ID NO: 2513835 - RNA, 19 nt, Homo sapiens
  misc_RNA (1)...(19): siRNA sense strand
cuuugaagacgaugaagaa

SEQ ID NO: 2513836 - RNA, 19 nt, Homo sapiens
  misc_RNA (1)...(19): siRNA sense strand
aggccauggaggagggaga

SEQ ID NO: 2513837 - RNA, 19 nt, Homo sapiens
  misc_RNA (1)...(19): siRNA sense strand
agaucaaagccgauaugaa

SEQ ID NO: 2513838 - RNA, 19 nt, Homo sapiens
  misc_RNA (1)...(19): siRNA sense strand
ggccgagaguggaaauaau

SEQ ID NO: 2513839 - RNA, 19 nt, Homo sapiens
  misc_RNA (1)...(19): siRNA sense strand
acuccaacaaugacgauaa

SEQ ID NO: 2513840 - RNA, 19 nt, Homo sapiens
  misc_RNA (1)...(19): siRNA sense strand
cagaagaaaugacagcaga

SEQ ID NO: 2513841 - RNA, 19 nt, Homo sapiens
  misc_RNA (1)...(19): siRNA sense strand
guaucaaauaucuggcaau

SEQ ID NO: 2513842 - RNA, 19 nt, Homo sapiens
  misc_RNA (1)...(19): siRNA sense strand
ccaacauccacgacaacaa

SEQ ID NO: 2513843 - RNA, 19 nt, Homo sapiens
  misc_RNA (1)...(19): siRNA sense strand
cugcagagcccaacagcuu

SEQ ID NO: 2513844 - RNA, 19 nt, Homo sapiens
  misc_RNA (1)...(19): siRNA sense strand
aggauauguagaugaguuu

SEQ ID NO: 2513845 - RNA, 19 nt, Homo sapiens
  misc_RNA (1)...(19): siRNA sense strand
aggaauugguguuucauca

SEQ ID NO: 2513846 - RNA, 19 nt, Homo sapiens
  misc_RNA (1)...(19): siRNA sense strand
gaaagcagcuagggauauu

SEQ ID NO: 2513847 - RNA, 19 nt, Homo sapiens
  misc_RNA (1)...(19): siRNA sense strand
gcuccauauuccaugauuu

SEQ ID NO: 2513848 - RNA, 19 nt, Homo sapiens
  misc_RNA (1)...(19): siRNA sense strand
ccaacagcuucgcucgaua

SEQ ID NO: 2513849 - RNA, 19 nt, Homo sapiens
  misc_RNA (1)...(19): siRNA sense strand
agaggaaauuucagagaug

SEQ ID NO: 2513850 - RNA, 19 nt, Homo sapiens
  misc_RNA (1)...(19): siRNA sense strand
cagagaugcgucagaugaa

SEQ ID NO: 2513851 - RNA, 19 nt, Homo sapiens
  misc_RNA (1)...(19): siRNA sense strand
guugaagacaguuggagau

SEQ ID NO: 2513852 - RNA, 19 nt, Homo sapiens
  misc_RNA (1)...(19): siRNA sense strand
uggcugaugugguagaaaa

SEQ ID NO: 2513853 - RNA, 19 nt, Homo sapiens
  misc_RNA (1)...(19): siRNA sense strand
agauaaauccacuaguaca

SEQ ID NO: 2513854 - RNA, 19 nt, Homo sapiens
  misc_RNA (1)...(19): siRNA sense strand
uguggauguugaugaggaa

SEQ ID NO: 2513855 - RNA, 19 nt, Homo sapiens
  misc_RNA (1)...(19): siRNA sense strand
ccaggaaucccaaaggaga

SEQ ID NO: 2513856 - RNA, 19 nt, Homo sapiens
  misc_RNA (1)...(19): siRNA sense strand
gguagaaaaugcaccaauu

SEQ ID NO: 2513857 - RNA, 19 nt, Homo sapiens
  misc_RNA (1)...(19): siRNA sense strand
uuuagaagguguuguggau

SEQ ID NO: 2513858 - RNA, 19 nt, Homo sapiens
  misc_RNA (1)...(19): siRNA sense strand
gauacgacuuugaagacga

SEQ ID NO: 2513859 - RNA, 19 nt, Homo sapiens
  misc_RNA (1)...(19): siRNA sense strand
gagaaugacuuucggcaag

SEQ ID NO: 2513860 - RNA, 19 nt, Homo sapiens
  misc_RNA (1)...(19): siRNA sense strand
auggagaggugguggccga

SEQ ID NO: 2513861 - RNA, 19 nt, Homo sapiens
  misc_RNA (1)...(19): siRNA sense strand
agaagauagucuagaacuc

SEQ ID NO: 2513862 - RNA, 19 nt, Homo sapiens
  misc_RNA (1)...(19): siRNA sense strand
agacaucguccaagaagau

SEQ ID NO: 2513863 - RNA, 19 nt, Homo sapiens
  misc_RNA (1)...(19): siRNA sense strand
uccagagaauugucaguaa

SEQ ID NO: 2513864 - RNA, 19 nt, Homo sapiens
  misc_RNA (1)...(19): siRNA sense strand
ggaaagcagcugugagaaa

SEQ ID NO: 2513865 - RNA, 19 nt, Homo sapiens
  misc_RNA (1)...(19): siRNA sense strand
ggaaacaauaggagaggaa

SEQ ID NO: 2513866 - RNA, 19 nt, Homo sapiens
  misc_RNA (1)...(19): siRNA sense strand
gaucaaagccgauaugaaa

SEQ ID NO: 2513867 - RNA, 19 nt, Homo sapiens
  misc_RNA (1)...(19): siRNA sense strand
cuuuauaugaaguggguaa

SEQ ID NO: 2513868 - RNA, 19 nt, Homo sapiens
  misc_RNA (1)...(19): siRNA sense strand
aaacaauaggagaggaaau

SEQ ID NO: 2513869 - RNA, 19 nt, Homo sapiens
  misc_RNA (1)...(19): siRNA sense strand
ggauauuccugaaaagaaa

SEQ ID NO: 2513870 - RNA, 19 nt, Homo sapiens
  misc_RNA (1)...(19): siRNA sense strand
cuacagagcagaauggcua

SEQ ID NO: 2513871 - RNA, 19 nt, Homo sapiens
  misc_RNA (1)...(19): siRNA sense strand
gaggaaagcagcugugaga

SEQ ID NO: 2513872 - RNA, 19 nt, Homo sapiens
  misc_RNA (1)...(19): siRNA sense strand
gagaaaggcugucagguca

SEQ ID NO: 2513873 - RNA, 19 nt, Homo sapiens
  misc_RNA (1)...(19): siRNA sense strand
augaaagcagcuagggaua

SEQ ID NO: 2513874 - RNA, 19 nt, Homo sapiens
  misc_RNA (1)...(19): siRNA sense strand
acucagacgaggagaauga

SEQ ID NO: 2513875 - RNA, 19 nt, Homo sapiens
  misc_RNA (1)...(19): siRNA sense strand
ggagaaugacuuucggcaa

SEQ ID NO: 2513876 - RNA, 19 nt, Homo sapiens
  misc_RNA (1)...(19): siRNA sense strand
ccgccagcacagugggaaa

SEQ ID NO: 2513877 - RNA, 19 nt, Homo sapiens
  misc_RNA (1)...(19): siRNA sense strand
cgauaauaaugcccagaau

SEQ ID NO: 2513878 - RNA, 19 nt, Homo sapiens
  misc_RNA (1)...(19): siRNA sense strand
cagaauggcuaaugcggau

SEQ ID NO: 2513879 - RNA, 19 nt, Homo sapiens
  misc_RNA (1)...(19): siRNA sense strand
ggagggagaugcagagagu

SEQ ID NO: 2513880 - RNA, 19 nt, Homo sapiens
  misc_RNA (1)...(19): siRNA sense strand
ccaagaagauggagaggug

SEQ ID NO: 2513881 - RNA, 19 nt, Homo sapiens
  misc_RNA (1)...(19): siRNA sense strand
gaaugccacccgagagaaa

SEQ ID NO: 2513882 - RNA, 19 nt, Homo sapiens
  misc_RNA (1)...(19): siRNA sense strand
caggaaucccaaaggagaa

SEQ ID NO: 2513883 - RNA, 19 nt, Homo sapiens
  misc_RNA (1)...(19): siRNA sense strand
uggccaguuuauugaauua

SEQ ID NO: 2513884 - RNA, 19 nt, Homo sapiens
  misc_RNA (1)...(19): siRNA sense strand
gagugaugaugaagaagau

SEQ ID NO: 2513885 - RNA, 19 nt, Homo sapiens
  misc_RNA (1)...(19): siRNA sense strand
acgaaagaaaagugugaaa

SEQ ID NO: 2513886 - RNA, 19 nt, Homo sapiens
  misc_RNA (1)...(19): siRNA sense strand
cuuugaagacgaugaagaa

SEQ ID NO: 2513887 - RNA, 19 nt, Homo sapiens
  misc_RNA (1)...(19): siRNA sense strand
aggccauggaggagggaga

SEQ ID NO: 2513888 - RNA, 19 nt, Homo sapiens
  misc_RNA (1)...(19): siRNA sense strand
agaucaaagccgauaugaa

SEQ ID NO: 2513889 - RNA, 19 nt, Homo sapiens
  misc_RNA (1)...(19): siRNA sense strand
ggccgagaguggaaauaau

SEQ ID NO: 2513890 - RNA, 19 nt, Homo sapiens
  misc_RNA (1)...(19): siRNA sense strand
acuccaacaaugacgauaa

SEQ ID NO: 2513891 - RNA, 19 nt, Homo sapiens
  misc_RNA (1)...(19): siRNA sense strand
cagaagaaaugacagcaga

SEQ ID NO: 2513892 - RNA, 19 nt, Homo sapiens
  misc_RNA (1)...(19): siRNA sense strand
guaucaaauaucuggcaau

SEQ ID NO: 2513893 - RNA, 19 nt, Homo sapiens
  misc_RNA (1)...(19): siRNA sense strand
ccaacauccacgacaacaa

SEQ ID NO: 2513894 - RNA, 19 nt, Homo sapiens
  misc_RNA (1)...(19): siRNA sense strand
cugcagagcccaacagcuu

SEQ ID NO: 2513895 - RNA, 19 nt, Homo sapiens
  misc_RNA (1)...(19): siRNA sense strand
aggauauguagaugaguuu

SEQ ID NO: 2513896 - RNA, 19 nt, Homo sapiens
  misc_RNA (1)...(19): siRNA sense strand
aggaauugguguuucauca

SEQ ID NO: 2513897 - RNA, 19 nt, Homo sapiens
  misc_RNA (1)...(19): siRNA sense strand
gaaagcagcuagggauauu

SEQ ID NO: 2513898 - RNA, 19 nt, Homo sapiens
  misc_RNA (1)...(19): siRNA sense strand
gcuccauauuccaugauuu

SEQ ID NO: 2513899 - RNA, 19 nt, Homo sapiens
  misc_RNA (1)...(19): siRNA sense strand
ccaacagcuucgcucgaua

SEQ ID NO: 2513900 - RNA, 19 nt, Homo sapiens
  misc_RNA (1)...(19): siRNA sense strand
agaggaaauuucagagaug

SEQ ID NO: 2513901 - RNA, 19 nt, Homo sapiens
  misc_RNA (1)...(19): siRNA sense strand
cagagaugcgucagaugaa

SEQ ID NO: 2513902 - RNA, 19 nt, Homo sapiens
  misc_RNA (1)...(19): siRNA sense strand
guugaagacaguuggagau

SEQ ID NO: 2513903 - RNA, 19 nt, Homo sapiens
  misc_RNA (1)...(19): siRNA sense strand
uggcugaugugguagaaaa

SEQ ID NO: 2513904 - RNA, 19 nt, Homo sapiens
  misc_RNA (1)...(19): siRNA sense strand
agauaaauccacuaguaca

SEQ ID NO: 2513905 - RNA, 19 nt, Homo sapiens
  misc_RNA (1)...(19): siRNA sense strand
uguggauguugaugaggaa

SEQ ID NO: 2513906 - RNA, 19 nt, Homo sapiens
  misc_RNA (1)...(19): siRNA sense strand
ccaggaaucccaaaggaga

SEQ ID NO: 2513907 - RNA, 19 nt, Homo sapiens
  misc_RNA (1)...(19): siRNA sense strand
gguagaaaaugcaccaauu

SEQ ID NO: 2513908 - RNA, 19 nt, Homo sapiens
  misc_RNA (1)...(19): siRNA sense strand
uuuagaagguguuguggau

SEQ ID NO: 2513909 - RNA, 19 nt, Homo sapiens
  misc_RNA (1)...(19): siRNA sense strand
gauacgacuuugaagacga

SEQ ID NO: 2513910 - RNA, 19 nt, Homo sapiens
  misc_RNA (1)...(19): siRNA sense strand
gagaaugacuuucggcaag

SEQ ID NO: 2513911 - RNA, 19 nt, Homo sapiens
  misc_RNA (1)...(19): siRNA sense strand
auggagaggugguggccga

SEQ ID NO: 2513912 - RNA, 19 nt, Homo sapiens
  misc_RNA (1)...(19): siRNA sense strand
agaagauagucuagaacuc

SEQ ID NO: 2513913 - RNA, 19 nt, Homo sapiens
  misc_RNA (1)...(19): siRNA sense strand
agacaucguccaagaagau

SEQ ID NO: 2513914 - RNA, 19 nt, Homo sapiens
  misc_RNA (1)...(19): siRNA sense strand
uccagagaauugucaguaa

SEQ ID NO: 2513915 - RNA, 19 nt, Homo sapiens
  misc_RNA (1)...(19): siRNA sense strand
ccaugagagacgagauaaa

SEQ ID NO: 2513916 - RNA, 19 nt, Homo sapiens
  misc_RNA (1)...(19): siRNA sense strand
gcuagaaacacgggagaaa

SEQ ID NO: 2513917 - RNA, 19 nt, Homo sapiens
  misc_RNA (1)...(19): siRNA sense strand
ggaaaagaguacugccuua

SEQ ID NO: 2513918 - RNA, 19 nt, Homo sapiens
  misc_RNA (1)...(19): siRNA sense strand
gcaaaugguuccucgagaa

SEQ ID NO: 2513919 - RNA, 19 nt, Homo sapiens
  misc_RNA (1)...(19): siRNA sense strand
ccagaaagcagaacgggaa

SEQ ID NO: 2513920 - RNA, 19 nt, Homo sapiens
  misc_RNA (1)...(19): siRNA sense strand
ccagaggauucguggaaaa

SEQ ID NO: 2513921 - RNA, 19 nt, Homo sapiens
  misc_RNA (1)...(19): siRNA sense strand
augaagaacaccauggaaa

SEQ ID NO: 2513922 - RNA, 19 nt, Homo sapiens
  misc_RNA (1)...(19): siRNA sense strand
ugcaaugauaagagagaaa

SEQ ID NO: 2513923 - RNA, 19 nt, Homo sapiens
  misc_RNA (1)...(19): siRNA sense strand
gggaagaauaugagugugu

SEQ ID NO: 2513924 - RNA, 19 nt, Homo sapiens
  misc_RNA (1)...(19): siRNA sense strand
gcuaaaggaaccagcaaaa

SEQ ID NO: 2513925 - RNA, 19 nt, Homo sapiens
  misc_RNA (1)...(19): siRNA sense strand
ccuauaaugacaagccaua

SEQ ID NO: 2513926 - RNA, 19 nt, Homo sapiens
  misc_RNA (1)...(19): siRNA sense strand
gagugaagugcaugagaga

SEQ ID NO: 2513927 - RNA, 19 nt, Homo sapiens
  misc_RNA (1)...(19): siRNA sense strand
agacaaaggaagcugugaa

SEQ ID NO: 2513928 - RNA, 19 nt, Homo sapiens
  misc_RNA (1)...(19): siRNA sense strand
cgccaugagagacgagaua

SEQ ID NO: 2513929 - RNA, 19 nt, Homo sapiens
  misc_RNA (1)...(19): siRNA sense strand
gcggaugcaugcaaugaua

SEQ ID NO: 2513930 - RNA, 19 nt, Homo sapiens
  misc_RNA (1)...(19): siRNA sense strand
aguugaaguaacaggauuu

SEQ ID NO: 2513931 - RNA, 19 nt, Homo sapiens
  misc_RNA (1)...(19): siRNA sense strand
ggcaaaagagaacgagaua

SEQ ID NO: 2513932 - RNA, 19 nt, Homo sapiens
  misc_RNA (1)...(19): siRNA sense strand
ugaagaacaccauggaaaa

SEQ ID NO: 2513933 - RNA, 19 nt, Homo sapiens
  misc_RNA (1)...(19): siRNA sense strand
ggaaugacaugaagccuca

SEQ ID NO: 2513934 - RNA, 19 nt, Homo sapiens
  misc_RNA (1)...(19): siRNA sense strand
aguuguaagaguuggaaaa

SEQ ID NO: 2513935 - RNA, 19 nt, Homo sapiens
  misc_RNA (1)...(19): siRNA sense strand
caaugauaagagagaaaca

SEQ ID NO: 2513936 - RNA, 19 nt, Homo sapiens
  misc_RNA (1)...(19): siRNA sense strand
ccucagugccgcagcaaga

SEQ ID NO: 2513937 - RNA, 19 nt, Homo sapiens
  misc_RNA (1)...(19): siRNA sense strand
cggaaagcaagccuggaaa

SEQ ID NO: 2513938 - RNA, 19 nt, Homo sapiens
  misc_RNA (1)...(19): siRNA sense strand
caaagaaccuacagcagca

SEQ ID NO: 2513939 - RNA, 19 nt, Homo sapiens
  misc_RNA (1)...(19): siRNA sense strand
caucaauggaacaggggaa

SEQ ID NO: 2513940 - RNA, 19 nt, Homo sapiens
  misc_RNA (1)...(19): siRNA sense strand
cugaacauccagagagcau

SEQ ID NO: 2513941 - RNA, 19 nt, Homo sapiens
  misc_RNA (1)...(19): siRNA sense strand
cagagagcaugaugaguga

SEQ ID NO: 2513942 - RNA, 19 nt, Homo sapiens
  misc_RNA (1)...(19): siRNA sense strand
ccgaaaucccucagaagga

SEQ ID NO: 2513943 - RNA, 19 nt, Homo sapiens
  misc_RNA (1)...(19): siRNA sense strand
acuuauaugguuuggaaga

SEQ ID NO: 2513944 - RNA, 19 nt, Homo sapiens
  misc_RNA (1)...(19): siRNA sense strand
caugaugagugaagugcau

SEQ ID NO: 2513945 - RNA, 19 nt, Homo sapiens
  misc_RNA (1)...(19): siRNA sense strand
gaaaaugcaugcugauaau

SEQ ID NO: 2513946 - RNA, 19 nt, Homo sapiens
  misc_RNA (1)...(19): siRNA sense strand
cugacauggagguggaaga

SEQ ID NO: 2513947 - RNA, 19 nt, Homo sapiens
  misc_RNA (1)...(19): siRNA sense strand
ggaaagcaagccuggaaaa

SEQ ID NO: 2513948 - RNA, 19 nt, Homo sapiens
  misc_RNA (1)...(19): siRNA sense strand
ucaugaaggauuugcaaaa

SEQ ID NO: 2513949 - RNA, 19 nt, Homo sapiens
  misc_RNA (1)...(19): siRNA sense strand
cuuaaaacuucuucaggaa

SEQ ID NO: 2513950 - RNA, 19 nt, Homo sapiens
  misc_RNA (1)...(19): siRNA sense strand
ccuuaggagucgacaucau

SEQ ID NO: 2513951 - RNA, 19 nt, Homo sapiens
  misc_RNA (1)...(19): siRNA sense strand
uuuggaagaaggacagaaa

SEQ ID NO: 2513952 - RNA, 19 nt, Homo sapiens
  misc_RNA (1)...(19): siRNA sense strand
cgaagaugcaagugccaca

SEQ ID NO: 2513953 - RNA, 19 nt, Homo sapiens
  misc_RNA (1)...(19): siRNA sense strand
agaaaaugcaugcugauaa

SEQ ID NO: 2513954 - RNA, 19 nt, Homo sapiens
  misc_RNA (1)...(19): siRNA sense strand
gugacagauuacaagaaga

SEQ ID NO: 2513955 - RNA, 19 nt, Homo sapiens
  misc_RNA (1)...(19): siRNA sense strand
ggaagagcgacuaccacaa

SEQ ID NO: 2513956 - RNA, 19 nt, Homo sapiens
  misc_RNA (1)...(19): siRNA sense strand
aacacaagaucuagggcuu

SEQ ID NO: 2513957 - RNA, 19 nt, Homo sapiens
  misc_RNA (1)...(19): siRNA sense strand
caucaaaucaagagagcug

SEQ ID NO: 2513958 - RNA, 19 nt, Homo sapiens
  misc_RNA (1)...(19): siRNA sense strand
cagggugguuugcuagaaa

SEQ ID NO: 2513959 - RNA, 19 nt, Homo sapiens
  misc_RNA (1)...(19): siRNA sense strand
cauucaaagagcaacuuaa

SEQ ID NO: 2513960 - RNA, 19 nt, Homo sapiens
  misc_RNA (1)...(19): siRNA sense strand
ggaguuaacuggcagagga

SEQ ID NO: 2513961 - RNA, 19 nt, Homo sapiens
  misc_RNA (1)...(19): siRNA sense strand
caugcaaugauaagagaga

SEQ ID NO: 2513962 - RNA, 19 nt, Homo sapiens
  misc_RNA (1)...(19): siRNA sense strand
acgagauauuagaugugaa

SEQ ID NO: 2513963 - RNA, 19 nt, Homo sapiens
  misc_RNA (1)...(19): siRNA sense strand
ggccuuaccuccaguucaa

SEQ ID NO: 2513964 - RNA, 19 nt, Homo sapiens
  misc_RNA (1)...(19): siRNA sense strand
cauuuuagaucuacgacaa

SEQ ID NO: 2513965 - RNA, 19 nt, Homo sapiens
  misc_RNA (1)...(19): siRNA sense strand
augaugagguucaguacau

SEQ ID NO: 2513966 - RNA, 19 nt, Homo sapiens
  misc_RNA (1)...(19): siRNA sense strand
cuuauaugguuuggaagaa

SEQ ID NO: 2513967 - RNA, 19 nt, Homo sapiens
  misc_RNA (1)...(19): siRNA sense strand
uggcagaucuuuugggcau

SEQ ID NO: 2513968 - RNA, 19 nt, Homo sapiens
  misc_RNA (1)...(19): siRNA sense strand
acgagauaaaugagcucaa

SEQ ID NO: 2513969 - RNA, 19 nt, Homo sapiens
  misc_RNA (1)...(19): siRNA sense strand
aaucaagagagcuggaguu

SEQ ID NO: 2513970 - RNA, 19 nt, Homo sapiens
  misc_RNA (1)...(19): siRNA sense strand
caucugacauggaggugga

SEQ ID NO: 2513971 - RNA, 19 nt, Homo sapiens
  misc_RNA (1)...(19): siRNA sense strand
gcugauaauaacuucacua

SEQ ID NO: 2513972 - RNA, 19 nt, Homo sapiens
  misc_RNA (1)...(19): siRNA sense strand
gggaagagcgacuaccaca

SEQ ID NO: 2513973 - RNA, 19 nt, Homo sapiens
  misc_RNA (1)...(19): siRNA sense strand
aagcagaacgggaagaacu

SEQ ID NO: 2513974 - RNA, 19 nt, Homo sapiens
  misc_RNA (1)...(19): siRNA sense strand
caguuguaagaguuggaaa

SEQ ID NO: 2513975 - RNA, 19 nt, Homo sapiens
  misc_RNA (1)...(19): siRNA sense strand
cucagaaggagcaggauga

SEQ ID NO: 2513976 - RNA, 19 nt, Homo sapiens
  misc_RNA (1)...(19): siRNA sense strand
auuaaaagcacaucagcaa

SEQ ID NO: 2513977 - RNA, 19 nt, Homo sapiens
  misc_RNA (1)...(19): siRNA sense strand
aaguugaaguaacaggauu

SEQ ID NO: 2513978 - RNA, 19 nt, Homo sapiens
  misc_RNA (1)...(19): siRNA sense strand
aggugauagaagaguguca

SEQ ID NO: 2513979 - RNA, 19 nt, Homo sapiens
  misc_RNA (1)...(19): siRNA sense strand
caagauaggcugcaugcuu

SEQ ID NO: 2513980 - RNA, 19 nt, Homo sapiens
  misc_RNA (1)...(19): siRNA sense strand
cggcauucaaagagcaacu

SEQ ID NO: 2513981 - RNA, 19 nt, Homo sapiens
  misc_RNA (1)...(19): siRNA sense strand
gaacauccagagagcauga

SEQ ID NO: 2513982 - RNA, 19 nt, Homo sapiens
  misc_RNA (1)...(19): siRNA sense strand
ggaagguucuccagugacu

SEQ ID NO: 2513983 - RNA, 19 nt, Homo sapiens
  misc_RNA (1)...(19): siRNA sense strand
ggaaagagacuccagggaa

SEQ ID NO: 2513984 - RNA, 19 nt, Homo sapiens
  misc_RNA (1)...(19): siRNA sense strand
ucguauacacccugaggaa

SEQ ID NO: 2513985 - RNA, 19 nt, Homo sapiens
  misc_RNA (1)...(19): siRNA sense strand
gaacaaggagauaaagcga

SEQ ID NO: 2513986 - RNA, 19 nt, Homo sapiens
  misc_RNA (1)...(19): siRNA sense strand
ucuugacccuggugggcaa

SEQ ID NO: 2513987 - RNA, 19 nt, Homo sapiens
  misc_RNA (1)...(19): siRNA sense strand
cugucuaccuccagcccaa

SEQ ID NO: 2513988 - RNA, 19 nt, Homo sapiens
  misc_RNA (1)...(19): siRNA sense strand
ccugaggaacaaggagaua

SEQ ID NO: 2513989 - RNA, 19 nt, Homo sapiens
  misc_RNA (1)...(19): siRNA sense strand
ggagauaaagcgagcacuc

SEQ ID NO: 2513990 - RNA, 19 nt, Homo sapiens
  misc_RNA (1)...(19): siRNA sense strand
cugaggaacaaggagauaa

SEQ ID NO: 2513991 - RNA, 19 nt, Homo sapiens
  misc_RNA (1)...(19): siRNA sense strand
ccucugaagcugaagacca

SEQ ID NO: 2513992 - RNA, 19 nt, Homo sapiens
  misc_RNA (1)...(19): siRNA sense strand
gccaggagcuucaggccau

SEQ ID NO: 2513993 - RNA, 19 nt, Homo sapiens
  misc_RNA (1)...(19): siRNA sense strand
cuccagaggucaagcucau

SEQ ID NO: 2513994 - RNA, 19 nt, Homo sapiens
  misc_RNA (1)...(19): siRNA sense strand
cguccuugcugcagggaag

SEQ ID NO: 2513995 - RNA, 19 nt, Homo sapiens
  misc_RNA (1)...(19): siRNA sense strand
acugaggcuccgugggaaa

SEQ ID NO: 2513996 - RNA, 19 nt, Homo sapiens
  misc_RNA (1)...(19): siRNA sense strand
caacauaguuccugugggu

SEQ ID NO: 2513997 - RNA, 19 nt, Homo sapiens
  misc_RNA (1)...(19): siRNA sense strand
acauaguuccuguggguca

SEQ ID NO: 2513998 - RNA, 19 nt, Homo sapiens
  misc_RNA (1)...(19): siRNA sense strand
ugacuguaguuguggcuca

SEQ ID NO: 2513999 - RNA, 19 nt, Homo sapiens
  misc_RNA (1)...(19): siRNA sense strand
gugaaggacuugagggacu

SEQ ID NO: 2514000 - RNA, 19 nt, Homo sapiens
  misc_RNA (1)...(19): siRNA sense strand
gagccaggaugcaggccua

SEQ ID NO: 2514001 - RNA, 19 nt, Homo sapiens
  misc_RNA (1)...(19): siRNA sense strand
aggagaaucagcaggccaa

SEQ ID NO: 2514002 - RNA, 19 nt, Homo sapiens
  misc_RNA (1)...(19): siRNA sense strand
aggugaaggacuugaggga

SEQ ID NO: 2514003 - RNA, 19 nt, Homo sapiens
  misc_RNA (1)...(19): siRNA sense strand
gguucugccuggauggaca

SEQ ID NO: 2514004 - RNA, 19 nt, Homo sapiens
  misc_RNA (1)...(19): siRNA sense strand
ccgucuaccuggagagcgu

SEQ ID NO: 2514005 - RNA, 19 nt, Homo sapiens
  misc_RNA (1)...(19): siRNA sense strand
gucucaggaucaagaggaa

SEQ ID NO: 2514006 - RNA, 19 nt, Homo sapiens
  misc_RNA (1)...(19): siRNA sense strand
ggagagagugacccggcua

SEQ ID NO: 2514007 - RNA, 19 nt, Homo sapiens
  misc_RNA (1)...(19): siRNA sense strand
gggagaaagaagagcuggu

SEQ ID NO: 2514008 - RNA, 19 nt, Homo sapiens
  misc_RNA (1)...(19): siRNA sense strand
agaaaggacuccagcaccu

SEQ ID NO: 2514009 - RNA, 19 nt, Homo sapiens
  misc_RNA (1)...(19): siRNA sense strand
uguaagaucugcauggacu

SEQ ID NO: 2514010 - RNA, 19 nt, Homo sapiens
  misc_RNA (1)...(19): siRNA sense strand
ggcuauacaaggaucagaa

SEQ ID NO: 2514011 - RNA, 19 nt, Homo sapiens
  misc_RNA (1)...(19): siRNA sense strand
cuacagccuuucagcgaga

SEQ ID NO: 2514012 - RNA, 19 nt, Homo sapiens
  misc_RNA (1)...(19): siRNA sense strand
gugagaagugggagcugau

SEQ ID NO: 2514013 - RNA, 19 nt, Homo sapiens
  misc_RNA (1)...(19): siRNA sense strand
ccaacgguuucgagcuaca

SEQ ID NO: 2514014 - RNA, 19 nt, Homo sapiens
  misc_RNA (1)...(19): siRNA sense strand
uugcaaacacggccaggaa

SEQ ID NO: 2514015 - RNA, 19 nt, Homo sapiens
  misc_RNA (1)...(19): siRNA sense strand
cugcugaggaugagaccca

SEQ ID NO: 2514016 - RNA, 19 nt, Homo sapiens
  misc_RNA (1)...(19): siRNA sense strand
guucgagccaaguagggaa

SEQ ID NO: 2514017 - RNA, 19 nt, Homo sapiens
  misc_RNA (1)...(19): siRNA sense strand
gaaccaagcugcaaguccu

SEQ ID NO: 2514018 - RNA, 19 nt, Homo sapiens
  misc_RNA (1)...(19): siRNA sense strand
ccgaaaugugccgggagaa

SEQ ID NO: 2514019 - RNA, 19 nt, Homo sapiens
  misc_RNA (1)...(19): siRNA sense strand
gagcaguaccaucaggcuu

SEQ ID NO: 2514020 - RNA, 19 nt, Homo sapiens
  misc_RNA (1)...(19): siRNA sense strand
ccuuaaaauucaagagcua

SEQ ID NO: 2514021 - RNA, 19 nt, Homo sapiens
  misc_RNA (1)...(19): siRNA sense strand
gugcaaagguugacugcca

SEQ ID NO: 2514022 - RNA, 19 nt, Homo sapiens
  misc_RNA (1)...(19): siRNA sense strand
aggaagaagacaaggcaca

SEQ ID NO: 2514023 - RNA, 19 nt, Homo sapiens
  misc_RNA (1)...(19): siRNA sense strand
agccauuauugaagaggaa

SEQ ID NO: 2514024 - RNA, 19 nt, Homo sapiens
  misc_RNA (1)...(19): siRNA sense strand
uaaaagaggaagaagacaa

SEQ ID NO: 2514025 - RNA, 19 nt, Homo sapiens
  misc_RNA (1)...(19): siRNA sense strand
ggagaaguaccuuagggaa

SEQ ID NO: 2514026 - RNA, 19 nt, Homo sapiens
  misc_RNA (1)...(19): siRNA sense strand
cuguaaaagaggaagaaga

SEQ ID NO: 2514027 - RNA, 19 nt, Homo sapiens
  misc_RNA (1)...(19): siRNA sense strand
uagaagaccuggacagcca

SEQ ID NO: 2514028 - RNA, 19 nt, Homo sapiens
  misc_RNA (1)...(19): siRNA sense strand
agcaauuugugcaggaaaa

SEQ ID NO: 2514029 - RNA, 19 nt, Homo sapiens
  misc_RNA (1)...(19): siRNA sense strand
ggaugagaauaguugagga

SEQ ID NO: 2514030 - RNA, 19 nt, Homo sapiens
  misc_RNA (1)...(19): siRNA sense strand
acugaaugcaauacaggaa

SEQ ID NO: 2514031 - RNA, 19 nt, Homo sapiens
  misc_RNA (1)...(19): siRNA sense strand
aagcaauuugugcaggaaa

SEQ ID NO: 2514032 - RNA, 19 nt, Homo sapiens
  misc_RNA (1)...(19): siRNA sense strand
gcaacugagagcuguaaaa

SEQ ID NO: 2514033 - RNA, 19 nt, Homo sapiens
  misc_RNA (1)...(19): siRNA sense strand
agucauuaguccuauccaa

SEQ ID NO: 2514034 - RNA, 19 nt, Homo sapiens
  misc_RNA (1)...(19): siRNA sense strand
gaagaggaacugaagacca

SEQ ID NO: 2514035 - RNA, 19 nt, Homo sapiens
  misc_RNA (1)...(19): siRNA sense strand
agaucgacugaaugcaaua

SEQ ID NO: 2514036 - RNA, 19 nt, Homo sapiens
  misc_RNA (1)...(19): siRNA sense strand
ccauuauugaagaggaacu

SEQ ID NO: 2514037 - RNA, 19 nt, Homo sapiens
  misc_RNA (1)...(19): siRNA sense strand
acaagaaaugggaucaaca

SEQ ID NO: 2514038 - RNA, 19 nt, Homo sapiens
  misc_RNA (1)...(19): siRNA sense strand
ccucaaaauacaagaaaug

SEQ ID NO: 2514039 - RNA, 19 nt, Homo sapiens
  misc_RNA (1)...(19): siRNA sense strand
ugaugauggcucugaagaa

SEQ ID NO: 2514040 - RNA, 19 nt, Homo sapiens
  misc_RNA (1)...(19): siRNA sense strand
guuuaaagacuggcagcaa

SEQ ID NO: 2514041 - RNA, 19 nt, Homo sapiens
  misc_RNA (1)...(19): siRNA sense strand
aggaaguuguuuaaagacu

SEQ ID NO: 2514042 - RNA, 19 nt, Homo sapiens
  misc_RNA (1)...(19): siRNA sense strand
gugugcagucgcagggcua

SEQ ID NO: 2514043 - RNA, 19 nt, Homo sapiens
  misc_RNA (1)...(19): siRNA sense strand
cuacaaugaaugaguuucu

SEQ ID NO: 2514044 - RNA, 19 nt, Homo sapiens
  misc_RNA (1)...(19): siRNA sense strand
acaaauaugaagagugcaa

SEQ ID NO: 2514045 - RNA, 19 nt, Homo sapiens
  misc_RNA (1)...(19): siRNA sense strand
cagaaaccucaaagagaaa

SEQ ID NO: 2514046 - RNA, 19 nt, Homo sapiens
  misc_RNA (1)...(19): siRNA sense strand
gggaagaaaagaaggggaa

SEQ ID NO: 2514047 - RNA, 19 nt, Homo sapiens
  misc_RNA (1)...(19): siRNA sense strand
gggaagaaaagaaggggaa

SEQ ID NO: 2514048 - RNA, 19 nt, Homo sapiens
  misc_RNA (1)...(19): siRNA sense strand
ccacauaagaaaaccaaaa

SEQ ID NO: 2514049 - RNA, 19 nt, Homo sapiens
  misc_RNA (1)...(19): siRNA sense strand
aagaaaagaagaaggggaa

SEQ ID NO: 2514050 - RNA, 19 nt, Homo sapiens
  misc_RNA (1)...(19): siRNA sense strand
aagaagaaggggaagaaaa

SEQ ID NO: 2514051 - RNA, 19 nt, Homo sapiens
  misc_RNA (1)...(19): siRNA sense strand
ggaagaagaccaagaccca

SEQ ID NO: 2514052 - RNA, 19 nt, Homo sapiens
  misc_RNA (1)...(19): siRNA sense strand
ggaagaagaccaaggccca

SEQ ID NO: 2514053 - RNA, 19 nt, Homo sapiens
  misc_RNA (1)...(19): siRNA sense strand
augaugaggaagaggaaga

SEQ ID NO: 2514054 - RNA, 19 nt, Homo sapiens
  misc_RNA (1)...(19): siRNA sense strand
cauuugaggaagagcauau

SEQ ID NO: 2514055 - RNA, 19 nt, Homo sapiens
  misc_RNA (1)...(19): siRNA sense strand
gggaaggggaagaaaagaa

SEQ ID NO: 2514056 - RNA, 19 nt, Homo sapiens
  misc_RNA (1)...(19): siRNA sense strand
aguccugggaugaagguua

SEQ ID NO: 2514057 - RNA, 19 nt, Homo sapiens
  misc_RNA (1)...(19): siRNA sense strand
gggagaugcagaaggcuga

SEQ ID NO: 2514058 - RNA, 19 nt, Homo sapiens
  misc_RNA (1)...(19): siRNA sense strand
uuacaggacucacuggaua

SEQ ID NO: 2514059 - RNA, 19 nt, Homo sapiens
  misc_RNA (1)...(19): siRNA sense strand
ucacauuugaggaagacaa

SEQ ID NO: 2514060 - RNA, 19 nt, Homo sapiens
  misc_RNA (1)...(19): siRNA sense strand
aagaagaggaagaagacca

SEQ ID NO: 2514061 - RNA, 19 nt, Homo sapiens
  misc_RNA (1)...(19): siRNA sense strand
gaaguuacgggaagggaga

SEQ ID NO: 2514062 - RNA, 19 nt, Homo sapiens
  misc_RNA (1)...(19): siRNA sense strand
aguugagguggcugagaaa

SEQ ID NO: 2514063 - RNA, 19 nt, Homo sapiens
  misc_RNA (1)...(19): siRNA sense strand
ggaugaagguuauucgacu

SEQ ID NO: 2514064 - RNA, 19 nt, Homo sapiens
  misc_RNA (1)...(19): siRNA sense strand
cccaguuggcagagaagaa

SEQ ID NO: 2514065 - RNA, 19 nt, Homo sapiens
  misc_RNA (1)...(19): siRNA sense strand
agucugaagaggaggaagu

SEQ ID NO: 2514066 - RNA, 19 nt, Homo sapiens
  misc_RNA (1)...(19): siRNA sense strand
accaagaagaggaagaaga

SEQ ID NO: 2514067 - RNA, 19 nt, Homo sapiens
  misc_RNA (1)...(19): siRNA sense strand
ugggagaaauugaaaagaa

SEQ ID NO: 2514068 - RNA, 19 nt, Homo sapiens
  misc_RNA (1)...(19): siRNA sense strand
aggaagagcauaucagcuu

SEQ ID NO: 2514069 - RNA, 19 nt, Homo sapiens
  misc_RNA (1)...(19): siRNA sense strand
aggaccaagaagaggaaga

SEQ ID NO: 2514070 - RNA, 19 nt, Homo sapiens
  misc_RNA (1)...(19): siRNA sense strand
cauuagaggaacagcaagu

SEQ ID NO: 2514071 - RNA, 19 nt, Homo sapiens
  misc_RNA (1)...(19): siRNA sense strand
aaaagaaggggaaggggaa

SEQ ID NO: 2514072 - RNA, 19 nt, Homo sapiens
  misc_RNA (1)...(19): siRNA sense strand
gaaaagaagaaggggaaga

SEQ ID NO: 2514073 - RNA, 19 nt, Homo sapiens
  misc_RNA (1)...(19): siRNA sense strand
uggcugagaaagugcagaa

SEQ ID NO: 2514074 - RNA, 19 nt, Homo sapiens
  misc_RNA (1)...(19): siRNA sense strand
agaaguggaagaagaccaa

SEQ ID NO: 2514075 - RNA, 19 nt, Homo sapiens
  misc_RNA (1)...(19): siRNA sense strand
ggauagauguuauucgacu

SEQ ID NO: 2514076 - RNA, 19 nt, Homo sapiens
  misc_RNA (1)...(19): siRNA sense strand
acucauuggaggaacagua

SEQ ID NO: 2514077 - RNA, 19 nt, Homo sapiens
  misc_RNA (1)...(19): siRNA sense strand
ugaugaugaggaagaggaa

SEQ ID NO: 2514078 - RNA, 19 nt, Homo sapiens
  misc_RNA (1)...(19): siRNA sense strand
gaagaaaagaagaagggga

SEQ ID NO: 2514079 - RNA, 19 nt, Homo sapiens
  misc_RNA (1)...(19): siRNA sense strand
guacacauuauuccagaaa

SEQ ID NO: 2514080 - RNA, 19 nt, Homo sapiens
  misc_RNA (1)...(19): siRNA sense strand
uggccaaccgacagaagaa

SEQ ID NO: 2514081 - RNA, 19 nt, Homo sapiens
  misc_RNA (1)...(19): siRNA sense strand
gcaacaggucccaggcuca

SEQ ID NO: 2514082 - RNA, 19 nt, Homo sapiens
  misc_RNA (1)...(19): siRNA sense strand
cagagaagaaacagcaguu

SEQ ID NO: 2514083 - RNA, 19 nt, Homo sapiens
  misc_RNA (1)...(19): siRNA sense strand
gaaaagaaggggaagggga

SEQ ID NO: 2514084 - RNA, 19 nt, Homo sapiens
  misc_RNA (1)...(19): siRNA sense strand
aggagaagcuugcagagca

SEQ ID NO: 2514085 - RNA, 19 nt, Homo sapiens
  misc_RNA (1)...(19): siRNA sense strand
augaggaagaggaagaaaa

SEQ ID NO: 2514086 - RNA, 19 nt, Homo sapiens
  misc_RNA (1)...(19): siRNA sense strand
ugcagaaggcugaagaaaa

SEQ ID NO: 2514087 - RNA, 19 nt, Homo sapiens
  misc_RNA (1)...(19): siRNA sense strand
uaguagagccugaagucuu

SEQ ID NO: 2514088 - RNA, 19 nt, Homo sapiens
  misc_RNA (1)...(19): siRNA sense strand
gaagaaaagaaggggaaga

SEQ ID NO: 2514089 - RNA, 19 nt, Homo sapiens
  misc_RNA (1)...(19): siRNA sense strand
gaagaaaagaaggggaaga

SEQ ID NO: 2514090 - RNA, 19 nt, Homo sapiens
  misc_RNA (1)...(19): siRNA sense strand
uggaaguggaagagccuga

SEQ ID NO: 2514091 - RNA, 19 nt, Homo sapiens
  misc_RNA (1)...(19): siRNA sense strand
aguaccaagaaguggaaga

SEQ ID NO: 2514092 - RNA, 19 nt, Homo sapiens
  misc_RNA (1)...(19): siRNA sense strand
guuccagaugggagucaua

SEQ ID NO: 2514093 - RNA, 19 nt, Homo sapiens
  misc_RNA (1)...(19): siRNA sense strand
gggagcugcuggagguagu

SEQ ID NO: 2514094 - RNA, 19 nt, Homo sapiens
  misc_RNA (1)...(19): siRNA sense strand
agggagaaguuacgggaag

SEQ ID NO: 2514095 - RNA, 19 nt, Homo sapiens
  misc_RNA (1)...(19): siRNA sense strand
augcagaaggcugaagaaa

SEQ ID NO: 2514096 - RNA, 19 nt, Homo sapiens
  misc_RNA (1)...(19): siRNA sense strand
gaaagaagcagcugugcca

SEQ ID NO: 2514097 - RNA, 19 nt, Homo sapiens
  misc_RNA (1)...(19): siRNA sense strand
ccuaagaauaugccugaca

SEQ ID NO: 2514098 - RNA, 19 nt, Homo sapiens
  misc_RNA (1)...(19): siRNA sense strand
ccugaaaggagguggagga

SEQ ID NO: 2514099 - RNA, 19 nt, Homo sapiens
  misc_RNA (1)...(19): siRNA sense strand
aggaagggacccagggaga

SEQ ID NO: 2514100 - RNA, 19 nt, Homo sapiens
  misc_RNA (1)...(19): siRNA sense strand
gaaaggagguggaggaugg

SEQ ID NO: 2514101 - RNA, 19 nt, Homo sapiens
  misc_RNA (1)...(19): siRNA sense strand
ccaaagaggucaaggcacg

SEQ ID NO: 2514102 - RNA, 19 nt, Homo sapiens
  misc_RNA (1)...(19): siRNA sense strand
cgacaagacuggacagggu

SEQ ID NO: 2514103 - RNA, 19 nt, Homo sapiens
  misc_RNA (1)...(19): siRNA sense strand
cggauuaugcagaagucaa

SEQ ID NO: 2514104 - RNA, 19 nt, Homo sapiens
  misc_RNA (1)...(19): siRNA sense strand
ggguucaaguggagcacga

SEQ ID NO: 2514105 - RNA, 19 nt, Homo sapiens
  misc_RNA (1)...(19): siRNA sense strand
gggaacugcuccuugguga

SEQ ID NO: 2514106 - RNA, 19 nt, Homo sapiens
  misc_RNA (1)...(19): siRNA sense strand
gaaucaaagaagaaccaga

SEQ ID NO: 2514107 - RNA, 19 nt, Homo sapiens
  misc_RNA (1)...(19): siRNA sense strand
aaguggagcacgaaggaga

SEQ ID NO: 2514108 - RNA, 19 nt, Homo sapiens
  misc_RNA (1)...(19): siRNA sense strand
ucaaagaagaaccagaaaa

SEQ ID NO: 2514109 - RNA, 19 nt, Homo sapiens
  misc_RNA (1)...(19): siRNA sense strand
augcagaagucaaguucca

SEQ ID NO: 2514110 - RNA, 19 nt, Homo sapiens
  misc_RNA (1)...(19): siRNA sense strand
cagaaucccaggagagcca

SEQ ID NO: 2514111 - RNA, 19 nt, Homo sapiens
  misc_RNA (1)...(19): siRNA sense strand
acggagcguuucugggaau

SEQ ID NO: 2514112 - RNA, 19 nt, Homo sapiens
  misc_RNA (1)...(19): siRNA sense strand
ggacucaucucaacggcau

SEQ ID NO: 2514113 - RNA, 19 nt, Homo sapiens
  misc_RNA (1)...(19): siRNA sense strand
ccccagaaucaaagaagaa

SEQ ID NO: 2514114 - RNA, 19 nt, Homo sapiens
  misc_RNA (1)...(19): siRNA sense strand
ccagauaagaagggacuca

SEQ ID NO: 2514115 - RNA, 19 nt, Homo sapiens
  misc_RNA (1)...(19): siRNA sense strand
cagaaucaaagaagaacca

SEQ ID NO: 2514116 - RNA, 19 nt, Homo sapiens
  misc_RNA (1)...(19): siRNA sense strand
gguggagagaggaagcuau

SEQ ID NO: 2514117 - RNA, 19 nt, Homo sapiens
  misc_RNA (1)...(19): siRNA sense strand
ccacaaaccaccagagucg

SEQ ID NO: 2514118 - RNA, 19 nt, Homo sapiens
  misc_RNA (1)...(19): siRNA sense strand
aggcuauggaugggagauu

SEQ ID NO: 2514119 - RNA, 19 nt, Homo sapiens
  misc_RNA (1)...(19): siRNA sense strand
ucacaaaguuacuggguuc

SEQ ID NO: 2514120 - RNA, 19 nt, Homo sapiens
  misc_RNA (1)...(19): siRNA sense strand
gggagcaacucucgggaca

SEQ ID NO: 2514121 - RNA, 19 nt, Homo sapiens
  misc_RNA (1)...(19): siRNA sense strand
cggcagugguggagcuucu

SEQ ID NO: 2514122 - RNA, 19 nt, Homo sapiens
  misc_RNA (1)...(19): siRNA sense strand
cgguaauucuuaagagcgu

SEQ ID NO: 2514123 - RNA, 19 nt, Homo sapiens
  misc_RNA (1)...(19): siRNA sense strand
agccaauagaggaaaguuu

SEQ ID NO: 2514124 - RNA, 19 nt, Homo sapiens
  misc_RNA (1)...(19): siRNA sense strand
ugguggagcuucuaggaga

SEQ ID NO: 2514125 - RNA, 19 nt, Homo sapiens
  misc_RNA (1)...(19): siRNA sense strand
uugugaagcucaaggugau

SEQ ID NO: 2514126 - RNA, 19 nt, Homo sapiens
  misc_RNA (1)...(19): siRNA sense strand
aaaggaaaucguuggcgua

SEQ ID NO: 2514127 - RNA, 19 nt, Homo sapiens
  misc_RNA (1)...(19): siRNA sense strand
gcaaagaggaggucgacag

SEQ ID NO: 2514128 - RNA, 19 nt, Homo sapiens
  misc_RNA (1)...(19): siRNA sense strand
aaucguuggcguaguaaau

SEQ ID NO: 2514129 - RNA, 19 nt, Homo sapiens
  misc_RNA (1)...(19): siRNA sense strand
caaaggaaaucguuggcgu

SEQ ID NO: 2514130 - RNA, 19 nt, Homo sapiens
  misc_RNA (1)...(19): siRNA sense strand
gcguaguaaauguaagacu

SEQ ID NO: 2514131 - RNA, 19 nt, Homo sapiens
  misc_RNA (1)...(19): siRNA sense strand
ugagcaaagaggaggucga

SEQ ID NO: 2514132 - RNA, 19 nt, Homo sapiens
  misc_RNA (1)...(19): siRNA sense strand
uggcguaguaaauguaaga

SEQ ID NO: 2514133 - RNA, 19 nt, Homo sapiens
  misc_RNA (1)...(19): siRNA sense strand
ggacagagaagcaggagga

SEQ ID NO: 2514134 - RNA, 19 nt, Homo sapiens
  misc_RNA (1)...(19): siRNA sense strand
cagagaagcaggaggagga

SEQ ID NO: 2514135 - RNA, 19 nt, Homo sapiens
  misc_RNA (1)...(19): siRNA sense strand
gcagugagguccagagcga

SEQ ID NO: 2514136 - RNA, 19 nt, Homo sapiens
  misc_RNA (1)...(19): siRNA sense strand
uugagaagcuucaggccaa

SEQ ID NO: 2514137 - RNA, 19 nt, Homo sapiens
  misc_RNA (1)...(19): siRNA sense strand
caauuuaaccuuugagcca

SEQ ID NO: 2514138 - RNA, 19 nt, Homo sapiens
  misc_RNA (1)...(19): siRNA sense strand
aaacaaagaagcuggagga

SEQ ID NO: 2514139 - RNA, 19 nt, Homo sapiens
  misc_RNA (1)...(19): siRNA sense strand
cuccuaaauucaaggucaa

SEQ ID NO: 2514140 - RNA, 19 nt, Homo sapiens
  misc_RNA (1)...(19): siRNA sense strand
ccuccuaaauucaagguca

SEQ ID NO: 2514141 - RNA, 19 nt, Homo sapiens
  misc_RNA (1)...(19): siRNA sense strand
cgggagagggagugagaac

SEQ ID NO: 2514142 - RNA, 19 nt, Homo sapiens
  misc_RNA (1)...(19): siRNA sense strand
aggaaaagccagcuggaga

SEQ ID NO: 2514143 - RNA, 19 nt, Homo sapiens
  misc_RNA (1)...(19): siRNA sense strand
aggaagcagagauggaaaa

SEQ ID NO: 2514144 - RNA, 19 nt, Homo sapiens
  misc_RNA (1)...(19): siRNA sense strand
ggaaaaggcuacagaggug

SEQ ID NO: 2514145 - RNA, 19 nt, Homo sapiens
  misc_RNA (1)...(19): siRNA sense strand
caaagaagcuggaggaggg

SEQ ID NO: 2514146 - RNA, 19 nt, Homo sapiens
  misc_RNA (1)...(19): siRNA sense strand
agaacggugcuaaggaaga

SEQ ID NO: 2514147 - RNA, 19 nt, Homo sapiens
  misc_RNA (1)...(19): siRNA sense strand
ggaaagaccggcagagacc

SEQ ID NO: 2514148 - RNA, 19 nt, Homo sapiens
  misc_RNA (1)...(19): siRNA sense strand
gcagaaaauagguguggga

SEQ ID NO: 2514149 - RNA, 19 nt, Homo sapiens
  misc_RNA (1)...(19): siRNA sense strand
acaugacagccaagaaaca

SEQ ID NO: 2514150 - RNA, 19 nt, Homo sapiens
  misc_RNA (1)...(19): siRNA sense strand
aggagacaccagccaguaa

SEQ ID NO: 2514151 - RNA, 19 nt, Homo sapiens
  misc_RNA (1)...(19): siRNA sense strand
gggccacagaggaagccaa

SEQ ID NO: 2514152 - RNA, 19 nt, Homo sapiens
  misc_RNA (1)...(19): siRNA sense strand
gggccagaauggugaggag

SEQ ID NO: 2514153 - RNA, 19 nt, Homo sapiens
  misc_RNA (1)...(19): siRNA sense strand
ugucaauagcaaagagauu

SEQ ID NO: 2514154 - RNA, 19 nt, Homo sapiens
  misc_RNA (1)...(19): siRNA sense strand
aagaagucagcgagugaaa

SEQ ID NO: 2514155 - RNA, 19 nt, Homo sapiens
  misc_RNA (1)...(19): siRNA sense strand
agaucuaagcugaaaccaa

SEQ ID NO: 2514156 - RNA, 19 nt, Homo sapiens
  misc_RNA (1)...(19): siRNA sense strand
acaaugauuucaagagcga

SEQ ID NO: 2514157 - RNA, 19 nt, Homo sapiens
  misc_RNA (1)...(19): siRNA sense strand
cguuacugauuaugaccaa

SEQ ID NO: 2514158 - RNA, 19 nt, Homo sapiens
  misc_RNA (1)...(19): siRNA sense strand
aguuaagaucuaagcugaa

SEQ ID NO: 2514159 - RNA, 19 nt, Homo sapiens
  misc_RNA (1)...(19): siRNA sense strand
aaguuaagaucuaagcuga

SEQ ID NO: 2514160 - RNA, 19 nt, Homo sapiens
  misc_RNA (1)...(19): siRNA sense strand
augagagagauaugaggaa

SEQ ID NO: 2514161 - RNA, 19 nt, Homo sapiens
  misc_RNA (1)...(19): siRNA sense strand
cuuugaggacacagaagaa

SEQ ID NO: 2514162 - RNA, 19 nt, Homo sapiens
  misc_RNA (1)...(19): siRNA sense strand
gagagagauaugaggaaag

SEQ ID NO: 2514163 - RNA, 19 nt, Homo sapiens
  misc_RNA (1)...(19): siRNA sense strand
cuuugauacugucggauga

SEQ ID NO: 2514164 - RNA, 19 nt, Homo sapiens
  misc_RNA (1)...(19): siRNA sense strand
caagacaaggagagugcau

SEQ ID NO: 2514165 - RNA, 19 nt, Homo sapiens
  misc_RNA (1)...(19): siRNA sense strand
ggucauggaaagucaucau

SEQ ID NO: 2514166 - RNA, 19 nt, Homo sapiens
  misc_RNA (1)...(19): siRNA sense strand
ccgcaguggauuaucaaaa

SEQ ID NO: 2514167 - RNA, 19 nt, Homo sapiens
  misc_RNA (1)...(19): siRNA sense strand
acacaguaugaccaggaua

SEQ ID NO: 2514168 - RNA, 19 nt, Homo sapiens
  misc_RNA (1)...(19): siRNA sense strand
cuccaguccaugagagaga

SEQ ID NO: 2514169 - RNA, 19 nt, Homo sapiens
  misc_RNA (1)...(19): siRNA sense strand
aguuacugcucaaggucau

SEQ ID NO: 2514170 - RNA, 19 nt, Homo sapiens
  misc_RNA (1)...(19): siRNA sense strand
cugcucaaggucauggaaa

SEQ ID NO: 2514171 - RNA, 19 nt, Homo sapiens
  misc_RNA (1)...(19): siRNA sense strand
auuucaagagcgaagggaa

SEQ ID NO: 2514172 - RNA, 19 nt, Homo sapiens
  misc_RNA (1)...(19): siRNA sense strand
agaaacagguugaguggga

SEQ ID NO: 2514173 - RNA, 19 nt, Homo sapiens
  misc_RNA (1)...(19): siRNA sense strand
gagaaugccuugaagcuga

SEQ ID NO: 2514174 - RNA, 19 nt, Homo sapiens
  misc_RNA (1)...(19): siRNA sense strand
ccauuugucuaguggaaaa

SEQ ID NO: 2514175 - RNA, 19 nt, Homo sapiens
  misc_RNA (1)...(19): siRNA sense strand
agaagaagcuuguggacac

SEQ ID NO: 2514176 - RNA, 19 nt, Homo sapiens
  misc_RNA (1)...(19): siRNA sense strand
gcacuaugugacugagcua

SEQ ID NO: 2514177 - RNA, 19 nt, Homo sapiens
  misc_RNA (1)...(19): siRNA sense strand
cagaaggagcagcagcaaa

SEQ ID NO: 2514178 - RNA, 19 nt, Homo sapiens
  misc_RNA (1)...(19): siRNA sense strand
agaagaaaugcuuaaggaa

SEQ ID NO: 2514179 - RNA, 19 nt, Homo sapiens
  misc_RNA (1)...(19): siRNA sense strand
acgaagugccagaagaaaa

SEQ ID NO: 2514180 - RNA, 19 nt, Homo sapiens
  misc_RNA (1)...(19): siRNA sense strand
gggcuauaccgcacaggaa

SEQ ID NO: 2514181 - RNA, 19 nt, Homo sapiens
  misc_RNA (1)...(19): siRNA sense strand
gcgauguagaaaagaguaa

SEQ ID NO: 2514182 - RNA, 19 nt, Homo sapiens
  misc_RNA (1)...(19): siRNA sense strand
ccaaauauugccaggcuga

SEQ ID NO: 2514183 - RNA, 19 nt, Homo sapiens
  misc_RNA (1)...(19): siRNA sense strand
agcaaaugauggaggcuca

SEQ ID NO: 2514184 - RNA, 19 nt, Homo sapiens
  misc_RNA (1)...(19): siRNA sense strand
accaugaauuccagaagaa

SEQ ID NO: 2514185 - RNA, 19 nt, Homo sapiens
  misc_RNA (1)...(19): siRNA sense strand
uguggacaccauagagaaa

SEQ ID NO: 2514186 - RNA, 19 nt, Homo sapiens
  misc_RNA (1)...(19): siRNA sense strand
gcaaagaccaagacccuga

SEQ ID NO: 2514187 - RNA, 19 nt, Homo sapiens
  misc_RNA (1)...(19): siRNA sense strand
uucaaaggcauuagagauu

SEQ ID NO: 2514188 - RNA, 19 nt, Homo sapiens
  misc_RNA (1)...(19): siRNA sense strand
aagaugaguaccuggagaa

SEQ ID NO: 2514189 - RNA, 19 nt, Homo sapiens
  misc_RNA (1)...(19): siRNA sense strand
ccucacugcuggagagaag

SEQ ID NO: 2514190 - RNA, 19 nt, Homo sapiens
  misc_RNA (1)...(19): siRNA sense strand
gaagaaaugcuuaaggaag

SEQ ID NO: 2514191 - RNA, 19 nt, Homo sapiens
  misc_RNA (1)...(19): siRNA sense strand
auucaaaggcauuagagau

SEQ ID NO: 2514192 - RNA, 19 nt, Homo sapiens
  misc_RNA (1)...(19): siRNA sense strand
agucugaaacuaagggcau

SEQ ID NO: 2514193 - RNA, 19 nt, Homo sapiens
  misc_RNA (1)...(19): siRNA sense strand
gaagaugaguaccuggaga

SEQ ID NO: 2514194 - RNA, 19 nt, Homo sapiens
  misc_RNA (1)...(19): siRNA sense strand
ugaagguacaagaagaaau

SEQ ID NO: 2514195 - RNA, 19 nt, Homo sapiens
  misc_RNA (1)...(19): siRNA sense strand
ggcuauaccgcacaggaaa

SEQ ID NO: 2514196 - RNA, 19 nt, Homo sapiens
  misc_RNA (1)...(19): siRNA sense strand
cggugcagucugaaacuaa

SEQ ID NO: 2514197 - RNA, 19 nt, Homo sapiens
  misc_RNA (1)...(19): siRNA sense strand
gagcaguuaaauaaagaga

SEQ ID NO: 2514198 - RNA, 19 nt, Homo sapiens
  misc_RNA (1)...(19): siRNA sense strand
cagugaauucaaaggcauu

SEQ ID NO: 2514199 - RNA, 19 nt, Homo sapiens
  misc_RNA (1)...(19): siRNA sense strand
aggaagagcagcugacagu

SEQ ID NO: 2514200 - RNA, 19 nt, Homo sapiens
  misc_RNA (1)...(19): siRNA sense strand
agaaaaggaguuaaggcaa

SEQ ID NO: 2514201 - RNA, 19 nt, Homo sapiens
  misc_RNA (1)...(19): siRNA sense strand
aggaagcagcugagaagga

SEQ ID NO: 2514202 - RNA, 19 nt, Homo sapiens
  misc_RNA (1)...(19): siRNA sense strand
aagaaaaucuggaaaggca

SEQ ID NO: 2514203 - RNA, 19 nt, Homo sapiens
  misc_RNA (1)...(19): siRNA sense strand
aagaaaagaaacagguuga

SEQ ID NO: 2514204 - RNA, 19 nt, Homo sapiens
  misc_RNA (1)...(19): siRNA sense strand
agcugaagguacaagaaga

SEQ ID NO: 2514205 - RNA, 19 nt, Homo sapiens
  misc_RNA (1)...(19): siRNA sense strand
gcagagcuaaucagggcaa

SEQ ID NO: 2514206 - RNA, 19 nt, Homo sapiens
  misc_RNA (1)...(19): siRNA sense strand
agagaguguaucaggcauu

SEQ ID NO: 2514207 - RNA, 19 nt, Homo sapiens
  misc_RNA (1)...(19): siRNA sense strand
agguugagugggacuauaa

SEQ ID NO: 2514208 - RNA, 19 nt, Homo sapiens
  misc_RNA (1)...(19): siRNA sense strand
gcuauaccgcacaggaaaa

SEQ ID NO: 2514209 - RNA, 19 nt, Homo sapiens
  misc_RNA (1)...(19): siRNA sense strand
gcuuaaggaagaauuucaa

SEQ ID NO: 2514210 - RNA, 19 nt, Homo sapiens
  misc_RNA (1)...(19): siRNA sense strand
ucacagaagaugaguaccu

SEQ ID NO: 2514211 - RNA, 19 nt, Homo sapiens
  misc_RNA (1)...(19): siRNA sense strand
cgaagugccagaagaaaau

SEQ ID NO: 2514212 - RNA, 19 nt, Homo sapiens
  misc_RNA (1)...(19): siRNA sense strand
acagugaauucaaaggcau

SEQ ID NO: 2514213 - RNA, 19 nt, Homo sapiens
  misc_RNA (1)...(19): siRNA sense strand
cagaagaagcuuguggaca

SEQ ID NO: 2514214 - RNA, 19 nt, Homo sapiens
  misc_RNA (1)...(19): siRNA sense strand
cagaaaaggaguuaaggca

SEQ ID NO: 2514215 - RNA, 19 nt, Homo sapiens
  misc_RNA (1)...(19): siRNA sense strand
gcugcagaaugaagaggca

SEQ ID NO: 2514216 - RNA, 19 nt, Homo sapiens
  misc_RNA (1)...(19): siRNA sense strand
caugaaucgucuugcagga

SEQ ID NO: 2514217 - RNA, 19 nt, Homo sapiens
  misc_RNA (1)...(19): siRNA sense strand
ugacuuauguagaugccau

SEQ ID NO: 2514218 - RNA, 19 nt, Homo sapiens
  misc_RNA (1)...(19): siRNA sense strand
aaagaguaacccuaagaau

SEQ ID NO: 2514219 - RNA, 19 nt, Homo sapiens
  misc_RNA (1)...(19): siRNA sense strand
ccuacaaaugacaagcaau

SEQ ID NO: 2514220 - RNA, 19 nt, Homo sapiens
  misc_RNA (1)...(19): siRNA sense strand
ccaugaaggaagcagcuga

SEQ ID NO: 2514221 - RNA, 19 nt, Homo sapiens
  misc_RNA (1)...(19): siRNA sense strand
acaccagguuauccagaau

SEQ ID NO: 2514222 - RNA, 19 nt, Homo sapiens
  misc_RNA (1)...(19): siRNA sense strand
caacauaaugauugucacu

SEQ ID NO: 2514223 - RNA, 19 nt, Homo sapiens
  misc_RNA (1)...(19): siRNA sense strand
ggaaaggaauacaggcuga

SEQ ID NO: 2514224 - RNA, 19 nt, Homo sapiens
  misc_RNA (1)...(19): siRNA sense strand
ugaaaaggcugaagcgcaa

SEQ ID NO: 2514225 - RNA, 19 nt, Homo sapiens
  misc_RNA (1)...(19): siRNA sense strand
gagaauucccuaaggccaa

SEQ ID NO: 2514226 - RNA, 19 nt, Homo sapiens
  misc_RNA (1)...(19): siRNA sense strand
gagcaaaugaugcaggaga

SEQ ID NO: 2514227 - RNA, 19 nt, Homo sapiens
  misc_RNA (1)...(19): siRNA sense strand
acaaauggagauagccaaa

SEQ ID NO: 2514228 - RNA, 19 nt, Homo sapiens
  misc_RNA (1)...(19): siRNA sense strand
ugaacaagcuggcugggaa

SEQ ID NO: 2514229 - RNA, 19 nt, Homo sapiens
  misc_RNA (1)...(19): siRNA sense strand
acagaagaacugaaggcaa

SEQ ID NO: 2514230 - RNA, 19 nt, Homo sapiens
  misc_RNA (1)...(19): siRNA sense strand
aggaauacaggcugaagaa

SEQ ID NO: 2514231 - RNA, 19 nt, Homo sapiens
  misc_RNA (1)...(19): siRNA sense strand
uguacaauacugugaacaa

SEQ ID NO: 2514232 - RNA, 19 nt, Homo sapiens
  misc_RNA (1)...(19): siRNA sense strand
uagaagaagcagugaagca

SEQ ID NO: 2514233 - RNA, 19 nt, Homo sapiens
  misc_RNA (1)...(19): siRNA sense strand
agugaaagcagaagcugaa

SEQ ID NO: 2514234 - RNA, 19 nt, Homo sapiens
  misc_RNA (1)...(19): siRNA sense strand
caggaacaagugagacaaa

SEQ ID NO: 2514235 - RNA, 19 nt, Homo sapiens
  misc_RNA (1)...(19): siRNA sense strand
ccuggaaauagaugggcaa

SEQ ID NO: 2514236 - RNA, 19 nt, Homo sapiens
  misc_RNA (1)...(19): siRNA sense strand
aagcagugaagcagggaau

SEQ ID NO: 2514237 - RNA, 19 nt, Homo sapiens
  misc_RNA (1)...(19): siRNA sense strand
uggcagagcaacagaaaau

SEQ ID NO: 2514238 - RNA, 19 nt, Homo sapiens
  misc_RNA (1)...(19): siRNA sense strand
ggucaauggaucucgucua

SEQ ID NO: 2514239 - RNA, 19 nt, Homo sapiens
  misc_RNA (1)...(19): siRNA sense strand
augcaauauuacagacuga

SEQ ID NO: 2514240 - RNA, 19 nt, Homo sapiens
  misc_RNA (1)...(19): siRNA sense strand
ccucuaucgcacuggcaaa

SEQ ID NO: 2514241 - RNA, 19 nt, Homo sapiens
  misc_RNA (1)...(19): siRNA sense strand
augaugagcuagagccuga

SEQ ID NO: 2514242 - RNA, 19 nt, Homo sapiens
  misc_RNA (1)...(19): siRNA sense strand
ccagcaaaugggccagaaa

SEQ ID NO: 2514243 - RNA, 19 nt, Homo sapiens
  misc_RNA (1)...(19): siRNA sense strand
aggcacaagugaaagcaga

SEQ ID NO: 2514244 - RNA, 19 nt, Homo sapiens
  misc_RNA (1)...(19): siRNA sense strand
agacaaauggagauagcca

SEQ ID NO: 2514245 - RNA, 19 nt, Homo sapiens
  misc_RNA (1)...(19): siRNA sense strand
gcacaacauuccaagcuca

SEQ ID NO: 2514246 - RNA, 19 nt, Homo sapiens
  misc_RNA (1)...(19): siRNA sense strand
cuaucgaccuacugcacaa

SEQ ID NO: 2514247 - RNA, 19 nt, Homo sapiens
  misc_RNA (1)...(19): siRNA sense strand
gugcaacaagugacagaau

SEQ ID NO: 2514248 - RNA, 19 nt, Homo sapiens
  misc_RNA (1)...(19): siRNA sense strand
ggauauggugugugccuca

SEQ ID NO: 2514249 - RNA, 19 nt, Homo sapiens
  misc_RNA (1)...(19): siRNA sense strand
cugcacaggaccagugaga

SEQ ID NO: 2514250 - RNA, 19 nt, Homo sapiens
  misc_RNA (1)...(19): siRNA sense strand
ggagaauucccuaaggcca

SEQ ID NO: 2514251 - RNA, 19 nt, Homo sapiens
  misc_RNA (1)...(19): siRNA sense strand
aggcagaacgagcaaauga

SEQ ID NO: 2514252 - RNA, 19 nt, Homo sapiens
  misc_RNA (1)...(19): siRNA sense strand
gugcagcugcccauggaaa

SEQ ID NO: 2514253 - RNA, 19 nt, Homo sapiens
  misc_RNA (1)...(19): siRNA sense strand
aaaugaugcaggagaggga

SEQ ID NO: 2514254 - RNA, 19 nt, Homo sapiens
  misc_RNA (1)...(19): siRNA sense strand
aggcugacaacaagaauga

SEQ ID NO: 2514255 - RNA, 19 nt, Homo sapiens
  misc_RNA (1)...(19): siRNA sense strand
uggccuuggcucagagaga

SEQ ID NO: 2514256 - RNA, 19 nt, Homo sapiens
  misc_RNA (1)...(19): siRNA sense strand
ggcacaagugaaagcagaa

SEQ ID NO: 2514257 - RNA, 19 nt, Homo sapiens
  misc_RNA (1)...(19): siRNA sense strand
ccaucaggaacaagugaga

SEQ ID NO: 2514258 - RNA, 19 nt, Homo sapiens
  misc_RNA (1)...(19): siRNA sense strand
agugagacaaauggagaua

SEQ ID NO: 2514259 - RNA, 19 nt, Homo sapiens
  misc_RNA (1)...(19): siRNA sense strand
agguagugaucaaagaguu

SEQ ID NO: 2514260 - RNA, 19 nt, Homo sapiens
  misc_RNA (1)...(19): siRNA sense strand
uauuuaaaguccaaggagu

SEQ ID NO: 2514261 - RNA, 19 nt, Homo sapiens
  misc_RNA (1)...(19): siRNA sense strand
cugggaagaacaagggcuu

SEQ ID NO: 2514262 - RNA, 19 nt, Homo sapiens
  misc_RNA (1)...(19): siRNA sense strand
gagauguagagaaggcuga

SEQ ID NO: 2514263 - RNA, 19 nt, Homo sapiens
  misc_RNA (1)...(19): siRNA sense strand
aggcaaaguacuaucggga

SEQ ID NO: 2514264 - RNA, 19 nt, Homo sapiens
  misc_RNA (1)...(19): siRNA sense strand
gcaaaguacuaucgggagc

SEQ ID NO: 2514265 - RNA, 19 nt, Homo sapiens
  misc_RNA (1)...(19): siRNA sense strand
aagugaaagcagaagcuga

SEQ ID NO: 2514266 - RNA, 19 nt, Homo sapiens
  misc_RNA (1)...(19): siRNA sense strand
agaaaaugcaggaacaaca

SEQ ID NO: 2514267 - RNA, 19 nt, Homo sapiens
  misc_RNA (1)...(19): siRNA sense strand
agccugaauuugugcaaca

SEQ ID NO: 2514268 - RNA, 19 nt, Homo sapiens
  misc_RNA (1)...(19): siRNA sense strand
gcacaggaccagugagagg

SEQ ID NO: 2514269 - RNA, 19 nt, Homo sapiens
  misc_RNA (1)...(19): siRNA sense strand
aaaagaagaaagaggcaca

SEQ ID NO: 2514270 - RNA, 19 nt, Homo sapiens
  misc_RNA (1)...(19): siRNA sense strand
caagugagacaaauggaga

SEQ ID NO: 2514271 - RNA, 19 nt, Homo sapiens
  misc_RNA (1)...(19): siRNA sense strand
gacaaauggagauagccaa

SEQ ID NO: 2514272 - RNA, 19 nt, Homo sapiens
  misc_RNA (1)...(19): siRNA sense strand
gcaucauggucaauggauc

SEQ ID NO: 2514273 - RNA, 19 nt, Homo sapiens
  misc_RNA (1)...(19): siRNA sense strand
caucauggucaauggaucu

SEQ ID NO: 2514274 - RNA, 19 nt, Homo sapiens
  misc_RNA (1)...(19): siRNA sense strand
ccagaaagaauuggagacu

SEQ ID NO: 2514275 - RNA, 19 nt, Homo sapiens
  misc_RNA (1)...(19): siRNA sense strand
agguuaaucaggaagcuuu

SEQ ID NO: 2514276 - RNA, 19 nt, Homo sapiens
  misc_RNA (1)...(19): siRNA sense strand
auguagagaaggcugacaa

SEQ ID NO: 2514277 - RNA, 19 nt, Homo sapiens
  misc_RNA (1)...(19): siRNA sense strand
agucucacaccaagggaau

SEQ ID NO: 2514278 - RNA, 19 nt, Homo sapiens
  misc_RNA (1)...(19): siRNA sense strand
agaugaauaccuggagaau

SEQ ID NO: 2514279 - RNA, 19 nt, Homo sapiens
  misc_RNA (1)...(19): siRNA sense strand
gguagugaucaaagaguuc

SEQ ID NO: 2514280 - RNA, 19 nt, Homo sapiens
  misc_RNA (1)...(19): siRNA sense strand
uggccaggaaggagagcaa

SEQ ID NO: 2514281 - RNA, 19 nt, Homo sapiens
  misc_RNA (1)...(19): siRNA sense strand
gggcagaagaggaggaagg

SEQ ID NO: 2514282 - RNA, 19 nt, Homo sapiens
  misc_RNA (1)...(19): siRNA sense strand
ccaaguguaaggagggcuu

SEQ ID NO: 2514283 - RNA, 19 nt, Homo sapiens
  misc_RNA (1)...(19): siRNA sense strand
agccauaacuucugcacca

SEQ ID NO: 2514284 - RNA, 19 nt, Homo sapiens
  misc_RNA (1)...(19): siRNA sense strand
cagaagaggaggaagggag

SEQ ID NO: 2514285 - RNA, 19 nt, Homo sapiens
  misc_RNA (1)...(19): siRNA sense strand
cugaaguuccagagagaga

SEQ ID NO: 2514286 - RNA, 19 nt, Homo sapiens
  misc_RNA (1)...(19): siRNA sense strand
ggacaggugaggaguggca

SEQ ID NO: 2514287 - RNA, 19 nt, Homo sapiens
  misc_RNA (1)...(19): siRNA sense strand
cgcaaaggucuuaguauca

SEQ ID NO: 2514288 - RNA, 19 nt, Homo sapiens
  misc_RNA (1)...(19): siRNA sense strand
ccgaggaaacagcgagguu

SEQ ID NO: 2514289 - RNA, 19 nt, Homo sapiens
  misc_RNA (1)...(19): siRNA sense strand
uggaugucucugaggaaau

SEQ ID NO: 2514290 - RNA, 19 nt, Homo sapiens
  misc_RNA (1)...(19): siRNA sense strand
cuaaagagccagaagacuc

SEQ ID NO: 2514291 - RNA, 19 nt, Homo sapiens
  misc_RNA (1)...(19): siRNA sense strand
acgaagaggcagugagagc

SEQ ID NO: 2514292 - RNA, 19 nt, Homo sapiens
  misc_RNA (1)...(19): siRNA sense strand
ccgaguuucugcacgggua

SEQ ID NO: 2514293 - RNA, 19 nt, Homo sapiens
  misc_RNA (1)...(19): siRNA sense strand
gguacagucaguagagcca

SEQ ID NO: 2514294 - RNA, 19 nt, Homo sapiens
  misc_RNA (1)...(19): siRNA sense strand
auccaaagaauuacgacua

SEQ ID NO: 2514295 - RNA, 19 nt, Homo sapiens
  misc_RNA (1)...(19): siRNA sense strand
ccuggaugucucugaggaa

SEQ ID NO: 2514296 - RNA, 19 nt, Homo sapiens
  misc_RNA (1)...(19): siRNA sense strand
cuucaaaacccaaggccuu

SEQ ID NO: 2514297 - RNA, 19 nt, Homo sapiens
  misc_RNA (1)...(19): siRNA sense strand
ucucugaggaaauguacaa

SEQ ID NO: 2514298 - RNA, 19 nt, Homo sapiens
  misc_RNA (1)...(19): siRNA sense strand
gaaaguuaguccacccaga

SEQ ID NO: 2514299 - RNA, 19 nt, Homo sapiens
  misc_RNA (1)...(19): siRNA sense strand
cugccuauccugaaaccaa

SEQ ID NO: 2514300 - RNA, 19 nt, Homo sapiens
  misc_RNA (1)...(19): siRNA sense strand
cuauaaacagcaaacccaa

SEQ ID NO: 2514301 - RNA, 19 nt, Homo sapiens
  misc_RNA (1)...(19): siRNA sense strand
ccaccaaaggaguuuccaa

SEQ ID NO: 2514302 - RNA, 19 nt, Homo sapiens
  misc_RNA (1)...(19): siRNA sense strand
gcugggucguuuaggagau

SEQ ID NO: 2514303 - RNA, 19 nt, Homo sapiens
  misc_RNA (1)...(19): siRNA sense strand
gcaaugugcuggagcccaa

SEQ ID NO: 2514304 - RNA, 19 nt, Homo sapiens
  misc_RNA (1)...(19): siRNA sense strand
gcggguaccugcaaggaga

SEQ ID NO: 2514305 - RNA, 19 nt, Homo sapiens
  misc_RNA (1)...(19): siRNA sense strand
aguaaugggugggaggaga

SEQ ID NO: 2514306 - RNA, 19 nt, Homo sapiens
  misc_RNA (1)...(19): siRNA sense strand
ugaaaggagaagacggcaa

SEQ ID NO: 2514307 - RNA, 19 nt, Homo sapiens
  misc_RNA (1)...(19): siRNA sense strand
aggagaaagaagagggcca

SEQ ID NO: 2514308 - RNA, 19 nt, Homo sapiens
  misc_RNA (1)...(19): siRNA sense strand
aggaggagaaggaagagaa

SEQ ID NO: 2514309 - RNA, 19 nt, Homo sapiens
  misc_RNA (1)...(19): siRNA sense strand
aggcagugacgcagcaaca

SEQ ID NO: 2514310 - RNA, 19 nt, Homo sapiens
  misc_RNA (1)...(19): siRNA sense strand
gggcaggaggagaaagaag

SEQ ID NO: 2514311 - RNA, 19 nt, Homo sapiens
  misc_RNA (1)...(19): siRNA sense strand
gggcaggaggagaaggaag

SEQ ID NO: 2514312 - RNA, 19 nt, Homo sapiens
  misc_RNA (1)...(19): siRNA sense strand
aggagaaggaagagaacug

SEQ ID NO: 2514313 - RNA, 19 nt, Homo sapiens
  misc_RNA (1)...(19): siRNA sense strand
cugggcaggaggagaaaga

SEQ ID NO: 2514314 - RNA, 19 nt, Homo sapiens
  misc_RNA (1)...(19): siRNA sense strand
cggaugugagcgaggacua

SEQ ID NO: 2514315 - RNA, 19 nt, Homo sapiens
  misc_RNA (1)...(19): siRNA sense strand
gggaguugcuggaagagga

SEQ ID NO: 2514316 - RNA, 19 nt, Homo sapiens
  misc_RNA (1)...(19): siRNA sense strand
gcaaagcacacuaggagga

SEQ ID NO: 2514317 - RNA, 19 nt, Homo sapiens
  misc_RNA (1)...(19): siRNA sense strand
accacacacuacagagaaa

SEQ ID NO: 2514318 - RNA, 19 nt, Homo sapiens
  misc_RNA (1)...(19): siRNA sense strand
gcgaggacuacgaggcuga

SEQ ID NO: 2514319 - RNA, 19 nt, Homo sapiens
  misc_RNA (1)...(19): siRNA sense strand
cauucuuacccaugggauu

SEQ ID NO: 2514320 - RNA, 19 nt, Homo sapiens
  misc_RNA (1)...(19): siRNA sense strand
agagaaaagccuugagcca

SEQ ID NO: 2514321 - RNA, 19 nt, Homo sapiens
  misc_RNA (1)...(19): siRNA sense strand
cagugcuccuagugaguau

SEQ ID NO: 2514322 - RNA, 19 nt, Homo sapiens
  misc_RNA (1)...(19): siRNA sense strand
gcaccguacuggagccugu

SEQ ID NO: 2514323 - RNA, 19 nt, Homo sapiens
  misc_RNA (1)...(19): siRNA sense strand
ggcagauggcucagaacaa

SEQ ID NO: 2514324 - RNA, 19 nt, Homo sapiens
  misc_RNA (1)...(19): siRNA sense strand
gcagaaaagagaagaaaac

SEQ ID NO: 2514325 - RNA, 19 nt, Homo sapiens
  misc_RNA (1)...(19): siRNA sense strand
gggcccagcaugagcucaa

SEQ ID NO: 2514326 - RNA, 19 nt, Homo sapiens
  misc_RNA (1)...(19): siRNA sense strand
ccugguaucuggauggaca

SEQ ID NO: 2514327 - RNA, 19 nt, Homo sapiens
  misc_RNA (1)...(19): siRNA sense strand
ccaaguaccaggaagcuca

SEQ ID NO: 2514328 - RNA, 19 nt, Homo sapiens
  misc_RNA (1)...(19): siRNA sense strand
cggcagauggcucagaaca

SEQ ID NO: 2514329 - RNA, 19 nt, Homo sapiens
  misc_RNA (1)...(19): siRNA sense strand
gugcaauucaagccagaga

SEQ ID NO: 2514330 - RNA, 19 nt, Homo sapiens
  misc_RNA (1)...(19): siRNA sense strand
uguuguggcugcugggcuu

SEQ ID NO: 2514331 - RNA, 19 nt, Homo sapiens
  misc_RNA (1)...(19): siRNA sense strand
agaaaagagaagaaaacca

SEQ ID NO: 2514332 - RNA, 19 nt, Homo sapiens
  misc_RNA (1)...(19): siRNA sense strand
aaguagaagcucagaaaca

SEQ ID NO: 2514333 - RNA, 19 nt, Homo sapiens
  misc_RNA (1)...(19): siRNA sense strand
cgauaagugguauggagaa

SEQ ID NO: 2514334 - RNA, 19 nt, Homo sapiens
  misc_RNA (1)...(19): siRNA sense strand
gagugauauagcagguuua

SEQ ID NO: 2514335 - RNA, 19 nt, Homo sapiens
  misc_RNA (1)...(19): siRNA sense strand
ccgauaagugguauggaga

SEQ ID NO: 2514336 - RNA, 19 nt, Homo sapiens
  misc_RNA (1)...(19): siRNA sense strand
ccauaaagcuacaaccauc

SEQ ID NO: 2514337 - RNA, 19 nt, Homo sapiens
  misc_RNA (1)...(19): siRNA sense strand
gguaaaacguugauugcca

SEQ ID NO: 2514338 - RNA, 19 nt, Homo sapiens
  misc_RNA (1)...(19): siRNA sense strand
gggcaauugaaaagaugaa

SEQ ID NO: 2514339 - RNA, 19 nt, Homo sapiens
  misc_RNA (1)...(19): siRNA sense strand
ugccaaggccacagccaaa

SEQ ID NO: 2514340 - RNA, 19 nt, Homo sapiens
  misc_RNA (1)...(19): siRNA sense strand
gaucacagcugccagguca

SEQ ID NO: 2514341 - RNA, 19 nt, Homo sapiens
  misc_RNA (1)...(19): siRNA sense strand
ccugaaacucaucuugaaa

SEQ ID NO: 2514342 - RNA, 19 nt, Homo sapiens
  misc_RNA (1)...(19): siRNA sense strand
ccuucgacacugaccgaua

SEQ ID NO: 2514343 - RNA, 19 nt, Homo sapiens
  misc_RNA (1)...(19): siRNA sense strand
ugauccaaccagaaagcaa

SEQ ID NO: 2514344 - RNA, 19 nt, Homo sapiens
  misc_RNA (1)...(19): siRNA sense strand
ugugaagcucucagaauau

SEQ ID NO: 2514345 - RNA, 19 nt, Homo sapiens
  misc_RNA (1)...(19): siRNA sense strand
augaagaaaucaaaggaug

SEQ ID NO: 2514346 - RNA, 19 nt, Homo sapiens
  misc_RNA (1)...(19): siRNA sense strand
gguagaugcaauugaucca

SEQ ID NO: 2514347 - RNA, 19 nt, Homo sapiens
  misc_RNA (1)...(19): siRNA sense strand
ugucauuacggaucugaaa

SEQ ID NO: 2514348 - RNA, 19 nt, Homo sapiens
  misc_RNA (1)...(19): siRNA sense strand
cagaagaaagccaugacga

SEQ ID NO: 2514349 - RNA, 19 nt, Homo sapiens
  misc_RNA (1)...(19): siRNA sense strand
cuaucaaauggaugguaga

SEQ ID NO: 2514350 - RNA, 19 nt, Homo sapiens
  misc_RNA (1)...(19): siRNA sense strand
gccaugacgaagaugaaau

SEQ ID NO: 2514351 - RNA, 19 nt, Homo sapiens
  misc_RNA (1)...(19): siRNA sense strand
guuuaugagucucugggau

SEQ ID NO: 2514352 - RNA, 19 nt, Homo sapiens
  misc_RNA (1)...(19): siRNA sense strand
ucggcuauaaugagaagaa

SEQ ID NO: 2514353 - RNA, 19 nt, Homo sapiens
  misc_RNA (1)...(19): siRNA sense strand
gcuuuaaaacagagagaag

SEQ ID NO: 2514354 - RNA, 19 nt, Homo sapiens
  misc_RNA (1)...(19): siRNA sense strand
aagccaugacgaagaugaa

SEQ ID NO: 2514355 - RNA, 19 nt, Homo sapiens
  misc_RNA (1)...(19): siRNA sense strand
ggccacagccaaagaagca

SEQ ID NO: 2514356 - RNA, 19 nt, Homo sapiens
  misc_RNA (1)...(19): siRNA sense strand
cugcaucgggcaauugaaa

SEQ ID NO: 2514357 - RNA, 19 nt, Homo sapiens
  misc_RNA (1)...(19): siRNA sense strand
ccucagagcugcagacgga

SEQ ID NO: 2514358 - RNA, 19 nt, Homo sapiens
  misc_RNA (1)...(19): siRNA sense strand
ccguggacccugaggaaga

SEQ ID NO: 2514359 - RNA, 19 nt, Homo sapiens
  misc_RNA (1)...(19): siRNA sense strand
acguggaccuggaggacuu

SEQ ID NO: 2514360 - RNA, 19 nt, Homo sapiens
  misc_RNA (1)...(19): siRNA sense strand
gcgaccauucagagaacaa

SEQ ID NO: 2514361 - RNA, 19 nt, Homo sapiens
  misc_RNA (1)...(19): siRNA sense strand
ccuggaggacuuugagaau

SEQ ID NO: 2514362 - RNA, 19 nt, Homo sapiens
  misc_RNA (1)...(19): siRNA sense strand
ugacagagcaccaggccca

SEQ ID NO: 2514363 - RNA, 19 nt, Homo sapiens
  misc_RNA (1)...(19): siRNA sense strand
cguccaaccucaaugggca

SEQ ID NO: 2514364 - RNA, 19 nt, Homo sapiens
  misc_RNA (1)...(19): siRNA sense strand
gcaacaaaugagagauuau

SEQ ID NO: 2514365 - RNA, 19 nt, Homo sapiens
  misc_RNA (1)...(19): siRNA sense strand
ucgaauagagaaagaggaa

SEQ ID NO: 2514366 - RNA, 19 nt, Homo sapiens
  misc_RNA (1)...(19): siRNA sense strand
cagcuguggcagagguaaa

SEQ ID NO: 2514367 - RNA, 19 nt, Homo sapiens
  misc_RNA (1)...(19): siRNA sense strand
ggacacugccuuaggaaaa

SEQ ID NO: 2514368 - RNA, 19 nt, Homo sapiens
  misc_RNA (1)...(19): siRNA sense strand
gguaaaacuucgagaugau

SEQ ID NO: 2514369 - RNA, 19 nt, Homo sapiens
  misc_RNA (1)...(19): siRNA sense strand
ggucacuaucaguaagaaa

SEQ ID NO: 2514370 - RNA, 19 nt, Homo sapiens
  misc_RNA (1)...(19): siRNA sense strand
aggcaacaaaugagagauu

SEQ ID NO: 2514371 - RNA, 19 nt, Homo sapiens
  misc_RNA (1)...(19): siRNA sense strand
ugaagacguaucagagaaa

SEQ ID NO: 2514372 - RNA, 19 nt, Homo sapiens
  misc_RNA (1)...(19): siRNA sense strand
cagaaaggaaggcaggcaa

SEQ ID NO: 2514373 - RNA, 19 nt, Homo sapiens
  misc_RNA (1)...(19): siRNA sense strand
gaguaauagcuuggagauu

SEQ ID NO: 2514374 - RNA, 19 nt, Homo sapiens
  misc_RNA (1)...(19): siRNA sense strand
cugcaauagcugaacguuu

SEQ ID NO: 2514375 - RNA, 19 nt, Homo sapiens
  misc_RNA (1)...(19): siRNA sense strand
ggaacuuauaagagauuca

SEQ ID NO: 2514376 - RNA, 19 nt, Homo sapiens
  misc_RNA (1)...(19): siRNA sense strand
ccagcaaacaagaugauau

SEQ ID NO: 2514377 - RNA, 19 nt, Homo sapiens
  misc_RNA (1)...(19): siRNA sense strand
gaguuagaagaaugugaua

SEQ ID NO: 2514378 - RNA, 19 nt, Homo sapiens
  misc_RNA (1)...(19): siRNA sense strand
gaauuggauaugaaaggaa

SEQ ID NO: 2514379 - RNA, 19 nt, Homo sapiens
  misc_RNA (1)...(19): siRNA sense strand
ugucauuggaacaggugaa

SEQ ID NO: 2514380 - RNA, 19 nt, Homo sapiens
  misc_RNA (1)...(19): siRNA sense strand
acauuguacugaaggauca

SEQ ID NO: 2514381 - RNA, 19 nt, Homo sapiens
  misc_RNA (1)...(19): siRNA sense strand
augcagauuugauggcaau

SEQ ID NO: 2514382 - RNA, 19 nt, Homo sapiens
  misc_RNA (1)...(19): siRNA sense strand
ccuacagauuugacagcau

SEQ ID NO: 2514383 - RNA, 19 nt, Homo sapiens
  misc_RNA (1)...(19): siRNA sense strand
acugcuaaaugcugaagaa

SEQ ID NO: 2514384 - RNA, 19 nt, Homo sapiens
  misc_RNA (1)...(19): siRNA sense strand
augaagacguaucagagaa

SEQ ID NO: 2514385 - RNA, 19 nt, Homo sapiens
  misc_RNA (1)...(19): siRNA sense strand
ccaugauguugaugcccua

SEQ ID NO: 2514386 - RNA, 19 nt, Homo sapiens
  misc_RNA (1)...(19): siRNA sense strand
gaucaugaaagcaguacau

SEQ ID NO: 2514387 - RNA, 19 nt, Homo sapiens
  misc_RNA (1)...(19): siRNA sense strand
gagaguaauagcuuggaga

SEQ ID NO: 2514388 - RNA, 19 nt, Homo sapiens
  misc_RNA (1)...(19): siRNA sense strand
uggagauuuccuugauuaa

SEQ ID NO: 2514389 - RNA, 19 nt, Homo sapiens
  misc_RNA (1)...(19): siRNA sense strand
uguccaagcaucaaagaga

SEQ ID NO: 2514390 - RNA, 19 nt, Homo sapiens
  misc_RNA (1)...(19): siRNA sense strand
uauugagccugauggaaau

SEQ ID NO: 2514391 - RNA, 19 nt, Homo sapiens
  misc_RNA (1)...(19): siRNA sense strand
cugucauaguggauccuaa

SEQ ID NO: 2514392 - RNA, 19 nt, Homo sapiens
  misc_RNA (1)...(19): siRNA sense strand
gaguauucaucuaucguca

SEQ ID NO: 2514393 - RNA, 19 nt, Homo sapiens
  misc_RNA (1)...(19): siRNA sense strand
aaguaggacagguugcuaa

SEQ ID NO: 2514394 - RNA, 19 nt, Homo sapiens
  misc_RNA (1)...(19): siRNA sense strand
ccuacaagucuuucacauu

SEQ ID NO: 2514395 - RNA, 19 nt, Homo sapiens
  misc_RNA (1)...(19): siRNA sense strand
ugucauaguggauccuaaa

SEQ ID NO: 2514396 - RNA, 19 nt, Homo sapiens
  misc_RNA (1)...(19): siRNA sense strand
gaacguggaaauagcgcuu

SEQ ID NO: 2514397 - RNA, 19 nt, Homo sapiens
  misc_RNA (1)...(19): siRNA sense strand
gauuaagaagaaugaagga

SEQ ID NO: 2514398 - RNA, 19 nt, Homo sapiens
  misc_RNA (1)...(19): siRNA sense strand
gauucaugguaucaagaca

SEQ ID NO: 2514399 - RNA, 19 nt, Homo sapiens
  misc_RNA (1)...(19): siRNA sense strand
ugcuaaaugcugaagaaca

SEQ ID NO: 2514400 - RNA, 19 nt, Homo sapiens
  misc_RNA (1)...(19): siRNA sense strand
caagcaucaaagagagaca

SEQ ID NO: 2514401 - RNA, 19 nt, Homo sapiens
  misc_RNA (1)...(19): siRNA sense strand
gcagcaaguagcaagccua

SEQ ID NO: 2514402 - RNA, 19 nt, Homo sapiens
  misc_RNA (1)...(19): siRNA sense strand
uauugauacccuuggaaga

SEQ ID NO: 2514403 - RNA, 19 nt, Homo sapiens
  misc_RNA (1)...(19): siRNA sense strand
ccuuggaagaauuaugaau

SEQ ID NO: 2514404 - RNA, 19 nt, Homo sapiens
  misc_RNA (1)...(19): siRNA sense strand
auaguggauccuaaagaaa

SEQ ID NO: 2514405 - RNA, 19 nt, Homo sapiens
  misc_RNA (1)...(19): siRNA sense strand
cuuucaaugcuuuaggcua

SEQ ID NO: 2514406 - RNA, 19 nt, Homo sapiens
  misc_RNA (1)...(19): siRNA sense strand
cugaagaugauuugacagu

SEQ ID NO: 2514407 - RNA, 19 nt, Homo sapiens
  misc_RNA (1)...(19): siRNA sense strand
cuaaggaggacauucaaau

SEQ ID NO: 2514408 - RNA, 19 nt, Homo sapiens
  misc_RNA (1)...(19): siRNA sense strand
acaucaacauuguacugaa

SEQ ID NO: 2514409 - RNA, 19 nt, Homo sapiens
  misc_RNA (1)...(19): siRNA sense strand
cgugauauucuccguggaa

SEQ ID NO: 2514410 - RNA, 19 nt, Homo sapiens
  misc_RNA (1)...(19): siRNA sense strand
ggaacaggugaacguggaa

SEQ ID NO: 2514411 - RNA, 19 nt, Homo sapiens
  misc_RNA (1)...(19): siRNA sense strand
acuucgagaugaucaauau

SEQ ID NO: 2514412 - RNA, 19 nt, Homo sapiens
  misc_RNA (1)...(19): siRNA sense strand
aggaggacauucaaauaca

SEQ ID NO: 2514413 - RNA, 19 nt, Homo sapiens
  misc_RNA (1)...(19): siRNA sense strand
uuaagaagaaugaaggacu

SEQ ID NO: 2514414 - RNA, 19 nt, Homo sapiens
  misc_RNA (1)...(19): siRNA sense strand
uuguaagaaaugugggaaa

SEQ ID NO: 2514415 - RNA, 19 nt, Homo sapiens
  misc_RNA (1)...(19): siRNA sense strand
augagaaagccuugaagaa

SEQ ID NO: 2514416 - RNA, 19 nt, Homo sapiens
  misc_RNA (1)...(19): siRNA sense strand
acucccaaucagagaauua

SEQ ID NO: 2514417 - RNA, 19 nt, Homo sapiens
  misc_RNA (1)...(19): siRNA sense strand
aacucaugcaggagagaaa

SEQ ID NO: 2514418 - RNA, 19 nt, Homo sapiens
  misc_RNA (1)...(19): siRNA sense strand
agucaagagagcugggaaa

SEQ ID NO: 2514419 - RNA, 19 nt, Homo sapiens
  misc_RNA (1)...(19): siRNA sense strand
ggcugaagauagagggacu

SEQ ID NO: 2514420 - RNA, 19 nt, Homo sapiens
  misc_RNA (1)...(19): siRNA sense strand
ccuacuugcccgugggaca

SEQ ID NO: 2514421 - RNA, 19 nt, Homo sapiens
  misc_RNA (1)...(19): siRNA sense strand
gaacauaguccaucccaca

SEQ ID NO: 2514422 - RNA, 19 nt, Homo sapiens
  misc_RNA (1)...(19): siRNA sense strand
uggcagaaggacagcauaa

SEQ ID NO: 2514423 - RNA, 19 nt, Homo sapiens
  misc_RNA (1)...(19): siRNA sense strand
ugguugaaauguuggauau

SEQ ID NO: 2514424 - RNA, 19 nt, Homo sapiens
  misc_RNA (1)...(19): siRNA sense strand
ugucaaagagauaaagaga

SEQ ID NO: 2514425 - RNA, 19 nt, Homo sapiens
  misc_RNA (1)...(19): siRNA sense strand
gcaaagaaguaccagcuga

SEQ ID NO: 2514426 - RNA, 19 nt, Homo sapiens
  misc_RNA (1)...(19): siRNA sense strand
caguacaauugguugaaau

SEQ ID NO: 2514427 - RNA, 19 nt, Homo sapiens
  misc_RNA (1)...(19): siRNA sense strand
agucugugucaaagagaua

SEQ ID NO: 2514428 - RNA, 19 nt, Homo sapiens
  misc_RNA (1)...(19): siRNA sense strand
cuuuagaagaugaagauga

SEQ ID NO: 2514429 - RNA, 19 nt, Homo sapiens
  misc_RNA (1)...(19): siRNA sense strand
gcuugaagacugugggagu

SEQ ID NO: 2514430 - RNA, 19 nt, Homo sapiens
  misc_RNA (1)...(19): siRNA sense strand
ggaggagaagauagagauu

SEQ ID NO: 2514431 - RNA, 19 nt, Homo sapiens
  misc_RNA (1)...(19): siRNA sense strand
ggaggagcuaggagaacua

SEQ ID NO: 2514432 - RNA, 19 nt, Homo sapiens
  misc_RNA (1)...(19): siRNA sense strand
ggccaagacucuaggucga

SEQ ID NO: 2514433 - RNA, 19 nt, Homo sapiens
  misc_RNA (1)...(19): siRNA sense strand
ccagaaaacccaagcaaga

SEQ ID NO: 2514434 - RNA, 19 nt, Homo sapiens
  misc_RNA (1)...(19): siRNA sense strand
agguugacaaacugggaaa

SEQ ID NO: 2514435 - RNA, 19 nt, Homo sapiens
  misc_RNA (1)...(19): siRNA sense strand
guuauacacaggaggagaa

SEQ ID NO: 2514436 - RNA, 19 nt, Homo sapiens
  misc_RNA (1)...(19): siRNA sense strand
cugaugugacugagagaga

SEQ ID NO: 2514437 - RNA, 19 nt, Homo sapiens
  misc_RNA (1)...(19): siRNA sense strand
agagaagguugcagagaac

SEQ ID NO: 2514438 - RNA, 19 nt, Homo sapiens
  misc_RNA (1)...(19): siRNA sense strand
agacugugggagugaacaa

SEQ ID NO: 2514439 - RNA, 19 nt, Homo sapiens
  misc_RNA (1)...(19): siRNA sense strand
agagauaaagagacucaaa

SEQ ID NO: 2514440 - RNA, 19 nt, Homo sapiens
  misc_RNA (1)...(19): siRNA sense strand
auacacaggaggagaagau

SEQ ID NO: 2514441 - RNA, 19 nt, Homo sapiens
  misc_RNA (1)...(19): siRNA sense strand
acaaauugaaggccugaaa

SEQ ID NO: 2514442 - RNA, 19 nt, Homo sapiens
  misc_RNA (1)...(19): siRNA sense strand
uagaagaugaagaugaaga

SEQ ID NO: 2514443 - RNA, 19 nt, Homo sapiens
  misc_RNA (1)...(19): siRNA sense strand
ugggaagaucaguggccaa

SEQ ID NO: 2514444 - RNA, 19 nt, Homo sapiens
  misc_RNA (1)...(19): siRNA sense strand
uggacagaauggagaucau

SEQ ID NO: 2514445 - RNA, 19 nt, Homo sapiens
  misc_RNA (1)...(19): siRNA sense strand
agaaguaccagcugaccaa

SEQ ID NO: 2514446 - RNA, 19 nt, Homo sapiens
  misc_RNA (1)...(19): siRNA sense strand
agucauuauuccucggaga

SEQ ID NO: 2514447 - RNA, 19 nt, Homo sapiens
  misc_RNA (1)...(19): siRNA sense strand
cauugucaugcuagagaaa

SEQ ID NO: 2514448 - RNA, 19 nt, Homo sapiens
  misc_RNA (1)...(19): siRNA sense strand
ggaacuuaugguagaacuu

SEQ ID NO: 2514449 - RNA, 19 nt, Homo sapiens
  misc_RNA (1)...(19): siRNA sense strand
cugccuuguuggacagaau

SEQ ID NO: 2514450 - RNA, 19 nt, Homo sapiens
  misc_RNA (1)...(19): siRNA sense strand
cauucagguuccagguuau

SEQ ID NO: 2514451 - RNA, 19 nt, Homo sapiens
  misc_RNA (1)...(19): siRNA sense strand
gagggaggagcuaggagaa

SEQ ID NO: 2514452 - RNA, 19 nt, Homo sapiens
  misc_RNA (1)...(19): siRNA sense strand
aacaagcaacaaagagaaa

SEQ ID NO: 2514453 - RNA, 19 nt, Homo sapiens
  misc_RNA (1)...(19): siRNA sense strand
guacuuuagaagaugaaga

SEQ ID NO: 2514454 - RNA, 19 nt, Homo sapiens
  misc_RNA (1)...(19): siRNA sense strand
augaagaugaagaugaaga

SEQ ID NO: 2514455 - RNA, 19 nt, Homo sapiens
  misc_RNA (1)...(19): siRNA sense strand
caggaggagaagauagaga

SEQ ID NO: 2514456 - RNA, 19 nt, Homo sapiens
  misc_RNA (1)...(19): siRNA sense strand
uggagaaauuacacugaga

SEQ ID NO: 2514457 - RNA, 19 nt, Homo sapiens
  misc_RNA (1)...(19): siRNA sense strand
ggauuuaaguuuugucaca

SEQ ID NO: 2514458 - RNA, 19 nt, Homo sapiens
  misc_RNA (1)...(19): siRNA sense strand
uguaugaaauggagguauc

SEQ ID NO: 2514459 - RNA, 19 nt, Homo sapiens
  misc_RNA (1)...(19): siRNA sense strand
ugaagguggcagaaggaca

SEQ ID NO: 2514460 - RNA, 19 nt, Homo sapiens
  misc_RNA (1)...(19): siRNA sense strand
auuuggaacuuaugguaga

SEQ ID NO: 2514461 - RNA, 19 nt, Homo sapiens
  misc_RNA (1)...(19): siRNA sense strand
uauuagaugagguugacaa

SEQ ID NO: 2514462 - RNA, 19 nt, Homo sapiens
  misc_RNA (1)...(19): siRNA sense strand
aaagagauaaagagacuca

SEQ ID NO: 2514463 - RNA, 19 nt, Homo sapiens
  misc_RNA (1)...(19): siRNA sense strand
gaagauagagauugcccau

SEQ ID NO: 2514464 - RNA, 19 nt, Homo sapiens
  misc_RNA (1)...(19): siRNA sense strand
gaaauuacacugagagguc

SEQ ID NO: 2514465 - RNA, 19 nt, Homo sapiens
  misc_RNA (1)...(19): siRNA sense strand
agaagaugaagaugaagau

SEQ ID NO: 2514466 - RNA, 19 nt, Homo sapiens
  misc_RNA (1)...(19): siRNA sense strand
auuagaugagguugacaaa

SEQ ID NO: 2514467 - RNA, 19 nt, Homo sapiens
  misc_RNA (1)...(19): siRNA sense strand
gguuauacacaggaggaga

SEQ ID NO: 2514468 - RNA, 19 nt, Homo sapiens
  misc_RNA (1)...(19): siRNA sense strand
caagcaacaaagagaaacu

SEQ ID NO: 2514469 - RNA, 19 nt, Homo sapiens
  misc_RNA (1)...(19): siRNA sense strand
gaucaguggccaagacucu

SEQ ID NO: 2514470 - RNA, 19 nt, Homo sapiens
  misc_RNA (1)...(19): siRNA sense strand
caggauugcacuuggagga

SEQ ID NO: 2514471 - RNA, 19 nt, Homo sapiens
  misc_RNA (1)...(19): siRNA sense strand
cagguauaccagagaggca

SEQ ID NO: 2514472 - RNA, 19 nt, Homo sapiens
  misc_RNA (1)...(19): siRNA sense strand
caggaguagcaauagguuu

SEQ ID NO: 2514473 - RNA, 19 nt, Homo sapiens
  misc_RNA (1)...(19): siRNA sense strand
cccggauucuucuggauaa

SEQ ID NO: 2514474 - RNA, 19 nt, Homo sapiens
  misc_RNA (1)...(19): siRNA sense strand
ucagccaggaguagcaaua

SEQ ID NO: 2514475 - RNA, 19 nt, Homo sapiens
  misc_RNA (1)...(19): siRNA sense strand
cauuauuccucggagaaau

SEQ ID NO: 2514476 - RNA, 19 nt, Homo sapiens
  misc_RNA (1)...(19): siRNA sense strand
ugaagaugaagaugaagau

SEQ ID NO: 2514477 - RNA, 19 nt, Homo sapiens
  misc_RNA (1)...(19): siRNA sense strand
cacaggaggagaagauaga

SEQ ID NO: 2514478 - RNA, 19 nt, Homo sapiens
  misc_RNA (1)...(19): siRNA sense strand
gagaaaucauguucgugga

SEQ ID NO: 2514479 - RNA, 19 nt, Homo sapiens
  misc_RNA (1)...(19): siRNA sense strand
gcccauaaagucuguguca

SEQ ID NO: 2514480 - RNA, 19 nt, Homo sapiens
  misc_RNA (1)...(19): siRNA sense strand
gagauaaagagacucaaaa

SEQ ID NO: 2514481 - RNA, 19 nt, Homo sapiens
  misc_RNA (1)...(19): siRNA sense strand
caacugaccgccuggacau

SEQ ID NO: 2514482 - RNA, 19 nt, Homo sapiens
  misc_RNA (1)...(19): siRNA sense strand
ggaccaucugcuggaguua

SEQ ID NO: 2514483 - RNA, 19 nt, Homo sapiens
  misc_RNA (1)...(19): siRNA sense strand
ccagaaaauaagagcuuua

SEQ ID NO: 2514484 - RNA, 19 nt, Homo sapiens
  misc_RNA (1)...(19): siRNA sense strand
gaugcagaggugaaggaaa

SEQ ID NO: 2514485 - RNA, 19 nt, Homo sapiens
  misc_RNA (1)...(19): siRNA sense strand
cagucaaguaugugaggau

SEQ ID NO: 2514486 - RNA, 19 nt, Homo sapiens
  misc_RNA (1)...(19): siRNA sense strand
agguguuacuuacuggaaa

SEQ ID NO: 2514487 - RNA, 19 nt, Homo sapiens
  misc_RNA (1)...(19): siRNA sense strand
ccucaaaauagaaggccau

SEQ ID NO: 2514488 - RNA, 19 nt, Homo sapiens
  misc_RNA (1)...(19): siRNA sense strand
gugugaauguugaaaauca

SEQ ID NO: 2514489 - RNA, 19 nt, Homo sapiens
  misc_RNA (1)...(19): siRNA sense strand
aagaaugugcccagaaaau

SEQ ID NO: 2514490 - RNA, 19 nt, Homo sapiens
  misc_RNA (1)...(19): siRNA sense strand
gagcuuuaguugaucacca

SEQ ID NO: 2514491 - RNA, 19 nt, Homo sapiens
  misc_RNA (1)...(19): siRNA sense strand
cugagaagaaacagaccaa

SEQ ID NO: 2514492 - RNA, 19 nt, Homo sapiens
  misc_RNA (1)...(19): siRNA sense strand
gagaaaguguggugagcuc

SEQ ID NO: 2514493 - RNA, 19 nt, Homo sapiens
  misc_RNA (1)...(19): siRNA sense strand
cauccaaggaagaacaaaa

SEQ ID NO: 2514494 - RNA, 19 nt, Homo sapiens
  misc_RNA (1)...(19): siRNA sense strand
caaagauacuuaugagccu

SEQ ID NO: 2514495 - RNA, 19 nt, Homo sapiens
  misc_RNA (1)...(19): siRNA sense strand
ccagcaauucugacgacaa

SEQ ID NO: 2514496 - RNA, 19 nt, Homo sapiens
  misc_RNA (1)...(19): siRNA sense strand
acaccaugcugaaggccau

SEQ ID NO: 2514497 - RNA, 19 nt, Homo sapiens
  misc_RNA (1)...(19): siRNA sense strand
agaaacagaccaaggugga

SEQ ID NO: 2514498 - RNA, 19 nt, Homo sapiens
  misc_RNA (1)...(19): siRNA sense strand
gcuccaaauacgugaagcu

SEQ ID NO: 2514499 - RNA, 19 nt, Homo sapiens
  misc_RNA (1)...(19): siRNA sense strand
acuuauagcgacuucaaau

SEQ ID NO: 2514500 - RNA, 19 nt, Homo sapiens
  misc_RNA (1)...(19): siRNA sense strand
gcccaaagaaagaaggaga

SEQ ID NO: 2514501 - RNA, 19 nt, Homo sapiens
  misc_RNA (1)...(19): siRNA sense strand
gaucuaaauaucauggcua

SEQ ID NO: 2514502 - RNA, 19 nt, Homo sapiens
  misc_RNA (1)...(19): siRNA sense strand
uggcaaacuccuggcgaua

SEQ ID NO: 2514503 - RNA, 19 nt, Homo sapiens
  misc_RNA (1)...(19): siRNA sense strand
ccauauaagaggaccacca

SEQ ID NO: 2514504 - RNA, 19 nt, Homo sapiens
  misc_RNA (1)...(19): siRNA sense strand
agaaagaaggagauggugu

SEQ ID NO: 2514505 - RNA, 19 nt, Homo sapiens
  misc_RNA (1)...(19): siRNA sense strand
uuggaaagcgaaagauaau

SEQ ID NO: 2514506 - RNA, 19 nt, Homo sapiens
  misc_RNA (1)...(19): siRNA sense strand
cugacauggauauuggaaa

SEQ ID NO: 2514507 - RNA, 19 nt, Homo sapiens
  misc_RNA (1)...(19): siRNA sense strand
auuggaaagcgaaagauaa

SEQ ID NO: 2514508 - RNA, 19 nt, Homo sapiens
  misc_RNA (1)...(19): siRNA sense strand
gaaccauauaagaggacca

SEQ ID NO: 2514509 - RNA, 19 nt, Homo sapiens
  misc_RNA (1)...(19): siRNA sense strand
uggauauuggaaagcgaaa

SEQ ID NO: 2514510 - RNA, 19 nt, Homo sapiens
  misc_RNA (1)...(19): siRNA sense strand
guuccgucgccuugugaaa

SEQ ID NO: 2514511 - RNA, 19 nt, Homo sapiens
  misc_RNA (1)...(19): siRNA sense strand
uggcgauacuccagugcau

SEQ ID NO: 2514512 - RNA, 19 nt, Homo sapiens
  misc_RNA (1)...(19): siRNA sense strand
cccaaagaaagaaggagau

SEQ ID NO: 2514513 - RNA, 19 nt, Homo sapiens
  misc_RNA (1)...(19): siRNA sense strand
aaacaugaauucagcucca

SEQ ID NO: 2514514 - RNA, 19 nt, Homo sapiens
  misc_RNA (1)...(19): siRNA sense strand
ugguauuggacuuguugua

SEQ ID NO: 2514515 - RNA, 19 nt, Homo sapiens
  misc_RNA (1)...(19): siRNA sense strand
ggcuguuauugguggacuu

SEQ ID NO: 2514516 - RNA, 19 nt, Homo sapiens
  misc_RNA (1)...(19): siRNA sense strand
guuagucagcugauggaau

SEQ ID NO: 2514517 - RNA, 19 nt, Homo sapiens
  misc_RNA (1)...(19): siRNA sense strand
augaagaauuccagauccu

SEQ ID NO: 2514518 - RNA, 19 nt, Homo sapiens
  misc_RNA (1)...(19): siRNA sense strand
cuguuuaaugguggaguua

SEQ ID NO: 2514519 - RNA, 19 nt, Homo sapiens
  misc_RNA (1)...(19): siRNA sense strand
gaucaaugcuacagcgaca

SEQ ID NO: 2514520 - RNA, 19 nt, Homo sapiens
  misc_RNA (1)...(19): siRNA sense strand
cggcaauggaacaguacaa

SEQ ID NO: 2514521 - RNA, 19 nt, Homo sapiens
  misc_RNA (1)...(19): siRNA sense strand
gugaaauaaaggagcaaga

SEQ ID NO: 2514522 - RNA, 19 nt, Homo sapiens
  misc_RNA (1)...(19): siRNA sense strand
ucaucaugcuuuagaggaa

SEQ ID NO: 2514523 - RNA, 19 nt, Homo sapiens
  misc_RNA (1)...(19): siRNA sense strand
cuguggaaauacugauaaa

SEQ ID NO: 2514524 - RNA, 19 nt, Homo sapiens
  misc_RNA (1)...(19): siRNA sense strand
acgcagaaauagaaguaga

SEQ ID NO: 2514525 - RNA, 19 nt, Homo sapiens
  misc_RNA (1)...(19): siRNA sense strand
cuuaaagugaguagaaaga

SEQ ID NO: 2514526 - RNA, 19 nt, Homo sapiens
  misc_RNA (1)...(19): siRNA sense strand
ggugaaaauaaaugggauu

SEQ ID NO: 2514527 - RNA, 19 nt, Homo sapiens
  misc_RNA (1)...(19): siRNA sense strand
aagaagaggacgcagaaau

SEQ ID NO: 2514528 - RNA, 19 nt, Homo sapiens
  misc_RNA (1)...(19): siRNA sense strand
aggaaugagaagaaugauu

SEQ ID NO: 2514529 - RNA, 19 nt, Homo sapiens
  misc_RNA (1)...(19): siRNA sense strand
acaaauaccagaagaagca

SEQ ID NO: 2514530 - RNA, 19 nt, Homo sapiens
  misc_RNA (1)...(19): siRNA sense strand
cacaggaggcucaaagaaa

SEQ ID NO: 2514531 - RNA, 19 nt, Homo sapiens
  misc_RNA (1)...(19): siRNA sense strand
ucauaagugaagcaagaaa

SEQ ID NO: 2514532 - RNA, 19 nt, Homo sapiens
  misc_RNA (1)...(19): siRNA sense strand
ccaaagagaaagggagcau

SEQ ID NO: 2514533 - RNA, 19 nt, Homo sapiens
  misc_RNA (1)...(19): siRNA sense strand
cuuacuaccaagugaagaa

SEQ ID NO: 2514534 - RNA, 19 nt, Homo sapiens
  misc_RNA (1)...(19): siRNA sense strand
cacaaacuccauugggaaa

SEQ ID NO: 2514535 - RNA, 19 nt, Homo sapiens
  misc_RNA (1)...(19): siRNA sense strand
augcuuuagaggaaggaaa

SEQ ID NO: 2514536 - RNA, 19 nt, Homo sapiens
  misc_RNA (1)...(19): siRNA sense strand
guggacuguuuaagagauu

SEQ ID NO: 2514537 - RNA, 19 nt, Homo sapiens
  misc_RNA (1)...(19): siRNA sense strand
ucacaaacuccauugggaa

SEQ ID NO: 2514538 - RNA, 19 nt, Homo sapiens
  misc_RNA (1)...(19): siRNA sense strand
cauaagugaagcaagaaau

SEQ ID NO: 2514539 - RNA, 19 nt, Homo sapiens
  misc_RNA (1)...(19): siRNA sense strand
aggaaacaugcuuggaaau

SEQ ID NO: 2514540 - RNA, 19 nt, Homo sapiens
  misc_RNA (1)...(19): siRNA sense strand
uggaacaguacaaggguga

SEQ ID NO: 2514541 - RNA, 19 nt, Homo sapiens
  misc_RNA (1)...(19): siRNA sense strand
aaaccaaagcagucccaaa

SEQ ID NO: 2514542 - RNA, 19 nt, Homo sapiens
  misc_RNA (1)...(19): siRNA sense strand
aggcagaggacgugcucau

SEQ ID NO: 2514543 - RNA, 19 nt, Homo sapiens
  misc_RNA (1)...(19): siRNA sense strand
cagaagaccagugcagaaa

SEQ ID NO: 2514544 - RNA, 19 nt, Homo sapiens
  misc_RNA (1)...(19): siRNA sense strand
aaucauuauuggagguacu

SEQ ID NO: 2514545 - RNA, 19 nt, Homo sapiens
  misc_RNA (1)...(19): siRNA sense strand
gugaauuagaaaaggaaga

SEQ ID NO: 2514546 - RNA, 19 nt, Homo sapiens
  misc_RNA (1)...(19): siRNA sense strand
aagaacaguuagaacccaa

SEQ ID NO: 2514547 - RNA, 19 nt, Homo sapiens
  misc_RNA (1)...(19): siRNA sense strand
cuucaguguccaagcagaa

SEQ ID NO: 2514548 - RNA, 19 nt, Homo sapiens
  misc_RNA (1)...(19): siRNA sense strand
guguaaacuaguugauguu

SEQ ID NO: 2514549 - RNA, 19 nt, Homo sapiens
  misc_RNA (1)...(19): siRNA sense strand
aaaugaggacaucaagaaa

SEQ ID NO: 2514550 - RNA, 19 nt, Homo sapiens
  misc_RNA (1)...(19): siRNA sense strand
ggaaaugaagacaccaaca

SEQ ID NO: 2514551 - RNA, 19 nt, Homo sapiens
  misc_RNA (1)...(19): siRNA sense strand
guuagaacccaaagaccau

SEQ ID NO: 2514552 - RNA, 19 nt, Homo sapiens
  misc_RNA (1)...(19): siRNA sense strand
ggagguacuaagaagugaa

SEQ ID NO: 2514553 - RNA, 19 nt, Homo sapiens
  misc_RNA (1)...(19): siRNA sense strand
agugaagaccugcaaacua

SEQ ID NO: 2514554 - RNA, 19 nt, Homo sapiens
  misc_RNA (1)...(19): siRNA sense strand
aguuagaacccaaagacca

SEQ ID NO: 2514555 - RNA, 19 nt, Homo sapiens
  misc_RNA (1)...(19): siRNA sense strand
ccacaggaggcucaaagaa

SEQ ID NO: 2514556 - RNA, 19 nt, Homo sapiens
  misc_RNA (1)...(19): siRNA sense strand
acaggaggcucaaagaaaa

SEQ ID NO: 2514557 - RNA, 19 nt, Homo sapiens
  misc_RNA (1)...(19): siRNA sense strand
ccucaagaacaucagaaaa

SEQ ID NO: 2514558 - RNA, 19 nt, Homo sapiens
  misc_RNA (1)...(19): siRNA sense strand
agauuagaagaguaagcaa

SEQ ID NO: 2514559 - RNA, 19 nt, Homo sapiens
  misc_RNA (1)...(19): siRNA sense strand
ugucauuauuccagacguu

SEQ ID NO: 2514560 - RNA, 19 nt, Homo sapiens
  misc_RNA (1)...(19): siRNA sense strand
caagaaaugcauuaagaac

SEQ ID NO: 2514561 - RNA, 19 nt, Homo sapiens
  misc_RNA (1)...(19): siRNA sense strand
cagaauauucagcaaacuu

SEQ ID NO: 2514562 - RNA, 19 nt, Homo sapiens
  misc_RNA (1)...(19): siRNA sense strand
uggauaaagacaagcgugu

SEQ ID NO: 2514563 - RNA, 19 nt, Homo sapiens
  misc_RNA (1)...(19): siRNA sense strand
ccaccagagaggaggauuc

SEQ ID NO: 2514564 - RNA, 19 nt, Homo sapiens
  misc_RNA (1)...(19): siRNA sense strand
ugcgaagauuagaagagua

SEQ ID NO: 2514565 - RNA, 19 nt, Homo sapiens
  misc_RNA (1)...(19): siRNA sense strand
cugaagacccuguguaaac

SEQ ID NO: 2514566 - RNA, 19 nt, Homo sapiens
  misc_RNA (1)...(19): siRNA sense strand
cucaagaacaucagaaaau

SEQ ID NO: 2514567 - RNA, 19 nt, Homo sapiens
  misc_RNA (1)...(19): siRNA sense strand
cacuagagcugaaaccgaa

SEQ ID NO: 2514568 - RNA, 19 nt, Homo sapiens
  misc_RNA (1)...(19): siRNA sense strand
cagugaaauaaaggagcaa

SEQ ID NO: 2514569 - RNA, 19 nt, Homo sapiens
  misc_RNA (1)...(19): siRNA sense strand
gguacuaagaagugaagac

SEQ ID NO: 2514570 - RNA, 19 nt, Homo sapiens
  misc_RNA (1)...(19): siRNA sense strand
ugacugcuacauugagaaa

SEQ ID NO: 2514571 - RNA, 19 nt, Homo sapiens
  misc_RNA (1)...(19): siRNA sense strand
accagaagaagcaggauuu

SEQ ID NO: 2514572 - RNA, 19 nt, Homo sapiens
  misc_RNA (1)...(19): siRNA sense strand
gagaaaaggugaaggcuga

SEQ ID NO: 2514573 - RNA, 19 nt, Homo sapiens
  misc_RNA (1)...(19): siRNA sense strand
cugaaguggcugagaaaca

SEQ ID NO: 2514574 - RNA, 19 nt, Homo sapiens
  misc_RNA (1)...(19): siRNA sense strand
aacaacaggaacagacaaa

SEQ ID NO: 2514575 - RNA, 19 nt, Homo sapiens
  misc_RNA (1)...(19): siRNA sense strand
cucugaaguggcugagaaa

SEQ ID NO: 2514576 - RNA, 19 nt, Homo sapiens
  misc_RNA (1)...(19): siRNA sense strand
gcagcagauugucagggua

SEQ ID NO: 2514577 - RNA, 19 nt, Homo sapiens
  misc_RNA (1)...(19): siRNA sense strand
uggcugagaaacacaacaa

SEQ ID NO: 2514578 - RNA, 19 nt, Homo sapiens
  misc_RNA (1)...(19): siRNA sense strand
ggaacaaucugcaugaggu

SEQ ID NO: 2514579 - RNA, 19 nt, Homo sapiens
  misc_RNA (1)...(19): siRNA sense strand
ggaggagagugaagaggag

SEQ ID NO: 2514580 - RNA, 19 nt, Homo sapiens
  misc_RNA (1)...(19): siRNA sense strand
gugaagaggaggaggcagc

SEQ ID NO: 2514581 - RNA, 19 nt, Homo sapiens
  misc_RNA (1)...(19): siRNA sense strand
gguacaaagagaagcgaca

SEQ ID NO: 2514582 - RNA, 19 nt, Homo sapiens
  misc_RNA (1)...(19): siRNA sense strand
gguuuaaaauucagcacau

SEQ ID NO: 2514583 - RNA, 19 nt, Homo sapiens
  misc_RNA (1)...(19): siRNA sense strand
uauccgaacugcagguaca

SEQ ID NO: 2514584 - RNA, 19 nt, Homo sapiens
  misc_RNA (1)...(19): siRNA sense strand
acgaagugaaugaaguaaa

SEQ ID NO: 2514585 - RNA, 19 nt, Homo sapiens
  misc_RNA (1)...(19): siRNA sense strand
caguauuugaggaugauaa

SEQ ID NO: 2514586 - RNA, 19 nt, Homo sapiens
  misc_RNA (1)...(19): siRNA sense strand
cauuauugcaugaggcuga

SEQ ID NO: 2514587 - RNA, 19 nt, Homo sapiens
  misc_RNA (1)...(19): siRNA sense strand
gccugaagucccugauaaa

SEQ ID NO: 2514588 - RNA, 19 nt, Homo sapiens
  misc_RNA (1)...(19): siRNA sense strand
uggaaaagcaagaagaaga

SEQ ID NO: 2514589 - RNA, 19 nt, Homo sapiens
  misc_RNA (1)...(19): siRNA sense strand
ccauuaucuuugaggcaca

SEQ ID NO: 2514590 - RNA, 19 nt, Homo sapiens
  misc_RNA (1)...(19): siRNA sense strand
gcucauugauacuaggcuu

SEQ ID NO: 2514591 - RNA, 19 nt, Homo sapiens
  misc_RNA (1)...(19): siRNA sense strand
auacagaacaggccagcaa

SEQ ID NO: 2514592 - RNA, 19 nt, Homo sapiens
  misc_RNA (1)...(19): siRNA sense strand
ccaccagaaauguaggauu

SEQ ID NO: 2514593 - RNA, 19 nt, Homo sapiens
  misc_RNA (1)...(19): siRNA sense strand
agaaucaagcauuaagcaa

SEQ ID NO: 2514594 - RNA, 19 nt, Homo sapiens
  misc_RNA (1)...(19): siRNA sense strand
ccaacuacuaccacagaau

SEQ ID NO: 2514595 - RNA, 19 nt, Homo sapiens
  misc_RNA (1)...(19): siRNA sense strand
ggaaaagcaagaagaagau

SEQ ID NO: 2514596 - RNA, 19 nt, Homo sapiens
  misc_RNA (1)...(19): siRNA sense strand
ggacccuuaugguggaaaa

SEQ ID NO: 2514597 - RNA, 19 nt, Homo sapiens
  misc_RNA (1)...(19): siRNA sense strand
gguggaaaagcaagaagaa

SEQ ID NO: 2514598 - RNA, 19 nt, Homo sapiens
  misc_RNA (1)...(19): siRNA sense strand
aaguaaaacugcaagcaca

SEQ ID NO: 2514599 - RNA, 19 nt, Homo sapiens
  misc_RNA (1)...(19): siRNA sense strand
aggcacaagaugcagagua

SEQ ID NO: 2514600 - RNA, 19 nt, Homo sapiens
  misc_RNA (1)...(19): siRNA sense strand
aagacuuucuggaugguau

SEQ ID NO: 2514601 - RNA, 19 nt, Homo sapiens
  misc_RNA (1)...(19): siRNA sense strand
gccuugaagaugaggggaa

SEQ ID NO: 2514602 - RNA, 19 nt, Homo sapiens
  misc_RNA (1)...(19): siRNA sense strand
agcagaugucauucagaaa

SEQ ID NO: 2514603 - RNA, 19 nt, Homo sapiens
  misc_RNA (1)...(19): siRNA sense strand
auggauuacugaagagaag

SEQ ID NO: 2514604 - RNA, 19 nt, Homo sapiens
  misc_RNA (1)...(19): siRNA sense strand
gggcucaacuccagggcuu

SEQ ID NO: 2514605 - RNA, 19 nt, Homo sapiens
  misc_RNA (1)...(19): siRNA sense strand
caacuuugaccgacggcua

SEQ ID NO: 2514606 - RNA, 19 nt, Homo sapiens
  misc_RNA (1)...(19): siRNA sense strand
gaacaaggcuucaggcagg

SEQ ID NO: 2514607 - RNA, 19 nt, Homo sapiens
  misc_RNA (1)...(19): siRNA sense strand
gggagaagaacgagccgga

SEQ ID NO: 2514608 - RNA, 19 nt, Homo sapiens
  misc_RNA (1)...(19): siRNA sense strand
cugucgaguccaagggaga

SEQ ID NO: 2514609 - RNA, 19 nt, Homo sapiens
  misc_RNA (1)...(19): siRNA sense strand
ccaagaacuggcuggacau

SEQ ID NO: 2514610 - RNA, 19 nt, Homo sapiens
  misc_RNA (1)...(19): siRNA sense strand
cagaaguacgugaaggagu

SEQ ID NO: 2514611 - RNA, 19 nt, Homo sapiens
  misc_RNA (1)...(19): siRNA sense strand
auggacggaugcagagcaa

SEQ ID NO: 2514612 - RNA, 19 nt, Homo sapiens
  misc_RNA (1)...(19): siRNA sense strand
guccaagggagaagaacga

SEQ ID NO: 2514613 - RNA, 19 nt, Homo sapiens
  misc_RNA (1)...(19): siRNA sense strand
uggcaagagauaaacauca

SEQ ID NO: 2514614 - RNA, 19 nt, Homo sapiens
  misc_RNA (1)...(19): siRNA sense strand
aaggcaagcaguuggcuau

SEQ ID NO: 2514615 - RNA, 19 nt, Homo sapiens
  misc_RNA (1)...(19): siRNA sense strand
acauauuucuggugcgcuu

SEQ ID NO: 2514616 - RNA, 19 nt, Homo sapiens
  misc_RNA (1)...(19): siRNA sense strand
cucuaguggugaugggaau

SEQ ID NO: 2514617 - RNA, 19 nt, Homo sapiens
  misc_RNA (1)...(19): siRNA sense strand
ucgaaguaguguuggccuu

SEQ ID NO: 2514618 - RNA, 19 nt, Homo sapiens
  misc_RNA (1)...(19): siRNA sense strand
ggcccaaggugacaggcua

SEQ ID NO: 2514619 - RNA, 19 nt, Homo sapiens
  misc_RNA (1)...(19): siRNA sense strand
ggagcgauguagugggaag

SEQ ID NO: 2514620 - RNA, 19 nt, Homo sapiens
  misc_RNA (1)...(19): siRNA sense strand
cugaauuagaggauggguu

SEQ ID NO: 2514621 - RNA, 19 nt, Homo sapiens
  misc_RNA (1)...(19): siRNA sense strand
agacaggaaccgaggcgga

SEQ ID NO: 2514622 - RNA, 19 nt, Homo sapiens
  misc_RNA (1)...(19): siRNA sense strand
cggaaacaggagcagaaga

SEQ ID NO: 2514623 - RNA, 19 nt, Homo sapiens
  misc_RNA (1)...(19): siRNA sense strand
ccacugaauuagaggaugg

SEQ ID NO: 2514624 - RNA, 19 nt, Homo sapiens
  misc_RNA (1)...(19): siRNA sense strand
agcggaaacaggagcagaa

SEQ ID NO: 2514625 - RNA, 19 nt, Homo sapiens
  misc_RNA (1)...(19): siRNA sense strand
caggagcagaagacaggaa

SEQ ID NO: 2514626 - RNA, 19 nt, Homo sapiens
  misc_RNA (1)...(19): siRNA sense strand
gugaagucaggcagggaua

SEQ ID NO: 2514627 - RNA, 19 nt, Homo sapiens
  misc_RNA (1)...(19): siRNA sense strand
ccguauucgagcagugcaa

SEQ ID NO: 2514628 - RNA, 19 nt, Homo sapiens
  misc_RNA (1)...(19): siRNA sense strand
gcaucagcuauguggugua

SEQ ID NO: 2514629 - RNA, 19 nt, Homo sapiens
  misc_RNA (1)...(19): siRNA sense strand
gugcugaagacgcgguuga

SEQ ID NO: 2514630 - RNA, 19 nt, Homo sapiens
  misc_RNA (1)...(19): siRNA sense strand
ggcagaucuugcagcgaga

SEQ ID NO: 2514631 - RNA, 19 nt, Homo sapiens
  misc_RNA (1)...(19): siRNA sense strand
augagaugcuccagugcuu

SEQ ID NO: 2514632 - RNA, 19 nt, Homo sapiens
  misc_RNA (1)...(19): siRNA sense strand
ccucacggaacgucagcaa

SEQ ID NO: 2514633 - RNA, 19 nt, Homo sapiens
  misc_RNA (1)...(19): siRNA sense strand
augcuuugguuaaacgaau

SEQ ID NO: 2514634 - RNA, 19 nt, Homo sapiens
  misc_RNA (1)...(19): siRNA sense strand
gcuucaugcaggagcgcca

SEQ ID NO: 2514635 - RNA, 19 nt, Homo sapiens
  misc_RNA (1)...(19): siRNA sense strand
gcaucaugauaaaggacau

SEQ ID NO: 2514636 - RNA, 19 nt, Homo sapiens
  misc_RNA (1)...(19): siRNA sense strand
ggaaaugguucuaacagca

SEQ ID NO: 2514637 - RNA, 19 nt, Homo sapiens
  misc_RNA (1)...(19): siRNA sense strand
guuucaaaucagagggagu

SEQ ID NO: 2514638 - RNA, 19 nt, Homo sapiens
  misc_RNA (1)...(19): siRNA sense strand
uguauaagguccaugggau

SEQ ID NO: 2514639 - RNA, 19 nt, Homo sapiens
  misc_RNA (1)...(19): siRNA sense strand
uggccaaagaugagaagca

SEQ ID NO: 2514640 - RNA, 19 nt, Homo sapiens
  misc_RNA (1)...(19): siRNA sense strand
cugaaagacaucaaagcuu

SEQ ID NO: 2514641 - RNA, 19 nt, Homo sapiens
  misc_RNA (1)...(19): siRNA sense strand
guauaagguccaugggauc

SEQ ID NO: 2514642 - RNA, 19 nt, Homo sapiens
  misc_RNA (1)...(19): siRNA sense strand
acacccuggaggagauaua

SEQ ID NO: 2514643 - RNA, 19 nt, Homo sapiens
  misc_RNA (1)...(19): siRNA sense strand
gaggagauauauagcugga

SEQ ID NO: 2514644 - RNA, 19 nt, Homo sapiens
  misc_RNA (1)...(19): siRNA sense strand
aaagacaggccauggcgaa

SEQ ID NO: 2514645 - RNA, 19 nt, Homo sapiens
  misc_RNA (1)...(19): siRNA sense strand
guacauaucaagagggcaa

SEQ ID NO: 2514646 - RNA, 19 nt, Homo sapiens
  misc_RNA (1)...(19): siRNA sense strand
aagcaauaagugugacaga

SEQ ID NO: 2514647 - RNA, 19 nt, Homo sapiens
  misc_RNA (1)...(19): siRNA sense strand
cggaauaaucucaggaagc

SEQ ID NO: 2514648 - RNA, 19 nt, Homo sapiens
  misc_RNA (1)...(19): siRNA sense strand
cauggaaagaugccagaau

SEQ ID NO: 2514649 - RNA, 19 nt, Homo sapiens
  misc_RNA (1)...(19): siRNA sense strand
gaauaaucucaggaagcaa

SEQ ID NO: 2514650 - RNA, 19 nt, Homo sapiens
  misc_RNA (1)...(19): siRNA sense strand
gguucuuguucauuguaau

SEQ ID NO: 2514651 - RNA, 19 nt, Homo sapiens
  misc_RNA (1)...(19): siRNA sense strand
agaaauuacaggagaagaa

SEQ ID NO: 2514652 - RNA, 19 nt, Homo sapiens
  misc_RNA (1)...(19): siRNA sense strand
acccagaaguuaagagaau

SEQ ID NO: 2514653 - RNA, 19 nt, Homo sapiens
  misc_RNA (1)...(19): siRNA sense strand
ggaaaagcgaccagguaaa

SEQ ID NO: 2514654 - RNA, 19 nt, Homo sapiens
  misc_RNA (1)...(19): siRNA sense strand
acaaagaugaagaggauca

SEQ ID NO: 2514655 - RNA, 19 nt, Homo sapiens
  misc_RNA (1)...(19): siRNA sense strand
caggagaagaagaugcaua

SEQ ID NO: 2514656 - RNA, 19 nt, Homo sapiens
  misc_RNA (1)...(19): siRNA sense strand
guuaaagauuggaagcaga

SEQ ID NO: 2514657 - RNA, 19 nt, Homo sapiens
  misc_RNA (1)...(19): siRNA sense strand
gcaagauaaauuaggccaa

SEQ ID NO: 2514658 - RNA, 19 nt, Homo sapiens
  misc_RNA (1)...(19): siRNA sense strand
guaaaaggauugagaggga

SEQ ID NO: 2514659 - RNA, 19 nt, Homo sapiens
  misc_RNA (1)...(19): siRNA sense strand
ccagaaguuaagagaauuu

SEQ ID NO: 2514660 - RNA, 19 nt, Homo sapiens
  misc_RNA (1)...(19): siRNA sense strand
augcagagaaaguggaaga

SEQ ID NO: 2514661 - RNA, 19 nt, Homo sapiens
  misc_RNA (1)...(19): siRNA sense strand
cagaggaagcugaagaaaa

SEQ ID NO: 2514662 - RNA, 19 nt, Homo sapiens
  misc_RNA (1)...(19): siRNA sense strand
gauuuaggacaaagaguau

SEQ ID NO: 2514663 - RNA, 19 nt, Homo sapiens
  misc_RNA (1)...(19): siRNA sense strand
agagggaagaagaggaaga

SEQ ID NO: 2514664 - RNA, 19 nt, Homo sapiens
  misc_RNA (1)...(19): siRNA sense strand
ggaagagaucauugaagau

SEQ ID NO: 2514665 - RNA, 19 nt, Homo sapiens
  misc_RNA (1)...(19): siRNA sense strand
guugugaagcugugaagaa

SEQ ID NO: 2514666 - RNA, 19 nt, Homo sapiens
  misc_RNA (1)...(19): siRNA sense strand
ucauauucuuucuggacaa

SEQ ID NO: 2514667 - RNA, 19 nt, Homo sapiens
  misc_RNA (1)...(19): siRNA sense strand
uggagaacccaaaggaaaa

SEQ ID NO: 2514668 - RNA, 19 nt, Homo sapiens
  misc_RNA (1)...(19): siRNA sense strand
aagaagaaauuacaggaga

SEQ ID NO: 2514669 - RNA, 19 nt, Homo sapiens
  misc_RNA (1)...(19): siRNA sense strand
uggaaaaucuggaacaaau

SEQ ID NO: 2514670 - RNA, 19 nt, Homo sapiens
  misc_RNA (1)...(19): siRNA sense strand
agagagggaacuugaggaa

SEQ ID NO: 2514671 - RNA, 19 nt, Homo sapiens
  misc_RNA (1)...(19): siRNA sense strand
gcgagagcuucgagaggca

SEQ ID NO: 2514672 - RNA, 19 nt, Homo sapiens
  misc_RNA (1)...(19): siRNA sense strand
uggcagaagucgcugugaa

SEQ ID NO: 2514673 - RNA, 19 nt, Homo sapiens
  misc_RNA (1)...(19): siRNA sense strand
acuaagacccgaaaagaaa

SEQ ID NO: 2514674 - RNA, 19 nt, Homo sapiens
  misc_RNA (1)...(19): siRNA sense strand
ggaagaagaagaagcccuu

SEQ ID NO: 2514675 - RNA, 19 nt, Homo sapiens
  misc_RNA (1)...(19): siRNA sense strand
cagagaaggaacugauuca

SEQ ID NO: 2514676 - RNA, 19 nt, Homo sapiens
  misc_RNA (1)...(19): siRNA sense strand
ugagagggaagaagaggaa

SEQ ID NO: 2514677 - RNA, 19 nt, Homo sapiens
  misc_RNA (1)...(19): siRNA sense strand
guaacaaagaugaagagga

SEQ ID NO: 2514678 - RNA, 19 nt, Homo sapiens
  misc_RNA (1)...(19): siRNA sense strand
augaagaggaucaagaaga

SEQ ID NO: 2514679 - RNA, 19 nt, Homo sapiens
  misc_RNA (1)...(19): siRNA sense strand
aggagaagaagaugcauau

SEQ ID NO: 2514680 - RNA, 19 nt, Homo sapiens
  misc_RNA (1)...(19): siRNA sense strand
ucaagaaugcagagaaagu

SEQ ID NO: 2514681 - RNA, 19 nt, Homo sapiens
  misc_RNA (1)...(19): siRNA sense strand
cuucaaaccccaaaauaaa

SEQ ID NO: 2514682 - RNA, 19 nt, Homo sapiens
  misc_RNA (1)...(19): siRNA sense strand
ugauugagagaaagaagaa

SEQ ID NO: 2514683 - RNA, 19 nt, Homo sapiens
  misc_RNA (1)...(19): siRNA sense strand
gccuaagaaucaaggaagu

SEQ ID NO: 2514684 - RNA, 19 nt, Homo sapiens
  misc_RNA (1)...(19): siRNA sense strand
cauugagucuggugaccua

SEQ ID NO: 2514685 - RNA, 19 nt, Homo sapiens
  misc_RNA (1)...(19): siRNA sense strand
cgaaaagaacagaggaaac

SEQ ID NO: 2514686 - RNA, 19 nt, Homo sapiens
  misc_RNA (1)...(19): siRNA sense strand
ccuaagaaucaaggaagua

SEQ ID NO: 2514687 - RNA, 19 nt, Homo sapiens
  misc_RNA (1)...(19): siRNA sense strand
cauugaaauucuacacaca

SEQ ID NO: 2514688 - RNA, 19 nt, Homo sapiens
  misc_RNA (1)...(19): siRNA sense strand
ggaacaaaugguuaaagau

SEQ ID NO: 2514689 - RNA, 19 nt, Homo sapiens
  misc_RNA (1)...(19): siRNA sense strand
gaaucaaggaaguagaagu

SEQ ID NO: 2514690 - RNA, 19 nt, Homo sapiens
  misc_RNA (1)...(19): siRNA sense strand
gugaagagcuugugugagc

SEQ ID NO: 2514691 - RNA, 19 nt, Homo sapiens
  misc_RNA (1)...(19): siRNA sense strand
agagcugaccauagaagaa

SEQ ID NO: 2514692 - RNA, 19 nt, Homo sapiens
  misc_RNA (1)...(19): siRNA sense strand
acuaaggcaagcugugaaa

SEQ ID NO: 2514693 - RNA, 19 nt, Homo sapiens
  misc_RNA (1)...(19): siRNA sense strand
agaaagcagaagagaaacu

SEQ ID NO: 2514694 - RNA, 19 nt, Homo sapiens
  misc_RNA (1)...(19): siRNA sense strand
aggaaaagcgaccagguaa

SEQ ID NO: 2514695 - RNA, 19 nt, Homo sapiens
  misc_RNA (1)...(19): siRNA sense strand
uaaugaaggauuuaggaca

SEQ ID NO: 2514696 - RNA, 19 nt, Homo sapiens
  misc_RNA (1)...(19): siRNA sense strand
caagaagaagagagggaac

SEQ ID NO: 2514697 - RNA, 19 nt, Homo sapiens
  misc_RNA (1)...(19): siRNA sense strand
aagauuggaagcagaggaa

SEQ ID NO: 2514698 - RNA, 19 nt, Homo sapiens
  misc_RNA (1)...(19): siRNA sense strand
acagaggaaacuaaggcaa

SEQ ID NO: 2514699 - RNA, 19 nt, Homo sapiens
  misc_RNA (1)...(19): siRNA sense strand
auacaaaggacuggcagaa

SEQ ID NO: 2514700 - RNA, 19 nt, Homo sapiens
  misc_RNA (1)...(19): siRNA sense strand
uugugaagcugugaagaaa

SEQ ID NO: 2514701 - RNA, 19 nt, Homo sapiens
  misc_RNA (1)...(19): siRNA sense strand
gcgaagaaacggaagcaug

SEQ ID NO: 2514702 - RNA, 19 nt, Homo sapiens
  misc_RNA (1)...(19): siRNA sense strand
ccgaaaagaacagaggaaa

SEQ ID NO: 2514703 - RNA, 19 nt, Homo sapiens
  misc_RNA (1)...(19): siRNA sense strand
ugaccuaagcuaucaagaa

SEQ ID NO: 2514704 - RNA, 19 nt, Homo sapiens
  misc_RNA (1)...(19): siRNA sense strand
cauuugauugagagaaaga

SEQ ID NO: 2514705 - RNA, 19 nt, Homo sapiens
  misc_RNA (1)...(19): siRNA sense strand
aagcagaggaagcugaaga

SEQ ID NO: 2514706 - RNA, 19 nt, Homo sapiens
  misc_RNA (1)...(19): siRNA sense strand
aggaaaagaggaagaagaa

SEQ ID NO: 2514707 - RNA, 19 nt, Homo sapiens
  misc_RNA (1)...(19): siRNA sense strand
aggaauacagugacgacaa

SEQ ID NO: 2514708 - RNA, 19 nt, Homo sapiens
  misc_RNA (1)...(19): siRNA sense strand
caggaaaagaggaagaaga

SEQ ID NO: 2514709 - RNA, 19 nt, Homo sapiens
  misc_RNA (1)...(19): siRNA sense strand
cacgaaacccaaaggaaaa

SEQ ID NO: 2514710 - RNA, 19 nt, Homo sapiens
  misc_RNA (1)...(19): siRNA sense strand
aggacaagauggagggcag

SEQ ID NO: 2514711 - RNA, 19 nt, Homo sapiens
  misc_RNA (1)...(19): siRNA sense strand
gaguacaucuccacgguga

SEQ ID NO: 2514712 - RNA, 19 nt, Homo sapiens
  misc_RNA (1)...(19): siRNA sense strand
cggaagauaagaaagcaga

SEQ ID NO: 2514713 - RNA, 19 nt, Homo sapiens
  misc_RNA (1)...(19): siRNA sense strand
gaagcagaucugaaggaca

SEQ ID NO: 2514714 - RNA, 19 nt, Homo sapiens
  misc_RNA (1)...(19): siRNA sense strand
accagaggacggaagauaa

SEQ ID NO: 2514715 - RNA, 19 nt, Homo sapiens
  misc_RNA (1)...(19): siRNA sense strand
acaaagugcagcuggccau

SEQ ID NO: 2514716 - RNA, 19 nt, Homo sapiens
  misc_RNA (1)...(19): siRNA sense strand
ugaaagcuccggagggcga

SEQ ID NO: 2514717 - RNA, 19 nt, Homo sapiens
  misc_RNA (1)...(19): siRNA sense strand
gggucugaguucacugaca

SEQ ID NO: 2514718 - RNA, 19 nt, Homo sapiens
  misc_RNA (1)...(19): siRNA sense strand
agagaguggaauagagaca

SEQ ID NO: 2514719 - RNA, 19 nt, Homo sapiens
  misc_RNA (1)...(19): siRNA sense strand
cgauagcaggcauguauaa

SEQ ID NO: 2514720 - RNA, 19 nt, Homo sapiens
  misc_RNA (1)...(19): siRNA sense strand
ugggugaaguccuggaaaa

SEQ ID NO: 2514721 - RNA, 19 nt, Homo sapiens
  misc_RNA (1)...(19): siRNA sense strand
auuaaaaggugcucaggaa

SEQ ID NO: 2514722 - RNA, 19 nt, Homo sapiens
  misc_RNA (1)...(19): siRNA sense strand
aggaacggauagauagcuu

SEQ ID NO: 2514723 - RNA, 19 nt, Homo sapiens
  misc_RNA (1)...(19): siRNA sense strand
agaauugcugccugacaaa

SEQ ID NO: 2514724 - RNA, 19 nt, Homo sapiens
  misc_RNA (1)...(19): siRNA sense strand
uggugaagucugugcuuga

SEQ ID NO: 2514725 - RNA, 19 nt, Homo sapiens
  misc_RNA (1)...(19): siRNA sense strand
gaucuacagugcagccaga

SEQ ID NO: 2514726 - RNA, 19 nt, Homo sapiens
  misc_RNA (1)...(19): siRNA sense strand
cugauuggcacauggcauu

SEQ ID NO: 2514727 - RNA, 19 nt, Homo sapiens
  misc_RNA (1)...(19): siRNA sense strand
uagcaggcauguauaaaca

SEQ ID NO: 2514728 - RNA, 19 nt, Homo sapiens
  misc_RNA (1)...(19): siRNA sense strand
ggacaugcugggagagcuc

SEQ ID NO: 2514729 - RNA, 19 nt, Homo sapiens
  misc_RNA (1)...(19): siRNA sense strand
gcugggaauccuaugguga

SEQ ID NO: 2514730 - RNA, 19 nt, Homo sapiens
  misc_RNA (1)...(19): siRNA sense strand
gcgauagcaggcauguaua

SEQ ID NO: 2514731 - RNA, 19 nt, Homo sapiens
  misc_RNA (1)...(19): siRNA sense strand
cagcagggucagugggaga

SEQ ID NO: 2514732 - RNA, 19 nt, Homo sapiens
  misc_RNA (1)...(19): siRNA sense strand
ggcagugcgacgagagcaa

SEQ ID NO: 2514733 - RNA, 19 nt, Homo sapiens
  misc_RNA (1)...(19): siRNA sense strand
aggaugagugccuggacua

SEQ ID NO: 2514734 - RNA, 19 nt, Homo sapiens
  misc_RNA (1)...(19): siRNA sense strand
ugacugaggcccugcgaga

SEQ ID NO: 2514735 - RNA, 19 nt, Homo sapiens
  misc_RNA (1)...(19): siRNA sense strand
caaagaggacagaggguag

SEQ ID NO: 2514736 - RNA, 19 nt, Homo sapiens
  misc_RNA (1)...(19): siRNA sense strand
cgugcugggaggaggauga

SEQ ID NO: 2514737 - RNA, 19 nt, Homo sapiens
  misc_RNA (1)...(19): siRNA sense strand
gggaggaggaugagugccu

SEQ ID NO: 2514738 - RNA, 19 nt, Homo sapiens
  misc_RNA (1)...(19): siRNA sense strand
ucaaagaggacagagggua

SEQ ID NO: 2514739 - RNA, 19 nt, Homo sapiens
  misc_RNA (1)...(19): siRNA sense strand
ggcaaagugaccugugaca

SEQ ID NO: 2514740 - RNA, 19 nt, Homo sapiens
  misc_RNA (1)...(19): siRNA sense strand
cggaaacccucgugggaca

SEQ ID NO: 2514741 - RNA, 19 nt, Homo sapiens
  misc_RNA (1)...(19): siRNA sense strand
cggcaaaaugggcggacaa

SEQ ID NO: 2514742 - RNA, 19 nt, Homo sapiens
  misc_RNA (1)...(19): siRNA sense strand
gaggagagcgagcaggaga

SEQ ID NO: 2514743 - RNA, 19 nt, Homo sapiens
  misc_RNA (1)...(19): siRNA sense strand
cggacaauuucauggccga

SEQ ID NO: 2514744 - RNA, 19 nt, Homo sapiens
  misc_RNA (1)...(19): siRNA sense strand
agagcgagcaggagagacu

SEQ ID NO: 2514745 - RNA, 19 nt, Homo sapiens
  misc_RNA (1)...(19): siRNA sense strand
gggcauguuccugggagaa

SEQ ID NO: 2514746 - RNA, 19 nt, Homo sapiens
  misc_RNA (1)...(19): siRNA sense strand
ugggcauguuccugggaga

SEQ ID NO: 2514747 - RNA, 19 nt, Homo sapiens
  misc_RNA (1)...(19): siRNA sense strand
cagcacuguuacugggaau

SEQ ID NO: 2514748 - RNA, 19 nt, Homo sapiens
  misc_RNA (1)...(19): siRNA sense strand
agagacaacgacugagcaa

SEQ ID NO: 2514749 - RNA, 19 nt, Homo sapiens
  misc_RNA (1)...(19): siRNA sense strand
ucacgaugcggcaggaaca

SEQ ID NO: 2514750 - RNA, 19 nt, Homo sapiens
  misc_RNA (1)...(19): siRNA sense strand
agaccugguaccuggauuu

SEQ ID NO: 2514751 - RNA, 19 nt, Homo sapiens
  misc_RNA (1)...(19): siRNA sense strand
acagaaauuaagagaggaa

SEQ ID NO: 2514752 - RNA, 19 nt, Homo sapiens
  misc_RNA (1)...(19): siRNA sense strand
accuaugauuggagaggaa

SEQ ID NO: 2514753 - RNA, 19 nt, Homo sapiens
  misc_RNA (1)...(19): siRNA sense strand
aagaagaacucucacgcua

SEQ ID NO: 2514754 - RNA, 19 nt, Homo sapiens
  misc_RNA (1)...(19): siRNA sense strand
cgaauggaaaggagguaga

SEQ ID NO: 2514755 - RNA, 19 nt, Homo sapiens
  misc_RNA (1)...(19): siRNA sense strand
cagagaacuguuagauaau

SEQ ID NO: 2514756 - RNA, 19 nt, Homo sapiens
  misc_RNA (1)...(19): siRNA sense strand
gggaugaggaacuguccaa

SEQ ID NO: 2514757 - RNA, 19 nt, Homo sapiens
  misc_RNA (1)...(19): siRNA sense strand
auggaaaggagguagaaaa

SEQ ID NO: 2514758 - RNA, 19 nt, Homo sapiens
  misc_RNA (1)...(19): siRNA sense strand
caguaaucaaggagacaca

SEQ ID NO: 2514759 - RNA, 19 nt, Homo sapiens
  misc_RNA (1)...(19): siRNA sense strand
guugcaaaugacagugaaa

SEQ ID NO: 2514760 - RNA, 19 nt, Homo sapiens
  misc_RNA (1)...(19): siRNA sense strand
agaaauuaagagaggaauc

SEQ ID NO: 2514761 - RNA, 19 nt, Homo sapiens
  misc_RNA (1)...(19): siRNA sense strand
aggagagucaagaaacaaa

SEQ ID NO: 2514762 - RNA, 19 nt, Homo sapiens
  misc_RNA (1)...(19): siRNA sense strand
cuacagaaauuaagagagg

SEQ ID NO: 2514763 - RNA, 19 nt, Homo sapiens
  misc_RNA (1)...(19): siRNA sense strand
cuuuagggccauacaggaa

SEQ ID NO: 2514764 - RNA, 19 nt, Homo sapiens
  misc_RNA (1)...(19): siRNA sense strand
aauuauuucuuuagggcca

SEQ ID NO: 2514765 - RNA, 19 nt, Homo sapiens
  misc_RNA (1)...(19): siRNA sense strand
ugcuugauauugagaacaa

SEQ ID NO: 2514766 - RNA, 19 nt, Homo sapiens
  misc_RNA (1)...(19): siRNA sense strand
aaugaaaauccauggacaa

SEQ ID NO: 2514767 - RNA, 19 nt, Homo sapiens
  misc_RNA (1)...(19): siRNA sense strand
aggaugaaaucuuugacau

SEQ ID NO: 2514768 - RNA, 19 nt, Homo sapiens
  misc_RNA (1)...(19): siRNA sense strand
gugaaaaggcuggagcaaa

SEQ ID NO: 2514769 - RNA, 19 nt, Homo sapiens
  misc_RNA (1)...(19): siRNA sense strand
gaggaacuguccaaggaga

SEQ ID NO: 2514770 - RNA, 19 nt, Homo sapiens
  misc_RNA (1)...(19): siRNA sense strand
gggccauacaggaacuaau

SEQ ID NO: 2514771 - RNA, 19 nt, Homo sapiens
  misc_RNA (1)...(19): siRNA sense strand
gcuucaucaaacaagaaua

SEQ ID NO: 2514772 - RNA, 19 nt, Homo sapiens
  misc_RNA (1)...(19): siRNA sense strand
ccauacaggaacuaaugaa

SEQ ID NO: 2514773 - RNA, 19 nt, Homo sapiens
  misc_RNA (1)...(19): siRNA sense strand
caacaguaaucaaggagac

SEQ ID NO: 2514774 - RNA, 19 nt, Homo sapiens
  misc_RNA (1)...(19): siRNA sense strand
aggcuggagcaaagugcaa

SEQ ID NO: 2514775 - RNA, 19 nt, Homo sapiens
  misc_RNA (1)...(19): siRNA sense strand
uggcaugcucaguaaagaa

SEQ ID NO: 2514776 - RNA, 19 nt, Homo sapiens
  misc_RNA (1)...(19): siRNA sense strand
agcagagaacuguuagaua

SEQ ID NO: 2514777 - RNA, 19 nt, Homo sapiens
  misc_RNA (1)...(19): siRNA sense strand
aauuagauggucuggaaaa

SEQ ID NO: 2514778 - RNA, 19 nt, Homo sapiens
  misc_RNA (1)...(19): siRNA sense strand
caauuagauggucuggaaa

SEQ ID NO: 2514779 - RNA, 19 nt, Homo sapiens
  misc_RNA (1)...(19): siRNA sense strand
caugcucaguaaagaagaa

SEQ ID NO: 2514780 - RNA, 19 nt, Homo sapiens
  misc_RNA (1)...(19): siRNA sense strand
ggugaaaaggcuggagcaa

SEQ ID NO: 2514781 - RNA, 19 nt, Homo sapiens
  misc_RNA (1)...(19): siRNA sense strand
ccuucugcccuaagaguuu

SEQ ID NO: 2514782 - RNA, 19 nt, Homo sapiens
  misc_RNA (1)...(19): siRNA sense strand
ccuaagaguuuauggccag

SEQ ID NO: 2514783 - RNA, 19 nt, Homo sapiens
  misc_RNA (1)...(19): siRNA sense strand
auaaagaucacaauggcau

SEQ ID NO: 2514784 - RNA, 19 nt, Homo sapiens
  misc_RNA (1)...(19): siRNA sense strand
agcuaagggaugaggaacu

SEQ ID NO: 2514785 - RNA, 19 nt, Homo sapiens
  misc_RNA (1)...(19): siRNA sense strand
cccuaagaguuuauggcca

SEQ ID NO: 2514786 - RNA, 19 nt, Homo sapiens
  misc_RNA (1)...(19): siRNA sense strand
agaacaaaggauaccugaa

SEQ ID NO: 2514787 - RNA, 19 nt, Homo sapiens
  misc_RNA (1)...(19): siRNA sense strand
aauauuacuccgaauggaa

SEQ ID NO: 2514788 - RNA, 19 nt, Homo sapiens
  misc_RNA (1)...(19): siRNA sense strand
acaaaggauaccugaaugu

SEQ ID NO: 2514789 - RNA, 19 nt, Homo sapiens
  misc_RNA (1)...(19): siRNA sense strand
gugaugagucagaugaaga

SEQ ID NO: 2514790 - RNA, 19 nt, Homo sapiens
  misc_RNA (1)...(19): siRNA sense strand
acccaagagugaugaguca

SEQ ID NO: 2514791 - RNA, 19 nt, Homo sapiens
  misc_RNA (1)...(19): siRNA sense strand
acuagaaagacuuaccaaa

SEQ ID NO: 2514792 - RNA, 19 nt, Homo sapiens
  misc_RNA (1)...(19): siRNA sense strand
ggaauacgcaccuaggcaa

SEQ ID NO: 2514793 - RNA, 19 nt, Homo sapiens
  misc_RNA (1)...(19): siRNA sense strand
cauuauaacaacagcucuu

SEQ ID NO: 2514794 - RNA, 19 nt, Homo sapiens
  misc_RNA (1)...(19): siRNA sense strand
cuucaauggcuaauaucua

SEQ ID NO: 2514795 - RNA, 19 nt, Homo sapiens
  misc_RNA (1)...(19): siRNA sense strand
uucugaaguuccuggauaa

SEQ ID NO: 2514796 - RNA, 19 nt, Homo sapiens
  misc_RNA (1)...(19): siRNA sense strand
caguggggauggagaagaa

SEQ ID NO: 2514797 - RNA, 19 nt, Homo sapiens
  misc_RNA (1)...(19): siRNA sense strand
agacaauuguacagcaaag

SEQ ID NO: 2514798 - RNA, 19 nt, Homo sapiens
  misc_RNA (1)...(19): siRNA sense strand
agucagaugaagauacuuu

SEQ ID NO: 2514799 - RNA, 19 nt, Homo sapiens
  misc_RNA (1)...(19): siRNA sense strand
augaaaagauacugaagga

SEQ ID NO: 2514800 - RNA, 19 nt, Homo sapiens
  misc_RNA (1)...(19): siRNA sense strand
cagauuaagaacuguggau

SEQ ID NO: 2514801 - RNA, 19 nt, Homo sapiens
  misc_RNA (1)...(19): siRNA sense strand
caauuguacagcaaaggaa

SEQ ID NO: 2514802 - RNA, 19 nt, Homo sapiens
  misc_RNA (1)...(19): siRNA sense strand
ccgagaucuaaguggcaau

SEQ ID NO: 2514803 - RNA, 19 nt, Homo sapiens
  misc_RNA (1)...(19): siRNA sense strand
gagugaugagucagaugaa

SEQ ID NO: 2514804 - RNA, 19 nt, Homo sapiens
  misc_RNA (1)...(19): siRNA sense strand
gaagcuaaauggaacacca

SEQ ID NO: 2514805 - RNA, 19 nt, Homo sapiens
  misc_RNA (1)...(19): siRNA sense strand
ccugaagcuaaauggaaca

SEQ ID NO: 2514806 - RNA, 19 nt, Homo sapiens
  misc_RNA (1)...(19): siRNA sense strand
ccaaugaagaaaacaagua

SEQ ID NO: 2514807 - RNA, 19 nt, Homo sapiens
  misc_RNA (1)...(19): siRNA sense strand
ugccauauucauugcuuua

SEQ ID NO: 2514808 - RNA, 19 nt, Homo sapiens
  misc_RNA (1)...(19): siRNA sense strand
gggauggagaagaacuaga

SEQ ID NO: 2514809 - RNA, 19 nt, Homo sapiens
  misc_RNA (1)...(19): siRNA sense strand
agaagaacuagaaagacuu

SEQ ID NO: 2514810 - RNA, 19 nt, Homo sapiens
  misc_RNA (1)...(19): siRNA sense strand
auggagacgcugaaggaua

SEQ ID NO: 2514811 - RNA, 19 nt, Homo sapiens
  misc_RNA (1)...(19): siRNA sense strand
aagaagaguccgaggccau

SEQ ID NO: 2514812 - RNA, 19 nt, Homo sapiens
  misc_RNA (1)...(19): siRNA sense strand
agaaguuccuggagggcga

SEQ ID NO: 2514813 - RNA, 19 nt, Homo sapiens
  misc_RNA (1)...(19): siRNA sense strand
cgcucaaaccucucggaua

SEQ ID NO: 2514814 - RNA, 19 nt, Homo sapiens
  misc_RNA (1)...(19): siRNA sense strand
aggccauggcugagaaguu

SEQ ID NO: 2514815 - RNA, 19 nt, Homo sapiens
  misc_RNA (1)...(19): siRNA sense strand
aggcaugaagaucgaagaa

SEQ ID NO: 2514816 - RNA, 19 nt, Homo sapiens
  misc_RNA (1)...(19): siRNA sense strand
uggcagggaaggauggaga

SEQ ID NO: 2514817 - RNA, 19 nt, Homo sapiens
  misc_RNA (1)...(19): siRNA sense strand
agaaugacucggaggcgau

SEQ ID NO: 2514818 - RNA, 19 nt, Homo sapiens
  misc_RNA (1)...(19): siRNA sense strand
ggaaggauggagacgcuga

SEQ ID NO: 2514819 - RNA, 19 nt, Homo sapiens
  misc_RNA (1)...(19): siRNA sense strand
cagaaugacucggaggcga

SEQ ID NO: 2514820 - RNA, 19 nt, Homo sapiens
  misc_RNA (1)...(19): siRNA sense strand
guggaaaucagaagggcaa

SEQ ID NO: 2514821 - RNA, 19 nt, Homo sapiens
  misc_RNA (1)...(19): siRNA sense strand
aggaacaacagaagagaau

SEQ ID NO: 2514822 - RNA, 19 nt, Homo sapiens
  misc_RNA (1)...(19): siRNA sense strand
gugucuugaugaugagaau

SEQ ID NO: 2514823 - RNA, 19 nt, Homo sapiens
  misc_RNA (1)...(19): siRNA sense strand
ggaguggcuacaugggaaa

SEQ ID NO: 2514824 - RNA, 19 nt, Homo sapiens
  misc_RNA (1)...(19): siRNA sense strand
agaaguuauuccugaacau

SEQ ID NO: 2514825 - RNA, 19 nt, Homo sapiens
  misc_RNA (1)...(19): siRNA sense strand
ggaaagauguuuauggcug

SEQ ID NO: 2514826 - RNA, 19 nt, Homo sapiens
  misc_RNA (1)...(19): siRNA sense strand
ugaaaagguaugugacaau

SEQ ID NO: 2514827 - RNA, 19 nt, Homo sapiens
  misc_RNA (1)...(19): siRNA sense strand
ccauaaggcugaaccggca

SEQ ID NO: 2514828 - RNA, 19 nt, Homo sapiens
  misc_RNA (1)...(19): siRNA sense strand
uggaguggcuacaugggaa

SEQ ID NO: 2514829 - RNA, 19 nt, Homo sapiens
  misc_RNA (1)...(19): siRNA sense strand
caaacuagcaagugcgucu

SEQ ID NO: 2514830 - RNA, 19 nt, Homo sapiens
  misc_RNA (1)...(19): siRNA sense strand
caggaacaacagaagagaa

SEQ ID NO: 2514831 - RNA, 19 nt, Homo sapiens
  misc_RNA (1)...(19): siRNA sense strand
ggauauuccugcaaaccca

SEQ ID NO: 2514832 - RNA, 19 nt, Homo sapiens
  misc_RNA (1)...(19): siRNA sense strand
cuagcaagugcgucugaaa

SEQ ID NO: 2514833 - RNA, 19 nt, Homo sapiens
  misc_RNA (1)...(19): siRNA sense strand
aaucuugugccguggaaau

SEQ ID NO: 2514834 - RNA, 19 nt, Homo sapiens
  misc_RNA (1)...(19): siRNA sense strand
augaaaucccggacgucua

SEQ ID NO: 2514835 - RNA, 19 nt, Homo sapiens
  misc_RNA (1)...(19): siRNA sense strand
gcuugaacuucuccggaca

SEQ ID NO: 2514836 - RNA, 19 nt, Homo sapiens
  misc_RNA (1)...(19): siRNA sense strand
gcaaugaaaucccggacgu

SEQ ID NO: 2514837 - RNA, 19 nt, Homo sapiens
  misc_RNA (1)...(19): siRNA sense strand
ggaaaucagaagggcaaaa

SEQ ID NO: 2514838 - RNA, 19 nt, Homo sapiens
  misc_RNA (1)...(19): siRNA sense strand
cuguggagcagcuggauca

SEQ ID NO: 2514839 - RNA, 19 nt, Homo sapiens
  misc_RNA (1)...(19): siRNA sense strand
ugaugaugagaaugaguuu

SEQ ID NO: 2514840 - RNA, 19 nt, Homo sapiens
  misc_RNA (1)...(19): siRNA sense strand
gaugaaaagguaugugaca

SEQ ID NO: 2514841 - RNA, 19 nt, Homo sapiens
  misc_RNA (1)...(19): siRNA sense strand
cguggaaaucagaagggca

SEQ ID NO: 2514842 - RNA, 19 nt, Homo sapiens
  misc_RNA (1)...(19): siRNA sense strand
gguucaaugauuuggacuu

SEQ ID NO: 2514843 - RNA, 19 nt, Homo sapiens
  misc_RNA (1)...(19): siRNA sense strand
aagcccacgaggagauaaa

SEQ ID NO: 2514844 - RNA, 19 nt, Homo sapiens
  misc_RNA (1)...(19): siRNA sense strand
gcguaagcgccauggccau

SEQ ID NO: 2514845 - RNA, 19 nt, Homo sapiens
  misc_RNA (1)...(19): siRNA sense strand
acugugagcaggugguauu

SEQ ID NO: 2514846 - RNA, 19 nt, Homo sapiens
  misc_RNA (1)...(19): siRNA sense strand
agugauuguuccagaugau

SEQ ID NO: 2514847 - RNA, 19 nt, Homo sapiens
  misc_RNA (1)...(19): siRNA sense strand
ggugaauaucucagucuca

SEQ ID NO: 2514848 - RNA, 19 nt, Homo sapiens
  misc_RNA (1)...(19): siRNA sense strand
ggguauucccgcaacguca

SEQ ID NO: 2514849 - RNA, 19 nt, Homo sapiens
  misc_RNA (1)...(19): siRNA sense strand
auggcagaggauuggaaua

SEQ ID NO: 2514850 - RNA, 19 nt, Homo sapiens
  misc_RNA (1)...(19): siRNA sense strand
agaagguggcuuuggcuga

SEQ ID NO: 2514851 - RNA, 19 nt, Homo sapiens
  misc_RNA (1)...(19): siRNA sense strand
gaagaaagcugcagcgauc

SEQ ID NO: 2514852 - RNA, 19 nt, Homo sapiens
  misc_RNA (1)...(19): siRNA sense strand
cagccuaacugaagagcca

SEQ ID NO: 2514853 - RNA, 19 nt, Homo sapiens
  misc_RNA (1)...(19): siRNA sense strand
ucagaaagaagcaggcgaa

SEQ ID NO: 2514854 - RNA, 19 nt, Homo sapiens
  misc_RNA (1)...(19): siRNA sense strand
gggaagaaccaaaacggaa

SEQ ID NO: 2514855 - RNA, 19 nt, Homo sapiens
  misc_RNA (1)...(19): siRNA sense strand
cagaaaugggcaugagacu

SEQ ID NO: 2514856 - RNA, 19 nt, Homo sapiens
  misc_RNA (1)...(19): siRNA sense strand
ggauauuggaaaagcaaga

SEQ ID NO: 2514857 - RNA, 19 nt, Homo sapiens
  misc_RNA (1)...(19): siRNA sense strand
agaaagaagcaggcgaaga

SEQ ID NO: 2514858 - RNA, 19 nt, Homo sapiens
  misc_RNA (1)...(19): siRNA sense strand
gcugcagcgaucagagcaa

SEQ ID NO: 2514859 - RNA, 19 nt, Homo sapiens
  misc_RNA (1)...(19): siRNA sense strand
cgaagaaagcugcagcgau

SEQ ID NO: 2514860 - RNA, 19 nt, Homo sapiens
  misc_RNA (1)...(19): siRNA sense strand
gugcuaucuaugcgggaau

SEQ ID NO: 2514861 - RNA, 19 nt, Homo sapiens
  misc_RNA (1)...(19): siRNA sense strand
gaaacauaucagaaagaag

SEQ ID NO: 2514862 - RNA, 19 nt, Homo sapiens
  misc_RNA (1)...(19): siRNA sense strand
cuaacugaagagccagaaa

SEQ ID NO: 2514863 - RNA, 19 nt, Homo sapiens
  misc_RNA (1)...(19): siRNA sense strand
ccagagaaguucaaccaca

SEQ ID NO: 2514864 - RNA, 19 nt, Homo sapiens
  misc_RNA (1)...(19): siRNA sense strand
gaggaaggugacuggaaca

SEQ ID NO: 2514865 - RNA, 19 nt, Homo sapiens
  misc_RNA (1)...(19): siRNA sense strand
aggaggaaggugacuggaa

SEQ ID NO: 2514866 - RNA, 19 nt, Homo sapiens
  misc_RNA (1)...(19): siRNA sense strand
ggaggaaggugacuggaac

SEQ ID NO: 2514867 - RNA, 19 nt, Homo sapiens
  misc_RNA (1)...(19): siRNA sense strand
gugugaagaucuuggccaa

SEQ ID NO: 2514868 - RNA, 19 nt, Homo sapiens
  misc_RNA (1)...(19): siRNA sense strand
gaguagagguccugagccu

SEQ ID NO: 2514869 - RNA, 19 nt, Homo sapiens
  misc_RNA (1)...(19): siRNA sense strand
cggagaacaaccaggucau

SEQ ID NO: 2514870 - RNA, 19 nt, Homo sapiens
  misc_RNA (1)...(19): siRNA sense strand
guucauggccgcagcagga

SEQ ID NO: 2514871 - RNA, 19 nt, Homo sapiens
  misc_RNA (1)...(19): siRNA sense strand
ucaucuacgaggcggaauu

SEQ ID NO: 2514872 - RNA, 19 nt, Homo sapiens
  misc_RNA (1)...(19): siRNA sense strand
auggauugcagcuggagua

SEQ ID NO: 2514873 - RNA, 19 nt, Homo sapiens
  misc_RNA (1)...(19): siRNA sense strand
guguagagaaugugggaaa

SEQ ID NO: 2514874 - RNA, 19 nt, Homo sapiens
  misc_RNA (1)...(19): siRNA sense strand
guguaaagaauguaggaaa

SEQ ID NO: 2514875 - RNA, 19 nt, Homo sapiens
  misc_RNA (1)...(19): siRNA sense strand
guguggagaaugugggaaa

SEQ ID NO: 2514876 - RNA, 19 nt, Homo sapiens
  misc_RNA (1)...(19): siRNA sense strand
guguggagaaugugggaaa

SEQ ID NO: 2514877 - RNA, 19 nt, Homo sapiens
  misc_RNA (1)...(19): siRNA sense strand
augcagugauucugggaaa

SEQ ID NO: 2514878 - RNA, 19 nt, Homo sapiens
  misc_RNA (1)...(19): siRNA sense strand
guguggagaaugugauaaa

SEQ ID NO: 2514879 - RNA, 19 nt, Homo sapiens
  misc_RNA (1)...(19): siRNA sense strand
gggaaauucacuagcaaaa

SEQ ID NO: 2514880 - RNA, 19 nt, Homo sapiens
  misc_RNA (1)...(19): siRNA sense strand
gggaaaucuuuuagccaua

SEQ ID NO: 2514881 - RNA, 19 nt, Homo sapiens
  misc_RNA (1)...(19): siRNA sense strand
gggaaguuauuuaggagca

SEQ ID NO: 2514882 - RNA, 19 nt, Homo sapiens
  misc_RNA (1)...(19): siRNA sense strand
ccuuaugaguguggagaau

SEQ ID NO: 2514883 - RNA, 19 nt, Homo sapiens
  misc_RNA (1)...(19): siRNA sense strand
cccuaugaguguaaagaau

SEQ ID NO: 2514884 - RNA, 19 nt, Homo sapiens
  misc_RNA (1)...(19): siRNA sense strand
cguuuaaucacaagugcaa

SEQ ID NO: 2514885 - RNA, 19 nt, Homo sapiens
  misc_RNA (1)...(19): siRNA sense strand
ugaaacuaagcaugggaua

SEQ ID NO: 2514886 - RNA, 19 nt, Homo sapiens
  misc_RNA (1)...(19): siRNA sense strand
aguucacacuggagaaaga

SEQ ID NO: 2514887 - RNA, 19 nt, Homo sapiens
  misc_RNA (1)...(19): siRNA sense strand
aguucacacuggagaaaga

SEQ ID NO: 2514888 - RNA, 19 nt, Homo sapiens
  misc_RNA (1)...(19): siRNA sense strand
aguucacacuggagaaaga

SEQ ID NO: 2514889 - RNA, 19 nt, Homo sapiens
  misc_RNA (1)...(19): siRNA sense strand
aguucacacuggagaaaga

SEQ ID NO: 2514890 - RNA, 19 nt, Homo sapiens
  misc_RNA (1)...(19): siRNA sense strand
aguucacacuggagaaaga

SEQ ID NO: 2514891 - RNA, 19 nt, Homo sapiens
  misc_RNA (1)...(19): siRNA sense strand
gguuguugguauggagcaa

SEQ ID NO: 2514892 - RNA, 19 nt, Homo sapiens
  misc_RNA (1)...(19): siRNA sense strand
gggaguucgcacuggaaaa

SEQ ID NO: 2514893 - RNA, 19 nt, Homo sapiens
  misc_RNA (1)...(19): siRNA sense strand
ucagaaauugaauggguuu

SEQ ID NO: 2514894 - RNA, 19 nt, Homo sapiens
  misc_RNA (1)...(19): siRNA sense strand
ccuuaucaguguggagaau

SEQ ID NO: 2514895 - RNA, 19 nt, Homo sapiens
  misc_RNA (1)...(19): siRNA sense strand
augugacgaaugugggaaa

SEQ ID NO: 2514896 - RNA, 19 nt, Homo sapiens
  misc_RNA (1)...(19): siRNA sense strand
ugggaaauucacuagcaaa

SEQ ID NO: 2514897 - RNA, 19 nt, Homo sapiens
  misc_RNA (1)...(19): siRNA sense strand
gcgaguucacacuggagaa

SEQ ID NO: 2514898 - RNA, 19 nt, Homo sapiens
  misc_RNA (1)...(19): siRNA sense strand
gcgaguucacacuggagaa

SEQ ID NO: 2514899 - RNA, 19 nt, Homo sapiens
  misc_RNA (1)...(19): siRNA sense strand
gcgaguucacacuggagaa

SEQ ID NO: 2514900 - RNA, 19 nt, Homo sapiens
  misc_RNA (1)...(19): siRNA sense strand
ucacugaacaccagagagu

SEQ ID NO: 2514901 - RNA, 19 nt, Homo sapiens
  misc_RNA (1)...(19): siRNA sense strand
ucacugaacaccagagagu

SEQ ID NO: 2514902 - RNA, 19 nt, Homo sapiens
  misc_RNA (1)...(19): siRNA sense strand
guguggacaaugugaugaa

SEQ ID NO: 2514903 - RNA, 19 nt, Homo sapiens
  misc_RNA (1)...(19): siRNA sense strand
ccuaaaggaacaccagaga

SEQ ID NO: 2514904 - RNA, 19 nt, Homo sapiens
  misc_RNA (1)...(19): siRNA sense strand
ggagaaugugggaaauguu

SEQ ID NO: 2514905 - RNA, 19 nt, Homo sapiens
  misc_RNA (1)...(19): siRNA sense strand
gguuuggggcauaugaaaa

SEQ ID NO: 2514906 - RNA, 19 nt, Homo sapiens
  misc_RNA (1)...(19): siRNA sense strand
gaagcaaugccaagggaac

SEQ ID NO: 2514907 - RNA, 19 nt, Homo sapiens
  misc_RNA (1)...(19): siRNA sense strand
ggagaaugugauaaaucuu

SEQ ID NO: 2514908 - RNA, 19 nt, Homo sapiens
  misc_RNA (1)...(19): siRNA sense strand
cggcaugugggaaguuauu

SEQ ID NO: 2514909 - RNA, 19 nt, Homo sapiens
  misc_RNA (1)...(19): siRNA sense strand
cugggaaauucacuagcaa

SEQ ID NO: 2514910 - RNA, 19 nt, Homo sapiens
  misc_RNA (1)...(19): siRNA sense strand
uggagaaagaccuuaugaa

SEQ ID NO: 2514911 - RNA, 19 nt, Homo sapiens
  misc_RNA (1)...(19): siRNA sense strand
agaaaggccauaugagugu

SEQ ID NO: 2514912 - RNA, 19 nt, Homo sapiens
  misc_RNA (1)...(19): siRNA sense strand
agaaaggccacaugagugu

SEQ ID NO: 2514913 - RNA, 19 nt, Homo sapiens
  misc_RNA (1)...(19): siRNA sense strand
agaaaggccacaugagugu

SEQ ID NO: 2514914 - RNA, 19 nt, Homo sapiens
  misc_RNA (1)...(19): siRNA sense strand
gggaaaccucauuaaacau

SEQ ID NO: 2514915 - RNA, 19 nt, Homo sapiens
  misc_RNA (1)...(19): siRNA sense strand
cgaguucacacgggagaaa

SEQ ID NO: 2514916 - RNA, 19 nt, Homo sapiens
  misc_RNA (1)...(19): siRNA sense strand
acacaacacaaucagaaau

SEQ ID NO: 2514917 - RNA, 19 nt, Homo sapiens
  misc_RNA (1)...(19): siRNA sense strand
aauuggaugacgaugcaaa

SEQ ID NO: 2514918 - RNA, 19 nt, Homo sapiens
  misc_RNA (1)...(19): siRNA sense strand
uguagagaaugugggaaau

SEQ ID NO: 2514919 - RNA, 19 nt, Homo sapiens
  misc_RNA (1)...(19): siRNA sense strand
guacagaagcaaugccaag

SEQ ID NO: 2514920 - RNA, 19 nt, Homo sapiens
  misc_RNA (1)...(19): siRNA sense strand
auaugaguguagagaaugu

SEQ ID NO: 2514921 - RNA, 19 nt, Homo sapiens
  misc_RNA (1)...(19): siRNA sense strand
cagaacacccagaggcuga

SEQ ID NO: 2514922 - RNA, 19 nt, Homo sapiens
  misc_RNA (1)...(19): siRNA sense strand
gacaaacgguggugggagu

SEQ ID NO: 2514923 - RNA, 19 nt, Homo sapiens
  misc_RNA (1)...(19): siRNA sense strand
cagcaagaucagcagaaca

SEQ ID NO: 2514924 - RNA, 19 nt, Homo sapiens
  misc_RNA (1)...(19): siRNA sense strand
gcucagaucccuuccgaca

SEQ ID NO: 2514925 - RNA, 19 nt, Homo sapiens
  misc_RNA (1)...(19): siRNA sense strand
cagagagcgaagaugaaga

SEQ ID NO: 2514926 - RNA, 19 nt, Homo sapiens
  misc_RNA (1)...(19): siRNA sense strand
cagaacacccagaggcuga

SEQ ID NO: 2514927 - RNA, 19 nt, Homo sapiens
  misc_RNA (1)...(19): siRNA sense strand
gacaaacgguggugggagu

SEQ ID NO: 2514928 - RNA, 19 nt, Homo sapiens
  misc_RNA (1)...(19): siRNA sense strand
cagcaagaucagcagaaca

SEQ ID NO: 2514929 - RNA, 19 nt, Homo sapiens
  misc_RNA (1)...(19): siRNA sense strand
gcucagaucccuuccgaca

SEQ ID NO: 2514930 - RNA, 19 nt, Homo sapiens
  misc_RNA (1)...(19): siRNA sense strand
cagaauucauacaggaaaa

SEQ ID NO: 2514931 - RNA, 19 nt, Homo sapiens
  misc_RNA (1)...(19): siRNA sense strand
ccuuaugguugcagugaau

SEQ ID NO: 2514932 - RNA, 19 nt, Homo sapiens
  misc_RNA (1)...(19): siRNA sense strand
uugcagugaaugugggaaa

SEQ ID NO: 2514933 - RNA, 19 nt, Homo sapiens
  misc_RNA (1)...(19): siRNA sense strand
acauaaacuuucugaccau

SEQ ID NO: 2514934 - RNA, 19 nt, Homo sapiens
  misc_RNA (1)...(19): siRNA sense strand
ucuuaugguugcagugaau

SEQ ID NO: 2514935 - RNA, 19 nt, Homo sapiens
  misc_RNA (1)...(19): siRNA sense strand
ggauggaggaagaccgaca

SEQ ID NO: 2514936 - RNA, 19 nt, Homo sapiens
  misc_RNA (1)...(19): siRNA sense strand
gggaaauuguuuaugugga

SEQ ID NO: 2514937 - RNA, 19 nt, Homo sapiens
  misc_RNA (1)...(19): siRNA sense strand
acucaaaccucuuuaggca

SEQ ID NO: 2514938 - RNA, 19 nt, Homo sapiens
  misc_RNA (1)...(19): siRNA sense strand
ccuuaugaaugcagugagu

SEQ ID NO: 2514939 - RNA, 19 nt, Homo sapiens
  misc_RNA (1)...(19): siRNA sense strand
acucaauagacaucagaga

SEQ ID NO: 2514940 - RNA, 19 nt, Homo sapiens
  misc_RNA (1)...(19): siRNA sense strand
ugggaaauucuuuagguau

SEQ ID NO: 2514941 - RNA, 19 nt, Homo sapiens
  misc_RNA (1)...(19): siRNA sense strand
ggaggcaccuuuagagcca

SEQ ID NO: 2514942 - RNA, 19 nt, Homo sapiens
  misc_RNA (1)...(19): siRNA sense strand
gccauggagcugaggauga

SEQ ID NO: 2514943 - RNA, 19 nt, Homo sapiens
  misc_RNA (1)...(19): siRNA sense strand
gggaaguucuuuaagugca

SEQ ID NO: 2514944 - RNA, 19 nt, Homo sapiens
  misc_RNA (1)...(19): siRNA sense strand
ggaaauuguuuauguggag

SEQ ID NO: 2514945 - RNA, 19 nt, Homo sapiens
  misc_RNA (1)...(19): siRNA sense strand
acagaauucauacaggaaa

SEQ ID NO: 2514946 - RNA, 19 nt, Homo sapiens
  misc_RNA (1)...(19): siRNA sense strand
gagaacucacacuggagaa

SEQ ID NO: 2514947 - RNA, 19 nt, Homo sapiens
  misc_RNA (1)...(19): siRNA sense strand
ccuuuagccacaaacauaa

SEQ ID NO: 2514948 - RNA, 19 nt, Homo sapiens
  misc_RNA (1)...(19): siRNA sense strand
aaggagcagauuagagaga

SEQ ID NO: 2514949 - RNA, 19 nt, Homo sapiens
  misc_RNA (1)...(19): siRNA sense strand
ccacagaguucacauggca

SEQ ID NO: 2514950 - RNA, 19 nt, Homo sapiens
  misc_RNA (1)...(19): siRNA sense strand
ucuuuaggcauuacagaau

SEQ ID NO: 2514951 - RNA, 19 nt, Homo sapiens
  misc_RNA (1)...(19): siRNA sense strand
cuugauaguaauaggguuu

SEQ ID NO: 2514952 - RNA, 19 nt, Homo sapiens
  misc_RNA (1)...(19): siRNA sense strand
aggacugucggaagggaaa

SEQ ID NO: 2514953 - RNA, 19 nt, Homo sapiens
  misc_RNA (1)...(19): siRNA sense strand
acauagguuucgaaggcau

SEQ ID NO: 2514954 - RNA, 19 nt, Homo sapiens
  misc_RNA (1)...(19): siRNA sense strand
caagaaaucugccagcgua

SEQ ID NO: 2514955 - RNA, 19 nt, Homo sapiens
  misc_RNA (1)...(19): siRNA sense strand
ugaaagagcucggaggacu

SEQ ID NO: 2514956 - RNA, 19 nt, Homo sapiens
  misc_RNA (1)...(19): siRNA sense strand
cuauaaaacugaacccgua

SEQ ID NO: 2514957 - RNA, 19 nt, Homo sapiens
  misc_RNA (1)...(19): siRNA sense strand
gcuugauaguaauaggguu

SEQ ID NO: 2514958 - RNA, 19 nt, Homo sapiens
  misc_RNA (1)...(19): siRNA sense strand
agccaaacugcucaagaaa

SEQ ID NO: 2514959 - RNA, 19 nt, Homo sapiens
  misc_RNA (1)...(19): siRNA sense strand
cagauacacaguuggccaa

SEQ ID NO: 2514960 - RNA, 19 nt, Homo sapiens
  misc_RNA (1)...(19): siRNA sense strand
gaggacugucggaagggaa

SEQ ID NO: 2514961 - RNA, 19 nt, Homo sapiens
  misc_RNA (1)...(19): siRNA sense strand
cugccagcguacagggcuu

SEQ ID NO: 2514962 - RNA, 19 nt, Homo sapiens
  misc_RNA (1)...(19): siRNA sense strand
aggaacauugccagccaaa

SEQ ID NO: 2514963 - RNA, 19 nt, Homo sapiens
  misc_RNA (1)...(19): siRNA sense strand
ccagauacacaguuggcca

SEQ ID NO: 2514964 - RNA, 19 nt, Homo sapiens
  misc_RNA (1)...(19): siRNA sense strand
ucuccagagggcagguuua

SEQ ID NO: 2514965 - RNA, 19 nt, Homo sapiens
  misc_RNA (1)...(19): siRNA sense strand
ccugaaagagcucggagga

SEQ ID NO: 2514966 - RNA, 19 nt, Homo sapiens
  misc_RNA (1)...(19): siRNA sense strand
ucugaaaucucuuggcugu

SEQ ID NO: 2514967 - RNA, 19 nt, Homo sapiens
  misc_RNA (1)...(19): siRNA sense strand
gguucgggaagaaaggaaa

SEQ ID NO: 2514968 - RNA, 19 nt, Homo sapiens
  misc_RNA (1)...(19): siRNA sense strand
gggauggugacaagcggaa

SEQ ID NO: 2514969 - RNA, 19 nt, Homo sapiens
  misc_RNA (1)...(19): siRNA sense strand
ccaagaggagguucgggaa

SEQ ID NO: 2514970 - RNA, 19 nt, Homo sapiens
  misc_RNA (1)...(19): siRNA sense strand
gcagagagguaccacgcca

SEQ ID NO: 2514971 - RNA, 19 nt, Homo sapiens
  misc_RNA (1)...(19): siRNA sense strand
cugccaaaccucaaggaaa

SEQ ID NO: 2514972 - RNA, 19 nt, Homo sapiens
  misc_RNA (1)...(19): siRNA sense strand
cgguuauguacgugugaaa

SEQ ID NO: 2514973 - RNA, 19 nt, Homo sapiens
  misc_RNA (1)...(19): siRNA sense strand
cuguguaccuagaggaaaa

SEQ ID NO: 2514974 - RNA, 19 nt, Homo sapiens
  misc_RNA (1)...(19): siRNA sense strand
ggggauuauuggugugaua

SEQ ID NO: 2514975 - RNA, 19 nt, Homo sapiens
  misc_RNA (1)...(19): siRNA sense strand
cuggaaagcaaguucuaaa

SEQ ID NO: 2514976 - RNA, 19 nt, Homo sapiens
  misc_RNA (1)...(19): siRNA sense strand
ccauugagucucugccaaa

SEQ ID NO: 2514977 - RNA, 19 nt, Homo sapiens
  misc_RNA (1)...(19): siRNA sense strand
ggauaaauaauaugccuga

SEQ ID NO: 2514978 - RNA, 19 nt, Homo sapiens
  misc_RNA (1)...(19): siRNA sense strand
agauauaaauggcguaacu

SEQ ID NO: 2514979 - RNA, 19 nt, Homo sapiens
  misc_RNA (1)...(19): siRNA sense strand
aguacaucacugaaaguaa

SEQ ID NO: 2514980 - RNA, 19 nt, Homo sapiens
  misc_RNA (1)...(19): siRNA sense strand
uggaaaacuuagaaagcau

SEQ ID NO: 2514981 - RNA, 19 nt, Homo sapiens
  misc_RNA (1)...(19): siRNA sense strand
uuaaaagaguuggggauaa

SEQ ID NO: 2514982 - RNA, 19 nt, Homo sapiens
  misc_RNA (1)...(19): siRNA sense strand
ccucaaggaaaucagcaua

SEQ ID NO: 2514983 - RNA, 19 nt, Homo sapiens
  misc_RNA (1)...(19): siRNA sense strand
uugcauuaggugagcuuua

SEQ ID NO: 2514984 - RNA, 19 nt, Homo sapiens
  misc_RNA (1)...(19): siRNA sense strand
cagacuaacaauauugcaa

SEQ ID NO: 2514985 - RNA, 19 nt, Homo sapiens
  misc_RNA (1)...(19): siRNA sense strand
acuccgaauucaugugcua

SEQ ID NO: 2514986 - RNA, 19 nt, Homo sapiens
  misc_RNA (1)...(19): siRNA sense strand
cugcagaaccacagccuga

SEQ ID NO: 2514987 - RNA, 19 nt, Homo sapiens
  misc_RNA (1)...(19): siRNA sense strand
gcgcaaagugcucgaauac

SEQ ID NO: 2514988 - RNA, 19 nt, Homo sapiens
  misc_RNA (1)...(19): siRNA sense strand
agcaacuguuauagguuua

SEQ ID NO: 2514989 - RNA, 19 nt, Homo sapiens
  misc_RNA (1)...(19): siRNA sense strand
aaaucagcauacacaguaa

SEQ ID NO: 2514990 - RNA, 19 nt, Homo sapiens
  misc_RNA (1)...(19): siRNA sense strand
cuuaaaagaguuggggaua

SEQ ID NO: 2514991 - RNA, 19 nt, Homo sapiens
  misc_RNA (1)...(19): siRNA sense strand
ucugauaaaucucugggaa

SEQ ID NO: 2514992 - RNA, 19 nt, Homo sapiens
  misc_RNA (1)...(19): siRNA sense strand
ugcagaugaucaacaguaa

SEQ ID NO: 2514993 - RNA, 19 nt, Homo sapiens
  misc_RNA (1)...(19): siRNA sense strand
gcaacuuacaagaacucua

SEQ ID NO: 2514994 - RNA, 19 nt, Homo sapiens
  misc_RNA (1)...(19): siRNA sense strand
uggaugaacaugaacaaaa

SEQ ID NO: 2514995 - RNA, 19 nt, Homo sapiens
  misc_RNA (1)...(19): siRNA sense strand
aggucagaauguucggcaa

SEQ ID NO: 2514996 - RNA, 19 nt, Homo sapiens
  misc_RNA (1)...(19): siRNA sense strand
acuuaaaagaguuggggau

SEQ ID NO: 2514997 - RNA, 19 nt, Homo sapiens
  misc_RNA (1)...(19): siRNA sense strand
gggaagcaggaaaagaaaa

SEQ ID NO: 2514998 - RNA, 19 nt, Homo sapiens
  misc_RNA (1)...(19): siRNA sense strand
auagauugcagaugaucaa

SEQ ID NO: 2514999 - RNA, 19 nt, Homo sapiens
  misc_RNA (1)...(19): siRNA sense strand
cgauagucuugcuguggau

SEQ ID NO: 2515000 - RNA, 19 nt, Homo sapiens
  misc_RNA (1)...(19): siRNA sense strand
guuggaugaacaugaacaa

SEQ ID NO: 2515001 - RNA, 19 nt, Homo sapiens
  misc_RNA (1)...(19): siRNA sense strand
ggauaacaccuucugguca

SEQ ID NO: 2515002 - RNA, 19 nt, Homo sapiens
  misc_RNA (1)...(19): siRNA sense strand
aagagauauucaugccaau

SEQ ID NO: 2515003 - RNA, 19 nt, Homo sapiens
  misc_RNA (1)...(19): siRNA sense strand
acauaaucuucuucgacuu

SEQ ID NO: 2515004 - RNA, 19 nt, Homo sapiens
  misc_RNA (1)...(19): siRNA sense strand
ugguauaaaccucacagaa

SEQ ID NO: 2515005 - RNA, 19 nt, Homo sapiens
  misc_RNA (1)...(19): siRNA sense strand
acaauggcucuuugaauau

SEQ ID NO: 2515006 - RNA, 19 nt, Homo sapiens
  misc_RNA (1)...(19): siRNA sense strand
gccugaaaucuacuggaua

SEQ ID NO: 2515007 - RNA, 19 nt, Homo sapiens
  misc_RNA (1)...(19): siRNA sense strand
gggaacacuagauauaaau

SEQ ID NO: 2515008 - RNA, 19 nt, Homo sapiens
  misc_RNA (1)...(19): siRNA sense strand
cugauaaaucucugggaag

SEQ ID NO: 2515009 - RNA, 19 nt, Homo sapiens
  misc_RNA (1)...(19): siRNA sense strand
cuucagucaccaauauuaa

SEQ ID NO: 2515010 - RNA, 19 nt, Homo sapiens
  misc_RNA (1)...(19): siRNA sense strand
aggggugauuuuagcaaua

SEQ ID NO: 2515011 - RNA, 19 nt, Homo sapiens
  misc_RNA (1)...(19): siRNA sense strand
cuagauauaaauggcguaa

SEQ ID NO: 2515012 - RNA, 19 nt, Homo sapiens
  misc_RNA (1)...(19): siRNA sense strand
ugcgcaaagugcucgaaua

SEQ ID NO: 2515013 - RNA, 19 nt, Homo sapiens
  misc_RNA (1)...(19): siRNA sense strand
uuguauagcaacuaaccua

SEQ ID NO: 2515014 - RNA, 19 nt, Homo sapiens
  misc_RNA (1)...(19): siRNA sense strand
uaagagauauucaugccaa

SEQ ID NO: 2515015 - RNA, 19 nt, Homo sapiens
  misc_RNA (1)...(19): siRNA sense strand
cagccuuugucaagacuga

SEQ ID NO: 2515016 - RNA, 19 nt, Homo sapiens
  misc_RNA (1)...(19): siRNA sense strand
gaacugugaugguggacac

SEQ ID NO: 2515017 - RNA, 19 nt, Homo sapiens
  misc_RNA (1)...(19): siRNA sense strand
ccacauaccaccucggcua

SEQ ID NO: 2515018 - RNA, 19 nt, Homo sapiens
  misc_RNA (1)...(19): siRNA sense strand
gggaauguguauaacccua

SEQ ID NO: 2515019 - RNA, 19 nt, Homo sapiens
  misc_RNA (1)...(19): siRNA sense strand
ggguagaauccucucggaa

SEQ ID NO: 2515020 - RNA, 19 nt, Homo sapiens
  misc_RNA (1)...(19): siRNA sense strand
uauucaaagcccaccgaua

SEQ ID NO: 2515021 - RNA, 19 nt, Homo sapiens
  misc_RNA (1)...(19): siRNA sense strand
uaagggaaucagaggcaau

SEQ ID NO: 2515022 - RNA, 19 nt, Homo sapiens
  misc_RNA (1)...(19): siRNA sense strand
ccaucuuugaccagaaauu

SEQ ID NO: 2515023 - RNA, 19 nt, Homo sapiens
  misc_RNA (1)...(19): siRNA sense strand
agucagaauugccucaaaa

SEQ ID NO: 2515024 - RNA, 19 nt, Homo sapiens
  misc_RNA (1)...(19): siRNA sense strand
ccagaaauuugccaagcca

SEQ ID NO: 2515025 - RNA, 19 nt, Homo sapiens
  misc_RNA (1)...(19): siRNA sense strand
aguauuuggcagaaagaua

SEQ ID NO: 2515026 - RNA, 19 nt, Homo sapiens
  misc_RNA (1)...(19): siRNA sense strand
agaaaaugguggaaguaca

SEQ ID NO: 2515027 - RNA, 19 nt, Homo sapiens
  misc_RNA (1)...(19): siRNA sense strand
ggaagacaauucagggagu

SEQ ID NO: 2515028 - RNA, 19 nt, Homo sapiens
  misc_RNA (1)...(19): siRNA sense strand
gcgcaggauaaaaggcaaa

SEQ ID NO: 2515029 - RNA, 19 nt, Homo sapiens
  misc_RNA (1)...(19): siRNA sense strand
aaacaauugcccuggguca

SEQ ID NO: 2515030 - RNA, 19 nt, Homo sapiens
  misc_RNA (1)...(19): siRNA sense strand
gugaagaagcugagcagac

SEQ ID NO: 2515031 - RNA, 19 nt, Homo sapiens
  misc_RNA (1)...(19): siRNA sense strand
gcuaauuaugugaucguca

SEQ ID NO: 2515032 - RNA, 19 nt, Homo sapiens
  misc_RNA (1)...(19): siRNA sense strand
gggcugaagcuggaggaga

SEQ ID NO: 2515033 - RNA, 19 nt, Homo sapiens
  misc_RNA (1)...(19): siRNA sense strand
agauguuguccuuguguau

SEQ ID NO: 2515034 - RNA, 19 nt, Homo sapiens
  misc_RNA (1)...(19): siRNA sense strand
guacacaacucuaaccagu

SEQ ID NO: 2515035 - RNA, 19 nt, Homo sapiens
  misc_RNA (1)...(19): siRNA sense strand
auucauugggacuggaaaa

SEQ ID NO: 2515036 - RNA, 19 nt, Homo sapiens
  misc_RNA (1)...(19): siRNA sense strand
caagauacagagugaucca

SEQ ID NO: 2515037 - RNA, 19 nt, Homo sapiens
  misc_RNA (1)...(19): siRNA sense strand
aagcaaaggaccuggcaaa

SEQ ID NO: 2515038 - RNA, 19 nt, Homo sapiens
  misc_RNA (1)...(19): siRNA sense strand
agugagaagaugaagguua

SEQ ID NO: 2515039 - RNA, 19 nt, Homo sapiens
  misc_RNA (1)...(19): siRNA sense strand
gggauuuguuauugcgaau

SEQ ID NO: 2515040 - RNA, 19 nt, Homo sapiens
  misc_RNA (1)...(19): siRNA sense strand
ccgagaucgucaaggagaa

SEQ ID NO: 2515041 - RNA, 19 nt, Homo sapiens
  misc_RNA (1)...(19): siRNA sense strand
ucuucaaugccguggaaua

SEQ ID NO: 2515042 - RNA, 19 nt, Homo sapiens
  misc_RNA (1)...(19): siRNA sense strand
cagaaaagcugcaggccau

SEQ ID NO: 2515043 - RNA, 19 nt, Homo sapiens
  misc_RNA (1)...(19): siRNA sense strand
uggaaauauuagucgucaa

SEQ ID NO: 2515044 - RNA, 19 nt, Homo sapiens
  misc_RNA (1)...(19): siRNA sense strand
ggcuggagguauugggaga

SEQ ID NO: 2515045 - RNA, 19 nt, Homo sapiens
  misc_RNA (1)...(19): siRNA sense strand
gggcagugguuuacagacu

SEQ ID NO: 2515046 - RNA, 19 nt, Homo sapiens
  misc_RNA (1)...(19): siRNA sense strand
cuucaaugccguggaauaa

SEQ ID NO: 2515047 - RNA, 19 nt, Homo sapiens
  misc_RNA (1)...(19): siRNA sense strand
ggaacuggugacacagaaa

SEQ ID NO: 2515048 - RNA, 19 nt, Homo sapiens
  misc_RNA (1)...(19): siRNA sense strand
aguggaagguaaugacgaa

SEQ ID NO: 2515049 - RNA, 19 nt, Homo sapiens
  misc_RNA (1)...(19): siRNA sense strand
ggguaaaucugcagagacc

SEQ ID NO: 2515050 - RNA, 19 nt, Homo sapiens
  misc_RNA (1)...(19): siRNA sense strand
agaucucacagaagggaaa

SEQ ID NO: 2515051 - RNA, 19 nt, Homo sapiens
  misc_RNA (1)...(19): siRNA sense strand
gcacacaaauuuaagucga

SEQ ID NO: 2515052 - RNA, 19 nt, Homo sapiens
  misc_RNA (1)...(19): siRNA sense strand
uuacaaaagccacgcaaaa

SEQ ID NO: 2515053 - RNA, 19 nt, Homo sapiens
  misc_RNA (1)...(19): siRNA sense strand
cucaaagaccacacaguua

SEQ ID NO: 2515054 - RNA, 19 nt, Homo sapiens
  misc_RNA (1)...(19): siRNA sense strand
uugcgaaugauguggacaa

SEQ ID NO: 2515055 - RNA, 19 nt, Homo sapiens
  misc_RNA (1)...(19): siRNA sense strand
uagaaauaacagcggugaa

SEQ ID NO: 2515056 - RNA, 19 nt, Homo sapiens
  misc_RNA (1)...(19): siRNA sense strand
acuaaacccuauugaggau

SEQ ID NO: 2515057 - RNA, 19 nt, Homo sapiens
  misc_RNA (1)...(19): siRNA sense strand
agauguggacggcaggaaa

SEQ ID NO: 2515058 - RNA, 19 nt, Homo sapiens
  misc_RNA (1)...(19): siRNA sense strand
cagccaaagcuucagggua

SEQ ID NO: 2515059 - RNA, 19 nt, Homo sapiens
  misc_RNA (1)...(19): siRNA sense strand
gcugaauaacagugagaag

SEQ ID NO: 2515060 - RNA, 19 nt, Homo sapiens
  misc_RNA (1)...(19): siRNA sense strand
aacugaggauuuagagaau

SEQ ID NO: 2515061 - RNA, 19 nt, Homo sapiens
  misc_RNA (1)...(19): siRNA sense strand
uggaauaaacgucagccaa

SEQ ID NO: 2515062 - RNA, 19 nt, Homo sapiens
  misc_RNA (1)...(19): siRNA sense strand
uuucuaaggaguugcggaa

SEQ ID NO: 2515063 - RNA, 19 nt, Homo sapiens
  misc_RNA (1)...(19): siRNA sense strand
cuggagguauugggagaaa

SEQ ID NO: 2515064 - RNA, 19 nt, Homo sapiens
  misc_RNA (1)...(19): siRNA sense strand
acaagcuguucgagcacua

SEQ ID NO: 2515065 - RNA, 19 nt, Homo sapiens
  misc_RNA (1)...(19): siRNA sense strand
ggagaaaagaagaaggaag

SEQ ID NO: 2515066 - RNA, 19 nt, Homo sapiens
  misc_RNA (1)...(19): siRNA sense strand
gucaagaagcuguuagcau

SEQ ID NO: 2515067 - RNA, 19 nt, Homo sapiens
  misc_RNA (1)...(19): siRNA sense strand
gcaccuggcucaaagacca

SEQ ID NO: 2515068 - RNA, 19 nt, Homo sapiens
  misc_RNA (1)...(19): siRNA sense strand
ggcugaagguggaaggaug

SEQ ID NO: 2515069 - RNA, 19 nt, Homo sapiens
  misc_RNA (1)...(19): siRNA sense strand
ucacacaguggaagguaau

SEQ ID NO: 2515070 - RNA, 19 nt, Homo sapiens
  misc_RNA (1)...(19): siRNA sense strand
gccaaagcuucaggguaaa

SEQ ID NO: 2515071 - RNA, 19 nt, Homo sapiens
  misc_RNA (1)...(19): siRNA sense strand
gcccaagaaugaacggcuu

SEQ ID NO: 2515072 - RNA, 19 nt, Homo sapiens
  misc_RNA (1)...(19): siRNA sense strand
acuacuaccaggagcucaa

SEQ ID NO: 2515073 - RNA, 19 nt, Homo sapiens
  misc_RNA (1)...(19): siRNA sense strand
agaucgucaaggagaacaa

SEQ ID NO: 2515074 - RNA, 19 nt, Homo sapiens
  misc_RNA (1)...(19): siRNA sense strand
cuccauugcuuaaagaaca

SEQ ID NO: 2515075 - RNA, 19 nt, Homo sapiens
  misc_RNA (1)...(19): siRNA sense strand
cacacaaauuuaagucgaa

SEQ ID NO: 2515076 - RNA, 19 nt, Homo sapiens
  misc_RNA (1)...(19): siRNA sense strand
cuggaaaguccgucauuca

SEQ ID NO: 2515077 - RNA, 19 nt, Homo sapiens
  misc_RNA (1)...(19): siRNA sense strand
ggaagaaaaggcagcucua

SEQ ID NO: 2515078 - RNA, 19 nt, Homo sapiens
  misc_RNA (1)...(19): siRNA sense strand
ccugcaucaugguggucaa

SEQ ID NO: 2515079 - RNA, 19 nt, Homo sapiens
  misc_RNA (1)...(19): siRNA sense strand
aucaaagucugguguagaa

SEQ ID NO: 2515080 - RNA, 19 nt, Homo sapiens
  misc_RNA (1)...(19): siRNA sense strand
cagaugcagaagaggccaa

SEQ ID NO: 2515081 - RNA, 19 nt, Homo sapiens
  misc_RNA (1)...(19): siRNA sense strand
gcaacugaggauuuagaga

SEQ ID NO: 2515082 - RNA, 19 nt, Homo sapiens
  misc_RNA (1)...(19): siRNA sense strand
ggacuacagaagggaagaa

SEQ ID NO: 2515083 - RNA, 19 nt, Homo sapiens
  misc_RNA (1)...(19): siRNA sense strand
cugcugaauaacagugaga

SEQ ID NO: 2515084 - RNA, 19 nt, Homo sapiens
  misc_RNA (1)...(19): siRNA sense strand
cugaauaacagugagaaga

SEQ ID NO: 2515085 - RNA, 19 nt, Homo sapiens
  misc_RNA (1)...(19): siRNA sense strand
aguugaaguuccacagcca

SEQ ID NO: 2515086 - RNA, 19 nt, Homo sapiens
  misc_RNA (1)...(19): siRNA sense strand
ccuccgaaggacccagaaa

SEQ ID NO: 2515087 - RNA, 19 nt, Homo sapiens
  misc_RNA (1)...(19): siRNA sense strand
uuaaggaauuggaggaccu

SEQ ID NO: 2515088 - RNA, 19 nt, Homo sapiens
  misc_RNA (1)...(19): siRNA sense strand
agaccuacagucaagcaaa

SEQ ID NO: 2515089 - RNA, 19 nt, Homo sapiens
  misc_RNA (1)...(19): siRNA sense strand
ugauggggcuggagguauu

SEQ ID NO: 2515090 - RNA, 19 nt, Homo sapiens
  misc_RNA (1)...(19): siRNA sense strand
ucuaguuagugaaacagaa

SEQ ID NO: 2515091 - RNA, 19 nt, Homo sapiens
  misc_RNA (1)...(19): siRNA sense strand
ccucuaagcuggaaagucc

SEQ ID NO: 2515092 - RNA, 19 nt, Homo sapiens
  misc_RNA (1)...(19): siRNA sense strand
aauaacagugagaagauga

SEQ ID NO: 2515093 - RNA, 19 nt, Homo sapiens
  misc_RNA (1)...(19): siRNA sense strand
ugaaaugaguagagaggag

SEQ ID NO: 2515094 - RNA, 19 nt, Homo sapiens
  misc_RNA (1)...(19): siRNA sense strand
cgaauaaggugguccugca

SEQ ID NO: 2515095 - RNA, 19 nt, Homo sapiens
  misc_RNA (1)...(19): siRNA sense strand
caguugaaucaguugaauu

SEQ ID NO: 2515096 - RNA, 19 nt, Homo sapiens
  misc_RNA (1)...(19): siRNA sense strand
gggaaucagaagaauggau

SEQ ID NO: 2515097 - RNA, 19 nt, Homo sapiens
  misc_RNA (1)...(19): siRNA sense strand
gauuuugauuggcagguaa

SEQ ID NO: 2515098 - RNA, 19 nt, Homo sapiens
  misc_RNA (1)...(19): siRNA sense strand
caagaaagcaguugaguau

SEQ ID NO: 2515099 - RNA, 19 nt, Homo sapiens
  misc_RNA (1)...(19): siRNA sense strand
agaaagcaguugaguauua

SEQ ID NO: 2515100 - RNA, 19 nt, Homo sapiens
  misc_RNA (1)...(19): siRNA sense strand
gcaaagcaguugaagacaa

SEQ ID NO: 2515101 - RNA, 19 nt, Homo sapiens
  misc_RNA (1)...(19): siRNA sense strand
guauugaggaugaguguaa

SEQ ID NO: 2515102 - RNA, 19 nt, Homo sapiens
  misc_RNA (1)...(19): siRNA sense strand
gaauaauaggcuuggaaau

SEQ ID NO: 2515103 - RNA, 19 nt, Homo sapiens
  misc_RNA (1)...(19): siRNA sense strand
ggauuuacuuugauggcaa

SEQ ID NO: 2515104 - RNA, 19 nt, Homo sapiens
  misc_RNA (1)...(19): siRNA sense strand
gcagagacacagaggaaaa

SEQ ID NO: 2515105 - RNA, 19 nt, Homo sapiens
  misc_RNA (1)...(19): siRNA sense strand
uggcagagacacagaggaa

SEQ ID NO: 2515106 - RNA, 19 nt, Homo sapiens
  misc_RNA (1)...(19): siRNA sense strand
ccguauguauugaggauga

SEQ ID NO: 2515107 - RNA, 19 nt, Homo sapiens
  misc_RNA (1)...(19): siRNA sense strand
gcacugacauuucgggaau

SEQ ID NO: 2515108 - RNA, 19 nt, Homo sapiens
  misc_RNA (1)...(19): siRNA sense strand
ggaauaauaggcuuggaaa

SEQ ID NO: 2515109 - RNA, 19 nt, Homo sapiens
  misc_RNA (1)...(19): siRNA sense strand
acaaggaaccacauggaua

SEQ ID NO: 2515110 - RNA, 19 nt, Homo sapiens
  misc_RNA (1)...(19): siRNA sense strand
aggaaaggggcauggaaaa

SEQ ID NO: 2515111 - RNA, 19 nt, Homo sapiens
  misc_RNA (1)...(19): siRNA sense strand
ccucaaaccuggauguagu

SEQ ID NO: 2515112 - RNA, 19 nt, Homo sapiens
  misc_RNA (1)...(19): siRNA sense strand
ccugugacguggugaucaa

SEQ ID NO: 2515113 - RNA, 19 nt, Homo sapiens
  misc_RNA (1)...(19): siRNA sense strand
ggaagaaccucacuaccaa

SEQ ID NO: 2515114 - RNA, 19 nt, Homo sapiens
  misc_RNA (1)...(19): siRNA sense strand
ccagaagucuugagaguug

SEQ ID NO: 2515115 - RNA, 19 nt, Homo sapiens
  misc_RNA (1)...(19): siRNA sense strand
cggaauaauaggcuuggaa

SEQ ID NO: 2515116 - RNA, 19 nt, Homo sapiens
  misc_RNA (1)...(19): siRNA sense strand
guagaggauccaagggaca

SEQ ID NO: 2515117 - RNA, 19 nt, Homo sapiens
  misc_RNA (1)...(19): siRNA sense strand
cuccagaagucuugagagu

SEQ ID NO: 2515118 - RNA, 19 nt, Homo sapiens
  misc_RNA (1)...(19): siRNA sense strand
ggacagaagauaaaauaga

SEQ ID NO: 2515119 - RNA, 19 nt, Homo sapiens
  misc_RNA (1)...(19): siRNA sense strand
aaauagagcgauucaagaa

SEQ ID NO: 2515120 - RNA, 19 nt, Homo sapiens
  misc_RNA (1)...(19): siRNA sense strand
caaggaaccacauggauau

SEQ ID NO: 2515121 - RNA, 19 nt, Homo sapiens
  misc_RNA (1)...(19): siRNA sense strand
guggaaaagaugagacaga

SEQ ID NO: 2515122 - RNA, 19 nt, Homo sapiens
  misc_RNA (1)...(19): siRNA sense strand
acuuaagguucgagcucau

SEQ ID NO: 2515123 - RNA, 19 nt, Homo sapiens
  misc_RNA (1)...(19): siRNA sense strand
caggaaaggggcauggaaa

SEQ ID NO: 2515124 - RNA, 19 nt, Homo sapiens
  misc_RNA (1)...(19): siRNA sense strand
cgggaauggacuugcccaa

SEQ ID NO: 2515125 - RNA, 19 nt, Homo sapiens
  misc_RNA (1)...(19): siRNA sense strand
caaccaaaguggaaaagau

SEQ ID NO: 2515126 - RNA, 19 nt, Homo sapiens
  misc_RNA (1)...(19): siRNA sense strand
ggaagagaagagugaucau

SEQ ID NO: 2515127 - RNA, 19 nt, Homo sapiens
  misc_RNA (1)...(19): siRNA sense strand
cgcaacugaucgugggaca

SEQ ID NO: 2515128 - RNA, 19 nt, Homo sapiens
  misc_RNA (1)...(19): siRNA sense strand
guugaagacaagaacagaa

SEQ ID NO: 2515129 - RNA, 19 nt, Homo sapiens
  misc_RNA (1)...(19): siRNA sense strand
gaguaugcucucuacaaua

SEQ ID NO: 2515130 - RNA, 19 nt, Homo sapiens
  misc_RNA (1)...(19): siRNA sense strand
gggaagaaccucacuacca

SEQ ID NO: 2515131 - RNA, 19 nt, Homo sapiens
  misc_RNA (1)...(19): siRNA sense strand
ggaacgccaugcugggcua

SEQ ID NO: 2515132 - RNA, 19 nt, Homo sapiens
  misc_RNA (1)...(19): siRNA sense strand
ggccugaagaggaugaauu

SEQ ID NO: 2515133 - RNA, 19 nt, Homo sapiens
  misc_RNA (1)...(19): siRNA sense strand
aggcaaagcaguugaagac

SEQ ID NO: 2515134 - RNA, 19 nt, Homo sapiens
  misc_RNA (1)...(19): siRNA sense strand
gagaguugcugaacacaga

SEQ ID NO: 2515135 - RNA, 19 nt, Homo sapiens
  misc_RNA (1)...(19): siRNA sense strand
gcccaaaccucaagaagcu

SEQ ID NO: 2515136 - RNA, 19 nt, Homo sapiens
  misc_RNA (1)...(19): siRNA sense strand
agaacauccucuugcauca

SEQ ID NO: 2515137 - RNA, 19 nt, Homo sapiens
  misc_RNA (1)...(19): siRNA sense strand
gaagacaagaacagaagga

SEQ ID NO: 2515138 - RNA, 19 nt, Homo sapiens
  misc_RNA (1)...(19): siRNA sense strand
ucacuuuauucccgagcua

SEQ ID NO: 2515139 - RNA, 19 nt, Homo sapiens
  misc_RNA (1)...(19): siRNA sense strand
gccuggagcucguggucau

SEQ ID NO: 2515140 - RNA, 19 nt, Homo sapiens
  misc_RNA (1)...(19): siRNA sense strand
cauauuugcugcacugcua

SEQ ID NO: 2515141 - RNA, 19 nt, Homo sapiens
  misc_RNA (1)...(19): siRNA sense strand
agacaagaacagaaggaug

SEQ ID NO: 2515142 - RNA, 19 nt, Homo sapiens
  misc_RNA (1)...(19): siRNA sense strand
cuucagugauccuuaaaga

SEQ ID NO: 2515143 - RNA, 19 nt, Homo sapiens
  misc_RNA (1)...(19): siRNA sense strand
gcuaauuaaagcaggccga

SEQ ID NO: 2515144 - RNA, 19 nt, Homo sapiens
  misc_RNA (1)...(19): siRNA sense strand
agaacagacugguagagga

SEQ ID NO: 2515145 - RNA, 19 nt, Homo sapiens
  misc_RNA (1)...(19): siRNA sense strand
aaacugagcuggaauggga

SEQ ID NO: 2515146 - RNA, 19 nt, Homo sapiens
  misc_RNA (1)...(19): siRNA sense strand
ccucuugggaccagaacau

SEQ ID NO: 2515147 - RNA, 19 nt, Homo sapiens
  misc_RNA (1)...(19): siRNA sense strand
guaauaaugguaaccgcua

SEQ ID NO: 2515148 - RNA, 19 nt, Homo sapiens
  misc_RNA (1)...(19): siRNA sense strand
ggauguaguugggaaggau

SEQ ID NO: 2515149 - RNA, 19 nt, Homo sapiens
  misc_RNA (1)...(19): siRNA sense strand
cugauggugaugagccaaa

SEQ ID NO: 2515150 - RNA, 19 nt, Homo sapiens
  misc_RNA (1)...(19): siRNA sense strand
ucacagaagcauuucauca

SEQ ID NO: 2515151 - RNA, 19 nt, Homo sapiens
  misc_RNA (1)...(19): siRNA sense strand
uaaagcaggccgagagcga

SEQ ID NO: 2515152 - RNA, 19 nt, Homo sapiens
  misc_RNA (1)...(19): siRNA sense strand
ccggucagcucgucaauau

SEQ ID NO: 2515153 - RNA, 19 nt, Homo sapiens
  misc_RNA (1)...(19): siRNA sense strand
cugggaugguugugggcca

SEQ ID NO: 2515154 - RNA, 19 nt, Homo sapiens
  misc_RNA (1)...(19): siRNA sense strand
ccaauuaccugccuucuaa

SEQ ID NO: 2515155 - RNA, 19 nt, Homo sapiens
  misc_RNA (1)...(19): siRNA sense strand
uguugauacuggaguuuca

SEQ ID NO: 2515156 - RNA, 19 nt, Homo sapiens
  misc_RNA (1)...(19): siRNA sense strand
gccugaagaggaugaauuu

SEQ ID NO: 2515157 - RNA, 19 nt, Homo sapiens
  misc_RNA (1)...(19): siRNA sense strand
aagcaguugaagacaagaa

SEQ ID NO: 2515158 - RNA, 19 nt, Homo sapiens
  misc_RNA (1)...(19): siRNA sense strand
uggcaaccaaaguggaaaa

SEQ ID NO: 2515159 - RNA, 19 nt, Homo sapiens
  misc_RNA (1)...(19): siRNA sense strand
ggaaaucccaaucgugaca

SEQ ID NO: 2515160 - RNA, 19 nt, Homo sapiens
  misc_RNA (1)...(19): siRNA sense strand
ccucaagaagcucuggcua

SEQ ID NO: 2515161 - RNA, 19 nt, Homo sapiens
  misc_RNA (1)...(19): siRNA sense strand
guugaguauuauucaguca

SEQ ID NO: 2515162 - RNA, 19 nt, Homo sapiens
  misc_RNA (1)...(19): siRNA sense strand
aauagagcgauucaagaaa

SEQ ID NO: 2515163 - RNA, 19 nt, Homo sapiens
  misc_RNA (1)...(19): siRNA sense strand
ucauaucacagaagcauuu

SEQ ID NO: 2515164 - RNA, 19 nt, Homo sapiens
  misc_RNA (1)...(19): siRNA sense strand
aggcugaccuggcaaccaa

SEQ ID NO: 2515165 - RNA, 19 nt, Homo sapiens
  misc_RNA (1)...(19): siRNA sense strand
ggucucgcucccagguaaa

SEQ ID NO: 2515166 - RNA, 19 nt, Homo sapiens
  misc_RNA (1)...(19): siRNA sense strand
cgaguaugcucucuacaau

SEQ ID NO: 2515167 - RNA, 19 nt, Homo sapiens
  misc_RNA (1)...(19): siRNA sense strand
guuccugaugcaagaagua

SEQ ID NO: 2515168 - RNA, 19 nt, Homo sapiens
  misc_RNA (1)...(19): siRNA sense strand
aaguagaucuucaggaaaa

SEQ ID NO: 2515169 - RNA, 19 nt, Homo sapiens
  misc_RNA (1)...(19): siRNA sense strand
aggaagaccaggaggagga

SEQ ID NO: 2515170 - RNA, 19 nt, Homo sapiens
  misc_RNA (1)...(19): siRNA sense strand
aagagaaagauuugcagaa

SEQ ID NO: 2515171 - RNA, 19 nt, Homo sapiens
  misc_RNA (1)...(19): siRNA sense strand
aaauaaacucagaggccuu

SEQ ID NO: 2515172 - RNA, 19 nt, Homo sapiens
  misc_RNA (1)...(19): siRNA sense strand
gcagcaggaacgaggaaaa

SEQ ID NO: 2515173 - RNA, 19 nt, Homo sapiens
  misc_RNA (1)...(19): siRNA sense strand
agagaguguuauaagaaga

SEQ ID NO: 2515174 - RNA, 19 nt, Homo sapiens
  misc_RNA (1)...(19): siRNA sense strand
gaggaugaaugcaggacca

SEQ ID NO: 2515175 - RNA, 19 nt, Homo sapiens
  misc_RNA (1)...(19): siRNA sense strand
ccuccaagguccuggccau

SEQ ID NO: 2515176 - RNA, 19 nt, Homo sapiens
  misc_RNA (1)...(19): siRNA sense strand
aaaugaugcaguugaagaa

SEQ ID NO: 2515177 - RNA, 19 nt, Homo sapiens
  misc_RNA (1)...(19): siRNA sense strand
caggagugguaaagaaaau

SEQ ID NO: 2515178 - RNA, 19 nt, Homo sapiens
  misc_RNA (1)...(19): siRNA sense strand
gugucuagagaguguuaua

SEQ ID NO: 2515179 - RNA, 19 nt, Homo sapiens
  misc_RNA (1)...(19): siRNA sense strand
agccaagagaagaagggaa

SEQ ID NO: 2515180 - RNA, 19 nt, Homo sapiens
  misc_RNA (1)...(19): siRNA sense strand
ugaagagugcagaagaaau

SEQ ID NO: 2515181 - RNA, 19 nt, Homo sapiens
  misc_RNA (1)...(19): siRNA sense strand
aagacagaucccaagguaa

SEQ ID NO: 2515182 - RNA, 19 nt, Homo sapiens
  misc_RNA (1)...(19): siRNA sense strand
cagccaggauggaggaauc

SEQ ID NO: 2515183 - RNA, 19 nt, Homo sapiens
  misc_RNA (1)...(19): siRNA sense strand
augagguucuggugggcaa

SEQ ID NO: 2515184 - RNA, 19 nt, Homo sapiens
  misc_RNA (1)...(19): siRNA sense strand
cuguggagaaggaugcaaa

SEQ ID NO: 2515185 - RNA, 19 nt, Homo sapiens
  misc_RNA (1)...(19): siRNA sense strand
uuggagaagcugaaggaca

SEQ ID NO: 2515186 - RNA, 19 nt, Homo sapiens
  misc_RNA (1)...(19): siRNA sense strand
acagugaggguuuggagaa

SEQ ID NO: 2515187 - RNA, 19 nt, Homo sapiens
  misc_RNA (1)...(19): siRNA sense strand
aaaugagugcacagaacaa

SEQ ID NO: 2515188 - RNA, 19 nt, Homo sapiens
  misc_RNA (1)...(19): siRNA sense strand
gcggaugcccuaaaagaaa

SEQ ID NO: 2515189 - RNA, 19 nt, Homo sapiens
  misc_RNA (1)...(19): siRNA sense strand
auugagauccugacugaaa

SEQ ID NO: 2515190 - RNA, 19 nt, Homo sapiens
  misc_RNA (1)...(19): siRNA sense strand
gcucggaggaugagguucu

SEQ ID NO: 2515191 - RNA, 19 nt, Homo sapiens
  misc_RNA (1)...(19): siRNA sense strand
guuaaagcuugcaggcagu

SEQ ID NO: 2515192 - RNA, 19 nt, Homo sapiens
  misc_RNA (1)...(19): siRNA sense strand
agaaauggucugugugucu

SEQ ID NO: 2515193 - RNA, 19 nt, Homo sapiens
  misc_RNA (1)...(19): siRNA sense strand
gcugcaaacccaggugaaa

SEQ ID NO: 2515194 - RNA, 19 nt, Homo sapiens
  misc_RNA (1)...(19): siRNA sense strand
agcaggagugguaaagaaa

SEQ ID NO: 2515195 - RNA, 19 nt, Homo sapiens
  misc_RNA (1)...(19): siRNA sense strand
aguugagcguuaugaugaa

SEQ ID NO: 2515196 - RNA, 19 nt, Homo sapiens
  misc_RNA (1)...(19): siRNA sense strand
cagugugucuagagagugu

SEQ ID NO: 2515197 - RNA, 19 nt, Homo sapiens
  misc_RNA (1)...(19): siRNA sense strand
augcugauaaagagaaaga

SEQ ID NO: 2515198 - RNA, 19 nt, Homo sapiens
  misc_RNA (1)...(19): siRNA sense strand
aagaccaggaggaggauga

SEQ ID NO: 2515199 - RNA, 19 nt, Homo sapiens
  misc_RNA (1)...(19): siRNA sense strand
ccagcgugugcuagugaua

SEQ ID NO: 2515200 - RNA, 19 nt, Homo sapiens
  misc_RNA (1)...(19): siRNA sense strand
ggcaauuaugaaacagcua

SEQ ID NO: 2515201 - RNA, 19 nt, Homo sapiens
  misc_RNA (1)...(19): siRNA sense strand
auaaaugagugcacagaac

SEQ ID NO: 2515202 - RNA, 19 nt, Homo sapiens
  misc_RNA (1)...(19): siRNA sense strand
cuugcgagcaggaguggua

SEQ ID NO: 2515203 - RNA, 19 nt, Homo sapiens
  misc_RNA (1)...(19): siRNA sense strand
gcuugcaggcagugacaca

SEQ ID NO: 2515204 - RNA, 19 nt, Homo sapiens
  misc_RNA (1)...(19): siRNA sense strand
gcaggugggaagagauguu

SEQ ID NO: 2515205 - RNA, 19 nt, Homo sapiens
  misc_RNA (1)...(19): siRNA sense strand
ggaaagaacacagccguga

SEQ ID NO: 2515206 - RNA, 19 nt, Homo sapiens
  misc_RNA (1)...(19): siRNA sense strand
uggaggaagaccaggagga

SEQ ID NO: 2515207 - RNA, 19 nt, Homo sapiens
  misc_RNA (1)...(19): siRNA sense strand
augaugcaguugaagaaau

SEQ ID NO: 2515208 - RNA, 19 nt, Homo sapiens
  misc_RNA (1)...(19): siRNA sense strand
uuucuugauuucucggaua

SEQ ID NO: 2515209 - RNA, 19 nt, Homo sapiens
  misc_RNA (1)...(19): siRNA sense strand
ccaaccuggcccugaagaa

SEQ ID NO: 2515210 - RNA, 19 nt, Homo sapiens
  misc_RNA (1)...(19): siRNA sense strand
gaugaauucugaugaccca

SEQ ID NO: 2515211 - RNA, 19 nt, Homo sapiens
  misc_RNA (1)...(19): siRNA sense strand
gcuguggaggugagcagaa

SEQ ID NO: 2515212 - RNA, 19 nt, Homo sapiens
  misc_RNA (1)...(19): siRNA sense strand
aaacagcuauccugcgcua

SEQ ID NO: 2515213 - RNA, 19 nt, Homo sapiens
  misc_RNA (1)...(19): siRNA sense strand
ggaaagaggugcugggagg

SEQ ID NO: 2515214 - RNA, 19 nt, Homo sapiens
  misc_RNA (1)...(19): siRNA sense strand
gcaugaagaagaaggacga

SEQ ID NO: 2515215 - RNA, 19 nt, Homo sapiens
  misc_RNA (1)...(19): siRNA sense strand
ccuuggaggagccgaaaca

SEQ ID NO: 2515216 - RNA, 19 nt, Homo sapiens
  misc_RNA (1)...(19): siRNA sense strand
caaaugaccaagaggcuca

SEQ ID NO: 2515217 - RNA, 19 nt, Homo sapiens
  misc_RNA (1)...(19): siRNA sense strand
auauaaagggcaaugaaca

SEQ ID NO: 2515218 - RNA, 19 nt, Homo sapiens
  misc_RNA (1)...(19): siRNA sense strand
aagaauggacagaaagcau

SEQ ID NO: 2515219 - RNA, 19 nt, Homo sapiens
  misc_RNA (1)...(19): siRNA sense strand
uggacagaaagcauggaaa

SEQ ID NO: 2515220 - RNA, 19 nt, Homo sapiens
  misc_RNA (1)...(19): siRNA sense strand
ugugauaaugacagcaauu

SEQ ID NO: 2515221 - RNA, 19 nt, Homo sapiens
  misc_RNA (1)...(19): siRNA sense strand
cagucagaauccuguaaca

SEQ ID NO: 2515222 - RNA, 19 nt, Homo sapiens
  misc_RNA (1)...(19): siRNA sense strand
cuuauaauaugcuugguga

SEQ ID NO: 2515223 - RNA, 19 nt, Homo sapiens
  misc_RNA (1)...(19): siRNA sense strand
auaacaaaggaucggccaa

SEQ ID NO: 2515224 - RNA, 19 nt, Homo sapiens
  misc_RNA (1)...(19): siRNA sense strand
acaacauggccgagaugaa

SEQ ID NO: 2515225 - RNA, 19 nt, Homo sapiens
  misc_RNA (1)...(19): siRNA sense strand
uggacaaggacgggaagaa

SEQ ID NO: 2515226 - RNA, 19 nt, Homo sapiens
  misc_RNA (1)...(19): siRNA sense strand
cggccaagaagaagcagga

SEQ ID NO: 2515227 - RNA, 19 nt, Homo sapiens
  misc_RNA (1)...(19): siRNA sense strand
ugaccgagagccaggugaa

SEQ ID NO: 2515228 - RNA, 19 nt, Homo sapiens
  misc_RNA (1)...(19): siRNA sense strand
ccaagaagaagcaggacuc

SEQ ID NO: 2515229 - RNA, 19 nt, Homo sapiens
  misc_RNA (1)...(19): siRNA sense strand
aggacgacgacgaauacaa

SEQ ID NO: 2515230 - RNA, 19 nt, Homo sapiens
  misc_RNA (1)...(19): siRNA sense strand
auucaagaggugcgagaaa

SEQ ID NO: 2515231 - RNA, 19 nt, Homo sapiens
  misc_RNA (1)...(19): siRNA sense strand
cauccagaccauugaggaa

SEQ ID NO: 2515232 - RNA, 19 nt, Homo sapiens
  misc_RNA (1)...(19): siRNA sense strand
gcaaagcguugguggcagu

SEQ ID NO: 2515233 - RNA, 19 nt, Homo sapiens
  misc_RNA (1)...(19): siRNA sense strand
caugguugcaguaaggaaa

SEQ ID NO: 2515234 - RNA, 19 nt, Homo sapiens
  misc_RNA (1)...(19): siRNA sense strand
ccaugaaacaccugaagca

SEQ ID NO: 2515235 - RNA, 19 nt, Homo sapiens
  misc_RNA (1)...(19): siRNA sense strand
agaaguaugacgagaugau

SEQ ID NO: 2515236 - RNA, 19 nt, Homo sapiens
  misc_RNA (1)...(19): siRNA sense strand
ccagcaacagaaagagauu

SEQ ID NO: 2515237 - RNA, 19 nt, Homo sapiens
  misc_RNA (1)...(19): siRNA sense strand
uccggaaguuugugggcaa

SEQ ID NO: 2515238 - RNA, 19 nt, Homo sapiens
  misc_RNA (1)...(19): siRNA sense strand
gcuaagaucuuguacgaug

SEQ ID NO: 2515239 - RNA, 19 nt, Homo sapiens
  misc_RNA (1)...(19): siRNA sense strand
gcgagaagaucuaccagca

SEQ ID NO: 2515240 - RNA, 19 nt, Homo sapiens
  misc_RNA (1)...(19): siRNA sense strand
cagaaagagauuccagaca

SEQ ID NO: 2515241 - RNA, 19 nt, Homo sapiens
  misc_RNA (1)...(19): siRNA sense strand
gagugaagauccaagccau

SEQ ID NO: 2515242 - RNA, 19 nt, Homo sapiens
  misc_RNA (1)...(19): siRNA sense strand
agcagggaggagagaguaa

SEQ ID NO: 2515243 - RNA, 19 nt, Homo sapiens
  misc_RNA (1)...(19): siRNA sense strand
uguuugaaagaaaggacaa

SEQ ID NO: 2515244 - RNA, 19 nt, Homo sapiens
  misc_RNA (1)...(19): siRNA sense strand
guaucaaguccuccgcaaa

SEQ ID NO: 2515245 - RNA, 19 nt, Homo sapiens
  misc_RNA (1)...(19): siRNA sense strand
gcuguuugacgcugagcua

SEQ ID NO: 2515246 - RNA, 19 nt, Homo sapiens
  misc_RNA (1)...(19): siRNA sense strand
augcaaaaggcaaaacaaa

SEQ ID NO: 2515247 - RNA, 19 nt, Homo sapiens
  misc_RNA (1)...(19): siRNA sense strand
ugcaaaaggcaaaacaaaa

SEQ ID NO: 2515248 - RNA, 19 nt, Homo sapiens
  misc_RNA (1)...(19): siRNA sense strand
guaucuaugaugaggucuu

SEQ ID NO: 2515249 - RNA, 19 nt, Homo sapiens
  misc_RNA (1)...(19): siRNA sense strand
uagugaacgcaguagaauu

SEQ ID NO: 2515250 - RNA, 19 nt, Homo sapiens
  misc_RNA (1)...(19): siRNA sense strand
cagucaugcuggagcuguu

SEQ ID NO: 2515251 - RNA, 19 nt, Homo sapiens
  misc_RNA (1)...(19): siRNA sense strand
gggccaccucugaguacua

SEQ ID NO: 2515252 - RNA, 19 nt, Homo sapiens
  misc_RNA (1)...(19): siRNA sense strand
acaaagagcccgugccuug

SEQ ID NO: 2515253 - RNA, 19 nt, Homo sapiens
  misc_RNA (1)...(19): siRNA sense strand
augaaggacuggucggcca

SEQ ID NO: 2515254 - RNA, 19 nt, Homo sapiens
  misc_RNA (1)...(19): siRNA sense strand
acauucaagaggugcgaga

SEQ ID NO: 2515255 - RNA, 19 nt, Homo sapiens
  misc_RNA (1)...(19): siRNA sense strand
agaaaggacaauaagaaag

SEQ ID NO: 2515256 - RNA, 19 nt, Homo sapiens
  misc_RNA (1)...(19): siRNA sense strand
ccaugguugcaguaaggaa

SEQ ID NO: 2515257 - RNA, 19 nt, Homo sapiens
  misc_RNA (1)...(19): siRNA sense strand
gagccauuggugugggaaa

SEQ ID NO: 2515258 - RNA, 19 nt, Homo sapiens
  misc_RNA (1)...(19): siRNA sense strand
ugguguagagagaaagaua

SEQ ID NO: 2515259 - RNA, 19 nt, Homo sapiens
  misc_RNA (1)...(19): siRNA sense strand
agauuaucauauuggguga

SEQ ID NO: 2515260 - RNA, 19 nt, Homo sapiens
  misc_RNA (1)...(19): siRNA sense strand
gugccaagaaugacaucaa

SEQ ID NO: 2515261 - RNA, 19 nt, Homo sapiens
  misc_RNA (1)...(19): siRNA sense strand
ccaucaagcucucgccaga

SEQ ID NO: 2515262 - RNA, 19 nt, Homo sapiens
  misc_RNA (1)...(19): siRNA sense strand
agacguuuuaugaggaaua

SEQ ID NO: 2515263 - RNA, 19 nt, Homo sapiens
  misc_RNA (1)...(19): siRNA sense strand
ccaugguguuguuggggaa

SEQ ID NO: 2515264 - RNA, 19 nt, Homo sapiens
  misc_RNA (1)...(19): siRNA sense strand
ggaaguagcucaaggcugg

SEQ ID NO: 2515265 - RNA, 19 nt, Homo sapiens
  misc_RNA (1)...(19): siRNA sense strand
cauuaucgucggagccauu

SEQ ID NO: 2515266 - RNA, 19 nt, Homo sapiens
  misc_RNA (1)...(19): siRNA sense strand
uaucauauugggugacaca

SEQ ID NO: 2515267 - RNA, 19 nt, Homo sapiens
  misc_RNA (1)...(19): siRNA sense strand
acuagaaauuugaagcuca

SEQ ID NO: 2515268 - RNA, 19 nt, Homo sapiens
  misc_RNA (1)...(19): siRNA sense strand
agguggaggaugaacggaa

SEQ ID NO: 2515269 - RNA, 19 nt, Homo sapiens
  misc_RNA (1)...(19): siRNA sense strand
cacauauagacuaggaaaa

SEQ ID NO: 2515270 - RNA, 19 nt, Homo sapiens
  misc_RNA (1)...(19): siRNA sense strand
guuauuaugcuuuggcaca

SEQ ID NO: 2515271 - RNA, 19 nt, Homo sapiens
  misc_RNA (1)...(19): siRNA sense strand
auucauuucuagugggacu

SEQ ID NO: 2515272 - RNA, 19 nt, Homo sapiens
  misc_RNA (1)...(19): siRNA sense strand
cauaggagggccaugaaaa

SEQ ID NO: 2515273 - RNA, 19 nt, Homo sapiens
  misc_RNA (1)...(19): siRNA sense strand
gcacagaggcccauaggag

SEQ ID NO: 2515274 - RNA, 19 nt, Homo sapiens
  misc_RNA (1)...(19): siRNA sense strand
uggaagaagcagagaagca

SEQ ID NO: 2515275 - RNA, 19 nt, Homo sapiens
  misc_RNA (1)...(19): siRNA sense strand
ccgagauggugcaggacau

SEQ ID NO: 2515276 - RNA, 19 nt, Homo sapiens
  misc_RNA (1)...(19): siRNA sense strand
gagaagcaccugaggcaga

SEQ ID NO: 2515277 - RNA, 19 nt, Homo sapiens
  misc_RNA (1)...(19): siRNA sense strand
cagagaagcaccugaggca

SEQ ID NO: 2515278 - RNA, 19 nt, Homo sapiens
  misc_RNA (1)...(19): siRNA sense strand
ucaagaaccugcugggacu

SEQ ID NO: 2515279 - RNA, 19 nt, Homo sapiens
  misc_RNA (1)...(19): siRNA sense strand
gcuucugggaggugcagua

SEQ ID NO: 2515280 - RNA, 19 nt, Homo sapiens
  misc_RNA (1)...(19): siRNA sense strand
cguucuuccugcaggugua

SEQ ID NO: 2515281 - RNA, 19 nt, Homo sapiens
  misc_RNA (1)...(19): siRNA sense strand
ccuucgcaucucagaauaa

SEQ ID NO: 2515282 - RNA, 19 nt, Homo sapiens
  misc_RNA (1)...(19): siRNA sense strand
gggaggugcaguacggcau

SEQ ID NO: 2515283 - RNA, 19 nt, Homo sapiens
  misc_RNA (1)...(19): siRNA sense strand
acacuguggugcugggacu

SEQ ID NO: 2515284 - RNA, 19 nt, Homo sapiens
  misc_RNA (1)...(19): siRNA sense strand
gggucaaguaugagacaga

SEQ ID NO: 2515285 - RNA, 19 nt, Homo sapiens
  misc_RNA (1)...(19): siRNA sense strand
acuggaagcuggagagcca

SEQ ID NO: 2515286 - RNA, 19 nt, Homo sapiens
  misc_RNA (1)...(19): siRNA sense strand
auccagaaugagaaggaaa

SEQ ID NO: 2515287 - RNA, 19 nt, Homo sapiens
  misc_RNA (1)...(19): siRNA sense strand
accaugaagaggaaguaaa

SEQ ID NO: 2515288 - RNA, 19 nt, Homo sapiens
  misc_RNA (1)...(19): siRNA sense strand
agaagaaccaugaagagga

SEQ ID NO: 2515289 - RNA, 19 nt, Homo sapiens
  misc_RNA (1)...(19): siRNA sense strand
agcuggaagcagagaucaa

SEQ ID NO: 2515290 - RNA, 19 nt, Homo sapiens
  misc_RNA (1)...(19): siRNA sense strand
aagaggaaguaaagggccu

SEQ ID NO: 2515291 - RNA, 19 nt, Homo sapiens
  misc_RNA (1)...(19): siRNA sense strand
cuucaagaccaucgagaac

SEQ ID NO: 2515292 - RNA, 19 nt, Homo sapiens
  misc_RNA (1)...(19): siRNA sense strand
gaaaaggagacuucggcua

SEQ ID NO: 2515293 - RNA, 19 nt, Homo sapiens
  misc_RNA (1)...(19): siRNA sense strand
gaaaaggagacuucggcua

SEQ ID NO: 2515294 - RNA, 19 nt, Homo sapiens
  misc_RNA (1)...(19): siRNA sense strand
uguuacagguucuggucau

SEQ ID NO: 2515295 - RNA, 19 nt, Homo sapiens
  misc_RNA (1)...(19): siRNA sense strand
aggaagaggaagaggaaga

SEQ ID NO: 2515296 - RNA, 19 nt, Homo sapiens
  misc_RNA (1)...(19): siRNA sense strand
cgccauagaaggagagcaa

SEQ ID NO: 2515297 - RNA, 19 nt, Homo sapiens
  misc_RNA (1)...(19): siRNA sense strand
aggaggaggaagaggaaga

SEQ ID NO: 2515298 - RNA, 19 nt, Homo sapiens
  misc_RNA (1)...(19): siRNA sense strand
agacaagacuggaagggca

SEQ ID NO: 2515299 - RNA, 19 nt, Homo sapiens
  misc_RNA (1)...(19): siRNA sense strand
ggauagaagccaaagaacu

SEQ ID NO: 2515300 - RNA, 19 nt, Homo sapiens
  misc_RNA (1)...(19): siRNA sense strand
gaucaagagaagaggccuu

SEQ ID NO: 2515301 - RNA, 19 nt, Homo sapiens
  misc_RNA (1)...(19): siRNA sense strand
gggcugaagaagaggagga

SEQ ID NO: 2515302 - RNA, 19 nt, Homo sapiens
  misc_RNA (1)...(19): siRNA sense strand
aggaagaaaugcccagcaa

SEQ ID NO: 2515303 - RNA, 19 nt, Homo sapiens
  misc_RNA (1)...(19): siRNA sense strand
aagaggaagaggaagaaau

SEQ ID NO: 2515304 - RNA, 19 nt, Homo sapiens
  misc_RNA (1)...(19): siRNA sense strand
ggaagaaaugcccagcaaa

SEQ ID NO: 2515305 - RNA, 19 nt, Homo sapiens
  misc_RNA (1)...(19): siRNA sense strand
gagcaggaguggauagaag

SEQ ID NO: 2515306 - RNA, 19 nt, Homo sapiens
  misc_RNA (1)...(19): siRNA sense strand
ggaccuugacccaggccua

SEQ ID NO: 2515307 - RNA, 19 nt, Homo sapiens
  misc_RNA (1)...(19): siRNA sense strand
gagaggacauccagcgcuu

SEQ ID NO: 2515308 - RNA, 19 nt, Homo sapiens
  misc_RNA (1)...(19): siRNA sense strand
aggaguggauagaagccaa

SEQ ID NO: 2515309 - RNA, 19 nt, Homo sapiens
  misc_RNA (1)...(19): siRNA sense strand
agucacaggaggaggagga

SEQ ID NO: 2515310 - RNA, 19 nt, Homo sapiens
  misc_RNA (1)...(19): siRNA sense strand
gagaagaggccuugggacc

SEQ ID NO: 2515311 - RNA, 19 nt, Homo sapiens
  misc_RNA (1)...(19): siRNA sense strand
ggaguggauagaagccaaa

SEQ ID NO: 2515312 - RNA, 19 nt, Homo sapiens
  misc_RNA (1)...(19): siRNA sense strand
gaagaaaugcccagcaaag

SEQ ID NO: 2515313 - RNA, 19 nt, Homo sapiens
  misc_RNA (1)...(19): siRNA sense strand
agaaaagcucagagaggau

SEQ ID NO: 2515314 - RNA, 19 nt, Homo sapiens
  misc_RNA (1)...(19): siRNA sense strand
ucuucuacccggaggauga

SEQ ID NO: 2515315 - RNA, 19 nt, Homo sapiens
  misc_RNA (1)...(19): siRNA sense strand
gauagaagccaaagaacug

SEQ ID NO: 2515316 - RNA, 19 nt, Homo sapiens
  misc_RNA (1)...(19): siRNA sense strand
auggcuaaguacagacgaa

SEQ ID NO: 2515317 - RNA, 19 nt, Homo sapiens
  misc_RNA (1)...(19): siRNA sense strand
guggauagaagccaaagaa

SEQ ID NO: 2515318 - RNA, 19 nt, Homo sapiens
  misc_RNA (1)...(19): siRNA sense strand
ccgugaagccaaagcccuu

SEQ ID NO: 2515319 - RNA, 19 nt, Homo sapiens
  misc_RNA (1)...(19): siRNA sense strand
gccuauuaccaguugaaga

SEQ ID NO: 2515320 - RNA, 19 nt, Homo sapiens
  misc_RNA (1)...(19): siRNA sense strand
aggaggaggaggaagagga

SEQ ID NO: 2515321 - RNA, 19 nt, Homo sapiens
  misc_RNA (1)...(19): siRNA sense strand
aggaggaagaggaagagga

SEQ ID NO: 2515322 - RNA, 19 nt, Homo sapiens
  misc_RNA (1)...(19): siRNA sense strand
gggccuauuaccaguugaa

SEQ ID NO: 2515323 - RNA, 19 nt, Homo sapiens
  misc_RNA (1)...(19): siRNA sense strand
ccgacuugcucuacgcuga

SEQ ID NO: 2515324 - RNA, 19 nt, Homo sapiens
  misc_RNA (1)...(19): siRNA sense strand
accagaggguccaagacaa

SEQ ID NO: 2515325 - RNA, 19 nt, Homo sapiens
  misc_RNA (1)...(19): siRNA sense strand
cugaagaagaggaggaugg

SEQ ID NO: 2515326 - RNA, 19 nt, Homo sapiens
  misc_RNA (1)...(19): siRNA sense strand
gaggaaagacccugggcau

SEQ ID NO: 2515327 - RNA, 19 nt, Homo sapiens
  misc_RNA (1)...(19): siRNA sense strand
ugaagaaagaagaaggacu

SEQ ID NO: 2515328 - RNA, 19 nt, Homo sapiens
  misc_RNA (1)...(19): siRNA sense strand
gaagaaagaagaaggacuc

SEQ ID NO: 2515329 - RNA, 19 nt, Homo sapiens
  misc_RNA (1)...(19): siRNA sense strand
augcaagaaggaugaagaa

SEQ ID NO: 2515330 - RNA, 19 nt, Homo sapiens
  misc_RNA (1)...(19): siRNA sense strand
ccgaaaaggaggaagucuu

SEQ ID NO: 2515331 - RNA, 19 nt, Homo sapiens
  misc_RNA (1)...(19): siRNA sense strand
aaggaugaagaaagaagaa

SEQ ID NO: 2515332 - RNA, 19 nt, Homo sapiens
  misc_RNA (1)...(19): siRNA sense strand
aauaaaccuuccagcguca

SEQ ID NO: 2515333 - RNA, 19 nt, Homo sapiens
  misc_RNA (1)...(19): siRNA sense strand
caggcgagcaagugagaaa

SEQ ID NO: 2515334 - RNA, 19 nt, Homo sapiens
  misc_RNA (1)...(19): siRNA sense strand
gugcauacuuggaggacca

SEQ ID NO: 2515335 - RNA, 19 nt, Homo sapiens
  misc_RNA (1)...(19): siRNA sense strand
ccacaaaauccaagagcuu

SEQ ID NO: 2515336 - RNA, 19 nt, Homo sapiens
  misc_RNA (1)...(19): siRNA sense strand
gaaacguaugagaaggaaa

SEQ ID NO: 2515337 - RNA, 19 nt, Homo sapiens
  misc_RNA (1)...(19): siRNA sense strand
uccaagagcuucugggaga

SEQ ID NO: 2515338 - RNA, 19 nt, Homo sapiens
  misc_RNA (1)...(19): siRNA sense strand
gcuuugagauccugggcuu

SEQ ID NO: 2515339 - RNA, 19 nt, Homo sapiens
  misc_RNA (1)...(19): siRNA sense strand
agaaagucuuggaggagga

SEQ ID NO: 2515340 - RNA, 19 nt, Homo sapiens
  misc_RNA (1)...(19): siRNA sense strand
ucuuggaggaggagagaca

SEQ ID NO: 2515341 - RNA, 19 nt, Homo sapiens
  misc_RNA (1)...(19): siRNA sense strand
gguuggauaaagaggugaa

SEQ ID NO: 2515342 - RNA, 19 nt, Homo sapiens
  misc_RNA (1)...(19): siRNA sense strand
acaccuuaguccugaucaa

SEQ ID NO: 2515343 - RNA, 19 nt, Homo sapiens
  misc_RNA (1)...(19): siRNA sense strand
uugaggaagccaaggguuu

SEQ ID NO: 2515344 - RNA, 19 nt, Homo sapiens
  misc_RNA (1)...(19): siRNA sense strand
cuacccgaucugaggaaua

SEQ ID NO: 2515345 - RNA, 19 nt, Homo sapiens
  misc_RNA (1)...(19): siRNA sense strand
aaacguaugagaaggaaaa

SEQ ID NO: 2515346 - RNA, 19 nt, Homo sapiens
  misc_RNA (1)...(19): siRNA sense strand
ugggagaguccgaacacaa

SEQ ID NO: 2515347 - RNA, 19 nt, Homo sapiens
  misc_RNA (1)...(19): siRNA sense strand
cuaaagagugacaugaaca

SEQ ID NO: 2515348 - RNA, 19 nt, Homo sapiens
  misc_RNA (1)...(19): siRNA sense strand
gcauacagccauugccuga

SEQ ID NO: 2515349 - RNA, 19 nt, Homo sapiens
  misc_RNA (1)...(19): siRNA sense strand
auccaggagcugagacuaa

SEQ ID NO: 2515350 - RNA, 19 nt, Homo sapiens
  misc_RNA (1)...(19): siRNA sense strand
gagacuaaaacgggagaaa

SEQ ID NO: 2515351 - RNA, 19 nt, Homo sapiens
  misc_RNA (1)...(19): siRNA sense strand
cuugagugucagaggugaa

SEQ ID NO: 2515352 - RNA, 19 nt, Homo sapiens
  misc_RNA (1)...(19): siRNA sense strand
cugaaacguaugagaagga

SEQ ID NO: 2515353 - RNA, 19 nt, Homo sapiens
  misc_RNA (1)...(19): siRNA sense strand
uggaaagcugugacaagaa

SEQ ID NO: 2515354 - RNA, 19 nt, Homo sapiens
  misc_RNA (1)...(19): siRNA sense strand
ggaaaacuguggaggguuc

SEQ ID NO: 2515355 - RNA, 19 nt, Homo sapiens
  misc_RNA (1)...(19): siRNA sense strand
ggagggauauugaggacgu

SEQ ID NO: 2515356 - RNA, 19 nt, Homo sapiens
  misc_RNA (1)...(19): siRNA sense strand
gucugaauucggagaagua

SEQ ID NO: 2515357 - RNA, 19 nt, Homo sapiens
  misc_RNA (1)...(19): siRNA sense strand
gugucagaggugaaaggaa

SEQ ID NO: 2515358 - RNA, 19 nt, Homo sapiens
  misc_RNA (1)...(19): siRNA sense strand
caaaugaagaagaagguag

SEQ ID NO: 2515359 - RNA, 19 nt, Homo sapiens
  misc_RNA (1)...(19): siRNA sense strand
caacagaaacaacagcaga

SEQ ID NO: 2515360 - RNA, 19 nt, Homo sapiens
  misc_RNA (1)...(19): siRNA sense strand
cugacuugcucuugagugu

SEQ ID NO: 2515361 - RNA, 19 nt, Homo sapiens
  misc_RNA (1)...(19): siRNA sense strand
gagaagaggcagcuggaug

SEQ ID NO: 2515362 - RNA, 19 nt, Homo sapiens
  misc_RNA (1)...(19): siRNA sense strand
ccuuuaaaugcaagaagca

SEQ ID NO: 2515363 - RNA, 19 nt, Homo sapiens
  misc_RNA (1)...(19): siRNA sense strand
ccuggcugcuggaggucaa

SEQ ID NO: 2515364 - RNA, 19 nt, Homo sapiens
  misc_RNA (1)...(19): siRNA sense strand
acuuggaggaccacagcua

SEQ ID NO: 2515365 - RNA, 19 nt, Homo sapiens
  misc_RNA (1)...(19): siRNA sense strand
aacagaaacaacagcagaa

SEQ ID NO: 2515366 - RNA, 19 nt, Homo sapiens
  misc_RNA (1)...(19): siRNA sense strand
gaaacagacagcagccuca

SEQ ID NO: 2515367 - RNA, 19 nt, Homo sapiens
  misc_RNA (1)...(19): siRNA sense strand
acgcaagugcuaugaggga

SEQ ID NO: 2515368 - RNA, 19 nt, Homo sapiens
  misc_RNA (1)...(19): siRNA sense strand
acagaaacaacagcagaaa

SEQ ID NO: 2515369 - RNA, 19 nt, Homo sapiens
  misc_RNA (1)...(19): siRNA sense strand
cagaguccucagagcuaua

SEQ ID NO: 2515370 - RNA, 19 nt, Homo sapiens
  misc_RNA (1)...(19): siRNA sense strand
aggcaacauuuguggccaa

SEQ ID NO: 2515371 - RNA, 19 nt, Homo sapiens
  misc_RNA (1)...(19): siRNA sense strand
cagccaaggaugagaugca

SEQ ID NO: 2515372 - RNA, 19 nt, Homo sapiens
  misc_RNA (1)...(19): siRNA sense strand
agucauaccuggaaggcgu

SEQ ID NO: 2515373 - RNA, 19 nt, Homo sapiens
  misc_RNA (1)...(19): siRNA sense strand
cugcaaagugugugugaac

SEQ ID NO: 2515374 - RNA, 19 nt, Homo sapiens
  misc_RNA (1)...(19): siRNA sense strand
guggguugcuccagggcau

SEQ ID NO: 2515375 - RNA, 19 nt, Homo sapiens
  misc_RNA (1)...(19): siRNA sense strand
cagccuggucagugaguca

SEQ ID NO: 2515376 - RNA, 19 nt, Homo sapiens
  misc_RNA (1)...(19): siRNA sense strand
aacaguucuuggaggcaua

SEQ ID NO: 2515377 - RNA, 19 nt, Homo sapiens
  misc_RNA (1)...(19): siRNA sense strand
acucagcagccaaggauga

SEQ ID NO: 2515378 - RNA, 19 nt, Homo sapiens
  misc_RNA (1)...(19): siRNA sense strand
guggagacuggacgaacaa

SEQ ID NO: 2515379 - RNA, 19 nt, Homo sapiens
  misc_RNA (1)...(19): siRNA sense strand
ccgcgguagcagaaagcau

SEQ ID NO: 2515380 - RNA, 19 nt, Homo sapiens
  misc_RNA (1)...(19): siRNA sense strand
ccaacaaauaaguggauua

SEQ ID NO: 2515381 - RNA, 19 nt, Homo sapiens
  misc_RNA (1)...(19): siRNA sense strand
cgauaaugaaacagaacaa

SEQ ID NO: 2515382 - RNA, 19 nt, Homo sapiens
  misc_RNA (1)...(19): siRNA sense strand
gguaaaggaaagauaacaa

SEQ ID NO: 2515383 - RNA, 19 nt, Homo sapiens
  misc_RNA (1)...(19): siRNA sense strand
aguagaauguggugccaaa

SEQ ID NO: 2515384 - RNA, 19 nt, Homo sapiens
  misc_RNA (1)...(19): siRNA sense strand
uuauaauacuggagaggau

SEQ ID NO: 2515385 - RNA, 19 nt, Homo sapiens
  misc_RNA (1)...(19): siRNA sense strand
aggauaugcuaauggaaau

SEQ ID NO: 2515386 - RNA, 19 nt, Homo sapiens
  misc_RNA (1)...(19): siRNA sense strand
gagcaggaucagcggcaaa

SEQ ID NO: 2515387 - RNA, 19 nt, Homo sapiens
  misc_RNA (1)...(19): siRNA sense strand
gcuaauauucugggagcaa

SEQ ID NO: 2515388 - RNA, 19 nt, Homo sapiens
  misc_RNA (1)...(19): siRNA sense strand
ggugaauauugcugcuaau

SEQ ID NO: 2515389 - RNA, 19 nt, Homo sapiens
  misc_RNA (1)...(19): siRNA sense strand
gguuugagucagagacaca

SEQ ID NO: 2515390 - RNA, 19 nt, Homo sapiens
  misc_RNA (1)...(19): siRNA sense strand
aggaugacuuggugaauca

SEQ ID NO: 2515391 - RNA, 19 nt, Homo sapiens
  misc_RNA (1)...(19): siRNA sense strand
caagaauagcagaggagca

SEQ ID NO: 2515392 - RNA, 19 nt, Homo sapiens
  misc_RNA (1)...(19): siRNA sense strand
uagcagaggagcaggauca

SEQ ID NO: 2515393 - RNA, 19 nt, Homo sapiens
  misc_RNA (1)...(19): siRNA sense strand
gaucuaaaguccaagacca

SEQ ID NO: 2515394 - RNA, 19 nt, Homo sapiens
  misc_RNA (1)...(19): siRNA sense strand
aguccaagaccaaggaaaa

SEQ ID NO: 2515395 - RNA, 19 nt, Homo sapiens
  misc_RNA (1)...(19): siRNA sense strand
uuuacgaaccagagagauu

SEQ ID NO: 2515396 - RNA, 19 nt, Homo sapiens
  misc_RNA (1)...(19): siRNA sense strand
ugacauaaucaaaggaaac

SEQ ID NO: 2515397 - RNA, 19 nt, Homo sapiens
  misc_RNA (1)...(19): siRNA sense strand
augaacagauguaugcaaa

SEQ ID NO: 2515398 - RNA, 19 nt, Homo sapiens
  misc_RNA (1)...(19): siRNA sense strand
cgacaaugaagauggggaa

SEQ ID NO: 2515399 - RNA, 19 nt, Homo sapiens
  misc_RNA (1)...(19): siRNA sense strand
uaggauaugcuaauggaaa

SEQ ID NO: 2515400 - RNA, 19 nt, Homo sapiens
  misc_RNA (1)...(19): siRNA sense strand
ccugacagaaggaaauaaa

SEQ ID NO: 2515401 - RNA, 19 nt, Homo sapiens
  misc_RNA (1)...(19): siRNA sense strand
cuaauaugggagaaguuua

SEQ ID NO: 2515402 - RNA, 19 nt, Homo sapiens
  misc_RNA (1)...(19): siRNA sense strand
guuaacuggcaaagaagua

SEQ ID NO: 2515403 - RNA, 19 nt, Homo sapiens
  misc_RNA (1)...(19): siRNA sense strand
acaugguaaaggaaagaua

SEQ ID NO: 2515404 - RNA, 19 nt, Homo sapiens
  misc_RNA (1)...(19): siRNA sense strand
agaaaguuauggaaguaga

SEQ ID NO: 2515405 - RNA, 19 nt, Homo sapiens
  misc_RNA (1)...(19): siRNA sense strand
guggaagaauaugaagaaa

SEQ ID NO: 2515406 - RNA, 19 nt, Homo sapiens
  misc_RNA (1)...(19): siRNA sense strand
agaccugacagaaggaaau

SEQ ID NO: 2515407 - RNA, 19 nt, Homo sapiens
  misc_RNA (1)...(19): siRNA sense strand
agucagagacacaaauauu

SEQ ID NO: 2515408 - RNA, 19 nt, Homo sapiens
  misc_RNA (1)...(19): siRNA sense strand
cuggaggagcuuagccaaa

SEQ ID NO: 2515409 - RNA, 19 nt, Homo sapiens
  misc_RNA (1)...(19): siRNA sense strand
cuucagaauacuucaagaa

SEQ ID NO: 2515410 - RNA, 19 nt, Homo sapiens
  misc_RNA (1)...(19): siRNA sense strand
uggcaaagaaguagaccca

SEQ ID NO: 2515411 - RNA, 19 nt, Homo sapiens
  misc_RNA (1)...(19): siRNA sense strand
cagcuaauccagaagccaa

SEQ ID NO: 2515412 - RNA, 19 nt, Homo sapiens
  misc_RNA (1)...(19): siRNA sense strand
cguguauguuguaaagaga

SEQ ID NO: 2515413 - RNA, 19 nt, Homo sapiens
  misc_RNA (1)...(19): siRNA sense strand
caauagugccaccaauaaa

SEQ ID NO: 2515414 - RNA, 19 nt, Homo sapiens
  misc_RNA (1)...(19): siRNA sense strand
caacaguagcagaauugaa

SEQ ID NO: 2515415 - RNA, 19 nt, Homo sapiens
  misc_RNA (1)...(19): siRNA sense strand
cuuuagaugaacagaugua

SEQ ID NO: 2515416 - RNA, 19 nt, Homo sapiens
  misc_RNA (1)...(19): siRNA sense strand
guugagaucgauaaugaaa

SEQ ID NO: 2515417 - RNA, 19 nt, Homo sapiens
  misc_RNA (1)...(19): siRNA sense strand
acaaauggaagaaaugcaa

SEQ ID NO: 2515418 - RNA, 19 nt, Homo sapiens
  misc_RNA (1)...(19): siRNA sense strand
caaaggaaacaaagagauc

SEQ ID NO: 2515419 - RNA, 19 nt, Homo sapiens
  misc_RNA (1)...(19): siRNA sense strand
ccagaagccaagagcacau

SEQ ID NO: 2515420 - RNA, 19 nt, Homo sapiens
  misc_RNA (1)...(19): siRNA sense strand
gcggugaacaggaagauga

SEQ ID NO: 2515421 - RNA, 19 nt, Homo sapiens
  misc_RNA (1)...(19): siRNA sense strand
agaacagucuccagaagau

SEQ ID NO: 2515422 - RNA, 19 nt, Homo sapiens
  misc_RNA (1)...(19): siRNA sense strand
ggguuacagaggacagcua

SEQ ID NO: 2515423 - RNA, 19 nt, Homo sapiens
  misc_RNA (1)...(19): siRNA sense strand
cuucacaugguaaaggaaa

SEQ ID NO: 2515424 - RNA, 19 nt, Homo sapiens
  misc_RNA (1)...(19): siRNA sense strand
cggugaacaggaagaugaa

SEQ ID NO: 2515425 - RNA, 19 nt, Homo sapiens
  misc_RNA (1)...(19): siRNA sense strand
aaaucaaucccuugccuaa

SEQ ID NO: 2515426 - RNA, 19 nt, Homo sapiens
  misc_RNA (1)...(19): siRNA sense strand
ugaaggaagcucagaaacu

SEQ ID NO: 2515427 - RNA, 19 nt, Homo sapiens
  misc_RNA (1)...(19): siRNA sense strand
caugguaaaggaaagauaa

SEQ ID NO: 2515428 - RNA, 19 nt, Homo sapiens
  misc_RNA (1)...(19): siRNA sense strand
guauuaaagccuuagaagu

SEQ ID NO: 2515429 - RNA, 19 nt, Homo sapiens
  misc_RNA (1)...(19): siRNA sense strand
ccauaaagccugaagaacc

SEQ ID NO: 2515430 - RNA, 19 nt, Homo sapiens
  misc_RNA (1)...(19): siRNA sense strand
gacagauauccaacaaaua

SEQ ID NO: 2515431 - RNA, 19 nt, Homo sapiens
  misc_RNA (1)...(19): siRNA sense strand
guaguaugcaccaggauga

SEQ ID NO: 2515432 - RNA, 19 nt, Homo sapiens
  misc_RNA (1)...(19): siRNA sense strand
ucgaaauaauuaugccuca

SEQ ID NO: 2515433 - RNA, 19 nt, Homo sapiens
  misc_RNA (1)...(19): siRNA sense strand
acucagaacgccaggaacu

SEQ ID NO: 2515434 - RNA, 19 nt, Homo sapiens
  misc_RNA (1)...(19): siRNA sense strand
auaauacuggagaggauaa

SEQ ID NO: 2515435 - RNA, 19 nt, Homo sapiens
  misc_RNA (1)...(19): siRNA sense strand
gccgaacugcuuugaguaa

SEQ ID NO: 2515436 - RNA, 19 nt, Homo sapiens
  misc_RNA (1)...(19): siRNA sense strand
ggugauuuaaguaguagua

SEQ ID NO: 2515437 - RNA, 19 nt, Homo sapiens
  misc_RNA (1)...(19): siRNA sense strand
aagaagaagcgcugcaagu

SEQ ID NO: 2515438 - RNA, 19 nt, Homo sapiens
  misc_RNA (1)...(19): siRNA sense strand
aucuaaaguccaagaccaa

SEQ ID NO: 2515439 - RNA, 19 nt, Homo sapiens
  misc_RNA (1)...(19): siRNA sense strand
agauguacaauuccagaaa

SEQ ID NO: 2515440 - RNA, 19 nt, Homo sapiens
  misc_RNA (1)...(19): siRNA sense strand
gcaguuguggacagugaaa

SEQ ID NO: 2515441 - RNA, 19 nt, Homo sapiens
  misc_RNA (1)...(19): siRNA sense strand
aaacugaagaccugacaga

SEQ ID NO: 2515442 - RNA, 19 nt, Homo sapiens
  misc_RNA (1)...(19): siRNA sense strand
uuugaugaauggaagaaga

SEQ ID NO: 2515443 - RNA, 19 nt, Homo sapiens
  misc_RNA (1)...(19): siRNA sense strand
ccaacaaauaaguggauua

SEQ ID NO: 2515444 - RNA, 19 nt, Homo sapiens
  misc_RNA (1)...(19): siRNA sense strand
cgauaaugaaacagaacaa

SEQ ID NO: 2515445 - RNA, 19 nt, Homo sapiens
  misc_RNA (1)...(19): siRNA sense strand
gguaaaggaaagauaacaa

SEQ ID NO: 2515446 - RNA, 19 nt, Homo sapiens
  misc_RNA (1)...(19): siRNA sense strand
aguagaauguggugccaaa

SEQ ID NO: 2515447 - RNA, 19 nt, Homo sapiens
  misc_RNA (1)...(19): siRNA sense strand
uuauaauacuggagaggau

SEQ ID NO: 2515448 - RNA, 19 nt, Homo sapiens
  misc_RNA (1)...(19): siRNA sense strand
aggauaugcuaauggaaau

SEQ ID NO: 2515449 - RNA, 19 nt, Homo sapiens
  misc_RNA (1)...(19): siRNA sense strand
gagcaggaucagcggcaaa

SEQ ID NO: 2515450 - RNA, 19 nt, Homo sapiens
  misc_RNA (1)...(19): siRNA sense strand
gcuaauauucugggagcaa

SEQ ID NO: 2515451 - RNA, 19 nt, Homo sapiens
  misc_RNA (1)...(19): siRNA sense strand
agaaggaggagaagaugaa

SEQ ID NO: 2515452 - RNA, 19 nt, Homo sapiens
  misc_RNA (1)...(19): siRNA sense strand
aggagaagaugaagaagca

SEQ ID NO: 2515453 - RNA, 19 nt, Homo sapiens
  misc_RNA (1)...(19): siRNA sense strand
ggugaauauugcugcuaau

SEQ ID NO: 2515454 - RNA, 19 nt, Homo sapiens
  misc_RNA (1)...(19): siRNA sense strand
gguuugagucagagacaca

SEQ ID NO: 2515455 - RNA, 19 nt, Homo sapiens
  misc_RNA (1)...(19): siRNA sense strand
aggaugacuuggugaauca

SEQ ID NO: 2515456 - RNA, 19 nt, Homo sapiens
  misc_RNA (1)...(19): siRNA sense strand
caagaauagcagaggagca

SEQ ID NO: 2515457 - RNA, 19 nt, Homo sapiens
  misc_RNA (1)...(19): siRNA sense strand
uagcagaggagcaggauca

SEQ ID NO: 2515458 - RNA, 19 nt, Homo sapiens
  misc_RNA (1)...(19): siRNA sense strand
gaucuaaaguccaagacca

SEQ ID NO: 2515459 - RNA, 19 nt, Homo sapiens
  misc_RNA (1)...(19): siRNA sense strand
aguccaagaccaaggaaaa

SEQ ID NO: 2515460 - RNA, 19 nt, Homo sapiens
  misc_RNA (1)...(19): siRNA sense strand
uuuacgaaccagagagauu

SEQ ID NO: 2515461 - RNA, 19 nt, Homo sapiens
  misc_RNA (1)...(19): siRNA sense strand
ugacauaaucaaaggaaac

SEQ ID NO: 2515462 - RNA, 19 nt, Homo sapiens
  misc_RNA (1)...(19): siRNA sense strand
augaacagauguaugcaaa

SEQ ID NO: 2515463 - RNA, 19 nt, Homo sapiens
  misc_RNA (1)...(19): siRNA sense strand
cgacaaugaagauggggaa

SEQ ID NO: 2515464 - RNA, 19 nt, Homo sapiens
  misc_RNA (1)...(19): siRNA sense strand
uaggauaugcuaauggaaa

SEQ ID NO: 2515465 - RNA, 19 nt, Homo sapiens
  misc_RNA (1)...(19): siRNA sense strand
ccugacagaaggaaauaaa

SEQ ID NO: 2515466 - RNA, 19 nt, Homo sapiens
  misc_RNA (1)...(19): siRNA sense strand
aggaggagaagaugaagaa

SEQ ID NO: 2515467 - RNA, 19 nt, Homo sapiens
  misc_RNA (1)...(19): siRNA sense strand
cuaauaugggagaaguuua

SEQ ID NO: 2515468 - RNA, 19 nt, Homo sapiens
  misc_RNA (1)...(19): siRNA sense strand
guuaacuggcaaagaagua

SEQ ID NO: 2515469 - RNA, 19 nt, Homo sapiens
  misc_RNA (1)...(19): siRNA sense strand
acaugguaaaggaaagaua

SEQ ID NO: 2515470 - RNA, 19 nt, Homo sapiens
  misc_RNA (1)...(19): siRNA sense strand
agaaaguuauggaaguaga

SEQ ID NO: 2515471 - RNA, 19 nt, Homo sapiens
  misc_RNA (1)...(19): siRNA sense strand
guggaagaauaugaagaaa

SEQ ID NO: 2515472 - RNA, 19 nt, Homo sapiens
  misc_RNA (1)...(19): siRNA sense strand
agaccugacagaaggaaau

SEQ ID NO: 2515473 - RNA, 19 nt, Homo sapiens
  misc_RNA (1)...(19): siRNA sense strand
agucagagacacaaauauu

SEQ ID NO: 2515474 - RNA, 19 nt, Homo sapiens
  misc_RNA (1)...(19): siRNA sense strand
cuggaggagcuuagccaaa

SEQ ID NO: 2515475 - RNA, 19 nt, Homo sapiens
  misc_RNA (1)...(19): siRNA sense strand
cuucagaauacuucaagaa

SEQ ID NO: 2515476 - RNA, 19 nt, Homo sapiens
  misc_RNA (1)...(19): siRNA sense strand
uggcaaagaaguagaccca

SEQ ID NO: 2515477 - RNA, 19 nt, Homo sapiens
  misc_RNA (1)...(19): siRNA sense strand
cagcuaauccagaagccaa

SEQ ID NO: 2515478 - RNA, 19 nt, Homo sapiens
  misc_RNA (1)...(19): siRNA sense strand
cguguauguuguaaagaga

SEQ ID NO: 2515479 - RNA, 19 nt, Homo sapiens
  misc_RNA (1)...(19): siRNA sense strand
caauagugccaccaauaaa

SEQ ID NO: 2515480 - RNA, 19 nt, Homo sapiens
  misc_RNA (1)...(19): siRNA sense strand
caacaguagcagaauugaa

SEQ ID NO: 2515481 - RNA, 19 nt, Homo sapiens
  misc_RNA (1)...(19): siRNA sense strand
cuuuagaugaacagaugua

SEQ ID NO: 2515482 - RNA, 19 nt, Homo sapiens
  misc_RNA (1)...(19): siRNA sense strand
guugagaucgauaaugaaa

SEQ ID NO: 2515483 - RNA, 19 nt, Homo sapiens
  misc_RNA (1)...(19): siRNA sense strand
acaaauggaagaaaugcaa

SEQ ID NO: 2515484 - RNA, 19 nt, Homo sapiens
  misc_RNA (1)...(19): siRNA sense strand
caaaggaaacaaagagauc

SEQ ID NO: 2515485 - RNA, 19 nt, Homo sapiens
  misc_RNA (1)...(19): siRNA sense strand
ccagaagccaagagcacau

SEQ ID NO: 2515486 - RNA, 19 nt, Homo sapiens
  misc_RNA (1)...(19): siRNA sense strand
gggaagaaggaggagaaga

SEQ ID NO: 2515487 - RNA, 19 nt, Homo sapiens
  misc_RNA (1)...(19): siRNA sense strand
gcggugaacaggaagauga

SEQ ID NO: 2515488 - RNA, 19 nt, Homo sapiens
  misc_RNA (1)...(19): siRNA sense strand
agaacagucuccagaagau

SEQ ID NO: 2515489 - RNA, 19 nt, Homo sapiens
  misc_RNA (1)...(19): siRNA sense strand
ggguuacagaggacagcua

SEQ ID NO: 2515490 - RNA, 19 nt, Homo sapiens
  misc_RNA (1)...(19): siRNA sense strand
cuucacaugguaaaggaaa

SEQ ID NO: 2515491 - RNA, 19 nt, Homo sapiens
  misc_RNA (1)...(19): siRNA sense strand
cggugaacaggaagaugaa

SEQ ID NO: 2515492 - RNA, 19 nt, Homo sapiens
  misc_RNA (1)...(19): siRNA sense strand
aaaucaaucccuugccuaa

SEQ ID NO: 2515493 - RNA, 19 nt, Homo sapiens
  misc_RNA (1)...(19): siRNA sense strand
ugaaggaagcucagaaacu

SEQ ID NO: 2515494 - RNA, 19 nt, Homo sapiens
  misc_RNA (1)...(19): siRNA sense strand
caugguaaaggaaagauaa

SEQ ID NO: 2515495 - RNA, 19 nt, Homo sapiens
  misc_RNA (1)...(19): siRNA sense strand
guauuaaagccuuagaagu

SEQ ID NO: 2515496 - RNA, 19 nt, Homo sapiens
  misc_RNA (1)...(19): siRNA sense strand
ccauaaagccugaagaacc

SEQ ID NO: 2515497 - RNA, 19 nt, Homo sapiens
  misc_RNA (1)...(19): siRNA sense strand
gacagauauccaacaaaua

SEQ ID NO: 2515498 - RNA, 19 nt, Homo sapiens
  misc_RNA (1)...(19): siRNA sense strand
guaguaugcaccaggauga

SEQ ID NO: 2515499 - RNA, 19 nt, Homo sapiens
  misc_RNA (1)...(19): siRNA sense strand
ucgaaauaauuaugccuca

SEQ ID NO: 2515500 - RNA, 19 nt, Homo sapiens
  misc_RNA (1)...(19): siRNA sense strand
acucagaacgccaggaacu

SEQ ID NO: 2515501 - RNA, 19 nt, Homo sapiens
  misc_RNA (1)...(19): siRNA sense strand
auaauacuggagaggauaa

SEQ ID NO: 2515502 - RNA, 19 nt, Homo sapiens
  misc_RNA (1)...(19): siRNA sense strand
gccgaacugcuuugaguaa

SEQ ID NO: 2515503 - RNA, 19 nt, Homo sapiens
  misc_RNA (1)...(19): siRNA sense strand
ggugauuuaaguaguagua

SEQ ID NO: 2515504 - RNA, 19 nt, Homo sapiens
  misc_RNA (1)...(19): siRNA sense strand
aagaagaagcgcugcaagu

SEQ ID NO: 2515505 - RNA, 19 nt, Homo sapiens
  misc_RNA (1)...(19): siRNA sense strand
aucuaaaguccaagaccaa

SEQ ID NO: 2515506 - RNA, 19 nt, Homo sapiens
  misc_RNA (1)...(19): siRNA sense strand
agauguacaauuccagaaa

SEQ ID NO: 2515507 - RNA, 19 nt, Homo sapiens
  misc_RNA (1)...(19): siRNA sense strand
gcaguuguggacagugaaa

SEQ ID NO: 2515508 - RNA, 19 nt, Homo sapiens
  misc_RNA (1)...(19): siRNA sense strand
aggaguggcuggaggaaaa

SEQ ID NO: 2515509 - RNA, 19 nt, Homo sapiens
  misc_RNA (1)...(19): siRNA sense strand
aagcgaaaguggagaaccu

SEQ ID NO: 2515510 - RNA, 19 nt, Homo sapiens
  misc_RNA (1)...(19): siRNA sense strand
ggcuacagcaagagcagaa

SEQ ID NO: 2515511 - RNA, 19 nt, Homo sapiens
  misc_RNA (1)...(19): siRNA sense strand
aggaagcagcacagggaga

SEQ ID NO: 2515512 - RNA, 19 nt, Homo sapiens
  misc_RNA (1)...(19): siRNA sense strand
augaagauguuaaagcgaa

SEQ ID NO: 2515513 - RNA, 19 nt, Homo sapiens
  misc_RNA (1)...(19): siRNA sense strand
acgcggaggauuugaugaa

SEQ ID NO: 2515514 - RNA, 19 nt, Homo sapiens
  misc_RNA (1)...(19): siRNA sense strand
cggucaugguucagcacau

SEQ ID NO: 2515515 - RNA, 19 nt, Homo sapiens
  misc_RNA (1)...(19): siRNA sense strand
cggacucacugcagggcau

SEQ ID NO: 2515516 - RNA, 19 nt, Homo sapiens
  misc_RNA (1)...(19): siRNA sense strand
augcgcugcuggagggcaa

SEQ ID NO: 2515517 - RNA, 19 nt, Homo sapiens
  misc_RNA (1)...(19): siRNA sense strand
cagcaagagcagaacagca

SEQ ID NO: 2515518 - RNA, 19 nt, Homo sapiens
  misc_RNA (1)...(19): siRNA sense strand
gggacgacaugcuccgaga

SEQ ID NO: 2515519 - RNA, 19 nt, Homo sapiens
  misc_RNA (1)...(19): siRNA sense strand
gaaggaagcagcacaggga

SEQ ID NO: 2515520 - RNA, 19 nt, Homo sapiens
  misc_RNA (1)...(19): siRNA sense strand
gaagggaaguuuaaggaca

SEQ ID NO: 2515521 - RNA, 19 nt, Homo sapiens
  misc_RNA (1)...(19): siRNA sense strand
ccaagagccugcagggaac

SEQ ID NO: 2515522 - RNA, 19 nt, Homo sapiens
  misc_RNA (1)...(19): siRNA sense strand
accaagagccugcagggaa

SEQ ID NO: 2515523 - RNA, 19 nt, Homo sapiens
  misc_RNA (1)...(19): siRNA sense strand
ugaaaucagaagagacagu

SEQ ID NO: 2515524 - RNA, 19 nt, Homo sapiens
  misc_RNA (1)...(19): siRNA sense strand
gaagggaaguuuaaggaca

SEQ ID NO: 2515525 - RNA, 19 nt, Homo sapiens
  misc_RNA (1)...(19): siRNA sense strand
ugaaaucagaagagacagu

SEQ ID NO: 2515526 - RNA, 19 nt, Homo sapiens
  misc_RNA (1)...(19): siRNA sense strand
ccaaagggcaacagugcau

SEQ ID NO: 2515527 - RNA, 19 nt, Homo sapiens
  misc_RNA (1)...(19): siRNA sense strand
gugcacaaaugaagauguu

SEQ ID NO: 2515528 - RNA, 19 nt, Homo sapiens
  misc_RNA (1)...(19): siRNA sense strand
ucuucaauggacagaauua

SEQ ID NO: 2515529 - RNA, 19 nt, Homo sapiens
  misc_RNA (1)...(19): siRNA sense strand
uuguaagccacuagaaaga

SEQ ID NO: 2515530 - RNA, 19 nt, Homo sapiens
  misc_RNA (1)...(19): siRNA sense strand
uggaacaggaggaggaaac

SEQ ID NO: 2515531 - RNA, 19 nt, Homo sapiens
  misc_RNA (1)...(19): siRNA sense strand
acuuguaagccacuagaaa

SEQ ID NO: 2515532 - RNA, 19 nt, Homo sapiens
  misc_RNA (1)...(19): siRNA sense strand
gcacaaaugaagauguuuc

SEQ ID NO: 2515533 - RNA, 19 nt, Homo sapiens
  misc_RNA (1)...(19): siRNA sense strand
ggacagaauuauuagaucc

SEQ ID NO: 2515534 - RNA, 19 nt, Homo sapiens
  misc_RNA (1)...(19): siRNA sense strand
ccgccuucauugagcccaa

SEQ ID NO: 2515535 - RNA, 19 nt, Homo sapiens
  misc_RNA (1)...(19): siRNA sense strand
ucauggacaaggaaggcaa

SEQ ID NO: 2515536 - RNA, 19 nt, Homo sapiens
  misc_RNA (1)...(19): siRNA sense strand
cgugcaagccaguggaaug

SEQ ID NO: 2515537 - RNA, 19 nt, Homo sapiens
  misc_RNA (1)...(19): siRNA sense strand
aaggcaauguccuggguca

SEQ ID NO: 2515538 - RNA, 19 nt, Homo sapiens
  misc_RNA (1)...(19): siRNA sense strand
auagaaaacucgaggcaac

SEQ ID NO: 2515539 - RNA, 19 nt, Homo sapiens
  misc_RNA (1)...(19): siRNA sense strand
gaggagugcucgugcgucu

SEQ ID NO: 2515540 - RNA, 19 nt, Homo sapiens
  misc_RNA (1)...(19): siRNA sense strand
gaggcaacugggaggucaa

SEQ ID NO: 2515541 - RNA, 19 nt, Homo sapiens
  misc_RNA (1)...(19): siRNA sense strand
acugggaggucaacgggaa

SEQ ID NO: 2515542 - RNA, 19 nt, Homo sapiens
  misc_RNA (1)...(19): siRNA sense strand
aggaugaaaugucagguga

SEQ ID NO: 2515543 - RNA, 19 nt, Homo sapiens
  misc_RNA (1)...(19): siRNA sense strand
cuucaaagccugggaccau

SEQ ID NO: 2515544 - RNA, 19 nt, Homo sapiens
  misc_RNA (1)...(19): siRNA sense strand
cugcaagugggcuggaaca

SEQ ID NO: 2515545 - RNA, 19 nt, Homo sapiens
  misc_RNA (1)...(19): siRNA sense strand
aggucaacgggaagacaau

SEQ ID NO: 2515546 - RNA, 19 nt, Homo sapiens
  misc_RNA (1)...(19): siRNA sense strand
acucauuugacgaggaaua

SEQ ID NO: 2515547 - RNA, 19 nt, Homo sapiens
  misc_RNA (1)...(19): siRNA sense strand
gcugggaacuuaugggaga

SEQ ID NO: 2515548 - RNA, 19 nt, Homo sapiens
  misc_RNA (1)...(19): siRNA sense strand
ggaaguaucucuuaggcuu

SEQ ID NO: 2515549 - RNA, 19 nt, Homo sapiens
  misc_RNA (1)...(19): siRNA sense strand
ccauuaugaaacugagcaa

SEQ ID NO: 2515550 - RNA, 19 nt, Homo sapiens
  misc_RNA (1)...(19): siRNA sense strand
cagcgaugguggaugccaa

SEQ ID NO: 2515551 - RNA, 19 nt, Homo sapiens
  misc_RNA (1)...(19): siRNA sense strand
caugucauccagagggaaa

SEQ ID NO: 2515552 - RNA, 19 nt, Homo sapiens
  misc_RNA (1)...(19): siRNA sense strand
ggcucgugcuaaagagauu

SEQ ID NO: 2515553 - RNA, 19 nt, Homo sapiens
  misc_RNA (1)...(19): siRNA sense strand
cgaugguggaugccaauaa

SEQ ID NO: 2515554 - RNA, 19 nt, Homo sapiens
  misc_RNA (1)...(19): siRNA sense strand
aauacgacaaggugggaau

SEQ ID NO: 2515555 - RNA, 19 nt, Homo sapiens
  misc_RNA (1)...(19): siRNA sense strand
gcucagaaguugaagaugg

SEQ ID NO: 2515556 - RNA, 19 nt, Homo sapiens
  misc_RNA (1)...(19): siRNA sense strand
uuguauaauucauccggaa

SEQ ID NO: 2515557 - RNA, 19 nt, Homo sapiens
  misc_RNA (1)...(19): siRNA sense strand
ccguggugucgaugagaau

SEQ ID NO: 2515558 - RNA, 19 nt, Homo sapiens
  misc_RNA (1)...(19): siRNA sense strand
ccgagugucccgagcaaaa

SEQ ID NO: 2515559 - RNA, 19 nt, Homo sapiens
  misc_RNA (1)...(19): siRNA sense strand
aaacugugccucugggaga

SEQ ID NO: 2515560 - RNA, 19 nt, Homo sapiens
  misc_RNA (1)...(19): siRNA sense strand
gggagaaguuacgugaaaa

SEQ ID NO: 2515561 - RNA, 19 nt, Homo sapiens
  misc_RNA (1)...(19): siRNA sense strand
ucgcggaacucaagaccga

SEQ ID NO: 2515562 - RNA, 19 nt, Homo sapiens
  misc_RNA (1)...(19): siRNA sense strand
gaaacugagcaaaacaaaa

SEQ ID NO: 2515563 - RNA, 19 nt, Homo sapiens
  misc_RNA (1)...(19): siRNA sense strand
ggaaagaaugcgugacgag

SEQ ID NO: 2515564 - RNA, 19 nt, Homo sapiens
  misc_RNA (1)...(19): siRNA sense strand
cgacaaggugggaauacca

SEQ ID NO: 2515565 - RNA, 19 nt, Homo sapiens
  misc_RNA (1)...(19): siRNA sense strand
ccgaaauacaagcaccauu

SEQ ID NO: 2515566 - RNA, 19 nt, Homo sapiens
  misc_RNA (1)...(19): siRNA sense strand
cgaugagaucacggauaua

SEQ ID NO: 2515567 - RNA, 19 nt, Homo sapiens
  misc_RNA (1)...(19): siRNA sense strand
cugaagacgaaauacgaca

SEQ ID NO: 2515568 - RNA, 19 nt, Homo sapiens
  misc_RNA (1)...(19): siRNA sense strand
ccaaaaucgcggaacucaa

SEQ ID NO: 2515569 - RNA, 19 nt, Homo sapiens
  misc_RNA (1)...(19): siRNA sense strand
ccagauaaugagaaggaaa

SEQ ID NO: 2515570 - RNA, 19 nt, Homo sapiens
  misc_RNA (1)...(19): siRNA sense strand
acucauuugacgaggaaua

SEQ ID NO: 2515571 - RNA, 19 nt, Homo sapiens
  misc_RNA (1)...(19): siRNA sense strand
gcugggaacuuaugggaga

SEQ ID NO: 2515572 - RNA, 19 nt, Homo sapiens
  misc_RNA (1)...(19): siRNA sense strand
ggaaguaucucuuaggcuu

SEQ ID NO: 2515573 - RNA, 19 nt, Homo sapiens
  misc_RNA (1)...(19): siRNA sense strand
ucguggaaguacagaauau

SEQ ID NO: 2515574 - RNA, 19 nt, Homo sapiens
  misc_RNA (1)...(19): siRNA sense strand
ccauuaugaaacugagcaa

SEQ ID NO: 2515575 - RNA, 19 nt, Homo sapiens
  misc_RNA (1)...(19): siRNA sense strand
cagcgaugguggaugccaa

SEQ ID NO: 2515576 - RNA, 19 nt, Homo sapiens
  misc_RNA (1)...(19): siRNA sense strand
caugucauccagagggaaa

SEQ ID NO: 2515577 - RNA, 19 nt, Homo sapiens
  misc_RNA (1)...(19): siRNA sense strand
agauuaaacagcuaagaga

SEQ ID NO: 2515578 - RNA, 19 nt, Homo sapiens
  misc_RNA (1)...(19): siRNA sense strand
aggaaagauuaucaagcau

SEQ ID NO: 2515579 - RNA, 19 nt, Homo sapiens
  misc_RNA (1)...(19): siRNA sense strand
ggcucgugcuaaagagauu

SEQ ID NO: 2515580 - RNA, 19 nt, Homo sapiens
  misc_RNA (1)...(19): siRNA sense strand
uaaacagcuaagagaacaa

SEQ ID NO: 2515581 - RNA, 19 nt, Homo sapiens
  misc_RNA (1)...(19): siRNA sense strand
gcucaguaaugugggaaaa

SEQ ID NO: 2515582 - RNA, 19 nt, Homo sapiens
  misc_RNA (1)...(19): siRNA sense strand
cgaugguggaugccaauaa

SEQ ID NO: 2515583 - RNA, 19 nt, Homo sapiens
  misc_RNA (1)...(19): siRNA sense strand
aauacgacaaggugggaau

SEQ ID NO: 2515584 - RNA, 19 nt, Homo sapiens
  misc_RNA (1)...(19): siRNA sense strand
gcucagaaguugaagaugg

SEQ ID NO: 2515585 - RNA, 19 nt, Homo sapiens
  misc_RNA (1)...(19): siRNA sense strand
uuguauaauucauccggaa

SEQ ID NO: 2515586 - RNA, 19 nt, Homo sapiens
  misc_RNA (1)...(19): siRNA sense strand
ccguggugucgaugagaau

SEQ ID NO: 2515587 - RNA, 19 nt, Homo sapiens
  misc_RNA (1)...(19): siRNA sense strand
ccgagugucccgagcaaaa

SEQ ID NO: 2515588 - RNA, 19 nt, Homo sapiens
  misc_RNA (1)...(19): siRNA sense strand
ugucuguguccaaagaaua

SEQ ID NO: 2515589 - RNA, 19 nt, Homo sapiens
  misc_RNA (1)...(19): siRNA sense strand
aaacugugccucugggaga

SEQ ID NO: 2515590 - RNA, 19 nt, Homo sapiens
  misc_RNA (1)...(19): siRNA sense strand
cagauaaugagaaggaaag

SEQ ID NO: 2515591 - RNA, 19 nt, Homo sapiens
  misc_RNA (1)...(19): siRNA sense strand
gggagaaguuacgugaaaa

SEQ ID NO: 2515592 - RNA, 19 nt, Homo sapiens
  misc_RNA (1)...(19): siRNA sense strand
ucgcggaacucaagaccga

SEQ ID NO: 2515593 - RNA, 19 nt, Homo sapiens
  misc_RNA (1)...(19): siRNA sense strand
gaaacugagcaaaacaaaa

SEQ ID NO: 2515594 - RNA, 19 nt, Homo sapiens
  misc_RNA (1)...(19): siRNA sense strand
ggaaagaaugcgugacgag

SEQ ID NO: 2515595 - RNA, 19 nt, Homo sapiens
  misc_RNA (1)...(19): siRNA sense strand
agcuaagagaacaaguuaa

SEQ ID NO: 2515596 - RNA, 19 nt, Homo sapiens
  misc_RNA (1)...(19): siRNA sense strand
cgacaaggugggaauacca

SEQ ID NO: 2515597 - RNA, 19 nt, Homo sapiens
  misc_RNA (1)...(19): siRNA sense strand
ccgaaauacaagcaccauu

SEQ ID NO: 2515598 - RNA, 19 nt, Homo sapiens
  misc_RNA (1)...(19): siRNA sense strand
gagaacaaguuaaugaccu

SEQ ID NO: 2515599 - RNA, 19 nt, Homo sapiens
  misc_RNA (1)...(19): siRNA sense strand
cgaugagaucacggauaua

SEQ ID NO: 2515600 - RNA, 19 nt, Homo sapiens
  misc_RNA (1)...(19): siRNA sense strand
agugacuguuccagauaau

SEQ ID NO: 2515601 - RNA, 19 nt, Homo sapiens
  misc_RNA (1)...(19): siRNA sense strand
cugaagacgaaauacgaca

SEQ ID NO: 2515602 - RNA, 19 nt, Homo sapiens
  misc_RNA (1)...(19): siRNA sense strand
ccaaaaucgcggaacucaa

SEQ ID NO: 2515603 - RNA, 19 nt, Homo sapiens
  misc_RNA (1)...(19): siRNA sense strand
aggaaagcgcaaaggaaau

SEQ ID NO: 2515604 - RNA, 19 nt, Homo sapiens
  misc_RNA (1)...(19): siRNA sense strand
ggaaauuacugaagguguc

SEQ ID NO: 2515605 - RNA, 19 nt, Homo sapiens
  misc_RNA (1)...(19): siRNA sense strand
cggcagauguucagcgaug

SEQ ID NO: 2515606 - RNA, 19 nt, Homo sapiens
  misc_RNA (1)...(19): siRNA sense strand
aguacgagaacguggauga

SEQ ID NO: 2515607 - RNA, 19 nt, Homo sapiens
  misc_RNA (1)...(19): siRNA sense strand
cggacggcgaaguggacua

SEQ ID NO: 2515608 - RNA, 19 nt, Homo sapiens
  misc_RNA (1)...(19): siRNA sense strand
ggagcugaggaaagcgcaa

SEQ ID NO: 2515609 - RNA, 19 nt, Homo sapiens
  misc_RNA (1)...(19): siRNA sense strand
caggaggagcugaggaaag

SEQ ID NO: 2515610 - RNA, 19 nt, Homo sapiens
  misc_RNA (1)...(19): siRNA sense strand
acggcgaaguggacuacaa

SEQ ID NO: 2515611 - RNA, 19 nt, Homo sapiens
  misc_RNA (1)...(19): siRNA sense strand
aggaaauuacugaaggugu

SEQ ID NO: 2515612 - RNA, 19 nt, Homo sapiens
  misc_RNA (1)...(19): siRNA sense strand
ccuaauggaauuugagaca

SEQ ID NO: 2515613 - RNA, 19 nt, Homo sapiens
  misc_RNA (1)...(19): siRNA sense strand
agugaaaccuugaaagcau

SEQ ID NO: 2515614 - RNA, 19 nt, Homo sapiens
  misc_RNA (1)...(19): siRNA sense strand
cuuugaagaaauuggcaua

SEQ ID NO: 2515615 - RNA, 19 nt, Homo sapiens
  misc_RNA (1)...(19): siRNA sense strand
guaauuuaguugauggcuu

SEQ ID NO: 2515616 - RNA, 19 nt, Homo sapiens
  misc_RNA (1)...(19): siRNA sense strand
auuacgagcuaguggccaa

SEQ ID NO: 2515617 - RNA, 19 nt, Homo sapiens
  misc_RNA (1)...(19): siRNA sense strand
cuugaaagcauuuggaguu

SEQ ID NO: 2515618 - RNA, 19 nt, Homo sapiens
  misc_RNA (1)...(19): siRNA sense strand
aagagagaucguagaagaa

SEQ ID NO: 2515619 - RNA, 19 nt, Homo sapiens
  misc_RNA (1)...(19): siRNA sense strand
caacggaaguagauggaac

SEQ ID NO: 2515620 - RNA, 19 nt, Homo sapiens
  misc_RNA (1)...(19): siRNA sense strand
gaagaaacgcaaaugggau

SEQ ID NO: 2515621 - RNA, 19 nt, Homo sapiens
  misc_RNA (1)...(19): siRNA sense strand
cuuaaugaggcaaguaaau

SEQ ID NO: 2515622 - RNA, 19 nt, Homo sapiens
  misc_RNA (1)...(19): siRNA sense strand
gaggcaaguaaauggauau

SEQ ID NO: 2515623 - RNA, 19 nt, Homo sapiens
  misc_RNA (1)...(19): siRNA sense strand
augaaaugagccaggauau

SEQ ID NO: 2515624 - RNA, 19 nt, Homo sapiens
  misc_RNA (1)...(19): siRNA sense strand
cagcuauccaugaaaggaa

SEQ ID NO: 2515625 - RNA, 19 nt, Homo sapiens
  misc_RNA (1)...(19): siRNA sense strand
acugaaaugagguggcuuu

SEQ ID NO: 2515626 - RNA, 19 nt, Homo sapiens
  misc_RNA (1)...(19): siRNA sense strand
acuggaaauagcacaaaua

SEQ ID NO: 2515627 - RNA, 19 nt, Homo sapiens
  misc_RNA (1)...(19): siRNA sense strand
aguaucagcuagagagaag

SEQ ID NO: 2515628 - RNA, 19 nt, Homo sapiens
  misc_RNA (1)...(19): siRNA sense strand
cugcaacaauugagcaacu

SEQ ID NO: 2515629 - RNA, 19 nt, Homo sapiens
  misc_RNA (1)...(19): siRNA sense strand
cggacaucauugaacaaaa

SEQ ID NO: 2515630 - RNA, 19 nt, Homo sapiens
  misc_RNA (1)...(19): siRNA sense strand
ccaggauaucuuacagcaa

SEQ ID NO: 2515631 - RNA, 19 nt, Homo sapiens
  misc_RNA (1)...(19): siRNA sense strand
aaggaauagauguguucaa

SEQ ID NO: 2515632 - RNA, 19 nt, Homo sapiens
  misc_RNA (1)...(19): siRNA sense strand
auuuaugugccaaggagaa

SEQ ID NO: 2515633 - RNA, 19 nt, Homo sapiens
  misc_RNA (1)...(19): siRNA sense strand
aggagaaaauuccgaguuu

SEQ ID NO: 2515634 - RNA, 19 nt, Homo sapiens
  misc_RNA (1)...(19): siRNA sense strand
ucuuaaugaggcaaguaaa

SEQ ID NO: 2515635 - RNA, 19 nt, Homo sapiens
  misc_RNA (1)...(19): siRNA sense strand
agcaaguucuagaagauau

SEQ ID NO: 2515636 - RNA, 19 nt, Homo sapiens
  misc_RNA (1)...(19): siRNA sense strand
guuuguugccuacgugaaa

SEQ ID NO: 2515637 - RNA, 19 nt, Homo sapiens
  misc_RNA (1)...(19): siRNA sense strand
cguaguuacacauuguuua

SEQ ID NO: 2515638 - RNA, 19 nt, Homo sapiens
  misc_RNA (1)...(19): siRNA sense strand
agacaacugacauggauga

SEQ ID NO: 2515639 - RNA, 19 nt, Homo sapiens
  misc_RNA (1)...(19): siRNA sense strand
uggccaaauccuaauggaa

SEQ ID NO: 2515640 - RNA, 19 nt, Homo sapiens
  misc_RNA (1)...(19): siRNA sense strand
gcauauucauugcagcuga

SEQ ID NO: 2515641 - RNA, 19 nt, Homo sapiens
  misc_RNA (1)...(19): siRNA sense strand
gaauugaugaaaugagcca

SEQ ID NO: 2515642 - RNA, 19 nt, Homo sapiens
  misc_RNA (1)...(19): siRNA sense strand
cgaagaaacgcaaauggga

SEQ ID NO: 2515643 - RNA, 19 nt, Homo sapiens
  misc_RNA (1)...(19): siRNA sense strand
caucaaaacugucagacca

SEQ ID NO: 2515644 - RNA, 19 nt, Homo sapiens
  misc_RNA (1)...(19): siRNA sense strand
cagcaaguucuagaagaua

SEQ ID NO: 2515645 - RNA, 19 nt, Homo sapiens
  misc_RNA (1)...(19): siRNA sense strand
cauuugugcgcuauauaaa

SEQ ID NO: 2515646 - RNA, 19 nt, Homo sapiens
  misc_RNA (1)...(19): siRNA sense strand
gcgcuauauaaaagaaaga

SEQ ID NO: 2515647 - RNA, 19 nt, Homo sapiens
  misc_RNA (1)...(19): siRNA sense strand
aagaaagagagaucguaga

SEQ ID NO: 2515648 - RNA, 19 nt, Homo sapiens
  misc_RNA (1)...(19): siRNA sense strand
uuaaaugaacucagugcau

SEQ ID NO: 2515649 - RNA, 19 nt, Homo sapiens
  misc_RNA (1)...(19): siRNA sense strand
ccuugaaagcauuuggagu

SEQ ID NO: 2515650 - RNA, 19 nt, Homo sapiens
  misc_RNA (1)...(19): siRNA sense strand
gcuccaaaucaucgccuau

SEQ ID NO: 2515651 - RNA, 19 nt, Homo sapiens
  misc_RNA (1)...(19): siRNA sense strand
gacaaugaagcuugaggau

SEQ ID NO: 2515652 - RNA, 19 nt, Homo sapiens
  misc_RNA (1)...(19): siRNA sense strand
caucauugaacaaaagcua

SEQ ID NO: 2515653 - RNA, 19 nt, Homo sapiens
  misc_RNA (1)...(19): siRNA sense strand
agcaacagcaacugcgaaa

SEQ ID NO: 2515654 - RNA, 19 nt, Homo sapiens
  misc_RNA (1)...(19): siRNA sense strand
ccgcuuacgugcagcucau

SEQ ID NO: 2515655 - RNA, 19 nt, Homo sapiens
  misc_RNA (1)...(19): siRNA sense strand
ggcaauuagaagagaaagu

SEQ ID NO: 2515656 - RNA, 19 nt, Homo sapiens
  misc_RNA (1)...(19): siRNA sense strand
uaggcaauuagaagagaaa

SEQ ID NO: 2515657 - RNA, 19 nt, Homo sapiens
  misc_RNA (1)...(19): siRNA sense strand
cuguaagaggugcagaaau

SEQ ID NO: 2515658 - RNA, 19 nt, Homo sapiens
  misc_RNA (1)...(19): siRNA sense strand
cagcuggauaauaggcaau

SEQ ID NO: 2515659 - RNA, 19 nt, Homo sapiens
  misc_RNA (1)...(19): siRNA sense strand
cacuguaagaggugcagaa

SEQ ID NO: 2515660 - RNA, 19 nt, Homo sapiens
  misc_RNA (1)...(19): siRNA sense strand
caagaaauguuccagagga

SEQ ID NO: 2515661 - RNA, 19 nt, Homo sapiens
  misc_RNA (1)...(19): siRNA sense strand
cacccaaucaggagggaau

SEQ ID NO: 2515662 - RNA, 19 nt, Homo sapiens
  misc_RNA (1)...(19): siRNA sense strand
gaagaaaguuccaaggacu

SEQ ID NO: 2515663 - RNA, 19 nt, Homo sapiens
  misc_RNA (1)...(19): siRNA sense strand
ccagagauggugugcggaa

SEQ ID NO: 2515664 - RNA, 19 nt, Homo sapiens
  misc_RNA (1)...(19): siRNA sense strand
gcugcuucguggugggauu

SEQ ID NO: 2515665 - RNA, 19 nt, Homo sapiens
  misc_RNA (1)...(19): siRNA sense strand
ucgaaagcccagucccaaa

SEQ ID NO: 2515666 - RNA, 19 nt, Homo sapiens
  misc_RNA (1)...(19): siRNA sense strand
gggccaaggacuuugucuu

SEQ ID NO: 2515667 - RNA, 19 nt, Homo sapiens
  misc_RNA (1)...(19): siRNA sense strand
gcacugaacugcaacugga

SEQ ID NO: 2515668 - RNA, 19 nt, Homo sapiens
  misc_RNA (1)...(19): siRNA sense strand
ccgaacggagagcgaagaa

SEQ ID NO: 2515669 - RNA, 19 nt, Homo sapiens
  misc_RNA (1)...(19): siRNA sense strand
ggaccaaggugaugcgugu

SEQ ID NO: 2515670 - RNA, 19 nt, Homo sapiens
  misc_RNA (1)...(19): siRNA sense strand
uggaggaguaccuggacaa

SEQ ID NO: 2515671 - RNA, 19 nt, Homo sapiens
  misc_RNA (1)...(19): siRNA sense strand
gcuacaacaaggaugaaaa

SEQ ID NO: 2515672 - RNA, 19 nt, Homo sapiens
  misc_RNA (1)...(19): siRNA sense strand
gcgagaaaguggugcuggu

SEQ ID NO: 2515673 - RNA, 19 nt, Homo sapiens
  misc_RNA (1)...(19): siRNA sense strand
gugucaacaaccuggaauu

SEQ ID NO: 2515674 - RNA, 19 nt, Homo sapiens
  misc_RNA (1)...(19): siRNA sense strand
uguccaacaagaugagauu

SEQ ID NO: 2515675 - RNA, 19 nt, Homo sapiens
  misc_RNA (1)...(19): siRNA sense strand
gguacaaguggcugcgcuu

SEQ ID NO: 2515676 - RNA, 19 nt, Homo sapiens
  misc_RNA (1)...(19): siRNA sense strand
ggacauaguucaagaugcc

SEQ ID NO: 2515677 - RNA, 19 nt, Homo sapiens
  misc_RNA (1)...(19): siRNA sense strand
gcugggugcaggagaacau

SEQ ID NO: 2515678 - RNA, 19 nt, Homo sapiens
  misc_RNA (1)...(19): siRNA sense strand
aacugaacuuccagagaga

SEQ ID NO: 2515679 - RNA, 19 nt, Homo sapiens
  misc_RNA (1)...(19): siRNA sense strand
uggaaaucuuggaaguacu

SEQ ID NO: 2515680 - RNA, 19 nt, Homo sapiens
  misc_RNA (1)...(19): siRNA sense strand
ccuuagacauguaccggaa

SEQ ID NO: 2515681 - RNA, 19 nt, Homo sapiens
  misc_RNA (1)...(19): siRNA sense strand
gcucagaggugcacgucga

SEQ ID NO: 2515682 - RNA, 19 nt, Homo sapiens
  misc_RNA (1)...(19): siRNA sense strand
ggaaccagaugcagagcca

SEQ ID NO: 2515683 - RNA, 19 nt, Homo sapiens
  misc_RNA (1)...(19): siRNA sense strand
aaagaaagagaaacggcaa

SEQ ID NO: 2515684 - RNA, 19 nt, Homo sapiens
  misc_RNA (1)...(19): siRNA sense strand
ccacaaaucagcucgccaa

SEQ ID NO: 2515685 - RNA, 19 nt, Homo sapiens
  misc_RNA (1)...(19): siRNA sense strand
ggguaucugaaaaggaaaa

SEQ ID NO: 2515686 - RNA, 19 nt, Homo sapiens
  misc_RNA (1)...(19): siRNA sense strand
aaaaggaaaaggagaguau

SEQ ID NO: 2515687 - RNA, 19 nt, Homo sapiens
  misc_RNA (1)...(19): siRNA sense strand
gcauagaagccaaugugga

SEQ ID NO: 2515688 - RNA, 19 nt, Homo sapiens
  misc_RNA (1)...(19): siRNA sense strand
uaaagaauuugaugagcca

SEQ ID NO: 2515689 - RNA, 19 nt, Homo sapiens
  misc_RNA (1)...(19): siRNA sense strand
aagaaagagaaacggcaau

SEQ ID NO: 2515690 - RNA, 19 nt, Homo sapiens
  misc_RNA (1)...(19): siRNA sense strand
gggacuuauuaucuggcua

SEQ ID NO: 2515691 - RNA, 19 nt, Homo sapiens
  misc_RNA (1)...(19): siRNA sense strand
gaguggaaccagaugcaga

SEQ ID NO: 2515692 - RNA, 19 nt, Homo sapiens
  misc_RNA (1)...(19): siRNA sense strand
gaagagaggcaaagagagg

SEQ ID NO: 2515693 - RNA, 19 nt, Homo sapiens
  misc_RNA (1)...(19): siRNA sense strand
caugaggaguggaaccaga

SEQ ID NO: 2515694 - RNA, 19 nt, Homo sapiens
  misc_RNA (1)...(19): siRNA sense strand
gcugaaagaauuagggucc

SEQ ID NO: 2515695 - RNA, 19 nt, Homo sapiens
  misc_RNA (1)...(19): siRNA sense strand
aggaaaugaggaagaaaua

SEQ ID NO: 2515696 - RNA, 19 nt, Homo sapiens
  misc_RNA (1)...(19): siRNA sense strand
gcuugaaagagaaggaaau

SEQ ID NO: 2515697 - RNA, 19 nt, Homo sapiens
  misc_RNA (1)...(19): siRNA sense strand
aagagaaggaaaugaggaa

SEQ ID NO: 2515698 - RNA, 19 nt, Homo sapiens
  misc_RNA (1)...(19): siRNA sense strand
agaggauugugcugagaaa

SEQ ID NO: 2515699 - RNA, 19 nt, Homo sapiens
  misc_RNA (1)...(19): siRNA sense strand
aagugaagacacaaagaaa

SEQ ID NO: 2515700 - RNA, 19 nt, Homo sapiens
  misc_RNA (1)...(19): siRNA sense strand
aggagcuauugcagagaaa

SEQ ID NO: 2515701 - RNA, 19 nt, Homo sapiens
  misc_RNA (1)...(19): siRNA sense strand
agacaguuacagaguuaua

SEQ ID NO: 2515702 - RNA, 19 nt, Homo sapiens
  misc_RNA (1)...(19): siRNA sense strand
aaggaaaugaggaagaaau

SEQ ID NO: 2515703 - RNA, 19 nt, Homo sapiens
  misc_RNA (1)...(19): siRNA sense strand
gagcacuggaggaaagcaa

SEQ ID NO: 2515704 - RNA, 19 nt, Homo sapiens
  misc_RNA (1)...(19): siRNA sense strand
caaacacuugugagagaaa

SEQ ID NO: 2515705 - RNA, 19 nt, Homo sapiens
  misc_RNA (1)...(19): siRNA sense strand
uugcagugguugugacgaa

SEQ ID NO: 2515706 - RNA, 19 nt, Homo sapiens
  misc_RNA (1)...(19): siRNA sense strand
caguaaugcaaguguuuau

SEQ ID NO: 2515707 - RNA, 19 nt, Homo sapiens
  misc_RNA (1)...(19): siRNA sense strand
cgguuauucaggacaguua

SEQ ID NO: 2515708 - RNA, 19 nt, Homo sapiens
  misc_RNA (1)...(19): siRNA sense strand
aggauugugcugagaaauu

SEQ ID NO: 2515709 - RNA, 19 nt, Homo sapiens
  misc_RNA (1)...(19): siRNA sense strand
uggaggaaagcaaaggaaa

SEQ ID NO: 2515710 - RNA, 19 nt, Homo sapiens
  misc_RNA (1)...(19): siRNA sense strand
aauaauaggaccggacaaa

SEQ ID NO: 2515711 - RNA, 19 nt, Homo sapiens
  misc_RNA (1)...(19): siRNA sense strand
ggaaacaucuccaugcaga

SEQ ID NO: 2515712 - RNA, 19 nt, Homo sapiens
  misc_RNA (1)...(19): siRNA sense strand
guagcaaagcagaagauga

SEQ ID NO: 2515713 - RNA, 19 nt, Homo sapiens
  misc_RNA (1)...(19): siRNA sense strand
uuacagggagagugagcaa

SEQ ID NO: 2515714 - RNA, 19 nt, Homo sapiens
  misc_RNA (1)...(19): siRNA sense strand
gugaacauagcaugguaaa

SEQ ID NO: 2515715 - RNA, 19 nt, Homo sapiens
  misc_RNA (1)...(19): siRNA sense strand
ucuaagucuaggagaauau

SEQ ID NO: 2515716 - RNA, 19 nt, Homo sapiens
  misc_RNA (1)...(19): siRNA sense strand
gucuaaagcauguacaaau

SEQ ID NO: 2515717 - RNA, 19 nt, Homo sapiens
  misc_RNA (1)...(19): siRNA sense strand
cagaguuguuugaagacuu

SEQ ID NO: 2515718 - RNA, 19 nt, Homo sapiens
  misc_RNA (1)...(19): siRNA sense strand
aaauaauaggaccggacaa

SEQ ID NO: 2515719 - RNA, 19 nt, Homo sapiens
  misc_RNA (1)...(19): siRNA sense strand
aagucuggauucaggagaa

SEQ ID NO: 2515720 - RNA, 19 nt, Homo sapiens
  misc_RNA (1)...(19): siRNA sense strand
acacagaauagaacagcuu

SEQ ID NO: 2515721 - RNA, 19 nt, Homo sapiens
  misc_RNA (1)...(19): siRNA sense strand
agaacagcuugaaagagaa

SEQ ID NO: 2515722 - RNA, 19 nt, Homo sapiens
  misc_RNA (1)...(19): siRNA sense strand
auguacaaaugaugaccaa

SEQ ID NO: 2515723 - RNA, 19 nt, Homo sapiens
  misc_RNA (1)...(19): siRNA sense strand
gacauaagugugaaggaga

SEQ ID NO: 2515724 - RNA, 19 nt, Homo sapiens
  misc_RNA (1)...(19): siRNA sense strand
gaaggaaaugaggaagaaa

SEQ ID NO: 2515725 - RNA, 19 nt, Homo sapiens
  misc_RNA (1)...(19): siRNA sense strand
cuaaaguaucaaauggaca

SEQ ID NO: 2515726 - RNA, 19 nt, Homo sapiens
  misc_RNA (1)...(19): siRNA sense strand
gguucugguuucaaauaau

SEQ ID NO: 2515727 - RNA, 19 nt, Homo sapiens
  misc_RNA (1)...(19): siRNA sense strand
aguuaucaguuguggucuu

SEQ ID NO: 2515728 - RNA, 19 nt, Homo sapiens
  misc_RNA (1)...(19): siRNA sense strand
uugcacgacaccugagaua

SEQ ID NO: 2515729 - RNA, 19 nt, Homo sapiens
  misc_RNA (1)...(19): siRNA sense strand
acacagcaauuaaaggaca

SEQ ID NO: 2515730 - RNA, 19 nt, Homo sapiens
  misc_RNA (1)...(19): siRNA sense strand
agaauagaacagcuugaaa

SEQ ID NO: 2515731 - RNA, 19 nt, Homo sapiens
  misc_RNA (1)...(19): siRNA sense strand
agucuggauucaggagaaa

SEQ ID NO: 2515732 - RNA, 19 nt, Homo sapiens
  misc_RNA (1)...(19): siRNA sense strand
aauagaacagcuugaaaga

SEQ ID NO: 2515733 - RNA, 19 nt, Homo sapiens
  misc_RNA (1)...(19): siRNA sense strand
agugaagacacaaagaaaa

SEQ ID NO: 2515734 - RNA, 19 nt, Homo sapiens
  misc_RNA (1)...(19): siRNA sense strand
acuuauuauuggagugucu

SEQ ID NO: 2515735 - RNA, 19 nt, Homo sapiens
  misc_RNA (1)...(19): siRNA sense strand
uugaagagcacuggaggaa

SEQ ID NO: 2515736 - RNA, 19 nt, Homo sapiens
  misc_RNA (1)...(19): siRNA sense strand
augaagacaccguuaaaga

SEQ ID NO: 2515737 - RNA, 19 nt, Homo sapiens
  misc_RNA (1)...(19): siRNA sense strand
caugcuuguuacagggaga

SEQ ID NO: 2515738 - RNA, 19 nt, Homo sapiens
  misc_RNA (1)...(19): siRNA sense strand
aguuggauuugucagauaa

SEQ ID NO: 2515739 - RNA, 19 nt, Homo sapiens
  misc_RNA (1)...(19): siRNA sense strand
agcuugaaagagaaggaaa

SEQ ID NO: 2515740 - RNA, 19 nt, Homo sapiens
  misc_RNA (1)...(19): siRNA sense strand
agcagaagaugaggauaaa

SEQ ID NO: 2515741 - RNA, 19 nt, Homo sapiens
  misc_RNA (1)...(19): siRNA sense strand
ggauaaaagccauucuaga

SEQ ID NO: 2515742 - RNA, 19 nt, Homo sapiens
  misc_RNA (1)...(19): siRNA sense strand
ugaggaagaaauacaaaga

SEQ ID NO: 2515743 - RNA, 19 nt, Homo sapiens
  misc_RNA (1)...(19): siRNA sense strand
aaaugaagacugaccugaa

SEQ ID NO: 2515744 - RNA, 19 nt, Homo sapiens
  misc_RNA (1)...(19): siRNA sense strand
caaaacaugaguuggauuu

SEQ ID NO: 2515745 - RNA, 19 nt, Homo sapiens
  misc_RNA (1)...(19): siRNA sense strand
caugcuaaugaauggcuaa

SEQ ID NO: 2515746 - RNA, 19 nt, Homo sapiens
  misc_RNA (1)...(19): siRNA sense strand
uggacucacucuugcaaau

SEQ ID NO: 2515747 - RNA, 19 nt, Homo sapiens
  misc_RNA (1)...(19): siRNA sense strand
ugaaaaugaaacacagcaa

SEQ ID NO: 2515748 - RNA, 19 nt, Homo sapiens
  misc_RNA (1)...(19): siRNA sense strand
gcaaagcagaagaugagga

SEQ ID NO: 2515749 - RNA, 19 nt, Homo sapiens
  misc_RNA (1)...(19): siRNA sense strand
gggagagugagcaaaauaa

SEQ ID NO: 2515750 - RNA, 19 nt, Homo sapiens
  misc_RNA (1)...(19): siRNA sense strand
ggucauugcacagaggauu

SEQ ID NO: 2515751 - RNA, 19 nt, Homo sapiens
  misc_RNA (1)...(19): siRNA sense strand
gaagauauguguaaaggca

SEQ ID NO: 2515752 - RNA, 19 nt, Homo sapiens
  misc_RNA (1)...(19): siRNA sense strand
ucuagaugaacaugggaaa

SEQ ID NO: 2515753 - RNA, 19 nt, Homo sapiens
  misc_RNA (1)...(19): siRNA sense strand
augaaaacuuggugacuau

SEQ ID NO: 2515754 - RNA, 19 nt, Homo sapiens
  misc_RNA (1)...(19): siRNA sense strand
gggaguaaauggaggccug

SEQ ID NO: 2515755 - RNA, 19 nt, Homo sapiens
  misc_RNA (1)...(19): siRNA sense strand
acaagaugaaagagcacau

SEQ ID NO: 2515756 - RNA, 19 nt, Homo sapiens
  misc_RNA (1)...(19): siRNA sense strand
gaacuggacagcaggcaca

SEQ ID NO: 2515757 - RNA, 19 nt, Homo sapiens
  misc_RNA (1)...(19): siRNA sense strand
gguccaaaaucgacagcca

SEQ ID NO: 2515758 - RNA, 19 nt, Homo sapiens
  misc_RNA (1)...(19): siRNA sense strand
guguaaaggcauuaaagcu

SEQ ID NO: 2515759 - RNA, 19 nt, Homo sapiens
  misc_RNA (1)...(19): siRNA sense strand
agaccuguacagagaugaa

SEQ ID NO: 2515760 - RNA, 19 nt, Homo sapiens
  misc_RNA (1)...(19): siRNA sense strand
cagcaaaaguuguagagcu

SEQ ID NO: 2515761 - RNA, 19 nt, Homo sapiens
  misc_RNA (1)...(19): siRNA sense strand
gaacauaaccacagggaca

SEQ ID NO: 2515762 - RNA, 19 nt, Homo sapiens
  misc_RNA (1)...(19): siRNA sense strand
aggcguaagcuuugagaua

SEQ ID NO: 2515763 - RNA, 19 nt, Homo sapiens
  misc_RNA (1)...(19): siRNA sense strand
ugacagacgaagagggcaa

SEQ ID NO: 2515764 - RNA, 19 nt, Homo sapiens
  misc_RNA (1)...(19): siRNA sense strand
cguuaugggucaagcuuua

SEQ ID NO: 2515765 - RNA, 19 nt, Homo sapiens
  misc_RNA (1)...(19): siRNA sense strand
ccgucaagcagaugaauaa

SEQ ID NO: 2515766 - RNA, 19 nt, Homo sapiens
  misc_RNA (1)...(19): siRNA sense strand
uggaaaugggcgugagaau

SEQ ID NO: 2515767 - RNA, 19 nt, Homo sapiens
  misc_RNA (1)...(19): siRNA sense strand
cagaagaugcaaagagaca

SEQ ID NO: 2515768 - RNA, 19 nt, Homo sapiens
  misc_RNA (1)...(19): siRNA sense strand
agauaaaagcugaggauga

SEQ ID NO: 2515769 - RNA, 19 nt, Homo sapiens
  misc_RNA (1)...(19): siRNA sense strand
gcucagagauggcgagaac

SEQ ID NO: 2515770 - RNA, 19 nt, Homo sapiens
  misc_RNA (1)...(19): siRNA sense strand
gccaagaaacagaagacaa

SEQ ID NO: 2515771 - RNA, 19 nt, Homo sapiens
  misc_RNA (1)...(19): siRNA sense strand
agucggacguggagaucaa

SEQ ID NO: 2515772 - RNA, 19 nt, Homo sapiens
  misc_RNA (1)...(19): siRNA sense strand
caguagucacccugaauaa

SEQ ID NO: 2515773 - RNA, 19 nt, Homo sapiens
  misc_RNA (1)...(19): siRNA sense strand
ggugauugagguugggaau

SEQ ID NO: 2515774 - RNA, 19 nt, Homo sapiens
  misc_RNA (1)...(19): siRNA sense strand
ucagagauggcgagaacua

SEQ ID NO: 2515775 - RNA, 19 nt, Homo sapiens
  misc_RNA (1)...(19): siRNA sense strand
ggagaaagcugcccaggga

SEQ ID NO: 2515776 - RNA, 19 nt, Homo sapiens
  misc_RNA (1)...(19): siRNA sense strand
uggaaggagucgagauugu

SEQ ID NO: 2515777 - RNA, 19 nt, Homo sapiens
  misc_RNA (1)...(19): siRNA sense strand
agagacaagccaagaaaca

SEQ ID NO: 2515778 - RNA, 19 nt, Homo sapiens
  misc_RNA (1)...(19): siRNA sense strand
cuuacaaagugcaggugau

SEQ ID NO: 2515779 - RNA, 19 nt, Homo sapiens
  misc_RNA (1)...(19): siRNA sense strand
gcaguugaguucaggcaga

SEQ ID NO: 2515780 - RNA, 19 nt, Homo sapiens
  misc_RNA (1)...(19): siRNA sense strand
ccgcagugggcuaccauaa

SEQ ID NO: 2515781 - RNA, 19 nt, Homo sapiens
  misc_RNA (1)...(19): siRNA sense strand
caucucaagacaaggacaa

SEQ ID NO: 2515782 - RNA, 19 nt, Homo sapiens
  misc_RNA (1)...(19): siRNA sense strand
ggugaugguuccugaggca

SEQ ID NO: 2515783 - RNA, 19 nt, Homo sapiens
  misc_RNA (1)...(19): siRNA sense strand
ggaccgaagcaaagaucca

SEQ ID NO: 2515784 - RNA, 19 nt, Homo sapiens
  misc_RNA (1)...(19): siRNA sense strand
ccacagugcguguaaccaa

SEQ ID NO: 2515785 - RNA, 19 nt, Homo sapiens
  misc_RNA (1)...(19): siRNA sense strand
guuggaaggagucgagauu

SEQ ID NO: 2515786 - RNA, 19 nt, Homo sapiens
  misc_RNA (1)...(19): siRNA sense strand
ucggagacuucaaggccua

SEQ ID NO: 2515787 - RNA, 19 nt, Homo sapiens
  misc_RNA (1)...(19): siRNA sense strand
ccucauaguugcuggcuac

SEQ ID NO: 2515788 - RNA, 19 nt, Homo sapiens
  misc_RNA (1)...(19): siRNA sense strand
cuuccuacguuauggguca

SEQ ID NO: 2515789 - RNA, 19 nt, Homo sapiens
  misc_RNA (1)...(19): siRNA sense strand
agacaagccaagaaacaga

SEQ ID NO: 2515790 - RNA, 19 nt, Homo sapiens
  misc_RNA (1)...(19): siRNA sense strand
acacugggaccgaagcaaa

SEQ ID NO: 2515791 - RNA, 19 nt, Homo sapiens
  misc_RNA (1)...(19): siRNA sense strand
gagcaugacagcuugaaaa

SEQ ID NO: 2515792 - RNA, 19 nt, Homo sapiens
  misc_RNA (1)...(19): siRNA sense strand
aaacagaagacaaggcgga

SEQ ID NO: 2515793 - RNA, 19 nt, Homo sapiens
  misc_RNA (1)...(19): siRNA sense strand
aagcaugggacuuugaaau

SEQ ID NO: 2515794 - RNA, 19 nt, Homo sapiens
  misc_RNA (1)...(19): siRNA sense strand
gagauaaagcuguacacca

SEQ ID NO: 2515795 - RNA, 19 nt, Homo sapiens
  misc_RNA (1)...(19): siRNA sense strand
gaauaaugacaucgaugau

SEQ ID NO: 2515796 - RNA, 19 nt, Homo sapiens
  misc_RNA (1)...(19): siRNA sense strand
uggcaagguccucagcaaa

SEQ ID NO: 2515797 - RNA, 19 nt, Homo sapiens
  misc_RNA (1)...(19): siRNA sense strand
aggagaugguagaugaguu

SEQ ID NO: 2515798 - RNA, 19 nt, Homo sapiens
  misc_RNA (1)...(19): siRNA sense strand
ccugaauaaccaaaucaaa

SEQ ID NO: 2515799 - RNA, 19 nt, Homo sapiens
  misc_RNA (1)...(19): siRNA sense strand
cggagaagacaccgugaca

SEQ ID NO: 2515800 - RNA, 19 nt, Homo sapiens
  misc_RNA (1)...(19): siRNA sense strand
gcucaaggcagaaggcaac

SEQ ID NO: 2515801 - RNA, 19 nt, Homo sapiens
  misc_RNA (1)...(19): siRNA sense strand
aguucugccuggagauuau

SEQ ID NO: 2515802 - RNA, 19 nt, Homo sapiens
  misc_RNA (1)...(19): siRNA sense strand
aggagaugguguuccagaa

SEQ ID NO: 2515803 - RNA, 19 nt, Homo sapiens
  misc_RNA (1)...(19): siRNA sense strand
agcaugggacuuugaaaua

SEQ ID NO: 2515804 - RNA, 19 nt, Homo sapiens
  misc_RNA (1)...(19): siRNA sense strand
gguuugagcaagcguucua

SEQ ID NO: 2515805 - RNA, 19 nt, Homo sapiens
  misc_RNA (1)...(19): siRNA sense strand
agcucaaggcagaaggcaa

SEQ ID NO: 2515806 - RNA, 19 nt, Homo sapiens
  misc_RNA (1)...(19): siRNA sense strand
ccauagggugauugagguu

SEQ ID NO: 2515807 - RNA, 19 nt, Homo sapiens
  misc_RNA (1)...(19): siRNA sense strand
cguugaaaccccagacauu

SEQ ID NO: 2515808 - RNA, 19 nt, Homo sapiens
  misc_RNA (1)...(19): siRNA sense strand
agguggaagugcuggagga

SEQ ID NO: 2515809 - RNA, 19 nt, Homo sapiens
  misc_RNA (1)...(19): siRNA sense strand
cgacaauccaauccagaca

SEQ ID NO: 2515810 - RNA, 19 nt, Homo sapiens
  misc_RNA (1)...(19): siRNA sense strand
ugaacggacccgaaggaga

SEQ ID NO: 2515811 - RNA, 19 nt, Homo sapiens
  misc_RNA (1)...(19): siRNA sense strand
acaagagccuggaggugga

SEQ ID NO: 2515812 - RNA, 19 nt, Homo sapiens
  misc_RNA (1)...(19): siRNA sense strand
cuuugaaauaccagacaga

SEQ ID NO: 2515813 - RNA, 19 nt, Homo sapiens
  misc_RNA (1)...(19): siRNA sense strand
caguggagcaugacagcuu

SEQ ID NO: 2515814 - RNA, 19 nt, Homo sapiens
  misc_RNA (1)...(19): siRNA sense strand
aagcaaaaccagggacuua

SEQ ID NO: 2515815 - RNA, 19 nt, Homo sapiens
  misc_RNA (1)...(19): siRNA sense strand
ccagggaagcugaucgaga

SEQ ID NO: 2515816 - RNA, 19 nt, Homo sapiens
  misc_RNA (1)...(19): siRNA sense strand
augcaaagagacaagccaa

SEQ ID NO: 2515817 - RNA, 19 nt, Homo sapiens
  misc_RNA (1)...(19): siRNA sense strand
aauccaauccagacaguuu

SEQ ID NO: 2515818 - RNA, 19 nt, Homo sapiens
  misc_RNA (1)...(19): siRNA sense strand
auggcaagguccucagcaa

SEQ ID NO: 2515819 - RNA, 19 nt, Homo sapiens
  misc_RNA (1)...(19): siRNA sense strand
uguucugacugcaguggaa

SEQ ID NO: 2515820 - RNA, 19 nt, Homo sapiens
  misc_RNA (1)...(19): siRNA sense strand
guuccaaccucuugaccca

SEQ ID NO: 2515821 - RNA, 19 nt, Homo sapiens
  misc_RNA (1)...(19): siRNA sense strand
ccuuaaacggagagcccga

SEQ ID NO: 2515822 - RNA, 19 nt, Homo sapiens
  misc_RNA (1)...(19): siRNA sense strand
cugcagcauuuacggagaa

SEQ ID NO: 2515823 - RNA, 19 nt, Homo sapiens
  misc_RNA (1)...(19): siRNA sense strand
gggugauugagguugggaa

SEQ ID NO: 2515824 - RNA, 19 nt, Homo sapiens
  misc_RNA (1)...(19): siRNA sense strand
gcacaaaggguggggacau

SEQ ID NO: 2515825 - RNA, 19 nt, Homo sapiens
  misc_RNA (1)...(19): siRNA sense strand
ggaacuaucaccaccgaca

SEQ ID NO: 2515826 - RNA, 19 nt, Homo sapiens
  misc_RNA (1)...(19): siRNA sense strand
ggagcaugacagcuugaaa

SEQ ID NO: 2515827 - RNA, 19 nt, Homo sapiens
  misc_RNA (1)...(19): siRNA sense strand
uagcaggagaaguggcaaa

SEQ ID NO: 2515828 - RNA, 19 nt, Homo sapiens
  misc_RNA (1)...(19): siRNA sense strand
gggaugaagcccaggggua

SEQ ID NO: 2515829 - RNA, 19 nt, Homo sapiens
  misc_RNA (1)...(19): siRNA sense strand
caguaugaguuccggguca

SEQ ID NO: 2515830 - RNA, 19 nt, Homo sapiens
  misc_RNA (1)...(19): siRNA sense strand
aguacaaggcuguggcuga

SEQ ID NO: 2515831 - RNA, 19 nt, Homo sapiens
  misc_RNA (1)...(19): siRNA sense strand
gguuggacaucuauggaga

SEQ ID NO: 2515832 - RNA, 19 nt, Homo sapiens
  misc_RNA (1)...(19): siRNA sense strand
cguaagaaggggagcaaca

SEQ ID NO: 2515833 - RNA, 19 nt, Homo sapiens
  misc_RNA (1)...(19): siRNA sense strand
agagaaacugagagagcca

SEQ ID NO: 2515834 - RNA, 19 nt, Homo sapiens
  misc_RNA (1)...(19): siRNA sense strand
acuucagggugguggccaa

SEQ ID NO: 2515835 - RNA, 19 nt, Homo sapiens
  misc_RNA (1)...(19): siRNA sense strand
acacauuagugcaagccau

SEQ ID NO: 2515836 - RNA, 19 nt, Homo sapiens
  misc_RNA (1)...(19): siRNA sense strand
gguggcagccuaugggaga

SEQ ID NO: 2515837 - RNA, 19 nt, Homo sapiens
  misc_RNA (1)...(19): siRNA sense strand
cagaugugacagagaaacu

SEQ ID NO: 2515838 - RNA, 19 nt, Homo sapiens
  misc_RNA (1)...(19): siRNA sense strand
gcggcagggcugucaguau

SEQ ID NO: 2515839 - RNA, 19 nt, Homo sapiens
  misc_RNA (1)...(19): siRNA sense strand
agaucgaacaccagcauca

SEQ ID NO: 2515840 - RNA, 19 nt, Homo sapiens
  misc_RNA (1)...(19): siRNA sense strand
gcuccagaugugacagaga

SEQ ID NO: 2515841 - RNA, 19 nt, Homo sapiens
  misc_RNA (1)...(19): siRNA sense strand
ucuccaagucacagacaga

SEQ ID NO: 2515842 - RNA, 19 nt, Homo sapiens
  misc_RNA (1)...(19): siRNA sense strand
ggcaggagcacuuggcuga

SEQ ID NO: 2515843 - RNA, 19 nt, Homo sapiens
  misc_RNA (1)...(19): siRNA sense strand
uccagaugugacagagaaa

SEQ ID NO: 2515844 - RNA, 19 nt, Homo sapiens
  misc_RNA (1)...(19): siRNA sense strand
cugacgaggcccaggaugu

SEQ ID NO: 2515845 - RNA, 19 nt, Homo sapiens
  misc_RNA (1)...(19): siRNA sense strand
acgcuuuaaucaaggacau

SEQ ID NO: 2515846 - RNA, 19 nt, Homo sapiens
  misc_RNA (1)...(19): siRNA sense strand
acacagaagaagaaggcaa

SEQ ID NO: 2515847 - RNA, 19 nt, Homo sapiens
  misc_RNA (1)...(19): siRNA sense strand
cauuaaagaaagagaagca

SEQ ID NO: 2515848 - RNA, 19 nt, Homo sapiens
  misc_RNA (1)...(19): siRNA sense strand
agccaaacaaugagaacaa

SEQ ID NO: 2515849 - RNA, 19 nt, Homo sapiens
  misc_RNA (1)...(19): siRNA sense strand
aguuggagcagcaaguaaa

SEQ ID NO: 2515850 - RNA, 19 nt, Homo sapiens
  misc_RNA (1)...(19): siRNA sense strand
gcaagauaugcgucgggua

SEQ ID NO: 2515851 - RNA, 19 nt, Homo sapiens
  misc_RNA (1)...(19): siRNA sense strand
ggaacuagagagaguggca

SEQ ID NO: 2515852 - RNA, 19 nt, Homo sapiens
  misc_RNA (1)...(19): siRNA sense strand
gcgucuucgaggagccaaa

SEQ ID NO: 2515853 - RNA, 19 nt, Homo sapiens
  misc_RNA (1)...(19): siRNA sense strand
gaagaaaaguccaaggauc

SEQ ID NO: 2515854 - RNA, 19 nt, Homo sapiens
  misc_RNA (1)...(19): siRNA sense strand
uagagaagcuggagaggag

SEQ ID NO: 2515855 - RNA, 19 nt, Homo sapiens
  misc_RNA (1)...(19): siRNA sense strand
guaaaggagcuacaggaga

SEQ ID NO: 2515856 - RNA, 19 nt, Homo sapiens
  misc_RNA (1)...(19): siRNA sense strand
caguuggagcagcaaguaa

SEQ ID NO: 2515857 - RNA, 19 nt, Homo sapiens
  misc_RNA (1)...(19): siRNA sense strand
acauacagaaagaggaacu

SEQ ID NO: 2515858 - RNA, 19 nt, Homo sapiens
  misc_RNA (1)...(19): siRNA sense strand
caacauucauugcagcgua

SEQ ID NO: 2515859 - RNA, 19 nt, Homo sapiens
  misc_RNA (1)...(19): siRNA sense strand
agguucaaauccagacauu

SEQ ID NO: 2515860 - RNA, 19 nt, Homo sapiens
  misc_RNA (1)...(19): siRNA sense strand
cuacaggaaaagaaagcaa

SEQ ID NO: 2515861 - RNA, 19 nt, Homo sapiens
  misc_RNA (1)...(19): siRNA sense strand
ggauucgggagcaggaaga

SEQ ID NO: 2515862 - RNA, 19 nt, Homo sapiens
  misc_RNA (1)...(19): siRNA sense strand
cgguggcagcagaggauga

SEQ ID NO: 2515863 - RNA, 19 nt, Homo sapiens
  misc_RNA (1)...(19): siRNA sense strand
ggggacaagaagagaggau

SEQ ID NO: 2515864 - RNA, 19 nt, Homo sapiens
  misc_RNA (1)...(19): siRNA sense strand
aagaaaaguccaaggaucu

SEQ ID NO: 2515865 - RNA, 19 nt, Homo sapiens
  misc_RNA (1)...(19): siRNA sense strand
uaaagaaagagaagcagca

SEQ ID NO: 2515866 - RNA, 19 nt, Homo sapiens
  misc_RNA (1)...(19): siRNA sense strand
gcagcaaguaaaggagcua

SEQ ID NO: 2515867 - RNA, 19 nt, Homo sapiens
  misc_RNA (1)...(19): siRNA sense strand
uggcagcagaggaugagaa

SEQ ID NO: 2515868 - RNA, 19 nt, Homo sapiens
  misc_RNA (1)...(19): siRNA sense strand
cugcaaagagugcgcguga

SEQ ID NO: 2515869 - RNA, 19 nt, Homo sapiens
  misc_RNA (1)...(19): siRNA sense strand
agcaaauaauggagagaag

SEQ ID NO: 2515870 - RNA, 19 nt, Homo sapiens
  misc_RNA (1)...(19): siRNA sense strand
acccaauuguggagcagua

SEQ ID NO: 2515871 - RNA, 19 nt, Homo sapiens
  misc_RNA (1)...(19): siRNA sense strand
ugagagaggagcaggggaa

SEQ ID NO: 2515872 - RNA, 19 nt, Homo sapiens
  misc_RNA (1)...(19): siRNA sense strand
uggauguuguugauggcaa

SEQ ID NO: 2515873 - RNA, 19 nt, Homo sapiens
  misc_RNA (1)...(19): siRNA sense strand
gagagaagaaugcccgaca

SEQ ID NO: 2515874 - RNA, 19 nt, Homo sapiens
  misc_RNA (1)...(19): siRNA sense strand
gguacaacgauuugagccu

SEQ ID NO: 2515875 - RNA, 19 nt, Homo sapiens
  misc_RNA (1)...(19): siRNA sense strand
augaacauagacagugaaa

SEQ ID NO: 2515876 - RNA, 19 nt, Homo sapiens
  misc_RNA (1)...(19): siRNA sense strand
uggagcuggcuguggacaa

SEQ ID NO: 2515877 - RNA, 19 nt, Homo sapiens
  misc_RNA (1)...(19): siRNA sense strand
gggagguaucugaaagcca

SEQ ID NO: 2515878 - RNA, 19 nt, Homo sapiens
  misc_RNA (1)...(19): siRNA sense strand
aguacguguucucggauuu

SEQ ID NO: 2515879 - RNA, 19 nt, Homo sapiens
  misc_RNA (1)...(19): siRNA sense strand
guucucaaaguguacgaaa

SEQ ID NO: 2515880 - RNA, 19 nt, Homo sapiens
  misc_RNA (1)...(19): siRNA sense strand
aagucauacaagugucuua

SEQ ID NO: 2515881 - RNA, 19 nt, Homo sapiens
  misc_RNA (1)...(19): siRNA sense strand
cagagaugagagaggagca

SEQ ID NO: 2515882 - RNA, 19 nt, Homo sapiens
  misc_RNA (1)...(19): siRNA sense strand
cugauagagcaaagguaaa

SEQ ID NO: 2515883 - RNA, 19 nt, Homo sapiens
  misc_RNA (1)...(19): siRNA sense strand
cacagauauuacagaacaa

SEQ ID NO: 2515884 - RNA, 19 nt, Homo sapiens
  misc_RNA (1)...(19): siRNA sense strand
ccgacgaauguuaaugaaa

SEQ ID NO: 2515885 - RNA, 19 nt, Homo sapiens
  misc_RNA (1)...(19): siRNA sense strand
auucagaacaggcggaaca

SEQ ID NO: 2515886 - RNA, 19 nt, Homo sapiens
  misc_RNA (1)...(19): siRNA sense strand
gcaagaauuuaucagccua

SEQ ID NO: 2515887 - RNA, 19 nt, Homo sapiens
  misc_RNA (1)...(19): siRNA sense strand
uccaagaucauuaggacaa

SEQ ID NO: 2515888 - RNA, 19 nt, Homo sapiens
  misc_RNA (1)...(19): siRNA sense strand
ggauggucugauagagcaa

SEQ ID NO: 2515889 - RNA, 19 nt, Homo sapiens
  misc_RNA (1)...(19): siRNA sense strand
cauuaugcaacuuggaaga

SEQ ID NO: 2515890 - RNA, 19 nt, Homo sapiens
  misc_RNA (1)...(19): siRNA sense strand
ggaagaaaguaucacgucu

SEQ ID NO: 2515891 - RNA, 19 nt, Homo sapiens
  misc_RNA (1)...(19): siRNA sense strand
guacagaacuucaagcuuc

SEQ ID NO: 2515892 - RNA, 19 nt, Homo sapiens
  misc_RNA (1)...(19): siRNA sense strand
gcuugagauaaguggcuuu

SEQ ID NO: 2515893 - RNA, 19 nt, Homo sapiens
  misc_RNA (1)...(19): siRNA sense strand
aaguggaaucaaaggugaa

SEQ ID NO: 2515894 - RNA, 19 nt, Homo sapiens
  misc_RNA (1)...(19): siRNA sense strand
gagaagaccgcaugugcca

SEQ ID NO: 2515895 - RNA, 19 nt, Homo sapiens
  misc_RNA (1)...(19): siRNA sense strand
gaccauuguuagaagagca

SEQ ID NO: 2515896 - RNA, 19 nt, Homo sapiens
  misc_RNA (1)...(19): siRNA sense strand
caaguggaaucaaagguga

SEQ ID NO: 2515897 - RNA, 19 nt, Homo sapiens
  misc_RNA (1)...(19): siRNA sense strand
cagaacaggcggaacaacu

SEQ ID NO: 2515898 - RNA, 19 nt, Homo sapiens
  misc_RNA (1)...(19): siRNA sense strand
gggaaaaccacugcugaaa

SEQ ID NO: 2515899 - RNA, 19 nt, Homo sapiens
  misc_RNA (1)...(19): siRNA sense strand
ggaagaugccagagagcag

SEQ ID NO: 2515900 - RNA, 19 nt, Homo sapiens
  misc_RNA (1)...(19): siRNA sense strand
cugagauggcacaaagaga

SEQ ID NO: 2515901 - RNA, 19 nt, Homo sapiens
  misc_RNA (1)...(19): siRNA sense strand
aggucaucacagaggaaga

SEQ ID NO: 2515902 - RNA, 19 nt, Homo sapiens
  misc_RNA (1)...(19): siRNA sense strand
ccuucuugugguauaauaa

SEQ ID NO: 2515903 - RNA, 19 nt, Homo sapiens
  misc_RNA (1)...(19): siRNA sense strand
ccucuagagcugucagaau

SEQ ID NO: 2515904 - RNA, 19 nt, Homo sapiens
  misc_RNA (1)...(19): siRNA sense strand
guggaagagaagugaccau

SEQ ID NO: 2515905 - RNA, 19 nt, Homo sapiens
  misc_RNA (1)...(19): siRNA sense strand
cagggaagugggagcucaa

SEQ ID NO: 2515906 - RNA, 19 nt, Homo sapiens
  misc_RNA (1)...(19): siRNA sense strand
gcuggaagcuggaaagggu

SEQ ID NO: 2515907 - RNA, 19 nt, Homo sapiens
  misc_RNA (1)...(19): siRNA sense strand
cggaaaguucaaagugagu

SEQ ID NO: 2515908 - RNA, 19 nt, Homo sapiens
  misc_RNA (1)...(19): siRNA sense strand
guucaaagugaguggcaag

SEQ ID NO: 2515909 - RNA, 19 nt, Homo sapiens
  misc_RNA (1)...(19): siRNA sense strand
gcaaaaugaacccgcagaa

SEQ ID NO: 2515910 - RNA, 19 nt, Homo sapiens
  misc_RNA (1)...(19): siRNA sense strand
gaauacauggucugggaca

SEQ ID NO: 2515911 - RNA, 19 nt, Homo sapiens
  misc_RNA (1)...(19): siRNA sense strand
cauuauacccagauggugu

SEQ ID NO: 2515912 - RNA, 19 nt, Homo sapiens
  misc_RNA (1)...(19): siRNA sense strand
cauuaagggcaacuggauu

SEQ ID NO: 2515913 - RNA, 19 nt, Homo sapiens
  misc_RNA (1)...(19): siRNA sense strand
ggucugaggagaaguggca

SEQ ID NO: 2515914 - RNA, 19 nt, Homo sapiens
  misc_RNA (1)...(19): siRNA sense strand
aauacauggucugggacaa

SEQ ID NO: 2515915 - RNA, 19 nt, Homo sapiens
  misc_RNA (1)...(19): siRNA sense strand
uggaauacauggucuggga

SEQ ID NO: 2515916 - RNA, 19 nt, Homo sapiens
  misc_RNA (1)...(19): siRNA sense strand
ccgucuauuuugugguuua

SEQ ID NO: 2515917 - RNA, 19 nt, Homo sapiens
  misc_RNA (1)...(19): siRNA sense strand
cagcagagcucaggccaca

SEQ ID NO: 2515918 - RNA, 19 nt, Homo sapiens
  misc_RNA (1)...(19): siRNA sense strand
ccagagacuuugcagcaca

SEQ ID NO: 2515919 - RNA, 19 nt, Homo sapiens
  misc_RNA (1)...(19): siRNA sense strand
gagaaagagaagagcaaga

SEQ ID NO: 2515920 - RNA, 19 nt, Homo sapiens
  misc_RNA (1)...(19): siRNA sense strand
aagagaaagagaagagcaa

SEQ ID NO: 2515921 - RNA, 19 nt, Homo sapiens
  misc_RNA (1)...(19): siRNA sense strand
aaacagaacaggauggcua

SEQ ID NO: 2515922 - RNA, 19 nt, Homo sapiens
  misc_RNA (1)...(19): siRNA sense strand
gcaugaaaagcuugagaaa

SEQ ID NO: 2515923 - RNA, 19 nt, Homo sapiens
  misc_RNA (1)...(19): siRNA sense strand
gugaaaagcaaaugaagaa

SEQ ID NO: 2515924 - RNA, 19 nt, Homo sapiens
  misc_RNA (1)...(19): siRNA sense strand
agagcaagcaagagaaaga

SEQ ID NO: 2515925 - RNA, 19 nt, Homo sapiens
  misc_RNA (1)...(19): siRNA sense strand
ccagagaaggagaagaaaa

SEQ ID NO: 2515926 - RNA, 19 nt, Homo sapiens
  misc_RNA (1)...(19): siRNA sense strand
aaccagagaaggagaagaa

SEQ ID NO: 2515927 - RNA, 19 nt, Homo sapiens
  misc_RNA (1)...(19): siRNA sense strand
aaugaagaagucugagaaa

SEQ ID NO: 2515928 - RNA, 19 nt, Homo sapiens
  misc_RNA (1)...(19): siRNA sense strand
cucccaaggcugagaacaa

SEQ ID NO: 2515929 - RNA, 19 nt, Homo sapiens
  misc_RNA (1)...(19): siRNA sense strand
aaaagaaggcccaggacaa

SEQ ID NO: 2515930 - RNA, 19 nt, Homo sapiens
  misc_RNA (1)...(19): siRNA sense strand
ggacccaaggagagcacaa

SEQ ID NO: 2515931 - RNA, 19 nt, Homo sapiens
  misc_RNA (1)...(19): siRNA sense strand
gaaagaggacccaaggaga

SEQ ID NO: 2515932 - RNA, 19 nt, Homo sapiens
  misc_RNA (1)...(19): siRNA sense strand
ccaagaagucaguggccga

SEQ ID NO: 2515933 - RNA, 19 nt, Homo sapiens
  misc_RNA (1)...(19): siRNA sense strand
augaguaugaggagaagua

SEQ ID NO: 2515934 - RNA, 19 nt, Homo sapiens
  misc_RNA (1)...(19): siRNA sense strand
cagccacggaggacggaaa

SEQ ID NO: 2515935 - RNA, 19 nt, Homo sapiens
  misc_RNA (1)...(19): siRNA sense strand
ugaggaaagaguacggaau

SEQ ID NO: 2515936 - RNA, 19 nt, Homo sapiens
  misc_RNA (1)...(19): siRNA sense strand
aggaaagaguacggaauga

SEQ ID NO: 2515937 - RNA, 19 nt, Homo sapiens
  misc_RNA (1)...(19): siRNA sense strand
ccaaugugguccaugguga

SEQ ID NO: 2515938 - RNA, 19 nt, Homo sapiens
  misc_RNA (1)...(19): siRNA sense strand
acuuaagagugaaaagcaa

SEQ ID NO: 2515939 - RNA, 19 nt, Homo sapiens
  misc_RNA (1)...(19): siRNA sense strand
uggagaagcagaagaagga

SEQ ID NO: 2515940 - RNA, 19 nt, Homo sapiens
  misc_RNA (1)...(19): siRNA sense strand
uugagaaaccagagaagga

SEQ ID NO: 2515941 - RNA, 19 nt, Homo sapiens
  misc_RNA (1)...(19): siRNA sense strand
agaaugagaacgcagacaa

SEQ ID NO: 2515942 - RNA, 19 nt, Homo sapiens
  misc_RNA (1)...(19): siRNA sense strand
ccaugcgagugguggauga

SEQ ID NO: 2515943 - RNA, 19 nt, Homo sapiens
  misc_RNA (1)...(19): siRNA sense strand
auauggagaagcagaagaa

SEQ ID NO: 2515944 - RNA, 19 nt, Homo sapiens
  misc_RNA (1)...(19): siRNA sense strand
aggaggagguugcugguga

SEQ ID NO: 2515945 - RNA, 19 nt, Homo sapiens
  misc_RNA (1)...(19): siRNA sense strand
uggugaaagacauucguaa

SEQ ID NO: 2515946 - RNA, 19 nt, Homo sapiens
  misc_RNA (1)...(19): siRNA sense strand
acaggauggcuaucagaaa

SEQ ID NO: 2515947 - RNA, 19 nt, Homo sapiens
  misc_RNA (1)...(19): siRNA sense strand
aagauauggagaagcagaa

SEQ ID NO: 2515948 - RNA, 19 nt, Homo sapiens
  misc_RNA (1)...(19): siRNA sense strand
agcagaagaaggagggcau

SEQ ID NO: 2515949 - RNA, 19 nt, Homo sapiens
  misc_RNA (1)...(19): siRNA sense strand
gcgagaagaagaaagagga

SEQ ID NO: 2515950 - RNA, 19 nt, Homo sapiens
  misc_RNA (1)...(19): siRNA sense strand
agagaagagcaagaagaaa

SEQ ID NO: 2515951 - RNA, 19 nt, Homo sapiens
  misc_RNA (1)...(19): siRNA sense strand
acaauauguaugugcaaca

SEQ ID NO: 2515952 - RNA, 19 nt, Homo sapiens
  misc_RNA (1)...(19): siRNA sense strand
auguaaggccucuggugua

SEQ ID NO: 2515953 - RNA, 19 nt, Homo sapiens
  misc_RNA (1)...(19): siRNA sense strand
gcuuggagagcuucacaaa

SEQ ID NO: 2515954 - RNA, 19 nt, Homo sapiens
  misc_RNA (1)...(19): siRNA sense strand
ccaugcuucuagucggaaa

SEQ ID NO: 2515955 - RNA, 19 nt, Homo sapiens
  misc_RNA (1)...(19): siRNA sense strand
agggagaggccacagacaa

SEQ ID NO: 2515956 - RNA, 19 nt, Homo sapiens
  misc_RNA (1)...(19): siRNA sense strand
ucacuaugcuguuggccau

SEQ ID NO: 2515957 - RNA, 19 nt, Homo sapiens
  misc_RNA (1)...(19): siRNA sense strand
gagaaaccagagaaggaga

SEQ ID NO: 2515958 - RNA, 19 nt, Homo sapiens
  misc_RNA (1)...(19): siRNA sense strand
cagcccauuuggugaaaga

SEQ ID NO: 2515959 - RNA, 19 nt, Homo sapiens
  misc_RNA (1)...(19): siRNA sense strand
agaaaccagagaaggagaa

SEQ ID NO: 2515960 - RNA, 19 nt, Homo sapiens
  misc_RNA (1)...(19): siRNA sense strand
gauguggaucugagaguca

SEQ ID NO: 2515961 - RNA, 19 nt, Homo sapiens
  misc_RNA (1)...(19): siRNA sense strand
auaguuaccaccaaggaua

SEQ ID NO: 2515962 - RNA, 19 nt, Homo sapiens
  misc_RNA (1)...(19): siRNA sense strand
ggaucugagagucaagcaa

SEQ ID NO: 2515963 - RNA, 19 nt, Homo sapiens
  misc_RNA (1)...(19): siRNA sense strand
aucugagagucaagcaaua

SEQ ID NO: 2515964 - RNA, 19 nt, Homo sapiens
  misc_RNA (1)...(19): siRNA sense strand
gcaacuucggagacaggaa

SEQ ID NO: 2515965 - RNA, 19 nt, Homo sapiens
  misc_RNA (1)...(19): siRNA sense strand
agaucaggcagaagggcuu

SEQ ID NO: 2515966 - RNA, 19 nt, Homo sapiens
  misc_RNA (1)...(19): siRNA sense strand
augaugaagacuugguaga

SEQ ID NO: 2515967 - RNA, 19 nt, Homo sapiens
  misc_RNA (1)...(19): siRNA sense strand
aguaaugaguaugaggaga

SEQ ID NO: 2515968 - RNA, 19 nt, Homo sapiens
  misc_RNA (1)...(19): siRNA sense strand
augaagaagucugagaaaa

SEQ ID NO: 2515969 - RNA, 19 nt, Homo sapiens
  misc_RNA (1)...(19): siRNA sense strand
agaugaguaugcaggcuau

SEQ ID NO: 2515970 - RNA, 19 nt, Homo sapiens
  misc_RNA (1)...(19): siRNA sense strand
cagacaaccaggaggccca

SEQ ID NO: 2515971 - RNA, 19 nt, Homo sapiens
  misc_RNA (1)...(19): siRNA sense strand
ccacuuucagcuagauaau

SEQ ID NO: 2515972 - RNA, 19 nt, Homo sapiens
  misc_RNA (1)...(19): siRNA sense strand
gaggaaggaggcaagguga

SEQ ID NO: 2515973 - RNA, 19 nt, Homo sapiens
  misc_RNA (1)...(19): siRNA sense strand
ggcaaggugagaaggauca

SEQ ID NO: 2515974 - RNA, 19 nt, Homo sapiens
  misc_RNA (1)...(19): siRNA sense strand
ugaagcuggagaagggcaa

SEQ ID NO: 2515975 - RNA, 19 nt, Homo sapiens
  misc_RNA (1)...(19): siRNA sense strand
gcgagugguggaugaugaa

SEQ ID NO: 2515976 - RNA, 19 nt, Homo sapiens
  misc_RNA (1)...(19): siRNA sense strand
gagugguggaugaugaaga

SEQ ID NO: 2515977 - RNA, 19 nt, Homo sapiens
  misc_RNA (1)...(19): siRNA sense strand
uuuaggcguuggagaggaa

SEQ ID NO: 2515978 - RNA, 19 nt, Homo sapiens
  misc_RNA (1)...(19): siRNA sense strand
ggagacaggaaauggcgau

SEQ ID NO: 2515979 - RNA, 19 nt, Homo sapiens
  misc_RNA (1)...(19): siRNA sense strand
acugggaggucucgcggaa

SEQ ID NO: 2515980 - RNA, 19 nt, Homo sapiens
  misc_RNA (1)...(19): siRNA sense strand
aagaacagaguauggguca

SEQ ID NO: 2515981 - RNA, 19 nt, Homo sapiens
  misc_RNA (1)...(19): siRNA sense strand
gagaaagagaagagcaaga

SEQ ID NO: 2515982 - RNA, 19 nt, Homo sapiens
  misc_RNA (1)...(19): siRNA sense strand
aagagaaagagaagagcaa

SEQ ID NO: 2515983 - RNA, 19 nt, Homo sapiens
  misc_RNA (1)...(19): siRNA sense strand
aaacagaacaggauggcua

SEQ ID NO: 2515984 - RNA, 19 nt, Homo sapiens
  misc_RNA (1)...(19): siRNA sense strand
gcaugaaaagcuugagaaa

SEQ ID NO: 2515985 - RNA, 19 nt, Homo sapiens
  misc_RNA (1)...(19): siRNA sense strand
gugaaaagcaaaugaagaa

SEQ ID NO: 2515986 - RNA, 19 nt, Homo sapiens
  misc_RNA (1)...(19): siRNA sense strand
agagcaagcaagagaaaga

SEQ ID NO: 2515987 - RNA, 19 nt, Homo sapiens
  misc_RNA (1)...(19): siRNA sense strand
ccagagaaggagaagaaaa

SEQ ID NO: 2515988 - RNA, 19 nt, Homo sapiens
  misc_RNA (1)...(19): siRNA sense strand
aaccagagaaggagaagaa

SEQ ID NO: 2515989 - RNA, 19 nt, Homo sapiens
  misc_RNA (1)...(19): siRNA sense strand
aaugaagaagucugagaaa

SEQ ID NO: 2515990 - RNA, 19 nt, Homo sapiens
  misc_RNA (1)...(19): siRNA sense strand
cucccaaggcugagaacaa

SEQ ID NO: 2515991 - RNA, 19 nt, Homo sapiens
  misc_RNA (1)...(19): siRNA sense strand
aaaagaaggcccaggacaa

SEQ ID NO: 2515992 - RNA, 19 nt, Homo sapiens
  misc_RNA (1)...(19): siRNA sense strand
ggacccaaggagagcacaa

SEQ ID NO: 2515993 - RNA, 19 nt, Homo sapiens
  misc_RNA (1)...(19): siRNA sense strand
gaaagaggacccaaggaga

SEQ ID NO: 2515994 - RNA, 19 nt, Homo sapiens
  misc_RNA (1)...(19): siRNA sense strand
ccaagaagucaguggccga

SEQ ID NO: 2515995 - RNA, 19 nt, Homo sapiens
  misc_RNA (1)...(19): siRNA sense strand
augaguaugaggagaagua

SEQ ID NO: 2515996 - RNA, 19 nt, Homo sapiens
  misc_RNA (1)...(19): siRNA sense strand
cagccacggaggacggaaa

SEQ ID NO: 2515997 - RNA, 19 nt, Homo sapiens
  misc_RNA (1)...(19): siRNA sense strand
ugaggaaagaguacggaau

SEQ ID NO: 2515998 - RNA, 19 nt, Homo sapiens
  misc_RNA (1)...(19): siRNA sense strand
aggaaagaguacggaauga

SEQ ID NO: 2515999 - RNA, 19 nt, Homo sapiens
  misc_RNA (1)...(19): siRNA sense strand
ccaaugugguccaugguga

SEQ ID NO: 2516000 - RNA, 19 nt, Homo sapiens
  misc_RNA (1)...(19): siRNA sense strand
acuuaagagugaaaagcaa

SEQ ID NO: 2516001 - RNA, 19 nt, Homo sapiens
  misc_RNA (1)...(19): siRNA sense strand
uggagaagcagaagaagga

SEQ ID NO: 2516002 - RNA, 19 nt, Homo sapiens
  misc_RNA (1)...(19): siRNA sense strand
uugagaaaccagagaagga

SEQ ID NO: 2516003 - RNA, 19 nt, Homo sapiens
  misc_RNA (1)...(19): siRNA sense strand
agaaugagaacgcagacaa

SEQ ID NO: 2516004 - RNA, 19 nt, Homo sapiens
  misc_RNA (1)...(19): siRNA sense strand
ccaugcgagugguggauga

SEQ ID NO: 2516005 - RNA, 19 nt, Homo sapiens
  misc_RNA (1)...(19): siRNA sense strand
auauggagaagcagaagaa

SEQ ID NO: 2516006 - RNA, 19 nt, Homo sapiens
  misc_RNA (1)...(19): siRNA sense strand
aggaggagguugcugguga

SEQ ID NO: 2516007 - RNA, 19 nt, Homo sapiens
  misc_RNA (1)...(19): siRNA sense strand
uggugaaagacauucguaa

SEQ ID NO: 2516008 - RNA, 19 nt, Homo sapiens
  misc_RNA (1)...(19): siRNA sense strand
acaggauggcuaucagaaa

SEQ ID NO: 2516009 - RNA, 19 nt, Homo sapiens
  misc_RNA (1)...(19): siRNA sense strand
aagauauggagaagcagaa

SEQ ID NO: 2516010 - RNA, 19 nt, Homo sapiens
  misc_RNA (1)...(19): siRNA sense strand
agcagaagaaggagggcau

SEQ ID NO: 2516011 - RNA, 19 nt, Homo sapiens
  misc_RNA (1)...(19): siRNA sense strand
gcgagaagaagaaagagga

SEQ ID NO: 2516012 - RNA, 19 nt, Homo sapiens
  misc_RNA (1)...(19): siRNA sense strand
agagaagagcaagaagaaa

SEQ ID NO: 2516013 - RNA, 19 nt, Homo sapiens
  misc_RNA (1)...(19): siRNA sense strand
acaauauguaugugcaaca

SEQ ID NO: 2516014 - RNA, 19 nt, Homo sapiens
  misc_RNA (1)...(19): siRNA sense strand
auguaaggccucuggugua

SEQ ID NO: 2516015 - RNA, 19 nt, Homo sapiens
  misc_RNA (1)...(19): siRNA sense strand
gcuuggagagcuucacaaa

SEQ ID NO: 2516016 - RNA, 19 nt, Homo sapiens
  misc_RNA (1)...(19): siRNA sense strand
ccaugcuucuagucggaaa

SEQ ID NO: 2516017 - RNA, 19 nt, Homo sapiens
  misc_RNA (1)...(19): siRNA sense strand
agggagaggccacagacaa

SEQ ID NO: 2516018 - RNA, 19 nt, Homo sapiens
  misc_RNA (1)...(19): siRNA sense strand
ucacuaugcuguuggccau

SEQ ID NO: 2516019 - RNA, 19 nt, Homo sapiens
  misc_RNA (1)...(19): siRNA sense strand
gagaaaccagagaaggaga

SEQ ID NO: 2516020 - RNA, 19 nt, Homo sapiens
  misc_RNA (1)...(19): siRNA sense strand
cagcccauuuggugaaaga

SEQ ID NO: 2516021 - RNA, 19 nt, Homo sapiens
  misc_RNA (1)...(19): siRNA sense strand
agaaaccagagaaggagaa

SEQ ID NO: 2516022 - RNA, 19 nt, Homo sapiens
  misc_RNA (1)...(19): siRNA sense strand
gauguggaucugagaguca

SEQ ID NO: 2516023 - RNA, 19 nt, Homo sapiens
  misc_RNA (1)...(19): siRNA sense strand
auaguuaccaccaaggaua

SEQ ID NO: 2516024 - RNA, 19 nt, Homo sapiens
  misc_RNA (1)...(19): siRNA sense strand
ggaucugagagucaagcaa

SEQ ID NO: 2516025 - RNA, 19 nt, Homo sapiens
  misc_RNA (1)...(19): siRNA sense strand
aucugagagucaagcaaua

SEQ ID NO: 2516026 - RNA, 19 nt, Homo sapiens
  misc_RNA (1)...(19): siRNA sense strand
gcaacuucggagacaggaa

SEQ ID NO: 2516027 - RNA, 19 nt, Homo sapiens
  misc_RNA (1)...(19): siRNA sense strand
agaucaggcagaagggcuu

SEQ ID NO: 2516028 - RNA, 19 nt, Homo sapiens
  misc_RNA (1)...(19): siRNA sense strand
augaugaagacuugguaga

SEQ ID NO: 2516029 - RNA, 19 nt, Homo sapiens
  misc_RNA (1)...(19): siRNA sense strand
aguaaugaguaugaggaga

SEQ ID NO: 2516030 - RNA, 19 nt, Homo sapiens
  misc_RNA (1)...(19): siRNA sense strand
augaagaagucugagaaaa

SEQ ID NO: 2516031 - RNA, 19 nt, Homo sapiens
  misc_RNA (1)...(19): siRNA sense strand
agaugaguaugcaggcuau

SEQ ID NO: 2516032 - RNA, 19 nt, Homo sapiens
  misc_RNA (1)...(19): siRNA sense strand
cagacaaccaggaggccca

SEQ ID NO: 2516033 - RNA, 19 nt, Homo sapiens
  misc_RNA (1)...(19): siRNA sense strand
ccacuuucagcuagauaau

SEQ ID NO: 2516034 - RNA, 19 nt, Homo sapiens
  misc_RNA (1)...(19): siRNA sense strand
gaggaaggaggcaagguga

SEQ ID NO: 2516035 - RNA, 19 nt, Homo sapiens
  misc_RNA (1)...(19): siRNA sense strand
ggcaaggugagaaggauca

SEQ ID NO: 2516036 - RNA, 19 nt, Homo sapiens
  misc_RNA (1)...(19): siRNA sense strand
ugaagcuggagaagggcaa

SEQ ID NO: 2516037 - RNA, 19 nt, Homo sapiens
  misc_RNA (1)...(19): siRNA sense strand
gcgagugguggaugaugaa

SEQ ID NO: 2516038 - RNA, 19 nt, Homo sapiens
  misc_RNA (1)...(19): siRNA sense strand
gagugguggaugaugaaga

SEQ ID NO: 2516039 - RNA, 19 nt, Homo sapiens
  misc_RNA (1)...(19): siRNA sense strand
uuuaggcguuggagaggaa

SEQ ID NO: 2516040 - RNA, 19 nt, Homo sapiens
  misc_RNA (1)...(19): siRNA sense strand
ggagacaggaaauggcgau

SEQ ID NO: 2516041 - RNA, 19 nt, Homo sapiens
  misc_RNA (1)...(19): siRNA sense strand
acugggaggucucgcggaa

SEQ ID NO: 2516042 - RNA, 19 nt, Homo sapiens
  misc_RNA (1)...(19): siRNA sense strand
aagaacagaguauggguca

SEQ ID NO: 2516043 - RNA, 19 nt, Homo sapiens
  misc_RNA (1)...(19): siRNA sense strand
uggaaauagacaagaagaa

SEQ ID NO: 2516044 - RNA, 19 nt, Homo sapiens
  misc_RNA (1)...(19): siRNA sense strand
gauaauaaccgcagcacga

SEQ ID NO: 2516045 - RNA, 19 nt, Homo sapiens
  misc_RNA (1)...(19): siRNA sense strand
gaagaugacaggugagcca

SEQ ID NO: 2516046 - RNA, 19 nt, Homo sapiens
  misc_RNA (1)...(19): siRNA sense strand
gccaagaucaagagagcca

SEQ ID NO: 2516047 - RNA, 19 nt, Homo sapiens
  misc_RNA (1)...(19): siRNA sense strand
cggcaugccaagaucaaga

SEQ ID NO: 2516048 - RNA, 19 nt, Homo sapiens
  misc_RNA (1)...(19): siRNA sense strand
ucuucgggcuucugggcaa

SEQ ID NO: 2516049 - RNA, 19 nt, Homo sapiens
  misc_RNA (1)...(19): siRNA sense strand
cugaagaagaagaugccga

SEQ ID NO: 2516050 - RNA, 19 nt, Homo sapiens
  misc_RNA (1)...(19): siRNA sense strand
agaggaagaugacagguga

SEQ ID NO: 2516051 - RNA, 19 nt, Homo sapiens
  misc_RNA (1)...(19): siRNA sense strand
ccagcgugguugugcggau

SEQ ID NO: 2516052 - RNA, 19 nt, Homo sapiens
  misc_RNA (1)...(19): siRNA sense strand
caacaaaaccagaggcgcu

SEQ ID NO: 2516053 - RNA, 19 nt, Homo sapiens
  misc_RNA (1)...(19): siRNA sense strand
gugaagaagaagaggcgau

SEQ ID NO: 2516054 - RNA, 19 nt, Homo sapiens
  misc_RNA (1)...(19): siRNA sense strand
gagaaaggcugaaggggau

SEQ ID NO: 2516055 - RNA, 19 nt, Homo sapiens
  misc_RNA (1)...(19): siRNA sense strand
ggaugcuaaaggagauaaa

SEQ ID NO: 2516056 - RNA, 19 nt, Homo sapiens
  misc_RNA (1)...(19): siRNA sense strand
agcuaaaggugcuggagau

SEQ ID NO: 2516057 - RNA, 19 nt, Homo sapiens
  misc_RNA (1)...(19): siRNA sense strand
ccuacagagaagaagggaa

SEQ ID NO: 2516058 - RNA, 19 nt, Homo sapiens
  misc_RNA (1)...(19): siRNA sense strand
ucugcaaagaagagagaga

SEQ ID NO: 2516059 - RNA, 19 nt, Homo sapiens
  misc_RNA (1)...(19): siRNA sense strand
gcauuuacuucucuggcua

SEQ ID NO: 2516060 - RNA, 19 nt, Homo sapiens
  misc_RNA (1)...(19): siRNA sense strand
agaaaauggagaugccaaa

SEQ ID NO: 2516061 - RNA, 19 nt, Homo sapiens
  misc_RNA (1)...(19): siRNA sense strand
acagaaagcuaaaggugcu

SEQ ID NO: 2516062 - RNA, 19 nt, Homo sapiens
  misc_RNA (1)...(19): siRNA sense strand
gaccaaagcccgugcucca

SEQ ID NO: 2516063 - RNA, 19 nt, Homo sapiens
  misc_RNA (1)...(19): siRNA sense strand
cuccaaagccacagccgaa

SEQ ID NO: 2516064 - RNA, 19 nt, Homo sapiens
  misc_RNA (1)...(19): siRNA sense strand
aagugaagugugugcauuu

SEQ ID NO: 2516065 - RNA, 19 nt, Homo sapiens
  misc_RNA (1)...(19): siRNA sense strand
uagaaaugcacaaagcaga

SEQ ID NO: 2516066 - RNA, 19 nt, Homo sapiens
  misc_RNA (1)...(19): siRNA sense strand
agagaaaggcugaagggga

SEQ ID NO: 2516067 - RNA, 19 nt, Homo sapiens
  misc_RNA (1)...(19): siRNA sense strand
ccaaaacagacuaggcaca

SEQ ID NO: 2516068 - RNA, 19 nt, Homo sapiens
  misc_RNA (1)...(19): siRNA sense strand
cagaaaauggagaugccaa

SEQ ID NO: 2516069 - RNA, 19 nt, Homo sapiens
  misc_RNA (1)...(19): siRNA sense strand
gagaagauccacaagguug

SEQ ID NO: 2516070 - RNA, 19 nt, Homo sapiens
  misc_RNA (1)...(19): siRNA sense strand
cugcaaagaagagagagaa

SEQ ID NO: 2516071 - RNA, 19 nt, Homo sapiens
  misc_RNA (1)...(19): siRNA sense strand
gacuaggcacagaaagcua

SEQ ID NO: 2516072 - RNA, 19 nt, Homo sapiens
  misc_RNA (1)...(19): siRNA sense strand
aggaagaccaagagcggaa

SEQ ID NO: 2516073 - RNA, 19 nt, Homo sapiens
  misc_RNA (1)...(19): siRNA sense strand
ccauauuugacuuggauca

SEQ ID NO: 2516074 - RNA, 19 nt, Homo sapiens
  misc_RNA (1)...(19): siRNA sense strand
uggacaagggcaaggccaa

SEQ ID NO: 2516075 - RNA, 19 nt, Homo sapiens
  misc_RNA (1)...(19): siRNA sense strand
ggaagcagauggagcccuu

SEQ ID NO: 2516076 - RNA, 19 nt, Homo sapiens
  misc_RNA (1)...(19): siRNA sense strand
gggcuagagagcaagaaaa

SEQ ID NO: 2516077 - RNA, 19 nt, Homo sapiens
  misc_RNA (1)...(19): siRNA sense strand
uugccuggguggaggguga

SEQ ID NO: 2516078 - RNA, 19 nt, Homo sapiens
  misc_RNA (1)...(19): siRNA sense strand
cgggcuagagagcaagaaa

SEQ ID NO: 2516079 - RNA, 19 nt, Homo sapiens
  misc_RNA (1)...(19): siRNA sense strand
gacugaggaagaaaggaaa

SEQ ID NO: 2516080 - RNA, 19 nt, Homo sapiens
  misc_RNA (1)...(19): siRNA sense strand
gcacagaagucaucccucu

SEQ ID NO: 2516081 - RNA, 19 nt, Homo sapiens
  misc_RNA (1)...(19): siRNA sense strand
ucaaggugcugcaggagga

SEQ ID NO: 2516082 - RNA, 19 nt, Homo sapiens
  misc_RNA (1)...(19): siRNA sense strand
ggaaccugcacaagaggau

SEQ ID NO: 2516083 - RNA, 19 nt, Homo sapiens
  misc_RNA (1)...(19): siRNA sense strand
uguccuucgcggagaucaa

SEQ ID NO: 2516084 - RNA, 19 nt, Homo sapiens
  misc_RNA (1)...(19): siRNA sense strand
agguaacccaggagaaagu

SEQ ID NO: 2516085 - RNA, 19 nt, Homo sapiens
  misc_RNA (1)...(19): siRNA sense strand
cugcaaacgagaagaaaga

SEQ ID NO: 2516086 - RNA, 19 nt, Homo sapiens
  misc_RNA (1)...(19): siRNA sense strand
aggaaauggcacugaaauu

SEQ ID NO: 2516087 - RNA, 19 nt, Homo sapiens
  misc_RNA (1)...(19): siRNA sense strand
gcaaacgagaagaaagaau

SEQ ID NO: 2516088 - RNA, 19 nt, Homo sapiens
  misc_RNA (1)...(19): siRNA sense strand
aguauugaauccuggacaa

SEQ ID NO: 2516089 - RNA, 19 nt, Homo sapiens
  misc_RNA (1)...(19): siRNA sense strand
gaagaaagaauaugccaga

SEQ ID NO: 2516090 - RNA, 19 nt, Homo sapiens
  misc_RNA (1)...(19): siRNA sense strand
cuauagagugucuggaaga

SEQ ID NO: 2516091 - RNA, 19 nt, Homo sapiens
  misc_RNA (1)...(19): siRNA sense strand
gugaaaauggaguacgaaa

SEQ ID NO: 2516092 - RNA, 19 nt, Homo sapiens
  misc_RNA (1)...(19): siRNA sense strand
ccaacauggcacugugaau

SEQ ID NO: 2516093 - RNA, 19 nt, Homo sapiens
  misc_RNA (1)...(19): siRNA sense strand
ugugaauguaacugugaaa

SEQ ID NO: 2516094 - RNA, 19 nt, Homo sapiens
  misc_RNA (1)...(19): siRNA sense strand
cugcaaguguugucgugaa

SEQ ID NO: 2516095 - RNA, 19 nt, Homo sapiens
  misc_RNA (1)...(19): siRNA sense strand
uguuaaaacugaugaagga

SEQ ID NO: 2516096 - RNA, 19 nt, Homo sapiens
  misc_RNA (1)...(19): siRNA sense strand
gcaaaaugaaugaagggau

SEQ ID NO: 2516097 - RNA, 19 nt, Homo sapiens
  misc_RNA (1)...(19): siRNA sense strand
uugugaagugggagaauuu

SEQ ID NO: 2516098 - RNA, 19 nt, Homo sapiens
  misc_RNA (1)...(19): siRNA sense strand
caauauugaaagucaccua

SEQ ID NO: 2516099 - RNA, 19 nt, Homo sapiens
  misc_RNA (1)...(19): siRNA sense strand
ugcaaguguugucgugaaa

SEQ ID NO: 2516100 - RNA, 19 nt, Homo sapiens
  misc_RNA (1)...(19): siRNA sense strand
accauaacuuccagaguga

SEQ ID NO: 2516101 - RNA, 19 nt, Homo sapiens
  misc_RNA (1)...(19): siRNA sense strand
cauaacuuccagagugauu

SEQ ID NO: 2516102 - RNA, 19 nt, Homo sapiens
  misc_RNA (1)...(19): siRNA sense strand
agaaaauguaucuggucaa

SEQ ID NO: 2516103 - RNA, 19 nt, Homo sapiens
  misc_RNA (1)...(19): siRNA sense strand
cagaaagugaucauugaau

SEQ ID NO: 2516104 - RNA, 19 nt, Homo sapiens
  misc_RNA (1)...(19): siRNA sense strand
ugaaucggucauaaggaaa

SEQ ID NO: 2516105 - RNA, 19 nt, Homo sapiens
  misc_RNA (1)...(19): siRNA sense strand
uguaugagccaaagcccua

SEQ ID NO: 2516106 - RNA, 19 nt, Homo sapiens
  misc_RNA (1)...(19): siRNA sense strand
acucaacugugcagaagau

SEQ ID NO: 2516107 - RNA, 19 nt, Homo sapiens
  misc_RNA (1)...(19): siRNA sense strand
caggacuguaugagccaaa

SEQ ID NO: 2516108 - RNA, 19 nt, Homo sapiens
  misc_RNA (1)...(19): siRNA sense strand
cugcaauagaccauaacuu

SEQ ID NO: 2516109 - RNA, 19 nt, Homo sapiens
  misc_RNA (1)...(19): siRNA sense strand
cccuauaaauguugcaucu

SEQ ID NO: 2516110 - RNA, 19 nt, Homo sapiens
  misc_RNA (1)...(19): siRNA sense strand
uagagugucuggaagaaaa

SEQ ID NO: 2516111 - RNA, 19 nt, Homo sapiens
  misc_RNA (1)...(19): siRNA sense strand
gcuuuauaaugaaggcugu

SEQ ID NO: 2516112 - RNA, 19 nt, Homo sapiens
  misc_RNA (1)...(19): siRNA sense strand
ccucuguauugcucaggaa

SEQ ID NO: 2516113 - RNA, 19 nt, Homo sapiens
  misc_RNA (1)...(19): siRNA sense strand
gugggagaauuuacugcaa

SEQ ID NO: 2516114 - RNA, 19 nt, Homo sapiens
  misc_RNA (1)...(19): siRNA sense strand
aacugaugaaggagcaaua

SEQ ID NO: 2516115 - RNA, 19 nt, Homo sapiens
  misc_RNA (1)...(19): siRNA sense strand
gggcauaccagcagaucuu

SEQ ID NO: 2516116 - RNA, 19 nt, Homo sapiens
  misc_RNA (1)...(19): siRNA sense strand
gagcggucuaugagugaaa

SEQ ID NO: 2516117 - RNA, 19 nt, Homo sapiens
  misc_RNA (1)...(19): siRNA sense strand
uggaauauacugaaggcau

SEQ ID NO: 2516118 - RNA, 19 nt, Homo sapiens
  misc_RNA (1)...(19): siRNA sense strand
agucgaauucaguacgaaa

SEQ ID NO: 2516119 - RNA, 19 nt, Homo sapiens
  misc_RNA (1)...(19): siRNA sense strand
gauuguuguagcaggaaau

SEQ ID NO: 2516120 - RNA, 19 nt, Homo sapiens
  misc_RNA (1)...(19): siRNA sense strand
gaggauuguuguagcagga

SEQ ID NO: 2516121 - RNA, 19 nt, Homo sapiens
  misc_RNA (1)...(19): siRNA sense strand
gaacgugcuaaaagagaaa

SEQ ID NO: 2516122 - RNA, 19 nt, Homo sapiens
  misc_RNA (1)...(19): siRNA sense strand
uggaugugcuggaugaaaa

SEQ ID NO: 2516123 - RNA, 19 nt, Homo sapiens
  misc_RNA (1)...(19): siRNA sense strand
uguuguagcaggaaauaau

SEQ ID NO: 2516124 - RNA, 19 nt, Homo sapiens
  misc_RNA (1)...(19): siRNA sense strand
accugaagauggagcuaau

SEQ ID NO: 2516125 - RNA, 19 nt, Homo sapiens
  misc_RNA (1)...(19): siRNA sense strand
guuccaaaugcuaguguga

SEQ ID NO: 2516126 - RNA, 19 nt, Homo sapiens
  misc_RNA (1)...(19): siRNA sense strand
ugaaaaugcuguucgccaa

SEQ ID NO: 2516127 - RNA, 19 nt, Homo sapiens
  misc_RNA (1)...(19): siRNA sense strand
gcuaaaagagaaaugguca

SEQ ID NO: 2516128 - RNA, 19 nt, Homo sapiens
  misc_RNA (1)...(19): siRNA sense strand
acgaaauggaauauacuga

SEQ ID NO: 2516129 - RNA, 19 nt, Homo sapiens
  misc_RNA (1)...(19): siRNA sense strand
uucacuaagacgacagaua

SEQ ID NO: 2516130 - RNA, 19 nt, Homo sapiens
  misc_RNA (1)...(19): siRNA sense strand
cacuaagacgacagauaau

SEQ ID NO: 2516131 - RNA, 19 nt, Homo sapiens
  misc_RNA (1)...(19): siRNA sense strand
ccauauguuaccugaagau

SEQ ID NO: 2516132 - RNA, 19 nt, Homo sapiens
  misc_RNA (1)...(19): siRNA sense strand
ucuuggaugugcuggauga

SEQ ID NO: 2516133 - RNA, 19 nt, Homo sapiens
  misc_RNA (1)...(19): siRNA sense strand
ccaagaugcugcaggcgaa

SEQ ID NO: 2516134 - RNA, 19 nt, Homo sapiens
  misc_RNA (1)...(19): siRNA sense strand
ggagaauggcagugggaug

SEQ ID NO: 2516135 - RNA, 19 nt, Homo sapiens
  misc_RNA (1)...(19): siRNA sense strand
ggccagagggagaagaaca

SEQ ID NO: 2516136 - RNA, 19 nt, Homo sapiens
  misc_RNA (1)...(19): siRNA sense strand
ucuuugugcuggagaacau

SEQ ID NO: 2516137 - RNA, 19 nt, Homo sapiens
  misc_RNA (1)...(19): siRNA sense strand
ccauaacccugcuggagga

SEQ ID NO: 2516138 - RNA, 19 nt, Homo sapiens
  misc_RNA (1)...(19): siRNA sense strand
ugucuggagcccugggauu

SEQ ID NO: 2516139 - RNA, 19 nt, Homo sapiens
  misc_RNA (1)...(19): siRNA sense strand
gcggacuaccagagaagga

SEQ ID NO: 2516140 - RNA, 19 nt, Homo sapiens
  misc_RNA (1)...(19): siRNA sense strand
acucaaaggaggggagaaa

SEQ ID NO: 2516141 - RNA, 19 nt, Homo sapiens
  misc_RNA (1)...(19): siRNA sense strand
cccaaaucaaacuggaaua

SEQ ID NO: 2516142 - RNA, 19 nt, Homo sapiens
  misc_RNA (1)...(19): siRNA sense strand
aucuacagccugaggaaua

SEQ ID NO: 2516143 - RNA, 19 nt, Homo sapiens
  misc_RNA (1)...(19): siRNA sense strand
gaagaugauuggaggcucu

SEQ ID NO: 2516144 - RNA, 19 nt, Homo sapiens
  misc_RNA (1)...(19): siRNA sense strand
ggcuaugaggagaguguuu

SEQ ID NO: 2516145 - RNA, 19 nt, Homo sapiens
  misc_RNA (1)...(19): siRNA sense strand
aguaaaaugauguguguga

SEQ ID NO: 2516146 - RNA, 19 nt, Homo sapiens
  misc_RNA (1)...(19): siRNA sense strand
ccaucaacuccuuggcaca

SEQ ID NO: 2516147 - RNA, 19 nt, Homo sapiens
  misc_RNA (1)...(19): siRNA sense strand
gauuggaggcucuuggaca

SEQ ID NO: 2516148 - RNA, 19 nt, Homo sapiens
  misc_RNA (1)...(19): siRNA sense strand
aagacaagauccuggcagu

SEQ ID NO: 2516149 - RNA, 19 nt, Homo sapiens
  misc_RNA (1)...(19): siRNA sense strand
gaauauuucucuugugccu

SEQ ID NO: 2516150 - RNA, 19 nt, Homo sapiens
  misc_RNA (1)...(19): siRNA sense strand
gcuggugagacgagaggau

SEQ ID NO: 2516151 - RNA, 19 nt, Homo sapiens
  misc_RNA (1)...(19): siRNA sense strand
gaacaaauguccucggcuu

SEQ ID NO: 2516152 - RNA, 19 nt, Homo sapiens
  misc_RNA (1)...(19): siRNA sense strand
guuagauggcagagaccaa

SEQ ID NO: 2516153 - RNA, 19 nt, Homo sapiens
  misc_RNA (1)...(19): siRNA sense strand
caccaaaaccagagacuau

SEQ ID NO: 2516154 - RNA, 19 nt, Homo sapiens
  misc_RNA (1)...(19): siRNA sense strand
cagcaaaacaauugagaug

SEQ ID NO: 2516155 - RNA, 19 nt, Homo sapiens
  misc_RNA (1)...(19): siRNA sense strand
uaucaucauaccagagcaa

SEQ ID NO: 2516156 - RNA, 19 nt, Homo sapiens
  misc_RNA (1)...(19): siRNA sense strand
guuagauggcagagaccaa

SEQ ID NO: 2516157 - RNA, 19 nt, Homo sapiens
  misc_RNA (1)...(19): siRNA sense strand
cagcaaaacaauugagaug

SEQ ID NO: 2516158 - RNA, 19 nt, Homo sapiens
  misc_RNA (1)...(19): siRNA sense strand
gcaaauaucaagcaggcaa

SEQ ID NO: 2516159 - RNA, 19 nt, Homo sapiens
  misc_RNA (1)...(19): siRNA sense strand
acuauaaugcagagagaga

SEQ ID NO: 2516160 - RNA, 19 nt, Homo sapiens
  misc_RNA (1)...(19): siRNA sense strand
acguuuaaauugugcggaa

SEQ ID NO: 2516161 - RNA, 19 nt, Homo sapiens
  misc_RNA (1)...(19): siRNA sense strand
uaaaagaagcacaaggaaa

SEQ ID NO: 2516162 - RNA, 19 nt, Homo sapiens
  misc_RNA (1)...(19): siRNA sense strand
agaucaacuuggacaggaa

SEQ ID NO: 2516163 - RNA, 19 nt, Homo sapiens
  misc_RNA (1)...(19): siRNA sense strand
cguuuaaauugugcggaaa

SEQ ID NO: 2516164 - RNA, 19 nt, Homo sapiens
  misc_RNA (1)...(19): siRNA sense strand
guuuaaauugugcggaaau

SEQ ID NO: 2516165 - RNA, 19 nt, Homo sapiens
  misc_RNA (1)...(19): siRNA sense strand
aagagaugucauuggcaaa

SEQ ID NO: 2516166 - RNA, 19 nt, Homo sapiens
  misc_RNA (1)...(19): siRNA sense strand
aaagagaugucauuggcaa

SEQ ID NO: 2516167 - RNA, 19 nt, Homo sapiens
  misc_RNA (1)...(19): siRNA sense strand
aaaagaagaacucgcaaaa

SEQ ID NO: 2516168 - RNA, 19 nt, Homo sapiens
  misc_RNA (1)...(19): siRNA sense strand
guaugaaucaggaacucaa

SEQ ID NO: 2516169 - RNA, 19 nt, Homo sapiens
  misc_RNA (1)...(19): siRNA sense strand
gcaaaagcucagagggaac

SEQ ID NO: 2516170 - RNA, 19 nt, Homo sapiens
  misc_RNA (1)...(19): siRNA sense strand
agcagggacucgugaaaca

SEQ ID NO: 2516171 - RNA, 19 nt, Homo sapiens
  misc_RNA (1)...(19): siRNA sense strand
aggcaaaugcauuagaugu

SEQ ID NO: 2516172 - RNA, 19 nt, Homo sapiens
  misc_RNA (1)...(19): siRNA sense strand
agaaaagggcuaugaacga

SEQ ID NO: 2516173 - RNA, 19 nt, Homo sapiens
  misc_RNA (1)...(19): siRNA sense strand
gggcuaugaacgauuaaaa

SEQ ID NO: 2516174 - RNA, 19 nt, Homo sapiens
  misc_RNA (1)...(19): siRNA sense strand
ucgcaaaagcucagaggga

SEQ ID NO: 2516175 - RNA, 19 nt, Homo sapiens
  misc_RNA (1)...(19): siRNA sense strand
ggaagaacucacagcuagu

SEQ ID NO: 2516176 - RNA, 19 nt, Homo sapiens
  misc_RNA (1)...(19): siRNA sense strand
uaaaagaagaacucgcaaa

SEQ ID NO: 2516177 - RNA, 19 nt, Homo sapiens
  misc_RNA (1)...(19): siRNA sense strand
cauaaaauggugagagaag

SEQ ID NO: 2516178 - RNA, 19 nt, Homo sapiens
  misc_RNA (1)...(19): siRNA sense strand
caagcaggcaacagcagaa

SEQ ID NO: 2516179 - RNA, 19 nt, Homo sapiens
  misc_RNA (1)...(19): siRNA sense strand
guuuuggaaguuagagaaa

SEQ ID NO: 2516180 - RNA, 19 nt, Homo sapiens
  misc_RNA (1)...(19): siRNA sense strand
ggggcauacaagaaauaaa

SEQ ID NO: 2516181 - RNA, 19 nt, Homo sapiens
  misc_RNA (1)...(19): siRNA sense strand
gcaaauaucaagcaggcaa

SEQ ID NO: 2516182 - RNA, 19 nt, Homo sapiens
  misc_RNA (1)...(19): siRNA sense strand
acuauaaugcagagagaga

SEQ ID NO: 2516183 - RNA, 19 nt, Homo sapiens
  misc_RNA (1)...(19): siRNA sense strand
acguuuaaauugugcggaa

SEQ ID NO: 2516184 - RNA, 19 nt, Homo sapiens
  misc_RNA (1)...(19): siRNA sense strand
uaaaagaagcacaaggaaa

SEQ ID NO: 2516185 - RNA, 19 nt, Homo sapiens
  misc_RNA (1)...(19): siRNA sense strand
agaucaacuuggacaggaa

SEQ ID NO: 2516186 - RNA, 19 nt, Homo sapiens
  misc_RNA (1)...(19): siRNA sense strand
cguuuaaauugugcggaaa

SEQ ID NO: 2516187 - RNA, 19 nt, Homo sapiens
  misc_RNA (1)...(19): siRNA sense strand
guuuaaauugugcggaaau

SEQ ID NO: 2516188 - RNA, 19 nt, Homo sapiens
  misc_RNA (1)...(19): siRNA sense strand
aagagaugucauuggcaaa

SEQ ID NO: 2516189 - RNA, 19 nt, Homo sapiens
  misc_RNA (1)...(19): siRNA sense strand
aaagagaugucauuggcaa

SEQ ID NO: 2516190 - RNA, 19 nt, Homo sapiens
  misc_RNA (1)...(19): siRNA sense strand
aaaagaagaacucgcaaaa

SEQ ID NO: 2516191 - RNA, 19 nt, Homo sapiens
  misc_RNA (1)...(19): siRNA sense strand
guaugaaucaggaacucaa

SEQ ID NO: 2516192 - RNA, 19 nt, Homo sapiens
  misc_RNA (1)...(19): siRNA sense strand
gcaaaagcucagagggaac

SEQ ID NO: 2516193 - RNA, 19 nt, Homo sapiens
  misc_RNA (1)...(19): siRNA sense strand
agcagggacucgugaaaca

SEQ ID NO: 2516194 - RNA, 19 nt, Homo sapiens
  misc_RNA (1)...(19): siRNA sense strand
aggcaaaugcauuagaugu

SEQ ID NO: 2516195 - RNA, 19 nt, Homo sapiens
  misc_RNA (1)...(19): siRNA sense strand
agaaaagggcuaugaacga

SEQ ID NO: 2516196 - RNA, 19 nt, Homo sapiens
  misc_RNA (1)...(19): siRNA sense strand
gggcuaugaacgauuaaaa

SEQ ID NO: 2516197 - RNA, 19 nt, Homo sapiens
  misc_RNA (1)...(19): siRNA sense strand
ucgcaaaagcucagaggga

SEQ ID NO: 2516198 - RNA, 19 nt, Homo sapiens
  misc_RNA (1)...(19): siRNA sense strand
ggaagaacucacagcuagu

SEQ ID NO: 2516199 - RNA, 19 nt, Homo sapiens
  misc_RNA (1)...(19): siRNA sense strand
uaaaagaagaacucgcaaa

SEQ ID NO: 2516200 - RNA, 19 nt, Homo sapiens
  misc_RNA (1)...(19): siRNA sense strand
cauaaaauggugagagaag

SEQ ID NO: 2516201 - RNA, 19 nt, Homo sapiens
  misc_RNA (1)...(19): siRNA sense strand
uaucuuaugaugaggcuuu

SEQ ID NO: 2516202 - RNA, 19 nt, Homo sapiens
  misc_RNA (1)...(19): siRNA sense strand
caagcaggcaacagcagaa

SEQ ID NO: 2516203 - RNA, 19 nt, Homo sapiens
  misc_RNA (1)...(19): siRNA sense strand
guuuuggaaguuagagaaa

SEQ ID NO: 2516204 - RNA, 19 nt, Homo sapiens
  misc_RNA (1)...(19): siRNA sense strand
ggggcauacaagaaauaaa

SEQ ID NO: 2516205 - RNA, 19 nt, Homo sapiens
  misc_RNA (1)...(19): siRNA sense strand
gcaaauaucaagcaggcaa

SEQ ID NO: 2516206 - RNA, 19 nt, Homo sapiens
  misc_RNA (1)...(19): siRNA sense strand
acuauaaugcagagagaga

SEQ ID NO: 2516207 - RNA, 19 nt, Homo sapiens
  misc_RNA (1)...(19): siRNA sense strand
acguuuaaauugugcggaa

SEQ ID NO: 2516208 - RNA, 19 nt, Homo sapiens
  misc_RNA (1)...(19): siRNA sense strand
uaaaagaagcacaaggaaa

SEQ ID NO: 2516209 - RNA, 19 nt, Homo sapiens
  misc_RNA (1)...(19): siRNA sense strand
agaucaacuuggacaggaa

SEQ ID NO: 2516210 - RNA, 19 nt, Homo sapiens
  misc_RNA (1)...(19): siRNA sense strand
cguuuaaauugugcggaaa

SEQ ID NO: 2516211 - RNA, 19 nt, Homo sapiens
  misc_RNA (1)...(19): siRNA sense strand
guuuaaauugugcggaaau

SEQ ID NO: 2516212 - RNA, 19 nt, Homo sapiens
  misc_RNA (1)...(19): siRNA sense strand
aaaagaagaacucgcaaaa

SEQ ID NO: 2516213 - RNA, 19 nt, Homo sapiens
  misc_RNA (1)...(19): siRNA sense strand
guaugaaucaggaacucaa

SEQ ID NO: 2516214 - RNA, 19 nt, Homo sapiens
  misc_RNA (1)...(19): siRNA sense strand
gcaaaagcucagagggaac

SEQ ID NO: 2516215 - RNA, 19 nt, Homo sapiens
  misc_RNA (1)...(19): siRNA sense strand
aggcaaaugcauuagaugu

SEQ ID NO: 2516216 - RNA, 19 nt, Homo sapiens
  misc_RNA (1)...(19): siRNA sense strand
agaaaagggcuaugaacga

SEQ ID NO: 2516217 - RNA, 19 nt, Homo sapiens
  misc_RNA (1)...(19): siRNA sense strand
gggcuaugaacgauuaaaa

SEQ ID NO: 2516218 - RNA, 19 nt, Homo sapiens
  misc_RNA (1)...(19): siRNA sense strand
ucgcaaaagcucagaggga

SEQ ID NO: 2516219 - RNA, 19 nt, Homo sapiens
  misc_RNA (1)...(19): siRNA sense strand
ggaagaacucacagcuagu

SEQ ID NO: 2516220 - RNA, 19 nt, Homo sapiens
  misc_RNA (1)...(19): siRNA sense strand
uaaaagaagaacucgcaaa

SEQ ID NO: 2516221 - RNA, 19 nt, Homo sapiens
  misc_RNA (1)...(19): siRNA sense strand
cauaaaauggugagagaag

SEQ ID NO: 2516222 - RNA, 19 nt, Homo sapiens
  misc_RNA (1)...(19): siRNA sense strand
caagcaggcaacagcagaa

SEQ ID NO: 2516223 - RNA, 19 nt, Homo sapiens
  misc_RNA (1)...(19): siRNA sense strand
guuuuggaaguuagagaaa

SEQ ID NO: 2516224 - RNA, 19 nt, Homo sapiens
  misc_RNA (1)...(19): siRNA sense strand
ggggcauacaagaaauaaa

SEQ ID NO: 2516225 - RNA, 19 nt, Homo sapiens
  misc_RNA (1)...(19): siRNA sense strand
gcaaauaucaagcaggcaa

SEQ ID NO: 2516226 - RNA, 19 nt, Homo sapiens
  misc_RNA (1)...(19): siRNA sense strand
acuauaaugcagagagaga

SEQ ID NO: 2516227 - RNA, 19 nt, Homo sapiens
  misc_RNA (1)...(19): siRNA sense strand
acguuuaaauugugcggaa

SEQ ID NO: 2516228 - RNA, 19 nt, Homo sapiens
  misc_RNA (1)...(19): siRNA sense strand
uaaaagaagcacaaggaaa

SEQ ID NO: 2516229 - RNA, 19 nt, Homo sapiens
  misc_RNA (1)...(19): siRNA sense strand
agaucaacuuggacaggaa

SEQ ID NO: 2516230 - RNA, 19 nt, Homo sapiens
  misc_RNA (1)...(19): siRNA sense strand
cguuuaaauugugcggaaa

SEQ ID NO: 2516231 - RNA, 19 nt, Homo sapiens
  misc_RNA (1)...(19): siRNA sense strand
guuuaaauugugcggaaau

SEQ ID NO: 2516232 - RNA, 19 nt, Homo sapiens
  misc_RNA (1)...(19): siRNA sense strand
aaaagaagaacucgcaaaa

SEQ ID NO: 2516233 - RNA, 19 nt, Homo sapiens
  misc_RNA (1)...(19): siRNA sense strand
guaugaaucaggaacucaa

SEQ ID NO: 2516234 - RNA, 19 nt, Homo sapiens
  misc_RNA (1)...(19): siRNA sense strand
gcaaaagcucagagggaac

SEQ ID NO: 2516235 - RNA, 19 nt, Homo sapiens
  misc_RNA (1)...(19): siRNA sense strand
aggcaaaugcauuagaugu

SEQ ID NO: 2516236 - RNA, 19 nt, Homo sapiens
  misc_RNA (1)...(19): siRNA sense strand
agaaaagggcuaugaacga

SEQ ID NO: 2516237 - RNA, 19 nt, Homo sapiens
  misc_RNA (1)...(19): siRNA sense strand
gggcuaugaacgauuaaaa

SEQ ID NO: 2516238 - RNA, 19 nt, Homo sapiens
  misc_RNA (1)...(19): siRNA sense strand
ucgcaaaagcucagaggga

SEQ ID NO: 2516239 - RNA, 19 nt, Homo sapiens
  misc_RNA (1)...(19): siRNA sense strand
ggaagaacucacagcuagu

SEQ ID NO: 2516240 - RNA, 19 nt, Homo sapiens
  misc_RNA (1)...(19): siRNA sense strand
uaaaagaagaacucgcaaa

SEQ ID NO: 2516241 - RNA, 19 nt, Homo sapiens
  misc_RNA (1)...(19): siRNA sense strand
cauaaaauggugagagaag

SEQ ID NO: 2516242 - RNA, 19 nt, Homo sapiens
  misc_RNA (1)...(19): siRNA sense strand
uaucuuaugaugaggcuuu

SEQ ID NO: 2516243 - RNA, 19 nt, Homo sapiens
  misc_RNA (1)...(19): siRNA sense strand
caagcaggcaacagcagaa

SEQ ID NO: 2516244 - RNA, 19 nt, Homo sapiens
  misc_RNA (1)...(19): siRNA sense strand
guuuuggaaguuagagaaa

SEQ ID NO: 2516245 - RNA, 19 nt, Homo sapiens
  misc_RNA (1)...(19): siRNA sense strand
ggggcauacaagaaauaaa

SEQ ID NO: 2516246 - RNA, 19 nt, Homo sapiens
  misc_RNA (1)...(19): siRNA sense strand
gcaaauaucaagcaggcaa

SEQ ID NO: 2516247 - RNA, 19 nt, Homo sapiens
  misc_RNA (1)...(19): siRNA sense strand
acuauaaugcagagagaga

SEQ ID NO: 2516248 - RNA, 19 nt, Homo sapiens
  misc_RNA (1)...(19): siRNA sense strand
acguuuaaauugugcggaa

SEQ ID NO: 2516249 - RNA, 19 nt, Homo sapiens
  misc_RNA (1)...(19): siRNA sense strand
uaaaagaagcacaaggaaa

SEQ ID NO: 2516250 - RNA, 19 nt, Homo sapiens
  misc_RNA (1)...(19): siRNA sense strand
agaucaacuuggacaggaa

SEQ ID NO: 2516251 - RNA, 19 nt, Homo sapiens
  misc_RNA (1)...(19): siRNA sense strand
cguuuaaauugugcggaaa

SEQ ID NO: 2516252 - RNA, 19 nt, Homo sapiens
  misc_RNA (1)...(19): siRNA sense strand
guuuaaauugugcggaaau

SEQ ID NO: 2516253 - RNA, 19 nt, Homo sapiens
  misc_RNA (1)...(19): siRNA sense strand
aaaagaagaacucgcaaaa

SEQ ID NO: 2516254 - RNA, 19 nt, Homo sapiens
  misc_RNA (1)...(19): siRNA sense strand
guaugaaucaggaacucaa

SEQ ID NO: 2516255 - RNA, 19 nt, Homo sapiens
  misc_RNA (1)...(19): siRNA sense strand
gcaaaagcucagagggaac

SEQ ID NO: 2516256 - RNA, 19 nt, Homo sapiens
  misc_RNA (1)...(19): siRNA sense strand
aggcaaaugcauuagaugu

SEQ ID NO: 2516257 - RNA, 19 nt, Homo sapiens
  misc_RNA (1)...(19): siRNA sense strand
agaaaagggcuaugaacga

SEQ ID NO: 2516258 - RNA, 19 nt, Homo sapiens
  misc_RNA (1)...(19): siRNA sense strand
gggcuaugaacgauuaaaa

SEQ ID NO: 2516259 - RNA, 19 nt, Homo sapiens
  misc_RNA (1)...(19): siRNA sense strand
ucgcaaaagcucagaggga

SEQ ID NO: 2516260 - RNA, 19 nt, Homo sapiens
  misc_RNA (1)...(19): siRNA sense strand
ggaagaacucacagcuagu

SEQ ID NO: 2516261 - RNA, 19 nt, Homo sapiens
  misc_RNA (1)...(19): siRNA sense strand
uaaaagaagaacucgcaaa

SEQ ID NO: 2516262 - RNA, 19 nt, Homo sapiens
  misc_RNA (1)...(19): siRNA sense strand
cauaaaauggugagagaag

SEQ ID NO: 2516263 - RNA, 19 nt, Homo sapiens
  misc_RNA (1)...(19): siRNA sense strand
caagcaggcaacagcagaa

SEQ ID NO: 2516264 - RNA, 19 nt, Homo sapiens
  misc_RNA (1)...(19): siRNA sense strand
guuuuggaaguuagagaaa

SEQ ID NO: 2516265 - RNA, 19 nt, Homo sapiens
  misc_RNA (1)...(19): siRNA sense strand
ggggcauacaagaaauaaa

SEQ ID NO: 2516266 - RNA, 19 nt, Homo sapiens
  misc_RNA (1)...(19): siRNA sense strand
gcaaauaucaagcaggcaa

SEQ ID NO: 2516267 - RNA, 19 nt, Homo sapiens
  misc_RNA (1)...(19): siRNA sense strand
acuauaaugcagagagaga

SEQ ID NO: 2516268 - RNA, 19 nt, Homo sapiens
  misc_RNA (1)...(19): siRNA sense strand
acguuuaaauugugcggaa

SEQ ID NO: 2516269 - RNA, 19 nt, Homo sapiens
  misc_RNA (1)...(19): siRNA sense strand
uaaaagaagcacaaggaaa

SEQ ID NO: 2516270 - RNA, 19 nt, Homo sapiens
  misc_RNA (1)...(19): siRNA sense strand
agaucaacuuggacaggaa

SEQ ID NO: 2516271 - RNA, 19 nt, Homo sapiens
  misc_RNA (1)...(19): siRNA sense strand
cguuuaaauugugcggaaa

SEQ ID NO: 2516272 - RNA, 19 nt, Homo sapiens
  misc_RNA (1)...(19): siRNA sense strand
guuuaaauugugcggaaau

SEQ ID NO: 2516273 - RNA, 19 nt, Homo sapiens
  misc_RNA (1)...(19): siRNA sense strand
aaaagaagaacucgcaaaa

SEQ ID NO: 2516274 - RNA, 19 nt, Homo sapiens
  misc_RNA (1)...(19): siRNA sense strand
guaugaaucaggaacucaa

SEQ ID NO: 2516275 - RNA, 19 nt, Homo sapiens
  misc_RNA (1)...(19): siRNA sense strand
gcaaaagcucagagggaac

SEQ ID NO: 2516276 - RNA, 19 nt, Homo sapiens
  misc_RNA (1)...(19): siRNA sense strand
aggcaaaugcauuagaugu

SEQ ID NO: 2516277 - RNA, 19 nt, Homo sapiens
  misc_RNA (1)...(19): siRNA sense strand
agaaaagggcuaugaacga

SEQ ID NO: 2516278 - RNA, 19 nt, Homo sapiens
  misc_RNA (1)...(19): siRNA sense strand
gggcuaugaacgauuaaaa

SEQ ID NO: 2516279 - RNA, 19 nt, Homo sapiens
  misc_RNA (1)...(19): siRNA sense strand
ucgcaaaagcucagaggga

SEQ ID NO: 2516280 - RNA, 19 nt, Homo sapiens
  misc_RNA (1)...(19): siRNA sense strand
ggaagaacucacagcuagu

SEQ ID NO: 2516281 - RNA, 19 nt, Homo sapiens
  misc_RNA (1)...(19): siRNA sense strand
uaaaagaagaacucgcaaa

SEQ ID NO: 2516282 - RNA, 19 nt, Homo sapiens
  misc_RNA (1)...(19): siRNA sense strand
cauaaaauggugagagaag

SEQ ID NO: 2516283 - RNA, 19 nt, Homo sapiens
  misc_RNA (1)...(19): siRNA sense strand
uaucuuaugaugaggcuuu

SEQ ID NO: 2516284 - RNA, 19 nt, Homo sapiens
  misc_RNA (1)...(19): siRNA sense strand
caagcaggcaacagcagaa

SEQ ID NO: 2516285 - RNA, 19 nt, Homo sapiens
  misc_RNA (1)...(19): siRNA sense strand
guuuuggaaguuagagaaa

SEQ ID NO: 2516286 - RNA, 19 nt, Homo sapiens
  misc_RNA (1)...(19): siRNA sense strand
ggggcauacaagaaauaaa

SEQ ID NO: 2516287 - RNA, 19 nt, Homo sapiens
  misc_RNA (1)...(19): siRNA sense strand
ccccacagcuccugagaau

SEQ ID NO: 2516288 - RNA, 19 nt, Homo sapiens
  misc_RNA (1)...(19): siRNA sense strand
uggaagaauaugugaauca

SEQ ID NO: 2516289 - RNA, 19 nt, Homo sapiens
  misc_RNA (1)...(19): siRNA sense strand
ugguggaguuacagacaaa

SEQ ID NO: 2516290 - RNA, 19 nt, Homo sapiens
  misc_RNA (1)...(19): siRNA sense strand
agauagaccucucagggaa

SEQ ID NO: 2516291 - RNA, 19 nt, Homo sapiens
  misc_RNA (1)...(19): siRNA sense strand
gcuccagaccugcaggaaa

SEQ ID NO: 2516292 - RNA, 19 nt, Homo sapiens
  misc_RNA (1)...(19): siRNA sense strand
gagccaaaucccuggguca

SEQ ID NO: 2516293 - RNA, 19 nt, Homo sapiens
  misc_RNA (1)...(19): siRNA sense strand
ggacaagacaagcagggau

SEQ ID NO: 2516294 - RNA, 19 nt, Homo sapiens
  misc_RNA (1)...(19): siRNA sense strand
cuggagacagggaagguua

SEQ ID NO: 2516295 - RNA, 19 nt, Homo sapiens
  misc_RNA (1)...(19): siRNA sense strand
gaugaaggcugucggcuga

SEQ ID NO: 2516296 - RNA, 19 nt, Homo sapiens
  misc_RNA (1)...(19): siRNA sense strand
gagcuggacuugagccaca

SEQ ID NO: 2516297 - RNA, 19 nt, Homo sapiens
  misc_RNA (1)...(19): siRNA sense strand
agagaguggaccuggagaa

SEQ ID NO: 2516298 - RNA, 19 nt, Homo sapiens
  misc_RNA (1)...(19): siRNA sense strand
gggguuagcaggaaguaaa

SEQ ID NO: 2516299 - RNA, 19 nt, Homo sapiens
  misc_RNA (1)...(19): siRNA sense strand
cagccaaguucuuaggguu

SEQ ID NO: 2516300 - RNA, 19 nt, Homo sapiens
  misc_RNA (1)...(19): siRNA sense strand
gauccaacgaggaggagga

SEQ ID NO: 2516301 - RNA, 19 nt, Homo sapiens
  misc_RNA (1)...(19): siRNA sense strand
agaagugggcagagggcca

SEQ ID NO: 2516302 - RNA, 19 nt, Homo sapiens
  misc_RNA (1)...(19): siRNA sense strand
ggguggaagaauaugugaa

SEQ ID NO: 2516303 - RNA, 19 nt, Homo sapiens
  misc_RNA (1)...(19): siRNA sense strand
cugaagacauuucggcuga

SEQ ID NO: 2516304 - RNA, 19 nt, Homo sapiens
  misc_RNA (1)...(19): siRNA sense strand
ggccaaagguuguagagcu

SEQ ID NO: 2516305 - RNA, 19 nt, Homo sapiens
  misc_RNA (1)...(19): siRNA sense strand
gcugaucuuugaugggcua

SEQ ID NO: 2516306 - RNA, 19 nt, Homo sapiens
  misc_RNA (1)...(19): siRNA sense strand
ggcugaacgccaagaugaa

SEQ ID NO: 2516307 - RNA, 19 nt, Homo sapiens
  misc_RNA (1)...(19): siRNA sense strand
acaucagccugcagcacaa

SEQ ID NO: 2516308 - RNA, 19 nt, Homo sapiens
  misc_RNA (1)...(19): siRNA sense strand
cugccagagcucaggaaga

SEQ ID NO: 2516309 - RNA, 19 nt, Homo sapiens
  misc_RNA (1)...(19): siRNA sense strand
ccaacaugacucagcucua

SEQ ID NO: 2516310 - RNA, 19 nt, Homo sapiens
  misc_RNA (1)...(19): siRNA sense strand
agguuaucuucuaugcaaa

SEQ ID NO: 2516311 - RNA, 19 nt, Homo sapiens
  misc_RNA (1)...(19): siRNA sense strand
gggaaaagccaaccugaau

SEQ ID NO: 2516312 - RNA, 19 nt, Homo sapiens
  misc_RNA (1)...(19): siRNA sense strand
acaaagagcuccagaccug

SEQ ID NO: 2516313 - RNA, 19 nt, Homo sapiens
  misc_RNA (1)...(19): siRNA sense strand
gccuagaggagcuggacuu

SEQ ID NO: 2516314 - RNA, 19 nt, Homo sapiens
  misc_RNA (1)...(19): siRNA sense strand
gggacgucaagguggaaga

SEQ ID NO: 2516315 - RNA, 19 nt, Homo sapiens
  misc_RNA (1)...(19): siRNA sense strand
gcuggaagaugaaggcugu

SEQ ID NO: 2516316 - RNA, 19 nt, Homo sapiens
  misc_RNA (1)...(19): siRNA sense strand
cagggaaccagcuggaaga

SEQ ID NO: 2516317 - RNA, 19 nt, Homo sapiens
  misc_RNA (1)...(19): siRNA sense strand
cuguagugcagguguugaa

SEQ ID NO: 2516318 - RNA, 19 nt, Homo sapiens
  misc_RNA (1)...(19): siRNA sense strand
gauagaccucucagggaau

SEQ ID NO: 2516319 - RNA, 19 nt, Homo sapiens
  misc_RNA (1)...(19): siRNA sense strand
cgccggaagcagugcaaga

SEQ ID NO: 2516320 - RNA, 19 nt, Homo sapiens
  misc_RNA (1)...(19): siRNA sense strand
agcuagaguuggccaagaa

SEQ ID NO: 2516321 - RNA, 19 nt, Homo sapiens
  misc_RNA (1)...(19): siRNA sense strand
uugcuuacucacagacuaa

SEQ ID NO: 2516322 - RNA, 19 nt, Homo sapiens
  misc_RNA (1)...(19): siRNA sense strand
agaucagcuuggcggaaaa

SEQ ID NO: 2516323 - RNA, 19 nt, Homo sapiens
  misc_RNA (1)...(19): siRNA sense strand
gccaaagguuguagagcug

SEQ ID NO: 2516324 - RNA, 19 nt, Homo sapiens
  misc_RNA (1)...(19): siRNA sense strand
agacaacugcagagcuaca

SEQ ID NO: 2516325 - RNA, 19 nt, Homo sapiens
  misc_RNA (1)...(19): siRNA sense strand
ccaggagcacguagaguca

SEQ ID NO: 2516326 - RNA, 19 nt, Homo sapiens
  misc_RNA (1)...(19): siRNA sense strand
gggaauagcaucagcucag

SEQ ID NO: 2516327 - RNA, 19 nt, Homo sapiens
  misc_RNA (1)...(19): siRNA sense strand
cugcaauuguccugugagu

SEQ ID NO: 2516328 - RNA, 19 nt, Homo sapiens
  misc_RNA (1)...(19): siRNA sense strand
gcugggagcugaggggaaa

SEQ ID NO: 2516329 - RNA, 19 nt, Homo sapiens
  misc_RNA (1)...(19): siRNA sense strand
cagcgcuacaggagccaaa

SEQ ID NO: 2516330 - RNA, 19 nt, Homo sapiens
  misc_RNA (1)...(19): siRNA sense strand
ccacagagacaacugcaga

SEQ ID NO: 2516331 - RNA, 19 nt, Homo sapiens
  misc_RNA (1)...(19): siRNA sense strand
agcagaagcuugacgcuca

SEQ ID NO: 2516332 - RNA, 19 nt, Homo sapiens
  misc_RNA (1)...(19): siRNA sense strand
ugaccgugcuuuuggggaa

SEQ ID NO: 2516333 - RNA, 19 nt, Homo sapiens
  misc_RNA (1)...(19): siRNA sense strand
aaagugacggccagaggaa

SEQ ID NO: 2516334 - RNA, 19 nt, Homo sapiens
  misc_RNA (1)...(19): siRNA sense strand
ggggaaaagccaaccugaa

SEQ ID NO: 2516335 - RNA, 19 nt, Homo sapiens
  misc_RNA (1)...(19): siRNA sense strand
ggaaggcuggcaugggcaa

SEQ ID NO: 2516336 - RNA, 19 nt, Homo sapiens
  misc_RNA (1)...(19): siRNA sense strand
gggcccugguggaguuaca

SEQ ID NO: 2516337 - RNA, 19 nt, Homo sapiens
  misc_RNA (1)...(19): siRNA sense strand
cugcaaggcucugggagga

SEQ ID NO: 2516338 - RNA, 19 nt, Homo sapiens
  misc_RNA (1)...(19): siRNA sense strand
caaaggaaccagugggucu

SEQ ID NO: 2516339 - RNA, 19 nt, Homo sapiens
  misc_RNA (1)...(19): siRNA sense strand
caauacucgaauagagaau

SEQ ID NO: 2516340 - RNA, 19 nt, Homo sapiens
  misc_RNA (1)...(19): siRNA sense strand
cugcacuggcaaagcauaa

SEQ ID NO: 2516341 - RNA, 19 nt, Homo sapiens
  misc_RNA (1)...(19): siRNA sense strand
aguuaaaggcaugcacaaa

SEQ ID NO: 2516342 - RNA, 19 nt, Homo sapiens
  misc_RNA (1)...(19): siRNA sense strand
uggaugacuccgaagaaau

SEQ ID NO: 2516343 - RNA, 19 nt, Homo sapiens
  misc_RNA (1)...(19): siRNA sense strand
acggagaggucaaaggaac

SEQ ID NO: 2516344 - RNA, 19 nt, Homo sapiens
  misc_RNA (1)...(19): siRNA sense strand
uaguuaaaggcaugcacaa

SEQ ID NO: 2516345 - RNA, 19 nt, Homo sapiens
  misc_RNA (1)...(19): siRNA sense strand
ccuuauggauacagcugau

SEQ ID NO: 2516346 - RNA, 19 nt, Homo sapiens
  misc_RNA (1)...(19): siRNA sense strand
uggaaguaccucagccaga

SEQ ID NO: 2516347 - RNA, 19 nt, Homo sapiens
  misc_RNA (1)...(19): siRNA sense strand
agcauaaagaacagaagau

SEQ ID NO: 2516348 - RNA, 19 nt, Homo sapiens
  misc_RNA (1)...(19): siRNA sense strand
cagaaagaacuuagaaacc

SEQ ID NO: 2516349 - RNA, 19 nt, Homo sapiens
  misc_RNA (1)...(19): siRNA sense strand
cugggaagacacaggaaga

SEQ ID NO: 2516350 - RNA, 19 nt, Homo sapiens
  misc_RNA (1)...(19): siRNA sense strand
cggagaauguuguugccuu

SEQ ID NO: 2516351 - RNA, 19 nt, Homo sapiens
  misc_RNA (1)...(19): siRNA sense strand
acggagcuacugugagaaa

SEQ ID NO: 2516352 - RNA, 19 nt, Homo sapiens
  misc_RNA (1)...(19): siRNA sense strand
gguagcaauagcaggcaau

SEQ ID NO: 2516353 - RNA, 19 nt, Homo sapiens
  misc_RNA (1)...(19): siRNA sense strand
guucuaggaucuucgguga

SEQ ID NO: 2516354 - RNA, 19 nt, Homo sapiens
  misc_RNA (1)...(19): siRNA sense strand
ucuucuggcuaaagcacaa

SEQ ID NO: 2516355 - RNA, 19 nt, Homo sapiens
  misc_RNA (1)...(19): siRNA sense strand
ggagaauguuguugccuug

SEQ ID NO: 2516356 - RNA, 19 nt, Homo sapiens
  misc_RNA (1)...(19): siRNA sense strand
uggaaugucacuggcgaua

SEQ ID NO: 2516357 - RNA, 19 nt, Homo sapiens
  misc_RNA (1)...(19): siRNA sense strand
auagaugagcaaaggauaa

SEQ ID NO: 2516358 - RNA, 19 nt, Homo sapiens
  misc_RNA (1)...(19): siRNA sense strand
ggaugaaauaagacaguca

SEQ ID NO: 2516359 - RNA, 19 nt, Homo sapiens
  misc_RNA (1)...(19): siRNA sense strand
agucacuaguucugauaaa

SEQ ID NO: 2516360 - RNA, 19 nt, Homo sapiens
  misc_RNA (1)...(19): siRNA sense strand
ugagcaaaggauaaagaaa

SEQ ID NO: 2516361 - RNA, 19 nt, Homo sapiens
  misc_RNA (1)...(19): siRNA sense strand
agucuaggaaauaggaauu

SEQ ID NO: 2516362 - RNA, 19 nt, Homo sapiens
  misc_RNA (1)...(19): siRNA sense strand
cagagagaguauaacaaaa

SEQ ID NO: 2516363 - RNA, 19 nt, Homo sapiens
  misc_RNA (1)...(19): siRNA sense strand
cuguaauuauggaugaaga

SEQ ID NO: 2516364 - RNA, 19 nt, Homo sapiens
  misc_RNA (1)...(19): siRNA sense strand
aagaaguaucagagagagu

SEQ ID NO: 2516365 - RNA, 19 nt, Homo sapiens
  misc_RNA (1)...(19): siRNA sense strand
auucagaaauauccagcaa

SEQ ID NO: 2516366 - RNA, 19 nt, Homo sapiens
  misc_RNA (1)...(19): siRNA sense strand
cagucuaggaaauaggaau

SEQ ID NO: 2516367 - RNA, 19 nt, Homo sapiens
  misc_RNA (1)...(19): siRNA sense strand
aguaucagagagaguauaa

SEQ ID NO: 2516368 - RNA, 19 nt, Homo sapiens
  misc_RNA (1)...(19): siRNA sense strand
ggaugaagauuguagaagc

SEQ ID NO: 2516369 - RNA, 19 nt, Homo sapiens
  misc_RNA (1)...(19): siRNA sense strand
gcucugaaagaaaagaaaa

SEQ ID NO: 2516370 - RNA, 19 nt, Homo sapiens
  misc_RNA (1)...(19): siRNA sense strand
cugacagaugcauuagaaa

SEQ ID NO: 2516371 - RNA, 19 nt, Homo sapiens
  misc_RNA (1)...(19): siRNA sense strand
acauagaugagcaaaggau

SEQ ID NO: 2516372 - RNA, 19 nt, Homo sapiens
  misc_RNA (1)...(19): siRNA sense strand
uguucugaguuuaagguga

SEQ ID NO: 2516373 - RNA, 19 nt, Homo sapiens
  misc_RNA (1)...(19): siRNA sense strand
augauaaagcucagggaaa

SEQ ID NO: 2516374 - RNA, 19 nt, Homo sapiens
  misc_RNA (1)...(19): siRNA sense strand
ccauagaggaagacagaga

SEQ ID NO: 2516375 - RNA, 19 nt, Homo sapiens
  misc_RNA (1)...(19): siRNA sense strand
agagaauguuagaagagaa

SEQ ID NO: 2516376 - RNA, 19 nt, Homo sapiens
  misc_RNA (1)...(19): siRNA sense strand
uggugaagguggaaggaga

SEQ ID NO: 2516377 - RNA, 19 nt, Homo sapiens
  misc_RNA (1)...(19): siRNA sense strand
uguuagaagagaaggaaga

SEQ ID NO: 2516378 - RNA, 19 nt, Homo sapiens
  misc_RNA (1)...(19): siRNA sense strand
cuuaacagaaggagagaga

SEQ ID NO: 2516379 - RNA, 19 nt, Homo sapiens
  misc_RNA (1)...(19): siRNA sense strand
gaacaaguuacuaaggcua

SEQ ID NO: 2516380 - RNA, 19 nt, Homo sapiens
  misc_RNA (1)...(19): siRNA sense strand
gguuaaaaggcuuggaaca

SEQ ID NO: 2516381 - RNA, 19 nt, Homo sapiens
  misc_RNA (1)...(19): siRNA sense strand
gaggcaacacacugggaua

SEQ ID NO: 2516382 - RNA, 19 nt, Homo sapiens
  misc_RNA (1)...(19): siRNA sense strand
uguuaagaauccuguacaa

SEQ ID NO: 2516383 - RNA, 19 nt, Homo sapiens
  misc_RNA (1)...(19): siRNA sense strand
cccacaaacugaaaggaau

SEQ ID NO: 2516384 - RNA, 19 nt, Homo sapiens
  misc_RNA (1)...(19): siRNA sense strand
ugaagguacaggagcuaaa

SEQ ID NO: 2516385 - RNA, 19 nt, Homo sapiens
  misc_RNA (1)...(19): siRNA sense strand
acagaaggagagagaaaca

SEQ ID NO: 2516386 - RNA, 19 nt, Homo sapiens
  misc_RNA (1)...(19): siRNA sense strand
ggagagacauugaagguac

SEQ ID NO: 2516387 - RNA, 19 nt, Homo sapiens
  misc_RNA (1)...(19): siRNA sense strand
cuccaggaaucaugauaaa

SEQ ID NO: 2516388 - RNA, 19 nt, Homo sapiens
  misc_RNA (1)...(19): siRNA sense strand
acugaaaggaaucgagaca

SEQ ID NO: 2516389 - RNA, 19 nt, Homo sapiens
  misc_RNA (1)...(19): siRNA sense strand
uggaaagacuguggaaaca

SEQ ID NO: 2516390 - RNA, 19 nt, Homo sapiens
  misc_RNA (1)...(19): siRNA sense strand
gaccgugagcagagguuaa

SEQ ID NO: 2516391 - RNA, 19 nt, Homo sapiens
  misc_RNA (1)...(19): siRNA sense strand
ggccgaaagacuuggugaa

SEQ ID NO: 2516392 - RNA, 19 nt, Homo sapiens
  misc_RNA (1)...(19): siRNA sense strand
cgcaauaugacuaugacaa

SEQ ID NO: 2516393 - RNA, 19 nt, Homo sapiens
  misc_RNA (1)...(19): siRNA sense strand
cuggaaagacuguggaaac

SEQ ID NO: 2516394 - RNA, 19 nt, Homo sapiens
  misc_RNA (1)...(19): siRNA sense strand
ccacaaacugaaaggaauc

SEQ ID NO: 2516395 - RNA, 19 nt, Homo sapiens
  misc_RNA (1)...(19): siRNA sense strand
gagaaugaugacagugaca

SEQ ID NO: 2516396 - RNA, 19 nt, Homo sapiens
  misc_RNA (1)...(19): siRNA sense strand
cagaaauuaccaaagaaga

SEQ ID NO: 2516397 - RNA, 19 nt, Homo sapiens
  misc_RNA (1)...(19): siRNA sense strand
guuaaaaggcuuggaacaa

SEQ ID NO: 2516398 - RNA, 19 nt, Homo sapiens
  misc_RNA (1)...(19): siRNA sense strand
gaauguuagaagagaagga

SEQ ID NO: 2516399 - RNA, 19 nt, Homo sapiens
  misc_RNA (1)...(19): siRNA sense strand
gauaaagcucagggaaauu

SEQ ID NO: 2516400 - RNA, 19 nt, Homo sapiens
  misc_RNA (1)...(19): siRNA sense strand
gcccacaaacugaaaggaa

SEQ ID NO: 2516401 - RNA, 19 nt, Homo sapiens
  misc_RNA (1)...(19): siRNA sense strand
aggugaaacugaaaucaau

SEQ ID NO: 2516402 - RNA, 19 nt, Homo sapiens
  misc_RNA (1)...(19): siRNA sense strand
ggugaagguggaaggagau

SEQ ID NO: 2516403 - RNA, 19 nt, Homo sapiens
  misc_RNA (1)...(19): siRNA sense strand
ugugaugaaguguuggaaa

SEQ ID NO: 2516404 - RNA, 19 nt, Homo sapiens
  misc_RNA (1)...(19): siRNA sense strand
gaccagaagugcaggcugu

SEQ ID NO: 2516405 - RNA, 19 nt, Homo sapiens
  misc_RNA (1)...(19): siRNA sense strand
ccguagugucuuaggaacu

SEQ ID NO: 2516406 - RNA, 19 nt, Homo sapiens
  misc_RNA (1)...(19): siRNA sense strand
gagaaguggccgugaacac

SEQ ID NO: 2516407 - RNA, 19 nt, Homo sapiens
  misc_RNA (1)...(19): siRNA sense strand
ccuccaggaaucaugauaa

SEQ ID NO: 2516408 - RNA, 19 nt, Homo sapiens
  misc_RNA (1)...(19): siRNA sense strand
agaccucaauuuagaccaa

SEQ ID NO: 2516409 - RNA, 19 nt, Homo sapiens
  misc_RNA (1)...(19): siRNA sense strand
caggugaaacugaaaucaa

SEQ ID NO: 2516410 - RNA, 19 nt, Homo sapiens
  misc_RNA (1)...(19): siRNA sense strand
cauugaagguacaggagcu

SEQ ID NO: 2516411 - RNA, 19 nt, Homo sapiens
  misc_RNA (1)...(19): siRNA sense strand
ccuuagauuugauagcaga

SEQ ID NO: 2516412 - RNA, 19 nt, Homo sapiens
  misc_RNA (1)...(19): siRNA sense strand
ggaacaaguuacuaaggcu

SEQ ID NO: 2516413 - RNA, 19 nt, Homo sapiens
  misc_RNA (1)...(19): siRNA sense strand
agaggaagacagagaauuc

SEQ ID NO: 2516414 - RNA, 19 nt, Homo sapiens
  misc_RNA (1)...(19): siRNA sense strand
ugaagauuguuguacgaga

SEQ ID NO: 2516415 - RNA, 19 nt, Homo sapiens
  misc_RNA (1)...(19): siRNA sense strand
gcauccaauugaagcacau

SEQ ID NO: 2516416 - RNA, 19 nt, Homo sapiens
  misc_RNA (1)...(19): siRNA sense strand
gcuggaaagacuguggaaa

SEQ ID NO: 2516417 - RNA, 19 nt, Homo sapiens
  misc_RNA (1)...(19): siRNA sense strand
aaugagaaguggccgugaa

SEQ ID NO: 2516418 - RNA, 19 nt, Homo sapiens
  misc_RNA (1)...(19): siRNA sense strand
guauaaaguauguugcugu

SEQ ID NO: 2516419 - RNA, 19 nt, Homo sapiens
  misc_RNA (1)...(19): siRNA sense strand
gagaauguuagaagagaag

SEQ ID NO: 2516420 - RNA, 19 nt, Homo sapiens
  misc_RNA (1)...(19): siRNA sense strand
agaaggaagagccaggauu

SEQ ID NO: 2516421 - RNA, 19 nt, Homo sapiens
  misc_RNA (1)...(19): siRNA sense strand
caugauaaagcucagggaa

SEQ ID NO: 2516422 - RNA, 19 nt, Homo sapiens
  misc_RNA (1)...(19): siRNA sense strand
augagagaauguuagaaga

SEQ ID NO: 2516423 - RNA, 19 nt, Homo sapiens
  misc_RNA (1)...(19): siRNA sense strand
ccgucagagacaacuauaa

SEQ ID NO: 2516424 - RNA, 19 nt, Homo sapiens
  misc_RNA (1)...(19): siRNA sense strand
auagaggaagacagagaau

SEQ ID NO: 2516425 - RNA, 19 nt, Homo sapiens
  misc_RNA (1)...(19): siRNA sense strand
gugaagguggaaggagaua

SEQ ID NO: 2516426 - RNA, 19 nt, Homo sapiens
  misc_RNA (1)...(19): siRNA sense strand
augagaaugaugacaguga

SEQ ID NO: 2516427 - RNA, 19 nt, Homo sapiens
  misc_RNA (1)...(19): siRNA sense strand
aggauuucucacugguuua

SEQ ID NO: 2516428 - RNA, 19 nt, Homo sapiens
  misc_RNA (1)...(19): siRNA sense strand
ccuugcagggagagacauu

SEQ ID NO: 2516429 - RNA, 19 nt, Homo sapiens
  misc_RNA (1)...(19): siRNA sense strand
ccugacuggaugugaugaa

SEQ ID NO: 2516430 - RNA, 19 nt, Homo sapiens
  misc_RNA (1)...(19): siRNA sense strand
aaagguaagaagugggcaa

SEQ ID NO: 2516431 - RNA, 19 nt, Homo sapiens
  misc_RNA (1)...(19): siRNA sense strand
ggaucacagcugagcggaa

SEQ ID NO: 2516432 - RNA, 19 nt, Homo sapiens
  misc_RNA (1)...(19): siRNA sense strand
ccaaaaucaagcagaaaau

SEQ ID NO: 2516433 - RNA, 19 nt, Homo sapiens
  misc_RNA (1)...(19): siRNA sense strand
ggaaagcaaugaugcagca

SEQ ID NO: 2516434 - RNA, 19 nt, Homo sapiens
  misc_RNA (1)...(19): siRNA sense strand
gguaguuacaagugaaauc

SEQ ID NO: 2516435 - RNA, 19 nt, Homo sapiens
  misc_RNA (1)...(19): siRNA sense strand
gccaaaaucaagcagaaaa

SEQ ID NO: 2516436 - RNA, 19 nt, Homo sapiens
  misc_RNA (1)...(19): siRNA sense strand
gggcaaucuuuaaaacaau

SEQ ID NO: 2516437 - RNA, 19 nt, Homo sapiens
  misc_RNA (1)...(19): siRNA sense strand
ggggaaggaaagacggcua

SEQ ID NO: 2516438 - RNA, 19 nt, Homo sapiens
  misc_RNA (1)...(19): siRNA sense strand
aggagacauuaauccgaaa

SEQ ID NO: 2516439 - RNA, 19 nt, Homo sapiens
  misc_RNA (1)...(19): siRNA sense strand
acagcugagcggaaagcaa

SEQ ID NO: 2516440 - RNA, 19 nt, Homo sapiens
  misc_RNA (1)...(19): siRNA sense strand
cgugguggaacuugccaaa

SEQ ID NO: 2516441 - RNA, 19 nt, Homo sapiens
  misc_RNA (1)...(19): siRNA sense strand
gggaaaaggugcaggaacu

SEQ ID NO: 2516442 - RNA, 19 nt, Homo sapiens
  misc_RNA (1)...(19): siRNA sense strand
agcuagaggugguggccaa

SEQ ID NO: 2516443 - RNA, 19 nt, Homo sapiens
  misc_RNA (1)...(19): siRNA sense strand
gcgaaaaggcuuggagcua

SEQ ID NO: 2516444 - RNA, 19 nt, Homo sapiens
  misc_RNA (1)...(19): siRNA sense strand
agagauaaauuguuggagu

SEQ ID NO: 2516445 - RNA, 19 nt, Homo sapiens
  misc_RNA (1)...(19): siRNA sense strand
uagaggaggagguggaaaa

SEQ ID NO: 2516446 - RNA, 19 nt, Homo sapiens
  misc_RNA (1)...(19): siRNA sense strand
agguagaggaggaggugga

SEQ ID NO: 2516447 - RNA, 19 nt, Homo sapiens
  misc_RNA (1)...(19): siRNA sense strand
cugccaaagaaguaagaga

SEQ ID NO: 2516448 - RNA, 19 nt, Homo sapiens
  misc_RNA (1)...(19): siRNA sense strand
ccaucuuuauccagaggua

SEQ ID NO: 2516449 - RNA, 19 nt, Homo sapiens
  misc_RNA (1)...(19): siRNA sense strand
uuguuaaugacgugggcaa

SEQ ID NO: 2516450 - RNA, 19 nt, Homo sapiens
  misc_RNA (1)...(19): siRNA sense strand
gcugugaaggauugggaga

SEQ ID NO: 2516451 - RNA, 19 nt, Homo sapiens
  misc_RNA (1)...(19): siRNA sense strand
auacauugaaccaagcaaa

SEQ ID NO: 2516452 - RNA, 19 nt, Homo sapiens
  misc_RNA (1)...(19): siRNA sense strand
aauaguguguacagaguau

SEQ ID NO: 2516453 - RNA, 19 nt, Homo sapiens
  misc_RNA (1)...(19): siRNA sense strand
aaacaaggaguaagcucaa

SEQ ID NO: 2516454 - RNA, 19 nt, Homo sapiens
  misc_RNA (1)...(19): siRNA sense strand
auucauacuucaagaccau

SEQ ID NO: 2516455 - RNA, 19 nt, Homo sapiens
  misc_RNA (1)...(19): siRNA sense strand
agccagaaucuuaagguau

SEQ ID NO: 2516456 - RNA, 19 nt, Homo sapiens
  misc_RNA (1)...(19): siRNA sense strand
auaauuugccucaggaaga

SEQ ID NO: 2516457 - RNA, 19 nt, Homo sapiens
  misc_RNA (1)...(19): siRNA sense strand
gaucaaauacaguaccaca

SEQ ID NO: 2516458 - RNA, 19 nt, Homo sapiens
  misc_RNA (1)...(19): siRNA sense strand
cugaaaugggacuuuauua

SEQ ID NO: 2516459 - RNA, 19 nt, Homo sapiens
  misc_RNA (1)...(19): siRNA sense strand
gcugagauacacaaagaca

SEQ ID NO: 2516460 - RNA, 19 nt, Homo sapiens
  misc_RNA (1)...(19): siRNA sense strand
aaaucugggauguggaaga

SEQ ID NO: 2516461 - RNA, 19 nt, Homo sapiens
  misc_RNA (1)...(19): siRNA sense strand
gcuuggagcuagagguggu

SEQ ID NO: 2516462 - RNA, 19 nt, Homo sapiens
  misc_RNA (1)...(19): siRNA sense strand
ccuuccaguucguccguaa

SEQ ID NO: 2516463 - RNA, 19 nt, Homo sapiens
  misc_RNA (1)...(19): siRNA sense strand
uuggaaggacuguggauga

SEQ ID NO: 2516464 - RNA, 19 nt, Homo sapiens
  misc_RNA (1)...(19): siRNA sense strand
agccggagguagaggagga

SEQ ID NO: 2516465 - RNA, 19 nt, Homo sapiens
  misc_RNA (1)...(19): siRNA sense strand
ccaaagucugaaagagcga

SEQ ID NO: 2516466 - RNA, 19 nt, Homo sapiens
  misc_RNA (1)...(19): siRNA sense strand
gauuaugaaugacaggcuu

SEQ ID NO: 2516467 - RNA, 19 nt, Homo sapiens
  misc_RNA (1)...(19): siRNA sense strand
aauacaagguuaugcaaac

SEQ ID NO: 2516468 - RNA, 19 nt, Homo sapiens
  misc_RNA (1)...(19): siRNA sense strand
auuaugaaugacaggcuua

SEQ ID NO: 2516469 - RNA, 19 nt, Homo sapiens
  misc_RNA (1)...(19): siRNA sense strand
ggagcauaccugaguggga

SEQ ID NO: 2516470 - RNA, 19 nt, Homo sapiens
  misc_RNA (1)...(19): siRNA sense strand
ggauccaaagucugaaaga

SEQ ID NO: 2516471 - RNA, 19 nt, Homo sapiens
  misc_RNA (1)...(19): siRNA sense strand
ccuacaauggcaagcauca

SEQ ID NO: 2516472 - RNA, 19 nt, Homo sapiens
  misc_RNA (1)...(19): siRNA sense strand
gggaagaagaggaggagga

SEQ ID NO: 2516473 - RNA, 19 nt, Homo sapiens
  misc_RNA (1)...(19): siRNA sense strand
gggaaauuucggagccaaa

SEQ ID NO: 2516474 - RNA, 19 nt, Homo sapiens
  misc_RNA (1)...(19): siRNA sense strand
aggaggaggaagaggauau

SEQ ID NO: 2516475 - RNA, 19 nt, Homo sapiens
  misc_RNA (1)...(19): siRNA sense strand
aaggacaaguggagggaga

SEQ ID NO: 2516476 - RNA, 19 nt, Homo sapiens
  misc_RNA (1)...(19): siRNA sense strand
agcacuguguggagggaaa

SEQ ID NO: 2516477 - RNA, 19 nt, Homo sapiens
  misc_RNA (1)...(19): siRNA sense strand
acaaguggagggagaggaa

SEQ ID NO: 2516478 - RNA, 19 nt, Homo sapiens
  misc_RNA (1)...(19): siRNA sense strand
gggcaagacuggaaaggag

SEQ ID NO: 2516479 - RNA, 19 nt, Homo sapiens
  misc_RNA (1)...(19): siRNA sense strand
gcauugugaacguggaaaa

SEQ ID NO: 2516480 - RNA, 19 nt, Homo sapiens
  misc_RNA (1)...(19): siRNA sense strand
cagagaagaggaagcaaaa

SEQ ID NO: 2516481 - RNA, 19 nt, Homo sapiens
  misc_RNA (1)...(19): siRNA sense strand
ucaucaaagacauggaaaa

SEQ ID NO: 2516482 - RNA, 19 nt, Homo sapiens
  misc_RNA (1)...(19): siRNA sense strand
aaguggagggagaggaaga

SEQ ID NO: 2516483 - RNA, 19 nt, Homo sapiens
  misc_RNA (1)...(19): siRNA sense strand
ggguacagcaauucaucaa

SEQ ID NO: 2516484 - RNA, 19 nt, Homo sapiens
  misc_RNA (1)...(19): siRNA sense strand
gggaaguggcagaggagac

SEQ ID NO: 2516485 - RNA, 19 nt, Homo sapiens
  misc_RNA (1)...(19): siRNA sense strand
gguaccagcuacagcgcau

SEQ ID NO: 2516486 - RNA, 19 nt, Homo sapiens
  misc_RNA (1)...(19): siRNA sense strand
acgugaagcuaaguggaaa

SEQ ID NO: 2516487 - RNA, 19 nt, Homo sapiens
  misc_RNA (1)...(19): siRNA sense strand
uguuugacccgguaguaaa

SEQ ID NO: 2516488 - RNA, 19 nt, Homo sapiens
  misc_RNA (1)...(19): siRNA sense strand
ccccuuuacugaugggaaa

SEQ ID NO: 2516489 - RNA, 19 nt, Homo sapiens
  misc_RNA (1)...(19): siRNA sense strand
cccgggagaguuugggaaa

SEQ ID NO: 2516490 - RNA, 19 nt, Homo sapiens
  misc_RNA (1)...(19): siRNA sense strand
gcgcauugugaacguggaa

SEQ ID NO: 2516491 - RNA, 19 nt, Homo sapiens
  misc_RNA (1)...(19): siRNA sense strand
cguggaaguugcauggcga

SEQ ID NO: 2516492 - RNA, 19 nt, Homo sapiens
  misc_RNA (1)...(19): siRNA sense strand
ggugacagccccaggaaga

SEQ ID NO: 2516493 - RNA, 19 nt, Homo sapiens
  misc_RNA (1)...(19): siRNA sense strand
ucgucgugccugugaagaa

SEQ ID NO: 2516494 - RNA, 19 nt, Homo sapiens
  misc_RNA (1)...(19): siRNA sense strand
ccgggagaguuugggaaau

SEQ ID NO: 2516495 - RNA, 19 nt, Homo sapiens
  misc_RNA (1)...(19): siRNA sense strand
gguacuacuucgaggugcu

SEQ ID NO: 2516496 - RNA, 19 nt, Homo sapiens
  misc_RNA (1)...(19): siRNA sense strand
uggaaaagcgucaggacca

SEQ ID NO: 2516497 - RNA, 19 nt, Homo sapiens
  misc_RNA (1)...(19): siRNA sense strand
ccacacaaccguaggagac

SEQ ID NO: 2516498 - RNA, 19 nt, Homo sapiens
  misc_RNA (1)...(19): siRNA sense strand
acaccaaggaguuccgaga

SEQ ID NO: 2516499 - RNA, 19 nt, Homo sapiens
  misc_RNA (1)...(19): siRNA sense strand
gcucuggccagcaggaaca

SEQ ID NO: 2516500 - RNA, 19 nt, Homo sapiens
  misc_RNA (1)...(19): siRNA sense strand
gagaagaaagcuauggcaa

SEQ ID NO: 2516501 - RNA, 19 nt, Homo sapiens
  misc_RNA (1)...(19): siRNA sense strand
cggaaaugcuuggggaaaa

SEQ ID NO: 2516502 - RNA, 19 nt, Homo sapiens
  misc_RNA (1)...(19): siRNA sense strand
gcuuauggcuaccggaaau

SEQ ID NO: 2516503 - RNA, 19 nt, Homo sapiens
  misc_RNA (1)...(19): siRNA sense strand
guagaauacuuaaaggaga

SEQ ID NO: 2516504 - RNA, 19 nt, Homo sapiens
  misc_RNA (1)...(19): siRNA sense strand
cgccgaugcucaauggaaa

SEQ ID NO: 2516505 - RNA, 19 nt, Homo sapiens
  misc_RNA (1)...(19): siRNA sense strand
cuauggaauuugaagccua

SEQ ID NO: 2516506 - RNA, 19 nt, Homo sapiens
  misc_RNA (1)...(19): siRNA sense strand
gacaaaaguuacaaggaga

SEQ ID NO: 2516507 - RNA, 19 nt, Homo sapiens
  misc_RNA (1)...(19): siRNA sense strand
gggcaaaaucccucagaca

SEQ ID NO: 2516508 - RNA, 19 nt, Homo sapiens
  misc_RNA (1)...(19): siRNA sense strand
cccugaauguucuggaaau

SEQ ID NO: 2516509 - RNA, 19 nt, Homo sapiens
  misc_RNA (1)...(19): siRNA sense strand
agucggugguggagaaacu

SEQ ID NO: 2516510 - RNA, 19 nt, Homo sapiens
  misc_RNA (1)...(19): siRNA sense strand
ccagaauucucuuaggguu

SEQ ID NO: 2516511 - RNA, 19 nt, Homo sapiens
  misc_RNA (1)...(19): siRNA sense strand
uagaaauagccucugaaau

SEQ ID NO: 2516512 - RNA, 19 nt, Homo sapiens
  misc_RNA (1)...(19): siRNA sense strand
ucaauuugguuguugcgaa

SEQ ID NO: 2516513 - RNA, 19 nt, Homo sapiens
  misc_RNA (1)...(19): siRNA sense strand
ccggaaaugcuuggggaaa

SEQ ID NO: 2516514 - RNA, 19 nt, Homo sapiens
  misc_RNA (1)...(19): siRNA sense strand
ucaugcacuuggaggaaca

SEQ ID NO: 2516515 - RNA, 19 nt, Homo sapiens
  misc_RNA (1)...(19): siRNA sense strand
cauaugaucucuacagcca

SEQ ID NO: 2516516 - RNA, 19 nt, Homo sapiens
  misc_RNA (1)...(19): siRNA sense strand
acaaaaguuacaaggagaa

SEQ ID NO: 2516517 - RNA, 19 nt, Homo sapiens
  misc_RNA (1)...(19): siRNA sense strand
cagaauucucuuaggguuc

SEQ ID NO: 2516518 - RNA, 19 nt, Homo sapiens
  misc_RNA (1)...(19): siRNA sense strand
auggaaagcacaaguacga

SEQ ID NO: 2516519 - RNA, 19 nt, Homo sapiens
  misc_RNA (1)...(19): siRNA sense strand
gccaugacuuucaaggaga

SEQ ID NO: 2516520 - RNA, 19 nt, Homo sapiens
  misc_RNA (1)...(19): siRNA sense strand
aucaauggucucagaaauu

SEQ ID NO: 2516521 - RNA, 19 nt, Homo sapiens
  misc_RNA (1)...(19): siRNA sense strand
auuccagagaagaaagcua

SEQ ID NO: 2516522 - RNA, 19 nt, Homo sapiens
  misc_RNA (1)...(19): siRNA sense strand
uggcaauugcugaugcuuu

SEQ ID NO: 2516523 - RNA, 19 nt, Homo sapiens
  misc_RNA (1)...(19): siRNA sense strand
ccauagaucugguguacau

SEQ ID NO: 2516524 - RNA, 19 nt, Homo sapiens
  misc_RNA (1)...(19): siRNA sense strand
ggagaagacuuucgagcca

SEQ ID NO: 2516525 - RNA, 19 nt, Homo sapiens
  misc_RNA (1)...(19): siRNA sense strand
gauuguugucauagcgaaa

SEQ ID NO: 2516526 - RNA, 19 nt, Homo sapiens
  misc_RNA (1)...(19): siRNA sense strand
gcuuuauguaccuggaaau

SEQ ID NO: 2516527 - RNA, 19 nt, Homo sapiens
  misc_RNA (1)...(19): siRNA sense strand
cuuaaaaggccgaaaacuu

SEQ ID NO: 2516528 - RNA, 19 nt, Homo sapiens
  misc_RNA (1)...(19): siRNA sense strand
ggaagaagaccuagagacc

SEQ ID NO: 2516529 - RNA, 19 nt, Homo sapiens
  misc_RNA (1)...(19): siRNA sense strand
aagaagaccuagagacccu

SEQ ID NO: 2516530 - RNA, 19 nt, Homo sapiens
  misc_RNA (1)...(19): siRNA sense strand
cugguaagcaggugauuca

SEQ ID NO: 2516531 - RNA, 19 nt, Homo sapiens
  misc_RNA (1)...(19): siRNA sense strand
ccacuuaaaaggccgaaaa

SEQ ID NO: 2516532 - RNA, 19 nt, Homo sapiens
  misc_RNA (1)...(19): siRNA sense strand
aggugcaacaaguaguaaa

SEQ ID NO: 2516533 - RNA, 19 nt, Homo sapiens
  misc_RNA (1)...(19): siRNA sense strand
aauuaagugggcugaagaa

SEQ ID NO: 2516534 - RNA, 19 nt, Homo sapiens
  misc_RNA (1)...(19): siRNA sense strand
cuggaaaugaugaaaagaa

SEQ ID NO: 2516535 - RNA, 19 nt, Homo sapiens
  misc_RNA (1)...(19): siRNA sense strand
ccgaaaacuugaacaacca

SEQ ID NO: 2516536 - RNA, 19 nt, Homo sapiens
  misc_RNA (1)...(19): siRNA sense strand
ccuuuaaagaacaucaaca

SEQ ID NO: 2516537 - RNA, 19 nt, Homo sapiens
  misc_RNA (1)...(19): siRNA sense strand
ccauagaucugguguacau

SEQ ID NO: 2516538 - RNA, 19 nt, Homo sapiens
  misc_RNA (1)...(19): siRNA sense strand
ggagaagacuuucgagcca

SEQ ID NO: 2516539 - RNA, 19 nt, Homo sapiens
  misc_RNA (1)...(19): siRNA sense strand
gauuguugucauagcgaaa

SEQ ID NO: 2516540 - RNA, 19 nt, Homo sapiens
  misc_RNA (1)...(19): siRNA sense strand
gcuuuauguaccuggaaau

SEQ ID NO: 2516541 - RNA, 19 nt, Homo sapiens
  misc_RNA (1)...(19): siRNA sense strand
cuuaaaaggccgaaaacuu

SEQ ID NO: 2516542 - RNA, 19 nt, Homo sapiens
  misc_RNA (1)...(19): siRNA sense strand
ggaagaagaccuagagacc

SEQ ID NO: 2516543 - RNA, 19 nt, Homo sapiens
  misc_RNA (1)...(19): siRNA sense strand
aagaagaccuagagacccu

SEQ ID NO: 2516544 - RNA, 19 nt, Homo sapiens
  misc_RNA (1)...(19): siRNA sense strand
cugguaagcaggugauuca

SEQ ID NO: 2516545 - RNA, 19 nt, Homo sapiens
  misc_RNA (1)...(19): siRNA sense strand
ccacuuaaaaggccgaaaa

SEQ ID NO: 2516546 - RNA, 19 nt, Homo sapiens
  misc_RNA (1)...(19): siRNA sense strand
aggugcaacaaguaguaaa

SEQ ID NO: 2516547 - RNA, 19 nt, Homo sapiens
  misc_RNA (1)...(19): siRNA sense strand
aauuaagugggcugaagaa

SEQ ID NO: 2516548 - RNA, 19 nt, Homo sapiens
  misc_RNA (1)...(19): siRNA sense strand
cuggaaaugaugaaaagaa

SEQ ID NO: 2516549 - RNA, 19 nt, Homo sapiens
  misc_RNA (1)...(19): siRNA sense strand
ccgaaaacuugaacaacca

SEQ ID NO: 2516550 - RNA, 19 nt, Homo sapiens
  misc_RNA (1)...(19): siRNA sense strand
ccuuuaaagaacaucaaca

SEQ ID NO: 2516551 - RNA, 19 nt, Homo sapiens
  misc_RNA (1)...(19): siRNA sense strand
agccaaaggaauugaguaa

SEQ ID NO: 2516552 - RNA, 19 nt, Homo sapiens
  misc_RNA (1)...(19): siRNA sense strand
cuucaaugacagagaggaa

SEQ ID NO: 2516553 - RNA, 19 nt, Homo sapiens
  misc_RNA (1)...(19): siRNA sense strand
agaaauugaaagaggguca

SEQ ID NO: 2516554 - RNA, 19 nt, Homo sapiens
  misc_RNA (1)...(19): siRNA sense strand
aggcauacaaacagaagaa

SEQ ID NO: 2516555 - RNA, 19 nt, Homo sapiens
  misc_RNA (1)...(19): siRNA sense strand
cuggaaagaaauugaaaga

SEQ ID NO: 2516556 - RNA, 19 nt, Homo sapiens
  misc_RNA (1)...(19): siRNA sense strand
gaccagaaauguauggcua

SEQ ID NO: 2516557 - RNA, 19 nt, Homo sapiens
  misc_RNA (1)...(19): siRNA sense strand
cugaauuacuacaggagau

SEQ ID NO: 2516558 - RNA, 19 nt, Homo sapiens
  misc_RNA (1)...(19): siRNA sense strand
ugucaagauaccugugaaa

SEQ ID NO: 2516559 - RNA, 19 nt, Homo sapiens
  misc_RNA (1)...(19): siRNA sense strand
ggaaagaaauugaaagagg

SEQ ID NO: 2516560 - RNA, 19 nt, Homo sapiens
  misc_RNA (1)...(19): siRNA sense strand
gcauacaaacagaagaaca

SEQ ID NO: 2516561 - RNA, 19 nt, Homo sapiens
  misc_RNA (1)...(19): siRNA sense strand
cuuccaagacauugaaaga

SEQ ID NO: 2516562 - RNA, 19 nt, Homo sapiens
  misc_RNA (1)...(19): siRNA sense strand
aaacagaagaacacccaaa

SEQ ID NO: 2516563 - RNA, 19 nt, Homo sapiens
  misc_RNA (1)...(19): siRNA sense strand
guguaaacauugaaaucca

SEQ ID NO: 2516564 - RNA, 19 nt, Homo sapiens
  misc_RNA (1)...(19): siRNA sense strand
gugucaaagaggagcugaa

SEQ ID NO: 2516565 - RNA, 19 nt, Homo sapiens
  misc_RNA (1)...(19): siRNA sense strand
uggaaagugagcagaaaca

SEQ ID NO: 2516566 - RNA, 19 nt, Homo sapiens
  misc_RNA (1)...(19): siRNA sense strand
caugaaacaccgauggaca

SEQ ID NO: 2516567 - RNA, 19 nt, Homo sapiens
  misc_RNA (1)...(19): siRNA sense strand
cuuugggcaaggagagaaa

SEQ ID NO: 2516568 - RNA, 19 nt, Homo sapiens
  misc_RNA (1)...(19): siRNA sense strand
aagaggagcugaaagccaa

SEQ ID NO: 2516569 - RNA, 19 nt, Homo sapiens
  misc_RNA (1)...(19): siRNA sense strand
ucucuuuagcagacaguaa

SEQ ID NO: 2516570 - RNA, 19 nt, Homo sapiens
  misc_RNA (1)...(19): siRNA sense strand
aaaccaaggcagaacaaaa

SEQ ID NO: 2516571 - RNA, 19 nt, Homo sapiens
  misc_RNA (1)...(19): siRNA sense strand
auguacacuuugugcuaaa

SEQ ID NO: 2516572 - RNA, 19 nt, Homo sapiens
  misc_RNA (1)...(19): siRNA sense strand
agagaaaagauuuggugua

SEQ ID NO: 2516573 - RNA, 19 nt, Homo sapiens
  misc_RNA (1)...(19): siRNA sense strand
guacgaaggaagcuggaga

SEQ ID NO: 2516574 - RNA, 19 nt, Homo sapiens
  misc_RNA (1)...(19): siRNA sense strand
gaugaauguaauugagguu

SEQ ID NO: 2516575 - RNA, 19 nt, Homo sapiens
  misc_RNA (1)...(19): siRNA sense strand
ugugcuaaaucaagaguca

SEQ ID NO: 2516576 - RNA, 19 nt, Homo sapiens
  misc_RNA (1)...(19): siRNA sense strand
gaaaucagccagagggaag

SEQ ID NO: 2516577 - RNA, 19 nt, Homo sapiens
  misc_RNA (1)...(19): siRNA sense strand
ccaaagugcaagcaugaau

SEQ ID NO: 2516578 - RNA, 19 nt, Homo sapiens
  misc_RNA (1)...(19): siRNA sense strand
ccuggaaagugagcagaaa

SEQ ID NO: 2516579 - RNA, 19 nt, Homo sapiens
  misc_RNA (1)...(19): siRNA sense strand
caguaagcaggcaaauaaa

SEQ ID NO: 2516580 - RNA, 19 nt, Homo sapiens
  misc_RNA (1)...(19): siRNA sense strand
gagauaucagagaucgaaa

SEQ ID NO: 2516581 - RNA, 19 nt, Homo sapiens
  misc_RNA (1)...(19): siRNA sense strand
cgauggacauugauagcga

SEQ ID NO: 2516582 - RNA, 19 nt, Homo sapiens
  misc_RNA (1)...(19): siRNA sense strand
gcagcuaaggagagagugu

SEQ ID NO: 2516583 - RNA, 19 nt, Homo sapiens
  misc_RNA (1)...(19): siRNA sense strand
ugacauuucagcugccaaa

SEQ ID NO: 2516584 - RNA, 19 nt, Homo sapiens
  misc_RNA (1)...(19): siRNA sense strand
uggaaggucacgauggaau

SEQ ID NO: 2516585 - RNA, 19 nt, Homo sapiens
  misc_RNA (1)...(19): siRNA sense strand
cagacaguaagcaggcaaa

SEQ ID NO: 2516586 - RNA, 19 nt, Homo sapiens
  misc_RNA (1)...(19): siRNA sense strand
uuauagggccuuugaccaa

SEQ ID NO: 2516587 - RNA, 19 nt, Homo sapiens
  misc_RNA (1)...(19): siRNA sense strand
agucagcaggagagggaca

SEQ ID NO: 2516588 - RNA, 19 nt, Homo sapiens
  misc_RNA (1)...(19): siRNA sense strand
gcagacaguaagcaggcaa

SEQ ID NO: 2516589 - RNA, 19 nt, Homo sapiens
  misc_RNA (1)...(19): siRNA sense strand
ugaauuacuacaggagaua

SEQ ID NO: 2516590 - RNA, 19 nt, Homo sapiens
  misc_RNA (1)...(19): siRNA sense strand
cuacaggagauaucagaga

SEQ ID NO: 2516591 - RNA, 19 nt, Homo sapiens
  misc_RNA (1)...(19): siRNA sense strand
ucaagauaccugugaaacu

SEQ ID NO: 2516592 - RNA, 19 nt, Homo sapiens
  misc_RNA (1)...(19): siRNA sense strand
cgaagcaguauguucuaaa

SEQ ID NO: 2516593 - RNA, 19 nt, Homo sapiens
  misc_RNA (1)...(19): siRNA sense strand
aaauguacacuuugugcua

SEQ ID NO: 2516594 - RNA, 19 nt, Homo sapiens
  misc_RNA (1)...(19): siRNA sense strand
ugguauucagaaaggaaau

SEQ ID NO: 2516595 - RNA, 19 nt, Homo sapiens
  misc_RNA (1)...(19): siRNA sense strand
agaaaggaaaucagccaga

SEQ ID NO: 2516596 - RNA, 19 nt, Homo sapiens
  misc_RNA (1)...(19): siRNA sense strand
ucaauaaagaagaacacga

SEQ ID NO: 2516597 - RNA, 19 nt, Homo sapiens
  misc_RNA (1)...(19): siRNA sense strand
ucuaaaaggaggaggaaug

SEQ ID NO: 2516598 - RNA, 19 nt, Homo sapiens
  misc_RNA (1)...(19): siRNA sense strand
gcaaauaaauucaaacagg

SEQ ID NO: 2516599 - RNA, 19 nt, Homo sapiens
  misc_RNA (1)...(19): siRNA sense strand
cuaaggagagaguguugaa

SEQ ID NO: 2516600 - RNA, 19 nt, Homo sapiens
  misc_RNA (1)...(19): siRNA sense strand
agcugaaagccaaaggaau

SEQ ID NO: 2516601 - RNA, 19 nt, Homo sapiens
  misc_RNA (1)...(19): siRNA sense strand
uacugaagucuuugggcaa

SEQ ID NO: 2516602 - RNA, 19 nt, Homo sapiens
  misc_RNA (1)...(19): siRNA sense strand
agacucacuuccagguuau

SEQ ID NO: 2516603 - RNA, 19 nt, Homo sapiens
  misc_RNA (1)...(19): siRNA sense strand
gggcagcuaaggagagagu

SEQ ID NO: 2516604 - RNA, 19 nt, Homo sapiens
  misc_RNA (1)...(19): siRNA sense strand
gacacaaucacaagcagaa

SEQ ID NO: 2516605 - RNA, 19 nt, Homo sapiens
  misc_RNA (1)...(19): siRNA sense strand
aggagauaucagagaucga

SEQ ID NO: 2516606 - RNA, 19 nt, Homo sapiens
  misc_RNA (1)...(19): siRNA sense strand
uugcugaugacuuuagaaa

SEQ ID NO: 2516607 - RNA, 19 nt, Homo sapiens
  misc_RNA (1)...(19): siRNA sense strand
caaccaauuuccugggcaa

SEQ ID NO: 2516608 - RNA, 19 nt, Homo sapiens
  misc_RNA (1)...(19): siRNA sense strand
agaugagaguggagaagau

SEQ ID NO: 2516609 - RNA, 19 nt, Homo sapiens
  misc_RNA (1)...(19): siRNA sense strand
aguuaacaaugaugggcaa

SEQ ID NO: 2516610 - RNA, 19 nt, Homo sapiens
  misc_RNA (1)...(19): siRNA sense strand
aauucaaaggccuggauua

SEQ ID NO: 2516611 - RNA, 19 nt, Homo sapiens
  misc_RNA (1)...(19): siRNA sense strand
auucaaaggccuggauuaa

SEQ ID NO: 2516612 - RNA, 19 nt, Homo sapiens
  misc_RNA (1)...(19): siRNA sense strand
cagaaaacaagaugaguau

SEQ ID NO: 2516613 - RNA, 19 nt, Homo sapiens
  misc_RNA (1)...(19): siRNA sense strand
ggugaagaugccagugcaa

SEQ ID NO: 2516614 - RNA, 19 nt, Homo sapiens
  misc_RNA (1)...(19): siRNA sense strand
gaccaaagugggauggaga

SEQ ID NO: 2516615 - RNA, 19 nt, Homo sapiens
  misc_RNA (1)...(19): siRNA sense strand
uugaagaaauggagcgucu

SEQ ID NO: 2516616 - RNA, 19 nt, Homo sapiens
  misc_RNA (1)...(19): siRNA sense strand
agaagauggaggugaagau

SEQ ID NO: 2516617 - RNA, 19 nt, Homo sapiens
  misc_RNA (1)...(19): siRNA sense strand
ugaagaugagaguggagaa

SEQ ID NO: 2516618 - RNA, 19 nt, Homo sapiens
  misc_RNA (1)...(19): siRNA sense strand
gcaccgaaucagaaauaca

SEQ ID NO: 2516619 - RNA, 19 nt, Homo sapiens
  misc_RNA (1)...(19): siRNA sense strand
ggcacauguuccuggagaa

SEQ ID NO: 2516620 - RNA, 19 nt, Homo sapiens
  misc_RNA (1)...(19): siRNA sense strand
ggaugaugggcuugaagau

SEQ ID NO: 2516621 - RNA, 19 nt, Homo sapiens
  misc_RNA (1)...(19): siRNA sense strand
cuagcaaaccauugacgaa

SEQ ID NO: 2516622 - RNA, 19 nt, Homo sapiens
  misc_RNA (1)...(19): siRNA sense strand
ucuuauggaugaugggcuu

SEQ ID NO: 2516623 - RNA, 19 nt, Homo sapiens
  misc_RNA (1)...(19): siRNA sense strand
aaggaaauguagacaacca

SEQ ID NO: 2516624 - RNA, 19 nt, Homo sapiens
  misc_RNA (1)...(19): siRNA sense strand
ccaaagugggauggagauu

SEQ ID NO: 2516625 - RNA, 19 nt, Homo sapiens
  misc_RNA (1)...(19): siRNA sense strand
ucagaaaacaagaugagua

SEQ ID NO: 2516626 - RNA, 19 nt, Homo sapiens
  misc_RNA (1)...(19): siRNA sense strand
uggcuagacuggauguaca

SEQ ID NO: 2516627 - RNA, 19 nt, Homo sapiens
  misc_RNA (1)...(19): siRNA sense strand
ccaaaauccagcaccaaua

SEQ ID NO: 2516628 - RNA, 19 nt, Homo sapiens
  misc_RNA (1)...(19): siRNA sense strand
ucauuaaagcaccgaauca

SEQ ID NO: 2516629 - RNA, 19 nt, Homo sapiens
  misc_RNA (1)...(19): siRNA sense strand
ucaaaugaaugcacaggga

SEQ ID NO: 2516630 - RNA, 19 nt, Homo sapiens
  misc_RNA (1)...(19): siRNA sense strand
ccauauguaaugcaaggaa

SEQ ID NO: 2516631 - RNA, 19 nt, Homo sapiens
  misc_RNA (1)...(19): siRNA sense strand
ccuaguggcccaagaaaau

SEQ ID NO: 2516632 - RNA, 19 nt, Homo sapiens
  misc_RNA (1)...(19): siRNA sense strand
caucauuaaagcaccgaau

SEQ ID NO: 2516633 - RNA, 19 nt, Homo sapiens
  misc_RNA (1)...(19): siRNA sense strand
cuccaaaccuaguggccca

SEQ ID NO: 2516634 - RNA, 19 nt, Homo sapiens
  misc_RNA (1)...(19): siRNA sense strand
augcaaacaacuuggaacu

SEQ ID NO: 2516635 - RNA, 19 nt, Homo sapiens
  misc_RNA (1)...(19): siRNA sense strand
uguaaugcaaggaaaugua

SEQ ID NO: 2516636 - RNA, 19 nt, Homo sapiens
  misc_RNA (1)...(19): siRNA sense strand
caguacuaaaugaagaaga

SEQ ID NO: 2516637 - RNA, 19 nt, Homo sapiens
  misc_RNA (1)...(19): siRNA sense strand
ccaucaaccuacuggcgua

SEQ ID NO: 2516638 - RNA, 19 nt, Homo sapiens
  misc_RNA (1)...(19): siRNA sense strand
cggcgagaucacuggcuau

SEQ ID NO: 2516639 - RNA, 19 nt, Homo sapiens
  misc_RNA (1)...(19): siRNA sense strand
gauguaagcugcagccgca

SEQ ID NO: 2516640 - RNA, 19 nt, Homo sapiens
  misc_RNA (1)...(19): siRNA sense strand
acugcugggaggagaguua

SEQ ID NO: 2516641 - RNA, 19 nt, Homo sapiens
  misc_RNA (1)...(19): siRNA sense strand
aggagaguuaugagaugaa

SEQ ID NO: 2516642 - RNA, 19 nt, Homo sapiens
  misc_RNA (1)...(19): siRNA sense strand
gagaaaaggaagaggagaa

SEQ ID NO: 2516643 - RNA, 19 nt, Homo sapiens
  misc_RNA (1)...(19): siRNA sense strand
ugguugaacacgagaaaua

SEQ ID NO: 2516644 - RNA, 19 nt, Homo sapiens
  misc_RNA (1)...(19): siRNA sense strand
gggcauugaaauugaagaa

SEQ ID NO: 2516645 - RNA, 19 nt, Homo sapiens
  misc_RNA (1)...(19): siRNA sense strand
gugcauuaacugaagcaaa

SEQ ID NO: 2516646 - RNA, 19 nt, Homo sapiens
  misc_RNA (1)...(19): siRNA sense strand
cuuucagacuggaguauaa

SEQ ID NO: 2516647 - RNA, 19 nt, Homo sapiens
  misc_RNA (1)...(19): siRNA sense strand
aggaagaggagaaagagaa

SEQ ID NO: 2516648 - RNA, 19 nt, Homo sapiens
  misc_RNA (1)...(19): siRNA sense strand
gcauguuggcuaaggacaa

SEQ ID NO: 2516649 - RNA, 19 nt, Homo sapiens
  misc_RNA (1)...(19): siRNA sense strand
agaaagagaaacuguggaa

SEQ ID NO: 2516650 - RNA, 19 nt, Homo sapiens
  misc_RNA (1)...(19): siRNA sense strand
aagaaauggaaaugagaga

SEQ ID NO: 2516651 - RNA, 19 nt, Homo sapiens
  misc_RNA (1)...(19): siRNA sense strand
augaagagaacauuggaaa

SEQ ID NO: 2516652 - RNA, 19 nt, Homo sapiens
  misc_RNA (1)...(19): siRNA sense strand
uggacauguuacaaagaua

SEQ ID NO: 2516653 - RNA, 19 nt, Homo sapiens
  misc_RNA (1)...(19): siRNA sense strand
ugcaaagagcagagaagaa

SEQ ID NO: 2516654 - RNA, 19 nt, Homo sapiens
  misc_RNA (1)...(19): siRNA sense strand
agguugacuuugugaagaa

SEQ ID NO: 2516655 - RNA, 19 nt, Homo sapiens
  misc_RNA (1)...(19): siRNA sense strand
ucaugaagacaaagagaga

SEQ ID NO: 2516656 - RNA, 19 nt, Homo sapiens
  misc_RNA (1)...(19): siRNA sense strand
gcaagagcuaucagaacaa

SEQ ID NO: 2516657 - RNA, 19 nt, Homo sapiens
  misc_RNA (1)...(19): siRNA sense strand
aguacaaaccaguagacua

SEQ ID NO: 2516658 - RNA, 19 nt, Homo sapiens
  misc_RNA (1)...(19): siRNA sense strand
cuagaagaacugaagaaau

SEQ ID NO: 2516659 - RNA, 19 nt, Homo sapiens
  misc_RNA (1)...(19): siRNA sense strand
acaaugaacagcagauaau

SEQ ID NO: 2516660 - RNA, 19 nt, Homo sapiens
  misc_RNA (1)...(19): siRNA sense strand
ccaauaucgcuuugcuaua

SEQ ID NO: 2516661 - RNA, 19 nt, Homo sapiens
  misc_RNA (1)...(19): siRNA sense strand
ugaagagaacauuggaaau

SEQ ID NO: 2516662 - RNA, 19 nt, Homo sapiens
  misc_RNA (1)...(19): siRNA sense strand
cacaugaaauggagagcau

SEQ ID NO: 2516663 - RNA, 19 nt, Homo sapiens
  misc_RNA (1)...(19): siRNA sense strand
caggaauaccagaggcuga

SEQ ID NO: 2516664 - RNA, 19 nt, Homo sapiens
  misc_RNA (1)...(19): siRNA sense strand
gcaacagagaauagaaaau

SEQ ID NO: 2516665 - RNA, 19 nt, Homo sapiens
  misc_RNA (1)...(19): siRNA sense strand
agaaauuaaucgcugaaca

SEQ ID NO: 2516666 - RNA, 19 nt, Homo sapiens
  misc_RNA (1)...(19): siRNA sense strand
gcuaaagagauauuaccaa

SEQ ID NO: 2516667 - RNA, 19 nt, Homo sapiens
  misc_RNA (1)...(19): siRNA sense strand
uggagagcauguuggcuaa

SEQ ID NO: 2516668 - RNA, 19 nt, Homo sapiens
  misc_RNA (1)...(19): siRNA sense strand
ucacuaaaagacagagaaa

SEQ ID NO: 2516669 - RNA, 19 nt, Homo sapiens
  misc_RNA (1)...(19): siRNA sense strand
cagaagaagagaaaaggaa

SEQ ID NO: 2516670 - RNA, 19 nt, Homo sapiens
  misc_RNA (1)...(19): siRNA sense strand
ggcuggagcaacagagaau

SEQ ID NO: 2516671 - RNA, 19 nt, Homo sapiens
  misc_RNA (1)...(19): siRNA sense strand
cuguggaagaagaaggaau

SEQ ID NO: 2516672 - RNA, 19 nt, Homo sapiens
  misc_RNA (1)...(19): siRNA sense strand
agacagagaaaggguuaaa

SEQ ID NO: 2516673 - RNA, 19 nt, Homo sapiens
  misc_RNA (1)...(19): siRNA sense strand
aaguauuggaagagguuga

SEQ ID NO: 2516674 - RNA, 19 nt, Homo sapiens
  misc_RNA (1)...(19): siRNA sense strand
cacagaaauaucagaagaa

SEQ ID NO: 2516675 - RNA, 19 nt, Homo sapiens
  misc_RNA (1)...(19): siRNA sense strand
aagaagagguagcaagacu

SEQ ID NO: 2516676 - RNA, 19 nt, Homo sapiens
  misc_RNA (1)...(19): siRNA sense strand
gucuagaagaacugaagaa

SEQ ID NO: 2516677 - RNA, 19 nt, Homo sapiens
  misc_RNA (1)...(19): siRNA sense strand
cugcaaagcuaaagaucag

SEQ ID NO: 2516678 - RNA, 19 nt, Homo sapiens
  misc_RNA (1)...(19): siRNA sense strand
gaagaagagaaaaggaaga

SEQ ID NO: 2516679 - RNA, 19 nt, Homo sapiens
  misc_RNA (1)...(19): siRNA sense strand
ucaacaauugcgugcauua

SEQ ID NO: 2516680 - RNA, 19 nt, Homo sapiens
  misc_RNA (1)...(19): siRNA sense strand
cugucaacuaagugaagaa

SEQ ID NO: 2516681 - RNA, 19 nt, Homo sapiens
  misc_RNA (1)...(19): siRNA sense strand
uguggaagaagaaggaauu

SEQ ID NO: 2516682 - RNA, 19 nt, Homo sapiens
  misc_RNA (1)...(19): siRNA sense strand
gacuuaggcuggagcaaca

SEQ ID NO: 2516683 - RNA, 19 nt, Homo sapiens
  misc_RNA (1)...(19): siRNA sense strand
aaaaggaagaggagaaaga

SEQ ID NO: 2516684 - RNA, 19 nt, Homo sapiens
  misc_RNA (1)...(19): siRNA sense strand
gcucaugaagacaaagaga

SEQ ID NO: 2516685 - RNA, 19 nt, Homo sapiens
  misc_RNA (1)...(19): siRNA sense strand
gaaaggcguuugauggaga

SEQ ID NO: 2516686 - RNA, 19 nt, Homo sapiens
  misc_RNA (1)...(19): siRNA sense strand
agaaacuguggaagaagaa

SEQ ID NO: 2516687 - RNA, 19 nt, Homo sapiens
  misc_RNA (1)...(19): siRNA sense strand
gaaugaugucagauacaau

SEQ ID NO: 2516688 - RNA, 19 nt, Homo sapiens
  misc_RNA (1)...(19): siRNA sense strand
auggagagcauguuggcua

SEQ ID NO: 2516689 - RNA, 19 nt, Homo sapiens
  misc_RNA (1)...(19): siRNA sense strand
gugcugaucugaaagccaa

SEQ ID NO: 2516690 - RNA, 19 nt, Homo sapiens
  misc_RNA (1)...(19): siRNA sense strand
agaagcucaugaagacaaa

SEQ ID NO: 2516691 - RNA, 19 nt, Homo sapiens
  misc_RNA (1)...(19): siRNA sense strand
ccugauaucaaauuggaau

SEQ ID NO: 2516692 - RNA, 19 nt, Homo sapiens
  misc_RNA (1)...(19): siRNA sense strand
aaggaagaggagaaagaga

SEQ ID NO: 2516693 - RNA, 19 nt, Homo sapiens
  misc_RNA (1)...(19): siRNA sense strand
cuaaagaucagaaaagcaa

SEQ ID NO: 2516694 - RNA, 19 nt, Homo sapiens
  misc_RNA (1)...(19): siRNA sense strand
aagugugguggcaggaaua

SEQ ID NO: 2516695 - RNA, 19 nt, Homo sapiens
  misc_RNA (1)...(19): siRNA sense strand
agcaagagcuaucagaaca

SEQ ID NO: 2516696 - RNA, 19 nt, Homo sapiens
  misc_RNA (1)...(19): siRNA sense strand
gcuauagagcagcaaaaua

SEQ ID NO: 2516697 - RNA, 19 nt, Homo sapiens
  misc_RNA (1)...(19): siRNA sense strand
agaaaaggaagaggagaaa

SEQ ID NO: 2516698 - RNA, 19 nt, Homo sapiens
  misc_RNA (1)...(19): siRNA sense strand
agaaauaucagaagaagcu

SEQ ID NO: 2516699 - RNA, 19 nt, Homo sapiens
  misc_RNA (1)...(19): siRNA sense strand
gcaagacuggaaauggaaa

SEQ ID NO: 2516700 - RNA, 19 nt, Homo sapiens
  misc_RNA (1)...(19): siRNA sense strand
caagacuggaaauggaaau

SEQ ID NO: 2516701 - RNA, 19 nt, Homo sapiens
  misc_RNA (1)...(19): siRNA sense strand
aagaggagaaagagaaacu

SEQ ID NO: 2516702 - RNA, 19 nt, Homo sapiens
  misc_RNA (1)...(19): siRNA sense strand
ccucagccacagugcgcaa

SEQ ID NO: 2516703 - RNA, 19 nt, Homo sapiens
  misc_RNA (1)...(19): siRNA sense strand
gcuuaaaagagguuagaaa

SEQ ID NO: 2516704 - RNA, 19 nt, Homo sapiens
  misc_RNA (1)...(19): siRNA sense strand
caguaagagacaagaggaa

SEQ ID NO: 2516705 - RNA, 19 nt, Homo sapiens
  misc_RNA (1)...(19): siRNA sense strand
acgcaaggaaccaaagaaa

SEQ ID NO: 2516706 - RNA, 19 nt, Homo sapiens
  misc_RNA (1)...(19): siRNA sense strand
agacaagaggaaagaaaca

SEQ ID NO: 2516707 - RNA, 19 nt, Homo sapiens
  misc_RNA (1)...(19): siRNA sense strand
gguuaagaaagcaaagaau

SEQ ID NO: 2516708 - RNA, 19 nt, Homo sapiens
  misc_RNA (1)...(19): siRNA sense strand
ggaucuacauugaaggcau

SEQ ID NO: 2516709 - RNA, 19 nt, Homo sapiens
  misc_RNA (1)...(19): siRNA sense strand
cagaagaagcggcagaaaa

SEQ ID NO: 2516710 - RNA, 19 nt, Homo sapiens
  misc_RNA (1)...(19): siRNA sense strand
gcaucaaggaaaagguuaa

SEQ ID NO: 2516711 - RNA, 19 nt, Homo sapiens
  misc_RNA (1)...(19): siRNA sense strand
cacuuaagauggaggcaga

SEQ ID NO: 2516712 - RNA, 19 nt, Homo sapiens
  misc_RNA (1)...(19): siRNA sense strand
agucagaucgauaaagaau

SEQ ID NO: 2516713 - RNA, 19 nt, Homo sapiens
  misc_RNA (1)...(19): siRNA sense strand
uuaagagagaguuggcaaa

SEQ ID NO: 2516714 - RNA, 19 nt, Homo sapiens
  misc_RNA (1)...(19): siRNA sense strand
gaggagagcaguuucgcaa

SEQ ID NO: 2516715 - RNA, 19 nt, Homo sapiens
  misc_RNA (1)...(19): siRNA sense strand
agaagaagcggcagaaaau

SEQ ID NO: 2516716 - RNA, 19 nt, Homo sapiens
  misc_RNA (1)...(19): siRNA sense strand
aguaagagacaagaggaaa

SEQ ID NO: 2516717 - RNA, 19 nt, Homo sapiens
  misc_RNA (1)...(19): siRNA sense strand
agauggaggcagaugaaaa

SEQ ID NO: 2516718 - RNA, 19 nt, Homo sapiens
  misc_RNA (1)...(19): siRNA sense strand
uugaaagaguguuggccau

SEQ ID NO: 2516719 - RNA, 19 nt, Homo sapiens
  misc_RNA (1)...(19): siRNA sense strand
gguucuuuaguaaggaaua

SEQ ID NO: 2516720 - RNA, 19 nt, Homo sapiens
  misc_RNA (1)...(19): siRNA sense strand
cauugaaggcauuggaacu

SEQ ID NO: 2516721 - RNA, 19 nt, Homo sapiens
  misc_RNA (1)...(19): siRNA sense strand
gugaauaaacgcaaggaac

SEQ ID NO: 2516722 - RNA, 19 nt, Homo sapiens
  misc_RNA (1)...(19): siRNA sense strand
auuaagagagaguuggcaa

SEQ ID NO: 2516723 - RNA, 19 nt, Homo sapiens
  misc_RNA (1)...(19): siRNA sense strand
cacaaaguugggagagauu

SEQ ID NO: 2516724 - RNA, 19 nt, Homo sapiens
  misc_RNA (1)...(19): siRNA sense strand
aaucagaagaagcggcaga

SEQ ID NO: 2516725 - RNA, 19 nt, Homo sapiens
  misc_RNA (1)...(19): siRNA sense strand
aggaaagaaacaaagcauu

SEQ ID NO: 2516726 - RNA, 19 nt, Homo sapiens
  misc_RNA (1)...(19): siRNA sense strand
guaagagacaagaggaaag

SEQ ID NO: 2516727 - RNA, 19 nt, Homo sapiens
  misc_RNA (1)...(19): siRNA sense strand
aggaauaaagagagauuug

SEQ ID NO: 2516728 - RNA, 19 nt, Homo sapiens
  misc_RNA (1)...(19): siRNA sense strand
aagaaagaauauacgccau

SEQ ID NO: 2516729 - RNA, 19 nt, Homo sapiens
  misc_RNA (1)...(19): siRNA sense strand
gaaaagguuaagaaagcaa

SEQ ID NO: 2516730 - RNA, 19 nt, Homo sapiens
  misc_RNA (1)...(19): siRNA sense strand
uggccagcaucaaggaaaa

SEQ ID NO: 2516731 - RNA, 19 nt, Homo sapiens
  misc_RNA (1)...(19): siRNA sense strand
agguuaagaaagcaaagaa

SEQ ID NO: 2516732 - RNA, 19 nt, Homo sapiens
  misc_RNA (1)...(19): siRNA sense strand
aggaagucagaucgauaaa

SEQ ID NO: 2516733 - RNA, 19 nt, Homo sapiens
  misc_RNA (1)...(19): siRNA sense strand
cuaaacaagcagaagccau

SEQ ID NO: 2516734 - RNA, 19 nt, Homo sapiens
  misc_RNA (1)...(19): siRNA sense strand
ugccacaguucaagcacaa

SEQ ID NO: 2516735 - RNA, 19 nt, Homo sapiens
  misc_RNA (1)...(19): siRNA sense strand
caaggaaaagguuaagaaa

SEQ ID NO: 2516736 - RNA, 19 nt, Homo sapiens
  misc_RNA (1)...(19): siRNA sense strand
gaauaaacgcaaggaacca

SEQ ID NO: 2516737 - RNA, 19 nt, Homo sapiens
  misc_RNA (1)...(19): siRNA sense strand
aggaaaagguuaagaaagc

SEQ ID NO: 2516738 - RNA, 19 nt, Homo sapiens
  misc_RNA (1)...(19): siRNA sense strand
cugauaaaacuguuagcaa

SEQ ID NO: 2516739 - RNA, 19 nt, Homo sapiens
  misc_RNA (1)...(19): siRNA sense strand
cgaucacaaaguugggaga

SEQ ID NO: 2516740 - RNA, 19 nt, Homo sapiens
  misc_RNA (1)...(19): siRNA sense strand
ggcagaaaauggaagcaau

SEQ ID NO: 2516741 - RNA, 19 nt, Homo sapiens
  misc_RNA (1)...(19): siRNA sense strand
agccgaagccggagaacca

SEQ ID NO: 2516742 - RNA, 19 nt, Homo sapiens
  misc_RNA (1)...(19): siRNA sense strand
agcaauaaaggcuaaacaa

SEQ ID NO: 2516743 - RNA, 19 nt, Homo sapiens
  misc_RNA (1)...(19): siRNA sense strand
uugaacaggcaguacgaau

SEQ ID NO: 2516744 - RNA, 19 nt, Homo sapiens
  misc_RNA (1)...(19): siRNA sense strand
aguacgaauucuucaggau

SEQ ID NO: 2516745 - RNA, 19 nt, Homo sapiens
  misc_RNA (1)...(19): siRNA sense strand
cggagaaccaagaugaauc

SEQ ID NO: 2516746 - RNA, 19 nt, Homo sapiens
  misc_RNA (1)...(19): siRNA sense strand
guggccagcaucaaggaaa

SEQ ID NO: 2516747 - RNA, 19 nt, Homo sapiens
  misc_RNA (1)...(19): siRNA sense strand
cgcaaggaaccaaagaaaa

SEQ ID NO: 2516748 - RNA, 19 nt, Homo sapiens
  misc_RNA (1)...(19): siRNA sense strand
aggucaagguggaggugaa

SEQ ID NO: 2516749 - RNA, 19 nt, Homo sapiens
  misc_RNA (1)...(19): siRNA sense strand
ucgacaaggcggagggcaa

SEQ ID NO: 2516750 - RNA, 19 nt, Homo sapiens
  misc_RNA (1)...(19): siRNA sense strand
cugagaaggucaaggugga

SEQ ID NO: 2516751 - RNA, 19 nt, Homo sapiens
  misc_RNA (1)...(19): siRNA sense strand
gggaagaagcaccagacca

SEQ ID NO: 2516752 - RNA, 19 nt, Homo sapiens
  misc_RNA (1)...(19): siRNA sense strand
cugagaucgccgagggcau

SEQ ID NO: 2516753 - RNA, 19 nt, Homo sapiens
  misc_RNA (1)...(19): siRNA sense strand
gagcagccaaggaggccaa

SEQ ID NO: 2516754 - RNA, 19 nt, Homo sapiens
  misc_RNA (1)...(19): siRNA sense strand
gcacauacgcaggggaaga

SEQ ID NO: 2516755 - RNA, 19 nt, Homo sapiens
  misc_RNA (1)...(19): siRNA sense strand
cgggcuacaaagugaccaa

SEQ ID NO: 2516756 - RNA, 19 nt, Homo sapiens
  misc_RNA (1)...(19): siRNA sense strand
gugaccaagcagagagacu

SEQ ID NO: 2516757 - RNA, 19 nt, Homo sapiens
  misc_RNA (1)...(19): siRNA sense strand
acuggaaccgggagaccaa

SEQ ID NO: 2516758 - RNA, 19 nt, Homo sapiens
  misc_RNA (1)...(19): siRNA sense strand
ccuccuccuccgagagcaa

SEQ ID NO: 2516759 - RNA, 19 nt, Homo sapiens
  misc_RNA (1)...(19): siRNA sense strand
aagcagagagacucggaga

SEQ ID NO: 2516760 - RNA, 19 nt, Homo sapiens
  misc_RNA (1)...(19): siRNA sense strand
gguuauuaaugcagguaaa

SEQ ID NO: 2516761 - RNA, 19 nt, Homo sapiens
  misc_RNA (1)...(19): siRNA sense strand
ggugaagacaauauggaaa

SEQ ID NO: 2516762 - RNA, 19 nt, Homo sapiens
  misc_RNA (1)...(19): siRNA sense strand
gaaagaagaauuauggcaa

SEQ ID NO: 2516763 - RNA, 19 nt, Homo sapiens
  misc_RNA (1)...(19): siRNA sense strand
gcucagaaggaaaggugua

SEQ ID NO: 2516764 - RNA, 19 nt, Homo sapiens
  misc_RNA (1)...(19): siRNA sense strand
ggaaaauacuggaggcgau

SEQ ID NO: 2516765 - RNA, 19 nt, Homo sapiens
  misc_RNA (1)...(19): siRNA sense strand
ugacauucugaaagagaua

SEQ ID NO: 2516766 - RNA, 19 nt, Homo sapiens
  misc_RNA (1)...(19): siRNA sense strand
cuaaggagcugguuggaga

SEQ ID NO: 2516767 - RNA, 19 nt, Homo sapiens
  misc_RNA (1)...(19): siRNA sense strand
ccaaggaagacacaggaaa

SEQ ID NO: 2516768 - RNA, 19 nt, Homo sapiens
  misc_RNA (1)...(19): siRNA sense strand
gauuaugauuuggaggaaa

SEQ ID NO: 2516769 - RNA, 19 nt, Homo sapiens
  misc_RNA (1)...(19): siRNA sense strand
cagaggacgaggaggaaga

SEQ ID NO: 2516770 - RNA, 19 nt, Homo sapiens
  misc_RNA (1)...(19): siRNA sense strand
cugaauuggcauuggucua

SEQ ID NO: 2516771 - RNA, 19 nt, Homo sapiens
  misc_RNA (1)...(19): siRNA sense strand
gcgcuguggacaagagcua

SEQ ID NO: 2516772 - RNA, 19 nt, Homo sapiens
  misc_RNA (1)...(19): siRNA sense strand
ggauuaaaggccagaaacu

SEQ ID NO: 2516773 - RNA, 19 nt, Homo sapiens
  misc_RNA (1)...(19): siRNA sense strand
aggaaaguggagaaauuaa

SEQ ID NO: 2516774 - RNA, 19 nt, Homo sapiens
  misc_RNA (1)...(19): siRNA sense strand
gaagaggacggaagggaga

SEQ ID NO: 2516775 - RNA, 19 nt, Homo sapiens
  misc_RNA (1)...(19): siRNA sense strand
acggaagggagaaggagaa

SEQ ID NO: 2516776 - RNA, 19 nt, Homo sapiens
  misc_RNA (1)...(19): siRNA sense strand
ugguauacauugcagaaau

SEQ ID NO: 2516777 - RNA, 19 nt, Homo sapiens
  misc_RNA (1)...(19): siRNA sense strand
agaagagggaagaagauuu

SEQ ID NO: 2516778 - RNA, 19 nt, Homo sapiens
  misc_RNA (1)...(19): siRNA sense strand
gaggauuaaaggccagaaa

SEQ ID NO: 2516779 - RNA, 19 nt, Homo sapiens
  misc_RNA (1)...(19): siRNA sense strand
uguguuaccuggugggaga

SEQ ID NO: 2516780 - RNA, 19 nt, Homo sapiens
  misc_RNA (1)...(19): siRNA sense strand
cguuauucgucauugcuua

SEQ ID NO: 2516781 - RNA, 19 nt, Homo sapiens
  misc_RNA (1)...(19): siRNA sense strand
ugcaaacagugaagggauu

SEQ ID NO: 2516782 - RNA, 19 nt, Homo sapiens
  misc_RNA (1)...(19): siRNA sense strand
uaucaaggaaacagaaaga

SEQ ID NO: 2516783 - RNA, 19 nt, Homo sapiens
  misc_RNA (1)...(19): siRNA sense strand
ucaagaaagaagagggaag

SEQ ID NO: 2516784 - RNA, 19 nt, Homo sapiens
  misc_RNA (1)...(19): siRNA sense strand
uggaaauuacuuuggaaga

SEQ ID NO: 2516785 - RNA, 19 nt, Homo sapiens
  misc_RNA (1)...(19): siRNA sense strand
aaggaaacagaaagaagaa

SEQ ID NO: 2516786 - RNA, 19 nt, Homo sapiens
  misc_RNA (1)...(19): siRNA sense strand
cuggaaaaguauugacaga

SEQ ID NO: 2516787 - RNA, 19 nt, Homo sapiens
  misc_RNA (1)...(19): siRNA sense strand
cuaaugauauugaaggcau

SEQ ID NO: 2516788 - RNA, 19 nt, Homo sapiens
  misc_RNA (1)...(19): siRNA sense strand
gaauuauggcaaaggcuga

SEQ ID NO: 2516789 - RNA, 19 nt, Homo sapiens
  misc_RNA (1)...(19): siRNA sense strand
uugaaagauaugaggacuu

SEQ ID NO: 2516790 - RNA, 19 nt, Homo sapiens
  misc_RNA (1)...(19): siRNA sense strand
guuagaaagcccaguggau

SEQ ID NO: 2516791 - RNA, 19 nt, Homo sapiens
  misc_RNA (1)...(19): siRNA sense strand
gggugaagacaauauggaa

SEQ ID NO: 2516792 - RNA, 19 nt, Homo sapiens
  misc_RNA (1)...(19): siRNA sense strand
cuucauguuccacgggaua

SEQ ID NO: 2516793 - RNA, 19 nt, Homo sapiens
  misc_RNA (1)...(19): siRNA sense strand
auagugaaauccagaaaca

SEQ ID NO: 2516794 - RNA, 19 nt, Homo sapiens
  misc_RNA (1)...(19): siRNA sense strand
uggacaugcuguugaagau

SEQ ID NO: 2516795 - RNA, 19 nt, Homo sapiens
  misc_RNA (1)...(19): siRNA sense strand
acggaagguuucugacgua

SEQ ID NO: 2516796 - RNA, 19 nt, Homo sapiens
  misc_RNA (1)...(19): siRNA sense strand
ugacagaaguauggaaaau

SEQ ID NO: 2516797 - RNA, 19 nt, Homo sapiens
  misc_RNA (1)...(19): siRNA sense strand
cgucaaaggcagaucugga

SEQ ID NO: 2516798 - RNA, 19 nt, Homo sapiens
  misc_RNA (1)...(19): siRNA sense strand
cauugugauucucuggaaa

SEQ ID NO: 2516799 - RNA, 19 nt, Homo sapiens
  misc_RNA (1)...(19): siRNA sense strand
cugaaagagauaacuggaa

SEQ ID NO: 2516800 - RNA, 19 nt, Homo sapiens
  misc_RNA (1)...(19): siRNA sense strand
agaggauagcauugaaaga

SEQ ID NO: 2516801 - RNA, 19 nt, Homo sapiens
  misc_RNA (1)...(19): siRNA sense strand
aggagggcgcuguggacaa

SEQ ID NO: 2516802 - RNA, 19 nt, Homo sapiens
  misc_RNA (1)...(19): siRNA sense strand
ccaaagugcgggagguucu

SEQ ID NO: 2516803 - RNA, 19 nt, Homo sapiens
  misc_RNA (1)...(19): siRNA sense strand
aggcagaucuggagucacu

SEQ ID NO: 2516804 - RNA, 19 nt, Homo sapiens
  misc_RNA (1)...(19): siRNA sense strand
cagaugaagaaguugcaau

SEQ ID NO: 2516805 - RNA, 19 nt, Homo sapiens
  misc_RNA (1)...(19): siRNA sense strand
gaugaauuaucaaggaaac

SEQ ID NO: 2516806 - RNA, 19 nt, Homo sapiens
  misc_RNA (1)...(19): siRNA sense strand
uaguggaagcccaggguga

SEQ ID NO: 2516807 - RNA, 19 nt, Homo sapiens
  misc_RNA (1)...(19): siRNA sense strand
agcaaauuauccagaccua

SEQ ID NO: 2516808 - RNA, 19 nt, Homo sapiens
  misc_RNA (1)...(19): siRNA sense strand
aaagaagagggaagaagau

SEQ ID NO: 2516809 - RNA, 19 nt, Homo sapiens
  misc_RNA (1)...(19): siRNA sense strand
gugaagacaauauggaaac

SEQ ID NO: 2516810 - RNA, 19 nt, Homo sapiens
  misc_RNA (1)...(19): siRNA sense strand
uuguacaagccgugucuaa

SEQ ID NO: 2516811 - RNA, 19 nt, Homo sapiens
  misc_RNA (1)...(19): siRNA sense strand
ggacaaggggagcaggaaa

SEQ ID NO: 2516812 - RNA, 19 nt, Homo sapiens
  misc_RNA (1)...(19): siRNA sense strand
agaaggaaucaaugggaca

SEQ ID NO: 2516813 - RNA, 19 nt, Homo sapiens
  misc_RNA (1)...(19): siRNA sense strand
cagucuuaaagcagaauua

SEQ ID NO: 2516814 - RNA, 19 nt, Homo sapiens
  misc_RNA (1)...(19): siRNA sense strand
uggccagggcagugaagaa

SEQ ID NO: 2516815 - RNA, 19 nt, Homo sapiens
  misc_RNA (1)...(19): siRNA sense strand
gguggaagcaaauuggcua

SEQ ID NO: 2516816 - RNA, 19 nt, Homo sapiens
  misc_RNA (1)...(19): siRNA sense strand
aagccaagggagugugcaa

SEQ ID NO: 2516817 - RNA, 19 nt, Homo sapiens
  misc_RNA (1)...(19): siRNA sense strand
gaaacuucuaugaaagcaa

SEQ ID NO: 2516818 - RNA, 19 nt, Homo sapiens
  misc_RNA (1)...(19): siRNA sense strand
ggacaaggauucacagccu

SEQ ID NO: 2516819 - RNA, 19 nt, Homo sapiens
  misc_RNA (1)...(19): siRNA sense strand
cagccuaccucaaagccaa

SEQ ID NO: 2516820 - RNA, 19 nt, Homo sapiens
  misc_RNA (1)...(19): siRNA sense strand
ugucaaaaccaaagaaguu

SEQ ID NO: 2516821 - RNA, 19 nt, Homo sapiens
  misc_RNA (1)...(19): siRNA sense strand
uugaagaaaucgugcccau

SEQ ID NO: 2516822 - RNA, 19 nt, Homo sapiens
  misc_RNA (1)...(19): siRNA sense strand
gcuuuaaagaggaaugcga

SEQ ID NO: 2516823 - RNA, 19 nt, Homo sapiens
  misc_RNA (1)...(19): siRNA sense strand
cagcaaaggaggagcucac

SEQ ID NO: 2516824 - RNA, 19 nt, Homo sapiens
  misc_RNA (1)...(19): siRNA sense strand
gcagcuauucacagaccaa

SEQ ID NO: 2516825 - RNA, 19 nt, Homo sapiens
  misc_RNA (1)...(19): siRNA sense strand
acaucaggaaauucaguua

SEQ ID NO: 2516826 - RNA, 19 nt, Homo sapiens
  misc_RNA (1)...(19): siRNA sense strand
aggagguguuccagcucaa

SEQ ID NO: 2516827 - RNA, 19 nt, Homo sapiens
  misc_RNA (1)...(19): siRNA sense strand
gccugaugcugaugaggau

SEQ ID NO: 2516828 - RNA, 19 nt, Homo sapiens
  misc_RNA (1)...(19): siRNA sense strand
ccuacaagaagccuggaau

SEQ ID NO: 2516829 - RNA, 19 nt, Homo sapiens
  misc_RNA (1)...(19): siRNA sense strand
gagaaaagguuuacgguga

SEQ ID NO: 2516830 - RNA, 19 nt, Homo sapiens
  misc_RNA (1)...(19): siRNA sense strand
gggagaaggagaaggggaa

SEQ ID NO: 2516831 - RNA, 19 nt, Homo sapiens
  misc_RNA (1)...(19): siRNA sense strand
cugaggaugaugaggagaa

SEQ ID NO: 2516832 - RNA, 19 nt, Homo sapiens
  misc_RNA (1)...(19): siRNA sense strand
uggaagaaggugaagugaa

SEQ ID NO: 2516833 - RNA, 19 nt, Homo sapiens
  misc_RNA (1)...(19): siRNA sense strand
auacagaaacagagccgua

SEQ ID NO: 2516834 - RNA, 19 nt, Homo sapiens
  misc_RNA (1)...(19): siRNA sense strand
ggaggaaggaggaguggga

SEQ ID NO: 2516835 - RNA, 19 nt, Homo sapiens
  misc_RNA (1)...(19): siRNA sense strand
ccggaagucaggugggaga

SEQ ID NO: 2516836 - RNA, 19 nt, Homo sapiens
  misc_RNA (1)...(19): siRNA sense strand
ccaucagaaccaagggaga

SEQ ID NO: 2516837 - RNA, 19 nt, Homo sapiens
  misc_RNA (1)...(19): siRNA sense strand
acuaugaaauugagcgguu

SEQ ID NO: 2516838 - RNA, 19 nt, Homo sapiens
  misc_RNA (1)...(19): siRNA sense strand
gggagaaggagcgggagaa

SEQ ID NO: 2516839 - RNA, 19 nt, Homo sapiens
  misc_RNA (1)...(19): siRNA sense strand
ggagaagggcgaaggcacu

SEQ ID NO: 2516840 - RNA, 19 nt, Homo sapiens
  misc_RNA (1)...(19): siRNA sense strand
gcccagaccaggaaggaga

SEQ ID NO: 2516841 - RNA, 19 nt, Homo sapiens
  misc_RNA (1)...(19): siRNA sense strand
caggaaggagaaaggaaaa

SEQ ID NO: 2516842 - RNA, 19 nt, Homo sapiens
  misc_RNA (1)...(19): siRNA sense strand
gggacgaaggggaggaaga

SEQ ID NO: 2516843 - RNA, 19 nt, Homo sapiens
  misc_RNA (1)...(19): siRNA sense strand
gcguggacucggaggacau

SEQ ID NO: 2516844 - RNA, 19 nt, Homo sapiens
  misc_RNA (1)...(19): siRNA sense strand
gaugacauucugagggaca

SEQ ID NO: 2516845 - RNA, 19 nt, Homo sapiens
  misc_RNA (1)...(19): siRNA sense strand
cgagccaggaggaggaaga

SEQ ID NO: 2516846 - RNA, 19 nt, Homo sapiens
  misc_RNA (1)...(19): siRNA sense strand
gcgaagacgaacgggaauu

SEQ ID NO: 2516847 - RNA, 19 nt, Homo sapiens
  misc_RNA (1)...(19): siRNA sense strand
agaaaucgaugauggggaa

SEQ ID NO: 2516848 - RNA, 19 nt, Homo sapiens
  misc_RNA (1)...(19): siRNA sense strand
uggcgaagacgaacgggaa

SEQ ID NO: 2516849 - RNA, 19 nt, Homo sapiens
  misc_RNA (1)...(19): siRNA sense strand
aggaggaggaagauaauca

SEQ ID NO: 2516850 - RNA, 19 nt, Homo sapiens
  misc_RNA (1)...(19): siRNA sense strand
gagugaacgacaaggggaa

SEQ ID NO: 2516851 - RNA, 19 nt, Homo sapiens
  misc_RNA (1)...(19): siRNA sense strand
cuaagaaagaagacggugu

SEQ ID NO: 2516852 - RNA, 19 nt, Homo sapiens
  misc_RNA (1)...(19): siRNA sense strand
gggcugaggaugaugagga

SEQ ID NO: 2516853 - RNA, 19 nt, Homo sapiens
  misc_RNA (1)...(19): siRNA sense strand
ggcucgaaggcgucggaaa

SEQ ID NO: 2516854 - RNA, 19 nt, Homo sapiens
  misc_RNA (1)...(19): siRNA sense strand
aggaggagugggagcguga

SEQ ID NO: 2516855 - RNA, 19 nt, Homo sapiens
  misc_RNA (1)...(19): siRNA sense strand
gguucuucaugaaagggaa

SEQ ID NO: 2516856 - RNA, 19 nt, Homo sapiens
  misc_RNA (1)...(19): siRNA sense strand
cgggagcgagagagagaga

SEQ ID NO: 2516857 - RNA, 19 nt, Homo sapiens
  misc_RNA (1)...(19): siRNA sense strand
agagagcagaugaguggaa

SEQ ID NO: 2516858 - RNA, 19 nt, Homo sapiens
  misc_RNA (1)...(19): siRNA sense strand
cggaggacauguacgcaga

SEQ ID NO: 2516859 - RNA, 19 nt, Homo sapiens
  misc_RNA (1)...(19): siRNA sense strand
uuaaagaggaaaagcggaa

SEQ ID NO: 2516860 - RNA, 19 nt, Homo sapiens
  misc_RNA (1)...(19): siRNA sense strand
gcuggaugagcaugagcua

SEQ ID NO: 2516861 - RNA, 19 nt, Homo sapiens
  misc_RNA (1)...(19): siRNA sense strand
ggagcgagagagagagaac

SEQ ID NO: 2516862 - RNA, 19 nt, Homo sapiens
  misc_RNA (1)...(19): siRNA sense strand
aaagggagcgggagcgaga

SEQ ID NO: 2516863 - RNA, 19 nt, Homo sapiens
  misc_RNA (1)...(19): siRNA sense strand
ggacaagcgaccuuaggga

SEQ ID NO: 2516864 - RNA, 19 nt, Homo sapiens
  misc_RNA (1)...(19): siRNA sense strand
acgaugaugaccuggaaga

SEQ ID NO: 2516865 - RNA, 19 nt, Homo sapiens
  misc_RNA (1)...(19): siRNA sense strand
ugauaaaggaagcaggaag

SEQ ID NO: 2516866 - RNA, 19 nt, Homo sapiens
  misc_RNA (1)...(19): siRNA sense strand
ggaacgaggacuccggcau

SEQ ID NO: 2516867 - RNA, 19 nt, Homo sapiens
  misc_RNA (1)...(19): siRNA sense strand
gcugauaaaggaagcagga

SEQ ID NO: 2516868 - RNA, 19 nt, Homo sapiens
  misc_RNA (1)...(19): siRNA sense strand
gggagcuggaugagcauga

SEQ ID NO: 2516869 - RNA, 19 nt, Homo sapiens
  misc_RNA (1)...(19): siRNA sense strand
aagaggacgaugauggaga

SEQ ID NO: 2516870 - RNA, 19 nt, Homo sapiens
  misc_RNA (1)...(19): siRNA sense strand
augcaaaggagguuuuaaa

SEQ ID NO: 2516871 - RNA, 19 nt, Homo sapiens
  misc_RNA (1)...(19): siRNA sense strand
augaugaggagaagggcga

SEQ ID NO: 2516872 - RNA, 19 nt, Homo sapiens
  misc_RNA (1)...(19): siRNA sense strand
cgaugaugaccuggaagaa

SEQ ID NO: 2516873 - RNA, 19 nt, Homo sapiens
  misc_RNA (1)...(19): siRNA sense strand
gccugauuuugaagagaaa

SEQ ID NO: 2516874 - RNA, 19 nt, Homo sapiens
  misc_RNA (1)...(19): siRNA sense strand
ugaaacagcugaaggccgu

SEQ ID NO: 2516875 - RNA, 19 nt, Homo sapiens
  misc_RNA (1)...(19): siRNA sense strand
acgaugacauucugaggga

SEQ ID NO: 2516876 - RNA, 19 nt, Homo sapiens
  misc_RNA (1)...(19): siRNA sense strand
caucagacaaggacaggca

SEQ ID NO: 2516877 - RNA, 19 nt, Homo sapiens
  misc_RNA (1)...(19): siRNA sense strand
aggaugaagagcagccaca

SEQ ID NO: 2516878 - RNA, 19 nt, Homo sapiens
  misc_RNA (1)...(19): siRNA sense strand
guguucagagugugggaga

SEQ ID NO: 2516879 - RNA, 19 nt, Homo sapiens
  misc_RNA (1)...(19): siRNA sense strand
aaaagaaagaggacgauga

SEQ ID NO: 2516880 - RNA, 19 nt, Homo sapiens
  misc_RNA (1)...(19): siRNA sense strand
uggcggacaguaugagaau

SEQ ID NO: 2516881 - RNA, 19 nt, Homo sapiens
  misc_RNA (1)...(19): siRNA sense strand
gcagaugaguggaaggacc

SEQ ID NO: 2516882 - RNA, 19 nt, Homo sapiens
  misc_RNA (1)...(19): siRNA sense strand
aaagaggaaaagcggaaaa

SEQ ID NO: 2516883 - RNA, 19 nt, Homo sapiens
  misc_RNA (1)...(19): siRNA sense strand
gaacagagaaagagggacu

SEQ ID NO: 2516884 - RNA, 19 nt, Homo sapiens
  misc_RNA (1)...(19): siRNA sense strand
cugaaugaacagagaaaga

SEQ ID NO: 2516885 - RNA, 19 nt, Homo sapiens
  misc_RNA (1)...(19): siRNA sense strand
ggauagagcccaaggugga

SEQ ID NO: 2516886 - RNA, 19 nt, Homo sapiens
  misc_RNA (1)...(19): siRNA sense strand
ccaaacggauagagcccaa

SEQ ID NO: 2516887 - RNA, 19 nt, Homo sapiens
  misc_RNA (1)...(19): siRNA sense strand
agaugaaugacguggugaa

SEQ ID NO: 2516888 - RNA, 19 nt, Homo sapiens
  misc_RNA (1)...(19): siRNA sense strand
cugaugaaguggaggugga

SEQ ID NO: 2516889 - RNA, 19 nt, Homo sapiens
  misc_RNA (1)...(19): siRNA sense strand
agcugaaugaacagagaaa

SEQ ID NO: 2516890 - RNA, 19 nt, Homo sapiens
  misc_RNA (1)...(19): siRNA sense strand
guggagugccugagagagu

SEQ ID NO: 2516891 - RNA, 19 nt, Homo sapiens
  misc_RNA (1)...(19): siRNA sense strand
caucagguugacagugaaa

SEQ ID NO: 2516892 - RNA, 19 nt, Homo sapiens
  misc_RNA (1)...(19): siRNA sense strand
gcguggagugccugagaga

SEQ ID NO: 2516893 - RNA, 19 nt, Homo sapiens
  misc_RNA (1)...(19): siRNA sense strand
cgagcaaggaugaugcaga

SEQ ID NO: 2516894 - RNA, 19 nt, Homo sapiens
  misc_RNA (1)...(19): siRNA sense strand
ucuucaaggcccacaggaa

SEQ ID NO: 2516895 - RNA, 19 nt, Homo sapiens
  misc_RNA (1)...(19): siRNA sense strand
aggaagaccagaaggugca

SEQ ID NO: 2516896 - RNA, 19 nt, Homo sapiens
  misc_RNA (1)...(19): siRNA sense strand
cucccaaagugcuggcauu

SEQ ID NO: 2516897 - RNA, 19 nt, Homo sapiens
  misc_RNA (1)...(19): siRNA sense strand
agguggaauuugaugcuga

SEQ ID NO: 2516898 - RNA, 19 nt, Homo sapiens
  misc_RNA (1)...(19): siRNA sense strand
ugaacuucugcaagacaua

SEQ ID NO: 2516899 - RNA, 19 nt, Homo sapiens
  misc_RNA (1)...(19): siRNA sense strand
gagcaaggaugaugcagac

SEQ ID NO: 2516900 - RNA, 19 nt, Homo sapiens
  misc_RNA (1)...(19): siRNA sense strand
gcaagagguucacucgaca

SEQ ID NO: 2516901 - RNA, 19 nt, Homo sapiens
  misc_RNA (1)...(19): siRNA sense strand
gggaaaagaagauggggaa

SEQ ID NO: 2516902 - RNA, 19 nt, Homo sapiens
  misc_RNA (1)...(19): siRNA sense strand
guggagaaggagagaagaa

SEQ ID NO: 2516903 - RNA, 19 nt, Homo sapiens
  misc_RNA (1)...(19): siRNA sense strand
aggaagaagaggaagauga

SEQ ID NO: 2516904 - RNA, 19 nt, Homo sapiens
  misc_RNA (1)...(19): siRNA sense strand
agaaaaucauugugagcaa

SEQ ID NO: 2516905 - RNA, 19 nt, Homo sapiens
  misc_RNA (1)...(19): siRNA sense strand
aggaggaggaagaggaaga

SEQ ID NO: 2516906 - RNA, 19 nt, Homo sapiens
  misc_RNA (1)...(19): siRNA sense strand
cugaggaagaagaggaaga

SEQ ID NO: 2516907 - RNA, 19 nt, Homo sapiens
  misc_RNA (1)...(19): siRNA sense strand
cagaaaugaacgaugaaga

SEQ ID NO: 2516908 - RNA, 19 nt, Homo sapiens
  misc_RNA (1)...(19): siRNA sense strand
uguaauaugcugagagcca

SEQ ID NO: 2516909 - RNA, 19 nt, Homo sapiens
  misc_RNA (1)...(19): siRNA sense strand
agacaguauuguagaugau

SEQ ID NO: 2516910 - RNA, 19 nt, Homo sapiens
  misc_RNA (1)...(19): siRNA sense strand
aaggagagaagaagagaga

SEQ ID NO: 2516911 - RNA, 19 nt, Homo sapiens
  misc_RNA (1)...(19): siRNA sense strand
aggaagaugaggaggagga

SEQ ID NO: 2516912 - RNA, 19 nt, Homo sapiens
  misc_RNA (1)...(19): siRNA sense strand
uacugaaaguccagagaau

SEQ ID NO: 2516913 - RNA, 19 nt, Homo sapiens
  misc_RNA (1)...(19): siRNA sense strand
aggaggaagaggaagaaga

SEQ ID NO: 2516914 - RNA, 19 nt, Homo sapiens
  misc_RNA (1)...(19): siRNA sense strand
gaaaggaagcaaagccaca

SEQ ID NO: 2516915 - RNA, 19 nt, Homo sapiens
  misc_RNA (1)...(19): siRNA sense strand
ggacuaagaccaacagcca

SEQ ID NO: 2516916 - RNA, 19 nt, Homo sapiens
  misc_RNA (1)...(19): siRNA sense strand
ggugacagcaagaagaaaa

SEQ ID NO: 2516917 - RNA, 19 nt, Homo sapiens
  misc_RNA (1)...(19): siRNA sense strand
aagccguauuugugggcaa

SEQ ID NO: 2516918 - RNA, 19 nt, Homo sapiens
  misc_RNA (1)...(19): siRNA sense strand
agaggaaaguggagacaac

SEQ ID NO: 2516919 - RNA, 19 nt, Homo sapiens
  misc_RNA (1)...(19): siRNA sense strand
aagaggaagaagacaguau

SEQ ID NO: 2516920 - RNA, 19 nt, Homo sapiens
  misc_RNA (1)...(19): siRNA sense strand
cugaaaguccagagaaugu

SEQ ID NO: 2516921 - RNA, 19 nt, Homo sapiens
  misc_RNA (1)...(19): siRNA sense strand
ccacagacuacuugcuaca

SEQ ID NO: 2516922 - RNA, 19 nt, Homo sapiens
  misc_RNA (1)...(19): siRNA sense strand
gaaaagaagauggggaaga

SEQ ID NO: 2516923 - RNA, 19 nt, Homo sapiens
  misc_RNA (1)...(19): siRNA sense strand
ccaccuggacuaagaccaa

SEQ ID NO: 2516924 - RNA, 19 nt, Homo sapiens
  misc_RNA (1)...(19): siRNA sense strand
gugauugaugccagguuua

SEQ ID NO: 2516925 - RNA, 19 nt, Homo sapiens
  misc_RNA (1)...(19): siRNA sense strand
caauaaaaggcaucaggaa

SEQ ID NO: 2516926 - RNA, 19 nt, Homo sapiens
  misc_RNA (1)...(19): siRNA sense strand
aagaagaggaagaugagga

SEQ ID NO: 2516927 - RNA, 19 nt, Homo sapiens
  misc_RNA (1)...(19): siRNA sense strand
aagaggaagaugaggagga

SEQ ID NO: 2516928 - RNA, 19 nt, Homo sapiens
  misc_RNA (1)...(19): siRNA sense strand
aagaagagauggcugcaga

SEQ ID NO: 2516929 - RNA, 19 nt, Homo sapiens
  misc_RNA (1)...(19): siRNA sense strand
acucaacacccuaacuaaa

SEQ ID NO: 2516930 - RNA, 19 nt, Homo sapiens
  misc_RNA (1)...(19): siRNA sense strand
caacaauagcagacgccga

SEQ ID NO: 2516931 - RNA, 19 nt, Homo sapiens
  misc_RNA (1)...(19): siRNA sense strand
cuucaggauuggaguggca

SEQ ID NO: 2516932 - RNA, 19 nt, Homo sapiens
  misc_RNA (1)...(19): siRNA sense strand
aaaagagguuucagggaga

SEQ ID NO: 2516933 - RNA, 19 nt, Homo sapiens
  misc_RNA (1)...(19): siRNA sense strand
cagaaaggaagcaaagcca

SEQ ID NO: 2516934 - RNA, 19 nt, Homo sapiens
  misc_RNA (1)...(19): siRNA sense strand
gugcggauguggagccuca

SEQ ID NO: 2516935 - RNA, 19 nt, Homo sapiens
  misc_RNA (1)...(19): siRNA sense strand
ccucuucauuacuggagaa

SEQ ID NO: 2516936 - RNA, 19 nt, Homo sapiens
  misc_RNA (1)...(19): siRNA sense strand
gggcaauauugaugaccac

SEQ ID NO: 2516937 - RNA, 19 nt, Homo sapiens
  misc_RNA (1)...(19): siRNA sense strand
agaucaacucaguguucaa

SEQ ID NO: 2516938 - RNA, 19 nt, Homo sapiens
  misc_RNA (1)...(19): siRNA sense strand
aguucagauucuucagauu

SEQ ID NO: 2516939 - RNA, 19 nt, Homo sapiens
  misc_RNA (1)...(19): siRNA sense strand
cgaugaagauggugguagc

SEQ ID NO: 2516940 - RNA, 19 nt, Homo sapiens
  misc_RNA (1)...(19): siRNA sense strand
ggcccaagguacugauagu

SEQ ID NO: 2516941 - RNA, 19 nt, Homo sapiens
  misc_RNA (1)...(19): siRNA sense strand
agagagugaaccacaacaa

SEQ ID NO: 2516942 - RNA, 19 nt, Homo sapiens
  misc_RNA (1)...(19): siRNA sense strand
gcgaugucaguguggaaga

SEQ ID NO: 2516943 - RNA, 19 nt, Homo sapiens
  misc_RNA (1)...(19): siRNA sense strand
cggaaaggacugcucugaa

SEQ ID NO: 2516944 - RNA, 19 nt, Homo sapiens
  misc_RNA (1)...(19): siRNA sense strand
ccguuuuacuccucggaua

SEQ ID NO: 2516945 - RNA, 19 nt, Homo sapiens
  misc_RNA (1)...(19): siRNA sense strand
cacaacaaguuucuggcua

SEQ ID NO: 2516946 - RNA, 19 nt, Homo sapiens
  misc_RNA (1)...(19): siRNA sense strand
ugaggaggaggaagaggaa

SEQ ID NO: 2516947 - RNA, 19 nt, Homo sapiens
  misc_RNA (1)...(19): siRNA sense strand
ugaagauggugguagcgau

SEQ ID NO: 2516948 - RNA, 19 nt, Homo sapiens
  misc_RNA (1)...(19): siRNA sense strand
agaaguuuggaguggguga

SEQ ID NO: 2516949 - RNA, 19 nt, Homo sapiens
  misc_RNA (1)...(19): siRNA sense strand
cuucgaaauuacuucaaga

SEQ ID NO: 2516950 - RNA, 19 nt, Homo sapiens
  misc_RNA (1)...(19): siRNA sense strand
uagcgaugucaguguggaa

SEQ ID NO: 2516951 - RNA, 19 nt, Homo sapiens
  misc_RNA (1)...(19): siRNA sense strand
uggagugggugaugaugau

SEQ ID NO: 2516952 - RNA, 19 nt, Homo sapiens
  misc_RNA (1)...(19): siRNA sense strand
gagguuucagggagaauau

SEQ ID NO: 2516953 - RNA, 19 nt, Homo sapiens
  misc_RNA (1)...(19): siRNA sense strand
agagauaccugaagaagau

SEQ ID NO: 2516954 - RNA, 19 nt, Homo sapiens
  misc_RNA (1)...(19): siRNA sense strand
ggacaucccuguacgguau

SEQ ID NO: 2516955 - RNA, 19 nt, Homo sapiens
  misc_RNA (1)...(19): siRNA sense strand
ggaggagccuguuggaaga

SEQ ID NO: 2516956 - RNA, 19 nt, Homo sapiens
  misc_RNA (1)...(19): siRNA sense strand
gagagauaccugaagaaga

SEQ ID NO: 2516957 - RNA, 19 nt, Homo sapiens
  misc_RNA (1)...(19): siRNA sense strand
gcauguacauccuguggaa

SEQ ID NO: 2516958 - RNA, 19 nt, Homo sapiens
  misc_RNA (1)...(19): siRNA sense strand
ccauauaccuucagagggu

SEQ ID NO: 2516959 - RNA, 19 nt, Homo sapiens
  misc_RNA (1)...(19): siRNA sense strand
gacucuaacuggaggccua

SEQ ID NO: 2516960 - RNA, 19 nt, Homo sapiens
  misc_RNA (1)...(19): siRNA sense strand
cagcagaaacagaggcagu

SEQ ID NO: 2516961 - RNA, 19 nt, Homo sapiens
  misc_RNA (1)...(19): siRNA sense strand
aggugaaucccgagcacua

SEQ ID NO: 2516962 - RNA, 19 nt, Homo sapiens
  misc_RNA (1)...(19): siRNA sense strand
ccacuuuggagcugggcua

SEQ ID NO: 2516963 - RNA, 19 nt, Homo sapiens
  misc_RNA (1)...(19): siRNA sense strand
caucagagcuggucuuuga

SEQ ID NO: 2516964 - RNA, 19 nt, Homo sapiens
  misc_RNA (1)...(19): siRNA sense strand
ggagcaggcagcaaguaaa

SEQ ID NO: 2516965 - RNA, 19 nt, Homo sapiens
  misc_RNA (1)...(19): siRNA sense strand
aaacagaggcaguucguga

SEQ ID NO: 2516966 - RNA, 19 nt, Homo sapiens
  misc_RNA (1)...(19): siRNA sense strand
cgguaugaaagcagugaca

SEQ ID NO: 2516967 - RNA, 19 nt, Homo sapiens
  misc_RNA (1)...(19): siRNA sense strand
gcgcuaucuucaugcagua

SEQ ID NO: 2516968 - RNA, 19 nt, Homo sapiens
  misc_RNA (1)...(19): siRNA sense strand
ccuacaggagcgaguacaa

SEQ ID NO: 2516969 - RNA, 19 nt, Homo sapiens
  misc_RNA (1)...(19): siRNA sense strand
gagcagaagcugaagcaag

SEQ ID NO: 2516970 - RNA, 19 nt, Homo sapiens
  misc_RNA (1)...(19): siRNA sense strand
ggucucagcuugacuauga

SEQ ID NO: 2516971 - RNA, 19 nt, Homo sapiens
  misc_RNA (1)...(19): siRNA sense strand
gcuaugagcugcuggaccu

SEQ ID NO: 2516972 - RNA, 19 nt, Homo sapiens
  misc_RNA (1)...(19): siRNA sense strand
gcauaaggcucuacggcug

SEQ ID NO: 2516973 - RNA, 19 nt, Homo sapiens
  misc_RNA (1)...(19): siRNA sense strand
cugacaaugcagaggagga

SEQ ID NO: 2516974 - RNA, 19 nt, Homo sapiens
  misc_RNA (1)...(19): siRNA sense strand
gagacuuccuuccuggaua

SEQ ID NO: 2516975 - RNA, 19 nt, Homo sapiens
  misc_RNA (1)...(19): siRNA sense strand
uggagagauaccugaagaa

SEQ ID NO: 2516976 - RNA, 19 nt, Homo sapiens
  misc_RNA (1)...(19): siRNA sense strand
ggguacagcacaagcaacu

SEQ ID NO: 2516977 - RNA, 19 nt, Homo sapiens
  misc_RNA (1)...(19): siRNA sense strand
gguggcugcagcugggaaa

SEQ ID NO: 2516978 - RNA, 19 nt, Homo sapiens
  misc_RNA (1)...(19): siRNA sense strand
uggagcaggcagcaaguaa

SEQ ID NO: 2516979 - RNA, 19 nt, Homo sapiens
  misc_RNA (1)...(19): siRNA sense strand
aagaagaaugugagauuac

SEQ ID NO: 2516980 - RNA, 19 nt, Homo sapiens
  misc_RNA (1)...(19): siRNA sense strand
aggagaagcauaaggcucu

SEQ ID NO: 2516981 - RNA, 19 nt, Homo sapiens
  misc_RNA (1)...(19): siRNA sense strand
gugaguugcuaguuggcca

SEQ ID NO: 2516982 - RNA, 19 nt, Homo sapiens
  misc_RNA (1)...(19): siRNA sense strand
auugacacuuccugagcua

SEQ ID NO: 2516983 - RNA, 19 nt, Homo sapiens
  misc_RNA (1)...(19): siRNA sense strand
cggacaucccuguacggua

SEQ ID NO: 2516984 - RNA, 19 nt, Homo sapiens
  misc_RNA (1)...(19): siRNA sense strand
guaucaauccagagagaga

SEQ ID NO: 2516985 - RNA, 19 nt, Homo sapiens
  misc_RNA (1)...(19): siRNA sense strand
agaagaaagggaagaugaa

SEQ ID NO: 2516986 - RNA, 19 nt, Homo sapiens
  misc_RNA (1)...(19): siRNA sense strand
aggaaguuguccaagcaaa

SEQ ID NO: 2516987 - RNA, 19 nt, Homo sapiens
  misc_RNA (1)...(19): siRNA sense strand
aagaaagggaagaugaaga

SEQ ID NO: 2516988 - RNA, 19 nt, Homo sapiens
  misc_RNA (1)...(19): siRNA sense strand
ggagaagagcauuugccaa

SEQ ID NO: 2516989 - RNA, 19 nt, Homo sapiens
  misc_RNA (1)...(19): siRNA sense strand
ugguaucaauccagagaga

SEQ ID NO: 2516990 - RNA, 19 nt, Homo sapiens
  misc_RNA (1)...(19): siRNA sense strand
cagacgaggagaagagcau

SEQ ID NO: 2516991 - RNA, 19 nt, Homo sapiens
  misc_RNA (1)...(19): siRNA sense strand
uugaaaaggagaagaaaga

SEQ ID NO: 2516992 - RNA, 19 nt, Homo sapiens
  misc_RNA (1)...(19): siRNA sense strand
ggcuaauaucagucaacaa

SEQ ID NO: 2516993 - RNA, 19 nt, Homo sapiens
  misc_RNA (1)...(19): siRNA sense strand
aggcagcaacuuugggauu

SEQ ID NO: 2516994 - RNA, 19 nt, Homo sapiens
  misc_RNA (1)...(19): siRNA sense strand
gcacaucgaccuuggcuga

SEQ ID NO: 2516995 - RNA, 19 nt, Homo sapiens
  misc_RNA (1)...(19): siRNA sense strand
gccggaaagugcugcggaa

SEQ ID NO: 2516996 - RNA, 19 nt, Homo sapiens
  misc_RNA (1)...(19): siRNA sense strand
guaugaagacuuugccaga

SEQ ID NO: 2516997 - RNA, 19 nt, Homo sapiens
  misc_RNA (1)...(19): siRNA sense strand
cgaccuuggcugaucacaa

SEQ ID NO: 2516998 - RNA, 19 nt, Homo sapiens
  misc_RNA (1)...(19): siRNA sense strand
cuaugauuauggagaaguu

SEQ ID NO: 2516999 - RNA, 19 nt, Homo sapiens
  misc_RNA (1)...(19): siRNA sense strand
uaagugagcuagaggccuu

SEQ ID NO: 2517000 - RNA, 19 nt, Homo sapiens
  misc_RNA (1)...(19): siRNA sense strand
gagaagagcauuugccaac

SEQ ID NO: 2517001 - RNA, 19 nt, Homo sapiens
  misc_RNA (1)...(19): siRNA sense strand
cguuugugaucuugcuaau

SEQ ID NO: 2517002 - RNA, 19 nt, Homo sapiens
  misc_RNA (1)...(19): siRNA sense strand
auucagauuuugaggauga

SEQ ID NO: 2517003 - RNA, 19 nt, Homo sapiens
  misc_RNA (1)...(19): siRNA sense strand
uuaauaagcugcuagcaca

SEQ ID NO: 2517004 - RNA, 19 nt, Homo sapiens
  misc_RNA (1)...(19): siRNA sense strand
agagaaggaaguuguccaa

SEQ ID NO: 2517005 - RNA, 19 nt, Homo sapiens
  misc_RNA (1)...(19): siRNA sense strand
aggagaagaaagaaagucu

SEQ ID NO: 2517006 - RNA, 19 nt, Homo sapiens
  misc_RNA (1)...(19): siRNA sense strand
cauucagaaacuugucaaa

SEQ ID NO: 2517007 - RNA, 19 nt, Homo sapiens
  misc_RNA (1)...(19): siRNA sense strand
cggaaggauaaaagaauca

SEQ ID NO: 2517008 - RNA, 19 nt, Homo sapiens
  misc_RNA (1)...(19): siRNA sense strand
caguucaaacacucagaaa

SEQ ID NO: 2517009 - RNA, 19 nt, Homo sapiens
  misc_RNA (1)...(19): siRNA sense strand
ggauucucuaagugagcua

SEQ ID NO: 2517010 - RNA, 19 nt, Homo sapiens
  misc_RNA (1)...(19): siRNA sense strand
gggaagaugaagaggcguc

SEQ ID NO: 2517011 - RNA, 19 nt, Homo sapiens
  misc_RNA (1)...(19): siRNA sense strand
ggaaguuguccaagcaaac

SEQ ID NO: 2517012 - RNA, 19 nt, Homo sapiens
  misc_RNA (1)...(19): siRNA sense strand
gacgaggagaagagcauuu

SEQ ID NO: 2517013 - RNA, 19 nt, Homo sapiens
  misc_RNA (1)...(19): siRNA sense strand
ggacuauaccugggaaaau

SEQ ID NO: 2517014 - RNA, 19 nt, Homo sapiens
  misc_RNA (1)...(19): siRNA sense strand
gaaaauuuaucaagggcua

SEQ ID NO: 2517015 - RNA, 19 nt, Homo sapiens
  misc_RNA (1)...(19): siRNA sense strand
auucauaugccaaggaaaa

SEQ ID NO: 2517016 - RNA, 19 nt, Homo sapiens
  misc_RNA (1)...(19): siRNA sense strand
auucaaauccauuccgaaa

SEQ ID NO: 2517017 - RNA, 19 nt, Homo sapiens
  misc_RNA (1)...(19): siRNA sense strand
ugauauaaagagugcugaa

SEQ ID NO: 2517018 - RNA, 19 nt, Homo sapiens
  misc_RNA (1)...(19): siRNA sense strand
cgaaaaugcuugcuggaga

SEQ ID NO: 2517019 - RNA, 19 nt, Homo sapiens
  misc_RNA (1)...(19): siRNA sense strand
uaauaagauuucugaggga

SEQ ID NO: 2517020 - RNA, 19 nt, Homo sapiens
  misc_RNA (1)...(19): siRNA sense strand
gauucauaugccaaggaaa

SEQ ID NO: 2517021 - RNA, 19 nt, Homo sapiens
  misc_RNA (1)...(19): siRNA sense strand
caagacuaauuaugcgcaa

SEQ ID NO: 2517022 - RNA, 19 nt, Homo sapiens
  misc_RNA (1)...(19): siRNA sense strand
ggccagugcccaagauaca

SEQ ID NO: 2517023 - RNA, 19 nt, Homo sapiens
  misc_RNA (1)...(19): siRNA sense strand
agacugaaugacacagcaa

SEQ ID NO: 2517024 - RNA, 19 nt, Homo sapiens
  misc_RNA (1)...(19): siRNA sense strand
gcgcaaucaaggcagucua

SEQ ID NO: 2517025 - RNA, 19 nt, Homo sapiens
  misc_RNA (1)...(19): siRNA sense strand
cgaaguugugcaaaaguaa

SEQ ID NO: 2517026 - RNA, 19 nt, Homo sapiens
  misc_RNA (1)...(19): siRNA sense strand
aagcacugacuguggaaca

SEQ ID NO: 2517027 - RNA, 19 nt, Homo sapiens
  misc_RNA (1)...(19): siRNA sense strand
augagaaugaggaugauuu

SEQ ID NO: 2517028 - RNA, 19 nt, Homo sapiens
  misc_RNA (1)...(19): siRNA sense strand
auauaaagagugcugaaca

SEQ ID NO: 2517029 - RNA, 19 nt, Homo sapiens
  misc_RNA (1)...(19): siRNA sense strand
agcucgaaguugugcaaaa

SEQ ID NO: 2517030 - RNA, 19 nt, Homo sapiens
  misc_RNA (1)...(19): siRNA sense strand
cagcaaacucugggcccaa

SEQ ID NO: 2517031 - RNA, 19 nt, Homo sapiens
  misc_RNA (1)...(19): siRNA sense strand
ccuguaaacugaagcugca

SEQ ID NO: 2517032 - RNA, 19 nt, Homo sapiens
  misc_RNA (1)...(19): siRNA sense strand
auugaaaggggcagaggaa

SEQ ID NO: 2517033 - RNA, 19 nt, Homo sapiens
  misc_RNA (1)...(19): siRNA sense strand
agaaaacaugguagaaaga

SEQ ID NO: 2517034 - RNA, 19 nt, Homo sapiens
  misc_RNA (1)...(19): siRNA sense strand
uucaauaagcagagagaug

SEQ ID NO: 2517035 - RNA, 19 nt, Homo sapiens
  misc_RNA (1)...(19): siRNA sense strand
acaagaaagaagauggaaa

SEQ ID NO: 2517036 - RNA, 19 nt, Homo sapiens
  misc_RNA (1)...(19): siRNA sense strand
cugaagaccugguggaaaa

SEQ ID NO: 2517037 - RNA, 19 nt, Homo sapiens
  misc_RNA (1)...(19): siRNA sense strand
gggaaaacauggaggcaga

SEQ ID NO: 2517038 - RNA, 19 nt, Homo sapiens
  misc_RNA (1)...(19): siRNA sense strand
augaaauacaagaggagua

SEQ ID NO: 2517039 - RNA, 19 nt, Homo sapiens
  misc_RNA (1)...(19): siRNA sense strand
ggaugauauucucuggaaa

SEQ ID NO: 2517040 - RNA, 19 nt, Homo sapiens
  misc_RNA (1)...(19): siRNA sense strand
cuuuaagacugcaguggaa

SEQ ID NO: 2517041 - RNA, 19 nt, Homo sapiens
  misc_RNA (1)...(19): siRNA sense strand
aagagaaagcagagcauau

SEQ ID NO: 2517042 - RNA, 19 nt, Homo sapiens
  misc_RNA (1)...(19): siRNA sense strand
agaggaagcuggaggacca

SEQ ID NO: 2517043 - RNA, 19 nt, Homo sapiens
  misc_RNA (1)...(19): siRNA sense strand
ugacagaggagcaggcaga

SEQ ID NO: 2517044 - RNA, 19 nt, Homo sapiens
  misc_RNA (1)...(19): siRNA sense strand
ccuuagaagaguuggagau

SEQ ID NO: 2517045 - RNA, 19 nt, Homo sapiens
  misc_RNA (1)...(19): siRNA sense strand
uggcaauggaggaggcaga

SEQ ID NO: 2517046 - RNA, 19 nt, Homo sapiens
  misc_RNA (1)...(19): siRNA sense strand
gggagagagugcagcggau

SEQ ID NO: 2517047 - RNA, 19 nt, Homo sapiens
  misc_RNA (1)...(19): siRNA sense strand
agucacgguccaagaguaa

SEQ ID NO: 2517048 - RNA, 19 nt, Homo sapiens
  misc_RNA (1)...(19): siRNA sense strand
aagagaaguucaagggacu

SEQ ID NO: 2517049 - RNA, 19 nt, Homo sapiens
  misc_RNA (1)...(19): siRNA sense strand
ccauaacagcagaagaaaa

SEQ ID NO: 2517050 - RNA, 19 nt, Homo sapiens
  misc_RNA (1)...(19): siRNA sense strand
aggcagaagaguugcugaa

SEQ ID NO: 2517051 - RNA, 19 nt, Homo sapiens
  misc_RNA (1)...(19): siRNA sense strand
cagagagagaugauggcaa

SEQ ID NO: 2517052 - RNA, 19 nt, Homo sapiens
  misc_RNA (1)...(19): siRNA sense strand
augaagaccaaauggaaau

SEQ ID NO: 2517053 - RNA, 19 nt, Homo sapiens
  misc_RNA (1)...(19): siRNA sense strand
gcaagagaaagcagagcau

SEQ ID NO: 2517054 - RNA, 19 nt, Homo sapiens
  misc_RNA (1)...(19): siRNA sense strand
agauuuggccacagggaau

SEQ ID NO: 2517055 - RNA, 19 nt, Homo sapiens
  misc_RNA (1)...(19): siRNA sense strand
cagcaacaguccaagguga

SEQ ID NO: 2517056 - RNA, 19 nt, Homo sapiens
  misc_RNA (1)...(19): siRNA sense strand
agaagugcaucgaagacaa

SEQ ID NO: 2517057 - RNA, 19 nt, Homo sapiens
  misc_RNA (1)...(19): siRNA sense strand
guuaacaacaccaagacaa

SEQ ID NO: 2517058 - RNA, 19 nt, Homo sapiens
  misc_RNA (1)...(19): siRNA sense strand
uggcaaacugcgaggagau

SEQ ID NO: 2517059 - RNA, 19 nt, Homo sapiens
  misc_RNA (1)...(19): siRNA sense strand
aggagaauguagaagaguu

SEQ ID NO: 2517060 - RNA, 19 nt, Homo sapiens
  misc_RNA (1)...(19): siRNA sense strand
acuuaaagcaggaaaagaa

SEQ ID NO: 2517061 - RNA, 19 nt, Homo sapiens
  misc_RNA (1)...(19): siRNA sense strand
ggugaauugcugcgggaga

SEQ ID NO: 2517062 - RNA, 19 nt, Homo sapiens
  misc_RNA (1)...(19): siRNA sense strand
gaugauauucucuggaaaa

SEQ ID NO: 2517063 - RNA, 19 nt, Homo sapiens
  misc_RNA (1)...(19): siRNA sense strand
ccuccuggccuaagaagaa

SEQ ID NO: 2517064 - RNA, 19 nt, Homo sapiens
  misc_RNA (1)...(19): siRNA sense strand
ccaugagggccuugggcau

SEQ ID NO: 2517065 - RNA, 19 nt, Homo sapiens
  misc_RNA (1)...(19): siRNA sense strand
ggaacagaacacagcugaa

SEQ ID NO: 2517066 - RNA, 19 nt, Homo sapiens
  misc_RNA (1)...(19): siRNA sense strand
ccucaagcuuccugcccaa

SEQ ID NO: 2517067 - RNA, 19 nt, Homo sapiens
  misc_RNA (1)...(19): siRNA sense strand
aagaagaagacuuugccaa

SEQ ID NO: 2517068 - RNA, 19 nt, Homo sapiens
  misc_RNA (1)...(19): siRNA sense strand
ggaugaggcaggaggucca

SEQ ID NO: 2517069 - RNA, 19 nt, Homo sapiens
  misc_RNA (1)...(19): siRNA sense strand
aagcagaguucgugaagcu

SEQ ID NO: 2517070 - RNA, 19 nt, Homo sapiens
  misc_RNA (1)...(19): siRNA sense strand
gggccuugggcauggacua

SEQ ID NO: 2517071 - RNA, 19 nt, Homo sapiens
  misc_RNA (1)...(19): siRNA sense strand
gcuaaaaugcugcugcaaa

SEQ ID NO: 2517072 - RNA, 19 nt, Homo sapiens
  misc_RNA (1)...(19): siRNA sense strand
guagaagaguuaauggacu

SEQ ID NO: 2517073 - RNA, 19 nt, Homo sapiens
  misc_RNA (1)...(19): siRNA sense strand
cuggaagagcugagugcau

SEQ ID NO: 2517074 - RNA, 19 nt, Homo sapiens
  misc_RNA (1)...(19): siRNA sense strand
aaccaguaccagagagaga

SEQ ID NO: 2517075 - RNA, 19 nt, Homo sapiens
  misc_RNA (1)...(19): siRNA sense strand
ggaauugaaaccagaggca

SEQ ID NO: 2517076 - RNA, 19 nt, Homo sapiens
  misc_RNA (1)...(19): siRNA sense strand
guccagagcgugaggcaga

SEQ ID NO: 2517077 - RNA, 19 nt, Homo sapiens
  misc_RNA (1)...(19): siRNA sense strand
uuccauaacagcagaagaa

SEQ ID NO: 2517078 - RNA, 19 nt, Homo sapiens
  misc_RNA (1)...(19): siRNA sense strand
ccgagagacauguggacca

SEQ ID NO: 2517079 - RNA, 19 nt, Homo sapiens
  misc_RNA (1)...(19): siRNA sense strand
cagcugauggcgugaauga

SEQ ID NO: 2517080 - RNA, 19 nt, Homo sapiens
  misc_RNA (1)...(19): siRNA sense strand
caccccaaguagagagaaa

SEQ ID NO: 2517081 - RNA, 19 nt, Homo sapiens
  misc_RNA (1)...(19): siRNA sense strand
cuaaaauacaggagaaugu

SEQ ID NO: 2517082 - RNA, 19 nt, Homo sapiens
  misc_RNA (1)...(19): siRNA sense strand
aggcagagacugaaggaug

SEQ ID NO: 2517083 - RNA, 19 nt, Homo sapiens
  misc_RNA (1)...(19): siRNA sense strand
ugagagaggaacaacagaa

SEQ ID NO: 2517084 - RNA, 19 nt, Homo sapiens
  misc_RNA (1)...(19): siRNA sense strand
agaacagugucgugcuaga

SEQ ID NO: 2517085 - RNA, 19 nt, Homo sapiens
  misc_RNA (1)...(19): siRNA sense strand
uuggaaugaaauuggacaa

SEQ ID NO: 2517086 - RNA, 19 nt, Homo sapiens
  misc_RNA (1)...(19): siRNA sense strand
caccaagcccugagcaaga

SEQ ID NO: 2517087 - RNA, 19 nt, Homo sapiens
  misc_RNA (1)...(19): siRNA sense strand
cuggaaacaagaaagaaga

SEQ ID NO: 2517088 - RNA, 19 nt, Homo sapiens
  misc_RNA (1)...(19): siRNA sense strand
ucaagcagaaguuggacaa

SEQ ID NO: 2517089 - RNA, 19 nt, Homo sapiens
  misc_RNA (1)...(19): siRNA sense strand
uuugggacucugugggaaa

SEQ ID NO: 2517090 - RNA, 19 nt, Homo sapiens
  misc_RNA (1)...(19): siRNA sense strand
ggacaaugacuuaaagcag

SEQ ID NO: 2517091 - RNA, 19 nt, Homo sapiens
  misc_RNA (1)...(19): siRNA sense strand
caauggaggaggcagaaga

SEQ ID NO: 2517092 - RNA, 19 nt, Homo sapiens
  misc_RNA (1)...(19): siRNA sense strand
gcacgagagagcaggguac

SEQ ID NO: 2517093 - RNA, 19 nt, Homo sapiens
  misc_RNA (1)...(19): siRNA sense strand
caccagaagaggagccuga

SEQ ID NO: 2517094 - RNA, 19 nt, Homo sapiens
  misc_RNA (1)...(19): siRNA sense strand
aggcagagaagaagcacaa

SEQ ID NO: 2517095 - RNA, 19 nt, Homo sapiens
  misc_RNA (1)...(19): siRNA sense strand
agaccagagugcugcggaa

SEQ ID NO: 2517096 - RNA, 19 nt, Homo sapiens
  misc_RNA (1)...(19): siRNA sense strand
gcagaaagcgcauugccaa

SEQ ID NO: 2517097 - RNA, 19 nt, Homo sapiens
  misc_RNA (1)...(19): siRNA sense strand
caaaauggacuauggggaa

SEQ ID NO: 2517098 - RNA, 19 nt, Homo sapiens
  misc_RNA (1)...(19): siRNA sense strand
gcauauacccagagacccu

SEQ ID NO: 2517099 - RNA, 19 nt, Homo sapiens
  misc_RNA (1)...(19): siRNA sense strand
guacaacugaccagggaca

SEQ ID NO: 2517100 - RNA, 19 nt, Homo sapiens
  misc_RNA (1)...(19): siRNA sense strand
augucaaggugaacgucua

SEQ ID NO: 2517101 - RNA, 19 nt, Homo sapiens
  misc_RNA (1)...(19): siRNA sense strand
ccacugaccuccugccuga

SEQ ID NO: 2517102 - RNA, 19 nt, Homo sapiens
  misc_RNA (1)...(19): siRNA sense strand
ucaucaaagugcggagaga

SEQ ID NO: 2517103 - RNA, 19 nt, Homo sapiens
  misc_RNA (1)...(19): siRNA sense strand
agaaaacccaugugaagaa

SEQ ID NO: 2517104 - RNA, 19 nt, Homo sapiens
  misc_RNA (1)...(19): siRNA sense strand
aucaaagugcggagagaca

SEQ ID NO: 2517105 - RNA, 19 nt, Homo sapiens
  misc_RNA (1)...(19): siRNA sense strand
guaggaaccuguuggugga

SEQ ID NO: 2517106 - RNA, 19 nt, Homo sapiens
  misc_RNA (1)...(19): siRNA sense strand
ugacaauccaggaggccca

SEQ ID NO: 2517107 - RNA, 19 nt, Homo sapiens
  misc_RNA (1)...(19): siRNA sense strand
aggaauauccagaagugca

SEQ ID NO: 2517108 - RNA, 19 nt, Homo sapiens
  misc_RNA (1)...(19): siRNA sense strand
ggacaucaucaaaaggaau

SEQ ID NO: 2517109 - RNA, 19 nt, Homo sapiens
  misc_RNA (1)...(19): siRNA sense strand
uggcacagucugagcgagu

SEQ ID NO: 2517110 - RNA, 19 nt, Homo sapiens
  misc_RNA (1)...(19): siRNA sense strand
gggacaucaucaaaaggaa

SEQ ID NO: 2517111 - RNA, 19 nt, Homo sapiens
  misc_RNA (1)...(19): siRNA sense strand
ggaagguggacguaggaac

SEQ ID NO: 2517112 - RNA, 19 nt, Homo sapiens
  misc_RNA (1)...(19): siRNA sense strand
gugcugaacacuggagaga

SEQ ID NO: 2517113 - RNA, 19 nt, Homo sapiens
  misc_RNA (1)...(19): siRNA sense strand
uggaagaacuugaaggauc

SEQ ID NO: 2517114 - RNA, 19 nt, Homo sapiens
  misc_RNA (1)...(19): siRNA sense strand
guuacaaauucuugaggca

SEQ ID NO: 2517115 - RNA, 19 nt, Homo sapiens
  misc_RNA (1)...(19): siRNA sense strand
caguggaaagagacaguaa

SEQ ID NO: 2517116 - RNA, 19 nt, Homo sapiens
  misc_RNA (1)...(19): siRNA sense strand
ccaaauagucaaaaugcua

SEQ ID NO: 2517117 - RNA, 19 nt, Homo sapiens
  misc_RNA (1)...(19): siRNA sense strand
uggauuacucuuuggauau

SEQ ID NO: 2517118 - RNA, 19 nt, Homo sapiens
  misc_RNA (1)...(19): siRNA sense strand
caguaauaacauugaagca

SEQ ID NO: 2517119 - RNA, 19 nt, Homo sapiens
  misc_RNA (1)...(19): siRNA sense strand
guaauaacauugaagcagu

SEQ ID NO: 2517120 - RNA, 19 nt, Homo sapiens
  misc_RNA (1)...(19): siRNA sense strand
ggacuuugggagacugaau

SEQ ID NO: 2517121 - RNA, 19 nt, Homo sapiens
  misc_RNA (1)...(19): siRNA sense strand
acauugaagcagugaacca

SEQ ID NO: 2517122 - RNA, 19 nt, Homo sapiens
  misc_RNA (1)...(19): siRNA sense strand
gaggauguuucuaugguga

SEQ ID NO: 2517123 - RNA, 19 nt, Homo sapiens
  misc_RNA (1)...(19): siRNA sense strand
ugggagacugaaugugaaa

SEQ ID NO: 2517124 - RNA, 19 nt, Homo sapiens
  misc_RNA (1)...(19): siRNA sense strand
ggaagaaaaccauuggaga

SEQ ID NO: 2517125 - RNA, 19 nt, Homo sapiens
  misc_RNA (1)...(19): siRNA sense strand
gaaccaguggaaagagaca

SEQ ID NO: 2517126 - RNA, 19 nt, Homo sapiens
  misc_RNA (1)...(19): siRNA sense strand
acucagaacccuuagcaca

SEQ ID NO: 2517127 - RNA, 19 nt, Homo sapiens
  misc_RNA (1)...(19): siRNA sense strand
gaaaacacuuugugggcca

SEQ ID NO: 2517128 - RNA, 19 nt, Homo sapiens
  misc_RNA (1)...(19): siRNA sense strand
aagcagugaaccaguggaa

SEQ ID NO: 2517129 - RNA, 19 nt, Homo sapiens
  misc_RNA (1)...(19): siRNA sense strand
uuggauaagugaagacagu

SEQ ID NO: 2517130 - RNA, 19 nt, Homo sapiens
  misc_RNA (1)...(19): siRNA sense strand
uuuacagugcagagauuua

SEQ ID NO: 2517131 - RNA, 19 nt, Homo sapiens
  misc_RNA (1)...(19): siRNA sense strand
aguaacagaagccuggaua

SEQ ID NO: 2517132 - RNA, 19 nt, Homo sapiens
  misc_RNA (1)...(19): siRNA sense strand
agaucgaaagguagaacuu

SEQ ID NO: 2517133 - RNA, 19 nt, Homo sapiens
  misc_RNA (1)...(19): siRNA sense strand
guuugugauuuaaggacga

SEQ ID NO: 2517134 - RNA, 19 nt, Homo sapiens
  misc_RNA (1)...(19): siRNA sense strand
cgugaaggugggaauguuu

SEQ ID NO: 2517135 - RNA, 19 nt, Homo sapiens
  misc_RNA (1)...(19): siRNA sense strand
cagucgaagcucuguaaga

SEQ ID NO: 2517136 - RNA, 19 nt, Homo sapiens
  misc_RNA (1)...(19): siRNA sense strand
uggaaagagacaguaauaa

SEQ ID NO: 2517137 - RNA, 19 nt, Homo sapiens
  misc_RNA (1)...(19): siRNA sense strand
gauuuaaggacgaacaaac

SEQ ID NO: 2517138 - RNA, 19 nt, Homo sapiens
  misc_RNA (1)...(19): siRNA sense strand
aggaaauggauuacucuuu

SEQ ID NO: 2517139 - RNA, 19 nt, Homo sapiens
  misc_RNA (1)...(19): siRNA sense strand
aguucuucuucaaggaaaa

SEQ ID NO: 2517140 - RNA, 19 nt, Homo sapiens
  misc_RNA (1)...(19): siRNA sense strand
agacaguaauaaauccaga

SEQ ID NO: 2517141 - RNA, 19 nt, Homo sapiens
  misc_RNA (1)...(19): siRNA sense strand
acccagacucccaggaaga

SEQ ID NO: 2517142 - RNA, 19 nt, Homo sapiens
  misc_RNA (1)...(19): siRNA sense strand
agugugagauccuggguga

SEQ ID NO: 2517143 - RNA, 19 nt, Homo sapiens
  misc_RNA (1)...(19): siRNA sense strand
gggacuugcaggaagacga

SEQ ID NO: 2517144 - RNA, 19 nt, Homo sapiens
  misc_RNA (1)...(19): siRNA sense strand
aagaagagguagagaaaau

SEQ ID NO: 2517145 - RNA, 19 nt, Homo sapiens
  misc_RNA (1)...(19): siRNA sense strand
agacauuauugauggacaa

SEQ ID NO: 2517146 - RNA, 19 nt, Homo sapiens
  misc_RNA (1)...(19): siRNA sense strand
cuaaagaagagguagagaa

SEQ ID NO: 2517147 - RNA, 19 nt, Homo sapiens
  misc_RNA (1)...(19): siRNA sense strand
ggagaaggugacaaggaaa

SEQ ID NO: 2517148 - RNA, 19 nt, Homo sapiens
  misc_RNA (1)...(19): siRNA sense strand
caaagguaaacgagauuaa

SEQ ID NO: 2517149 - RNA, 19 nt, Homo sapiens
  misc_RNA (1)...(19): siRNA sense strand
cccuauaaaccgugaaauu

SEQ ID NO: 2517150 - RNA, 19 nt, Homo sapiens
  misc_RNA (1)...(19): siRNA sense strand
guuucugaccuguggaaua

SEQ ID NO: 2517151 - RNA, 19 nt, Homo sapiens
  misc_RNA (1)...(19): siRNA sense strand
ccgugaaauuuuagaagaa

SEQ ID NO: 2517152 - RNA, 19 nt, Homo sapiens
  misc_RNA (1)...(19): siRNA sense strand
augaagaauuccagaagau

SEQ ID NO: 2517153 - RNA, 19 nt, Homo sapiens
  misc_RNA (1)...(19): siRNA sense strand
uagaagaguuacaggaagu

SEQ ID NO: 2517154 - RNA, 19 nt, Homo sapiens
  misc_RNA (1)...(19): siRNA sense strand
aagauaacauggugaacau

SEQ ID NO: 2517155 - RNA, 19 nt, Homo sapiens
  misc_RNA (1)...(19): siRNA sense strand
cugugaagcuaucaguaaa

SEQ ID NO: 2517156 - RNA, 19 nt, Homo sapiens
  misc_RNA (1)...(19): siRNA sense strand
aggagaaggugacaaggaa

SEQ ID NO: 2517157 - RNA, 19 nt, Homo sapiens
  misc_RNA (1)...(19): siRNA sense strand
guagaaaugagaauggaau

SEQ ID NO: 2517158 - RNA, 19 nt, Homo sapiens
  misc_RNA (1)...(19): siRNA sense strand
agguaaguaagaagcaaua

SEQ ID NO: 2517159 - RNA, 19 nt, Homo sapiens
  misc_RNA (1)...(19): siRNA sense strand
caguaagucucuggauaaa

SEQ ID NO: 2517160 - RNA, 19 nt, Homo sapiens
  misc_RNA (1)...(19): siRNA sense strand
uugcaaaaguaguaaggaa

SEQ ID NO: 2517161 - RNA, 19 nt, Homo sapiens
  misc_RNA (1)...(19): siRNA sense strand
uguuugaauucuaaggcaa

SEQ ID NO: 2517162 - RNA, 19 nt, Homo sapiens
  misc_RNA (1)...(19): siRNA sense strand
gaguuugagcccagaauau

SEQ ID NO: 2517163 - RNA, 19 nt, Homo sapiens
  misc_RNA (1)...(19): siRNA sense strand
uuacauugcagcagaagaa

SEQ ID NO: 2517164 - RNA, 19 nt, Homo sapiens
  misc_RNA (1)...(19): siRNA sense strand
caguaauguaggaguccaa

SEQ ID NO: 2517165 - RNA, 19 nt, Homo sapiens
  misc_RNA (1)...(19): siRNA sense strand
gaaggaaauuucaccggaa

SEQ ID NO: 2517166 - RNA, 19 nt, Homo sapiens
  misc_RNA (1)...(19): siRNA sense strand
ggaucaccuuugaaugaaa

SEQ ID NO: 2517167 - RNA, 19 nt, Homo sapiens
  misc_RNA (1)...(19): siRNA sense strand
aauucgaagugguaagauu

SEQ ID NO: 2517168 - RNA, 19 nt, Homo sapiens
  misc_RNA (1)...(19): siRNA sense strand
aguugaugaaggugacaaa

SEQ ID NO: 2517169 - RNA, 19 nt, Homo sapiens
  misc_RNA (1)...(19): siRNA sense strand
cugauuugcuggaagguga

SEQ ID NO: 2517170 - RNA, 19 nt, Homo sapiens
  misc_RNA (1)...(19): siRNA sense strand
uguuguaacgucagugaua

SEQ ID NO: 2517171 - RNA, 19 nt, Homo sapiens
  misc_RNA (1)...(19): siRNA sense strand
agccagaauuuaagaagau

SEQ ID NO: 2517172 - RNA, 19 nt, Homo sapiens
  misc_RNA (1)...(19): siRNA sense strand
gauacuaugaugagcaaca

SEQ ID NO: 2517173 - RNA, 19 nt, Homo sapiens
  misc_RNA (1)...(19): siRNA sense strand
gugauaauauggaggugga

SEQ ID NO: 2517174 - RNA, 19 nt, Homo sapiens
  misc_RNA (1)...(19): siRNA sense strand
auaauauggagguggauuu

SEQ ID NO: 2517175 - RNA, 19 nt, Homo sapiens
  misc_RNA (1)...(19): siRNA sense strand
guuagaagaguuacaggaa

SEQ ID NO: 2517176 - RNA, 19 nt, Homo sapiens
  misc_RNA (1)...(19): siRNA sense strand
aaguacaacagcacaguaa

SEQ ID NO: 2517177 - RNA, 19 nt, Homo sapiens
  misc_RNA (1)...(19): siRNA sense strand
guacaacagcacaguaaaa

SEQ ID NO: 2517178 - RNA, 19 nt, Homo sapiens
  misc_RNA (1)...(19): siRNA sense strand
augaaguaacccauggaua

SEQ ID NO: 2517179 - RNA, 19 nt, Homo sapiens
  misc_RNA (1)...(19): siRNA sense strand
agaauggaaugguggaguu

SEQ ID NO: 2517180 - RNA, 19 nt, Homo sapiens
  misc_RNA (1)...(19): siRNA sense strand
cacuaaagacuguugauau

SEQ ID NO: 2517181 - RNA, 19 nt, Homo sapiens
  misc_RNA (1)...(19): siRNA sense strand
cagaagauugugacagaca

SEQ ID NO: 2517182 - RNA, 19 nt, Homo sapiens
  misc_RNA (1)...(19): siRNA sense strand
gugacagacacuaguagaa

SEQ ID NO: 2517183 - RNA, 19 nt, Homo sapiens
  misc_RNA (1)...(19): siRNA sense strand
cugaagauaacauggugaa

SEQ ID NO: 2517184 - RNA, 19 nt, Homo sapiens
  misc_RNA (1)...(19): siRNA sense strand
auggaaugguggaguuaga

SEQ ID NO: 2517185 - RNA, 19 nt, Homo sapiens
  misc_RNA (1)...(19): siRNA sense strand
cuaagaaauguugggauua

SEQ ID NO: 2517186 - RNA, 19 nt, Homo sapiens
  misc_RNA (1)...(19): siRNA sense strand
agguaaacgagauuaaaga

SEQ ID NO: 2517187 - RNA, 19 nt, Homo sapiens
  misc_RNA (1)...(19): siRNA sense strand
agauuaaagaagcugcuaa

SEQ ID NO: 2517188 - RNA, 19 nt, Homo sapiens
  misc_RNA (1)...(19): siRNA sense strand
cugucuaguuugaauagua

SEQ ID NO: 2517189 - RNA, 19 nt, Homo sapiens
  misc_RNA (1)...(19): siRNA sense strand
cauuggaacuagugacagu

SEQ ID NO: 2517190 - RNA, 19 nt, Homo sapiens
  misc_RNA (1)...(19): siRNA sense strand
cauuauugauggacaagga

SEQ ID NO: 2517191 - RNA, 19 nt, Homo sapiens
  misc_RNA (1)...(19): siRNA sense strand
gcaaccaauauuauagcaa

SEQ ID NO: 2517192 - RNA, 19 nt, Homo sapiens
  misc_RNA (1)...(19): siRNA sense strand
cucaguaagucucuggaua

SEQ ID NO: 2517193 - RNA, 19 nt, Homo sapiens
  misc_RNA (1)...(19): siRNA sense strand
cugggaagaacuuggaaga

SEQ ID NO: 2517194 - RNA, 19 nt, Homo sapiens
  misc_RNA (1)...(19): siRNA sense strand
acaugaaaguggcaagguu

SEQ ID NO: 2517195 - RNA, 19 nt, Homo sapiens
  misc_RNA (1)...(19): siRNA sense strand
aaggugacaaggaaagaaa

SEQ ID NO: 2517196 - RNA, 19 nt, Homo sapiens
  misc_RNA (1)...(19): siRNA sense strand
aggaacaguaugaggaugu

SEQ ID NO: 2517197 - RNA, 19 nt, Homo sapiens
  misc_RNA (1)...(19): siRNA sense strand
ggaugaauuucuagcugca

SEQ ID NO: 2517198 - RNA, 19 nt, Homo sapiens
  misc_RNA (1)...(19): siRNA sense strand
ggaccuucauacagcuaau

SEQ ID NO: 2517199 - RNA, 19 nt, Homo sapiens
  misc_RNA (1)...(19): siRNA sense strand
cuucauaaagccuguaaaa

SEQ ID NO: 2517200 - RNA, 19 nt, Homo sapiens
  misc_RNA (1)...(19): siRNA sense strand
ccggaaauuaggaguuuga

SEQ ID NO: 2517201 - RNA, 19 nt, Homo sapiens
  misc_RNA (1)...(19): siRNA sense strand
guacagagcaugaagcaga

SEQ ID NO: 2517202 - RNA, 19 nt, Homo sapiens
  misc_RNA (1)...(19): siRNA sense strand
ccguaauuccggagugcaa

SEQ ID NO: 2517203 - RNA, 19 nt, Homo sapiens
  misc_RNA (1)...(19): siRNA sense strand
gcaaaugcuuccagcggau

SEQ ID NO: 2517204 - RNA, 19 nt, Homo sapiens
  misc_RNA (1)...(19): siRNA sense strand
uugcagaggugauugggaa

SEQ ID NO: 2517205 - RNA, 19 nt, Homo sapiens
  misc_RNA (1)...(19): siRNA sense strand
aggacaaagaagacaguga

SEQ ID NO: 2517206 - RNA, 19 nt, Homo sapiens
  misc_RNA (1)...(19): siRNA sense strand
cgaacuagugugauggaca

SEQ ID NO: 2517207 - RNA, 19 nt, Homo sapiens
  misc_RNA (1)...(19): siRNA sense strand
ccaaggagaagcauggcua

SEQ ID NO: 2517208 - RNA, 19 nt, Homo sapiens
  misc_RNA (1)...(19): siRNA sense strand
aguggacaguagaggacaa

SEQ ID NO: 2517209 - RNA, 19 nt, Homo sapiens
  misc_RNA (1)...(19): siRNA sense strand
ggaacaagacucugaccca

SEQ ID NO: 2517210 - RNA, 19 nt, Homo sapiens
  misc_RNA (1)...(19): siRNA sense strand
aggaagaugaugaggucca

SEQ ID NO: 2517211 - RNA, 19 nt, Homo sapiens
  misc_RNA (1)...(19): siRNA sense strand
aagaagacccgcagccgaa

SEQ ID NO: 2517212 - RNA, 19 nt, Homo sapiens
  misc_RNA (1)...(19): siRNA sense strand
gcuucaaucuggaggaggu

SEQ ID NO: 2517213 - RNA, 19 nt, Homo sapiens
  misc_RNA (1)...(19): siRNA sense strand
acaaggagcugaaggggau

SEQ ID NO: 2517214 - RNA, 19 nt, Homo sapiens
  misc_RNA (1)...(19): siRNA sense strand
gggcuauugcagaggugau

SEQ ID NO: 2517215 - RNA, 19 nt, Homo sapiens
  misc_RNA (1)...(19): siRNA sense strand
cccuagaggaagaugauga

SEQ ID NO: 2517216 - RNA, 19 nt, Homo sapiens
  misc_RNA (1)...(19): siRNA sense strand
uugcgauggccaaggagaa

SEQ ID NO: 2517217 - RNA, 19 nt, Homo sapiens
  misc_RNA (1)...(19): siRNA sense strand
cauccguagguauggcaaa

SEQ ID NO: 2517218 - RNA, 19 nt, Homo sapiens
  misc_RNA (1)...(19): siRNA sense strand
aggccaacaccaaguucaa

SEQ ID NO: 2517219 - RNA, 19 nt, Homo sapiens
  misc_RNA (1)...(19): siRNA sense strand
uggaggaggugcugcagga

SEQ ID NO: 2517220 - RNA, 19 nt, Homo sapiens
  misc_RNA (1)...(19): siRNA sense strand
auaagcacgauguggagaa

SEQ ID NO: 2517221 - RNA, 19 nt, Homo sapiens
  misc_RNA (1)...(19): siRNA sense strand
gguucaaggaugaguuaga

SEQ ID NO: 2517222 - RNA, 19 nt, Homo sapiens
  misc_RNA (1)...(19): siRNA sense strand
gcuuaucaaacuugggaau

SEQ ID NO: 2517223 - RNA, 19 nt, Homo sapiens
  misc_RNA (1)...(19): siRNA sense strand
uguauuacuaagcuggaaa

SEQ ID NO: 2517224 - RNA, 19 nt, Homo sapiens
  misc_RNA (1)...(19): siRNA sense strand
cuucaaugccugcuugcaa

SEQ ID NO: 2517225 - RNA, 19 nt, Homo sapiens
  misc_RNA (1)...(19): siRNA sense strand
cgguauucaagaaacaaau

SEQ ID NO: 2517226 - RNA, 19 nt, Homo sapiens
  misc_RNA (1)...(19): siRNA sense strand
caaccaagaucgugggaga

SEQ ID NO: 2517227 - RNA, 19 nt, Homo sapiens
  misc_RNA (1)...(19): siRNA sense strand
ggaaggagcugaagaggga

SEQ ID NO: 2517228 - RNA, 19 nt, Homo sapiens
  misc_RNA (1)...(19): siRNA sense strand
agaagaaaguagaggugga

SEQ ID NO: 2517229 - RNA, 19 nt, Homo sapiens
  misc_RNA (1)...(19): siRNA sense strand
acgagaagguggagggugu

SEQ ID NO: 2517230 - RNA, 19 nt, Homo sapiens
  misc_RNA (1)...(19): siRNA sense strand
gaucaaggguacugagcca

SEQ ID NO: 2517231 - RNA, 19 nt, Homo sapiens
  misc_RNA (1)...(19): siRNA sense strand
aaguagagguggaggccau

SEQ ID NO: 2517232 - RNA, 19 nt, Homo sapiens
  misc_RNA (1)...(19): siRNA sense strand
cuaaagaagccgugaccau

SEQ ID NO: 2517233 - RNA, 19 nt, Homo sapiens
  misc_RNA (1)...(19): siRNA sense strand
uggaagacaaagagaccaa

SEQ ID NO: 2517234 - RNA, 19 nt, Homo sapiens
  misc_RNA (1)...(19): siRNA sense strand
cgucaguacuggaggcacu

SEQ ID NO: 2517235 - RNA, 19 nt, Homo sapiens
  misc_RNA (1)...(19): siRNA sense strand
cugcauaauggaacugaaa

SEQ ID NO: 2517236 - RNA, 19 nt, Homo sapiens
  misc_RNA (1)...(19): siRNA sense strand
gaacgaaggaagaaaggca

SEQ ID NO: 2517237 - RNA, 19 nt, Homo sapiens
  misc_RNA (1)...(19): siRNA sense strand
gagaaagagaugcuggaga

SEQ ID NO: 2517238 - RNA, 19 nt, Homo sapiens
  misc_RNA (1)...(19): siRNA sense strand
agcagaagaagguggcaaa

SEQ ID NO: 2517239 - RNA, 19 nt, Homo sapiens
  misc_RNA (1)...(19): siRNA sense strand
gcugguaacagaaggucaa

SEQ ID NO: 2517240 - RNA, 19 nt, Homo sapiens
  misc_RNA (1)...(19): siRNA sense strand
cggaugacucugacaacua

SEQ ID NO: 2517241 - RNA, 19 nt, Homo sapiens
  misc_RNA (1)...(19): siRNA sense strand
agggaugacaaguaugaaa

SEQ ID NO: 2517242 - RNA, 19 nt, Homo sapiens
  misc_RNA (1)...(19): siRNA sense strand
acaaggaacacgugcugaa

SEQ ID NO: 2517243 - RNA, 19 nt, Homo sapiens
  misc_RNA (1)...(19): siRNA sense strand
cacugaaguuccugggaga

SEQ ID NO: 2517244 - RNA, 19 nt, Homo sapiens
  misc_RNA (1)...(19): siRNA sense strand
gagaggaggucgugaggag

SEQ ID NO: 2517245 - RNA, 19 nt, Homo sapiens
  misc_RNA (1)...(19): siRNA sense strand
gcauggaagugacggagga

SEQ ID NO: 2517246 - RNA, 19 nt, Homo sapiens
  misc_RNA (1)...(19): siRNA sense strand
cagaaggucaagagaaaau

SEQ ID NO: 2517247 - RNA, 19 nt, Homo sapiens
  misc_RNA (1)...(19): siRNA sense strand
uggaagagggagagcggca

SEQ ID NO: 2517248 - RNA, 19 nt, Homo sapiens
  misc_RNA (1)...(19): siRNA sense strand
guccaaagugcccaagaaa

SEQ ID NO: 2517249 - RNA, 19 nt, Homo sapiens
  misc_RNA (1)...(19): siRNA sense strand
uguggaaguucaaugggaa

SEQ ID NO: 2517250 - RNA, 19 nt, Homo sapiens
  misc_RNA (1)...(19): siRNA sense strand
cggggaaccugguacaaaa

SEQ ID NO: 2517251 - RNA, 19 nt, Homo sapiens
  misc_RNA (1)...(19): siRNA sense strand
uggaagugacggaggagga

SEQ ID NO: 2517252 - RNA, 19 nt, Homo sapiens
  misc_RNA (1)...(19): siRNA sense strand
cucaaagagaugaagaaga

SEQ ID NO: 2517253 - RNA, 19 nt, Homo sapiens
  misc_RNA (1)...(19): siRNA sense strand
ggggaaaaccacugcccaa

SEQ ID NO: 2517254 - RNA, 19 nt, Homo sapiens
  misc_RNA (1)...(19): siRNA sense strand
ccucgagcauaguggaguu

SEQ ID NO: 2517255 - RNA, 19 nt, Homo sapiens
  misc_RNA (1)...(19): siRNA sense strand
gagaaaauggacuucaaaa

SEQ ID NO: 2517256 - RNA, 19 nt, Homo sapiens
  misc_RNA (1)...(19): siRNA sense strand
uggcaaaugagaaagagau

SEQ ID NO: 2517257 - RNA, 19 nt, Homo sapiens
  misc_RNA (1)...(19): siRNA sense strand
aagagaugcuggagauuuu

SEQ ID NO: 2517258 - RNA, 19 nt, Homo sapiens
  misc_RNA (1)...(19): siRNA sense strand
cgagcauaguggaguucuu

SEQ ID NO: 2517259 - RNA, 19 nt, Homo sapiens
  misc_RNA (1)...(19): siRNA sense strand
agaugaagccugugaaggu

SEQ ID NO: 2517260 - RNA, 19 nt, Homo sapiens
  misc_RNA (1)...(19): siRNA sense strand
agaugaagaagaaaguaga

SEQ ID NO: 2517261 - RNA, 19 nt, Homo sapiens
  misc_RNA (1)...(19): siRNA sense strand
ucuccaagaaagagcccaa

SEQ ID NO: 2517262 - RNA, 19 nt, Homo sapiens
  misc_RNA (1)...(19): siRNA sense strand
gaagauggucugacgcaca

SEQ ID NO: 2517263 - RNA, 19 nt, Homo sapiens
  misc_RNA (1)...(19): siRNA sense strand
ccuggaggacacagaauau

SEQ ID NO: 2517264 - RNA, 19 nt, Homo sapiens
  misc_RNA (1)...(19): siRNA sense strand
gcggaugagugcagagcuc

SEQ ID NO: 2517265 - RNA, 19 nt, Homo sapiens
  misc_RNA (1)...(19): siRNA sense strand
guguagugcugaaugacga

SEQ ID NO: 2517266 - RNA, 19 nt, Homo sapiens
  misc_RNA (1)...(19): siRNA sense strand
acacaaaggagugguccaa

SEQ ID NO: 2517267 - RNA, 19 nt, Homo sapiens
  misc_RNA (1)...(19): siRNA sense strand
cccaagaagaagcagaaga

SEQ ID NO: 2517268 - RNA, 19 nt, Homo sapiens
  misc_RNA (1)...(19): siRNA sense strand
uguagaacgaaggaagaaa

SEQ ID NO: 2517269 - RNA, 19 nt, Homo sapiens
  misc_RNA (1)...(19): siRNA sense strand
guggcaaaugagaaagaga

SEQ ID NO: 2517270 - RNA, 19 nt, Homo sapiens
  misc_RNA (1)...(19): siRNA sense strand
gcaagcaagcagagcugau

SEQ ID NO: 2517271 - RNA, 19 nt, Homo sapiens
  misc_RNA (1)...(19): siRNA sense strand
ccagcucaguaguggccaa

SEQ ID NO: 2517272 - RNA, 19 nt, Homo sapiens
  misc_RNA (1)...(19): siRNA sense strand
gcugaagacacaaaggagu

SEQ ID NO: 2517273 - RNA, 19 nt, Homo sapiens
  misc_RNA (1)...(19): siRNA sense strand
ggacucaucgagaggcaga

SEQ ID NO: 2517274 - RNA, 19 nt, Homo sapiens
  misc_RNA (1)...(19): siRNA sense strand
agaagguggcaaaugagaa

SEQ ID NO: 2517275 - RNA, 19 nt, Homo sapiens
  misc_RNA (1)...(19): siRNA sense strand
agcucaaagagaugaagaa

SEQ ID NO: 2517276 - RNA, 19 nt, Homo sapiens
  misc_RNA (1)...(19): siRNA sense strand
agcccaacuuuguguggaa

SEQ ID NO: 2517277 - RNA, 19 nt, Homo sapiens
  misc_RNA (1)...(19): siRNA sense strand
gaaccaugagggcaagcaa

SEQ ID NO: 2517278 - RNA, 19 nt, Homo sapiens
  misc_RNA (1)...(19): siRNA sense strand
ccaaagugacaugguacaa

SEQ ID NO: 2517279 - RNA, 19 nt, Homo sapiens
  misc_RNA (1)...(19): siRNA sense strand
gagcaugguuucaccgacu

SEQ ID NO: 2517280 - RNA, 19 nt, Homo sapiens
  misc_RNA (1)...(19): siRNA sense strand
ggaagcucaaagagaugaa

SEQ ID NO: 2517281 - RNA, 19 nt, Homo sapiens
  misc_RNA (1)...(19): siRNA sense strand
auuccgaguuauagcugua

SEQ ID NO: 2517282 - RNA, 19 nt, Homo sapiens
  misc_RNA (1)...(19): siRNA sense strand
gagugguccaagugcacaa

SEQ ID NO: 2517283 - RNA, 19 nt, Homo sapiens
  misc_RNA (1)...(19): siRNA sense strand
gccaagauauucuacgaca

SEQ ID NO: 2517284 - RNA, 19 nt, Homo sapiens
  misc_RNA (1)...(19): siRNA sense strand
agauauucuacgacagcau

SEQ ID NO: 2517285 - RNA, 19 nt, Homo sapiens
  misc_RNA (1)...(19): siRNA sense strand
gcacaaagauagcuggcuu

SEQ ID NO: 2517286 - RNA, 19 nt, Homo sapiens
  misc_RNA (1)...(19): siRNA sense strand
gcgaaucuuucuaggccua

SEQ ID NO: 2517287 - RNA, 19 nt, Homo sapiens
  misc_RNA (1)...(19): siRNA sense strand
acucagcgauccagggcua

SEQ ID NO: 2517288 - RNA, 19 nt, Homo sapiens
  misc_RNA (1)...(19): siRNA sense strand
acuuagaggcugaccguau

SEQ ID NO: 2517289 - RNA, 19 nt, Homo sapiens
  misc_RNA (1)...(19): siRNA sense strand
gugugacauuagagggaca

SEQ ID NO: 2517290 - RNA, 19 nt, Homo sapiens
  misc_RNA (1)...(19): siRNA sense strand
cggaagaggaguaugagca

SEQ ID NO: 2517291 - RNA, 19 nt, Homo sapiens
  misc_RNA (1)...(19): siRNA sense strand
ccguauucgucaggagcua

SEQ ID NO: 2517292 - RNA, 19 nt, Homo sapiens
  misc_RNA (1)...(19): siRNA sense strand
gaugaauacuugaugucca

SEQ ID NO: 2517293 - RNA, 19 nt, Homo sapiens
  misc_RNA (1)...(19): siRNA sense strand
aggaugaauucuauggguu

SEQ ID NO: 2517294 - RNA, 19 nt, Homo sapiens
  misc_RNA (1)...(19): siRNA sense strand
ggaugaugugacugaugaa

SEQ ID NO: 2517295 - RNA, 19 nt, Homo sapiens
  misc_RNA (1)...(19): siRNA sense strand
augaugugacugaugaaua

SEQ ID NO: 2517296 - RNA, 19 nt, Homo sapiens
  misc_RNA (1)...(19): siRNA sense strand
ccugauggugugugacauu

SEQ ID NO: 2517297 - RNA, 19 nt, Homo sapiens
  misc_RNA (1)...(19): siRNA sense strand
aagaggaguaugagcacau

SEQ ID NO: 2517298 - RNA, 19 nt, Homo sapiens
  misc_RNA (1)...(19): siRNA sense strand
cuauuagcccagagacaca

SEQ ID NO: 2517299 - RNA, 19 nt, Homo sapiens
  misc_RNA (1)...(19): siRNA sense strand
gaguaugagcacauggagu

SEQ ID NO: 2517300 - RNA, 19 nt, Homo sapiens
  misc_RNA (1)...(19): siRNA sense strand
ggaugaauucuauggguug

SEQ ID NO: 2517301 - RNA, 19 nt, Homo sapiens
  misc_RNA (1)...(19): siRNA sense strand
acuaaugaccguggagaca

SEQ ID NO: 2517302 - RNA, 19 nt, Homo sapiens
  misc_RNA (1)...(19): siRNA sense strand
ugggagaugccauuggaau

SEQ ID NO: 2517303 - RNA, 19 nt, Homo sapiens
  misc_RNA (1)...(19): siRNA sense strand
ccuaauauuguguuggaga

SEQ ID NO: 2517304 - RNA, 19 nt, Homo sapiens
  misc_RNA (1)...(19): siRNA sense strand
acggaagaucauaugcaaa

SEQ ID NO: 2517305 - RNA, 19 nt, Homo sapiens
  misc_RNA (1)...(19): siRNA sense strand
auauuguguuggagaacuu

SEQ ID NO: 2517306 - RNA, 19 nt, Homo sapiens
  misc_RNA (1)...(19): siRNA sense strand
agacaggguuggacggaag

SEQ ID NO: 2517307 - RNA, 19 nt, Homo sapiens
  misc_RNA (1)...(19): siRNA sense strand
ccaugacuauuuugggaaa

SEQ ID NO: 2517308 - RNA, 19 nt, Homo sapiens
  misc_RNA (1)...(19): siRNA sense strand
caaaugagccagacacgga

SEQ ID NO: 2517309 - RNA, 19 nt, Homo sapiens
  misc_RNA (1)...(19): siRNA sense strand
ccaaagucccagagcggua

SEQ ID NO: 2517310 - RNA, 19 nt, Homo sapiens
  misc_RNA (1)...(19): siRNA sense strand
ugucgaagauggauggcau

SEQ ID NO: 2517311 - RNA, 19 nt, Homo sapiens
  misc_RNA (1)...(19): siRNA sense strand
cugcuaugucucaggagua

SEQ ID NO: 2517312 - RNA, 19 nt, Homo sapiens
  misc_RNA (1)...(19): siRNA sense strand
cauuagauuaugcaggaau

SEQ ID NO: 2517313 - RNA, 19 nt, Homo sapiens
  misc_RNA (1)...(19): siRNA sense strand
cguacaucaccgacggcua

SEQ ID NO: 2517314 - RNA, 19 nt, Homo sapiens
  misc_RNA (1)...(19): siRNA sense strand
auggauggcauuagauuau

SEQ ID NO: 2517315 - RNA, 19 nt, Homo sapiens
  misc_RNA (1)...(19): siRNA sense strand
ccaauuaccucacgcagca

SEQ ID NO: 2517316 - RNA, 19 nt, Homo sapiens
  misc_RNA (1)...(19): siRNA sense strand
gcgaagacaugaagggccu

SEQ ID NO: 2517317 - RNA, 19 nt, Homo sapiens
  misc_RNA (1)...(19): siRNA sense strand
augaagauaagaaggcgaa

SEQ ID NO: 2517318 - RNA, 19 nt, Homo sapiens
  misc_RNA (1)...(19): siRNA sense strand
ugugagaugaagauaagaa

SEQ ID NO: 2517319 - RNA, 19 nt, Homo sapiens
  misc_RNA (1)...(19): siRNA sense strand
gaugaagauaagaaggcga

SEQ ID NO: 2517320 - RNA, 19 nt, Homo sapiens
  misc_RNA (1)...(19): siRNA sense strand
ccaaggagcuuucagggca

SEQ ID NO: 2517321 - RNA, 19 nt, Homo sapiens
  misc_RNA (1)...(19): siRNA sense strand
caggaaaugugaucgggca

SEQ ID NO: 2517322 - RNA, 19 nt, Homo sapiens
  misc_RNA (1)...(19): siRNA sense strand
ggugcagggauuagaggga

SEQ ID NO: 2517323 - RNA, 19 nt, Homo sapiens
  misc_RNA (1)...(19): siRNA sense strand
uguacaaggaggaagggaa

SEQ ID NO: 2517324 - RNA, 19 nt, Homo sapiens
  misc_RNA (1)...(19): siRNA sense strand
agaaaguccuggaacgaca

SEQ ID NO: 2517325 - RNA, 19 nt, Homo sapiens
  misc_RNA (1)...(19): siRNA sense strand
aggaagggaaccagcgcua

SEQ ID NO: 2517326 - RNA, 19 nt, Homo sapiens
  misc_RNA (1)...(19): siRNA sense strand
gggaagggaaguaccgaga

SEQ ID NO: 2517327 - RNA, 19 nt, Homo sapiens
  misc_RNA (1)...(19): siRNA sense strand
acuacgaacgagugagaga

SEQ ID NO: 2517328 - RNA, 19 nt, Homo sapiens
  misc_RNA (1)...(19): siRNA sense strand
guacaaggaggaagggaac

SEQ ID NO: 2517329 - RNA, 19 nt, Homo sapiens
  misc_RNA (1)...(19): siRNA sense strand
gagugagagaauauaguca

SEQ ID NO: 2517330 - RNA, 19 nt, Homo sapiens
  misc_RNA (1)...(19): siRNA sense strand
gaauauagucagaaagucc

SEQ ID NO: 2517331 - RNA, 19 nt, Homo sapiens
  misc_RNA (1)...(19): siRNA sense strand
cugauaaugccaaggccuu

SEQ ID NO: 2517332 - RNA, 19 nt, Homo sapiens
  misc_RNA (1)...(19): siRNA sense strand
aggaggaggaagaggagga

SEQ ID NO: 2517333 - RNA, 19 nt, Homo sapiens
  misc_RNA (1)...(19): siRNA sense strand
agagcgagcacgagaggga

SEQ ID NO: 2517334 - RNA, 19 nt, Homo sapiens
  misc_RNA (1)...(19): siRNA sense strand
guagaaagcucgagaggga

SEQ ID NO: 2517335 - RNA, 19 nt, Homo sapiens
  misc_RNA (1)...(19): siRNA sense strand
cauuaaaagcugaggacaa

SEQ ID NO: 2517336 - RNA, 19 nt, Homo sapiens
  misc_RNA (1)...(19): siRNA sense strand
cgagagaacuuuacgcaga

SEQ ID NO: 2517337 - RNA, 19 nt, Homo sapiens
  misc_RNA (1)...(19): siRNA sense strand
caguaaaucgagagaacuu

SEQ ID NO: 2517338 - RNA, 19 nt, Homo sapiens
  misc_RNA (1)...(19): siRNA sense strand
uguugaaaguccaggugaa

SEQ ID NO: 2517339 - RNA, 19 nt, Homo sapiens
  misc_RNA (1)...(19): siRNA sense strand
ggggaauggucaaggaaca

SEQ ID NO: 2517340 - RNA, 19 nt, Homo sapiens
  misc_RNA (1)...(19): siRNA sense strand
cuggaagaagcgagaggaa

SEQ ID NO: 2517341 - RNA, 19 nt, Homo sapiens
  misc_RNA (1)...(19): siRNA sense strand
aggugaugcucaagaugaa

SEQ ID NO: 2517342 - RNA, 19 nt, Homo sapiens
  misc_RNA (1)...(19): siRNA sense strand
ugauauaagugcaggggau

SEQ ID NO: 2517343 - RNA, 19 nt, Homo sapiens
  misc_RNA (1)...(19): siRNA sense strand
agucauugucauuggauuu

SEQ ID NO: 2517344 - RNA, 19 nt, Homo sapiens
  misc_RNA (1)...(19): siRNA sense strand
guaaacuacacgaagacaa

SEQ ID NO: 2517345 - RNA, 19 nt, Homo sapiens
  misc_RNA (1)...(19): siRNA sense strand
ccaagcaaauauauggcua

SEQ ID NO: 2517346 - RNA, 19 nt, Homo sapiens
  misc_RNA (1)...(19): siRNA sense strand
uggaaagccaguugcacaa

SEQ ID NO: 2517347 - RNA, 19 nt, Homo sapiens
  misc_RNA (1)...(19): siRNA sense strand
ccacuagccaaaagagaua

SEQ ID NO: 2517348 - RNA, 19 nt, Homo sapiens
  misc_RNA (1)...(19): siRNA sense strand
cugcauacaacuggaauua

SEQ ID NO: 2517349 - RNA, 19 nt, Homo sapiens
  misc_RNA (1)...(19): siRNA sense strand
ggaaaagaacuaaagguca

SEQ ID NO: 2517350 - RNA, 19 nt, Homo sapiens
  misc_RNA (1)...(19): siRNA sense strand
ccauauuccugaacagcuu

SEQ ID NO: 2517351 - RNA, 19 nt, Homo sapiens
  misc_RNA (1)...(19): siRNA sense strand
agagauagcaagacuaaca

SEQ ID NO: 2517352 - RNA, 19 nt, Homo sapiens
  misc_RNA (1)...(19): siRNA sense strand
gaaaauauauucuggagga

SEQ ID NO: 2517353 - RNA, 19 nt, Homo sapiens
  misc_RNA (1)...(19): siRNA sense strand
ggucaauggcucuauucaa

SEQ ID NO: 2517354 - RNA, 19 nt, Homo sapiens
  misc_RNA (1)...(19): siRNA sense strand
ucgcauaccugcuuggaca

SEQ ID NO: 2517355 - RNA, 19 nt, Homo sapiens
  misc_RNA (1)...(19): siRNA sense strand
uggaggaggcugaggagga

SEQ ID NO: 2517356 - RNA, 19 nt, Homo sapiens
  misc_RNA (1)...(19): siRNA sense strand
aagacuaacaucuggaaga

SEQ ID NO: 2517357 - RNA, 19 nt, Homo sapiens
  misc_RNA (1)...(19): siRNA sense strand
gaaaauuagcugaugccaa

SEQ ID NO: 2517358 - RNA, 19 nt, Homo sapiens
  misc_RNA (1)...(19): siRNA sense strand
ucacuaaacuugagguccu

SEQ ID NO: 2517359 - RNA, 19 nt, Homo sapiens
  misc_RNA (1)...(19): siRNA sense strand
agccauauuaggaggaaca

SEQ ID NO: 2517360 - RNA, 19 nt, Homo sapiens
  misc_RNA (1)...(19): siRNA sense strand
gcaguuauucaaugccaaa

SEQ ID NO: 2517361 - RNA, 19 nt, Homo sapiens
  misc_RNA (1)...(19): siRNA sense strand
cucauauaguccucagaaa

SEQ ID NO: 2517362 - RNA, 19 nt, Homo sapiens
  misc_RNA (1)...(19): siRNA sense strand
cagguaaugaggaggcgua

SEQ ID NO: 2517363 - RNA, 19 nt, Homo sapiens
  misc_RNA (1)...(19): siRNA sense strand
aaugaagauuccaaggaca

SEQ ID NO: 2517364 - RNA, 19 nt, Homo sapiens
  misc_RNA (1)...(19): siRNA sense strand
ggacaagugugguacucca

SEQ ID NO: 2517365 - RNA, 19 nt, Homo sapiens
  misc_RNA (1)...(19): siRNA sense strand
acaacaacaacaacagcaa

SEQ ID NO: 2517366 - RNA, 19 nt, Homo sapiens
  misc_RNA (1)...(19): siRNA sense strand
augccagggaagaggauau

SEQ ID NO: 2517367 - RNA, 19 nt, Homo sapiens
  misc_RNA (1)...(19): siRNA sense strand
agaaagcucgagagggaga

SEQ ID NO: 2517368 - RNA, 19 nt, Homo sapiens
  misc_RNA (1)...(19): siRNA sense strand
aggaggaacaauagucauu

SEQ ID NO: 2517369 - RNA, 19 nt, Homo sapiens
  misc_RNA (1)...(19): siRNA sense strand
cuuuguuauugcagggaca

SEQ ID NO: 2517370 - RNA, 19 nt, Homo sapiens
  misc_RNA (1)...(19): siRNA sense strand
aggacaagucgcaguuauu

SEQ ID NO: 2517371 - RNA, 19 nt, Homo sapiens
  misc_RNA (1)...(19): siRNA sense strand
ucauauaguccucagaaaa

SEQ ID NO: 2517372 - RNA, 19 nt, Homo sapiens
  misc_RNA (1)...(19): siRNA sense strand
cagaaacagaagaaagagu

SEQ ID NO: 2517373 - RNA, 19 nt, Homo sapiens
  misc_RNA (1)...(19): siRNA sense strand
gggaagaggauaucauacu

SEQ ID NO: 2517374 - RNA, 19 nt, Homo sapiens
  misc_RNA (1)...(19): siRNA sense strand
ccuaagcagcagugagagu

SEQ ID NO: 2517375 - RNA, 19 nt, Homo sapiens
  misc_RNA (1)...(19): siRNA sense strand
augaagauuccaaggacau

SEQ ID NO: 2517376 - RNA, 19 nt, Homo sapiens
  misc_RNA (1)...(19): siRNA sense strand
ccugaacagcuuaugcaua

SEQ ID NO: 2517377 - RNA, 19 nt, Homo sapiens
  misc_RNA (1)...(19): siRNA sense strand
auaucauacuugaagguca

SEQ ID NO: 2517378 - RNA, 19 nt, Homo sapiens
  misc_RNA (1)...(19): siRNA sense strand
gauaaaaguacccuacaaa

SEQ ID NO: 2517379 - RNA, 19 nt, Homo sapiens
  misc_RNA (1)...(19): siRNA sense strand
cugcaauaugugugaaaau

SEQ ID NO: 2517380 - RNA, 19 nt, Homo sapiens
  misc_RNA (1)...(19): siRNA sense strand
uggucaaggaacauaacaa

SEQ ID NO: 2517381 - RNA, 19 nt, Homo sapiens
  misc_RNA (1)...(19): siRNA sense strand
aggcagaaacagaagaaag

SEQ ID NO: 2517382 - RNA, 19 nt, Homo sapiens
  misc_RNA (1)...(19): siRNA sense strand
ggaaaagcacuguugaaga

SEQ ID NO: 2517383 - RNA, 19 nt, Homo sapiens
  misc_RNA (1)...(19): siRNA sense strand
ggaagaagcgagaggaacg

SEQ ID NO: 2517384 - RNA, 19 nt, Homo sapiens
  misc_RNA (1)...(19): siRNA sense strand
ccacaguaacuaaaagcaa

SEQ ID NO: 2517385 - RNA, 19 nt, Homo sapiens
  misc_RNA (1)...(19): siRNA sense strand
cuucaacaacacacauaaa

SEQ ID NO: 2517386 - RNA, 19 nt, Homo sapiens
  misc_RNA (1)...(19): siRNA sense strand
aaagaguuuccaugguaaa

SEQ ID NO: 2517387 - RNA, 19 nt, Homo sapiens
  misc_RNA (1)...(19): siRNA sense strand
caagcaaauauauggcuau

SEQ ID NO: 2517388 - RNA, 19 nt, Homo sapiens
  misc_RNA (1)...(19): siRNA sense strand
ggacauaugaugcaccaca

SEQ ID NO: 2517389 - RNA, 19 nt, Homo sapiens
  misc_RNA (1)...(19): siRNA sense strand
gaauggucaaggaacauaa

SEQ ID NO: 2517390 - RNA, 19 nt, Homo sapiens
  misc_RNA (1)...(19): siRNA sense strand
accaguaaaucgagagaac

SEQ ID NO: 2517391 - RNA, 19 nt, Homo sapiens
  misc_RNA (1)...(19): siRNA sense strand
cccugaagacccagcuuua

SEQ ID NO: 2517392 - RNA, 19 nt, Homo sapiens
  misc_RNA (1)...(19): siRNA sense strand
acaguuagucuauggccaa

SEQ ID NO: 2517393 - RNA, 19 nt, Homo sapiens
  misc_RNA (1)...(19): siRNA sense strand
caaaagagauagcaagacu

SEQ ID NO: 2517394 - RNA, 19 nt, Homo sapiens
  misc_RNA (1)...(19): siRNA sense strand
uggagaagguggaggcgga

SEQ ID NO: 2517395 - RNA, 19 nt, Homo sapiens
  misc_RNA (1)...(19): siRNA sense strand
cugaagugaucguggucau

SEQ ID NO: 2517396 - RNA, 19 nt, Homo sapiens
  misc_RNA (1)...(19): siRNA sense strand
uggccaagaacuacaucaa

SEQ ID NO: 2517397 - RNA, 19 nt, Homo sapiens
  misc_RNA (1)...(19): siRNA sense strand
aggcaguggcagugacuca

SEQ ID NO: 2517398 - RNA, 19 nt, Homo sapiens
  misc_RNA (1)...(19): siRNA sense strand
gcuucaauggcaagggaaa

SEQ ID NO: 2517399 - RNA, 19 nt, Homo sapiens
  misc_RNA (1)...(19): siRNA sense strand
ccguaaacccaggacgauu

SEQ ID NO: 2517400 - RNA, 19 nt, Homo sapiens
  misc_RNA (1)...(19): siRNA sense strand
ggaagggcucaggaggaaa

SEQ ID NO: 2517401 - RNA, 19 nt, Homo sapiens
  misc_RNA (1)...(19): siRNA sense strand
cagacaacgaugaggucaa

SEQ ID NO: 2517402 - RNA, 19 nt, Homo sapiens
  misc_RNA (1)...(19): siRNA sense strand
agaccgacgagguggacaa

SEQ ID NO: 2517403 - RNA, 19 nt, Homo sapiens
  misc_RNA (1)...(19): siRNA sense strand
gcgacaggaaugggagaaa

SEQ ID NO: 2517404 - RNA, 19 nt, Homo sapiens
  misc_RNA (1)...(19): siRNA sense strand
gagcuuaaggagauggaga

SEQ ID NO: 2517405 - RNA, 19 nt, Homo sapiens
  misc_RNA (1)...(19): siRNA sense strand
gcugagaggcccaagguca

SEQ ID NO: 2517406 - RNA, 19 nt, Homo sapiens
  misc_RNA (1)...(19): siRNA sense strand
acacugagacugauggcua

SEQ ID NO: 2517407 - RNA, 19 nt, Homo sapiens
  misc_RNA (1)...(19): siRNA sense strand
acucagauguagaggccga

SEQ ID NO: 2517408 - RNA, 19 nt, Homo sapiens
  misc_RNA (1)...(19): siRNA sense strand
ucaucaacucggagcuuaa

SEQ ID NO: 2517409 - RNA, 19 nt, Homo sapiens
  misc_RNA (1)...(19): siRNA sense strand
aggucaaguucaagucauu

SEQ ID NO: 2517410 - RNA, 19 nt, Homo sapiens
  misc_RNA (1)...(19): siRNA sense strand
guuagaaaucugugcuaca

SEQ ID NO: 2517411 - RNA, 19 nt, Homo sapiens
  misc_RNA (1)...(19): siRNA sense strand
cagcagagaacauggccau

SEQ ID NO: 2517412 - RNA, 19 nt, Homo sapiens
  misc_RNA (1)...(19): siRNA sense strand
ggugacaaggcgcgagaga

SEQ ID NO: 2517413 - RNA, 19 nt, Homo sapiens
  misc_RNA (1)...(19): siRNA sense strand
uggacgagauugaugccua

SEQ ID NO: 2517414 - RNA, 19 nt, Homo sapiens
  misc_RNA (1)...(19): siRNA sense strand
ggguuagaaaucugugcua

SEQ ID NO: 2517415 - RNA, 19 nt, Homo sapiens
  misc_RNA (1)...(19): siRNA sense strand
cagaggaggugguccgcau

SEQ ID NO: 2517416 - RNA, 19 nt, Homo sapiens
  misc_RNA (1)...(19): siRNA sense strand
accuagagaggguuagaaa

SEQ ID NO: 2517417 - RNA, 19 nt, Homo sapiens
  misc_RNA (1)...(19): siRNA sense strand
ccuacuggcuggagcucau

SEQ ID NO: 2517418 - RNA, 19 nt, Homo sapiens
  misc_RNA (1)...(19): siRNA sense strand
gcugaagaggaaagccaau

SEQ ID NO: 2517419 - RNA, 19 nt, Homo sapiens
  misc_RNA (1)...(19): siRNA sense strand
cuauauuagcagacaacga

SEQ ID NO: 2517420 - RNA, 19 nt, Homo sapiens
  misc_RNA (1)...(19): siRNA sense strand
ccuagagaggguuagaaau

SEQ ID NO: 2517421 - RNA, 19 nt, Homo sapiens
  misc_RNA (1)...(19): siRNA sense strand
agaggaaagccaaugccaa

SEQ ID NO: 2517422 - RNA, 19 nt, Homo sapiens
  misc_RNA (1)...(19): siRNA sense strand
agaucacagcagagaacau

SEQ ID NO: 2517423 - RNA, 19 nt, Homo sapiens
  misc_RNA (1)...(19): siRNA sense strand
gcagcaagcccuaagccuu

SEQ ID NO: 2517424 - RNA, 19 nt, Homo sapiens
  misc_RNA (1)...(19): siRNA sense strand
gggagaaaggugugcaggu

SEQ ID NO: 2517425 - RNA, 19 nt, Homo sapiens
  misc_RNA (1)...(19): siRNA sense strand
gaggaaagccaaugccaac

SEQ ID NO: 2517426 - RNA, 19 nt, Homo sapiens
  misc_RNA (1)...(19): siRNA sense strand
gagcaagguaacccggaga

SEQ ID NO: 2517427 - RNA, 19 nt, Homo sapiens
  misc_RNA (1)...(19): siRNA sense strand
acuacuacauccuggcaga

SEQ ID NO: 2517428 - RNA, 19 nt, Homo sapiens
  misc_RNA (1)...(19): siRNA sense strand
aggaaugggagaaaggugu

SEQ ID NO: 2517429 - RNA, 19 nt, Homo sapiens
  misc_RNA (1)...(19): siRNA sense strand
uggaggagcuggagacccu

SEQ ID NO: 2517430 - RNA, 19 nt, Homo sapiens
  misc_RNA (1)...(19): siRNA sense strand
ucgaguacgacgaggaugu

SEQ ID NO: 2517431 - RNA, 19 nt, Homo sapiens
  misc_RNA (1)...(19): siRNA sense strand
cauuagagcgugugcugga

SEQ ID NO: 2517432 - RNA, 19 nt, Homo sapiens
  misc_RNA (1)...(19): siRNA sense strand
ggcaggaccuagagagggu

SEQ ID NO: 2517433 - RNA, 19 nt, Homo sapiens
  misc_RNA (1)...(19): siRNA sense strand
ugugagaggcccuagccaa

SEQ ID NO: 2517434 - RNA, 19 nt, Homo sapiens
  misc_RNA (1)...(19): siRNA sense strand
cuaaauacccugcagcgaa

SEQ ID NO: 2517435 - RNA, 19 nt, Homo sapiens
  misc_RNA (1)...(19): siRNA sense strand
ggauuaaaacugacgucaa

SEQ ID NO: 2517436 - RNA, 19 nt, Homo sapiens
  misc_RNA (1)...(19): siRNA sense strand
agugaaguacagaaagaau

SEQ ID NO: 2517437 - RNA, 19 nt, Homo sapiens
  misc_RNA (1)...(19): siRNA sense strand
ucuacaacgaggacaagaa

SEQ ID NO: 2517438 - RNA, 19 nt, Homo sapiens
  misc_RNA (1)...(19): siRNA sense strand
ugccagugaaguacagaaa

SEQ ID NO: 2517439 - RNA, 19 nt, Homo sapiens
  misc_RNA (1)...(19): siRNA sense strand
gaaaucagccuacgguuua

SEQ ID NO: 2517440 - RNA, 19 nt, Homo sapiens
  misc_RNA (1)...(19): siRNA sense strand
gcaagaucaucaagcgcuu

SEQ ID NO: 2517441 - RNA, 19 nt, Homo sapiens
  misc_RNA (1)...(19): siRNA sense strand
agaaaucagccuacgguuu

SEQ ID NO: 2517442 - RNA, 19 nt, Homo sapiens
  misc_RNA (1)...(19): siRNA sense strand
ggacacagcucuucauucu

SEQ ID NO: 2517443 - RNA, 19 nt, Homo sapiens
  misc_RNA (1)...(19): siRNA sense strand
acuuagaggcaacaggauu

SEQ ID NO: 2517444 - RNA, 19 nt, Homo sapiens
  misc_RNA (1)...(19): siRNA sense strand
gaacaucauucauggcagu

SEQ ID NO: 2517445 - RNA, 19 nt, Homo sapiens
  misc_RNA (1)...(19): siRNA sense strand
ccaucaggccggacagcau

SEQ ID NO: 2517446 - RNA, 19 nt, Homo sapiens
  misc_RNA (1)...(19): siRNA sense strand
augaauaagagguggacac

SEQ ID NO: 2517447 - RNA, 19 nt, Homo sapiens
  misc_RNA (1)...(19): siRNA sense strand
cauucauggcagugauuca

SEQ ID NO: 2517448 - RNA, 19 nt, Homo sapiens
  misc_RNA (1)...(19): siRNA sense strand
ucuucauucuacugacuua

SEQ ID NO: 2517449 - RNA, 19 nt, Homo sapiens
  misc_RNA (1)...(19): siRNA sense strand
cuacugacuuagaggcaac

SEQ ID NO: 2517450 - RNA, 19 nt, Homo sapiens
  misc_RNA (1)...(19): siRNA sense strand
ucgcaguggcagugagaga

SEQ ID NO: 2517451 - RNA, 19 nt, Homo sapiens
  misc_RNA (1)...(19): siRNA sense strand
gcuuuaacgaggaggagau

SEQ ID NO: 2517452 - RNA, 19 nt, Homo sapiens
  misc_RNA (1)...(19): siRNA sense strand
gcagaugccuugaagcaga

SEQ ID NO: 2517453 - RNA, 19 nt, Homo sapiens
  misc_RNA (1)...(19): siRNA sense strand
acucaaggauacagaggca

SEQ ID NO: 2517454 - RNA, 19 nt, Homo sapiens
  misc_RNA (1)...(19): siRNA sense strand
uuaacgaggaggagaucaa

SEQ ID NO: 2517455 - RNA, 19 nt, Homo sapiens
  misc_RNA (1)...(19): siRNA sense strand
caggagaagggcaaggcaa

SEQ ID NO: 2517456 - RNA, 19 nt, Homo sapiens
  misc_RNA (1)...(19): siRNA sense strand
gguccauggcugaggccuu

SEQ ID NO: 2517457 - RNA, 19 nt, Homo sapiens
  misc_RNA (1)...(19): siRNA sense strand
gggcaacaccguuagggau

SEQ ID NO: 2517458 - RNA, 19 nt, Homo sapiens
  misc_RNA (1)...(19): siRNA sense strand
gagcaagacaugaaggcgu

SEQ ID NO: 2517459 - RNA, 19 nt, Homo sapiens
  misc_RNA (1)...(19): siRNA sense strand
agaucagcuuggcggagaa

SEQ ID NO: 2517460 - RNA, 19 nt, Homo sapiens
  misc_RNA (1)...(19): siRNA sense strand
ggauacagaggcaccgcaa

SEQ ID NO: 2517461 - RNA, 19 nt, Homo sapiens
  misc_RNA (1)...(19): siRNA sense strand
gcugaggcccugaagguga

SEQ ID NO: 2517462 - RNA, 19 nt, Homo sapiens
  misc_RNA (1)...(19): siRNA sense strand
ggaugaucucagaggccau

SEQ ID NO: 2517463 - RNA, 19 nt, Homo sapiens
  misc_RNA (1)...(19): siRNA sense strand
gcguauuacuauggcgcau

SEQ ID NO: 2517464 - RNA, 19 nt, Homo sapiens
  misc_RNA (1)...(19): siRNA sense strand
uggcaucgucaguggccua

SEQ ID NO: 2517465 - RNA, 19 nt, Homo sapiens
  misc_RNA (1)...(19): siRNA sense strand
gugaacagaaccuuggaga

SEQ ID NO: 2517466 - RNA, 19 nt, Homo sapiens
  misc_RNA (1)...(19): siRNA sense strand
ugaacagaaccuuggagau

SEQ ID NO: 2517467 - RNA, 19 nt, Homo sapiens
  misc_RNA (1)...(19): siRNA sense strand
agggaaagugagugagauc

SEQ ID NO: 2517468 - RNA, 19 nt, Homo sapiens
  misc_RNA (1)...(19): siRNA sense strand
cugaccaggcagugaucaa

SEQ ID NO: 2517469 - RNA, 19 nt, Homo sapiens
  misc_RNA (1)...(19): siRNA sense strand
gcuuagaaggagaaagaaa

SEQ ID NO: 2517470 - RNA, 19 nt, Homo sapiens
  misc_RNA (1)...(19): siRNA sense strand
gugaacagucaaugggaaa

SEQ ID NO: 2517471 - RNA, 19 nt, Homo sapiens
  misc_RNA (1)...(19): siRNA sense strand
aagaagaauuggagagaac

SEQ ID NO: 2517472 - RNA, 19 nt, Homo sapiens
  misc_RNA (1)...(19): siRNA sense strand
cccaagaggcccagggaau

SEQ ID NO: 2517473 - RNA, 19 nt, Homo sapiens
  misc_RNA (1)...(19): siRNA sense strand
ggaaauuaacaguggagga

SEQ ID NO: 2517474 - RNA, 19 nt, Homo sapiens
  misc_RNA (1)...(19): siRNA sense strand
gggucaaugccuucagaaa

SEQ ID NO: 2517475 - RNA, 19 nt, Homo sapiens
  misc_RNA (1)...(19): siRNA sense strand
cuauagaaagcuagccaaa

SEQ ID NO: 2517476 - RNA, 19 nt, Homo sapiens
  misc_RNA (1)...(19): siRNA sense strand
aauuaacaguggaggaaaa

SEQ ID NO: 2517477 - RNA, 19 nt, Homo sapiens
  misc_RNA (1)...(19): siRNA sense strand
caaugaaagaggagaacca

SEQ ID NO: 2517478 - RNA, 19 nt, Homo sapiens
  misc_RNA (1)...(19): siRNA sense strand
ggaagagcuuacagagcau

SEQ ID NO: 2517479 - RNA, 19 nt, Homo sapiens
  misc_RNA (1)...(19): siRNA sense strand
gcacgaaguuuggaggcaa

SEQ ID NO: 2517480 - RNA, 19 nt, Homo sapiens
  misc_RNA (1)...(19): siRNA sense strand
aagcuuagaaggagaaaga

SEQ ID NO: 2517481 - RNA, 19 nt, Homo sapiens
  misc_RNA (1)...(19): siRNA sense strand
cuugaaaaguuuagccuua

SEQ ID NO: 2517482 - RNA, 19 nt, Homo sapiens
  misc_RNA (1)...(19): siRNA sense strand
cugaaacagaguugaaauu

SEQ ID NO: 2517483 - RNA, 19 nt, Homo sapiens
  misc_RNA (1)...(19): siRNA sense strand
augaauugauggcggauau

SEQ ID NO: 2517484 - RNA, 19 nt, Homo sapiens
  misc_RNA (1)...(19): siRNA sense strand
ggauaaaauggauggguca

SEQ ID NO: 2517485 - RNA, 19 nt, Homo sapiens
  misc_RNA (1)...(19): siRNA sense strand
cucuagaagaugagucaaa

SEQ ID NO: 2517486 - RNA, 19 nt, Homo sapiens
  misc_RNA (1)...(19): siRNA sense strand
uuacgugggaagagagcaa

SEQ ID NO: 2517487 - RNA, 19 nt, Homo sapiens
  misc_RNA (1)...(19): siRNA sense strand
aagaaaccucagugauuua

SEQ ID NO: 2517488 - RNA, 19 nt, Homo sapiens
  misc_RNA (1)...(19): siRNA sense strand
ugaaguauggaaaggagaa

SEQ ID NO: 2517489 - RNA, 19 nt, Homo sapiens
  misc_RNA (1)...(19): siRNA sense strand
aaacaaaggaagagcuuac

SEQ ID NO: 2517490 - RNA, 19 nt, Homo sapiens
  misc_RNA (1)...(19): siRNA sense strand
ccaaaguacacgcagaaca

SEQ ID NO: 2517491 - RNA, 19 nt, Homo sapiens
  misc_RNA (1)...(19): siRNA sense strand
cugcugugcuugaagaaga

SEQ ID NO: 2517492 - RNA, 19 nt, Homo sapiens
  misc_RNA (1)...(19): siRNA sense strand
ucagauuaccaaugaaaga

SEQ ID NO: 2517493 - RNA, 19 nt, Homo sapiens
  misc_RNA (1)...(19): siRNA sense strand
cacaaauagcugaagccaa

SEQ ID NO: 2517494 - RNA, 19 nt, Homo sapiens
  misc_RNA (1)...(19): siRNA sense strand
aggcuaugaaguagaguca

SEQ ID NO: 2517495 - RNA, 19 nt, Homo sapiens
  misc_RNA (1)...(19): siRNA sense strand
cuuagaugauccucugaaa

SEQ ID NO: 2517496 - RNA, 19 nt, Homo sapiens
  misc_RNA (1)...(19): siRNA sense strand
agaaaagaggacaugauaa

SEQ ID NO: 2517497 - RNA, 19 nt, Homo sapiens
  misc_RNA (1)...(19): siRNA sense strand
uaccaaugaaagaggagaa

SEQ ID NO: 2517498 - RNA, 19 nt, Homo sapiens
  misc_RNA (1)...(19): siRNA sense strand
cucaaagggaagacagauu

SEQ ID NO: 2517499 - RNA, 19 nt, Homo sapiens
  misc_RNA (1)...(19): siRNA sense strand
agugaacagucaaugggaa

SEQ ID NO: 2517500 - RNA, 19 nt, Homo sapiens
  misc_RNA (1)...(19): siRNA sense strand
ccgaauagagggagaagag

SEQ ID NO: 2517501 - RNA, 19 nt, Homo sapiens
  misc_RNA (1)...(19): siRNA sense strand
ggagaaguuuagaucgguu

SEQ ID NO: 2517502 - RNA, 19 nt, Homo sapiens
  misc_RNA (1)...(19): siRNA sense strand
agugaagaacgacgggcua

SEQ ID NO: 2517503 - RNA, 19 nt, Homo sapiens
  misc_RNA (1)...(19): siRNA sense strand
aggaagagcuuacagagca

SEQ ID NO: 2517504 - RNA, 19 nt, Homo sapiens
  misc_RNA (1)...(19): siRNA sense strand
aguuaucugaaguggacaa

SEQ ID NO: 2517505 - RNA, 19 nt, Homo sapiens
  misc_RNA (1)...(19): siRNA sense strand
ggaaagaaaaugcucacaa

SEQ ID NO: 2517506 - RNA, 19 nt, Homo sapiens
  misc_RNA (1)...(19): siRNA sense strand
ugaagaagaauuggagaga

SEQ ID NO: 2517507 - RNA, 19 nt, Homo sapiens
  misc_RNA (1)...(19): siRNA sense strand
aagaaaaugcucacaacaa

SEQ ID NO: 2517508 - RNA, 19 nt, Homo sapiens
  misc_RNA (1)...(19): siRNA sense strand
guucaugagaagaggaccu

SEQ ID NO: 2517509 - RNA, 19 nt, Homo sapiens
  misc_RNA (1)...(19): siRNA sense strand
acuccaaaguacacgcaga

SEQ ID NO: 2517510 - RNA, 19 nt, Homo sapiens
  misc_RNA (1)...(19): siRNA sense strand
ugaagaacgacgggcuaua

SEQ ID NO: 2517511 - RNA, 19 nt, Homo sapiens
  misc_RNA (1)...(19): siRNA sense strand
agaagcugaaguauggaaa

SEQ ID NO: 2517512 - RNA, 19 nt, Homo sapiens
  misc_RNA (1)...(19): siRNA sense strand
uggacaaaacaaaggaaga

SEQ ID NO: 2517513 - RNA, 19 nt, Homo sapiens
  misc_RNA (1)...(19): siRNA sense strand
acugaaacagaguugaaau

SEQ ID NO: 2517514 - RNA, 19 nt, Homo sapiens
  misc_RNA (1)...(19): siRNA sense strand
cugaaguauggaaaggaga

SEQ ID NO: 2517515 - RNA, 19 nt, Homo sapiens
  misc_RNA (1)...(19): siRNA sense strand
auggaaaggagaagugagu

SEQ ID NO: 2517516 - RNA, 19 nt, Homo sapiens
  misc_RNA (1)...(19): siRNA sense strand
agaucaggcugcugugcuu

SEQ ID NO: 2517517 - RNA, 19 nt, Homo sapiens
  misc_RNA (1)...(19): siRNA sense strand
ugaugauaaccuggaauua

SEQ ID NO: 2517518 - RNA, 19 nt, Homo sapiens
  misc_RNA (1)...(19): siRNA sense strand
cugaaguggacaaaacaaa

SEQ ID NO: 2517519 - RNA, 19 nt, Homo sapiens
  misc_RNA (1)...(19): siRNA sense strand
cgagaaaagaggacaugau

SEQ ID NO: 2517520 - RNA, 19 nt, Homo sapiens
  misc_RNA (1)...(19): siRNA sense strand
gugagaaucagaagcuuca

SEQ ID NO: 2517521 - RNA, 19 nt, Homo sapiens
  misc_RNA (1)...(19): siRNA sense strand
ccacaugcuccauuugcaa

SEQ ID NO: 2517522 - RNA, 19 nt, Homo sapiens
  misc_RNA (1)...(19): siRNA sense strand
ugucaucuccgguggaaca

SEQ ID NO: 2517523 - RNA, 19 nt, Homo sapiens
  misc_RNA (1)...(19): siRNA sense strand
gcuggagagggaagggaaa

SEQ ID NO: 2517524 - RNA, 19 nt, Homo sapiens
  misc_RNA (1)...(19): siRNA sense strand
aggaugaagaccaggauga

SEQ ID NO: 2517525 - RNA, 19 nt, Homo sapiens
  misc_RNA (1)...(19): siRNA sense strand
ucgaaaaggaccucaguaa

SEQ ID NO: 2517526 - RNA, 19 nt, Homo sapiens
  misc_RNA (1)...(19): siRNA sense strand
cuggagaacaggagccaau

SEQ ID NO: 2517527 - RNA, 19 nt, Homo sapiens
  misc_RNA (1)...(19): siRNA sense strand
gggacaaacuccugcugga

SEQ ID NO: 2517528 - RNA, 19 nt, Homo sapiens
  misc_RNA (1)...(19): siRNA sense strand
aagaccaggaugaggacaa

SEQ ID NO: 2517529 - RNA, 19 nt, Homo sapiens
  misc_RNA (1)...(19): siRNA sense strand
aguucaauaaggagaucaa

SEQ ID NO: 2517530 - RNA, 19 nt, Homo sapiens
  misc_RNA (1)...(19): siRNA sense strand
ggacacaggagcagcccuu

SEQ ID NO: 2517531 - RNA, 19 nt, Homo sapiens
  misc_RNA (1)...(19): siRNA sense strand
cgagaguucaauaaggaga

SEQ ID NO: 2517532 - RNA, 19 nt, Homo sapiens
  misc_RNA (1)...(19): siRNA sense strand
cgcaaguacgaguucgaaa

SEQ ID NO: 2517533 - RNA, 19 nt, Homo sapiens
  misc_RNA (1)...(19): siRNA sense strand
ugcuacagcuggagaggga

SEQ ID NO: 2517534 - RNA, 19 nt, Homo sapiens
  misc_RNA (1)...(19): siRNA sense strand
gaggaugaguucaaggaug

SEQ ID NO: 2517535 - RNA, 19 nt, Homo sapiens
  misc_RNA (1)...(19): siRNA sense strand
ccgagauugaagaugaaga

SEQ ID NO: 2517536 - RNA, 19 nt, Homo sapiens
  misc_RNA (1)...(19): siRNA sense strand
ugaagaugaagaugaggau

SEQ ID NO: 2517537 - RNA, 19 nt, Homo sapiens
  misc_RNA (1)...(19): siRNA sense strand
cagccgggacagugaccua

SEQ ID NO: 2517538 - RNA, 19 nt, Homo sapiens
  misc_RNA (1)...(19): siRNA sense strand
ccuccuuggucauccgcaa

SEQ ID NO: 2517539 - RNA, 19 nt, Homo sapiens
  misc_RNA (1)...(19): siRNA sense strand
ccgugauaaagccgagauu

SEQ ID NO: 2517540 - RNA, 19 nt, Homo sapiens
  misc_RNA (1)...(19): siRNA sense strand
agccgagauugaagaugaa

SEQ ID NO: 2517541 - RNA, 19 nt, Homo sapiens
  misc_RNA (1)...(19): siRNA sense strand
gguggagaaucaaggacga

SEQ ID NO: 2517542 - RNA, 19 nt, Homo sapiens
  misc_RNA (1)...(19): siRNA sense strand
ugagacaaugauagggauu

SEQ ID NO: 2517543 - RNA, 19 nt, Homo sapiens
  misc_RNA (1)...(19): siRNA sense strand
gcagaaaggaauaacugga

SEQ ID NO: 2517544 - RNA, 19 nt, Homo sapiens
  misc_RNA (1)...(19): siRNA sense strand
ccgucaacauggagaaccu

SEQ ID NO: 2517545 - RNA, 19 nt, Homo sapiens
  misc_RNA (1)...(19): siRNA sense strand
caucaauggacguaaccuu

SEQ ID NO: 2517546 - RNA, 19 nt, Homo sapiens
  misc_RNA (1)...(19): siRNA sense strand
auaauaaggaccugcacau

SEQ ID NO: 2517547 - RNA, 19 nt, Homo sapiens
  misc_RNA (1)...(19): siRNA sense strand
gagaagaugaugaguggcu

SEQ ID NO: 2517548 - RNA, 19 nt, Homo sapiens
  misc_RNA (1)...(19): siRNA sense strand
gcaaauacagaaugagcag

SEQ ID NO: 2517549 - RNA, 19 nt, Homo sapiens
  misc_RNA (1)...(19): siRNA sense strand
cuaaagagaccaaggcuca

SEQ ID NO: 2517550 - RNA, 19 nt, Homo sapiens
  misc_RNA (1)...(19): siRNA sense strand
ccuuggaagcugaagauau

SEQ ID NO: 2517551 - RNA, 19 nt, Homo sapiens
  misc_RNA (1)...(19): siRNA sense strand
agucauaacugauugcuca

SEQ ID NO: 2517552 - RNA, 19 nt, Homo sapiens
  misc_RNA (1)...(19): siRNA sense strand
uggcauuaccagugaaaau

SEQ ID NO: 2517553 - RNA, 19 nt, Homo sapiens
  misc_RNA (1)...(19): siRNA sense strand
ccguauacccucagccaga

SEQ ID NO: 2517554 - RNA, 19 nt, Homo sapiens
  misc_RNA (1)...(19): siRNA sense strand
aucaaagacaucaaggaaa

SEQ ID NO: 2517555 - RNA, 19 nt, Homo sapiens
  misc_RNA (1)...(19): siRNA sense strand
accaaggcucagaaagaaa

SEQ ID NO: 2517556 - RNA, 19 nt, Homo sapiens
  misc_RNA (1)...(19): siRNA sense strand
uuauaaagaucuggagcca

SEQ ID NO: 2517557 - RNA, 19 nt, Homo sapiens
  misc_RNA (1)...(19): siRNA sense strand
uguuggaauuauuggaagu

SEQ ID NO: 2517558 - RNA, 19 nt, Homo sapiens
  misc_RNA (1)...(19): siRNA sense strand
uggaauuauuggaaguugu

SEQ ID NO: 2517559 - RNA, 19 nt, Homo sapiens
  misc_RNA (1)...(19): siRNA sense strand
gggcuuuuauacagaagaa

SEQ ID NO: 2517560 - RNA, 19 nt, Homo sapiens
  misc_RNA (1)...(19): siRNA sense strand
acaucaaggaaaagucaaa

SEQ ID NO: 2517561 - RNA, 19 nt, Homo sapiens
  misc_RNA (1)...(19): siRNA sense strand
cucuacagaaacaaagaua

SEQ ID NO: 2517562 - RNA, 19 nt, Homo sapiens
  misc_RNA (1)...(19): siRNA sense strand
agagagagccaguguggga

SEQ ID NO: 2517563 - RNA, 19 nt, Homo sapiens
  misc_RNA (1)...(19): siRNA sense strand
ggaugagauggaagagauc

SEQ ID NO: 2517564 - RNA, 19 nt, Homo sapiens
  misc_RNA (1)...(19): siRNA sense strand
cagaagaagcugaucgaca

SEQ ID NO: 2517565 - RNA, 19 nt, Homo sapiens
  misc_RNA (1)...(19): siRNA sense strand
uggaggaggccgugcucaa

SEQ ID NO: 2517566 - RNA, 19 nt, Homo sapiens
  misc_RNA (1)...(19): siRNA sense strand
acgaaggagaccagcgaga

SEQ ID NO: 2517567 - RNA, 19 nt, Homo sapiens
  misc_RNA (1)...(19): siRNA sense strand
cccugaaauugaggagaaa

SEQ ID NO: 2517568 - RNA, 19 nt, Homo sapiens
  misc_RNA (1)...(19): siRNA sense strand
ggcucaaccagcagaagaa

SEQ ID NO: 2517569 - RNA, 19 nt, Homo sapiens
  misc_RNA (1)...(19): siRNA sense strand
aggagaaccuggagcugca

SEQ ID NO: 2517570 - RNA, 19 nt, Homo sapiens
  misc_RNA (1)...(19): siRNA sense strand
cgggagaagcugcgcaagu

SEQ ID NO: 2517571 - RNA, 19 nt, Homo sapiens
  misc_RNA (1)...(19): siRNA sense strand
ugaucacggaugaggucaa

SEQ ID NO: 2517572 - RNA, 19 nt, Homo sapiens
  misc_RNA (1)...(19): siRNA sense strand
uggagaaggucaagagugc

SEQ ID NO: 2517573 - RNA, 19 nt, Homo sapiens
  misc_RNA (1)...(19): siRNA sense strand
acaacaucgagaagacaau

SEQ ID NO: 2517574 - RNA, 19 nt, Homo sapiens
  misc_RNA (1)...(19): siRNA sense strand
ccucgaaccugaugagcac

SEQ ID NO: 2517575 - RNA, 19 nt, Homo sapiens
  misc_RNA (1)...(19): siRNA sense strand
ggagaagcaagcaggcgaa

SEQ ID NO: 2517576 - RNA, 19 nt, Homo sapiens
  misc_RNA (1)...(19): siRNA sense strand
ugaagaagacagagacgca

SEQ ID NO: 2517577 - RNA, 19 nt, Homo sapiens
  misc_RNA (1)...(19): siRNA sense strand
aaacgauugaacaggagaa

SEQ ID NO: 2517578 - RNA, 19 nt, Homo sapiens
  misc_RNA (1)...(19): siRNA sense strand
aagucgaaacugaagaaga

SEQ ID NO: 2517579 - RNA, 19 nt, Homo sapiens
  misc_RNA (1)...(19): siRNA sense strand
agaagugacaggagggcaa

SEQ ID NO: 2517580 - RNA, 19 nt, Homo sapiens
  misc_RNA (1)...(19): siRNA sense strand
gggaaggggucucuggaca

SEQ ID NO: 2517581 - RNA, 19 nt, Homo sapiens
  misc_RNA (1)...(19): siRNA sense strand
agcggaagguccugggaaa

SEQ ID NO: 2517582 - RNA, 19 nt, Homo sapiens
  misc_RNA (1)...(19): siRNA sense strand
gcaaaugaccuucaggaga

SEQ ID NO: 2517583 - RNA, 19 nt, Homo sapiens
  misc_RNA (1)...(19): siRNA sense strand
gggaagaaagaggggaaaa

SEQ ID NO: 2517584 - RNA, 19 nt, Homo sapiens
  misc_RNA (1)...(19): siRNA sense strand
cguaauuugcugaaguuau

SEQ ID NO: 2517585 - RNA, 19 nt, Homo sapiens
  misc_RNA (1)...(19): siRNA sense strand
auaaaggaaacaagaccaa

SEQ ID NO: 2517586 - RNA, 19 nt, Homo sapiens
  misc_RNA (1)...(19): siRNA sense strand
auaccagacagcaaagaaa

SEQ ID NO: 2517587 - RNA, 19 nt, Homo sapiens
  misc_RNA (1)...(19): siRNA sense strand
agaacaagaugucagccua

SEQ ID NO: 2517588 - RNA, 19 nt, Homo sapiens
  misc_RNA (1)...(19): siRNA sense strand
ugaaguggucugaagggaa

SEQ ID NO: 2517589 - RNA, 19 nt, Homo sapiens
  misc_RNA (1)...(19): siRNA sense strand
gauaaaggaaacaagacca

SEQ ID NO: 2517590 - RNA, 19 nt, Homo sapiens
  misc_RNA (1)...(19): siRNA sense strand
gcggaagguccugggaaau

SEQ ID NO: 2517591 - RNA, 19 nt, Homo sapiens
  misc_RNA (1)...(19): siRNA sense strand
ccagacaaggaccggcaaa

SEQ ID NO: 2517592 - RNA, 19 nt, Homo sapiens
  misc_RNA (1)...(19): siRNA sense strand
ccaacaagauugaaguggu

SEQ ID NO: 2517593 - RNA, 19 nt, Homo sapiens
  misc_RNA (1)...(19): siRNA sense strand
gcaccauacggaagaggca

SEQ ID NO: 2517594 - RNA, 19 nt, Homo sapiens
  misc_RNA (1)...(19): siRNA sense strand
caacaagauugaagugguc

SEQ ID NO: 2517595 - RNA, 19 nt, Homo sapiens
  misc_RNA (1)...(19): siRNA sense strand
cuucaggagaauaucacaa

SEQ ID NO: 2517596 - RNA, 19 nt, Homo sapiens
  misc_RNA (1)...(19): siRNA sense strand
agucagcaaagaagaaaca

SEQ ID NO: 2517597 - RNA, 19 nt, Homo sapiens
  misc_RNA (1)...(19): siRNA sense strand
aagggaagaaagaggggaa

SEQ ID NO: 2517598 - RNA, 19 nt, Homo sapiens
  misc_RNA (1)...(19): siRNA sense strand
cagaggaagaggaggaaaa

SEQ ID NO: 2517599 - RNA, 19 nt, Homo sapiens
  misc_RNA (1)...(19): siRNA sense strand
aaguagaaggaaaggcaaa

SEQ ID NO: 2517600 - RNA, 19 nt, Homo sapiens
  misc_RNA (1)...(19): siRNA sense strand
aggaagaggaggaaaauaa

SEQ ID NO: 2517601 - RNA, 19 nt, Homo sapiens
  misc_RNA (1)...(19): siRNA sense strand
cagcagaggaagaggagga

SEQ ID NO: 2517602 - RNA, 19 nt, Homo sapiens
  misc_RNA (1)...(19): siRNA sense strand
agaaagagcuuauucgaca

SEQ ID NO: 2517603 - RNA, 19 nt, Homo sapiens
  misc_RNA (1)...(19): siRNA sense strand
acuuaauggacuugcuaaa

SEQ ID NO: 2517604 - RNA, 19 nt, Homo sapiens
  misc_RNA (1)...(19): siRNA sense strand
cgacuuuguaucagcauaa

SEQ ID NO: 2517605 - RNA, 19 nt, Homo sapiens
  misc_RNA (1)...(19): siRNA sense strand
aaauaagaggauuggagaa

SEQ ID NO: 2517606 - RNA, 19 nt, Homo sapiens
  misc_RNA (1)...(19): siRNA sense strand
caauaaauuucuugcacca

SEQ ID NO: 2517607 - RNA, 19 nt, Homo sapiens
  misc_RNA (1)...(19): siRNA sense strand
agaugauagcugugaccaa

SEQ ID NO: 2517608 - RNA, 19 nt, Homo sapiens
  misc_RNA (1)...(19): siRNA sense strand
agcuacaacuagaggauga

SEQ ID NO: 2517609 - RNA, 19 nt, Homo sapiens
  misc_RNA (1)...(19): siRNA sense strand
aauaagaggauuggagaau

SEQ ID NO: 2517610 - RNA, 19 nt, Homo sapiens
  misc_RNA (1)...(19): siRNA sense strand
gaagaauugcagagacgau

SEQ ID NO: 2517611 - RNA, 19 nt, Homo sapiens
  misc_RNA (1)...(19): siRNA sense strand
cuacaaagaugauagcugu

SEQ ID NO: 2517612 - RNA, 19 nt, Homo sapiens
  misc_RNA (1)...(19): siRNA sense strand
caaaguagaaggaaaggca

SEQ ID NO: 2517613 - RNA, 19 nt, Homo sapiens
  misc_RNA (1)...(19): siRNA sense strand
caccaggaacucagagaau

SEQ ID NO: 2517614 - RNA, 19 nt, Homo sapiens
  misc_RNA (1)...(19): siRNA sense strand
ugggaugagcuuuggaaca

SEQ ID NO: 2517615 - RNA, 19 nt, Homo sapiens
  misc_RNA (1)...(19): siRNA sense strand
uuacaaaguagaaggaaag

SEQ ID NO: 2517616 - RNA, 19 nt, Homo sapiens
  misc_RNA (1)...(19): siRNA sense strand
guaccugcuucuuggucaa

SEQ ID NO: 2517617 - RNA, 19 nt, Homo sapiens
  misc_RNA (1)...(19): siRNA sense strand
gaauuugggacuugagagu

SEQ ID NO: 2517618 - RNA, 19 nt, Homo sapiens
  misc_RNA (1)...(19): siRNA sense strand
gggcaggagcgaagcugau

SEQ ID NO: 2517619 - RNA, 19 nt, Homo sapiens
  misc_RNA (1)...(19): siRNA sense strand
gcuucaggcuggacuucaa

SEQ ID NO: 2517620 - RNA, 19 nt, Homo sapiens
  misc_RNA (1)...(19): siRNA sense strand
gggugguacuauggaaauu

SEQ ID NO: 2517621 - RNA, 19 nt, Homo sapiens
  misc_RNA (1)...(19): siRNA sense strand
cguuuaugacgauggauca

SEQ ID NO: 2517622 - RNA, 19 nt, Homo sapiens
  misc_RNA (1)...(19): siRNA sense strand
ggaaauuacagaagcagcu

SEQ ID NO: 2517623 - RNA, 19 nt, Homo sapiens
  misc_RNA (1)...(19): siRNA sense strand
ccacugccaaggaaggaaa

SEQ ID NO: 2517624 - RNA, 19 nt, Homo sapiens
  misc_RNA (1)...(19): siRNA sense strand
uggacuucaacgagcauua

SEQ ID NO: 2517625 - RNA, 19 nt, Homo sapiens
  misc_RNA (1)...(19): siRNA sense strand
gcauaacuugacuggaauu

SEQ ID NO: 2517626 - RNA, 19 nt, Homo sapiens
  misc_RNA (1)...(19): siRNA sense strand
agggcgaagcggauggaau

SEQ ID NO: 2517627 - RNA, 19 nt, Homo sapiens
  misc_RNA (1)...(19): siRNA sense strand
agaauugcagagacgauua

SEQ ID NO: 2517628 - RNA, 19 nt, Homo sapiens
  misc_RNA (1)...(19): siRNA sense strand
ggauuggagaauuuaaaga

SEQ ID NO: 2517629 - RNA, 19 nt, Homo sapiens
  misc_RNA (1)...(19): siRNA sense strand
cugacauacggaagggaca

SEQ ID NO: 2517630 - RNA, 19 nt, Homo sapiens
  misc_RNA (1)...(19): siRNA sense strand
ucagagaauacuaucgauu

SEQ ID NO: 2517631 - RNA, 19 nt, Homo sapiens
  misc_RNA (1)...(19): siRNA sense strand
gcuugaauguucuugggau

SEQ ID NO: 2517632 - RNA, 19 nt, Homo sapiens
  misc_RNA (1)...(19): siRNA sense strand
ugacaagguccaggagaga

SEQ ID NO: 2517633 - RNA, 19 nt, Homo sapiens
  misc_RNA (1)...(19): siRNA sense strand
ccaccaacgcacaguuuga

SEQ ID NO: 2517634 - RNA, 19 nt, Homo sapiens
  misc_RNA (1)...(19): siRNA sense strand
cuugaauguucuugggaug

SEQ ID NO: 2517635 - RNA, 19 nt, Homo sapiens
  misc_RNA (1)...(19): siRNA sense strand
gcucaagaugcaauauaca

SEQ ID NO: 2517636 - RNA, 19 nt, Homo sapiens
  misc_RNA (1)...(19): siRNA sense strand
ugacggcagcagaggaaga

SEQ ID NO: 2517637 - RNA, 19 nt, Homo sapiens
  misc_RNA (1)...(19): siRNA sense strand
gcagaggaagaggaggaaa

SEQ ID NO: 2517638 - RNA, 19 nt, Homo sapiens
  misc_RNA (1)...(19): siRNA sense strand
ucgacaacgaagagaagca

SEQ ID NO: 2517639 - RNA, 19 nt, Homo sapiens
  misc_RNA (1)...(19): siRNA sense strand
ccaggaacucagagaauac

SEQ ID NO: 2517640 - RNA, 19 nt, Homo sapiens
  misc_RNA (1)...(19): siRNA sense strand
uggaagaauugcagagacg

SEQ ID NO: 2517641 - RNA, 19 nt, Homo sapiens
  misc_RNA (1)...(19): siRNA sense strand
agaaggaaaggcaaaucua

SEQ ID NO: 2517642 - RNA, 19 nt, Homo sapiens
  misc_RNA (1)...(19): siRNA sense strand
cgagaauguaugagccacu

SEQ ID NO: 2517643 - RNA, 19 nt, Homo sapiens
  misc_RNA (1)...(19): siRNA sense strand
acaacgaagagaagcagau

SEQ ID NO: 2517644 - RNA, 19 nt, Homo sapiens
  misc_RNA (1)...(19): siRNA sense strand
uguguuuacucgagaaugu

SEQ ID NO: 2517645 - RNA, 19 nt, Homo sapiens
  misc_RNA (1)...(19): siRNA sense strand
cuguugaaagagaugaauu

SEQ ID NO: 2517646 - RNA, 19 nt, Homo sapiens
  misc_RNA (1)...(19): siRNA sense strand
cacaaauaaaccagagaaa

SEQ ID NO: 2517647 - RNA, 19 nt, Homo sapiens
  misc_RNA (1)...(19): siRNA sense strand
aauggaaagacuaggaaua

SEQ ID NO: 2517648 - RNA, 19 nt, Homo sapiens
  misc_RNA (1)...(19): siRNA sense strand
uggaauaccuuuaggacca

SEQ ID NO: 2517649 - RNA, 19 nt, Homo sapiens
  misc_RNA (1)...(19): siRNA sense strand
ccacaaaaggacagaguau

SEQ ID NO: 2517650 - RNA, 19 nt, Homo sapiens
  misc_RNA (1)...(19): siRNA sense strand
acaaaaggacagaguauaa

SEQ ID NO: 2517651 - RNA, 19 nt, Homo sapiens
  misc_RNA (1)...(19): siRNA sense strand
cacaaggagaagacagaaa

SEQ ID NO: 2517652 - RNA, 19 nt, Homo sapiens
  misc_RNA (1)...(19): siRNA sense strand
augcaagacauguaguaaa

SEQ ID NO: 2517653 - RNA, 19 nt, Homo sapiens
  misc_RNA (1)...(19): siRNA sense strand
acgcaaacaacuugauuau

SEQ ID NO: 2517654 - RNA, 19 nt, Homo sapiens
  misc_RNA (1)...(19): siRNA sense strand
uggaugauauggaaggcaa

SEQ ID NO: 2517655 - RNA, 19 nt, Homo sapiens
  misc_RNA (1)...(19): siRNA sense strand
acaaacaguaucaggaaaa

SEQ ID NO: 2517656 - RNA, 19 nt, Homo sapiens
  misc_RNA (1)...(19): siRNA sense strand
ugauuggauugaugaacaa

SEQ ID NO: 2517657 - RNA, 19 nt, Homo sapiens
  misc_RNA (1)...(19): siRNA sense strand
cagagaaagaugcaagaca

SEQ ID NO: 2517658 - RNA, 19 nt, Homo sapiens
  misc_RNA (1)...(19): siRNA sense strand
ggaaagugcagaaagagga

SEQ ID NO: 2517659 - RNA, 19 nt, Homo sapiens
  misc_RNA (1)...(19): siRNA sense strand
cagaaagaggagaaacuga

SEQ ID NO: 2517660 - RNA, 19 nt, Homo sapiens
  misc_RNA (1)...(19): siRNA sense strand
caauagaguuuaccagcuu

SEQ ID NO: 2517661 - RNA, 19 nt, Homo sapiens
  misc_RNA (1)...(19): siRNA sense strand
ggaugauauggaaggcaau

SEQ ID NO: 2517662 - RNA, 19 nt, Homo sapiens
  misc_RNA (1)...(19): siRNA sense strand
gugaagagacaaacgcaga

SEQ ID NO: 2517663 - RNA, 19 nt, Homo sapiens
  misc_RNA (1)...(19): siRNA sense strand
ugacugaauucaagggaag

SEQ ID NO: 2517664 - RNA, 19 nt, Homo sapiens
  misc_RNA (1)...(19): siRNA sense strand
cugauuggauugaugaaca

SEQ ID NO: 2517665 - RNA, 19 nt, Homo sapiens
  misc_RNA (1)...(19): siRNA sense strand
gaagauuggcucuggagga

SEQ ID NO: 2517666 - RNA, 19 nt, Homo sapiens
  misc_RNA (1)...(19): siRNA sense strand
ugcaagacauguaguaaaa

SEQ ID NO: 2517667 - RNA, 19 nt, Homo sapiens
  misc_RNA (1)...(19): siRNA sense strand
gaacagaaccugaaggacc

SEQ ID NO: 2517668 - RNA, 19 nt, Homo sapiens
  misc_RNA (1)...(19): siRNA sense strand
gcggugguugugugggaaa

SEQ ID NO: 2517669 - RNA, 19 nt, Homo sapiens
  misc_RNA (1)...(19): siRNA sense strand
cugacugaauucaagggaa

SEQ ID NO: 2517670 - RNA, 19 nt, Homo sapiens
  misc_RNA (1)...(19): siRNA sense strand
acguugagauccucggcua

SEQ ID NO: 2517671 - RNA, 19 nt, Homo sapiens
  misc_RNA (1)...(19): siRNA sense strand
ggaucuggucugacugaau

SEQ ID NO: 2517672 - RNA, 19 nt, Homo sapiens
  misc_RNA (1)...(19): siRNA sense strand
gauuuaugguaauggaaag

SEQ ID NO: 2517673 - RNA, 19 nt, Homo sapiens
  misc_RNA (1)...(19): siRNA sense strand
uaaugggacaauagaguuu

SEQ ID NO: 2517674 - RNA, 19 nt, Homo sapiens
  misc_RNA (1)...(19): siRNA sense strand
cacaaaaggcugcaacaaa

SEQ ID NO: 2517675 - RNA, 19 nt, Homo sapiens
  misc_RNA (1)...(19): siRNA sense strand
ucaggaaagcacaaggaga

SEQ ID NO: 2517676 - RNA, 19 nt, Homo sapiens
  misc_RNA (1)...(19): siRNA sense strand
agggaagaaguuacagauu

SEQ ID NO: 2517677 - RNA, 19 nt, Homo sapiens
  misc_RNA (1)...(19): siRNA sense strand
cauaaugggacaauagagu

SEQ ID NO: 2517678 - RNA, 19 nt, Homo sapiens
  misc_RNA (1)...(19): siRNA sense strand
agaaagaggagaaacugau

SEQ ID NO: 2517679 - RNA, 19 nt, Homo sapiens
  misc_RNA (1)...(19): siRNA sense strand
aagugcagaaagaggagaa

SEQ ID NO: 2517680 - RNA, 19 nt, Homo sapiens
  misc_RNA (1)...(19): siRNA sense strand
uggaaagacuaggaauaga

SEQ ID NO: 2517681 - RNA, 19 nt, Homo sapiens
  misc_RNA (1)...(19): siRNA sense strand
ggguacugggcaagaagau

SEQ ID NO: 2517682 - RNA, 19 nt, Homo sapiens
  misc_RNA (1)...(19): siRNA sense strand
cuuuaggaccacuggacuu

SEQ ID NO: 2517683 - RNA, 19 nt, Homo sapiens
  misc_RNA (1)...(19): siRNA sense strand
ugcagaaagaggagaaacu

SEQ ID NO: 2517684 - RNA, 19 nt, Homo sapiens
  misc_RNA (1)...(19): siRNA sense strand
gggcaagaagauuggcucu

SEQ ID NO: 2517685 - RNA, 19 nt, Homo sapiens
  misc_RNA (1)...(19): siRNA sense strand
gggaucacagacuuagaaa

SEQ ID NO: 2517686 - RNA, 19 nt, Homo sapiens
  misc_RNA (1)...(19): siRNA sense strand
acgaagugacguugagauc

SEQ ID NO: 2517687 - RNA, 19 nt, Homo sapiens
  misc_RNA (1)...(19): siRNA sense strand
acacaauagguuaaucgaa

SEQ ID NO: 2517688 - RNA, 19 nt, Homo sapiens
  misc_RNA (1)...(19): siRNA sense strand
uaucaagcccucaagaaaa

SEQ ID NO: 2517689 - RNA, 19 nt, Homo sapiens
  misc_RNA (1)...(19): siRNA sense strand
cagagguagugcagggcaa

SEQ ID NO: 2517690 - RNA, 19 nt, Homo sapiens
  misc_RNA (1)...(19): siRNA sense strand
aguaauaauucgcugguga

SEQ ID NO: 2517691 - RNA, 19 nt, Homo sapiens
  misc_RNA (1)...(19): siRNA sense strand
gggaucacauggaagggua

SEQ ID NO: 2517692 - RNA, 19 nt, Homo sapiens
  misc_RNA (1)...(19): siRNA sense strand
ggaucacauggaaggguau

SEQ ID NO: 2517693 - RNA, 19 nt, Homo sapiens
  misc_RNA (1)...(19): siRNA sense strand
ucaaggaaacagagguagu

SEQ ID NO: 2517694 - RNA, 19 nt, Homo sapiens
  misc_RNA (1)...(19): siRNA sense strand
agagaugccugcagggauc

SEQ ID NO: 2517695 - RNA, 19 nt, Homo sapiens
  misc_RNA (1)...(19): siRNA sense strand
ggguuuuccuggacaacaa

SEQ ID NO: 2517696 - RNA, 19 nt, Homo sapiens
  misc_RNA (1)...(19): siRNA sense strand
cuuaugucuuccuggguau

SEQ ID NO: 2517697 - RNA, 19 nt, Homo sapiens
  misc_RNA (1)...(19): siRNA sense strand
gugaccuggcucaaggaaa

SEQ ID NO: 2517698 - RNA, 19 nt, Homo sapiens
  misc_RNA (1)...(19): siRNA sense strand
gaacugauccugaaccaca

SEQ ID NO: 2517699 - RNA, 19 nt, Homo sapiens
  misc_RNA (1)...(19): siRNA sense strand
agagacauccaaagggcaa

SEQ ID NO: 2517700 - RNA, 19 nt, Homo sapiens
  misc_RNA (1)...(19): siRNA sense strand
aaagaagccuagaaaggga

SEQ ID NO: 2517701 - RNA, 19 nt, Homo sapiens
  misc_RNA (1)...(19): siRNA sense strand
acccaaagcaaucguggaa

SEQ ID NO: 2517702 - RNA, 19 nt, Homo sapiens
  misc_RNA (1)...(19): siRNA sense strand
acgauguucaagagagaca

SEQ ID NO: 2517703 - RNA, 19 nt, Homo sapiens
  misc_RNA (1)...(19): siRNA sense strand
uggcaacgucauugagaaa

SEQ ID NO: 2517704 - RNA, 19 nt, Homo sapiens
  misc_RNA (1)...(19): siRNA sense strand
ccgagauggaggaggagaa

SEQ ID NO: 2517705 - RNA, 19 nt, Homo sapiens
  misc_RNA (1)...(19): siRNA sense strand
agaaggagcuggugggcga

SEQ ID NO: 2517706 - RNA, 19 nt, Homo sapiens
  misc_RNA (1)...(19): siRNA sense strand
ccaagaagauccugcgcau

SEQ ID NO: 2517707 - RNA, 19 nt, Homo sapiens
  misc_RNA (1)...(19): siRNA sense strand
ugacagaguaugaggagga

SEQ ID NO: 2517708 - RNA, 19 nt, Homo sapiens
  misc_RNA (1)...(19): siRNA sense strand
gggagugggccaagagcau

SEQ ID NO: 2517709 - RNA, 19 nt, Homo sapiens
  misc_RNA (1)...(19): siRNA sense strand
ccgcagugcuagaagcuga

SEQ ID NO: 2517710 - RNA, 19 nt, Homo sapiens
  misc_RNA (1)...(19): siRNA sense strand
agaucuaugaugugggcua

SEQ ID NO: 2517711 - RNA, 19 nt, Homo sapiens
  misc_RNA (1)...(19): siRNA sense strand
gcaugacgcugucgggcua

SEQ ID NO: 2517712 - RNA, 19 nt, Homo sapiens
  misc_RNA (1)...(19): siRNA sense strand
agguaaagguuccagacau

SEQ ID NO: 2517713 - RNA, 19 nt, Homo sapiens
  misc_RNA (1)...(19): siRNA sense strand
ccaaugagcucuucagcca

SEQ ID NO: 2517714 - RNA, 19 nt, Homo sapiens
  misc_RNA (1)...(19): siRNA sense strand
gcuucaagaccauggacuu

SEQ ID NO: 2517715 - RNA, 19 nt, Homo sapiens
  misc_RNA (1)...(19): siRNA sense strand
cggccacgcaugaggaaga

SEQ ID NO: 2517716 - RNA, 19 nt, Homo sapiens
  misc_RNA (1)...(19): siRNA sense strand
gcaucuacguggugcagga

SEQ ID NO: 2517717 - RNA, 19 nt, Homo sapiens
  misc_RNA (1)...(19): siRNA sense strand
cgacauggccuaugagcgu

SEQ ID NO: 2517718 - RNA, 19 nt, Homo sapiens
  misc_RNA (1)...(19): siRNA sense strand
uggccaagcugaugcggau

SEQ ID NO: 2517719 - RNA, 19 nt, Homo sapiens
  misc_RNA (1)...(19): siRNA sense strand
gccggaagauuaugcggaa

SEQ ID NO: 2517720 - RNA, 19 nt, Homo sapiens
  misc_RNA (1)...(19): siRNA sense strand
ccaccuacugagccagaaa

SEQ ID NO: 2517721 - RNA, 19 nt, Homo sapiens
  misc_RNA (1)...(19): siRNA sense strand
gggaaggagugugugguga

SEQ ID NO: 2517722 - RNA, 19 nt, Homo sapiens
  misc_RNA (1)...(19): siRNA sense strand
caaagcaggagcuggccaa

SEQ ID NO: 2517723 - RNA, 19 nt, Homo sapiens
  misc_RNA (1)...(19): siRNA sense strand
ccgcagcaugggugccaaa

SEQ ID NO: 2517724 - RNA, 19 nt, Homo sapiens
  misc_RNA (1)...(19): siRNA sense strand
agaccauggacuuugggaa

SEQ ID NO: 2517725 - RNA, 19 nt, Homo sapiens
  misc_RNA (1)...(19): siRNA sense strand
ucgacaaggcggaggacgu

SEQ ID NO: 2517726 - RNA, 19 nt, Homo sapiens
  misc_RNA (1)...(19): siRNA sense strand
acagacgagcccagggaga

SEQ ID NO: 2517727 - RNA, 19 nt, Homo sapiens
  misc_RNA (1)...(19): siRNA sense strand
ucaccaacccagccagcaa

SEQ ID NO: 2517728 - RNA, 19 nt, Homo sapiens
  misc_RNA (1)...(19): siRNA sense strand
cugcaugagcucuacgaga

SEQ ID NO: 2517729 - RNA, 19 nt, Homo sapiens
  misc_RNA (1)...(19): siRNA sense strand
aggaagaugaggaggaaga

SEQ ID NO: 2517730 - RNA, 19 nt, Homo sapiens
  misc_RNA (1)...(19): siRNA sense strand
aggaagaugagaaggacaa

SEQ ID NO: 2517731 - RNA, 19 nt, Homo sapiens
  misc_RNA (1)...(19): siRNA sense strand
augagaaggacaaaggaaa

SEQ ID NO: 2517732 - RNA, 19 nt, Homo sapiens
  misc_RNA (1)...(19): siRNA sense strand
gagaagaagggauggcaga

SEQ ID NO: 2517733 - RNA, 19 nt, Homo sapiens
  misc_RNA (1)...(19): siRNA sense strand
gaacagaagaaacaggaga

SEQ ID NO: 2517734 - RNA, 19 nt, Homo sapiens
  misc_RNA (1)...(19): siRNA sense strand
uuucauuggaggagaagaa

SEQ ID NO: 2517735 - RNA, 19 nt, Homo sapiens
  misc_RNA (1)...(19): siRNA sense strand
aggacauggugguggacau

SEQ ID NO: 2517736 - RNA, 19 nt, Homo sapiens
  misc_RNA (1)...(19): siRNA sense strand
ugagaaggacaaaggaaaa

SEQ ID NO: 2517737 - RNA, 19 nt, Homo sapiens
  misc_RNA (1)...(19): siRNA sense strand
ggaaggacaugguggugga

SEQ ID NO: 2517738 - RNA, 19 nt, Homo sapiens
  misc_RNA (1)...(19): siRNA sense strand
aggaggaagaugagaagga

SEQ ID NO: 2517739 - RNA, 19 nt, Homo sapiens
  misc_RNA (1)...(19): siRNA sense strand
acaaugaagugaaggugga

SEQ ID NO: 2517740 - RNA, 19 nt, Homo sapiens
  misc_RNA (1)...(19): siRNA sense strand
gaggaagaugagaaggaca

SEQ ID NO: 2517741 - RNA, 19 nt, Homo sapiens
  misc_RNA (1)...(19): siRNA sense strand
cggcugaaagggaaggaca

SEQ ID NO: 2517742 - RNA, 19 nt, Homo sapiens
  misc_RNA (1)...(19): siRNA sense strand
gcuaacugaugaagaggca

SEQ ID NO: 2517743 - RNA, 19 nt, Homo sapiens
  misc_RNA (1)...(19): siRNA sense strand
cugaggaagaugaggagga

SEQ ID NO: 2517744 - RNA, 19 nt, Homo sapiens
  misc_RNA (1)...(19): siRNA sense strand
ccaagaagauuaacccuga

SEQ ID NO: 2517745 - RNA, 19 nt, Homo sapiens
  misc_RNA (1)...(19): siRNA sense strand
aaggaaaacugaagcccaa

SEQ ID NO: 2517746 - RNA, 19 nt, Homo sapiens
  misc_RNA (1)...(19): siRNA sense strand
augaagaggcagagaggcu

SEQ ID NO: 2517747 - RNA, 19 nt, Homo sapiens
  misc_RNA (1)...(19): siRNA sense strand
augaggaggaagaugagaa

SEQ ID NO: 2517748 - RNA, 19 nt, Homo sapiens
  misc_RNA (1)...(19): siRNA sense strand
agaucaacaccaagaagau

SEQ ID NO: 2517749 - RNA, 19 nt, Homo sapiens
  misc_RNA (1)...(19): siRNA sense strand
cagagaaucaugaggccca

SEQ ID NO: 2517750 - RNA, 19 nt, Homo sapiens
  misc_RNA (1)...(19): siRNA sense strand
ggcugaaagggaaggacau

SEQ ID NO: 2517751 - RNA, 19 nt, Homo sapiens
  misc_RNA (1)...(19): siRNA sense strand
uaacugaugaagaggcaga

SEQ ID NO: 2517752 - RNA, 19 nt, Homo sapiens
  misc_RNA (1)...(19): siRNA sense strand
aagugaagguggaggagag

SEQ ID NO: 2517753 - RNA, 19 nt, Homo sapiens
  misc_RNA (1)...(19): siRNA sense strand
ugauguaugaccagcgaca

SEQ ID NO: 2517754 - RNA, 19 nt, Homo sapiens
  misc_RNA (1)...(19): siRNA sense strand
acggcaagguggugacugu

SEQ ID NO: 2517755 - RNA, 19 nt, Homo sapiens
  misc_RNA (1)...(19): siRNA sense strand
ucaauaagauggaguggug

SEQ ID NO: 2517756 - RNA, 19 nt, Homo sapiens
  misc_RNA (1)...(19): siRNA sense strand
gaacaaagcucaagacccu

SEQ ID NO: 2517757 - RNA, 19 nt, Homo sapiens
  misc_RNA (1)...(19): siRNA sense strand
aagcgaagaaggagaucca

SEQ ID NO: 2517758 - RNA, 19 nt, Homo sapiens
  misc_RNA (1)...(19): siRNA sense strand
gcacagugauagauggcug

SEQ ID NO: 2517759 - RNA, 19 nt, Homo sapiens
  misc_RNA (1)...(19): siRNA sense strand
cauacaagcuggaucugca

SEQ ID NO: 2517760 - RNA, 19 nt, Homo sapiens
  misc_RNA (1)...(19): siRNA sense strand
ggaagaaggugaugagccu

SEQ ID NO: 2517761 - RNA, 19 nt, Homo sapiens
  misc_RNA (1)...(19): siRNA sense strand
agacggaacugguggcuga

SEQ ID NO: 2517762 - RNA, 19 nt, Homo sapiens
  misc_RNA (1)...(19): siRNA sense strand
cugcagaagaagaggaacu

SEQ ID NO: 2517763 - RNA, 19 nt, Homo sapiens
  misc_RNA (1)...(19): siRNA sense strand
uguacaaggaagaagguga

SEQ ID NO: 2517764 - RNA, 19 nt, Homo sapiens
  misc_RNA (1)...(19): siRNA sense strand
gguuggaugaagauggcaa

SEQ ID NO: 2517765 - RNA, 19 nt, Homo sapiens
  misc_RNA (1)...(19): siRNA sense strand
gcuccaacgaugagaccau

SEQ ID NO: 2517766 - RNA, 19 nt, Homo sapiens
  misc_RNA (1)...(19): siRNA sense strand
cccaggagaucuuggccaa

SEQ ID NO: 2517767 - RNA, 19 nt, Homo sapiens
  misc_RNA (1)...(19): siRNA sense strand
aggaugaccuggaggcacu

SEQ ID NO: 2517768 - RNA, 19 nt, Homo sapiens
  misc_RNA (1)...(19): siRNA sense strand
acuauagcauggagagcca

SEQ ID NO: 2517769 - RNA, 19 nt, Homo sapiens
  misc_RNA (1)...(19): siRNA sense strand
gccaagaacaucaagcaga

SEQ ID NO: 2517770 - RNA, 19 nt, Homo sapiens
  misc_RNA (1)...(19): siRNA sense strand
guuggaugaagauggcaaa

SEQ ID NO: 2517771 - RNA, 19 nt, Homo sapiens
  misc_RNA (1)...(19): siRNA sense strand
cacucaaggccaagaacau

SEQ ID NO: 2517772 - RNA, 19 nt, Homo sapiens
  misc_RNA (1)...(19): siRNA sense strand
ucgccagcgugguggacau

SEQ ID NO: 2517773 - RNA, 19 nt, Homo sapiens
  misc_RNA (1)...(19): siRNA sense strand
uggaggcacucaaggccaa

SEQ ID NO: 2517774 - RNA, 19 nt, Homo sapiens
  misc_RNA (1)...(19): siRNA sense strand
gggaugacucggugacgga

SEQ ID NO: 2517775 - RNA, 19 nt, Homo sapiens
  misc_RNA (1)...(19): siRNA sense strand
ucaaggaggaagagcugau

SEQ ID NO: 2517776 - RNA, 19 nt, Homo sapiens
  misc_RNA (1)...(19): siRNA sense strand
aaauggacuugucgggcaa

SEQ ID NO: 2517777 - RNA, 19 nt, Homo sapiens
  misc_RNA (1)...(19): siRNA sense strand
ccgagaacgccgugcagau

SEQ ID NO: 2517778 - RNA, 19 nt, Homo sapiens
  misc_RNA (1)...(19): siRNA sense strand
aagcaaaagcagaaacaga

SEQ ID NO: 2517779 - RNA, 19 nt, Homo sapiens
  misc_RNA (1)...(19): siRNA sense strand
ggaggaacaagguggccau

SEQ ID NO: 2517780 - RNA, 19 nt, Homo sapiens
  misc_RNA (1)...(19): siRNA sense strand
gcgcaacgugugugcccua

SEQ ID NO: 2517781 - RNA, 19 nt, Homo sapiens
  misc_RNA (1)...(19): siRNA sense strand
uuuggaaccuggagaaaau

SEQ ID NO: 2517782 - RNA, 19 nt, Homo sapiens
  misc_RNA (1)...(19): siRNA sense strand
gaaagaaccuggaggagga

SEQ ID NO: 2517783 - RNA, 19 nt, Homo sapiens
  misc_RNA (1)...(19): siRNA sense strand
gaagaagauuccagagcuc

SEQ ID NO: 2517784 - RNA, 19 nt, Homo sapiens
  misc_RNA (1)...(19): siRNA sense strand
acagaaagaaccuggagga

SEQ ID NO: 2517785 - RNA, 19 nt, Homo sapiens
  misc_RNA (1)...(19): siRNA sense strand
aggaggaggcuguggaaac

SEQ ID NO: 2517786 - RNA, 19 nt, Homo sapiens
  misc_RNA (1)...(19): siRNA sense strand
ggaaauucaucguccgaac

SEQ ID NO: 2517787 - RNA, 19 nt, Homo sapiens
  misc_RNA (1)...(19): siRNA sense strand
ccaacagaugauuugcaaa

SEQ ID NO: 2517788 - RNA, 19 nt, Homo sapiens
  misc_RNA (1)...(19): siRNA sense strand
gcacagcaguugacagccu

SEQ ID NO: 2517789 - RNA, 19 nt, Homo sapiens
  misc_RNA (1)...(19): siRNA sense strand
cuggaaaucuggaggaacc

SEQ ID NO: 2517790 - RNA, 19 nt, Homo sapiens
  misc_RNA (1)...(19): siRNA sense strand
gaaccaagaaacagggcuc

SEQ ID NO: 2517791 - RNA, 19 nt, Homo sapiens
  misc_RNA (1)...(19): siRNA sense strand
ggcuggaaaucuggaggaa

SEQ ID NO: 2517792 - RNA, 19 nt, Homo sapiens
  misc_RNA (1)...(19): siRNA sense strand
cugcguggagugugggaaa

SEQ ID NO: 2517793 - RNA, 19 nt, Homo sapiens
  misc_RNA (1)...(19): siRNA sense strand
gaggagaaggaaaggcuga

SEQ ID NO: 2517794 - RNA, 19 nt, Homo sapiens
  misc_RNA (1)...(19): siRNA sense strand
aggcugaagaaguguccaa

SEQ ID NO: 2517795 - RNA, 19 nt, Homo sapiens
  misc_RNA (1)...(19): siRNA sense strand
auuucaagaguguggguga

SEQ ID NO: 2517796 - RNA, 19 nt, Homo sapiens
  misc_RNA (1)...(19): siRNA sense strand
acaccuuguaugaggauau

SEQ ID NO: 2517797 - RNA, 19 nt, Homo sapiens
  misc_RNA (1)...(19): siRNA sense strand
caguggagguagugaacac

SEQ ID NO: 2517798 - RNA, 19 nt, Homo sapiens
  misc_RNA (1)...(19): siRNA sense strand
augagaaggaaguccguuu

SEQ ID NO: 2517799 - RNA, 19 nt, Homo sapiens
  misc_RNA (1)...(19): siRNA sense strand
gguuauuauauccgggaaa

SEQ ID NO: 2517800 - RNA, 19 nt, Homo sapiens
  misc_RNA (1)...(19): siRNA sense strand
gcacauagaugaagcugga

SEQ ID NO: 2517801 - RNA, 19 nt, Homo sapiens
  misc_RNA (1)...(19): siRNA sense strand
guucauuugccuacagaaa

SEQ ID NO: 2517802 - RNA, 19 nt, Homo sapiens
  misc_RNA (1)...(19): siRNA sense strand
cuucugauguagaggaaaa

SEQ ID NO: 2517803 - RNA, 19 nt, Homo sapiens
  misc_RNA (1)...(19): siRNA sense strand
ggucaaguaaagaggaguu

SEQ ID NO: 2517804 - RNA, 19 nt, Homo sapiens
  misc_RNA (1)...(19): siRNA sense strand
acauagaugaagcuggaaa

SEQ ID NO: 2517805 - RNA, 19 nt, Homo sapiens
  misc_RNA (1)...(19): siRNA sense strand
auucaugguuggaaaucaa

SEQ ID NO: 2517806 - RNA, 19 nt, Homo sapiens
  misc_RNA (1)...(19): siRNA sense strand
ggcagagagaugugaguuu

SEQ ID NO: 2517807 - RNA, 19 nt, Homo sapiens
  misc_RNA (1)...(19): siRNA sense strand
uggaaaagaccaagguuau

SEQ ID NO: 2517808 - RNA, 19 nt, Homo sapiens
  misc_RNA (1)...(19): siRNA sense strand
acagaaaaccucuuggaaa

SEQ ID NO: 2517809 - RNA, 19 nt, Homo sapiens
  misc_RNA (1)...(19): siRNA sense strand
gcacagacucaaugaccau

SEQ ID NO: 2517810 - RNA, 19 nt, Homo sapiens
  misc_RNA (1)...(19): siRNA sense strand
cagaaaaccucuuggaaac

SEQ ID NO: 2517811 - RNA, 19 nt, Homo sapiens
  misc_RNA (1)...(19): siRNA sense strand
cuggaaaagaccaagguua

SEQ ID NO: 2517812 - RNA, 19 nt, Homo sapiens
  misc_RNA (1)...(19): siRNA sense strand
uuggaaacaccuuuagaaa

SEQ ID NO: 2517813 - RNA, 19 nt, Homo sapiens
  misc_RNA (1)...(19): siRNA sense strand
gccucaaucuacugggaau

SEQ ID NO: 2517814 - RNA, 19 nt, Homo sapiens
  misc_RNA (1)...(19): siRNA sense strand
ugucagaagcagaagaagu

SEQ ID NO: 2517815 - RNA, 19 nt, Homo sapiens
  misc_RNA (1)...(19): siRNA sense strand
guauaaaucccuuacccua

SEQ ID NO: 2517816 - RNA, 19 nt, Homo sapiens
  misc_RNA (1)...(19): siRNA sense strand
gagaugugaguuuggacaa

SEQ ID NO: 2517817 - RNA, 19 nt, Homo sapiens
  misc_RNA (1)...(19): siRNA sense strand
uccuaaguuuggaagguua

SEQ ID NO: 2517818 - RNA, 19 nt, Homo sapiens
  misc_RNA (1)...(19): siRNA sense strand
acaagagaucagaugguau

SEQ ID NO: 2517819 - RNA, 19 nt, Homo sapiens
  misc_RNA (1)...(19): siRNA sense strand
ggaaaucaacagaggaccu

SEQ ID NO: 2517820 - RNA, 19 nt, Homo sapiens
  misc_RNA (1)...(19): siRNA sense strand
gugccuacucucucagaaa

SEQ ID NO: 2517821 - RNA, 19 nt, Homo sapiens
  misc_RNA (1)...(19): siRNA sense strand
ggacaagagaucagauggu

SEQ ID NO: 2517822 - RNA, 19 nt, Homo sapiens
  misc_RNA (1)...(19): siRNA sense strand
gagugaaggagauuguaau

SEQ ID NO: 2517823 - RNA, 19 nt, Homo sapiens
  misc_RNA (1)...(19): siRNA sense strand
aggcaggauugaaacaaga

SEQ ID NO: 2517824 - RNA, 19 nt, Homo sapiens
  misc_RNA (1)...(19): siRNA sense strand
cauagaugaagcuggaaaa

SEQ ID NO: 2517825 - RNA, 19 nt, Homo sapiens
  misc_RNA (1)...(19): siRNA sense strand
cauucagauggaugauaaa

SEQ ID NO: 2517826 - RNA, 19 nt, Homo sapiens
  misc_RNA (1)...(19): siRNA sense strand
caaagaaaguuauucagca

SEQ ID NO: 2517827 - RNA, 19 nt, Homo sapiens
  misc_RNA (1)...(19): siRNA sense strand
gaaacaagagcauugccaa

SEQ ID NO: 2517828 - RNA, 19 nt, Homo sapiens
  misc_RNA (1)...(19): siRNA sense strand
uggaaacaccuuuagaaaa

SEQ ID NO: 2517829 - RNA, 19 nt, Homo sapiens
  misc_RNA (1)...(19): siRNA sense strand
cuaccagaaaccagcacaa

SEQ ID NO: 2517830 - RNA, 19 nt, Homo sapiens
  misc_RNA (1)...(19): siRNA sense strand
aggauugaaacaagagcau

SEQ ID NO: 2517831 - RNA, 19 nt, Homo sapiens
  misc_RNA (1)...(19): siRNA sense strand
ggaaguggcaugucggacu

SEQ ID NO: 2517832 - RNA, 19 nt, Homo sapiens
  misc_RNA (1)...(19): siRNA sense strand
cagcauguuggucaaguaa

SEQ ID NO: 2517833 - RNA, 19 nt, Homo sapiens
  misc_RNA (1)...(19): siRNA sense strand
ggauuaucucaucaagaau

SEQ ID NO: 2517834 - RNA, 19 nt, Homo sapiens
  misc_RNA (1)...(19): siRNA sense strand
gcaaggcaggauugaaaca

SEQ ID NO: 2517835 - RNA, 19 nt, Homo sapiens
  misc_RNA (1)...(19): siRNA sense strand
ugaaauaaaagucagggaa

SEQ ID NO: 2517836 - RNA, 19 nt, Homo sapiens
  misc_RNA (1)...(19): siRNA sense strand
gaugaagauaagacagcca

SEQ ID NO: 2517837 - RNA, 19 nt, Homo sapiens
  misc_RNA (1)...(19): siRNA sense strand
cuuaaggguaucaaaguca

SEQ ID NO: 2517838 - RNA, 19 nt, Homo sapiens
  misc_RNA (1)...(19): siRNA sense strand
cagugauccaagaacuuaa

SEQ ID NO: 2517839 - RNA, 19 nt, Homo sapiens
  misc_RNA (1)...(19): siRNA sense strand
ugaaagaggcuguggcaga

SEQ ID NO: 2517840 - RNA, 19 nt, Homo sapiens
  misc_RNA (1)...(19): siRNA sense strand
cgguccugaucgagagaaa

SEQ ID NO: 2517841 - RNA, 19 nt, Homo sapiens
  misc_RNA (1)...(19): siRNA sense strand
gccugugggcagugggaaa

SEQ ID NO: 2517842 - RNA, 19 nt, Homo sapiens
  misc_RNA (1)...(19): siRNA sense strand
gggaaaacaacaauagcaa

SEQ ID NO: 2517843 - RNA, 19 nt, Homo sapiens
  misc_RNA (1)...(19): siRNA sense strand
ucaugaaggugcugagcca

SEQ ID NO: 2517844 - RNA, 19 nt, Homo sapiens
  misc_RNA (1)...(19): siRNA sense strand
cugcaaaggaagacaguuc

SEQ ID NO: 2517845 - RNA, 19 nt, Homo sapiens
  misc_RNA (1)...(19): siRNA sense strand
ggaagagaaucgacccuca

SEQ ID NO: 2517846 - RNA, 19 nt, Homo sapiens
  misc_RNA (1)...(19): siRNA sense strand
cuggaguaucauaggaaca

SEQ ID NO: 2517847 - RNA, 19 nt, Homo sapiens
  misc_RNA (1)...(19): siRNA sense strand
acgccuggcugaagaggau

SEQ ID NO: 2517848 - RNA, 19 nt, Homo sapiens
  misc_RNA (1)...(19): siRNA sense strand
gcugaagaggauugcauca

SEQ ID NO: 2517849 - RNA, 19 nt, Homo sapiens
  misc_RNA (1)...(19): siRNA sense strand
cagcacuugcauagagaca

SEQ ID NO: 2517850 - RNA, 19 nt, Homo sapiens
  misc_RNA (1)...(19): siRNA sense strand
gcucagaaacugcuggagu

SEQ ID NO: 2517851 - RNA, 19 nt, Homo sapiens
  misc_RNA (1)...(19): siRNA sense strand
gaaacuuggggaagagaau

SEQ ID NO: 2517852 - RNA, 19 nt, Homo sapiens
  misc_RNA (1)...(19): siRNA sense strand
caaugucugcugugggcaa

SEQ ID NO: 2517853 - RNA, 19 nt, Homo sapiens
  misc_RNA (1)...(19): siRNA sense strand
gauuguaauauuaggucca

SEQ ID NO: 2517854 - RNA, 19 nt, Homo sapiens
  misc_RNA (1)...(19): siRNA sense strand
ucuucgaguugaugcagaa

SEQ ID NO: 2517855 - RNA, 19 nt, Homo sapiens
  misc_RNA (1)...(19): siRNA sense strand
cugcagaacccaaaggaug

SEQ ID NO: 2517856 - RNA, 19 nt, Homo sapiens
  misc_RNA (1)...(19): siRNA sense strand
ucauggugccagaggacau

SEQ ID NO: 2517857 - RNA, 19 nt, Homo sapiens
  misc_RNA (1)...(19): siRNA sense strand
aggaacaucgucaggguca

SEQ ID NO: 2517858 - RNA, 19 nt, Homo sapiens
  misc_RNA (1)...(19): siRNA sense strand
ccuucaugauccagcacuu

SEQ ID NO: 2517859 - RNA, 19 nt, Homo sapiens
  misc_RNA (1)...(19): siRNA sense strand
uaucauaggaacaucguca

SEQ ID NO: 2517860 - RNA, 19 nt, Homo sapiens
  misc_RNA (1)...(19): siRNA sense strand
ccaaaauccucaaagucau

SEQ ID NO: 2517861 - RNA, 19 nt, Homo sapiens
  misc_RNA (1)...(19): siRNA sense strand
aguaaagaggagauggaaa

SEQ ID NO: 2517862 - RNA, 19 nt, Homo sapiens
  misc_RNA (1)...(19): siRNA sense strand
agggaaaccuagauggaau

SEQ ID NO: 2517863 - RNA, 19 nt, Homo sapiens
  misc_RNA (1)...(19): siRNA sense strand
aagaaacaacgcagagaaa

SEQ ID NO: 2517864 - RNA, 19 nt, Homo sapiens
  misc_RNA (1)...(19): siRNA sense strand
cugaaaaugaugaaggaaa

SEQ ID NO: 2517865 - RNA, 19 nt, Homo sapiens
  misc_RNA (1)...(19): siRNA sense strand
cguuauuauuagugacaca

SEQ ID NO: 2517866 - RNA, 19 nt, Homo sapiens
  misc_RNA (1)...(19): siRNA sense strand
agaauaaagcugugggaag

SEQ ID NO: 2517867 - RNA, 19 nt, Homo sapiens
  misc_RNA (1)...(19): siRNA sense strand
aggaagacauugaggacgu

SEQ ID NO: 2517868 - RNA, 19 nt, Homo sapiens
  misc_RNA (1)...(19): siRNA sense strand
gggaaaccuagauggaauu

SEQ ID NO: 2517869 - RNA, 19 nt, Homo sapiens
  misc_RNA (1)...(19): siRNA sense strand
uggccaaggaaucaagaaa

SEQ ID NO: 2517870 - RNA, 19 nt, Homo sapiens
  misc_RNA (1)...(19): siRNA sense strand
aggacuuggaugagaaaga

SEQ ID NO: 2517871 - RNA, 19 nt, Homo sapiens
  misc_RNA (1)...(19): siRNA sense strand
uggcauugggagacugaaa

SEQ ID NO: 2517872 - RNA, 19 nt, Homo sapiens
  misc_RNA (1)...(19): siRNA sense strand
ugguuaugguugacagaga

SEQ ID NO: 2517873 - RNA, 19 nt, Homo sapiens
  misc_RNA (1)...(19): siRNA sense strand
agguagaagaugcagauau

SEQ ID NO: 2517874 - RNA, 19 nt, Homo sapiens
  misc_RNA (1)...(19): siRNA sense strand
ugaagagggaucagaugaa

SEQ ID NO: 2517875 - RNA, 19 nt, Homo sapiens
  misc_RNA (1)...(19): siRNA sense strand
gugaaagaaauauggaagu

SEQ ID NO: 2517876 - RNA, 19 nt, Homo sapiens
  misc_RNA (1)...(19): siRNA sense strand
aguaauacagagaacagaa

SEQ ID NO: 2517877 - RNA, 19 nt, Homo sapiens
  misc_RNA (1)...(19): siRNA sense strand
ucucugaagaacaguuaaa

SEQ ID NO: 2517878 - RNA, 19 nt, Homo sapiens
  misc_RNA (1)...(19): siRNA sense strand
aauacagagaacagaagaa

SEQ ID NO: 2517879 - RNA, 19 nt, Homo sapiens
  misc_RNA (1)...(19): siRNA sense strand
gaaacauugaguuggccaa

SEQ ID NO: 2517880 - RNA, 19 nt, Homo sapiens
  misc_RNA (1)...(19): siRNA sense strand
uaggaacaccaaagagcaa

SEQ ID NO: 2517881 - RNA, 19 nt, Homo sapiens
  misc_RNA (1)...(19): siRNA sense strand
aauuaagaagcaaggucua

SEQ ID NO: 2517882 - RNA, 19 nt, Homo sapiens
  misc_RNA (1)...(19): siRNA sense strand
ggcaaaguaaagaggagau

SEQ ID NO: 2517883 - RNA, 19 nt, Homo sapiens
  misc_RNA (1)...(19): siRNA sense strand
cagaagaauaugaaaugca

SEQ ID NO: 2517884 - RNA, 19 nt, Homo sapiens
  misc_RNA (1)...(19): siRNA sense strand
agagaauacaauagcagau

SEQ ID NO: 2517885 - RNA, 19 nt, Homo sapiens
  misc_RNA (1)...(19): siRNA sense strand
aagcaguaauacagagaac

SEQ ID NO: 2517886 - RNA, 19 nt, Homo sapiens
  misc_RNA (1)...(19): siRNA sense strand
ggugaaagaaauauggaag

SEQ ID NO: 2517887 - RNA, 19 nt, Homo sapiens
  misc_RNA (1)...(19): siRNA sense strand
ugaagaaacuguugguccu

SEQ ID NO: 2517888 - RNA, 19 nt, Homo sapiens
  misc_RNA (1)...(19): siRNA sense strand
cuccagaagaauaugaaau

SEQ ID NO: 2517889 - RNA, 19 nt, Homo sapiens
  misc_RNA (1)...(19): siRNA sense strand
ugguugacagagagaagaa

SEQ ID NO: 2517890 - RNA, 19 nt, Homo sapiens
  misc_RNA (1)...(19): siRNA sense strand
gaagcagagaauaugaaau

SEQ ID NO: 2517891 - RNA, 19 nt, Homo sapiens
  misc_RNA (1)...(19): siRNA sense strand
aaugaugauaagcaggaaa

SEQ ID NO: 2517892 - RNA, 19 nt, Homo sapiens
  misc_RNA (1)...(19): siRNA sense strand
gaaacaaagguccagaaaa

SEQ ID NO: 2517893 - RNA, 19 nt, Homo sapiens
  misc_RNA (1)...(19): siRNA sense strand
uguggaaagaaaugaguca

SEQ ID NO: 2517894 - RNA, 19 nt, Homo sapiens
  misc_RNA (1)...(19): siRNA sense strand
gagaauaaagcugugggaa

SEQ ID NO: 2517895 - RNA, 19 nt, Homo sapiens
  misc_RNA (1)...(19): siRNA sense strand
aaaguaaagaggagaugga

SEQ ID NO: 2517896 - RNA, 19 nt, Homo sapiens
  misc_RNA (1)...(19): siRNA sense strand
agauugagcucagggguaa

SEQ ID NO: 2517897 - RNA, 19 nt, Homo sapiens
  misc_RNA (1)...(19): siRNA sense strand
gaugaaggaaaauguguua

SEQ ID NO: 2517898 - RNA, 19 nt, Homo sapiens
  misc_RNA (1)...(19): siRNA sense strand
aaucagaaacaaaggucca

SEQ ID NO: 2517899 - RNA, 19 nt, Homo sapiens
  misc_RNA (1)...(19): siRNA sense strand
aaagaggaccacuccgaaa

SEQ ID NO: 2517900 - RNA, 19 nt, Homo sapiens
  misc_RNA (1)...(19): siRNA sense strand
ugucacugaagcagagaau

SEQ ID NO: 2517901 - RNA, 19 nt, Homo sapiens
  misc_RNA (1)...(19): siRNA sense strand
agacuaaagaugcagcaga

SEQ ID NO: 2517902 - RNA, 19 nt, Homo sapiens
  misc_RNA (1)...(19): siRNA sense strand
agcagaagaauguaaagaa

SEQ ID NO: 2517903 - RNA, 19 nt, Homo sapiens
  misc_RNA (1)...(19): siRNA sense strand
ggagauggaaaauacaaaa

SEQ ID NO: 2517904 - RNA, 19 nt, Homo sapiens
  misc_RNA (1)...(19): siRNA sense strand
ggguaaacacaaccaggau

SEQ ID NO: 2517905 - RNA, 19 nt, Homo sapiens
  misc_RNA (1)...(19): siRNA sense strand
cuguaugguaucaguguga

SEQ ID NO: 2517906 - RNA, 19 nt, Homo sapiens
  misc_RNA (1)...(19): siRNA sense strand
gcagaugagcaggagacua

SEQ ID NO: 2517907 - RNA, 19 nt, Homo sapiens
  misc_RNA (1)...(19): siRNA sense strand
cagaaacaaagguccagaa

SEQ ID NO: 2517908 - RNA, 19 nt, Homo sapiens
  misc_RNA (1)...(19): siRNA sense strand
gagugaagaaugugaagcu

SEQ ID NO: 2517909 - RNA, 19 nt, Homo sapiens
  misc_RNA (1)...(19): siRNA sense strand
uauagugaagcuuggcaaa

SEQ ID NO: 2517910 - RNA, 19 nt, Homo sapiens
  misc_RNA (1)...(19): siRNA sense strand
gaacauuucuggaggguca

SEQ ID NO: 2517911 - RNA, 19 nt, Homo sapiens
  misc_RNA (1)...(19): siRNA sense strand
auuuaaaggccuucggaaa

SEQ ID NO: 2517912 - RNA, 19 nt, Homo sapiens
  misc_RNA (1)...(19): siRNA sense strand
ccguagacugaaagaauua

SEQ ID NO: 2517913 - RNA, 19 nt, Homo sapiens
  misc_RNA (1)...(19): siRNA sense strand
ggaaauaaggaaagcacca

SEQ ID NO: 2517914 - RNA, 19 nt, Homo sapiens
  misc_RNA (1)...(19): siRNA sense strand
cuacaaacucugagaccau

SEQ ID NO: 2517915 - RNA, 19 nt, Homo sapiens
  misc_RNA (1)...(19): siRNA sense strand
aggaguauuauguggacua

SEQ ID NO: 2517916 - RNA, 19 nt, Homo sapiens
  misc_RNA (1)...(19): siRNA sense strand
cauuaagguucaacagcau

SEQ ID NO: 2517917 - RNA, 19 nt, Homo sapiens
  misc_RNA (1)...(19): siRNA sense strand
ucuggaaauaugugggaau

SEQ ID NO: 2517918 - RNA, 19 nt, Homo sapiens
  misc_RNA (1)...(19): siRNA sense strand
cugaaguccagguggucaa

SEQ ID NO: 2517919 - RNA, 19 nt, Homo sapiens
  misc_RNA (1)...(19): siRNA sense strand
agggauccguagacugaaa

SEQ ID NO: 2517920 - RNA, 19 nt, Homo sapiens
  misc_RNA (1)...(19): siRNA sense strand
ccuuacacaacuuggauuu

SEQ ID NO: 2517921 - RNA, 19 nt, Homo sapiens
  misc_RNA (1)...(19): siRNA sense strand
cuacaauaagcuucagaca

SEQ ID NO: 2517922 - RNA, 19 nt, Homo sapiens
  misc_RNA (1)...(19): siRNA sense strand
ugaacaauuuaaaggccuu

SEQ ID NO: 2517923 - RNA, 19 nt, Homo sapiens
  misc_RNA (1)...(19): siRNA sense strand
cuaagcacauccaggguga

SEQ ID NO: 2517924 - RNA, 19 nt, Homo sapiens
  misc_RNA (1)...(19): siRNA sense strand
ccaucacauugucuggaaa

SEQ ID NO: 2517925 - RNA, 19 nt, Homo sapiens
  misc_RNA (1)...(19): siRNA sense strand
ccaugauccucuuggugau

SEQ ID NO: 2517926 - RNA, 19 nt, Homo sapiens
  misc_RNA (1)...(19): siRNA sense strand
caugaaacaacuccagcaa

SEQ ID NO: 2517927 - RNA, 19 nt, Homo sapiens
  misc_RNA (1)...(19): siRNA sense strand
cugaaagacaaaugaauuc

SEQ ID NO: 2517928 - RNA, 19 nt, Homo sapiens
  misc_RNA (1)...(19): siRNA sense strand
cuccagggaaugugaggua

SEQ ID NO: 2517929 - RNA, 19 nt, Homo sapiens
  misc_RNA (1)...(19): siRNA sense strand
ugaaaagguuagugaugca

SEQ ID NO: 2517930 - RNA, 19 nt, Homo sapiens
  misc_RNA (1)...(19): siRNA sense strand
acauuagcucaguggauga

SEQ ID NO: 2517931 - RNA, 19 nt, Homo sapiens
  misc_RNA (1)...(19): siRNA sense strand
caccaauaucucacaggaa

SEQ ID NO: 2517932 - RNA, 19 nt, Homo sapiens
  misc_RNA (1)...(19): siRNA sense strand
caucacauugucuggaaau

SEQ ID NO: 2517933 - RNA, 19 nt, Homo sapiens
  misc_RNA (1)...(19): siRNA sense strand
agacauugcaaucugaaca

SEQ ID NO: 2517934 - RNA, 19 nt, Homo sapiens
  misc_RNA (1)...(19): siRNA sense strand
cacuaaagacugugcccau

SEQ ID NO: 2517935 - RNA, 19 nt, Homo sapiens
  misc_RNA (1)...(19): siRNA sense strand
gauuccuggcgcagagcaa

SEQ ID NO: 2517936 - RNA, 19 nt, Homo sapiens
  misc_RNA (1)...(19): siRNA sense strand
agagcaagaguaugagcau

SEQ ID NO: 2517937 - RNA, 19 nt, Homo sapiens
  misc_RNA (1)...(19): siRNA sense strand
ggaucugggcccugcacau

SEQ ID NO: 2517938 - RNA, 19 nt, Homo sapiens
  misc_RNA (1)...(19): siRNA sense strand
gcauaaacaacgugggaaa

SEQ ID NO: 2517939 - RNA, 19 nt, Homo sapiens
  misc_RNA (1)...(19): siRNA sense strand
guguaaggaaugugggaaa

SEQ ID NO: 2517940 - RNA, 19 nt, Homo sapiens
  misc_RNA (1)...(19): siRNA sense strand
ccauaugaguguaaggaau

SEQ ID NO: 2517941 - RNA, 19 nt, Homo sapiens
  misc_RNA (1)...(19): siRNA sense strand
auguaaacaaugugggaaa

SEQ ID NO: 2517942 - RNA, 19 nt, Homo sapiens
  misc_RNA (1)...(19): siRNA sense strand
augcaagguaugugggaaa

SEQ ID NO: 2517943 - RNA, 19 nt, Homo sapiens
  misc_RNA (1)...(19): siRNA sense strand
auguaaggaaugugggaaa

SEQ ID NO: 2517944 - RNA, 19 nt, Homo sapiens
  misc_RNA (1)...(19): siRNA sense strand
auguaaggaaugugggaaa

SEQ ID NO: 2517945 - RNA, 19 nt, Homo sapiens
  misc_RNA (1)...(19): siRNA sense strand
auguaaggaaugugggaaa

SEQ ID NO: 2517946 - RNA, 19 nt, Homo sapiens
  misc_RNA (1)...(19): siRNA sense strand
ggagaaacaucuagccaga

SEQ ID NO: 2517947 - RNA, 19 nt, Homo sapiens
  misc_RNA (1)...(19): siRNA sense strand
auguaagauaugugggaaa

SEQ ID NO: 2517948 - RNA, 19 nt, Homo sapiens
  misc_RNA (1)...(19): siRNA sense strand
guguaaaacauguaggaaa

SEQ ID NO: 2517949 - RNA, 19 nt, Homo sapiens
  misc_RNA (1)...(19): siRNA sense strand
ccguaugaauguaaggaau

SEQ ID NO: 2517950 - RNA, 19 nt, Homo sapiens
  misc_RNA (1)...(19): siRNA sense strand
ccguaugaauguaaggaau

SEQ ID NO: 2517951 - RNA, 19 nt, Homo sapiens
  misc_RNA (1)...(19): siRNA sense strand
gcuucacacuggaaagaaa

SEQ ID NO: 2517952 - RNA, 19 nt, Homo sapiens
  misc_RNA (1)...(19): siRNA sense strand
aaguaaagauggaacucaa

SEQ ID NO: 2517953 - RNA, 19 nt, Homo sapiens
  misc_RNA (1)...(19): siRNA sense strand
auguaaacaauguggcaaa

SEQ ID NO: 2517954 - RNA, 19 nt, Homo sapiens
  misc_RNA (1)...(19): siRNA sense strand
aacucauacuggagagaaa

SEQ ID NO: 2517955 - RNA, 19 nt, Homo sapiens
  misc_RNA (1)...(19): siRNA sense strand
augcaagcagugugggaaa

SEQ ID NO: 2517956 - RNA, 19 nt, Homo sapiens
  misc_RNA (1)...(19): siRNA sense strand
ccauauaaauguaagcagu

SEQ ID NO: 2517957 - RNA, 19 nt, Homo sapiens
  misc_RNA (1)...(19): siRNA sense strand
cuuaaagguacaugaaaga

SEQ ID NO: 2517958 - RNA, 19 nt, Homo sapiens
  misc_RNA (1)...(19): siRNA sense strand
uggaaauggaccucauaaa

SEQ ID NO: 2517959 - RNA, 19 nt, Homo sapiens
  misc_RNA (1)...(19): siRNA sense strand
auguaaguugugugggaaa

SEQ ID NO: 2517960 - RNA, 19 nt, Homo sapiens
  misc_RNA (1)...(19): siRNA sense strand
acugcaaagucaugaaaga

SEQ ID NO: 2517961 - RNA, 19 nt, Homo sapiens
  misc_RNA (1)...(19): siRNA sense strand
ugauaaggcacacuggaaa

SEQ ID NO: 2517962 - RNA, 19 nt, Homo sapiens
  misc_RNA (1)...(19): siRNA sense strand
gauaaggcacacuggaaau

SEQ ID NO: 2517963 - RNA, 19 nt, Homo sapiens
  misc_RNA (1)...(19): siRNA sense strand
ggauuguguaguaaugaaa

SEQ ID NO: 2517964 - RNA, 19 nt, Homo sapiens
  misc_RNA (1)...(19): siRNA sense strand
gacucacacugcagagaaa

SEQ ID NO: 2517965 - RNA, 19 nt, Homo sapiens
  misc_RNA (1)...(19): siRNA sense strand
ccuucaguucuuugggaaa

SEQ ID NO: 2517966 - RNA, 19 nt, Homo sapiens
  misc_RNA (1)...(19): siRNA sense strand
cuaucuaagacaugaaaga

SEQ ID NO: 2517967 - RNA, 19 nt, Homo sapiens
  misc_RNA (1)...(19): siRNA sense strand
cuaucuaagacaugaaaga

SEQ ID NO: 2517968 - RNA, 19 nt, Homo sapiens
  misc_RNA (1)...(19): siRNA sense strand
agaauucacaugagagaga

SEQ ID NO: 2517969 - RNA, 19 nt, Homo sapiens
  misc_RNA (1)...(19): siRNA sense strand
cuuucgaagucauaugaua

SEQ ID NO: 2517970 - RNA, 19 nt, Homo sapiens
  misc_RNA (1)...(19): siRNA sense strand
ucaugaauguggagagaag

SEQ ID NO: 2517971 - RNA, 19 nt, Homo sapiens
  misc_RNA (1)...(19): siRNA sense strand
aacucacacuggagagaaa

SEQ ID NO: 2517972 - RNA, 19 nt, Homo sapiens
  misc_RNA (1)...(19): siRNA sense strand
aacucacacuggagagaaa

SEQ ID NO: 2517973 - RNA, 19 nt, Homo sapiens
  misc_RNA (1)...(19): siRNA sense strand
acaaagaugugaugcagga

SEQ ID NO: 2517974 - RNA, 19 nt, Homo sapiens
  misc_RNA (1)...(19): siRNA sense strand
gacucacacaggagagaaa

SEQ ID NO: 2517975 - RNA, 19 nt, Homo sapiens
  misc_RNA (1)...(19): siRNA sense strand
guguaguaaugaaauggaa

SEQ ID NO: 2517976 - RNA, 19 nt, Homo sapiens
  misc_RNA (1)...(19): siRNA sense strand
aaauguaaguuguguggga

SEQ ID NO: 2517977 - RNA, 19 nt, Homo sapiens
  misc_RNA (1)...(19): siRNA sense strand
ugaaauggaaagaccagaa

SEQ ID NO: 2517978 - RNA, 19 nt, Homo sapiens
  misc_RNA (1)...(19): siRNA sense strand
aagauaguauugugaccaa

SEQ ID NO: 2517979 - RNA, 19 nt, Homo sapiens
  misc_RNA (1)...(19): siRNA sense strand
aaauguaagcaguguucua

SEQ ID NO: 2517980 - RNA, 19 nt, Homo sapiens
  misc_RNA (1)...(19): siRNA sense strand
gucguauguuagagagauu

SEQ ID NO: 2517981 - RNA, 19 nt, Homo sapiens
  misc_RNA (1)...(19): siRNA sense strand
gcaaugugggaaagcguuu

SEQ ID NO: 2517982 - RNA, 19 nt, Homo sapiens
  misc_RNA (1)...(19): siRNA sense strand
cguauguuagagagauuua

SEQ ID NO: 2517983 - RNA, 19 nt, Homo sapiens
  misc_RNA (1)...(19): siRNA sense strand
ucaaagacaugaaaggacu

SEQ ID NO: 2517984 - RNA, 19 nt, Homo sapiens
  misc_RNA (1)...(19): siRNA sense strand
acuuaaagguacaugaaag

SEQ ID NO: 2517985 - RNA, 19 nt, Homo sapiens
  misc_RNA (1)...(19): siRNA sense strand
cccuauacauguaaacaau

SEQ ID NO: 2517986 - RNA, 19 nt, Homo sapiens
  misc_RNA (1)...(19): siRNA sense strand
aaagaauucacaugagaga

SEQ ID NO: 2517987 - RNA, 19 nt, Homo sapiens
  misc_RNA (1)...(19): siRNA sense strand
ccauaugaauguaagcagu

SEQ ID NO: 2517988 - RNA, 19 nt, Homo sapiens
  misc_RNA (1)...(19): siRNA sense strand
aacucaauguggagaaaca

SEQ ID NO: 2517989 - RNA, 19 nt, Homo sapiens
  misc_RNA (1)...(19): siRNA sense strand
augucagcaaugugggaaa

SEQ ID NO: 2517990 - RNA, 19 nt, Homo sapiens
  misc_RNA (1)...(19): siRNA sense strand
auaccuuucucgacauaaa

SEQ ID NO: 2517991 - RNA, 19 nt, Homo sapiens
  misc_RNA (1)...(19): siRNA sense strand
aauucacaugagagagaaa

SEQ ID NO: 2517992 - RNA, 19 nt, Homo sapiens
  misc_RNA (1)...(19): siRNA sense strand
ggcacaaaccacaugagua

SEQ ID NO: 2517993 - RNA, 19 nt, Homo sapiens
  misc_RNA (1)...(19): siRNA sense strand
gcuuagaggacguggcaau

SEQ ID NO: 2517994 - RNA, 19 nt, Homo sapiens
  misc_RNA (1)...(19): siRNA sense strand
auguuugacuugugggaaa

SEQ ID NO: 2517995 - RNA, 19 nt, Homo sapiens
  misc_RNA (1)...(19): siRNA sense strand
cccauaaggcagagaagaa

SEQ ID NO: 2517996 - RNA, 19 nt, Homo sapiens
  misc_RNA (1)...(19): siRNA sense strand
gcagagagagcuugggaga

SEQ ID NO: 2517997 - RNA, 19 nt, Homo sapiens
  misc_RNA (1)...(19): siRNA sense strand
gugccuugaaugugggaaa

SEQ ID NO: 2517998 - RNA, 19 nt, Homo sapiens
  misc_RNA (1)...(19): siRNA sense strand
uagugaagcuggaggagga

SEQ ID NO: 2517999 - RNA, 19 nt, Homo sapiens
  misc_RNA (1)...(19): siRNA sense strand
ggauaugcagagagagcuu

SEQ ID NO: 2518000 - RNA, 19 nt, Homo sapiens
  misc_RNA (1)...(19): siRNA sense strand
gcuguaaaggagagggcau

SEQ ID NO: 2518001 - RNA, 19 nt, Homo sapiens
  misc_RNA (1)...(19): siRNA sense strand
aagagaaauuugagaaccu

SEQ ID NO: 2518002 - RNA, 19 nt, Homo sapiens
  misc_RNA (1)...(19): siRNA sense strand
cugaagggaacauggaaga

SEQ ID NO: 2518003 - RNA, 19 nt, Homo sapiens
  misc_RNA (1)...(19): siRNA sense strand
ggaggaaagcuaugggauc

SEQ ID NO: 2518004 - RNA, 19 nt, Homo sapiens
  misc_RNA (1)...(19): siRNA sense strand
gcgaagaagcggugacccu

SEQ ID NO: 2518005 - RNA, 19 nt, Homo sapiens
  misc_RNA (1)...(19): siRNA sense strand
uaaucaggcaccagagaau

SEQ ID NO: 2518006 - RNA, 19 nt, Homo sapiens
  misc_RNA (1)...(19): siRNA sense strand
ggaacauggaagacaagga

SEQ ID NO: 2518007 - RNA, 19 nt, Homo sapiens
  misc_RNA (1)...(19): siRNA sense strand
acauggaagacaaggagau

SEQ ID NO: 2518008 - RNA, 19 nt, Homo sapiens
  misc_RNA (1)...(19): siRNA sense strand
aacacacacaggagagaaa

SEQ ID NO: 2518009 - RNA, 19 nt, Homo sapiens
  misc_RNA (1)...(19): siRNA sense strand
cagaagugcuuuuggagga

SEQ ID NO: 2518010 - RNA, 19 nt, Homo sapiens
  misc_RNA (1)...(19): siRNA sense strand
cuacaagugcccugagugu

SEQ ID NO: 2518011 - RNA, 19 nt, Homo sapiens
  misc_RNA (1)...(19): siRNA sense strand
ccuuauaagugucccgagu

SEQ ID NO: 2518012 - RNA, 19 nt, Homo sapiens
  misc_RNA (1)...(19): siRNA sense strand
cuguaaaggagagggcauu

SEQ ID NO: 2518013 - RNA, 19 nt, Homo sapiens
  misc_RNA (1)...(19): siRNA sense strand
ccgaaggaacugcagccaa

SEQ ID NO: 2518014 - RNA, 19 nt, Homo sapiens
  misc_RNA (1)...(19): siRNA sense strand
caauggagacugagcgaag

SEQ ID NO: 2518015 - RNA, 19 nt, Homo sapiens
  misc_RNA (1)...(19): siRNA sense strand
uguaaaggagagggcauua

SEQ ID NO: 2518016 - RNA, 19 nt, Homo sapiens
  misc_RNA (1)...(19): siRNA sense strand
aauacaugcagcugaaaga

SEQ ID NO: 2518017 - RNA, 19 nt, Homo sapiens
  misc_RNA (1)...(19): siRNA sense strand
gugcaggagaguuaugaga

SEQ ID NO: 2518018 - RNA, 19 nt, Homo sapiens
  misc_RNA (1)...(19): siRNA sense strand
gaggauaugcagagagagc

SEQ ID NO: 2518019 - RNA, 19 nt, Homo sapiens
  misc_RNA (1)...(19): siRNA sense strand
cccaguugccugagagcuu

SEQ ID NO: 2518020 - RNA, 19 nt, Homo sapiens
  misc_RNA (1)...(19): siRNA sense strand
agaagagaaauuugagaac

SEQ ID NO: 2518021 - RNA, 19 nt, Homo sapiens
  misc_RNA (1)...(19): siRNA sense strand
ugaaaucuuuggugggaac

SEQ ID NO: 2518022 - RNA, 19 nt, Homo sapiens
  misc_RNA (1)...(19): siRNA sense strand
ugacccuuguggaggauau

SEQ ID NO: 2518023 - RNA, 19 nt, Homo sapiens
  misc_RNA (1)...(19): siRNA sense strand
guggaauggagcaggccuu

SEQ ID NO: 2518024 - RNA, 19 nt, Homo sapiens
  misc_RNA (1)...(19): siRNA sense strand
cagcugaaagacuguguau

SEQ ID NO: 2518025 - RNA, 19 nt, Homo sapiens
  misc_RNA (1)...(19): siRNA sense strand
agaacucaugagagagaga

SEQ ID NO: 2518026 - RNA, 19 nt, Homo sapiens
  misc_RNA (1)...(19): siRNA sense strand
ugucaaggucaaugggaaa

SEQ ID NO: 2518027 - RNA, 19 nt, Homo sapiens
  misc_RNA (1)...(19): siRNA sense strand
gaacaagaguggacggaag

SEQ ID NO: 2518028 - RNA, 19 nt, Homo sapiens
  misc_RNA (1)...(19): siRNA sense strand
gggagauccaucagagaau

SEQ ID NO: 2518029 - RNA, 19 nt, Homo sapiens
  misc_RNA (1)...(19): siRNA sense strand
gagcaaaggguauccggaa

SEQ ID NO: 2518030 - RNA, 19 nt, Homo sapiens
  misc_RNA (1)...(19): siRNA sense strand
gguucugccaggagccaaa

SEQ ID NO: 2518031 - RNA, 19 nt, Homo sapiens
  misc_RNA (1)...(19): siRNA sense strand
agaauaagaagaaggucga

SEQ ID NO: 2518032 - RNA, 19 nt, Homo sapiens
  misc_RNA (1)...(19): siRNA sense strand
uugucaaggucaaugggaa

SEQ ID NO: 2518033 - RNA, 19 nt, Homo sapiens
  misc_RNA (1)...(19): siRNA sense strand
guguccagaugaagaucaa

SEQ ID NO: 2518034 - RNA, 19 nt, Homo sapiens
  misc_RNA (1)...(19): siRNA sense strand
cuguguaccuggugaggca

SEQ ID NO: 2518035 - RNA, 19 nt, Homo sapiens
  misc_RNA (1)...(19): siRNA sense strand
ccaucagagaauaagaaga

SEQ ID NO: 2518036 - RNA, 19 nt, Homo sapiens
  misc_RNA (1)...(19): siRNA sense strand
augaaugagaagaagccua

SEQ ID NO: 2518037 - RNA, 19 nt, Homo sapiens
  misc_RNA (1)...(19): siRNA sense strand
ccaugaaaccauugcccuu

SEQ ID NO: 2518038 - RNA, 19 nt, Homo sapiens
  misc_RNA (1)...(19): siRNA sense strand
gauggauccuggugcccaa

SEQ ID NO: 2518039 - RNA, 19 nt, Homo sapiens
  misc_RNA (1)...(19): siRNA sense strand
agcacgagcuccuggccaa

SEQ ID NO: 2518040 - RNA, 19 nt, Homo sapiens
  misc_RNA (1)...(19): siRNA sense strand
gguuugaggaagcgcacuu

SEQ ID NO: 2518041 - RNA, 19 nt, Homo sapiens
  misc_RNA (1)...(19): siRNA sense strand
gugaugaguuuccgggugu

SEQ ID NO: 2518042 - RNA, 19 nt, Homo sapiens
  misc_RNA (1)...(19): siRNA sense strand
gagaauaagaagaaggucg

SEQ ID NO: 2518043 - RNA, 19 nt, Homo sapiens
  misc_RNA (1)...(19): siRNA sense strand
ugguacaguuugaggagaa

SEQ ID NO: 2518044 - RNA, 19 nt, Homo sapiens
  misc_RNA (1)...(19): siRNA sense strand
guaaauggugagacgggua

SEQ ID NO: 2518045 - RNA, 19 nt, Homo sapiens
  misc_RNA (1)...(19): siRNA sense strand
gcgugaauccggaagaaaa

SEQ ID NO: 2518046 - RNA, 19 nt, Homo sapiens
  misc_RNA (1)...(19): siRNA sense strand
ucucggaaguagaacgcaa

SEQ ID NO: 2518047 - RNA, 19 nt, Homo sapiens
  misc_RNA (1)...(19): siRNA sense strand
ugccauucuucgagagauu

SEQ ID NO: 2518048 - RNA, 19 nt, Homo sapiens
  misc_RNA (1)...(19): siRNA sense strand
uggaauacaagaaaggaga

SEQ ID NO: 2518049 - RNA, 19 nt, Homo sapiens
  misc_RNA (1)...(19): siRNA sense strand
cagauuuagcucagcacua

SEQ ID NO: 2518050 - RNA, 19 nt, Homo sapiens
  misc_RNA (1)...(19): siRNA sense strand
acaugaaggaacugggcau

SEQ ID NO: 2518051 - RNA, 19 nt, Homo sapiens
  misc_RNA (1)...(19): siRNA sense strand
aggaugaagagguuggaga

SEQ ID NO: 2518052 - RNA, 19 nt, Homo sapiens
  misc_RNA (1)...(19): siRNA sense strand
aaagauaccuggaggcauc

SEQ ID NO: 2518053 - RNA, 19 nt, Homo sapiens
  misc_RNA (1)...(19): siRNA sense strand
agauggaggaagaguacau

SEQ ID NO: 2518054 - RNA, 19 nt, Homo sapiens
  misc_RNA (1)...(19): siRNA sense strand
gccaaguccaugaucgaaa

SEQ ID NO: 2518055 - RNA, 19 nt, Homo sapiens
  misc_RNA (1)...(19): siRNA sense strand
ccagacugacauugagauu

SEQ ID NO: 2518056 - RNA, 19 nt, Homo sapiens
  misc_RNA (1)...(19): siRNA sense strand
acaagaaaggagaaagcca

SEQ ID NO: 2518057 - RNA, 19 nt, Homo sapiens
  misc_RNA (1)...(19): siRNA sense strand
ggaacugagagaagaugau

SEQ ID NO: 2518058 - RNA, 19 nt, Homo sapiens
  misc_RNA (1)...(19): siRNA sense strand
ccagaggaacugagagaag

SEQ ID NO: 2518059 - RNA, 19 nt, Homo sapiens
  misc_RNA (1)...(19): siRNA sense strand
gaauggucggaaagagauu

SEQ ID NO: 2518060 - RNA, 19 nt, Homo sapiens
  misc_RNA (1)...(19): siRNA sense strand
gagaagaugauguuggaac

SEQ ID NO: 2518061 - RNA, 19 nt, Homo sapiens
  misc_RNA (1)...(19): siRNA sense strand
cggccaaguccaugaucga

SEQ ID NO: 2518062 - RNA, 19 nt, Homo sapiens
  misc_RNA (1)...(19): siRNA sense strand
ugucaagaugguacaguuu

SEQ ID NO: 2518063 - RNA, 19 nt, Homo sapiens
  misc_RNA (1)...(19): siRNA sense strand
ccgcagaguccggaagaca

SEQ ID NO: 2518064 - RNA, 19 nt, Homo sapiens
  misc_RNA (1)...(19): siRNA sense strand
ggguguaaauggugagacg

SEQ ID NO: 2518065 - RNA, 19 nt, Homo sapiens
  misc_RNA (1)...(19): siRNA sense strand
gaggcauugugaugaccaa

SEQ ID NO: 2518066 - RNA, 19 nt, Homo sapiens
  misc_RNA (1)...(19): siRNA sense strand
cagaacacaaagcgugaau

SEQ ID NO: 2518067 - RNA, 19 nt, Homo sapiens
  misc_RNA (1)...(19): siRNA sense strand
ucgcauugcuagagccugu

SEQ ID NO: 2518068 - RNA, 19 nt, Homo sapiens
  misc_RNA (1)...(19): siRNA sense strand
agucagccgaccagaggaa

SEQ ID NO: 2518069 - RNA, 19 nt, Homo sapiens
  misc_RNA (1)...(19): siRNA sense strand
gugcucagccagaacacaa

SEQ ID NO: 2518070 - RNA, 19 nt, Homo sapiens
  misc_RNA (1)...(19): siRNA sense strand
gguacaguuugaggagaau

SEQ ID NO: 2518071 - RNA, 19 nt, Homo sapiens
  misc_RNA (1)...(19): siRNA sense strand
aaaauaugcaagaguggaa

SEQ ID NO: 2518072 - RNA, 19 nt, Homo sapiens
  misc_RNA (1)...(19): siRNA sense strand
ugccaagacuauugcagau

SEQ ID NO: 2518073 - RNA, 19 nt, Homo sapiens
  misc_RNA (1)...(19): siRNA sense strand
agaggaacugagagaagau

SEQ ID NO: 2518074 - RNA, 19 nt, Homo sapiens
  misc_RNA (1)...(19): siRNA sense strand
caugaaggaacugggcaua

SEQ ID NO: 2518075 - RNA, 19 nt, Homo sapiens
  misc_RNA (1)...(19): siRNA sense strand
aggcauuggaugauaugau

SEQ ID NO: 2518076 - RNA, 19 nt, Homo sapiens
  misc_RNA (1)...(19): siRNA sense strand
aagaaaggagaaagccaga

SEQ ID NO: 2518077 - RNA, 19 nt, Homo sapiens
  misc_RNA (1)...(19): siRNA sense strand
gaggaggacuucacccgaa

SEQ ID NO: 2518078 - RNA, 19 nt, Homo sapiens
  misc_RNA (1)...(19): siRNA sense strand
gagaagaaguggagguccu

SEQ ID NO: 2518079 - RNA, 19 nt, Homo sapiens
  misc_RNA (1)...(19): siRNA sense strand
agagcaaaucaaagaacua

SEQ ID NO: 2518080 - RNA, 19 nt, Homo sapiens
  misc_RNA (1)...(19): siRNA sense strand
agcuggagcaggagaacaa

SEQ ID NO: 2518081 - RNA, 19 nt, Homo sapiens
  misc_RNA (1)...(19): siRNA sense strand
guaugcggucagagaagaa

SEQ ID NO: 2518082 - RNA, 19 nt, Homo sapiens
  misc_RNA (1)...(19): siRNA sense strand
gagaagaaguggagguccu

SEQ ID NO: 2518083 - RNA, 19 nt, Homo sapiens
  misc_RNA (1)...(19): siRNA sense strand
agagcaaaucaaagaacua

SEQ ID NO: 2518084 - RNA, 19 nt, Homo sapiens
  misc_RNA (1)...(19): siRNA sense strand
agcuggagcaggagaacaa

SEQ ID NO: 2518085 - RNA, 19 nt, Homo sapiens
  misc_RNA (1)...(19): siRNA sense strand
gcucaggaccaaccgcaua

SEQ ID NO: 2518086 - RNA, 19 nt, Homo sapiens
  misc_RNA (1)...(19): siRNA sense strand
guaugcggucagagaagaa

SEQ ID NO: 2518087 - RNA, 19 nt, Homo sapiens
  misc_RNA (1)...(19): siRNA sense strand
ggaacugcuucuuuggcua

SEQ ID NO: 2518088 - RNA, 19 nt, Homo sapiens
  misc_RNA (1)...(19): siRNA sense strand
gcacugcacugcugggaca

SEQ ID NO: 2518089 - RNA, 19 nt, Homo sapiens
  misc_RNA (1)...(19): siRNA sense strand
ccggcugguuccuggacaa

SEQ ID NO: 2518090 - RNA, 19 nt, Homo sapiens
  misc_RNA (1)...(19): siRNA sense strand
aggagggcgaggaguggaa

SEQ ID NO: 2518091 - RNA, 19 nt, Homo sapiens
  misc_RNA (1)...(19): siRNA sense strand
cgucuaagcugaaacccaa

SEQ ID NO: 2518092 - RNA, 19 nt, Homo sapiens
  misc_RNA (1)...(19): siRNA sense strand
cauuaguggacuugauauu

SEQ ID NO: 2518093 - RNA, 19 nt, Homo sapiens
  misc_RNA (1)...(19): siRNA sense strand
cuuuauuagugcugacaga

SEQ ID NO: 2518094 - RNA, 19 nt, Homo sapiens
  misc_RNA (1)...(19): siRNA sense strand
uguuaacaucacugcauua

SEQ ID NO: 2518095 - RNA, 19 nt, Homo sapiens
  misc_RNA (1)...(19): siRNA sense strand
aggagaaguccauaaggau

SEQ ID NO: 2518096 - RNA, 19 nt, Homo sapiens
  misc_RNA (1)...(19): siRNA sense strand
gucaaggagaaguccauaa

SEQ ID NO: 2518097 - RNA, 19 nt, Homo sapiens
  misc_RNA (1)...(19): siRNA sense strand
cugacaucaucuaucuaaa

SEQ ID NO: 2518098 - RNA, 19 nt, Homo sapiens
  misc_RNA (1)...(19): siRNA sense strand
ggagaaguccauaaggauc

SEQ ID NO: 2518099 - RNA, 19 nt, Homo sapiens
  misc_RNA (1)...(19): siRNA sense strand
auuucaggcucgagucauu

SEQ ID NO: 2518100 - RNA, 19 nt, Homo sapiens
  misc_RNA (1)...(19): siRNA sense strand
gugugugggagucuggaua

SEQ ID NO: 2518101 - RNA, 19 nt, Homo sapiens
  misc_RNA (1)...(19): siRNA sense strand
guauagaaacacaggacaa

SEQ ID NO: 2518102 - RNA, 19 nt, Homo sapiens
  misc_RNA (1)...(19): siRNA sense strand
uggaagagcaugaggcaga

SEQ ID NO: 2518103 - RNA, 19 nt, Homo sapiens
  misc_RNA (1)...(19): siRNA sense strand
ccgaugagcauauggcaaa

SEQ ID NO: 2518104 - RNA, 19 nt, Homo sapiens
  misc_RNA (1)...(19): siRNA sense strand
ugguagaaacuuuggaaau

SEQ ID NO: 2518105 - RNA, 19 nt, Homo sapiens
  misc_RNA (1)...(19): siRNA sense strand
caggaagagaggaaauaaa

SEQ ID NO: 2518106 - RNA, 19 nt, Homo sapiens
  misc_RNA (1)...(19): siRNA sense strand
cauucugguuggagauuaa

SEQ ID NO: 2518107 - RNA, 19 nt, Homo sapiens
  misc_RNA (1)...(19): siRNA sense strand
cagaaggagaggcaagaaa

SEQ ID NO: 2518108 - RNA, 19 nt, Homo sapiens
  misc_RNA (1)...(19): siRNA sense strand
agagugaggaguuggauaa

SEQ ID NO: 2518109 - RNA, 19 nt, Homo sapiens
  misc_RNA (1)...(19): siRNA sense strand
cggcagccuuacaggguua

SEQ ID NO: 2518110 - RNA, 19 nt, Homo sapiens
  misc_RNA (1)...(19): siRNA sense strand
cugaaaaugcugaugaaua

SEQ ID NO: 2518111 - RNA, 19 nt, Homo sapiens
  misc_RNA (1)...(19): siRNA sense strand
agacauuggaagagcauga

SEQ ID NO: 2518112 - RNA, 19 nt, Homo sapiens
  misc_RNA (1)...(19): siRNA sense strand
agucuaaagaagccagaaa

SEQ ID NO: 2518113 - RNA, 19 nt, Homo sapiens
  misc_RNA (1)...(19): siRNA sense strand
ccguguaccucaagaccua

SEQ ID NO: 2518114 - RNA, 19 nt, Homo sapiens
  misc_RNA (1)...(19): siRNA sense strand
aagaaauugcugugaaaca

SEQ ID NO: 2518115 - RNA, 19 nt, Homo sapiens
  misc_RNA (1)...(19): siRNA sense strand
cgaggaaguaaguuguaua

SEQ ID NO: 2518116 - RNA, 19 nt, Homo sapiens
  misc_RNA (1)...(19): siRNA sense strand
ggagccaggaagagaggaa

SEQ ID NO: 2518117 - RNA, 19 nt, Homo sapiens
  misc_RNA (1)...(19): siRNA sense strand
ccgucaaggucaaauagaa

SEQ ID NO: 2518118 - RNA, 19 nt, Homo sapiens
  misc_RNA (1)...(19): siRNA sense strand
augugugauugcagaauua

SEQ ID NO: 2518119 - RNA, 19 nt, Homo sapiens
  misc_RNA (1)...(19): siRNA sense strand
ugucagaugaagagcaaga

SEQ ID NO: 2518120 - RNA, 19 nt, Homo sapiens
  misc_RNA (1)...(19): siRNA sense strand
guuaaauguggguacuaaa

SEQ ID NO: 2518121 - RNA, 19 nt, Homo sapiens
  misc_RNA (1)...(19): siRNA sense strand
gguuggagauuaaagacau

SEQ ID NO: 2518122 - RNA, 19 nt, Homo sapiens
  misc_RNA (1)...(19): siRNA sense strand
gaauaguaugucagaugaa

SEQ ID NO: 2518123 - RNA, 19 nt, Homo sapiens
  misc_RNA (1)...(19): siRNA sense strand
gguaguuaaaugcuggaaa

SEQ ID NO: 2518124 - RNA, 19 nt, Homo sapiens
  misc_RNA (1)...(19): siRNA sense strand
gaauuguaccacuggagaa

SEQ ID NO: 2518125 - RNA, 19 nt, Homo sapiens
  misc_RNA (1)...(19): siRNA sense strand
ggaacuagaaaauggcuua

SEQ ID NO: 2518126 - RNA, 19 nt, Homo sapiens
  misc_RNA (1)...(19): siRNA sense strand
ugugaaugguagaaacuuu

SEQ ID NO: 2518127 - RNA, 19 nt, Homo sapiens
  misc_RNA (1)...(19): siRNA sense strand
gauaaucauagcagcgcaa

SEQ ID NO: 2518128 - RNA, 19 nt, Homo sapiens
  misc_RNA (1)...(19): siRNA sense strand
cagagaauguaaagguagu

SEQ ID NO: 2518129 - RNA, 19 nt, Homo sapiens
  misc_RNA (1)...(19): siRNA sense strand
gucaaauagaagugagcau

SEQ ID NO: 2518130 - RNA, 19 nt, Homo sapiens
  misc_RNA (1)...(19): siRNA sense strand
gcuuaaaugccgaugagca

SEQ ID NO: 2518131 - RNA, 19 nt, Homo sapiens
  misc_RNA (1)...(19): siRNA sense strand
gugccagaacagagguauu

SEQ ID NO: 2518132 - RNA, 19 nt, Homo sapiens
  misc_RNA (1)...(19): siRNA sense strand
ggucauagcagcucaggca

SEQ ID NO: 2518133 - RNA, 19 nt, Homo sapiens
  misc_RNA (1)...(19): siRNA sense strand
cauuaagaagucaggcauu

SEQ ID NO: 2518134 - RNA, 19 nt, Homo sapiens
  misc_RNA (1)...(19): siRNA sense strand
aggaagagaggaaauaaau

SEQ ID NO: 2518135 - RNA, 19 nt, Homo sapiens
  misc_RNA (1)...(19): siRNA sense strand
gagacuucccagagacauu

SEQ ID NO: 2518136 - RNA, 19 nt, Homo sapiens
  misc_RNA (1)...(19): siRNA sense strand
gcacuuuggaucugggcau

SEQ ID NO: 2518137 - RNA, 19 nt, Homo sapiens
  misc_RNA (1)...(19): siRNA sense strand
acagaagacagcaagcuua

SEQ ID NO: 2518138 - RNA, 19 nt, Homo sapiens
  misc_RNA (1)...(19): siRNA sense strand
ccucaagaccuauguuaca

SEQ ID NO: 2518139 - RNA, 19 nt, Homo sapiens
  misc_RNA (1)...(19): siRNA sense strand
uaauagaccucgaggacac

SEQ ID NO: 2518140 - RNA, 19 nt, Homo sapiens
  misc_RNA (1)...(19): siRNA sense strand
gauguggauugaagcgcaa

SEQ ID NO: 2518141 - RNA, 19 nt, Homo sapiens
  misc_RNA (1)...(19): siRNA sense strand
agaaaauguugcugauuga

SEQ ID NO: 2518142 - RNA, 19 nt, Homo sapiens
  misc_RNA (1)...(19): siRNA sense strand
auguaaagguagucuagau

SEQ ID NO: 2518143 - RNA, 19 nt, Homo sapiens
  misc_RNA (1)...(19): siRNA sense strand
ucuuugagaugcuggaaca

SEQ ID NO: 2518144 - RNA, 19 nt, Homo sapiens
  misc_RNA (1)...(19): siRNA sense strand
ccgaauaguaugucagaug

SEQ ID NO: 2518145 - RNA, 19 nt, Homo sapiens
  misc_RNA (1)...(19): siRNA sense strand
gaaaagagggacaaaugaa

SEQ ID NO: 2518146 - RNA, 19 nt, Homo sapiens
  misc_RNA (1)...(19): siRNA sense strand
cagaagacagcaagcuuau

SEQ ID NO: 2518147 - RNA, 19 nt, Homo sapiens
  misc_RNA (1)...(19): siRNA sense strand
ggguagugcuuuucagaca

SEQ ID NO: 2518148 - RNA, 19 nt, Homo sapiens
  misc_RNA (1)...(19): siRNA sense strand
caugggaaauccagugaca

SEQ ID NO: 2518149 - RNA, 19 nt, Homo sapiens
  misc_RNA (1)...(19): siRNA sense strand
agaaggagaggcaagaaau

SEQ ID NO: 2518150 - RNA, 19 nt, Homo sapiens
  misc_RNA (1)...(19): siRNA sense strand
aagagugaggaguuggaua

SEQ ID NO: 2518151 - RNA, 19 nt, Homo sapiens
  misc_RNA (1)...(19): siRNA sense strand
uugcaaaccaacaugggaa

SEQ ID NO: 2518152 - RNA, 19 nt, Homo sapiens
  misc_RNA (1)...(19): siRNA sense strand
uguuaaauguggguacuaa

SEQ ID NO: 2518153 - RNA, 19 nt, Homo sapiens
  misc_RNA (1)...(19): siRNA sense strand
guuggagauuaaagacauu

SEQ ID NO: 2518154 - RNA, 19 nt, Homo sapiens
  misc_RNA (1)...(19): siRNA sense strand
caccuaaauucaugugaca

SEQ ID NO: 2518155 - RNA, 19 nt, Homo sapiens
  misc_RNA (1)...(19): siRNA sense strand
ucagacaaacagcggcaaa

SEQ ID NO: 2518156 - RNA, 19 nt, Homo sapiens
  misc_RNA (1)...(19): siRNA sense strand
agaugaagagcaagaaagu

SEQ ID NO: 2518157 - RNA, 19 nt, Homo sapiens
  misc_RNA (1)...(19): siRNA sense strand
cuuacgaaguccuugauuu

SEQ ID NO: 2518158 - RNA, 19 nt, Homo sapiens
  misc_RNA (1)...(19): siRNA sense strand
aguugugcaccauggaaua

SEQ ID NO: 2518159 - RNA, 19 nt, Homo sapiens
  misc_RNA (1)...(19): siRNA sense strand
gaacucagaaggagaggca

SEQ ID NO: 2518160 - RNA, 19 nt, Homo sapiens
  misc_RNA (1)...(19): siRNA sense strand
aguacagcaugaagucuua

SEQ ID NO: 2518161 - RNA, 19 nt, Homo sapiens
  misc_RNA (1)...(19): siRNA sense strand
ucagaugaagagcaagaaa

SEQ ID NO: 2518162 - RNA, 19 nt, Homo sapiens
  misc_RNA (1)...(19): siRNA sense strand
aggacuuaaaccagaaaua

SEQ ID NO: 2518163 - RNA, 19 nt, Homo sapiens
  misc_RNA (1)...(19): siRNA sense strand
aguacaagaagcuggagaa

SEQ ID NO: 2518164 - RNA, 19 nt, Homo sapiens
  misc_RNA (1)...(19): siRNA sense strand
aguaggaacuuaaaggacu

SEQ ID NO: 2518165 - RNA, 19 nt, Homo sapiens
  misc_RNA (1)...(19): siRNA sense strand
acaaguauguucaaggcaa

SEQ ID NO: 2518166 - RNA, 19 nt, Homo sapiens
  misc_RNA (1)...(19): siRNA sense strand
cguauuggaaggagaucaa

SEQ ID NO: 2518167 - RNA, 19 nt, Homo sapiens
  misc_RNA (1)...(19): siRNA sense strand
aggacaaacugcagggaac

SEQ ID NO: 2518168 - RNA, 19 nt, Homo sapiens
  misc_RNA (1)...(19): siRNA sense strand
cagaauggcgggaagguga

SEQ ID NO: 2518169 - RNA, 19 nt, Homo sapiens
  misc_RNA (1)...(19): siRNA sense strand
aggcaaugcugaacggcuu

SEQ ID NO: 2518170 - RNA, 19 nt, Homo sapiens
  misc_RNA (1)...(19): siRNA sense strand
gggagugaggccagaguca

SEQ ID NO: 2518171 - RNA, 19 nt, Homo sapiens
  misc_RNA (1)...(19): siRNA sense strand
caaaucuugcacagggaaa

SEQ ID NO: 2518172 - RNA, 19 nt, Homo sapiens
  misc_RNA (1)...(19): siRNA sense strand
cccauauagcagaaguaaa

SEQ ID NO: 2518173 - RNA, 19 nt, Homo sapiens
  misc_RNA (1)...(19): siRNA sense strand
cuccaaugaauuugaggaa

SEQ ID NO: 2518174 - RNA, 19 nt, Homo sapiens
  misc_RNA (1)...(19): siRNA sense strand
caaagaaaccacucgggau

SEQ ID NO: 2518175 - RNA, 19 nt, Homo sapiens
  misc_RNA (1)...(19): siRNA sense strand
cgcuagugcaggugucaaa

SEQ ID NO: 2518176 - RNA, 19 nt, Homo sapiens
  misc_RNA (1)...(19): siRNA sense strand
caauaagggugaaagcgca

SEQ ID NO: 2518177 - RNA, 19 nt, Homo sapiens
  misc_RNA (1)...(19): siRNA sense strand
agcugggcuuugagaauaa

SEQ ID NO: 2518178 - RNA, 19 nt, Homo sapiens
  misc_RNA (1)...(19): siRNA sense strand
ucuccaucgucaucagaaa

SEQ ID NO: 2518179 - RNA, 19 nt, Homo sapiens
  misc_RNA (1)...(19): siRNA sense strand
uugcacagggaaaggacaa

SEQ ID NO: 2518180 - RNA, 19 nt, Homo sapiens
  misc_RNA (1)...(19): siRNA sense strand
cguucgacagccagauuua

SEQ ID NO: 2518181 - RNA, 19 nt, Homo sapiens
  misc_RNA (1)...(19): siRNA sense strand
gggugaaagcgcagcuaac

SEQ ID NO: 2518182 - RNA, 19 nt, Homo sapiens
  misc_RNA (1)...(19): siRNA sense strand
ggauccaauaagggugaaa

SEQ ID NO: 2518183 - RNA, 19 nt, Homo sapiens
  misc_RNA (1)...(19): siRNA sense strand
gacacguauuggaaggaga

SEQ ID NO: 2518184 - RNA, 19 nt, Homo sapiens
  misc_RNA (1)...(19): siRNA sense strand
ccuuggaguuggagaacaa

SEQ ID NO: 2518185 - RNA, 19 nt, Homo sapiens
  misc_RNA (1)...(19): siRNA sense strand
gagagaggcucaagggaca

SEQ ID NO: 2518186 - RNA, 19 nt, Homo sapiens
  misc_RNA (1)...(19): siRNA sense strand
cuaaauggacagaggaaga

SEQ ID NO: 2518187 - RNA, 19 nt, Homo sapiens
  misc_RNA (1)...(19): siRNA sense strand
agggcaagacacagaaaua

SEQ ID NO: 2518188 - RNA, 19 nt, Homo sapiens
  misc_RNA (1)...(19): siRNA sense strand
aggaggaagaagaggaaaa

SEQ ID NO: 2518189 - RNA, 19 nt, Homo sapiens
  misc_RNA (1)...(19): siRNA sense strand
caaucaugggaaagaguua

SEQ ID NO: 2518190 - RNA, 19 nt, Homo sapiens
  misc_RNA (1)...(19): siRNA sense strand
uggcagaggaggaagaaga

SEQ ID NO: 2518191 - RNA, 19 nt, Homo sapiens
  misc_RNA (1)...(19): siRNA sense strand
caguugaagcagucaguua

SEQ ID NO: 2518192 - RNA, 19 nt, Homo sapiens
  misc_RNA (1)...(19): siRNA sense strand
gcuuagagcgucuggccaa

SEQ ID NO: 2518193 - RNA, 19 nt, Homo sapiens
  misc_RNA (1)...(19): siRNA sense strand
acugaaaagugaugaggaa

SEQ ID NO: 2518194 - RNA, 19 nt, Homo sapiens
  misc_RNA (1)...(19): siRNA sense strand
aggaaguggcugaugacua

SEQ ID NO: 2518195 - RNA, 19 nt, Homo sapiens
  misc_RNA (1)...(19): siRNA sense strand
gagacauaaacaagaagaa

SEQ ID NO: 2518196 - RNA, 19 nt, Homo sapiens
  misc_RNA (1)...(19): siRNA sense strand
acaaagugcuaaauggaca

SEQ ID NO: 2518197 - RNA, 19 nt, Homo sapiens
  misc_RNA (1)...(19): siRNA sense strand
aaacaacacaggugagaca

SEQ ID NO: 2518198 - RNA, 19 nt, Homo sapiens
  misc_RNA (1)...(19): siRNA sense strand
guaccauacccgaagaaau

SEQ ID NO: 2518199 - RNA, 19 nt, Homo sapiens
  misc_RNA (1)...(19): siRNA sense strand
uggccaagaaucagaggaa

SEQ ID NO: 2518200 - RNA, 19 nt, Homo sapiens
  misc_RNA (1)...(19): siRNA sense strand
acaaagaaacacuggagau

SEQ ID NO: 2518201 - RNA, 19 nt, Homo sapiens
  misc_RNA (1)...(19): siRNA sense strand
augaagaggaaauaagcaa

SEQ ID NO: 2518202 - RNA, 19 nt, Homo sapiens
  misc_RNA (1)...(19): siRNA sense strand
gccaagaaucagaggaagu

SEQ ID NO: 2518203 - RNA, 19 nt, Homo sapiens
  misc_RNA (1)...(19): siRNA sense strand
guucccuacucgaaagaaa

SEQ ID NO: 2518204 - RNA, 19 nt, Homo sapiens
  misc_RNA (1)...(19): siRNA sense strand
ccaugaaggaaacgucaaa

SEQ ID NO: 2518205 - RNA, 19 nt, Homo sapiens
  misc_RNA (1)...(19): siRNA sense strand
uucagaaggagguggauaa

SEQ ID NO: 2518206 - RNA, 19 nt, Homo sapiens
  misc_RNA (1)...(19): siRNA sense strand
aagaagaacaggacagguu

SEQ ID NO: 2518207 - RNA, 19 nt, Homo sapiens
  misc_RNA (1)...(19): siRNA sense strand
agacacagaaauagaagau

SEQ ID NO: 2518208 - RNA, 19 nt, Homo sapiens
  misc_RNA (1)...(19): siRNA sense strand
accaagcaaucaugggaaa

SEQ ID NO: 2518209 - RNA, 19 nt, Homo sapiens
  misc_RNA (1)...(19): siRNA sense strand
uguacaagaagucaggaaa

SEQ ID NO: 2518210 - RNA, 19 nt, Homo sapiens
  misc_RNA (1)...(19): siRNA sense strand
ccuuguggcagaacagaaa

SEQ ID NO: 2518211 - RNA, 19 nt, Homo sapiens
  misc_RNA (1)...(19): siRNA sense strand
gacauaaacaagaagaaca

SEQ ID NO: 2518212 - RNA, 19 nt, Homo sapiens
  misc_RNA (1)...(19): siRNA sense strand
aagagcaaauggugccaaa

SEQ ID NO: 2518213 - RNA, 19 nt, Homo sapiens
  misc_RNA (1)...(19): siRNA sense strand
gaagagaauaugaagagga

SEQ ID NO: 2518214 - RNA, 19 nt, Homo sapiens
  misc_RNA (1)...(19): siRNA sense strand
gaguaucacuuacgcgcua

SEQ ID NO: 2518215 - RNA, 19 nt, Homo sapiens
  misc_RNA (1)...(19): siRNA sense strand
gcgaggaagaagaaaacaa

SEQ ID NO: 2518216 - RNA, 19 nt, Homo sapiens
  misc_RNA (1)...(19): siRNA sense strand
aggacagguuauuggcauu

SEQ ID NO: 2518217 - RNA, 19 nt, Homo sapiens
  misc_RNA (1)...(19): siRNA sense strand
gcauccaacaccagagaga

SEQ ID NO: 2518218 - RNA, 19 nt, Homo sapiens
  misc_RNA (1)...(19): siRNA sense strand
ggacauugacaguagugau

SEQ ID NO: 2518219 - RNA, 19 nt, Homo sapiens
  misc_RNA (1)...(19): siRNA sense strand
gcaucuacuguuugagaga

SEQ ID NO: 2518220 - RNA, 19 nt, Homo sapiens
  misc_RNA (1)...(19): siRNA sense strand
gugcaagcuuagagcgucu

SEQ ID NO: 2518221 - RNA, 19 nt, Homo sapiens
  misc_RNA (1)...(19): siRNA sense strand
ggacagaggaagaauccca

SEQ ID NO: 2518222 - RNA, 19 nt, Homo sapiens
  misc_RNA (1)...(19): siRNA sense strand
ggcgaagagcgauggaaga

SEQ ID NO: 2518223 - RNA, 19 nt, Homo sapiens
  misc_RNA (1)...(19): siRNA sense strand
gguuguuggcagaggagga

SEQ ID NO: 2518224 - RNA, 19 nt, Homo sapiens
  misc_RNA (1)...(19): siRNA sense strand
agaggaggaagaagaggaa

SEQ ID NO: 2518225 - RNA, 19 nt, Homo sapiens
  misc_RNA (1)...(19): siRNA sense strand
ccagcgaggaagaagaaaa

SEQ ID NO: 2518226 - RNA, 19 nt, Homo sapiens
  misc_RNA (1)...(19): siRNA sense strand
ggcaagacacagaaauaga

SEQ ID NO: 2518227 - RNA, 19 nt, Homo sapiens
  misc_RNA (1)...(19): siRNA sense strand
ugagaagagaauaugaaga

SEQ ID NO: 2518228 - RNA, 19 nt, Homo sapiens
  misc_RNA (1)...(19): siRNA sense strand
gggccagcgaggaagaaga

SEQ ID NO: 2518229 - RNA, 19 nt, Homo sapiens
  misc_RNA (1)...(19): siRNA sense strand
cuguacaagaagucaggaa

SEQ ID NO: 2518230 - RNA, 19 nt, Homo sapiens
  misc_RNA (1)...(19): siRNA sense strand
aguuaugugucuuaaguca

SEQ ID NO: 2518231 - RNA, 19 nt, Homo sapiens
  misc_RNA (1)...(19): siRNA sense strand
ggcaagaaagcuaagcauu

SEQ ID NO: 2518232 - RNA, 19 nt, Homo sapiens
  misc_RNA (1)...(19): siRNA sense strand
gacaguagugauaggaaaa

SEQ ID NO: 2518233 - RNA, 19 nt, Homo sapiens
  misc_RNA (1)...(19): siRNA sense strand
agacaaagugcuaaaugga

SEQ ID NO: 2518234 - RNA, 19 nt, Homo sapiens
  misc_RNA (1)...(19): siRNA sense strand
aauagaagaaagaugccaa

SEQ ID NO: 2518235 - RNA, 19 nt, Homo sapiens
  misc_RNA (1)...(19): siRNA sense strand
ugucuuaagucacgagcga

SEQ ID NO: 2518236 - RNA, 19 nt, Homo sapiens
  misc_RNA (1)...(19): siRNA sense strand
aguugaagcagucaguuaa

SEQ ID NO: 2518237 - RNA, 19 nt, Homo sapiens
  misc_RNA (1)...(19): siRNA sense strand
uaagcaagguggcggcaga

SEQ ID NO: 2518238 - RNA, 19 nt, Homo sapiens
  misc_RNA (1)...(19): siRNA sense strand
cagaaguauuugacaccga

SEQ ID NO: 2518239 - RNA, 19 nt, Homo sapiens
  misc_RNA (1)...(19): siRNA sense strand
cuccagacaaagugcuaaa

SEQ ID NO: 2518240 - RNA, 19 nt, Homo sapiens
  misc_RNA (1)...(19): siRNA sense strand
ugcuaaauggacagaggaa

SEQ ID NO: 2518241 - RNA, 19 nt, Homo sapiens
  misc_RNA (1)...(19): siRNA sense strand
auagaagaaagaugccaaa

SEQ ID NO: 2518242 - RNA, 19 nt, Homo sapiens
  misc_RNA (1)...(19): siRNA sense strand
gauaagaugugaaggugca

SEQ ID NO: 2518243 - RNA, 19 nt, Homo sapiens
  misc_RNA (1)...(19): siRNA sense strand
uuguuuggccacugggaaa

SEQ ID NO: 2518244 - RNA, 19 nt, Homo sapiens
  misc_RNA (1)...(19): siRNA sense strand
auaugaaugcagugcggaa

SEQ ID NO: 2518245 - RNA, 19 nt, Homo sapiens
  misc_RNA (1)...(19): siRNA sense strand
agaauguagaugugacaga

SEQ ID NO: 2518246 - RNA, 19 nt, Homo sapiens
  misc_RNA (1)...(19): siRNA sense strand
ccugauaagaugugaaggu

SEQ ID NO: 2518247 - RNA, 19 nt, Homo sapiens
  misc_RNA (1)...(19): siRNA sense strand
acuacagccuccagauaca

SEQ ID NO: 2518248 - RNA, 19 nt, Homo sapiens
  misc_RNA (1)...(19): siRNA sense strand
acagaauguagaugugaca

SEQ ID NO: 2518249 - RNA, 19 nt, Homo sapiens
  misc_RNA (1)...(19): siRNA sense strand
guggacaacaugaugguca

SEQ ID NO: 2518250 - RNA, 19 nt, Homo sapiens
  misc_RNA (1)...(19): siRNA sense strand
uugaaugguacaaaggaga

SEQ ID NO: 2518251 - RNA, 19 nt, Homo sapiens
  misc_RNA (1)...(19): siRNA sense strand
cugagaaacacaugggcua

SEQ ID NO: 2518252 - RNA, 19 nt, Homo sapiens
  misc_RNA (1)...(19): siRNA sense strand
gggaaagagaggugugcca

SEQ ID NO: 2518253 - RNA, 19 nt, Homo sapiens
  misc_RNA (1)...(19): siRNA sense strand
cuuccaagccucuggccaa

SEQ ID NO: 2518254 - RNA, 19 nt, Homo sapiens
  misc_RNA (1)...(19): siRNA sense strand
ccaguaaccucaagaccca

SEQ ID NO: 2518255 - RNA, 19 nt, Homo sapiens
  misc_RNA (1)...(19): siRNA sense strand
cagacaugguggaugcuca

SEQ ID NO: 2518256 - RNA, 19 nt, Homo sapiens
  misc_RNA (1)...(19): siRNA sense strand
aagaggacgccuugagcau

SEQ ID NO: 2518257 - RNA, 19 nt, Homo sapiens
  misc_RNA (1)...(19): siRNA sense strand
aagcaagagcagugagccu

SEQ ID NO: 2518258 - RNA, 19 nt, Homo sapiens
  misc_RNA (1)...(19): siRNA sense strand
acauauguggcaagagcuu

SEQ ID NO: 2518259 - RNA, 19 nt, Homo sapiens
  misc_RNA (1)...(19): siRNA sense strand
cgguggcaucugagaaaca

SEQ ID NO: 2518260 - RNA, 19 nt, Homo sapiens
  misc_RNA (1)...(19): siRNA sense strand
acccacagaacaaggacaa

SEQ ID NO: 2518261 - RNA, 19 nt, Homo sapiens
  misc_RNA (1)...(19): siRNA sense strand
gguaaauguucaaggucua

SEQ ID NO: 2518262 - RNA, 19 nt, Homo sapiens
  misc_RNA (1)...(19): siRNA sense strand
ggaaagaccuauuuggcaa

SEQ ID NO: 2518263 - RNA, 19 nt, Homo sapiens
  misc_RNA (1)...(19): siRNA sense strand
caguggagaugaagggaaa

SEQ ID NO: 2518264 - RNA, 19 nt, Homo sapiens
  misc_RNA (1)...(19): siRNA sense strand
gcacagaagcugaggcaga

SEQ ID NO: 2518265 - RNA, 19 nt, Homo sapiens
  misc_RNA (1)...(19): siRNA sense strand
aagcaaagagucugagaaa

SEQ ID NO: 2518266 - RNA, 19 nt, Homo sapiens
  misc_RNA (1)...(19): siRNA sense strand
agucaaaugcagggagaaa

SEQ ID NO: 2518267 - RNA, 19 nt, Homo sapiens
  misc_RNA (1)...(19): siRNA sense strand
aggagaagucagagcuuua

SEQ ID NO: 2518268 - RNA, 19 nt, Homo sapiens
  misc_RNA (1)...(19): siRNA sense strand
ucaaagaagagaaggauca

SEQ ID NO: 2518269 - RNA, 19 nt, Homo sapiens
  misc_RNA (1)...(19): siRNA sense strand
gugaaaucuuccucaguaa

SEQ ID NO: 2518270 - RNA, 19 nt, Homo sapiens
  misc_RNA (1)...(19): siRNA sense strand
aauccaugcuugagaaauu

SEQ ID NO: 2518271 - RNA, 19 nt, Homo sapiens
  misc_RNA (1)...(19): siRNA sense strand
ucaaagggguagaagaaaa

SEQ ID NO: 2518272 - RNA, 19 nt, Homo sapiens
  misc_RNA (1)...(19): siRNA sense strand
aggagaaagaagacagcaa

SEQ ID NO: 2518273 - RNA, 19 nt, Homo sapiens
  misc_RNA (1)...(19): siRNA sense strand
cagacaaggaaaaggaaaa

SEQ ID NO: 2518274 - RNA, 19 nt, Homo sapiens
  misc_RNA (1)...(19): siRNA sense strand
ugggugaacucuagaggaa

SEQ ID NO: 2518275 - RNA, 19 nt, Homo sapiens
  misc_RNA (1)...(19): siRNA sense strand
ccucaaagggguagaagaa

SEQ ID NO: 2518276 - RNA, 19 nt, Homo sapiens
  misc_RNA (1)...(19): siRNA sense strand
ccaaccaagaagagggcaa

SEQ ID NO: 2518277 - RNA, 19 nt, Homo sapiens
  misc_RNA (1)...(19): siRNA sense strand
caguauuggcagugguaau

SEQ ID NO: 2518278 - RNA, 19 nt, Homo sapiens
  misc_RNA (1)...(19): siRNA sense strand
ccaccaaagaaacgacaaa

SEQ ID NO: 2518279 - RNA, 19 nt, Homo sapiens
  misc_RNA (1)...(19): siRNA sense strand
agacauugcagauggagua

SEQ ID NO: 2518280 - RNA, 19 nt, Homo sapiens
  misc_RNA (1)...(19): siRNA sense strand
ugaaaagagcuuagggaau

SEQ ID NO: 2518281 - RNA, 19 nt, Homo sapiens
  misc_RNA (1)...(19): siRNA sense strand
gugaauuuggagagaagaa

SEQ ID NO: 2518282 - RNA, 19 nt, Homo sapiens
  misc_RNA (1)...(19): siRNA sense strand
ccauaaugcuggugacugu

SEQ ID NO: 2518283 - RNA, 19 nt, Homo sapiens
  misc_RNA (1)...(19): siRNA sense strand
ccacaagucaaguaaggaa

SEQ ID NO: 2518284 - RNA, 19 nt, Homo sapiens
  misc_RNA (1)...(19): siRNA sense strand
gaacaaugaaucagggagu

SEQ ID NO: 2518285 - RNA, 19 nt, Homo sapiens
  misc_RNA (1)...(19): siRNA sense strand
ggguaaauguucaaggucu

SEQ ID NO: 2518286 - RNA, 19 nt, Homo sapiens
  misc_RNA (1)...(19): siRNA sense strand
gaagaaaagaacagggaca

SEQ ID NO: 2518287 - RNA, 19 nt, Homo sapiens
  misc_RNA (1)...(19): siRNA sense strand
gccuauaaccauggagaaa

SEQ ID NO: 2518288 - RNA, 19 nt, Homo sapiens
  misc_RNA (1)...(19): siRNA sense strand
aggaaauggugcuguccaa

SEQ ID NO: 2518289 - RNA, 19 nt, Homo sapiens
  misc_RNA (1)...(19): siRNA sense strand
cagaaauacacuacccaaa

SEQ ID NO: 2518290 - RNA, 19 nt, Homo sapiens
  misc_RNA (1)...(19): siRNA sense strand
uggugauauccuugggaaa

SEQ ID NO: 2518291 - RNA, 19 nt, Homo sapiens
  misc_RNA (1)...(19): siRNA sense strand
ggaaagaccucgugccauc

SEQ ID NO: 2518292 - RNA, 19 nt, Homo sapiens
  misc_RNA (1)...(19): siRNA sense strand
guggauaccuuguuggaga

SEQ ID NO: 2518293 - RNA, 19 nt, Homo sapiens
  misc_RNA (1)...(19): siRNA sense strand
aagcugaggcagagauaau

SEQ ID NO: 2518294 - RNA, 19 nt, Homo sapiens
  misc_RNA (1)...(19): siRNA sense strand
cugcugaagaaauaagaaa

SEQ ID NO: 2518295 - RNA, 19 nt, Homo sapiens
  misc_RNA (1)...(19): siRNA sense strand
acucaaaacacccgggaaa

SEQ ID NO: 2518296 - RNA, 19 nt, Homo sapiens
  misc_RNA (1)...(19): siRNA sense strand
ggaagaaguucauggcucu

SEQ ID NO: 2518297 - RNA, 19 nt, Homo sapiens
  misc_RNA (1)...(19): siRNA sense strand
caacagaaguuaauggaag

SEQ ID NO: 2518298 - RNA, 19 nt, Homo sapiens
  misc_RNA (1)...(19): siRNA sense strand
aggaaaagccaaggagaaa

SEQ ID NO: 2518299 - RNA, 19 nt, Homo sapiens
  misc_RNA (1)...(19): siRNA sense strand
cuuuaacagcauugacaaa

SEQ ID NO: 2518300 - RNA, 19 nt, Homo sapiens
  misc_RNA (1)...(19): siRNA sense strand
cuucagguguaaaugguaa

SEQ ID NO: 2518301 - RNA, 19 nt, Homo sapiens
  misc_RNA (1)...(19): siRNA sense strand
gcacaaagcagugggcaga

SEQ ID NO: 2518302 - RNA, 19 nt, Homo sapiens
  misc_RNA (1)...(19): siRNA sense strand
ccugaaacaagaagaauga

SEQ ID NO: 2518303 - RNA, 19 nt, Homo sapiens
  misc_RNA (1)...(19): siRNA sense strand
ucauacagaaccagugaaa

SEQ ID NO: 2518304 - RNA, 19 nt, Homo sapiens
  misc_RNA (1)...(19): siRNA sense strand
gagaaagaagacagcaaga

SEQ ID NO: 2518305 - RNA, 19 nt, Homo sapiens
  misc_RNA (1)...(19): siRNA sense strand
caugacagauggaggacuu

SEQ ID NO: 2518306 - RNA, 19 nt, Homo sapiens
  misc_RNA (1)...(19): siRNA sense strand
ugaugcaacuggacauaaa

SEQ ID NO: 2518307 - RNA, 19 nt, Homo sapiens
  misc_RNA (1)...(19): siRNA sense strand
ccuaagggcagcaagacaa

SEQ ID NO: 2518308 - RNA, 19 nt, Homo sapiens
  misc_RNA (1)...(19): siRNA sense strand
agauaauucugcagcugaa

SEQ ID NO: 2518309 - RNA, 19 nt, Homo sapiens
  misc_RNA (1)...(19): siRNA sense strand
accagaagauguuggguau

SEQ ID NO: 2518310 - RNA, 19 nt, Homo sapiens
  misc_RNA (1)...(19): siRNA sense strand
gauugacaugagugagaaa

SEQ ID NO: 2518311 - RNA, 19 nt, Homo sapiens
  misc_RNA (1)...(19): siRNA sense strand
ggucgauguggguggauau

SEQ ID NO: 2518312 - RNA, 19 nt, Homo sapiens
  misc_RNA (1)...(19): siRNA sense strand
gggcuauggucgagcaaag

SEQ ID NO: 2518313 - RNA, 19 nt, Homo sapiens
  misc_RNA (1)...(19): siRNA sense strand
gcaacaacaccaucaacaa

SEQ ID NO: 2518314 - RNA, 19 nt, Homo sapiens
  misc_RNA (1)...(19): siRNA sense strand
cagucaaagaagagaagga

SEQ ID NO: 2518315 - RNA, 19 nt, Homo sapiens
  misc_RNA (1)...(19): siRNA sense strand
ucauauaguaagacugcua

SEQ ID NO: 2518316 - RNA, 19 nt, Homo sapiens
  misc_RNA (1)...(19): siRNA sense strand
gaagucaaaugcagggaga

SEQ ID NO: 2518317 - RNA, 19 nt, Homo sapiens
  misc_RNA (1)...(19): siRNA sense strand
aggucuaucugcugaagaa

SEQ ID NO: 2518318 - RNA, 19 nt, Homo sapiens
  misc_RNA (1)...(19): siRNA sense strand
cgagaaggcagggcagaaa

SEQ ID NO: 2518319 - RNA, 19 nt, Homo sapiens
  misc_RNA (1)...(19): siRNA sense strand
aggaaaagcuccccuaaaa

SEQ ID NO: 2518320 - RNA, 19 nt, Homo sapiens
  misc_RNA (1)...(19): siRNA sense strand
uugaaaugcugaaggcuca

SEQ ID NO: 2518321 - RNA, 19 nt, Homo sapiens
  misc_RNA (1)...(19): siRNA sense strand
cuacuguauaggagacuua

SEQ ID NO: 2518322 - RNA, 19 nt, Homo sapiens
  misc_RNA (1)...(19): siRNA sense strand
gauagaaauugaaaggaac

SEQ ID NO: 2518323 - RNA, 19 nt, Homo sapiens
  misc_RNA (1)...(19): siRNA sense strand
cauccagauuauugcaaau

SEQ ID NO: 2518324 - RNA, 19 nt, Homo sapiens
  misc_RNA (1)...(19): siRNA sense strand
ccagauuauugcaaaugaa

SEQ ID NO: 2518325 - RNA, 19 nt, Homo sapiens
  misc_RNA (1)...(19): siRNA sense strand
uggugaaggcccugaaaca

SEQ ID NO: 2518326 - RNA, 19 nt, Homo sapiens
  misc_RNA (1)...(19): siRNA sense strand
cagauugacaugagugaga

SEQ ID NO: 2518327 - RNA, 19 nt, Homo sapiens
  misc_RNA (1)...(19): siRNA sense strand
gaguaugguucauggaucu

SEQ ID NO: 2518328 - RNA, 19 nt, Homo sapiens
  misc_RNA (1)...(19): siRNA sense strand
aaggaaaagccaaggagaa

SEQ ID NO: 2518329 - RNA, 19 nt, Homo sapiens
  misc_RNA (1)...(19): siRNA sense strand
caaguaaggaauugcaaca

SEQ ID NO: 2518330 - RNA, 19 nt, Homo sapiens
  misc_RNA (1)...(19): siRNA sense strand
ggauaaaccaagugccaau

SEQ ID NO: 2518331 - RNA, 19 nt, Homo sapiens
  misc_RNA (1)...(19): siRNA sense strand
caggauacuccaaggauaa

SEQ ID NO: 2518332 - RNA, 19 nt, Homo sapiens
  misc_RNA (1)...(19): siRNA sense strand
gggaagaacaguaugccaa

SEQ ID NO: 2518333 - RNA, 19 nt, Homo sapiens
  misc_RNA (1)...(19): siRNA sense strand
ccuaauuuaccuagcgaua

SEQ ID NO: 2518334 - RNA, 19 nt, Homo sapiens
  misc_RNA (1)...(19): siRNA sense strand
ucucaguggcagaaggaaa

SEQ ID NO: 2518335 - RNA, 19 nt, Homo sapiens
  misc_RNA (1)...(19): siRNA sense strand
agaaacagguaguagccaa

SEQ ID NO: 2518336 - RNA, 19 nt, Homo sapiens
  misc_RNA (1)...(19): siRNA sense strand
gggaaauuucauaccauaa

SEQ ID NO: 2518337 - RNA, 19 nt, Homo sapiens
  misc_RNA (1)...(19): siRNA sense strand
aguagaauugccagggaaa

SEQ ID NO: 2518338 - RNA, 19 nt, Homo sapiens
  misc_RNA (1)...(19): siRNA sense strand
augaagaaaggcugauaaa

SEQ ID NO: 2518339 - RNA, 19 nt, Homo sapiens
  misc_RNA (1)...(19): siRNA sense strand
cuuuagaauuugcagacaa

SEQ ID NO: 2518340 - RNA, 19 nt, Homo sapiens
  misc_RNA (1)...(19): siRNA sense strand
ggcuacaacugaagauaau

SEQ ID NO: 2518341 - RNA, 19 nt, Homo sapiens
  misc_RNA (1)...(19): siRNA sense strand
gaauaaugcaccaggaaac

SEQ ID NO: 2518342 - RNA, 19 nt, Homo sapiens
  misc_RNA (1)...(19): siRNA sense strand
ucucaagcagucagaguaa

SEQ ID NO: 2518343 - RNA, 19 nt, Homo sapiens
  misc_RNA (1)...(19): siRNA sense strand
agaauaaugcaccaggaaa

SEQ ID NO: 2518344 - RNA, 19 nt, Homo sapiens
  misc_RNA (1)...(19): siRNA sense strand
caacaaaacagaagcugaa

SEQ ID NO: 2518345 - RNA, 19 nt, Homo sapiens
  misc_RNA (1)...(19): siRNA sense strand
aacgaaagcugcagcggaa

SEQ ID NO: 2518346 - RNA, 19 nt, Homo sapiens
  misc_RNA (1)...(19): siRNA sense strand
gcuguaacuccuaugauaa

SEQ ID NO: 2518347 - RNA, 19 nt, Homo sapiens
  misc_RNA (1)...(19): siRNA sense strand
cuuuaagacugaaccacaa

SEQ ID NO: 2518348 - RNA, 19 nt, Homo sapiens
  misc_RNA (1)...(19): siRNA sense strand
ccaaagagauggagcgacc

SEQ ID NO: 2518349 - RNA, 19 nt, Homo sapiens
  misc_RNA (1)...(19): siRNA sense strand
gaugaaaacaaaugagaca

SEQ ID NO: 2518350 - RNA, 19 nt, Homo sapiens
  misc_RNA (1)...(19): siRNA sense strand
ccaaaugagcaccaaggaa

SEQ ID NO: 2518351 - RNA, 19 nt, Homo sapiens
  misc_RNA (1)...(19): siRNA sense strand
aagauaggacggaaauuaa

SEQ ID NO: 2518352 - RNA, 19 nt, Homo sapiens
  misc_RNA (1)...(19): siRNA sense strand
gggacaaaugcguugaaga

SEQ ID NO: 2518353 - RNA, 19 nt, Homo sapiens
  misc_RNA (1)...(19): siRNA sense strand
aguuccaccuccagaauaa

SEQ ID NO: 2518354 - RNA, 19 nt, Homo sapiens
  misc_RNA (1)...(19): siRNA sense strand
gauuauggguccaaaggga

SEQ ID NO: 2518355 - RNA, 19 nt, Homo sapiens
  misc_RNA (1)...(19): siRNA sense strand
aagaaagggaugccacaaa

SEQ ID NO: 2518356 - RNA, 19 nt, Homo sapiens
  misc_RNA (1)...(19): siRNA sense strand
aaaccagagaggagucaua

SEQ ID NO: 2518357 - RNA, 19 nt, Homo sapiens
  misc_RNA (1)...(19): siRNA sense strand
gcucagugucccauggcua

SEQ ID NO: 2518358 - RNA, 19 nt, Homo sapiens
  misc_RNA (1)...(19): siRNA sense strand
agguaaggcucuccaaaga

SEQ ID NO: 2518359 - RNA, 19 nt, Homo sapiens
  misc_RNA (1)...(19): siRNA sense strand
cccagaacguggagaggga

SEQ ID NO: 2518360 - RNA, 19 nt, Homo sapiens
  misc_RNA (1)...(19): siRNA sense strand
gauaaaucaucuaagccau

SEQ ID NO: 2518361 - RNA, 19 nt, Homo sapiens
  misc_RNA (1)...(19): siRNA sense strand
caugggaucuugaggacau

SEQ ID NO: 2518362 - RNA, 19 nt, Homo sapiens
  misc_RNA (1)...(19): siRNA sense strand
gaucuugaggacauggaaa

SEQ ID NO: 2518363 - RNA, 19 nt, Homo sapiens
  misc_RNA (1)...(19): siRNA sense strand
ccgaagauaggacggaaau

SEQ ID NO: 2518364 - RNA, 19 nt, Homo sapiens
  misc_RNA (1)...(19): siRNA sense strand
cccagauaguaaagaugaa

SEQ ID NO: 2518365 - RNA, 19 nt, Homo sapiens
  misc_RNA (1)...(19): siRNA sense strand
cugcugaagaaguagaauu

SEQ ID NO: 2518366 - RNA, 19 nt, Homo sapiens
  misc_RNA (1)...(19): siRNA sense strand
aaguagaauugccagggaa

SEQ ID NO: 2518367 - RNA, 19 nt, Homo sapiens
  misc_RNA (1)...(19): siRNA sense strand
gcuccaaaccuguuaagau

SEQ ID NO: 2518368 - RNA, 19 nt, Homo sapiens
  misc_RNA (1)...(19): siRNA sense strand
gaaacagguaguagccaau

SEQ ID NO: 2518369 - RNA, 19 nt, Homo sapiens
  misc_RNA (1)...(19): siRNA sense strand
gugcaaguguggauaaacu

SEQ ID NO: 2518370 - RNA, 19 nt, Homo sapiens
  misc_RNA (1)...(19): siRNA sense strand
gaagaaacgcaucuggaca

SEQ ID NO: 2518371 - RNA, 19 nt, Homo sapiens
  misc_RNA (1)...(19): siRNA sense strand
ccuccaauauccagagacu

SEQ ID NO: 2518372 - RNA, 19 nt, Homo sapiens
  misc_RNA (1)...(19): siRNA sense strand
ccuaccagcuguaugagaa

SEQ ID NO: 2518373 - RNA, 19 nt, Homo sapiens
  misc_RNA (1)...(19): siRNA sense strand
cuaccagcuguaugagaaa

SEQ ID NO: 2518374 - RNA, 19 nt, Homo sapiens
  misc_RNA (1)...(19): siRNA sense strand
cagaauaaugcaccaggaa

SEQ ID NO: 2518375 - RNA, 19 nt, Homo sapiens
  misc_RNA (1)...(19): siRNA sense strand
gagaauaccagcacagcca

SEQ ID NO: 2518376 - RNA, 19 nt, Homo sapiens
  misc_RNA (1)...(19): siRNA sense strand
gguacaagcagcaaccaau

SEQ ID NO: 2518377 - RNA, 19 nt, Homo sapiens
  misc_RNA (1)...(19): siRNA sense strand
cgaaguaggagaaggaccu

SEQ ID NO: 2518378 - RNA, 19 nt, Homo sapiens
  misc_RNA (1)...(19): siRNA sense strand
caaugagagugaggaggaa

SEQ ID NO: 2518379 - RNA, 19 nt, Homo sapiens
  misc_RNA (1)...(19): siRNA sense strand
cagagaaacacuccagaga

SEQ ID NO: 2518380 - RNA, 19 nt, Homo sapiens
  misc_RNA (1)...(19): siRNA sense strand
agucauugguacagucuca

SEQ ID NO: 2518381 - RNA, 19 nt, Homo sapiens
  misc_RNA (1)...(19): siRNA sense strand
acaaaugcguugaagaaag

SEQ ID NO: 2518382 - RNA, 19 nt, Homo sapiens
  misc_RNA (1)...(19): siRNA sense strand
uggaguuccugaugagaca

SEQ ID NO: 2518383 - RNA, 19 nt, Homo sapiens
  misc_RNA (1)...(19): siRNA sense strand
ugacauuggaagaggccca

SEQ ID NO: 2518384 - RNA, 19 nt, Homo sapiens
  misc_RNA (1)...(19): siRNA sense strand
gagagugagccuucagaga

SEQ ID NO: 2518385 - RNA, 19 nt, Homo sapiens
  misc_RNA (1)...(19): siRNA sense strand
uggcuacaacugaagauaa

SEQ ID NO: 2518386 - RNA, 19 nt, Homo sapiens
  misc_RNA (1)...(19): siRNA sense strand
cugcaguugcucuagauaa

SEQ ID NO: 2518387 - RNA, 19 nt, Homo sapiens
  misc_RNA (1)...(19): siRNA sense strand
gaagcaagccauaggcagu

SEQ ID NO: 2518388 - RNA, 19 nt, Homo sapiens
  misc_RNA (1)...(19): siRNA sense strand
ggagcuggccaguuagauu

SEQ ID NO: 2518389 - RNA, 19 nt, Homo sapiens
  misc_RNA (1)...(19): siRNA sense strand
auauaucgaaguaggagaa

SEQ ID NO: 2518390 - RNA, 19 nt, Homo sapiens
  misc_RNA (1)...(19): siRNA sense strand
cugugguacuauagaguua

SEQ ID NO: 2518391 - RNA, 19 nt, Homo sapiens
  misc_RNA (1)...(19): siRNA sense strand
gauuaauacuagagaugca

SEQ ID NO: 2518392 - RNA, 19 nt, Homo sapiens
  misc_RNA (1)...(19): siRNA sense strand
gagaaaaugagaaggggua

SEQ ID NO: 2518393 - RNA, 19 nt, Homo sapiens
  misc_RNA (1)...(19): siRNA sense strand
agaaaaugguguuggguca

SEQ ID NO: 2518394 - RNA, 19 nt, Homo sapiens
  misc_RNA (1)...(19): siRNA sense strand
ggagauuagaggaaaccaa

SEQ ID NO: 2518395 - RNA, 19 nt, Homo sapiens
  misc_RNA (1)...(19): siRNA sense strand
uggacaaauuacacaacaa

SEQ ID NO: 2518396 - RNA, 19 nt, Homo sapiens
  misc_RNA (1)...(19): siRNA sense strand
uauaagacugggaggaauu

SEQ ID NO: 2518397 - RNA, 19 nt, Homo sapiens
  misc_RNA (1)...(19): siRNA sense strand
cugauuacuuugagacaca

SEQ ID NO: 2518398 - RNA, 19 nt, Homo sapiens
  misc_RNA (1)...(19): siRNA sense strand
gcuaaaggaagaagaagca

SEQ ID NO: 2518399 - RNA, 19 nt, Homo sapiens
  misc_RNA (1)...(19): siRNA sense strand
cagaugaagaagaacgcua

SEQ ID NO: 2518400 - RNA, 19 nt, Homo sapiens
  misc_RNA (1)...(19): siRNA sense strand
ggaaauacacggcagggau

SEQ ID NO: 2518401 - RNA, 19 nt, Homo sapiens
  misc_RNA (1)...(19): siRNA sense strand
uguuaaagacguugaagca

SEQ ID NO: 2518402 - RNA, 19 nt, Homo sapiens
  misc_RNA (1)...(19): siRNA sense strand
cuuaaguacaucuggucaa

SEQ ID NO: 2518403 - RNA, 19 nt, Homo sapiens
  misc_RNA (1)...(19): siRNA sense strand
gaguggagugugccagaaa

SEQ ID NO: 2518404 - RNA, 19 nt, Homo sapiens
  misc_RNA (1)...(19): siRNA sense strand
ggaugauggcacaauacaa

SEQ ID NO: 2518405 - RNA, 19 nt, Homo sapiens
  misc_RNA (1)...(19): siRNA sense strand
gcuauuuauuuguggaaag

SEQ ID NO: 2518406 - RNA, 19 nt, Homo sapiens
  misc_RNA (1)...(19): siRNA sense strand
ccauagacaggguugagua

SEQ ID NO: 2518407 - RNA, 19 nt, Homo sapiens
  misc_RNA (1)...(19): siRNA sense strand
uggcccagaugaagaagaa

SEQ ID NO: 2518408 - RNA, 19 nt, Homo sapiens
  misc_RNA (1)...(19): siRNA sense strand
cauucugagugaugaugaa

SEQ ID NO: 2518409 - RNA, 19 nt, Homo sapiens
  misc_RNA (1)...(19): siRNA sense strand
cugaugaguugcuggggaa

SEQ ID NO: 2518410 - RNA, 19 nt, Homo sapiens
  misc_RNA (1)...(19): siRNA sense strand
ugguggaauuacuggcauu

SEQ ID NO: 2518411 - RNA, 19 nt, Homo sapiens
  misc_RNA (1)...(19): siRNA sense strand
cauacauggcauuucauaa

SEQ ID NO: 2518412 - RNA, 19 nt, Homo sapiens
  misc_RNA (1)...(19): siRNA sense strand
agaguaugaaggaacauua

SEQ ID NO: 2518413 - RNA, 19 nt, Homo sapiens
  misc_RNA (1)...(19): siRNA sense strand
ggcauaugauccagaaagu

SEQ ID NO: 2518414 - RNA, 19 nt, Homo sapiens
  misc_RNA (1)...(19): siRNA sense strand
acagacaccugcaggacau

SEQ ID NO: 2518415 - RNA, 19 nt, Homo sapiens
  misc_RNA (1)...(19): siRNA sense strand
ccuuacaucuggaagcaca

SEQ ID NO: 2518416 - RNA, 19 nt, Homo sapiens
  misc_RNA (1)...(19): siRNA sense strand
gauuacugcuauggaacaa

SEQ ID NO: 2518417 - RNA, 19 nt, Homo sapiens
  misc_RNA (1)...(19): siRNA sense strand
cccaaaagguguuccaaau

SEQ ID NO: 2518418 - RNA, 19 nt, Homo sapiens
  misc_RNA (1)...(19): siRNA sense strand
aaacuugagaguaagguau

SEQ ID NO: 2518419 - RNA, 19 nt, Homo sapiens
  misc_RNA (1)...(19): siRNA sense strand
aguuagaguaugaaggaac

SEQ ID NO: 2518420 - RNA, 19 nt, Homo sapiens
  misc_RNA (1)...(19): siRNA sense strand
uuauaagacugggaggaau

SEQ ID NO: 2518421 - RNA, 19 nt, Homo sapiens
  misc_RNA (1)...(19): siRNA sense strand
ccaaaagguguuccaaaua

SEQ ID NO: 2518422 - RNA, 19 nt, Homo sapiens
  misc_RNA (1)...(19): siRNA sense strand
cauagacaggguugaguau

SEQ ID NO: 2518423 - RNA, 19 nt, Homo sapiens
  misc_RNA (1)...(19): siRNA sense strand
uauuaaaggcuaaaggaag

SEQ ID NO: 2518424 - RNA, 19 nt, Homo sapiens
  misc_RNA (1)...(19): siRNA sense strand
gcacaauacaaauacagga

SEQ ID NO: 2518425 - RNA, 19 nt, Homo sapiens
  misc_RNA (1)...(19): siRNA sense strand
ggauuacugcuauggaaca

SEQ ID NO: 2518426 - RNA, 19 nt, Homo sapiens
  misc_RNA (1)...(19): siRNA sense strand
aaguacaucuggucaaaca

SEQ ID NO: 2518427 - RNA, 19 nt, Homo sapiens
  misc_RNA (1)...(19): siRNA sense strand
acuuugagacacaagacaa

SEQ ID NO: 2518428 - RNA, 19 nt, Homo sapiens
  misc_RNA (1)...(19): siRNA sense strand
aaaggagauuagaggaaac

SEQ ID NO: 2518429 - RNA, 19 nt, Homo sapiens
  misc_RNA (1)...(19): siRNA sense strand
cagacauggaagucaauga

SEQ ID NO: 2518430 - RNA, 19 nt, Homo sapiens
  misc_RNA (1)...(19): siRNA sense strand
agaugaagaagaacgcuau

SEQ ID NO: 2518431 - RNA, 19 nt, Homo sapiens
  misc_RNA (1)...(19): siRNA sense strand
guacuauagaguuagacau

SEQ ID NO: 2518432 - RNA, 19 nt, Homo sapiens
  misc_RNA (1)...(19): siRNA sense strand
gaugaugcacuaaaggaga

SEQ ID NO: 2518433 - RNA, 19 nt, Homo sapiens
  misc_RNA (1)...(19): siRNA sense strand
ggucaaacauauuuccugu

SEQ ID NO: 2518434 - RNA, 19 nt, Homo sapiens
  misc_RNA (1)...(19): siRNA sense strand
gguacuauagaguuagaca

SEQ ID NO: 2518435 - RNA, 19 nt, Homo sapiens
  misc_RNA (1)...(19): siRNA sense strand
gaguaugaaggaacauuau

SEQ ID NO: 2518436 - RNA, 19 nt, Homo sapiens
  misc_RNA (1)...(19): siRNA sense strand
caaaagaugaugcacuaaa

SEQ ID NO: 2518437 - RNA, 19 nt, Homo sapiens
  misc_RNA (1)...(19): siRNA sense strand
agguauauuuggggagaau

SEQ ID NO: 2518438 - RNA, 19 nt, Homo sapiens
  misc_RNA (1)...(19): siRNA sense strand
caaauuucauaguguggga

SEQ ID NO: 2518439 - RNA, 19 nt, Homo sapiens
  misc_RNA (1)...(19): siRNA sense strand
uuuauaagacugggaggaa

SEQ ID NO: 2518440 - RNA, 19 nt, Homo sapiens
  misc_RNA (1)...(19): siRNA sense strand
aaggcuaaaggaagaagaa

SEQ ID NO: 2518441 - RNA, 19 nt, Homo sapiens
  misc_RNA (1)...(19): siRNA sense strand
aggaagaagaagcaccuuu

SEQ ID NO: 2518442 - RNA, 19 nt, Homo sapiens
  misc_RNA (1)...(19): siRNA sense strand
aagcugcauuuauggacaa

SEQ ID NO: 2518443 - RNA, 19 nt, Homo sapiens
  misc_RNA (1)...(19): siRNA sense strand
guuaaagacguugaagcaa

SEQ ID NO: 2518444 - RNA, 19 nt, Homo sapiens
  misc_RNA (1)...(19): siRNA sense strand
ggguacaggaauagcaaga

SEQ ID NO: 2518445 - RNA, 19 nt, Homo sapiens
  misc_RNA (1)...(19): siRNA sense strand
gcaucuuguccauggcaaa

SEQ ID NO: 2518446 - RNA, 19 nt, Homo sapiens
  misc_RNA (1)...(19): siRNA sense strand
cugagugguuggauggcaa

SEQ ID NO: 2518447 - RNA, 19 nt, Homo sapiens
  misc_RNA (1)...(19): siRNA sense strand
gcauacagguucuggcauc

SEQ ID NO: 2518448 - RNA, 19 nt, Homo sapiens
  misc_RNA (1)...(19): siRNA sense strand
ccgaaagcauacagguucu

SEQ ID NO: 2518449 - RNA, 19 nt, Homo sapiens
  misc_RNA (1)...(19): siRNA sense strand
cugccaagacugagugguu

SEQ ID NO: 2518450 - RNA, 19 nt, Homo sapiens
  misc_RNA (1)...(19): siRNA sense strand
aggaauagcaagaccagca

SEQ ID NO: 2518451 - RNA, 19 nt, Homo sapiens
  misc_RNA (1)...(19): siRNA sense strand
acgugugaauauuguggaa

SEQ ID NO: 2518452 - RNA, 19 nt, Homo sapiens
  misc_RNA (1)...(19): siRNA sense strand
ggauuucguuauaaggguu

SEQ ID NO: 2518453 - RNA, 19 nt, Homo sapiens
  misc_RNA (1)...(19): siRNA sense strand
acaaaggagauguggaaaa

SEQ ID NO: 2518454 - RNA, 19 nt, Homo sapiens
  misc_RNA (1)...(19): siRNA sense strand
gagcucagcaggagggcaa

SEQ ID NO: 2518455 - RNA, 19 nt, Homo sapiens
  misc_RNA (1)...(19): siRNA sense strand
gagaaaugguagaagagcu

SEQ ID NO: 2518456 - RNA, 19 nt, Homo sapiens
  misc_RNA (1)...(19): siRNA sense strand
gaacaagcacgcaggagga

SEQ ID NO: 2518457 - RNA, 19 nt, Homo sapiens
  misc_RNA (1)...(19): siRNA sense strand
ugacaggagaaaugguaga

SEQ ID NO: 2518458 - RNA, 19 nt, Homo sapiens
  misc_RNA (1)...(19): siRNA sense strand
ccgccaaacucaaggagcu

SEQ ID NO: 2518459 - RNA, 19 nt, Homo sapiens
  misc_RNA (1)...(19): siRNA sense strand
ggaacguggugacaggaga

SEQ ID NO: 2518460 - RNA, 19 nt, Homo sapiens
  misc_RNA (1)...(19): siRNA sense strand
aggguaagacuguggaagu

SEQ ID NO: 2518461 - RNA, 19 nt, Homo sapiens
  misc_RNA (1)...(19): siRNA sense strand
caaagugggaguuggacca

SEQ ID NO: 2518462 - RNA, 19 nt, Homo sapiens
  misc_RNA (1)...(19): siRNA sense strand
gaggaauguuuucggguca

SEQ ID NO: 2518463 - RNA, 19 nt, Homo sapiens
  misc_RNA (1)...(19): siRNA sense strand
uuguggaauucgugaaacu

SEQ ID NO: 2518464 - RNA, 19 nt, Homo sapiens
  misc_RNA (1)...(19): siRNA sense strand
gggagaaguucguccgcau

SEQ ID NO: 2518465 - RNA, 19 nt, Homo sapiens
  misc_RNA (1)...(19): siRNA sense strand
aguugaaggaacagaagga

SEQ ID NO: 2518466 - RNA, 19 nt, Homo sapiens
  misc_RNA (1)...(19): siRNA sense strand
agaaggagcaccuggagga

SEQ ID NO: 2518467 - RNA, 19 nt, Homo sapiens
  misc_RNA (1)...(19): siRNA sense strand
acucagaagaucuccagaa

SEQ ID NO: 2518468 - RNA, 19 nt, Homo sapiens
  misc_RNA (1)...(19): siRNA sense strand
gguagugacggcagagacu

SEQ ID NO: 2518469 - RNA, 19 nt, Homo sapiens
  misc_RNA (1)...(19): siRNA sense strand
gugcagaacacggcggaga

SEQ ID NO: 2518470 - RNA, 19 nt, Homo sapiens
  misc_RNA (1)...(19): siRNA sense strand
gccugaagaucguggcugu

SEQ ID NO: 2518471 - RNA, 19 nt, Homo sapiens
  misc_RNA (1)...(19): siRNA sense strand
cagaagaaugcaaaagaaa

SEQ ID NO: 2518472 - RNA, 19 nt, Homo sapiens
  misc_RNA (1)...(19): siRNA sense strand
ucugaagauaaucgagaaa

SEQ ID NO: 2518473 - RNA, 19 nt, Homo sapiens
  misc_RNA (1)...(19): siRNA sense strand
agcuaagacucaaugguau

SEQ ID NO: 2518474 - RNA, 19 nt, Homo sapiens
  misc_RNA (1)...(19): siRNA sense strand
uuaucaaagcaacaggaaa

SEQ ID NO: 2518475 - RNA, 19 nt, Homo sapiens
  misc_RNA (1)...(19): siRNA sense strand
acccagaccagaagauaau

SEQ ID NO: 2518476 - RNA, 19 nt, Homo sapiens
  misc_RNA (1)...(19): siRNA sense strand
agucaguagucagaagaau

SEQ ID NO: 2518477 - RNA, 19 nt, Homo sapiens
  misc_RNA (1)...(19): siRNA sense strand
aacccagaccagaagauaa

SEQ ID NO: 2518478 - RNA, 19 nt, Homo sapiens
  misc_RNA (1)...(19): siRNA sense strand
uggaagagauggaggcaga

SEQ ID NO: 2518479 - RNA, 19 nt, Homo sapiens
  misc_RNA (1)...(19): siRNA sense strand
ccugggagcuagagccuga

SEQ ID NO: 2518480 - RNA, 19 nt, Homo sapiens
  misc_RNA (1)...(19): siRNA sense strand
cagacacgaagguuggaaa

SEQ ID NO: 2518481 - RNA, 19 nt, Homo sapiens
  misc_RNA (1)...(19): siRNA sense strand
agacacgaagguuggaaau

SEQ ID NO: 2518482 - RNA, 19 nt, Homo sapiens
  misc_RNA (1)...(19): siRNA sense strand
cgaagaaggcagaaggagc

SEQ ID NO: 2518483 - RNA, 19 nt, Homo sapiens
  misc_RNA (1)...(19): siRNA sense strand
agaccaacacagacacgaa

SEQ ID NO: 2518484 - RNA, 19 nt, Homo sapiens
  misc_RNA (1)...(19): siRNA sense strand
ugggaggggaagagauuua

SEQ ID NO: 2518485 - RNA, 19 nt, Homo sapiens
  misc_RNA (1)...(19): siRNA sense strand
uggaggacacgcagcacaa

SEQ ID NO: 2518486 - RNA, 19 nt, Homo sapiens
  misc_RNA (1)...(19): siRNA sense strand
gggagacgaagaaggcaga

SEQ ID NO: 2518487 - RNA, 19 nt, Homo sapiens
  misc_RNA (1)...(19): siRNA sense strand
uugaggaacugauggagga

SEQ ID NO: 2518488 - RNA, 19 nt, Homo sapiens
  misc_RNA (1)...(19): siRNA sense strand
ugugacaaccagagggacu

SEQ ID NO: 2518489 - RNA, 19 nt, Homo sapiens
  misc_RNA (1)...(19): siRNA sense strand
uggaagagauggaggcaga

SEQ ID NO: 2518490 - RNA, 19 nt, Homo sapiens
  misc_RNA (1)...(19): siRNA sense strand
ccugggagcuagagccuga

SEQ ID NO: 2518491 - RNA, 19 nt, Homo sapiens
  misc_RNA (1)...(19): siRNA sense strand
cagacacgaagguuggaaa

SEQ ID NO: 2518492 - RNA, 19 nt, Homo sapiens
  misc_RNA (1)...(19): siRNA sense strand
agacacgaagguuggaaau

SEQ ID NO: 2518493 - RNA, 19 nt, Homo sapiens
  misc_RNA (1)...(19): siRNA sense strand
cgaagaaggcagaaggagc

SEQ ID NO: 2518494 - RNA, 19 nt, Homo sapiens
  misc_RNA (1)...(19): siRNA sense strand
agaccaacacagacacgaa

SEQ ID NO: 2518495 - RNA, 19 nt, Homo sapiens
  misc_RNA (1)...(19): siRNA sense strand
ugggaggggaagagauuua

SEQ ID NO: 2518496 - RNA, 19 nt, Homo sapiens
  misc_RNA (1)...(19): siRNA sense strand
uggaggacacgcagcacaa

SEQ ID NO: 2518497 - RNA, 19 nt, Homo sapiens
  misc_RNA (1)...(19): siRNA sense strand
gggagacgaagaaggcaga

SEQ ID NO: 2518498 - RNA, 19 nt, Homo sapiens
  misc_RNA (1)...(19): siRNA sense strand
uugaggaacugauggagga

SEQ ID NO: 2518499 - RNA, 19 nt, Homo sapiens
  misc_RNA (1)...(19): siRNA sense strand
ugugacaaccagagggacu

SEQ ID NO: 2518500 - RNA, 19 nt, Homo sapiens
  misc_RNA (1)...(19): siRNA sense strand
ggacagaagaccuggcacu

SEQ ID NO: 2518501 - RNA, 19 nt, Homo sapiens
  misc_RNA (1)...(19): siRNA sense strand
gggagagaggugaagaaca

SEQ ID NO: 2518502 - RNA, 19 nt, Homo sapiens
  misc_RNA (1)...(19): siRNA sense strand
aauccaaacccaaggccaa

SEQ ID NO: 2518503 - RNA, 19 nt, Homo sapiens
  misc_RNA (1)...(19): siRNA sense strand
gaaaugagcuggaaggcac

SEQ ID NO: 2518504 - RNA, 19 nt, Homo sapiens
  misc_RNA (1)...(19): siRNA sense strand
cagggagagaggugaagaa

SEQ ID NO: 2518505 - RNA, 19 nt, Homo sapiens
  misc_RNA (1)...(19): siRNA sense strand
gugaagaacaaguggagcu

SEQ ID NO: 2518506 - RNA, 19 nt, Homo sapiens
  misc_RNA (1)...(19): siRNA sense strand
ggccagggagagaggugaa

SEQ ID NO: 2518507 - RNA, 19 nt, Homo sapiens
  misc_RNA (1)...(19): siRNA sense strand
gagaacuggcagcgggcuu

SEQ ID NO: 2518508 - RNA, 19 nt, Homo sapiens
  misc_RNA (1)...(19): siRNA sense strand
ccacaaguguccaggaagc

SEQ ID NO: 2518509 - RNA, 19 nt, Homo sapiens
  misc_RNA (1)...(19): siRNA sense strand
uggaaggcaccgaggaacu

SEQ ID NO: 2518510 - RNA, 19 nt, Homo sapiens
  misc_RNA (1)...(19): siRNA sense strand
cugcugaggaggugcgguu

SEQ ID NO: 2518511 - RNA, 19 nt, Homo sapiens
  misc_RNA (1)...(19): siRNA sense strand
acaacugugcugagugaga

SEQ ID NO: 2518512 - RNA, 19 nt, Homo sapiens
  misc_RNA (1)...(19): siRNA sense strand
ggaaaugagcuggaaggca

SEQ ID NO: 2518513 - RNA, 19 nt, Homo sapiens
  misc_RNA (1)...(19): siRNA sense strand
gauccgagguggaguggac

SEQ ID NO: 2518514 - RNA, 19 nt, Homo sapiens
  misc_RNA (1)...(19): siRNA sense strand
gcuggaagauugugcccaa

SEQ ID NO: 2518515 - RNA, 19 nt, Homo sapiens
  misc_RNA (1)...(19): siRNA sense strand
cccaaguugaagaggguaa

SEQ ID NO: 2518516 - RNA, 19 nt, Homo sapiens
  misc_RNA (1)...(19): siRNA sense strand
ugaagaggguaaagcccaa

SEQ ID NO: 2518517 - RNA, 19 nt, Homo sapiens
  misc_RNA (1)...(19): siRNA sense strand
cugaagaauggcaagaaau

SEQ ID NO: 2518518 - RNA, 19 nt, Homo sapiens
  misc_RNA (1)...(19): siRNA sense strand
aaaucaagguuuaccgaga

SEQ ID NO: 2518519 - RNA, 19 nt, Homo sapiens
  misc_RNA (1)...(19): siRNA sense strand
auuuaaucccugaggccaa

SEQ ID NO: 2518520 - RNA, 19 nt, Homo sapiens
  misc_RNA (1)...(19): siRNA sense strand
agaaaauugagcuggcaaa

SEQ ID NO: 2518521 - RNA, 19 nt, Homo sapiens
  misc_RNA (1)...(19): siRNA sense strand
ggauauaagaagaagaacc

SEQ ID NO: 2518522 - RNA, 19 nt, Homo sapiens
  misc_RNA (1)...(19): siRNA sense strand
uauagauauccguggucaa

SEQ ID NO: 2518523 - RNA, 19 nt, Homo sapiens
  misc_RNA (1)...(19): siRNA sense strand
gugaagaggaaggagguga

SEQ ID NO: 2518524 - RNA, 19 nt, Homo sapiens
  misc_RNA (1)...(19): siRNA sense strand
ugguaucaaagguugguua

SEQ ID NO: 2518525 - RNA, 19 nt, Homo sapiens
  misc_RNA (1)...(19): siRNA sense strand
ggcauggauauaagaagaa

SEQ ID NO: 2518526 - RNA, 19 nt, Homo sapiens
  misc_RNA (1)...(19): siRNA sense strand
ugccaauguguuaggauau

SEQ ID NO: 2518527 - RNA, 19 nt, Homo sapiens
  misc_RNA (1)...(19): siRNA sense strand
ugaagaggaaggaggugau

SEQ ID NO: 2518528 - RNA, 19 nt, Homo sapiens
  misc_RNA (1)...(19): siRNA sense strand
ucugauuaguguuggccau

SEQ ID NO: 2518529 - RNA, 19 nt, Homo sapiens
  misc_RNA (1)...(19): siRNA sense strand
gcaucacccugcaaggaga

SEQ ID NO: 2518530 - RNA, 19 nt, Homo sapiens
  misc_RNA (1)...(19): siRNA sense strand
ccaaguugaagaggguaaa

SEQ ID NO: 2518531 - RNA, 19 nt, Homo sapiens
  misc_RNA (1)...(19): siRNA sense strand
aggcaaaagcggagcaaaa

SEQ ID NO: 2518532 - RNA, 19 nt, Homo sapiens
  misc_RNA (1)...(19): siRNA sense strand
ccacagaaauaccggcaga

SEQ ID NO: 2518533 - RNA, 19 nt, Homo sapiens
  misc_RNA (1)...(19): siRNA sense strand
caaauguacuucaagguga

SEQ ID NO: 2518534 - RNA, 19 nt, Homo sapiens
  misc_RNA (1)...(19): siRNA sense strand
gcaaagaaaggaagagcag

SEQ ID NO: 2518535 - RNA, 19 nt, Homo sapiens
  misc_RNA (1)...(19): siRNA sense strand
cugaguacaugaaggccau

SEQ ID NO: 2518536 - RNA, 19 nt, Homo sapiens
  misc_RNA (1)...(19): siRNA sense strand
ucaccgugcaguuggacaa

SEQ ID NO: 2518537 - RNA, 19 nt, Homo sapiens
  misc_RNA (1)...(19): siRNA sense strand
gcagaaaaccuggaggaau

SEQ ID NO: 2518538 - RNA, 19 nt, Homo sapiens
  misc_RNA (1)...(19): siRNA sense strand
gaagaaaggaggaggcugc

SEQ ID NO: 2518539 - RNA, 19 nt, Homo sapiens
  misc_RNA (1)...(19): siRNA sense strand
cucacgugccacagaaaua

SEQ ID NO: 2518540 - RNA, 19 nt, Homo sapiens
  misc_RNA (1)...(19): siRNA sense strand
augaauuaauggacgaacu

SEQ ID NO: 2518541 - RNA, 19 nt, Homo sapiens
  misc_RNA (1)...(19): siRNA sense strand
ccuugaaaugcauggagau

SEQ ID NO: 2518542 - RNA, 19 nt, Homo sapiens
  misc_RNA (1)...(19): siRNA sense strand
uggacaaaaggcaaagaaa

SEQ ID NO: 2518543 - RNA, 19 nt, Homo sapiens
  misc_RNA (1)...(19): siRNA sense strand
caaaaggcaaagaaaggaa

SEQ ID NO: 2518544 - RNA, 19 nt, Homo sapiens
  misc_RNA (1)...(19): siRNA sense strand
aggaaggccuacagacacu

SEQ ID NO: 2518545 - RNA, 19 nt, Homo sapiens
  misc_RNA (1)...(19): siRNA sense strand
ggcaaagaaaggaagagca

SEQ ID NO: 2518546 - RNA, 19 nt, Homo sapiens
  misc_RNA (1)...(19): siRNA sense strand
gaaauaaacaucugggaga

SEQ ID NO: 2518547 - RNA, 19 nt, Homo sapiens
  misc_RNA (1)...(19): siRNA sense strand
acucgaagggccaggguaa

SEQ ID NO: 2518548 - RNA, 19 nt, Homo sapiens
  misc_RNA (1)...(19): siRNA sense strand
aggacaaaguggagaggcu

SEQ ID NO: 2518549 - RNA, 19 nt, Homo sapiens
  misc_RNA (1)...(19): siRNA sense strand
gugaagacuuggugcagca

SEQ ID NO: 2518550 - RNA, 19 nt, Homo sapiens
  misc_RNA (1)...(19): siRNA sense strand
auucagcaccagaggcaaa

SEQ ID NO: 2518551 - RNA, 19 nt, Homo sapiens
  misc_RNA (1)...(19): siRNA sense strand
acaucugggagaagaaauu

SEQ ID NO: 2518552 - RNA, 19 nt, Homo sapiens
  misc_RNA (1)...(19): siRNA sense strand
ucagcaaaggcuuggagaa

SEQ ID NO: 2518553 - RNA, 19 nt, Homo sapiens
  misc_RNA (1)...(19): siRNA sense strand
ugaagaagaaguaccgaga

SEQ ID NO: 2518554 - RNA, 19 nt, Homo sapiens
  misc_RNA (1)...(19): siRNA sense strand
gagagcugauugauggaga

SEQ ID NO: 2518555 - RNA, 19 nt, Homo sapiens
  misc_RNA (1)...(19): siRNA sense strand
aagcaaucggcgugcgaca

SEQ ID NO: 2518556 - RNA, 19 nt, Homo sapiens
  misc_RNA (1)...(19): siRNA sense strand
gguaccuucaagagagauu

SEQ ID NO: 2518557 - RNA, 19 nt, Homo sapiens
  misc_RNA (1)...(19): siRNA sense strand
agucacugaagaagaagua

SEQ ID NO: 2518558 - RNA, 19 nt, Homo sapiens
  misc_RNA (1)...(19): siRNA sense strand
cugcaaagcaaguucagga

SEQ ID NO: 2518559 - RNA, 19 nt, Homo sapiens
  misc_RNA (1)...(19): siRNA sense strand
uaaacaucugggagaagaa

SEQ ID NO: 2518560 - RNA, 19 nt, Homo sapiens
  misc_RNA (1)...(19): siRNA sense strand
caagagagauuaaagcaac

SEQ ID NO: 2518561 - RNA, 19 nt, Homo sapiens
  misc_RNA (1)...(19): siRNA sense strand
ugggagaagaaauuaaaga

SEQ ID NO: 2518562 - RNA, 19 nt, Homo sapiens
  misc_RNA (1)...(19): siRNA sense strand
ccaaacaaaggcucggaga

SEQ ID NO: 2518563 - RNA, 19 nt, Homo sapiens
  misc_RNA (1)...(19): siRNA sense strand
ggguaaauccagcagcagu

SEQ ID NO: 2518564 - RNA, 19 nt, Homo sapiens
  misc_RNA (1)...(19): siRNA sense strand
ggaaagaccuggaaggcca

SEQ ID NO: 2518565 - RNA, 19 nt, Homo sapiens
  misc_RNA (1)...(19): siRNA sense strand
cagggaaaccgguggaaau

SEQ ID NO: 2518566 - RNA, 19 nt, Homo sapiens
  misc_RNA (1)...(19): siRNA sense strand
cagaaagugaagaagaaau

SEQ ID NO: 2518567 - RNA, 19 nt, Homo sapiens
  misc_RNA (1)...(19): siRNA sense strand
cgguggaaaugacaggaaa

SEQ ID NO: 2518568 - RNA, 19 nt, Homo sapiens
  misc_RNA (1)...(19): siRNA sense strand
uauauugaaccgugggaaa

SEQ ID NO: 2518569 - RNA, 19 nt, Homo sapiens
  misc_RNA (1)...(19): siRNA sense strand
gauuauugaagauggagaa

SEQ ID NO: 2518570 - RNA, 19 nt, Homo sapiens
  misc_RNA (1)...(19): siRNA sense strand
caacagaggaugaagagca

SEQ ID NO: 2518571 - RNA, 19 nt, Homo sapiens
  misc_RNA (1)...(19): siRNA sense strand
ggauauuccucaaagcaga

SEQ ID NO: 2518572 - RNA, 19 nt, Homo sapiens
  misc_RNA (1)...(19): siRNA sense strand
ccagcuggcaggaaggaaa

SEQ ID NO: 2518573 - RNA, 19 nt, Homo sapiens
  misc_RNA (1)...(19): siRNA sense strand
aggaaaggguucaggguug

SEQ ID NO: 2518574 - RNA, 19 nt, Homo sapiens
  misc_RNA (1)...(19): siRNA sense strand
cuuuauaugacaagaccaa

SEQ ID NO: 2518575 - RNA, 19 nt, Homo sapiens
  misc_RNA (1)...(19): siRNA sense strand
aagcagaaagugaagaaga

SEQ ID NO: 2518576 - RNA, 19 nt, Homo sapiens
  misc_RNA (1)...(19): siRNA sense strand
guaaaguaaggucggacaa

SEQ ID NO: 2518577 - RNA, 19 nt, Homo sapiens
  misc_RNA (1)...(19): siRNA sense strand
ccgucagugugcugguuaa

SEQ ID NO: 2518578 - RNA, 19 nt, Homo sapiens
  misc_RNA (1)...(19): siRNA sense strand
gguggaaaugacaggaaaa

SEQ ID NO: 2518579 - RNA, 19 nt, Homo sapiens
  misc_RNA (1)...(19): siRNA sense strand
ugaaggacacagaaggaau

SEQ ID NO: 2518580 - RNA, 19 nt, Homo sapiens
  misc_RNA (1)...(19): siRNA sense strand
aacagaggaugaagagcaa

SEQ ID NO: 2518581 - RNA, 19 nt, Homo sapiens
  misc_RNA (1)...(19): siRNA sense strand
caggaucaacagaggauga

SEQ ID NO: 2518582 - RNA, 19 nt, Homo sapiens
  misc_RNA (1)...(19): siRNA sense strand
agagcaacuuuuacagaaa

SEQ ID NO: 2518583 - RNA, 19 nt, Homo sapiens
  misc_RNA (1)...(19): siRNA sense strand
augacaagaccaagaggau

SEQ ID NO: 2518584 - RNA, 19 nt, Homo sapiens
  misc_RNA (1)...(19): siRNA sense strand
gcagagaacaacucggguu

SEQ ID NO: 2518585 - RNA, 19 nt, Homo sapiens
  misc_RNA (1)...(19): siRNA sense strand
aagcagaggccgucagugu

SEQ ID NO: 2518586 - RNA, 19 nt, Homo sapiens
  misc_RNA (1)...(19): siRNA sense strand
cggacaaaagccugaaauu

SEQ ID NO: 2518587 - RNA, 19 nt, Homo sapiens
  misc_RNA (1)...(19): siRNA sense strand
agugaugaacuuaugggaa

SEQ ID NO: 2518588 - RNA, 19 nt, Homo sapiens
  misc_RNA (1)...(19): siRNA sense strand
ggguccaaggugaagggua

SEQ ID NO: 2518589 - RNA, 19 nt, Homo sapiens
  misc_RNA (1)...(19): siRNA sense strand
aguaaaguaaggucggaca

SEQ ID NO: 2518590 - RNA, 19 nt, Homo sapiens
  misc_RNA (1)...(19): siRNA sense strand
acaccagcuuguugugaga

SEQ ID NO: 2518591 - RNA, 19 nt, Homo sapiens
  misc_RNA (1)...(19): siRNA sense strand
uguugugagaagagacuau

SEQ ID NO: 2518592 - RNA, 19 nt, Homo sapiens
  misc_RNA (1)...(19): siRNA sense strand
uuaaacaacuguaaccaga

SEQ ID NO: 2518593 - RNA, 19 nt, Homo sapiens
  misc_RNA (1)...(19): siRNA sense strand
gagaagugguucaggaugg

SEQ ID NO: 2518594 - RNA, 19 nt, Homo sapiens
  misc_RNA (1)...(19): siRNA sense strand
cugugaguuuagagaaaau

SEQ ID NO: 2518595 - RNA, 19 nt, Homo sapiens
  misc_RNA (1)...(19): siRNA sense strand
gaaugagauuagaaggcau

SEQ ID NO: 2518596 - RNA, 19 nt, Homo sapiens
  misc_RNA (1)...(19): siRNA sense strand
gaaugaagcuggaggccgu

SEQ ID NO: 2518597 - RNA, 19 nt, Homo sapiens
  misc_RNA (1)...(19): siRNA sense strand
ggagcauggucuugggagu

SEQ ID NO: 2518598 - RNA, 19 nt, Homo sapiens
  misc_RNA (1)...(19): siRNA sense strand
cagaaguccuaaugggcca

SEQ ID NO: 2518599 - RNA, 19 nt, Homo sapiens
  misc_RNA (1)...(19): siRNA sense strand
acuacuggguggaggcaga

SEQ ID NO: 2518600 - RNA, 19 nt, Homo sapiens
  misc_RNA (1)...(19): siRNA sense strand
cagaauaccuggaagcuac

SEQ ID NO: 2518601 - RNA, 19 nt, Homo sapiens
  misc_RNA (1)...(19): siRNA sense strand
uguagauguugaugaccaa

SEQ ID NO: 2518602 - RNA, 19 nt, Homo sapiens
  misc_RNA (1)...(19): siRNA sense strand
augaaaaggugaacaguca

SEQ ID NO: 2518603 - RNA, 19 nt, Homo sapiens
  misc_RNA (1)...(19): siRNA sense strand
aggaaaaggaagcuuaaua

SEQ ID NO: 2518604 - RNA, 19 nt, Homo sapiens
  misc_RNA (1)...(19): siRNA sense strand
accaaagaguaaagguuca

SEQ ID NO: 2518605 - RNA, 19 nt, Homo sapiens
  misc_RNA (1)...(19): siRNA sense strand
aagaauuucagguuggaau

SEQ ID NO: 2518606 - RNA, 19 nt, Homo sapiens
  misc_RNA (1)...(19): siRNA sense strand
gguacuugaaagaacagaa

SEQ ID NO: 2518607 - RNA, 19 nt, Homo sapiens
  misc_RNA (1)...(19): siRNA sense strand
cgaucguuugagagaacaa

SEQ ID NO: 2518608 - RNA, 19 nt, Homo sapiens
  misc_RNA (1)...(19): siRNA sense strand
ggacagaauaccuggaagc

SEQ ID NO: 2518609 - RNA, 19 nt, Homo sapiens
  misc_RNA (1)...(19): siRNA sense strand
gugccgaggaauaggccau

SEQ ID NO: 2518610 - RNA, 19 nt, Homo sapiens
  misc_RNA (1)...(19): siRNA sense strand
gaaaacaugaaaaggugaa

SEQ ID NO: 2518611 - RNA, 19 nt, Homo sapiens
  misc_RNA (1)...(19): siRNA sense strand
cgauuguagauguugauga

SEQ ID NO: 2518612 - RNA, 19 nt, Homo sapiens
  misc_RNA (1)...(19): siRNA sense strand
agaacaaacacaggcaaau

SEQ ID NO: 2518613 - RNA, 19 nt, Homo sapiens
  misc_RNA (1)...(19): siRNA sense strand
ccaaacaugaacugcacau

SEQ ID NO: 2518614 - RNA, 19 nt, Homo sapiens
  misc_RNA (1)...(19): siRNA sense strand
ccuaaggguuauagaaaag

SEQ ID NO: 2518615 - RNA, 19 nt, Homo sapiens
  misc_RNA (1)...(19): siRNA sense strand
caaaaugcuccaaagaaau

SEQ ID NO: 2518616 - RNA, 19 nt, Homo sapiens
  misc_RNA (1)...(19): siRNA sense strand
cagaaacagaaguccuaau

SEQ ID NO: 2518617 - RNA, 19 nt, Homo sapiens
  misc_RNA (1)...(19): siRNA sense strand
gacuuguacagcaggcaaa

SEQ ID NO: 2518618 - RNA, 19 nt, Homo sapiens
  misc_RNA (1)...(19): siRNA sense strand
gcaaagaacuugagcgaca

SEQ ID NO: 2518619 - RNA, 19 nt, Homo sapiens
  misc_RNA (1)...(19): siRNA sense strand
gggaagacuggaaggcaaa

SEQ ID NO: 2518620 - RNA, 19 nt, Homo sapiens
  misc_RNA (1)...(19): siRNA sense strand
agggaagacuggaaggcaa

SEQ ID NO: 2518621 - RNA, 19 nt, Homo sapiens
  misc_RNA (1)...(19): siRNA sense strand
gggaaguggcugagcugaa

SEQ ID NO: 2518622 - RNA, 19 nt, Homo sapiens
  misc_RNA (1)...(19): siRNA sense strand
cuacaaagaaaguggcaca

SEQ ID NO: 2518623 - RNA, 19 nt, Homo sapiens
  misc_RNA (1)...(19): siRNA sense strand
aaaacaagaaggugggaaa

SEQ ID NO: 2518624 - RNA, 19 nt, Homo sapiens
  misc_RNA (1)...(19): siRNA sense strand
gaugaagguuguaugggaa

SEQ ID NO: 2518625 - RNA, 19 nt, Homo sapiens
  misc_RNA (1)...(19): siRNA sense strand
aagcaaagaacuugagcga

SEQ ID NO: 2518626 - RNA, 19 nt, Homo sapiens
  misc_RNA (1)...(19): siRNA sense strand
uggcagaagcuaaagaaga

SEQ ID NO: 2518627 - RNA, 19 nt, Homo sapiens
  misc_RNA (1)...(19): siRNA sense strand
ggaugaagguuguauggga

SEQ ID NO: 2518628 - RNA, 19 nt, Homo sapiens
  misc_RNA (1)...(19): siRNA sense strand
auucaagagcaauuggaaa

SEQ ID NO: 2518629 - RNA, 19 nt, Homo sapiens
  misc_RNA (1)...(19): siRNA sense strand
agaaaguaacaaggagaaa

SEQ ID NO: 2518630 - RNA, 19 nt, Homo sapiens
  misc_RNA (1)...(19): siRNA sense strand
cuagaaaguaacaaggaga

SEQ ID NO: 2518631 - RNA, 19 nt, Homo sapiens
  misc_RNA (1)...(19): siRNA sense strand
ugaaagaaguaaagaggag

SEQ ID NO: 2518632 - RNA, 19 nt, Homo sapiens
  misc_RNA (1)...(19): siRNA sense strand
cuagagaagacaacaggaa

SEQ ID NO: 2518633 - RNA, 19 nt, Homo sapiens
  misc_RNA (1)...(19): siRNA sense strand
aagaagaccucgaggcugu

SEQ ID NO: 2518634 - RNA, 19 nt, Homo sapiens
  misc_RNA (1)...(19): siRNA sense strand
ccaaaguggaagcagaauu

SEQ ID NO: 2518635 - RNA, 19 nt, Homo sapiens
  misc_RNA (1)...(19): siRNA sense strand
agaucacauucaagagcaa

SEQ ID NO: 2518636 - RNA, 19 nt, Homo sapiens
  misc_RNA (1)...(19): siRNA sense strand
caaucauguuggagaaugu

SEQ ID NO: 2518637 - RNA, 19 nt, Homo sapiens
  misc_RNA (1)...(19): siRNA sense strand
aagagcaauuggaaagcaa

SEQ ID NO: 2518638 - RNA, 19 nt, Homo sapiens
  misc_RNA (1)...(19): siRNA sense strand
gaaaguggcacaacgggaa

SEQ ID NO: 2518639 - RNA, 19 nt, Homo sapiens
  misc_RNA (1)...(19): siRNA sense strand
ccgagagcugcgacagaaa

SEQ ID NO: 2518640 - RNA, 19 nt, Homo sapiens
  misc_RNA (1)...(19): siRNA sense strand
uagaaaguaacaaggagaa

SEQ ID NO: 2518641 - RNA, 19 nt, Homo sapiens
  misc_RNA (1)...(19): siRNA sense strand
agaaagaaagggaucucaa

SEQ ID NO: 2518642 - RNA, 19 nt, Homo sapiens
  misc_RNA (1)...(19): siRNA sense strand
augaaaacaucucaggaua

SEQ ID NO: 2518643 - RNA, 19 nt, Homo sapiens
  misc_RNA (1)...(19): siRNA sense strand
gagcgacagaauuuggaaa

SEQ ID NO: 2518644 - RNA, 19 nt, Homo sapiens
  misc_RNA (1)...(19): siRNA sense strand
gggcggagggauucagaga

SEQ ID NO: 2518645 - RNA, 19 nt, Homo sapiens
  misc_RNA (1)...(19): siRNA sense strand
ucauggaggaccagcacaa

SEQ ID NO: 2518646 - RNA, 19 nt, Homo sapiens
  misc_RNA (1)...(19): siRNA sense strand
augaagguuguaugggaaa

SEQ ID NO: 2518647 - RNA, 19 nt, Homo sapiens
  misc_RNA (1)...(19): siRNA sense strand
ggcgaauaaugcucagaau

SEQ ID NO: 2518648 - RNA, 19 nt, Homo sapiens
  misc_RNA (1)...(19): siRNA sense strand
ccucaagaaagaaagggau

SEQ ID NO: 2518649 - RNA, 19 nt, Homo sapiens
  misc_RNA (1)...(19): siRNA sense strand
agguguagcuagagaagac

SEQ ID NO: 2518650 - RNA, 19 nt, Homo sapiens
  misc_RNA (1)...(19): siRNA sense strand
gaaaguaacaaggagaaaa

SEQ ID NO: 2518651 - RNA, 19 nt, Homo sapiens
  misc_RNA (1)...(19): siRNA sense strand
ccagcacaacagugagauu

SEQ ID NO: 2518652 - RNA, 19 nt, Homo sapiens
  misc_RNA (1)...(19): siRNA sense strand
agagaagacaacaggaaac

SEQ ID NO: 2518653 - RNA, 19 nt, Homo sapiens
  misc_RNA (1)...(19): siRNA sense strand
agaacuugagcgacagaau

SEQ ID NO: 2518654 - RNA, 19 nt, Homo sapiens
  misc_RNA (1)...(19): siRNA sense strand
uauaaaggaaagaacguca

SEQ ID NO: 2518655 - RNA, 19 nt, Homo sapiens
  misc_RNA (1)...(19): siRNA sense strand
aagaaagggaucucaauca

SEQ ID NO: 2518656 - RNA, 19 nt, Homo sapiens
  misc_RNA (1)...(19): siRNA sense strand
cagaagcuaaagaagacaa

SEQ ID NO: 2518657 - RNA, 19 nt, Homo sapiens
  misc_RNA (1)...(19): siRNA sense strand
gaaagaagaccucgaggcu

SEQ ID NO: 2518658 - RNA, 19 nt, Homo sapiens
  misc_RNA (1)...(19): siRNA sense strand
guugguuugccuaguguua

SEQ ID NO: 2518659 - RNA, 19 nt, Homo sapiens
  misc_RNA (1)...(19): siRNA sense strand
ugaaaacaucucaggauau

SEQ ID NO: 2518660 - RNA, 19 nt, Homo sapiens
  misc_RNA (1)...(19): siRNA sense strand
auagaaaggaugaagguug

SEQ ID NO: 2518661 - RNA, 19 nt, Homo sapiens
  misc_RNA (1)...(19): siRNA sense strand
uuaaacaggacucggugaa

SEQ ID NO: 2518662 - RNA, 19 nt, Homo sapiens
  misc_RNA (1)...(19): siRNA sense strand
cgaacagugaagugucgua

SEQ ID NO: 2518663 - RNA, 19 nt, Homo sapiens
  misc_RNA (1)...(19): siRNA sense strand
auuggaaagcaaagaacuu

SEQ ID NO: 2518664 - RNA, 19 nt, Homo sapiens
  misc_RNA (1)...(19): siRNA sense strand
ccgagagagaaacuacaaa

SEQ ID NO: 2518665 - RNA, 19 nt, Homo sapiens
  misc_RNA (1)...(19): siRNA sense strand
ggauggagaucgagagcca

SEQ ID NO: 2518666 - RNA, 19 nt, Homo sapiens
  misc_RNA (1)...(19): siRNA sense strand
aggaaagcuuugaggccaa

SEQ ID NO: 2518667 - RNA, 19 nt, Homo sapiens
  misc_RNA (1)...(19): siRNA sense strand
aggaaaagacagagagaga

SEQ ID NO: 2518668 - RNA, 19 nt, Homo sapiens
  misc_RNA (1)...(19): siRNA sense strand
guacugaauuugaugggaa

SEQ ID NO: 2518669 - RNA, 19 nt, Homo sapiens
  misc_RNA (1)...(19): siRNA sense strand
cugaaaaggaggagagaca

SEQ ID NO: 2518670 - RNA, 19 nt, Homo sapiens
  misc_RNA (1)...(19): siRNA sense strand
aggagaggauggagaucaa

SEQ ID NO: 2518671 - RNA, 19 nt, Homo sapiens
  misc_RNA (1)...(19): siRNA sense strand
ggauggagaucaagagcca

SEQ ID NO: 2518672 - RNA, 19 nt, Homo sapiens
  misc_RNA (1)...(19): siRNA sense strand
cggaagaagaucacagaca

SEQ ID NO: 2518673 - RNA, 19 nt, Homo sapiens
  misc_RNA (1)...(19): siRNA sense strand
ccaaagagaugcugcacca

SEQ ID NO: 2518674 - RNA, 19 nt, Homo sapiens
  misc_RNA (1)...(19): siRNA sense strand
cugugaagguuaaaggaga

SEQ ID NO: 2518675 - RNA, 19 nt, Homo sapiens
  misc_RNA (1)...(19): siRNA sense strand
ggacagagcuugugcggag

SEQ ID NO: 2518676 - RNA, 19 nt, Homo sapiens
  misc_RNA (1)...(19): siRNA sense strand
gcugcagagcaauggaaua

SEQ ID NO: 2518677 - RNA, 19 nt, Homo sapiens
  misc_RNA (1)...(19): siRNA sense strand
cggaagauuuagaaaccau

SEQ ID NO: 2518678 - RNA, 19 nt, Homo sapiens
  misc_RNA (1)...(19): siRNA sense strand
gagagacagcagugggaga

SEQ ID NO: 2518679 - RNA, 19 nt, Homo sapiens
  misc_RNA (1)...(19): siRNA sense strand
cuguggagguuaaaggaga

SEQ ID NO: 2518680 - RNA, 19 nt, Homo sapiens
  misc_RNA (1)...(19): siRNA sense strand
cuguggagguuaaaggaga

SEQ ID NO: 2518681 - RNA, 19 nt, Homo sapiens
  misc_RNA (1)...(19): siRNA sense strand
uuacagaacuugauggaac

SEQ ID NO: 2518682 - RNA, 19 nt, Homo sapiens
  misc_RNA (1)...(19): siRNA sense strand
ugaugaugaaacaggcaaa

SEQ ID NO: 2518683 - RNA, 19 nt, Homo sapiens
  misc_RNA (1)...(19): siRNA sense strand
gcauugaagccuuggccau

SEQ ID NO: 2518684 - RNA, 19 nt, Homo sapiens
  misc_RNA (1)...(19): siRNA sense strand
gagcuauuuguuaaggaaa

SEQ ID NO: 2518685 - RNA, 19 nt, Homo sapiens
  misc_RNA (1)...(19): siRNA sense strand
gcuuugaggccaaggacga

SEQ ID NO: 2518686 - RNA, 19 nt, Homo sapiens
  misc_RNA (1)...(19): siRNA sense strand
aggagaggauggagaucga

SEQ ID NO: 2518687 - RNA, 19 nt, Homo sapiens
  misc_RNA (1)...(19): siRNA sense strand
gcaaaucucuggaagacca

SEQ ID NO: 2518688 - RNA, 19 nt, Homo sapiens
  misc_RNA (1)...(19): siRNA sense strand
uacugaauuugaugggaaa

SEQ ID NO: 2518689 - RNA, 19 nt, Homo sapiens
  misc_RNA (1)...(19): siRNA sense strand
ggagguuaaaggagaggau

SEQ ID NO: 2518690 - RNA, 19 nt, Homo sapiens
  misc_RNA (1)...(19): siRNA sense strand
agaacuugauggaacgaga

SEQ ID NO: 2518691 - RNA, 19 nt, Homo sapiens
  misc_RNA (1)...(19): siRNA sense strand
gaaaagacagagagagagu

SEQ ID NO: 2518692 - RNA, 19 nt, Homo sapiens
  misc_RNA (1)...(19): siRNA sense strand
uuaaaggagaggauggaga

SEQ ID NO: 2518693 - RNA, 19 nt, Homo sapiens
  misc_RNA (1)...(19): siRNA sense strand
uuaaaggagaggauggaga

SEQ ID NO: 2518694 - RNA, 19 nt, Homo sapiens
  misc_RNA (1)...(19): siRNA sense strand
caggcaaaucucuggaaga

SEQ ID NO: 2518695 - RNA, 19 nt, Homo sapiens
  misc_RNA (1)...(19): siRNA sense strand
cgggcagaggagaggaaaa

SEQ ID NO: 2518696 - RNA, 19 nt, Homo sapiens
  misc_RNA (1)...(19): siRNA sense strand
cuaaaaguucccugcaaaa

SEQ ID NO: 2518697 - RNA, 19 nt, Homo sapiens
  misc_RNA (1)...(19): siRNA sense strand
gaagguuaaaggagaggau

SEQ ID NO: 2518698 - RNA, 19 nt, Homo sapiens
  misc_RNA (1)...(19): siRNA sense strand
acuaaaaguucccugcaaa

SEQ ID NO: 2518699 - RNA, 19 nt, Homo sapiens
  misc_RNA (1)...(19): siRNA sense strand
aaagacagagagagaguca

SEQ ID NO: 2518700 - RNA, 19 nt, Homo sapiens
  misc_RNA (1)...(19): siRNA sense strand
ucgaaaaccuggaggccca

SEQ ID NO: 2518701 - RNA, 19 nt, Homo sapiens
  misc_RNA (1)...(19): siRNA sense strand
caaaugaacuugcuccgua

SEQ ID NO: 2518702 - RNA, 19 nt, Homo sapiens
  misc_RNA (1)...(19): siRNA sense strand
cuggaaagcaugcccgauu

SEQ ID NO: 2518703 - RNA, 19 nt, Homo sapiens
  misc_RNA (1)...(19): siRNA sense strand
gaggagaggaaaagacaga

SEQ ID NO: 2518704 - RNA, 19 nt, Homo sapiens
  misc_RNA (1)...(19): siRNA sense strand
uucagaugauggugagaau

SEQ ID NO: 2518705 - RNA, 19 nt, Homo sapiens
  misc_RNA (1)...(19): siRNA sense strand
agaacggaagauuuagaaa

SEQ ID NO: 2518706 - RNA, 19 nt, Homo sapiens
  misc_RNA (1)...(19): siRNA sense strand
uggagaccguggaggacau

SEQ ID NO: 2518707 - RNA, 19 nt, Homo sapiens
  misc_RNA (1)...(19): siRNA sense strand
ugauggaacgagaacggaa

SEQ ID NO: 2518708 - RNA, 19 nt, Homo sapiens
  misc_RNA (1)...(19): siRNA sense strand
gagagcagggagcggaaga

SEQ ID NO: 2518709 - RNA, 19 nt, Homo sapiens
  misc_RNA (1)...(19): siRNA sense strand
ggacagagaaacaaggcag

SEQ ID NO: 2518710 - RNA, 19 nt, Homo sapiens
  misc_RNA (1)...(19): siRNA sense strand
agacuggagacaaaggaga

SEQ ID NO: 2518711 - RNA, 19 nt, Homo sapiens
  misc_RNA (1)...(19): siRNA sense strand
gguuaaaggagaggaugga

SEQ ID NO: 2518712 - RNA, 19 nt, Homo sapiens
  misc_RNA (1)...(19): siRNA sense strand
gguuaaaggagaggaugga

SEQ ID NO: 2518713 - RNA, 19 nt, Homo sapiens
  misc_RNA (1)...(19): siRNA sense strand
gugcggaaggcaaggagga

SEQ ID NO: 2518714 - RNA, 19 nt, Homo sapiens
  misc_RNA (1)...(19): siRNA sense strand
acuuggaagaugaugauga

SEQ ID NO: 2518715 - RNA, 19 nt, Homo sapiens
  misc_RNA (1)...(19): siRNA sense strand
aaagaagcuaagagggacu

SEQ ID NO: 2518716 - RNA, 19 nt, Homo sapiens
  misc_RNA (1)...(19): siRNA sense strand
uggaacgaacauaaagaaa

SEQ ID NO: 2518717 - RNA, 19 nt, Homo sapiens
  misc_RNA (1)...(19): siRNA sense strand
cuccaagaacugauugaaa

SEQ ID NO: 2518718 - RNA, 19 nt, Homo sapiens
  misc_RNA (1)...(19): siRNA sense strand
ugacuuggguucaggacca

SEQ ID NO: 2518719 - RNA, 19 nt, Homo sapiens
  misc_RNA (1)...(19): siRNA sense strand
aggaggaagcacaucuaaa

SEQ ID NO: 2518720 - RNA, 19 nt, Homo sapiens
  misc_RNA (1)...(19): siRNA sense strand
auuucaugucuguggcaaa

SEQ ID NO: 2518721 - RNA, 19 nt, Homo sapiens
  misc_RNA (1)...(19): siRNA sense strand
gcccaaaauaugaguauca

SEQ ID NO: 2518722 - RNA, 19 nt, Homo sapiens
  misc_RNA (1)...(19): siRNA sense strand
uagaagagaacuugcacca

SEQ ID NO: 2518723 - RNA, 19 nt, Homo sapiens
  misc_RNA (1)...(19): siRNA sense strand
gaagaacauuccagagggu

SEQ ID NO: 2518724 - RNA, 19 nt, Homo sapiens
  misc_RNA (1)...(19): siRNA sense strand
agucagaggaugaaggaau

SEQ ID NO: 2518725 - RNA, 19 nt, Homo sapiens
  misc_RNA (1)...(19): siRNA sense strand
agucaaaggcaaagccaga

SEQ ID NO: 2518726 - RNA, 19 nt, Homo sapiens
  misc_RNA (1)...(19): siRNA sense strand
aggaagaagaagaagagau

SEQ ID NO: 2518727 - RNA, 19 nt, Homo sapiens
  misc_RNA (1)...(19): siRNA sense strand
augaaagagcucagggaca

SEQ ID NO: 2518728 - RNA, 19 nt, Homo sapiens
  misc_RNA (1)...(19): siRNA sense strand
uaggaagacucaaaggcaa

SEQ ID NO: 2518729 - RNA, 19 nt, Homo sapiens
  misc_RNA (1)...(19): siRNA sense strand
cuccaaaggaagauggcua

SEQ ID NO: 2518730 - RNA, 19 nt, Homo sapiens
  misc_RNA (1)...(19): siRNA sense strand
uauacagaucacagaguua

SEQ ID NO: 2518731 - RNA, 19 nt, Homo sapiens
  misc_RNA (1)...(19): siRNA sense strand
cgacaagaaccacgagcga

SEQ ID NO: 2518732 - RNA, 19 nt, Homo sapiens
  misc_RNA (1)...(19): siRNA sense strand
aagaagaagagauggcuga

SEQ ID NO: 2518733 - RNA, 19 nt, Homo sapiens
  misc_RNA (1)...(19): siRNA sense strand
cagcaauugaagugguuga

SEQ ID NO: 2518734 - RNA, 19 nt, Homo sapiens
  misc_RNA (1)...(19): siRNA sense strand
ugaaggaagaagagccuau

SEQ ID NO: 2518735 - RNA, 19 nt, Homo sapiens
  misc_RNA (1)...(19): siRNA sense strand
agagccuauuagugggaaa

SEQ ID NO: 2518736 - RNA, 19 nt, Homo sapiens
  misc_RNA (1)...(19): siRNA sense strand
cggucaucaugcaaauaaa

SEQ ID NO: 2518737 - RNA, 19 nt, Homo sapiens
  misc_RNA (1)...(19): siRNA sense strand
aagaggaagaagaagaaga

SEQ ID NO: 2518738 - RNA, 19 nt, Homo sapiens
  misc_RNA (1)...(19): siRNA sense strand
aagagauggcugaagauau

SEQ ID NO: 2518739 - RNA, 19 nt, Homo sapiens
  misc_RNA (1)...(19): siRNA sense strand
uguauuggguggaggagca

SEQ ID NO: 2518740 - RNA, 19 nt, Homo sapiens
  misc_RNA (1)...(19): siRNA sense strand
caauagaaucggucaucau

SEQ ID NO: 2518741 - RNA, 19 nt, Homo sapiens
  misc_RNA (1)...(19): siRNA sense strand
aggcaaagccagagugcag

SEQ ID NO: 2518742 - RNA, 19 nt, Homo sapiens
  misc_RNA (1)...(19): siRNA sense strand
cuagaagauacuaagaaca

SEQ ID NO: 2518743 - RNA, 19 nt, Homo sapiens
  misc_RNA (1)...(19): siRNA sense strand
uaaucuagcaagagcccaa

SEQ ID NO: 2518744 - RNA, 19 nt, Homo sapiens
  misc_RNA (1)...(19): siRNA sense strand
ggagcaaauaagaaucaau

SEQ ID NO: 2518745 - RNA, 19 nt, Homo sapiens
  misc_RNA (1)...(19): siRNA sense strand
ugucagggcucaaggccga

SEQ ID NO: 2518746 - RNA, 19 nt, Homo sapiens
  misc_RNA (1)...(19): siRNA sense strand
uccaaaggaagauggcuaa

SEQ ID NO: 2518747 - RNA, 19 nt, Homo sapiens
  misc_RNA (1)...(19): siRNA sense strand
gagcauuauguauggaacu

SEQ ID NO: 2518748 - RNA, 19 nt, Homo sapiens
  misc_RNA (1)...(19): siRNA sense strand
uuuaaauggugcagugucu

SEQ ID NO: 2518749 - RNA, 19 nt, Homo sapiens
  misc_RNA (1)...(19): siRNA sense strand
uggcugaagauauagaaga

SEQ ID NO: 2518750 - RNA, 19 nt, Homo sapiens
  misc_RNA (1)...(19): siRNA sense strand
ccugauaguccuuugcaca

SEQ ID NO: 2518751 - RNA, 19 nt, Homo sapiens
  misc_RNA (1)...(19): siRNA sense strand
ccgauaugguuuguggauu

SEQ ID NO: 2518752 - RNA, 19 nt, Homo sapiens
  misc_RNA (1)...(19): siRNA sense strand
gaguuauaaaacagggauu

SEQ ID NO: 2518753 - RNA, 19 nt, Homo sapiens
  misc_RNA (1)...(19): siRNA sense strand
gggcuuugauagagaggca

SEQ ID NO: 2518754 - RNA, 19 nt, Homo sapiens
  misc_RNA (1)...(19): siRNA sense strand
ggauaggacucaagcgaag

SEQ ID NO: 2518755 - RNA, 19 nt, Homo sapiens
  misc_RNA (1)...(19): siRNA sense strand
agagaaagggcguggucuu

SEQ ID NO: 2518756 - RNA, 19 nt, Homo sapiens
  misc_RNA (1)...(19): siRNA sense strand
gcuggaagguggaagagca

SEQ ID NO: 2518757 - RNA, 19 nt, Homo sapiens
  misc_RNA (1)...(19): siRNA sense strand
cagcagagggagagagccu

SEQ ID NO: 2518758 - RNA, 19 nt, Homo sapiens
  misc_RNA (1)...(19): siRNA sense strand
gggauaggacucaagcgaa

SEQ ID NO: 2518759 - RNA, 19 nt, Homo sapiens
  misc_RNA (1)...(19): siRNA sense strand
cgggagaguuaguggaagg

SEQ ID NO: 2518760 - RNA, 19 nt, Homo sapiens
  misc_RNA (1)...(19): siRNA sense strand
gggcguggucuuuuggaaa

SEQ ID NO: 2518761 - RNA, 19 nt, Homo sapiens
  misc_RNA (1)...(19): siRNA sense strand
aggcugaggacgaguucau

SEQ ID NO: 2518762 - RNA, 19 nt, Homo sapiens
  misc_RNA (1)...(19): siRNA sense strand
aggagggcuuugauagaga

SEQ ID NO: 2518763 - RNA, 19 nt, Homo sapiens
  misc_RNA (1)...(19): siRNA sense strand
aguuaguggaagggacuua

SEQ ID NO: 2518764 - RNA, 19 nt, Homo sapiens
  misc_RNA (1)...(19): siRNA sense strand
gauaaggagcugcgggcaa

SEQ ID NO: 2518765 - RNA, 19 nt, Homo sapiens
  misc_RNA (1)...(19): siRNA sense strand
cuacagaaggggagugaua

SEQ ID NO: 2518766 - RNA, 19 nt, Homo sapiens
  misc_RNA (1)...(19): siRNA sense strand
uggaggagucuguaggaaa

SEQ ID NO: 2518767 - RNA, 19 nt, Homo sapiens
  misc_RNA (1)...(19): siRNA sense strand
cgggcaaugcugagagaga

SEQ ID NO: 2518768 - RNA, 19 nt, Homo sapiens
  misc_RNA (1)...(19): siRNA sense strand
cguaagacuacuucagaau

SEQ ID NO: 2518769 - RNA, 19 nt, Homo sapiens
  misc_RNA (1)...(19): siRNA sense strand
gcaaaggaaagaagaggga

SEQ ID NO: 2518770 - RNA, 19 nt, Homo sapiens
  misc_RNA (1)...(19): siRNA sense strand
uggagauguuacagccaaa

SEQ ID NO: 2518771 - RNA, 19 nt, Homo sapiens
  misc_RNA (1)...(19): siRNA sense strand
agacagagccugaggagcu

SEQ ID NO: 2518772 - RNA, 19 nt, Homo sapiens
  misc_RNA (1)...(19): siRNA sense strand
augaguuagaggagagauu

SEQ ID NO: 2518773 - RNA, 19 nt, Homo sapiens
  misc_RNA (1)...(19): siRNA sense strand
guguaugagcauugugaca

SEQ ID NO: 2518774 - RNA, 19 nt, Homo sapiens
  misc_RNA (1)...(19): siRNA sense strand
agaaacgggucuuggcaca

SEQ ID NO: 2518775 - RNA, 19 nt, Homo sapiens
  misc_RNA (1)...(19): siRNA sense strand
ggauauccugacagagcaa

SEQ ID NO: 2518776 - RNA, 19 nt, Homo sapiens
  misc_RNA (1)...(19): siRNA sense strand
gugaggucaugcaggaaau

SEQ ID NO: 2518777 - RNA, 19 nt, Homo sapiens
  misc_RNA (1)...(19): siRNA sense strand
aaaggaaagaagagggagu

SEQ ID NO: 2518778 - RNA, 19 nt, Homo sapiens
  misc_RNA (1)...(19): siRNA sense strand
agucaagaacaucccgaaa

SEQ ID NO: 2518779 - RNA, 19 nt, Homo sapiens
  misc_RNA (1)...(19): siRNA sense strand
cgcaagagacagagccuga

SEQ ID NO: 2518780 - RNA, 19 nt, Homo sapiens
  misc_RNA (1)...(19): siRNA sense strand
cugaggagcucuagcagca

SEQ ID NO: 2518781 - RNA, 19 nt, Homo sapiens
  misc_RNA (1)...(19): siRNA sense strand
uggaaagguguaugagcau

SEQ ID NO: 2518782 - RNA, 19 nt, Homo sapiens
  misc_RNA (1)...(19): siRNA sense strand
ugaccaacaccaagcagaa

SEQ ID NO: 2518783 - RNA, 19 nt, Homo sapiens
  misc_RNA (1)...(19): siRNA sense strand
gaacauagaaccagccauc

SEQ ID NO: 2518784 - RNA, 19 nt, Homo sapiens
  misc_RNA (1)...(19): siRNA sense strand
accagauacuuauggagaa

SEQ ID NO: 2518785 - RNA, 19 nt, Homo sapiens
  misc_RNA (1)...(19): siRNA sense strand
gagcaaagggagugggucc

SEQ ID NO: 2518786 - RNA, 19 nt, Homo sapiens
  misc_RNA (1)...(19): siRNA sense strand
aggauagcauuaugaacau

SEQ ID NO: 2518787 - RNA, 19 nt, Homo sapiens
  misc_RNA (1)...(19): siRNA sense strand
ucguaagacuacuucagaa

SEQ ID NO: 2518788 - RNA, 19 nt, Homo sapiens
  misc_RNA (1)...(19): siRNA sense strand
ccagcgaggagauggugaa

SEQ ID NO: 2518789 - RNA, 19 nt, Homo sapiens
  misc_RNA (1)...(19): siRNA sense strand
cagaaguguuaccgggacu

SEQ ID NO: 2518790 - RNA, 19 nt, Homo sapiens
  misc_RNA (1)...(19): siRNA sense strand
gguguuuguaugacguuua

SEQ ID NO: 2518791 - RNA, 19 nt, Homo sapiens
  misc_RNA (1)...(19): siRNA sense strand
aggaaagaagagggaguuu

SEQ ID NO: 2518792 - RNA, 19 nt, Homo sapiens
  misc_RNA (1)...(19): siRNA sense strand
aggagacaguuguggagga

SEQ ID NO: 2518793 - RNA, 19 nt, Homo sapiens
  misc_RNA (1)...(19): siRNA sense strand
augccaaggaugaguuaga

SEQ ID NO: 2518794 - RNA, 19 nt, Homo sapiens
  misc_RNA (1)...(19): siRNA sense strand
uuagaggagagauuggaaa

SEQ ID NO: 2518795 - RNA, 19 nt, Homo sapiens
  misc_RNA (1)...(19): siRNA sense strand
cagugacgaugaagaggau

SEQ ID NO: 2518796 - RNA, 19 nt, Homo sapiens
  misc_RNA (1)...(19): siRNA sense strand
uuggaaagguguaugagca

SEQ ID NO: 2518797 - RNA, 19 nt, Homo sapiens
  misc_RNA (1)...(19): siRNA sense strand
gagagauuggaaaggugua

SEQ ID NO: 2518798 - RNA, 19 nt, Homo sapiens
  misc_RNA (1)...(19): siRNA sense strand
auacggaggcccaguguga

SEQ ID NO: 2518799 - RNA, 19 nt, Homo sapiens
  misc_RNA (1)...(19): siRNA sense strand
ccaagcgagcugugacgaa

SEQ ID NO: 2518800 - RNA, 19 nt, Homo sapiens
  misc_RNA (1)...(19): siRNA sense strand
agaagaggaagacacgaaa

SEQ ID NO: 2518801 - RNA, 19 nt, Homo sapiens
  misc_RNA (1)...(19): siRNA sense strand
aggaugaguuagaggagag

SEQ ID NO: 2518802 - RNA, 19 nt, Homo sapiens
  misc_RNA (1)...(19): siRNA sense strand
gucagaugcaggaagacaa

SEQ ID NO: 2518803 - RNA, 19 nt, Homo sapiens
  misc_RNA (1)...(19): siRNA sense strand
gaggaagacacgaaaccga

SEQ ID NO: 2518804 - RNA, 19 nt, Homo sapiens
  misc_RNA (1)...(19): siRNA sense strand
ggaagaugaaccuguacga

SEQ ID NO: 2518805 - RNA, 19 nt, Homo sapiens
  misc_RNA (1)...(19): siRNA sense strand
agaaguaccugaagcugca

SEQ ID NO: 2518806 - RNA, 19 nt, Homo sapiens
  misc_RNA (1)...(19): siRNA sense strand
cugacagagcaaagggagu

SEQ ID NO: 2518807 - RNA, 19 nt, Homo sapiens
  misc_RNA (1)...(19): siRNA sense strand
gagccaguuuccauggaga

SEQ ID NO: 2518808 - RNA, 19 nt, Homo sapiens
  misc_RNA (1)...(19): siRNA sense strand
acgaugaagaggaucucaa

SEQ ID NO: 2518809 - RNA, 19 nt, Homo sapiens
  misc_RNA (1)...(19): siRNA sense strand
caugaauauuguccugaau

SEQ ID NO: 2518810 - RNA, 19 nt, Homo sapiens
  misc_RNA (1)...(19): siRNA sense strand
ugaacaugaucguggcugu

SEQ ID NO: 2518811 - RNA, 19 nt, Homo sapiens
  misc_RNA (1)...(19): siRNA sense strand
cggaggaauaugaggacuc

SEQ ID NO: 2518812 - RNA, 19 nt, Homo sapiens
  misc_RNA (1)...(19): siRNA sense strand
agggauuguccuugggaau

SEQ ID NO: 2518813 - RNA, 19 nt, Homo sapiens
  misc_RNA (1)...(19): siRNA sense strand
agaaaagaagacagacaaa

SEQ ID NO: 2518814 - RNA, 19 nt, Homo sapiens
  misc_RNA (1)...(19): siRNA sense strand
gguuacaagaacagccaau

SEQ ID NO: 2518815 - RNA, 19 nt, Homo sapiens
  misc_RNA (1)...(19): siRNA sense strand
acaugugggaccaggacua

SEQ ID NO: 2518816 - RNA, 19 nt, Homo sapiens
  misc_RNA (1)...(19): siRNA sense strand
ggaauuuguggaaagaaaa

SEQ ID NO: 2518817 - RNA, 19 nt, Homo sapiens
  misc_RNA (1)...(19): siRNA sense strand
aaagaaaagaagacagaca

SEQ ID NO: 2518818 - RNA, 19 nt, Homo sapiens
  misc_RNA (1)...(19): siRNA sense strand
gacaaaacaaagaagggua

SEQ ID NO: 2518819 - RNA, 19 nt, Homo sapiens
  misc_RNA (1)...(19): siRNA sense strand
acaaaacaaagaaggguau

SEQ ID NO: 2518820 - RNA, 19 nt, Homo sapiens
  misc_RNA (1)...(19): siRNA sense strand
ggucuuaagucaacggcuc

SEQ ID NO: 2518821 - RNA, 19 nt, Homo sapiens
  misc_RNA (1)...(19): siRNA sense strand
cggaaaacaaggugaagaa

SEQ ID NO: 2518822 - RNA, 19 nt, Homo sapiens
  misc_RNA (1)...(19): siRNA sense strand
gugaagaacuccaaaggga

SEQ ID NO: 2518823 - RNA, 19 nt, Homo sapiens
  misc_RNA (1)...(19): siRNA sense strand
cgacggaggaagaggagga

SEQ ID NO: 2518824 - RNA, 19 nt, Homo sapiens
  misc_RNA (1)...(19): siRNA sense strand
cggaggaagaggaggagga

SEQ ID NO: 2518825 - RNA, 19 nt, Homo sapiens
  misc_RNA (1)...(19): siRNA sense strand
aagagaaggaugcggaaaa

SEQ ID NO: 2518826 - RNA, 19 nt, Homo sapiens
  misc_RNA (1)...(19): siRNA sense strand
caggcgaggaagagaaaga

SEQ ID NO: 2518827 - RNA, 19 nt, Homo sapiens
  misc_RNA (1)...(19): siRNA sense strand
aggaggaggaagaggggaa

SEQ ID NO: 2518828 - RNA, 19 nt, Homo sapiens
  misc_RNA (1)...(19): siRNA sense strand
ccgaaaagugggaugaaga

SEQ ID NO: 2518829 - RNA, 19 nt, Homo sapiens
  misc_RNA (1)...(19): siRNA sense strand
cagaggaaccagacgcaga

SEQ ID NO: 2518830 - RNA, 19 nt, Homo sapiens
  misc_RNA (1)...(19): siRNA sense strand
cugcaggcgaggaagagaa

SEQ ID NO: 2518831 - RNA, 19 nt, Homo sapiens
  misc_RNA (1)...(19): siRNA sense strand
acuaaaucucagcccgaaa

SEQ ID NO: 2518832 - RNA, 19 nt, Homo sapiens
  misc_RNA (1)...(19): siRNA sense strand
agaaggaugcggaaaacaa

SEQ ID NO: 2518833 - RNA, 19 nt, Homo sapiens
  misc_RNA (1)...(19): siRNA sense strand
cagaagaaccgaccgcaca

SEQ ID NO: 2518834 - RNA, 19 nt, Homo sapiens
  misc_RNA (1)...(19): siRNA sense strand
uggcagaggaugcgggaga

SEQ ID NO: 2518835 - RNA, 19 nt, Homo sapiens
  misc_RNA (1)...(19): siRNA sense strand
ccgaguaucugcauggaga

SEQ ID NO: 2518836 - RNA, 19 nt, Homo sapiens
  misc_RNA (1)...(19): siRNA sense strand
cguugagggaggagagagu

SEQ ID NO: 2518837 - RNA, 19 nt, Homo sapiens
  misc_RNA (1)...(19): siRNA sense strand
uggaagaaaaugagggcuu

SEQ ID NO: 2518838 - RNA, 19 nt, Homo sapiens
  misc_RNA (1)...(19): siRNA sense strand
uguggaaggagcuggagaa

SEQ ID NO: 2518839 - RNA, 19 nt, Homo sapiens
  misc_RNA (1)...(19): siRNA sense strand
uggagaaucuggcaggaca

SEQ ID NO: 2518840 - RNA, 19 nt, Homo sapiens
  misc_RNA (1)...(19): siRNA sense strand
gcaaauggagagagagcag

SEQ ID NO: 2518841 - RNA, 19 nt, Homo sapiens
  misc_RNA (1)...(19): siRNA sense strand
aggagagagugcacagcau

SEQ ID NO: 2518842 - RNA, 19 nt, Homo sapiens
  misc_RNA (1)...(19): siRNA sense strand
auaaggagcugaagcagga

SEQ ID NO: 2518843 - RNA, 19 nt, Homo sapiens
  misc_RNA (1)...(19): siRNA sense strand
gugacuuggaggagcugaa

SEQ ID NO: 2518844 - RNA, 19 nt, Homo sapiens
  misc_RNA (1)...(19): siRNA sense strand
ggcugaaguaucugcaaau

SEQ ID NO: 2518845 - RNA, 19 nt, Homo sapiens
  misc_RNA (1)...(19): siRNA sense strand
aagcccaaguggaagaaaa

SEQ ID NO: 2518846 - RNA, 19 nt, Homo sapiens
  misc_RNA (1)...(19): siRNA sense strand
aagcagaggcugagcaccu

SEQ ID NO: 2518847 - RNA, 19 nt, Homo sapiens
  misc_RNA (1)...(19): siRNA sense strand
agcagaagcuacaagcaga

SEQ ID NO: 2518848 - RNA, 19 nt, Homo sapiens
  misc_RNA (1)...(19): siRNA sense strand
ucaugaaggagaagggcaa

SEQ ID NO: 2518849 - RNA, 19 nt, Homo sapiens
  misc_RNA (1)...(19): siRNA sense strand
cguaccaacaaguggcaaa

SEQ ID NO: 2518850 - RNA, 19 nt, Homo sapiens
  misc_RNA (1)...(19): siRNA sense strand
gugacauccucguggccua

SEQ ID NO: 2518851 - RNA, 19 nt, Homo sapiens
  misc_RNA (1)...(19): siRNA sense strand
cuaaguaugagcagggaca

SEQ ID NO: 2518852 - RNA, 19 nt, Homo sapiens
  misc_RNA (1)...(19): siRNA sense strand
caccaauaaccucgggauu

SEQ ID NO: 2518853 - RNA, 19 nt, Homo sapiens
  misc_RNA (1)...(19): siRNA sense strand
gagaagggcaagagguccu

SEQ ID NO: 2518854 - RNA, 19 nt, Homo sapiens
  misc_RNA (1)...(19): siRNA sense strand
gucucaaagaguauacaaa

SEQ ID NO: 2518855 - RNA, 19 nt, Homo sapiens
  misc_RNA (1)...(19): siRNA sense strand
uauaaggucaugaaggaga

SEQ ID NO: 2518856 - RNA, 19 nt, Homo sapiens
  misc_RNA (1)...(19): siRNA sense strand
ccaggcaaauauaagguca

SEQ ID NO: 2518857 - RNA, 19 nt, Homo sapiens
  misc_RNA (1)...(19): siRNA sense strand
cguucuuauaugcgauuaa

SEQ ID NO: 2518858 - RNA, 19 nt, Homo sapiens
  misc_RNA (1)...(19): siRNA sense strand
gaagaugaaucacugccaa

SEQ ID NO: 2518859 - RNA, 19 nt, Homo sapiens
  misc_RNA (1)...(19): siRNA sense strand
guggcaaagacaagaauua

SEQ ID NO: 2518860 - RNA, 19 nt, Homo sapiens
  misc_RNA (1)...(19): siRNA sense strand
uguuggaaguuggcagaaa

SEQ ID NO: 2518861 - RNA, 19 nt, Homo sapiens
  misc_RNA (1)...(19): siRNA sense strand
gcuuaugaccgaacgcaca

SEQ ID NO: 2518862 - RNA, 19 nt, Homo sapiens
  misc_RNA (1)...(19): siRNA sense strand
acaagaauuacgcuggcaa

SEQ ID NO: 2518863 - RNA, 19 nt, Homo sapiens
  misc_RNA (1)...(19): siRNA sense strand
ccucaguggaguagauucu

SEQ ID NO: 2518864 - RNA, 19 nt, Homo sapiens
  misc_RNA (1)...(19): siRNA sense strand
gcaaacagaugcugcgcuc

SEQ ID NO: 2518865 - RNA, 19 nt, Homo sapiens
  misc_RNA (1)...(19): siRNA sense strand
cuuucagaguuucagacaa

SEQ ID NO: 2518866 - RNA, 19 nt, Homo sapiens
  misc_RNA (1)...(19): siRNA sense strand
aggagguucccgaggcuaa

SEQ ID NO: 2518867 - RNA, 19 nt, Homo sapiens
  misc_RNA (1)...(19): siRNA sense strand
aggcggagguggaguacaa

SEQ ID NO: 2518868 - RNA, 19 nt, Homo sapiens
  misc_RNA (1)...(19): siRNA sense strand
cgccauuggaggugugaaa

SEQ ID NO: 2518869 - RNA, 19 nt, Homo sapiens
  misc_RNA (1)...(19): siRNA sense strand
aggaauaaaguuagugaga

SEQ ID NO: 2518870 - RNA, 19 nt, Homo sapiens
  misc_RNA (1)...(19): siRNA sense strand
ccaagaagaucaaggugga

SEQ ID NO: 2518871 - RNA, 19 nt, Homo sapiens
  misc_RNA (1)...(19): siRNA sense strand
aggaaaggauccagaaacu

SEQ ID NO: 2518872 - RNA, 19 nt, Homo sapiens
  misc_RNA (1)...(19): siRNA sense strand
aagaagaugaagagcauau

SEQ ID NO: 2518873 - RNA, 19 nt, Homo sapiens
  misc_RNA (1)...(19): siRNA sense strand
ccuaugacagagaggcaaa

SEQ ID NO: 2518874 - RNA, 19 nt, Homo sapiens
  misc_RNA (1)...(19): siRNA sense strand
agaagaucaucaagcgcaa

SEQ ID NO: 2518875 - RNA, 19 nt, Homo sapiens
  misc_RNA (1)...(19): siRNA sense strand
ucauuguacacuugaguua

SEQ ID NO: 2518876 - RNA, 19 nt, Homo sapiens
  misc_RNA (1)...(19): siRNA sense strand
uuugaaagaaggagaauca

SEQ ID NO: 2518877 - RNA, 19 nt, Homo sapiens
  misc_RNA (1)...(19): siRNA sense strand
cuagcaagucagucaauaa

SEQ ID NO: 2518878 - RNA, 19 nt, Homo sapiens
  misc_RNA (1)...(19): siRNA sense strand
aagcaguaguguuugggaa

SEQ ID NO: 2518879 - RNA, 19 nt, Homo sapiens
  misc_RNA (1)...(19): siRNA sense strand
cuauuaagacgguugaauu

SEQ ID NO: 2518880 - RNA, 19 nt, Homo sapiens
  misc_RNA (1)...(19): siRNA sense strand
ggaaaauggacaagaacca

SEQ ID NO: 2518881 - RNA, 19 nt, Homo sapiens
  misc_RNA (1)...(19): siRNA sense strand
agaucaagguggaguucga

SEQ ID NO: 2518882 - RNA, 19 nt, Homo sapiens
  misc_RNA (1)...(19): siRNA sense strand
gacaacugauacaaggaaa

SEQ ID NO: 2518883 - RNA, 19 nt, Homo sapiens
  misc_RNA (1)...(19): siRNA sense strand
aguucaaagaugaggcaca

SEQ ID NO: 2518884 - RNA, 19 nt, Homo sapiens
  misc_RNA (1)...(19): siRNA sense strand
acaugggaaucaucagaaa

SEQ ID NO: 2518885 - RNA, 19 nt, Homo sapiens
  misc_RNA (1)...(19): siRNA sense strand
cuugcaaggauuugaagaa

SEQ ID NO: 2518886 - RNA, 19 nt, Homo sapiens
  misc_RNA (1)...(19): siRNA sense strand
caguaguguuugggaagaa

SEQ ID NO: 2518887 - RNA, 19 nt, Homo sapiens
  misc_RNA (1)...(19): siRNA sense strand
caaagcaagaaguggccaa

SEQ ID NO: 2518888 - RNA, 19 nt, Homo sapiens
  misc_RNA (1)...(19): siRNA sense strand
cguagaaccuucaccaaaa

SEQ ID NO: 2518889 - RNA, 19 nt, Homo sapiens
  misc_RNA (1)...(19): siRNA sense strand
ucguaauaagcuaggaaaa

SEQ ID NO: 2518890 - RNA, 19 nt, Homo sapiens
  misc_RNA (1)...(19): siRNA sense strand
uaaaucaggugaaaggcua

SEQ ID NO: 2518891 - RNA, 19 nt, Homo sapiens
  misc_RNA (1)...(19): siRNA sense strand
cacagaugauacagaagaa

SEQ ID NO: 2518892 - RNA, 19 nt, Homo sapiens
  misc_RNA (1)...(19): siRNA sense strand
uggacaagaaccagagcau

SEQ ID NO: 2518893 - RNA, 19 nt, Homo sapiens
  misc_RNA (1)...(19): siRNA sense strand
gcacaagugucaaaaccaa

SEQ ID NO: 2518894 - RNA, 19 nt, Homo sapiens
  misc_RNA (1)...(19): siRNA sense strand
ucagaaacuuccugcccua

SEQ ID NO: 2518895 - RNA, 19 nt, Homo sapiens
  misc_RNA (1)...(19): siRNA sense strand
acugauaggcgaauagaca

SEQ ID NO: 2518896 - RNA, 19 nt, Homo sapiens
  misc_RNA (1)...(19): siRNA sense strand
aggaguuggaacacaauaa

SEQ ID NO: 2518897 - RNA, 19 nt, Homo sapiens
  misc_RNA (1)...(19): siRNA sense strand
agcaagaaguggccaaaga

SEQ ID NO: 2518898 - RNA, 19 nt, Homo sapiens
  misc_RNA (1)...(19): siRNA sense strand
gcauuguggugcagggauc

SEQ ID NO: 2518899 - RNA, 19 nt, Homo sapiens
  misc_RNA (1)...(19): siRNA sense strand
agaggaaaggauccagaaa

SEQ ID NO: 2518900 - RNA, 19 nt, Homo sapiens
  misc_RNA (1)...(19): siRNA sense strand
cuagaguucauguuggaua

SEQ ID NO: 2518901 - RNA, 19 nt, Homo sapiens
  misc_RNA (1)...(19): siRNA sense strand
guaaauuagcuguaggaag

SEQ ID NO: 2518902 - RNA, 19 nt, Homo sapiens
  misc_RNA (1)...(19): siRNA sense strand
cagaugauacagaagaaga

SEQ ID NO: 2518903 - RNA, 19 nt, Homo sapiens
  misc_RNA (1)...(19): siRNA sense strand
cguaauaagcuaggaaaau

SEQ ID NO: 2518904 - RNA, 19 nt, Homo sapiens
  misc_RNA (1)...(19): siRNA sense strand
ugaaagaaggagaaucaga

SEQ ID NO: 2518905 - RNA, 19 nt, Homo sapiens
  misc_RNA (1)...(19): siRNA sense strand
caauaauucccuuguuaga

SEQ ID NO: 2518906 - RNA, 19 nt, Homo sapiens
  misc_RNA (1)...(19): siRNA sense strand
aagugaugucagagcacaa

SEQ ID NO: 2518907 - RNA, 19 nt, Homo sapiens
  misc_RNA (1)...(19): siRNA sense strand
cuaccgaauuacaagauca

SEQ ID NO: 2518908 - RNA, 19 nt, Homo sapiens
  misc_RNA (1)...(19): siRNA sense strand
ggagcaacugauaggcgaa

SEQ ID NO: 2518909 - RNA, 19 nt, Homo sapiens
  misc_RNA (1)...(19): siRNA sense strand
agaaauuggucgugaucug

SEQ ID NO: 2518910 - RNA, 19 nt, Homo sapiens
  misc_RNA (1)...(19): siRNA sense strand
ugcaaggauuugaagaaga

SEQ ID NO: 2518911 - RNA, 19 nt, Homo sapiens
  misc_RNA (1)...(19): siRNA sense strand
ggcauugaagauauagaaa

SEQ ID NO: 2518912 - RNA, 19 nt, Homo sapiens
  misc_RNA (1)...(19): siRNA sense strand
aggauuugaagaagaugaa

SEQ ID NO: 2518913 - RNA, 19 nt, Homo sapiens
  misc_RNA (1)...(19): siRNA sense strand
cuaggaaaauggacaagaa

SEQ ID NO: 2518914 - RNA, 19 nt, Homo sapiens
  misc_RNA (1)...(19): siRNA sense strand
ugucacagguacuuaaaca

SEQ ID NO: 2518915 - RNA, 19 nt, Homo sapiens
  misc_RNA (1)...(19): siRNA sense strand
ucccuaaagaggagcaauu

SEQ ID NO: 2518916 - RNA, 19 nt, Homo sapiens
  misc_RNA (1)...(19): siRNA sense strand
acaacugauacaaggaaaa

SEQ ID NO: 2518917 - RNA, 19 nt, Homo sapiens
  misc_RNA (1)...(19): siRNA sense strand
ccagaguaaucaaggugca

SEQ ID NO: 2518918 - RNA, 19 nt, Homo sapiens
  misc_RNA (1)...(19): siRNA sense strand
ccuucuaugucgaguggau

SEQ ID NO: 2518919 - RNA, 19 nt, Homo sapiens
  misc_RNA (1)...(19): siRNA sense strand
uggccaaguugcugugcga

SEQ ID NO: 2518920 - RNA, 19 nt, Homo sapiens
  misc_RNA (1)...(19): siRNA sense strand
cagccuuguuccuguucaa

SEQ ID NO: 2518921 - RNA, 19 nt, Homo sapiens
  misc_RNA (1)...(19): siRNA sense strand
cuucaaguacacagagaaa

SEQ ID NO: 2518922 - RNA, 19 nt, Homo sapiens
  misc_RNA (1)...(19): siRNA sense strand
uagaagacauugugcgaga

SEQ ID NO: 2518923 - RNA, 19 nt, Homo sapiens
  misc_RNA (1)...(19): siRNA sense strand
gggaagacaugcaucgaga

SEQ ID NO: 2518924 - RNA, 19 nt, Homo sapiens
  misc_RNA (1)...(19): siRNA sense strand
agugcgagcgagaggauaa

SEQ ID NO: 2518925 - RNA, 19 nt, Homo sapiens
  misc_RNA (1)...(19): siRNA sense strand
gcaccuuccaggagagaga

SEQ ID NO: 2518926 - RNA, 19 nt, Homo sapiens
  misc_RNA (1)...(19): siRNA sense strand
gguagaagacauugugcga

SEQ ID NO: 2518927 - RNA, 19 nt, Homo sapiens
  misc_RNA (1)...(19): siRNA sense strand
ccugcgaaacaaaggcaaa

SEQ ID NO: 2518928 - RNA, 19 nt, Homo sapiens
  misc_RNA (1)...(19): siRNA sense strand
uuaccuaugaugaggacua

SEQ ID NO: 2518929 - RNA, 19 nt, Homo sapiens
  misc_RNA (1)...(19): siRNA sense strand
acagagaaacacaaggaga

SEQ ID NO: 2518930 - RNA, 19 nt, Homo sapiens
  misc_RNA (1)...(19): siRNA sense strand
cccuggaacuggaggcaga

SEQ ID NO: 2518931 - RNA, 19 nt, Homo sapiens
  misc_RNA (1)...(19): siRNA sense strand
acguccuggucaugagaaa

SEQ ID NO: 2518932 - RNA, 19 nt, Homo sapiens
  misc_RNA (1)...(19): siRNA sense strand
gcaaagaggucacaaggcu

SEQ ID NO: 2518933 - RNA, 19 nt, Homo sapiens
  misc_RNA (1)...(19): siRNA sense strand
gcaaagacguggaugagug

SEQ ID NO: 2518934 - RNA, 19 nt, Homo sapiens
  misc_RNA (1)...(19): siRNA sense strand
uggaugagugcgagcgaga

SEQ ID NO: 2518935 - RNA, 19 nt, Homo sapiens
  misc_RNA (1)...(19): siRNA sense strand
acugcaaagacguggauga

SEQ ID NO: 2518936 - RNA, 19 nt, Homo sapiens
  misc_RNA (1)...(19): siRNA sense strand
gcacagacuuugauggcuc

SEQ ID NO: 2518937 - RNA, 19 nt, Homo sapiens
  misc_RNA (1)...(19): siRNA sense strand
ccgcgcaagauguggauga

SEQ ID NO: 2518938 - RNA, 19 nt, Homo sapiens
  misc_RNA (1)...(19): siRNA sense strand
ugaaaggaucccugaagau

SEQ ID NO: 2518939 - RNA, 19 nt, Homo sapiens
  misc_RNA (1)...(19): siRNA sense strand
gcuucaugcugcagccaga

SEQ ID NO: 2518940 - RNA, 19 nt, Homo sapiens
  misc_RNA (1)...(19): siRNA sense strand
augaauugcaugaacaaga

SEQ ID NO: 2518941 - RNA, 19 nt, Homo sapiens
  misc_RNA (1)...(19): siRNA sense strand
ccacauuugccgggagaca

SEQ ID NO: 2518942 - RNA, 19 nt, Homo sapiens
  misc_RNA (1)...(19): siRNA sense strand
guggagugcaucuggaaca

SEQ ID NO: 2518943 - RNA, 19 nt, Homo sapiens
  misc_RNA (1)...(19): siRNA sense strand
cggucuggcaagaaggaca

SEQ ID NO: 2518944 - RNA, 19 nt, Homo sapiens
  misc_RNA (1)...(19): siRNA sense strand
gagcagagccgauggaguc

SEQ ID NO: 2518945 - RNA, 19 nt, Homo sapiens
  misc_RNA (1)...(19): siRNA sense strand
gcaaagauauagaugagug

SEQ ID NO: 2518946 - RNA, 19 nt, Homo sapiens
  misc_RNA (1)...(19): siRNA sense strand
gggccuccuucaagaucaa

SEQ ID NO: 2518947 - RNA, 19 nt, Homo sapiens
  misc_RNA (1)...(19): siRNA sense strand
acuaugagcagcugguaga

SEQ ID NO: 2518948 - RNA, 19 nt, Homo sapiens
  misc_RNA (1)...(19): siRNA sense strand
cugaaaaccaccaggagau

SEQ ID NO: 2518949 - RNA, 19 nt, Homo sapiens
  misc_RNA (1)...(19): siRNA sense strand
agaggaacugccaggauau

SEQ ID NO: 2518950 - RNA, 19 nt, Homo sapiens
  misc_RNA (1)...(19): siRNA sense strand
cagcugguguggagugcau

SEQ ID NO: 2518951 - RNA, 19 nt, Homo sapiens
  misc_RNA (1)...(19): siRNA sense strand
caaagauugcacagagcca

SEQ ID NO: 2518952 - RNA, 19 nt, Homo sapiens
  misc_RNA (1)...(19): siRNA sense strand
agaaccaacgggacuguaa

SEQ ID NO: 2518953 - RNA, 19 nt, Homo sapiens
  misc_RNA (1)...(19): siRNA sense strand
augcaagaaucgucagugu

SEQ ID NO: 2518954 - RNA, 19 nt, Homo sapiens
  misc_RNA (1)...(19): siRNA sense strand
gcaagauguggaugagugu

SEQ ID NO: 2518955 - RNA, 19 nt, Homo sapiens
  misc_RNA (1)...(19): siRNA sense strand
cgugcaaagauauagauga

SEQ ID NO: 2518956 - RNA, 19 nt, Homo sapiens
  misc_RNA (1)...(19): siRNA sense strand
ggguauugccugugaaugc

SEQ ID NO: 2518957 - RNA, 19 nt, Homo sapiens
  misc_RNA (1)...(19): siRNA sense strand
aggagauuuuaaaggacaa

SEQ ID NO: 2518958 - RNA, 19 nt, Homo sapiens
  misc_RNA (1)...(19): siRNA sense strand
aagaaaggcuauaagcuuc

SEQ ID NO: 2518959 - RNA, 19 nt, Homo sapiens
  misc_RNA (1)...(19): siRNA sense strand
gcagcugguagaagacauu

SEQ ID NO: 2518960 - RNA, 19 nt, Homo sapiens
  misc_RNA (1)...(19): siRNA sense strand
aggacaagaagcucaucaa

SEQ ID NO: 2518961 - RNA, 19 nt, Homo sapiens
  misc_RNA (1)...(19): siRNA sense strand
ggaagaaguuggucaucua

SEQ ID NO: 2518962 - RNA, 19 nt, Homo sapiens
  misc_RNA (1)...(19): siRNA sense strand
caguuaagcagguacgaaa

SEQ ID NO: 2518963 - RNA, 19 nt, Homo sapiens
  misc_RNA (1)...(19): siRNA sense strand
cugaaacauaugagguaua

SEQ ID NO: 2518964 - RNA, 19 nt, Homo sapiens
  misc_RNA (1)...(19): siRNA sense strand
gcacaaaugcauugccaga

SEQ ID NO: 2518965 - RNA, 19 nt, Homo sapiens
  misc_RNA (1)...(19): siRNA sense strand
ggaagaaaacagaacuaaa

SEQ ID NO: 2518966 - RNA, 19 nt, Homo sapiens
  misc_RNA (1)...(19): siRNA sense strand
cagaauuugaaguggaaaa

SEQ ID NO: 2518967 - RNA, 19 nt, Homo sapiens
  misc_RNA (1)...(19): siRNA sense strand
gaaacuagccgaauggaga

SEQ ID NO: 2518968 - RNA, 19 nt, Homo sapiens
  misc_RNA (1)...(19): siRNA sense strand
gaguauucuuugucaguau

SEQ ID NO: 2518969 - RNA, 19 nt, Homo sapiens
  misc_RNA (1)...(19): siRNA sense strand
agaccaaauuucagaagga

SEQ ID NO: 2518970 - RNA, 19 nt, Homo sapiens
  misc_RNA (1)...(19): siRNA sense strand
ccacaguaauauggaagaa

SEQ ID NO: 2518971 - RNA, 19 nt, Homo sapiens
  misc_RNA (1)...(19): siRNA sense strand
ggagaaaagcuauugaaau

SEQ ID NO: 2518972 - RNA, 19 nt, Homo sapiens
  misc_RNA (1)...(19): siRNA sense strand
cguccaucggugaaagaaa

SEQ ID NO: 2518973 - RNA, 19 nt, Homo sapiens
  misc_RNA (1)...(19): siRNA sense strand
aagcaaggagaauggcaua

SEQ ID NO: 2518974 - RNA, 19 nt, Homo sapiens
  misc_RNA (1)...(19): siRNA sense strand
gaauaagagccuugaugca

SEQ ID NO: 2518975 - RNA, 19 nt, Homo sapiens
  misc_RNA (1)...(19): siRNA sense strand
gcggaaagaucgugucgca

SEQ ID NO: 2518976 - RNA, 19 nt, Homo sapiens
  misc_RNA (1)...(19): siRNA sense strand
ccuaugaugaccacaguaa

SEQ ID NO: 2518977 - RNA, 19 nt, Homo sapiens
  misc_RNA (1)...(19): siRNA sense strand
auuuuaaacuggagccaaa

SEQ ID NO: 2518978 - RNA, 19 nt, Homo sapiens
  misc_RNA (1)...(19): siRNA sense strand
ggaaagaucgugucgcaca

SEQ ID NO: 2518979 - RNA, 19 nt, Homo sapiens
  misc_RNA (1)...(19): siRNA sense strand
acauaaaaccacaggacuu

SEQ ID NO: 2518980 - RNA, 19 nt, Homo sapiens
  misc_RNA (1)...(19): siRNA sense strand
aaaccagaauugagcccua

SEQ ID NO: 2518981 - RNA, 19 nt, Homo sapiens
  misc_RNA (1)...(19): siRNA sense strand
gcaacauaaccaagaaaau

SEQ ID NO: 2518982 - RNA, 19 nt, Homo sapiens
  misc_RNA (1)...(19): siRNA sense strand
ugcugaacauagagaagua

SEQ ID NO: 2518983 - RNA, 19 nt, Homo sapiens
  misc_RNA (1)...(19): siRNA sense strand
auagagaaguauugccaga

SEQ ID NO: 2518984 - RNA, 19 nt, Homo sapiens
  misc_RNA (1)...(19): siRNA sense strand
cgaaaacauugcugugaau

SEQ ID NO: 2518985 - RNA, 19 nt, Homo sapiens
  misc_RNA (1)...(19): siRNA sense strand
uugcacaaucaaagagaau

SEQ ID NO: 2518986 - RNA, 19 nt, Homo sapiens
  misc_RNA (1)...(19): siRNA sense strand
ccgugaugccuuucauaua

SEQ ID NO: 2518987 - RNA, 19 nt, Homo sapiens
  misc_RNA (1)...(19): siRNA sense strand
aaguguaugcaaagaguau

SEQ ID NO: 2518988 - RNA, 19 nt, Homo sapiens
  misc_RNA (1)...(19): siRNA sense strand
aaugaagucuugaagguga

SEQ ID NO: 2518989 - RNA, 19 nt, Homo sapiens
  misc_RNA (1)...(19): siRNA sense strand
aagcaagauugacgguaga

SEQ ID NO: 2518990 - RNA, 19 nt, Homo sapiens
  misc_RNA (1)...(19): siRNA sense strand
gguagaagagguugccaga

SEQ ID NO: 2518991 - RNA, 19 nt, Homo sapiens
  misc_RNA (1)...(19): siRNA sense strand
acacgaaacucucccggaa

SEQ ID NO: 2518992 - RNA, 19 nt, Homo sapiens
  misc_RNA (1)...(19): siRNA sense strand
ucucacaacuauaagacau

SEQ ID NO: 2518993 - RNA, 19 nt, Homo sapiens
  misc_RNA (1)...(19): siRNA sense strand
guggaauucuuuucagaua

SEQ ID NO: 2518994 - RNA, 19 nt, Homo sapiens
  misc_RNA (1)...(19): siRNA sense strand
agauguugugggagggaga

SEQ ID NO: 2518995 - RNA, 19 nt, Homo sapiens
  misc_RNA (1)...(19): siRNA sense strand
aggaaauguuuaugaggcu

SEQ ID NO: 2518996 - RNA, 19 nt, Homo sapiens
  misc_RNA (1)...(19): siRNA sense strand
ugcaaagaauacagagagu

SEQ ID NO: 2518997 - RNA, 19 nt, Homo sapiens
  misc_RNA (1)...(19): siRNA sense strand
cuuagaaaccacuguauca

SEQ ID NO: 2518998 - RNA, 19 nt, Homo sapiens
  misc_RNA (1)...(19): siRNA sense strand
ucacauagaugaaccacca

SEQ ID NO: 2518999 - RNA, 19 nt, Homo sapiens
  misc_RNA (1)...(19): siRNA sense strand
agacagacuacuccagaau

SEQ ID NO: 2519000 - RNA, 19 nt, Homo sapiens
  misc_RNA (1)...(19): siRNA sense strand
ccgaaagacacaaaccaga

SEQ ID NO: 2519001 - RNA, 19 nt, Homo sapiens
  misc_RNA (1)...(19): siRNA sense strand
acagacuacuccagaauca

SEQ ID NO: 2519002 - RNA, 19 nt, Homo sapiens
  misc_RNA (1)...(19): siRNA sense strand
agcauguagucuuggagaa

SEQ ID NO: 2519003 - RNA, 19 nt, Homo sapiens
  misc_RNA (1)...(19): siRNA sense strand
gaucugaauguauaggauu

SEQ ID NO: 2519004 - RNA, 19 nt, Homo sapiens
  misc_RNA (1)...(19): siRNA sense strand
ccaagaaaaugguugcaga

SEQ ID NO: 2519005 - RNA, 19 nt, Homo sapiens
  misc_RNA (1)...(19): siRNA sense strand
gcuauugaaauggaagaaa

SEQ ID NO: 2519006 - RNA, 19 nt, Homo sapiens
  misc_RNA (1)...(19): siRNA sense strand
ggauagaugugaugggugg

SEQ ID NO: 2519007 - RNA, 19 nt, Homo sapiens
  misc_RNA (1)...(19): siRNA sense strand
ucuagaagauguuguggga

SEQ ID NO: 2519008 - RNA, 19 nt, Homo sapiens
  misc_RNA (1)...(19): siRNA sense strand
ggaagaagacauuuugaau

SEQ ID NO: 2519009 - RNA, 19 nt, Homo sapiens
  misc_RNA (1)...(19): siRNA sense strand
guugcaaagaauacagaga

SEQ ID NO: 2519010 - RNA, 19 nt, Homo sapiens
  misc_RNA (1)...(19): siRNA sense strand
cccaaacacccgaaagaca

SEQ ID NO: 2519011 - RNA, 19 nt, Homo sapiens
  misc_RNA (1)...(19): siRNA sense strand
ccuuagucuuguuaaccaa

SEQ ID NO: 2519012 - RNA, 19 nt, Homo sapiens
  misc_RNA (1)...(19): siRNA sense strand
agaaguauugccagaauca

SEQ ID NO: 2519013 - RNA, 19 nt, Homo sapiens
  misc_RNA (1)...(19): siRNA sense strand
agaugaaccaccaacacaa

SEQ ID NO: 2519014 - RNA, 19 nt, Homo sapiens
  misc_RNA (1)...(19): siRNA sense strand
gcauauuacacgaaacucu

SEQ ID NO: 2519015 - RNA, 19 nt, Homo sapiens
  misc_RNA (1)...(19): siRNA sense strand
ccgaaaacauugcugugaa

SEQ ID NO: 2519016 - RNA, 19 nt, Homo sapiens
  misc_RNA (1)...(19): siRNA sense strand
ugacugaagagaaaguuau

SEQ ID NO: 2519017 - RNA, 19 nt, Homo sapiens
  misc_RNA (1)...(19): siRNA sense strand
gcacuggaauggaagccua

SEQ ID NO: 2519018 - RNA, 19 nt, Homo sapiens
  misc_RNA (1)...(19): siRNA sense strand
aggacaagaacuacgguuu

SEQ ID NO: 2519019 - RNA, 19 nt, Homo sapiens
  misc_RNA (1)...(19): siRNA sense strand
ggaucaugaaggagcggga

SEQ ID NO: 2519020 - RNA, 19 nt, Homo sapiens
  misc_RNA (1)...(19): siRNA sense strand
gggaaagcaagcagcagca

SEQ ID NO: 2519021 - RNA, 19 nt, Homo sapiens
  misc_RNA (1)...(19): siRNA sense strand
agccaggaaagcaggacaa

SEQ ID NO: 2519022 - RNA, 19 nt, Homo sapiens
  misc_RNA (1)...(19): siRNA sense strand
gcaccuuagaugaugcaga

SEQ ID NO: 2519023 - RNA, 19 nt, Homo sapiens
  misc_RNA (1)...(19): siRNA sense strand
gggaagacuaugcuggagu

SEQ ID NO: 2519024 - RNA, 19 nt, Homo sapiens
  misc_RNA (1)...(19): siRNA sense strand
gaaaagaugcgcagccaca

SEQ ID NO: 2519025 - RNA, 19 nt, Homo sapiens
  misc_RNA (1)...(19): siRNA sense strand
gcgcagaagauuuccgaga

SEQ ID NO: 2519026 - RNA, 19 nt, Homo sapiens
  misc_RNA (1)...(19): siRNA sense strand
gggaaggagcacaggaaac

SEQ ID NO: 2519027 - RNA, 19 nt, Homo sapiens
  misc_RNA (1)...(19): siRNA sense strand
agaagauuuccgagaggau

SEQ ID NO: 2519028 - RNA, 19 nt, Homo sapiens
  misc_RNA (1)...(19): siRNA sense strand
cugggaaggagcacaggaa

SEQ ID NO: 2519029 - RNA, 19 nt, Homo sapiens
  misc_RNA (1)...(19): siRNA sense strand
ccuguaacccaccggaaau

SEQ ID NO: 2519030 - RNA, 19 nt, Homo sapiens
  misc_RNA (1)...(19): siRNA sense strand
ugggaaggagcacaggaaa

SEQ ID NO: 2519031 - RNA, 19 nt, Homo sapiens
  misc_RNA (1)...(19): siRNA sense strand
gagaagacccagaaggaca

SEQ ID NO: 2519032 - RNA, 19 nt, Homo sapiens
  misc_RNA (1)...(19): siRNA sense strand
gcgaagagagugaggagga

SEQ ID NO: 2519033 - RNA, 19 nt, Homo sapiens
  misc_RNA (1)...(19): siRNA sense strand
cgaagaaguuggaugccau

SEQ ID NO: 2519034 - RNA, 19 nt, Homo sapiens
  misc_RNA (1)...(19): siRNA sense strand
gguaauaaauccagagacc

SEQ ID NO: 2519035 - RNA, 19 nt, Homo sapiens
  misc_RNA (1)...(19): siRNA sense strand
uaaagaaccuccuggcaga

SEQ ID NO: 2519036 - RNA, 19 nt, Homo sapiens
  misc_RNA (1)...(19): siRNA sense strand
uuccagaagcacugcgaaa

SEQ ID NO: 2519037 - RNA, 19 nt, Homo sapiens
  misc_RNA (1)...(19): siRNA sense strand
ccuccagcgaagagaguga

SEQ ID NO: 2519038 - RNA, 19 nt, Homo sapiens
  misc_RNA (1)...(19): siRNA sense strand
ucgaugacuucgcgggaca

SEQ ID NO: 2519039 - RNA, 19 nt, Homo sapiens
  misc_RNA (1)...(19): siRNA sense strand
gcaagucauccaaaggcaa

SEQ ID NO: 2519040 - RNA, 19 nt, Homo sapiens
  misc_RNA (1)...(19): siRNA sense strand
ccuaaaacccaccggaaga

SEQ ID NO: 2519041 - RNA, 19 nt, Homo sapiens
  misc_RNA (1)...(19): siRNA sense strand
ccgagagugaauuggauga

SEQ ID NO: 2519042 - RNA, 19 nt, Homo sapiens
  misc_RNA (1)...(19): siRNA sense strand
gccaaguggugaagccuca

SEQ ID NO: 2519043 - RNA, 19 nt, Homo sapiens
  misc_RNA (1)...(19): siRNA sense strand
cuggaggagaguagcaaaa

SEQ ID NO: 2519044 - RNA, 19 nt, Homo sapiens
  misc_RNA (1)...(19): siRNA sense strand
gcuggaggagaguagcaaa

SEQ ID NO: 2519045 - RNA, 19 nt, Homo sapiens
  misc_RNA (1)...(19): siRNA sense strand
gcgaacagcuggagcagga

SEQ ID NO: 2519046 - RNA, 19 nt, Homo sapiens
  misc_RNA (1)...(19): siRNA sense strand
aggaagaggaagaggagca

SEQ ID NO: 2519047 - RNA, 19 nt, Homo sapiens
  misc_RNA (1)...(19): siRNA sense strand
ccgaaaaggcgcaggccau

SEQ ID NO: 2519048 - RNA, 19 nt, Homo sapiens
  misc_RNA (1)...(19): siRNA sense strand
aagaugaagcugacgguga

SEQ ID NO: 2519049 - RNA, 19 nt, Homo sapiens
  misc_RNA (1)...(19): siRNA sense strand
cggugagugcgcaggguau

SEQ ID NO: 2519050 - RNA, 19 nt, Homo sapiens
  misc_RNA (1)...(19): siRNA sense strand
ugcaggaggaagaggaaga

SEQ ID NO: 2519051 - RNA, 19 nt, Homo sapiens
  misc_RNA (1)...(19): siRNA sense strand
ccuccgacaugaaggcuga

SEQ ID NO: 2519052 - RNA, 19 nt, Homo sapiens
  misc_RNA (1)...(19): siRNA sense strand
gcugcaggaggaagaggaa

SEQ ID NO: 2519053 - RNA, 19 nt, Homo sapiens
  misc_RNA (1)...(19): siRNA sense strand
ugggcaagaucuggagcaa

SEQ ID NO: 2519054 - RNA, 19 nt, Homo sapiens
  misc_RNA (1)...(19): siRNA sense strand
aggaggaagaggaagagga

SEQ ID NO: 2519055 - RNA, 19 nt, Homo sapiens
  misc_RNA (1)...(19): siRNA sense strand
gcacaucacuagcgaggac

SEQ ID NO: 2519056 - RNA, 19 nt, Homo sapiens
  misc_RNA (1)...(19): siRNA sense strand
aggagcugcaggaggaaga

SEQ ID NO: 2519057 - RNA, 19 nt, Homo sapiens
  misc_RNA (1)...(19): siRNA sense strand
guuggauacucuggagaau

SEQ ID NO: 2519058 - RNA, 19 nt, Homo sapiens
  misc_RNA (1)...(19): siRNA sense strand
cggcacgagcugaagcaca

SEQ ID NO: 2519059 - RNA, 19 nt, Homo sapiens
  misc_RNA (1)...(19): siRNA sense strand
uagaagagcuggaggcuga

SEQ ID NO: 2519060 - RNA, 19 nt, Homo sapiens
  misc_RNA (1)...(19): siRNA sense strand
cgcuuaaacaggugaaaca

SEQ ID NO: 2519061 - RNA, 19 nt, Homo sapiens
  misc_RNA (1)...(19): siRNA sense strand
gguuuaagcccaucgagca

SEQ ID NO: 2519062 - RNA, 19 nt, Homo sapiens
  misc_RNA (1)...(19): siRNA sense strand
acgaagagauugagagcca

SEQ ID NO: 2519063 - RNA, 19 nt, Homo sapiens
  misc_RNA (1)...(19): siRNA sense strand
aauugaagcaguugggaaa

SEQ ID NO: 2519064 - RNA, 19 nt, Homo sapiens
  misc_RNA (1)...(19): siRNA sense strand
aggaaaucagcaagagaaa

SEQ ID NO: 2519065 - RNA, 19 nt, Homo sapiens
  misc_RNA (1)...(19): siRNA sense strand
uggaagugauaaaggaaau

SEQ ID NO: 2519066 - RNA, 19 nt, Homo sapiens
  misc_RNA (1)...(19): siRNA sense strand
ugguaaagccagaugaauu

SEQ ID NO: 2519067 - RNA, 19 nt, Homo sapiens
  misc_RNA (1)...(19): siRNA sense strand
agugagaaguguaaggcua

SEQ ID NO: 2519068 - RNA, 19 nt, Homo sapiens
  misc_RNA (1)...(19): siRNA sense strand
ccaggaaguuuguaggcaa

SEQ ID NO: 2519069 - RNA, 19 nt, Homo sapiens
  misc_RNA (1)...(19): siRNA sense strand
aagaaaggucuguggauuu

SEQ ID NO: 2519070 - RNA, 19 nt, Homo sapiens
  misc_RNA (1)...(19): siRNA sense strand
gguagaugugcgaagguua

SEQ ID NO: 2519071 - RNA, 19 nt, Homo sapiens
  misc_RNA (1)...(19): siRNA sense strand
aggaagaucuuguggaacu

SEQ ID NO: 2519072 - RNA, 19 nt, Homo sapiens
  misc_RNA (1)...(19): siRNA sense strand
gcagaaaacaucagagaca

SEQ ID NO: 2519073 - RNA, 19 nt, Homo sapiens
  misc_RNA (1)...(19): siRNA sense strand
agguaaugcagguggugaa

SEQ ID NO: 2519074 - RNA, 19 nt, Homo sapiens
  misc_RNA (1)...(19): siRNA sense strand
ggauguaaccauugaaaau

SEQ ID NO: 2519075 - RNA, 19 nt, Homo sapiens
  misc_RNA (1)...(19): siRNA sense strand
cuggaaaagcauagaaaau

SEQ ID NO: 2519076 - RNA, 19 nt, Homo sapiens
  misc_RNA (1)...(19): siRNA sense strand
gcuagaagggccuggauca

SEQ ID NO: 2519077 - RNA, 19 nt, Homo sapiens
  misc_RNA (1)...(19): siRNA sense strand
gcagaaaaucacaguggaa

SEQ ID NO: 2519078 - RNA, 19 nt, Homo sapiens
  misc_RNA (1)...(19): siRNA sense strand
cauccugggccuauggaaa

SEQ ID NO: 2519079 - RNA, 19 nt, Homo sapiens
  misc_RNA (1)...(19): siRNA sense strand
ggauaagaaaguaacgcau

SEQ ID NO: 2519080 - RNA, 19 nt, Homo sapiens
  misc_RNA (1)...(19): siRNA sense strand
agaaacacgaagagauuga

SEQ ID NO: 2519081 - RNA, 19 nt, Homo sapiens
  misc_RNA (1)...(19): siRNA sense strand
gggaaaucacuuuuggaua

SEQ ID NO: 2519082 - RNA, 19 nt, Homo sapiens
  misc_RNA (1)...(19): siRNA sense strand
ucguaaugcuacagaaugu

SEQ ID NO: 2519083 - RNA, 19 nt, Homo sapiens
  misc_RNA (1)...(19): siRNA sense strand
uagcaagcgcacacaguua

SEQ ID NO: 2519084 - RNA, 19 nt, Homo sapiens
  misc_RNA (1)...(19): siRNA sense strand
aagagagaguacauagauu

SEQ ID NO: 2519085 - RNA, 19 nt, Homo sapiens
  misc_RNA (1)...(19): siRNA sense strand
ugaugaaauugaagcaguu

SEQ ID NO: 2519086 - RNA, 19 nt, Homo sapiens
  misc_RNA (1)...(19): siRNA sense strand
ggaaggagaaggauagacu

SEQ ID NO: 2519087 - RNA, 19 nt, Homo sapiens
  misc_RNA (1)...(19): siRNA sense strand
aaggagugauggaagauau

SEQ ID NO: 2519088 - RNA, 19 nt, Homo sapiens
  misc_RNA (1)...(19): siRNA sense strand
gccaauuaacagaagauuu

SEQ ID NO: 2519089 - RNA, 19 nt, Homo sapiens
  misc_RNA (1)...(19): siRNA sense strand
gagaaguuuacaaaggaau

SEQ ID NO: 2519090 - RNA, 19 nt, Homo sapiens
  misc_RNA (1)...(19): siRNA sense strand
aagauaugcagcuuagaaa

SEQ ID NO: 2519091 - RNA, 19 nt, Homo sapiens
  misc_RNA (1)...(19): siRNA sense strand
gaucacauggacugguuaa

SEQ ID NO: 2519092 - RNA, 19 nt, Homo sapiens
  misc_RNA (1)...(19): siRNA sense strand
agauucacuccgagagcaa

SEQ ID NO: 2519093 - RNA, 19 nt, Homo sapiens
  misc_RNA (1)...(19): siRNA sense strand
ugagaaguuuacaaaggaa

SEQ ID NO: 2519094 - RNA, 19 nt, Homo sapiens
  misc_RNA (1)...(19): siRNA sense strand
aaauugaagcaguugggaa

SEQ ID NO: 2519095 - RNA, 19 nt, Homo sapiens
  misc_RNA (1)...(19): siRNA sense strand
gcuagaggauuuaccguga

SEQ ID NO: 2519096 - RNA, 19 nt, Homo sapiens
  misc_RNA (1)...(19): siRNA sense strand
aaucagcaagagaaagaaa

SEQ ID NO: 2519097 - RNA, 19 nt, Homo sapiens
  misc_RNA (1)...(19): siRNA sense strand
caugaauuguuguccgaau

SEQ ID NO: 2519098 - RNA, 19 nt, Homo sapiens
  misc_RNA (1)...(19): siRNA sense strand
acugaacagaguauggaaa

SEQ ID NO: 2519099 - RNA, 19 nt, Homo sapiens
  misc_RNA (1)...(19): siRNA sense strand
cugauggaaccgaacaaua

SEQ ID NO: 2519100 - RNA, 19 nt, Homo sapiens
  misc_RNA (1)...(19): siRNA sense strand
ggugaaaacaguagucgua

SEQ ID NO: 2519101 - RNA, 19 nt, Homo sapiens
  misc_RNA (1)...(19): siRNA sense strand
aggaaaggacagacggagu

SEQ ID NO: 2519102 - RNA, 19 nt, Homo sapiens
  misc_RNA (1)...(19): siRNA sense strand
gaguacauagauuggaaau

SEQ ID NO: 2519103 - RNA, 19 nt, Homo sapiens
  misc_RNA (1)...(19): siRNA sense strand
acaaaggaaucuacaucau

SEQ ID NO: 2519104 - RNA, 19 nt, Homo sapiens
  misc_RNA (1)...(19): siRNA sense strand
auggaagugauaaaggaaa

SEQ ID NO: 2519105 - RNA, 19 nt, Homo sapiens
  misc_RNA (1)...(19): siRNA sense strand
aaggaaaucagcaagagaa

SEQ ID NO: 2519106 - RNA, 19 nt, Homo sapiens
  misc_RNA (1)...(19): siRNA sense strand
cuuuaaaacugcuugaaga

SEQ ID NO: 2519107 - RNA, 19 nt, Homo sapiens
  misc_RNA (1)...(19): siRNA sense strand
cuauuaaugaugaggagca

SEQ ID NO: 2519108 - RNA, 19 nt, Homo sapiens
  misc_RNA (1)...(19): siRNA sense strand
gauuaacaauggaagugau

SEQ ID NO: 2519109 - RNA, 19 nt, Homo sapiens
  misc_RNA (1)...(19): siRNA sense strand
ccacagguuaugaaauuau

SEQ ID NO: 2519110 - RNA, 19 nt, Homo sapiens
  misc_RNA (1)...(19): siRNA sense strand
uacaaggagugauggaaga

SEQ ID NO: 2519111 - RNA, 19 nt, Homo sapiens
  misc_RNA (1)...(19): siRNA sense strand
agacaaauauggaugagcu

SEQ ID NO: 2519112 - RNA, 19 nt, Homo sapiens
  misc_RNA (1)...(19): siRNA sense strand
uauuaaugaugaggagcaa

SEQ ID NO: 2519113 - RNA, 19 nt, Homo sapiens
  misc_RNA (1)...(19): siRNA sense strand
uuaaugaugaggagcaauu

SEQ ID NO: 2519114 - RNA, 19 nt, Homo sapiens
  misc_RNA (1)...(19): siRNA sense strand
agucguaaugcuacagaau

SEQ ID NO: 2519115 - RNA, 19 nt, Homo sapiens
  misc_RNA (1)...(19): siRNA sense strand
gaaggauagacuuggcuuu

SEQ ID NO: 2519116 - RNA, 19 nt, Homo sapiens
  misc_RNA (1)...(19): siRNA sense strand
caguagaauggcuaaguga

SEQ ID NO: 2519117 - RNA, 19 nt, Homo sapiens
  misc_RNA (1)...(19): siRNA sense strand
caggaugaaacuaguuaau

SEQ ID NO: 2519118 - RNA, 19 nt, Homo sapiens
  misc_RNA (1)...(19): siRNA sense strand
aaguguaaggcuagaggau

SEQ ID NO: 2519119 - RNA, 19 nt, Homo sapiens
  misc_RNA (1)...(19): siRNA sense strand
auaaaggaaaucagcaaga

SEQ ID NO: 2519120 - RNA, 19 nt, Homo sapiens
  misc_RNA (1)...(19): siRNA sense strand
cgaacaauauuuugggagu

SEQ ID NO: 2519121 - RNA, 19 nt, Homo sapiens
  misc_RNA (1)...(19): siRNA sense strand
agauucaacagaagguaau

SEQ ID NO: 2519122 - RNA, 19 nt, Homo sapiens
  misc_RNA (1)...(19): siRNA sense strand
acgaaaguuuugcuggaaa

SEQ ID NO: 2519123 - RNA, 19 nt, Homo sapiens
  misc_RNA (1)...(19): siRNA sense strand
gaaugcuggcgaugaggaa

SEQ ID NO: 2519124 - RNA, 19 nt, Homo sapiens
  misc_RNA (1)...(19): siRNA sense strand
cgaaaguguuauaaggagu

SEQ ID NO: 2519125 - RNA, 19 nt, Homo sapiens
  misc_RNA (1)...(19): siRNA sense strand
cuaaagaagaauuggaaag

SEQ ID NO: 2519126 - RNA, 19 nt, Homo sapiens
  misc_RNA (1)...(19): siRNA sense strand
acgagaaauaggacaagaa

SEQ ID NO: 2519127 - RNA, 19 nt, Homo sapiens
  misc_RNA (1)...(19): siRNA sense strand
uggaaagccucuaccggaa

SEQ ID NO: 2519128 - RNA, 19 nt, Homo sapiens
  misc_RNA (1)...(19): siRNA sense strand
ugacauaguuagagaaaag

SEQ ID NO: 2519129 - RNA, 19 nt, Homo sapiens
  misc_RNA (1)...(19): siRNA sense strand
ccgagaaauuacagauaac

SEQ ID NO: 2519130 - RNA, 19 nt, Homo sapiens
  misc_RNA (1)...(19): siRNA sense strand
gugcucaagaaguggaaau

SEQ ID NO: 2519131 - RNA, 19 nt, Homo sapiens
  misc_RNA (1)...(19): siRNA sense strand
uauacgagaaauaggacaa

SEQ ID NO: 2519132 - RNA, 19 nt, Homo sapiens
  misc_RNA (1)...(19): siRNA sense strand
caagacugucagagaggua

SEQ ID NO: 2519133 - RNA, 19 nt, Homo sapiens
  misc_RNA (1)...(19): siRNA sense strand
aggagaaggcauugaugau

SEQ ID NO: 2519134 - RNA, 19 nt, Homo sapiens
  misc_RNA (1)...(19): siRNA sense strand
auacgaaucgaguggaauu

SEQ ID NO: 2519135 - RNA, 19 nt, Homo sapiens
  misc_RNA (1)...(19): siRNA sense strand
aagaagaauuggaaagccu

SEQ ID NO: 2519136 - RNA, 19 nt, Homo sapiens
  misc_RNA (1)...(19): siRNA sense strand
acaucaagacugucagaga

SEQ ID NO: 2519137 - RNA, 19 nt, Homo sapiens
  misc_RNA (1)...(19): siRNA sense strand
cccagaaacaacagcaaau

SEQ ID NO: 2519138 - RNA, 19 nt, Homo sapiens
  misc_RNA (1)...(19): siRNA sense strand
cucaagaaguggaaaugau

SEQ ID NO: 2519139 - RNA, 19 nt, Homo sapiens
  misc_RNA (1)...(19): siRNA sense strand
uuauacgaaucgaguggaa

SEQ ID NO: 2519140 - RNA, 19 nt, Homo sapiens
  misc_RNA (1)...(19): siRNA sense strand
acucaggccgaaaguguua

SEQ ID NO: 2519141 - RNA, 19 nt, Homo sapiens
  misc_RNA (1)...(19): siRNA sense strand
ggagccagguauaccgcua

SEQ ID NO: 2519142 - RNA, 19 nt, Homo sapiens
  misc_RNA (1)...(19): siRNA sense strand
cacauggaagauagaguaa

SEQ ID NO: 2519143 - RNA, 19 nt, Homo sapiens
  misc_RNA (1)...(19): siRNA sense strand
acaagaaugugcagcccau

SEQ ID NO: 2519144 - RNA, 19 nt, Homo sapiens
  misc_RNA (1)...(19): siRNA sense strand
ccugagagagugaugcaau

SEQ ID NO: 2519145 - RNA, 19 nt, Homo sapiens
  misc_RNA (1)...(19): siRNA sense strand
agauauaauuacuggugcu

SEQ ID NO: 2519146 - RNA, 19 nt, Homo sapiens
  misc_RNA (1)...(19): siRNA sense strand
ugaaaagugaugugcagaa

SEQ ID NO: 2519147 - RNA, 19 nt, Homo sapiens
  misc_RNA (1)...(19): siRNA sense strand
guagaaugaaagaacacau

SEQ ID NO: 2519148 - RNA, 19 nt, Homo sapiens
  misc_RNA (1)...(19): siRNA sense strand
agauagaguaaauguggca

SEQ ID NO: 2519149 - RNA, 19 nt, Homo sapiens
  misc_RNA (1)...(19): siRNA sense strand
ggacaaagaacgccagcug

SEQ ID NO: 2519150 - RNA, 19 nt, Homo sapiens
  misc_RNA (1)...(19): siRNA sense strand
gaaaaggaggagaaggcau

SEQ ID NO: 2519151 - RNA, 19 nt, Homo sapiens
  misc_RNA (1)...(19): siRNA sense strand
auuccauauucucagguaa

SEQ ID NO: 2519152 - RNA, 19 nt, Homo sapiens
  misc_RNA (1)...(19): siRNA sense strand
ggugaaagcuguuguccug

SEQ ID NO: 2519153 - RNA, 19 nt, Homo sapiens
  misc_RNA (1)...(19): siRNA sense strand
cucuguuacccgagaaauu

SEQ ID NO: 2519154 - RNA, 19 nt, Homo sapiens
  misc_RNA (1)...(19): siRNA sense strand
ccggaagauuaucagcuau

SEQ ID NO: 2519155 - RNA, 19 nt, Homo sapiens
  misc_RNA (1)...(19): siRNA sense strand
cuguggaaaaggaggagaa

SEQ ID NO: 2519156 - RNA, 19 nt, Homo sapiens
  misc_RNA (1)...(19): siRNA sense strand
cugaaagaacucaccauga

SEQ ID NO: 2519157 - RNA, 19 nt, Homo sapiens
  misc_RNA (1)...(19): siRNA sense strand
acucaugagggcugaacuu

SEQ ID NO: 2519158 - RNA, 19 nt, Homo sapiens
  misc_RNA (1)...(19): siRNA sense strand
ggaccagcuugcaagacga

SEQ ID NO: 2519159 - RNA, 19 nt, Homo sapiens
  misc_RNA (1)...(19): siRNA sense strand
cagccagagacuugugaaa

SEQ ID NO: 2519160 - RNA, 19 nt, Homo sapiens
  misc_RNA (1)...(19): siRNA sense strand
ccucacuaacagaaggaaa

SEQ ID NO: 2519161 - RNA, 19 nt, Homo sapiens
  misc_RNA (1)...(19): siRNA sense strand
gcgaguacauagaucggaa

SEQ ID NO: 2519162 - RNA, 19 nt, Homo sapiens
  misc_RNA (1)...(19): siRNA sense strand
ccaccaaagcgaaggagga

SEQ ID NO: 2519163 - RNA, 19 nt, Homo sapiens
  misc_RNA (1)...(19): siRNA sense strand
ggagaaggccaaaggguuc

SEQ ID NO: 2519164 - RNA, 19 nt, Homo sapiens
  misc_RNA (1)...(19): siRNA sense strand
ccaagaagaauccaggcua

SEQ ID NO: 2519165 - RNA, 19 nt, Homo sapiens
  misc_RNA (1)...(19): siRNA sense strand
cuggagugccugagcagaa

SEQ ID NO: 2519166 - RNA, 19 nt, Homo sapiens
  misc_RNA (1)...(19): siRNA sense strand
caacaaaggaugaccccaa

SEQ ID NO: 2519167 - RNA, 19 nt, Homo sapiens
  misc_RNA (1)...(19): siRNA sense strand
aggagaaggccaaaggguu

SEQ ID NO: 2519168 - RNA, 19 nt, Homo sapiens
  misc_RNA (1)...(19): siRNA sense strand
caagaagaauccaggcuac

SEQ ID NO: 2519169 - RNA, 19 nt, Homo sapiens
  misc_RNA (1)...(19): siRNA sense strand
ugaaagaaucauggauaca

SEQ ID NO: 2519170 - RNA, 19 nt, Homo sapiens
  misc_RNA (1)...(19): siRNA sense strand
gaaucaaaucaucaagcau

SEQ ID NO: 2519171 - RNA, 19 nt, Homo sapiens
  misc_RNA (1)...(19): siRNA sense strand
agggugugaucgauggauu

SEQ ID NO: 2519172 - RNA, 19 nt, Homo sapiens
  misc_RNA (1)...(19): siRNA sense strand
gagacuugugaaagaauca

SEQ ID NO: 2519173 - RNA, 19 nt, Homo sapiens
  misc_RNA (1)...(19): siRNA sense strand
agaucuggaugaagggugu

SEQ ID NO: 2519174 - RNA, 19 nt, Homo sapiens
  misc_RNA (1)...(19): siRNA sense strand
agcaaauacuagagaaucu

SEQ ID NO: 2519175 - RNA, 19 nt, Homo sapiens
  misc_RNA (1)...(19): siRNA sense strand
agaauuaaaugaccgggaa

SEQ ID NO: 2519176 - RNA, 19 nt, Homo sapiens
  misc_RNA (1)...(19): siRNA sense strand
gggaagaaaacgaaaacca

SEQ ID NO: 2519177 - RNA, 19 nt, Homo sapiens
  misc_RNA (1)...(19): siRNA sense strand
auuaaaugaccgggaagaa

SEQ ID NO: 2519178 - RNA, 19 nt, Homo sapiens
  misc_RNA (1)...(19): siRNA sense strand
accaagaugacaagcaaau

SEQ ID NO: 2519179 - RNA, 19 nt, Homo sapiens
  misc_RNA (1)...(19): siRNA sense strand
gguugcaccaagaugacaa

SEQ ID NO: 2519180 - RNA, 19 nt, Homo sapiens
  misc_RNA (1)...(19): siRNA sense strand
uggaguuugaagagagaaa

SEQ ID NO: 2519181 - RNA, 19 nt, Homo sapiens
  misc_RNA (1)...(19): siRNA sense strand
agucagaaugugugugcaa

SEQ ID NO: 2519182 - RNA, 19 nt, Homo sapiens
  misc_RNA (1)...(19): siRNA sense strand
cugggaaaccuguggaaca

SEQ ID NO: 2519183 - RNA, 19 nt, Homo sapiens
  misc_RNA (1)...(19): siRNA sense strand
gcagugaggaggaggagga

SEQ ID NO: 2519184 - RNA, 19 nt, Homo sapiens
  misc_RNA (1)...(19): siRNA sense strand
gugaggaggaggaggagga

SEQ ID NO: 2519185 - RNA, 19 nt, Homo sapiens
  misc_RNA (1)...(19): siRNA sense strand
ugggcuggaugcugggaaa

SEQ ID NO: 2519186 - RNA, 19 nt, Homo sapiens
  misc_RNA (1)...(19): siRNA sense strand
aggaggaggaggaggaagu

SEQ ID NO: 2519187 - RNA, 19 nt, Homo sapiens
  misc_RNA (1)...(19): siRNA sense strand
gugagaaacuccuaaggga

SEQ ID NO: 2519188 - RNA, 19 nt, Homo sapiens
  misc_RNA (1)...(19): siRNA sense strand
auucacaggcaguggaaga

SEQ ID NO: 2519189 - RNA, 19 nt, Homo sapiens
  misc_RNA (1)...(19): siRNA sense strand
gagcagaggcagaaggcag

SEQ ID NO: 2519190 - RNA, 19 nt, Homo sapiens
  misc_RNA (1)...(19): siRNA sense strand
ucuuugagcuccugcgaca

SEQ ID NO: 2519191 - RNA, 19 nt, Homo sapiens
  misc_RNA (1)...(19): siRNA sense strand
gggaaguguaguagcucca

SEQ ID NO: 2519192 - RNA, 19 nt, Homo sapiens
  misc_RNA (1)...(19): siRNA sense strand
ccauguuuguccuggagau

SEQ ID NO: 2519193 - RNA, 19 nt, Homo sapiens
  misc_RNA (1)...(19): siRNA sense strand
guuugaagagagaaagcga

SEQ ID NO: 2519194 - RNA, 19 nt, Homo sapiens
  misc_RNA (1)...(19): siRNA sense strand
cagcuggagaagcgaauga

SEQ ID NO: 2519195 - RNA, 19 nt, Homo sapiens
  misc_RNA (1)...(19): siRNA sense strand
cgggaugaguucugggaca

SEQ ID NO: 2519196 - RNA, 19 nt, Homo sapiens
  misc_RNA (1)...(19): siRNA sense strand
gcuacgaugagcugggcaa

SEQ ID NO: 2519197 - RNA, 19 nt, Homo sapiens
  misc_RNA (1)...(19): siRNA sense strand
cuuaaguggaagagcgacu

SEQ ID NO: 2519198 - RNA, 19 nt, Homo sapiens
  misc_RNA (1)...(19): siRNA sense strand
acacggaggaggagagccu

SEQ ID NO: 2519199 - RNA, 19 nt, Homo sapiens
  misc_RNA (1)...(19): siRNA sense strand
cggaaaugugaacgggaaa

SEQ ID NO: 2519200 - RNA, 19 nt, Homo sapiens
  misc_RNA (1)...(19): siRNA sense strand
ccggaaaugugaacgggaa

SEQ ID NO: 2519201 - RNA, 19 nt, Homo sapiens
  misc_RNA (1)...(19): siRNA sense strand
cugaagaaaccgagcagga

SEQ ID NO: 2519202 - RNA, 19 nt, Homo sapiens
  misc_RNA (1)...(19): siRNA sense strand
gggaggagcuaguagucca

SEQ ID NO: 2519203 - RNA, 19 nt, Homo sapiens
  misc_RNA (1)...(19): siRNA sense strand
cagguuaugugauggccua

SEQ ID NO: 2519204 - RNA, 19 nt, Homo sapiens
  misc_RNA (1)...(19): siRNA sense strand
aaucagaagaugaagcuca

SEQ ID NO: 2519205 - RNA, 19 nt, Homo sapiens
  misc_RNA (1)...(19): siRNA sense strand
gaugagagccagagccagu

SEQ ID NO: 2519206 - RNA, 19 nt, Homo sapiens
  misc_RNA (1)...(19): siRNA sense strand
cccuauuccuggagcuaau

SEQ ID NO: 2519207 - RNA, 19 nt, Homo sapiens
  misc_RNA (1)...(19): siRNA sense strand
gggauagcaucaagccuga

SEQ ID NO: 2519208 - RNA, 19 nt, Homo sapiens
  misc_RNA (1)...(19): siRNA sense strand
ccuccaaagcccacaauca

SEQ ID NO: 2519209 - RNA, 19 nt, Homo sapiens
  misc_RNA (1)...(19): siRNA sense strand
agcaacaacuucaaggaga

SEQ ID NO: 2519210 - RNA, 19 nt, Homo sapiens
  misc_RNA (1)...(19): siRNA sense strand
ccugcuagccauaaagaca

SEQ ID NO: 2519211 - RNA, 19 nt, Homo sapiens
  misc_RNA (1)...(19): siRNA sense strand
uagaauaugccuuccggaa

SEQ ID NO: 2519212 - RNA, 19 nt, Homo sapiens
  misc_RNA (1)...(19): siRNA sense strand
ugacaagggugaugagagc

SEQ ID NO: 2519213 - RNA, 19 nt, Homo sapiens
  misc_RNA (1)...(19): siRNA sense strand
acuuagagauggggauuaa

SEQ ID NO: 2519214 - RNA, 19 nt, Homo sapiens
  misc_RNA (1)...(19): siRNA sense strand
ccauaagggcaaugacaag

SEQ ID NO: 2519215 - RNA, 19 nt, Homo sapiens
  misc_RNA (1)...(19): siRNA sense strand
ggaaaugugaacgggaaaa

SEQ ID NO: 2519216 - RNA, 19 nt, Homo sapiens
  misc_RNA (1)...(19): siRNA sense strand
ccuauguggaagugagcca

SEQ ID NO: 2519217 - RNA, 19 nt, Homo sapiens
  misc_RNA (1)...(19): siRNA sense strand
gcauggaggaguaugucau

SEQ ID NO: 2519218 - RNA, 19 nt, Homo sapiens
  misc_RNA (1)...(19): siRNA sense strand
agggcaaugacaaggguga

SEQ ID NO: 2519219 - RNA, 19 nt, Homo sapiens
  misc_RNA (1)...(19): siRNA sense strand
gugaugagagccagagcca

SEQ ID NO: 2519220 - RNA, 19 nt, Homo sapiens
  misc_RNA (1)...(19): siRNA sense strand
gcccacaaucagaagauga

SEQ ID NO: 2519221 - RNA, 19 nt, Homo sapiens
  misc_RNA (1)...(19): siRNA sense strand
cggccuacuuccugcugaa

SEQ ID NO: 2519222 - RNA, 19 nt, Homo sapiens
  misc_RNA (1)...(19): siRNA sense strand
ccaucaugauccugaccau

SEQ ID NO: 2519223 - RNA, 19 nt, Homo sapiens
  misc_RNA (1)...(19): siRNA sense strand
acggagggcaugagcauca

SEQ ID NO: 2519224 - RNA, 19 nt, Homo sapiens
  misc_RNA (1)...(19): siRNA sense strand
agauagcaaggaugaagaa

SEQ ID NO: 2519225 - RNA, 19 nt, Homo sapiens
  misc_RNA (1)...(19): siRNA sense strand
uguauuagaucuugggagu

SEQ ID NO: 2519226 - RNA, 19 nt, Homo sapiens
  misc_RNA (1)...(19): siRNA sense strand
ugcaaauucuggugggaga

SEQ ID NO: 2519227 - RNA, 19 nt, Homo sapiens
  misc_RNA (1)...(19): siRNA sense strand
ugauguugucagaggaaaa

SEQ ID NO: 2519228 - RNA, 19 nt, Homo sapiens
  misc_RNA (1)...(19): siRNA sense strand
gagucuacuaggcaggaaa

SEQ ID NO: 2519229 - RNA, 19 nt, Homo sapiens
  misc_RNA (1)...(19): siRNA sense strand
guuggaaagcacacaggaa

SEQ ID NO: 2519230 - RNA, 19 nt, Homo sapiens
  misc_RNA (1)...(19): siRNA sense strand
gaacaagauaagugggacc

SEQ ID NO: 2519231 - RNA, 19 nt, Homo sapiens
  misc_RNA (1)...(19): siRNA sense strand
agugauccuuacugggcaa

SEQ ID NO: 2519232 - RNA, 19 nt, Homo sapiens
  misc_RNA (1)...(19): siRNA sense strand
cugaagaacuccagggcau

SEQ ID NO: 2519233 - RNA, 19 nt, Homo sapiens
  misc_RNA (1)...(19): siRNA sense strand
gcaacgaguucaaggugga

SEQ ID NO: 2519234 - RNA, 19 nt, Homo sapiens
  misc_RNA (1)...(19): siRNA sense strand
ggaagcagcugguguggca

SEQ ID NO: 2519235 - RNA, 19 nt, Homo sapiens
  misc_RNA (1)...(19): siRNA sense strand
aggcagagauggagcggcu

SEQ ID NO: 2519236 - RNA, 19 nt, Homo sapiens
  misc_RNA (1)...(19): siRNA sense strand
gcugugaguccuacggcua

SEQ ID NO: 2519237 - RNA, 19 nt, Homo sapiens
  misc_RNA (1)...(19): siRNA sense strand
aguucaagguggagcugga

SEQ ID NO: 2519238 - RNA, 19 nt, Homo sapiens
  misc_RNA (1)...(19): siRNA sense strand
gacuaucagugcugggaga

SEQ ID NO: 2519239 - RNA, 19 nt, Homo sapiens
  misc_RNA (1)...(19): siRNA sense strand
gugcauuggcagagacaag

SEQ ID NO: 2519240 - RNA, 19 nt, Homo sapiens
  misc_RNA (1)...(19): siRNA sense strand
gggucaucgcccuggucaa

SEQ ID NO: 2519241 - RNA, 19 nt, Homo sapiens
  misc_RNA (1)...(19): siRNA sense strand
ccacaaucaacuuuggcau

SEQ ID NO: 2519242 - RNA, 19 nt, Homo sapiens
  misc_RNA (1)...(19): siRNA sense strand
agaagacucugcuggguca

SEQ ID NO: 2519243 - RNA, 19 nt, Homo sapiens
  misc_RNA (1)...(19): siRNA sense strand
gaggauugugggaggccaa

SEQ ID NO: 2519244 - RNA, 19 nt, Homo sapiens
  misc_RNA (1)...(19): siRNA sense strand
gcuacaaggaugagcggga

SEQ ID NO: 2519245 - RNA, 19 nt, Homo sapiens
  misc_RNA (1)...(19): siRNA sense strand
aggaaggcauggagcgcuu

SEQ ID NO: 2519246 - RNA, 19 nt, Homo sapiens
  misc_RNA (1)...(19): siRNA sense strand
gaggauaaauucaaggauc

SEQ ID NO: 2519247 - RNA, 19 nt, Homo sapiens
  misc_RNA (1)...(19): siRNA sense strand
aaggaaaagagaaggggaa

SEQ ID NO: 2519248 - RNA, 19 nt, Homo sapiens
  misc_RNA (1)...(19): siRNA sense strand
caauaagugcagacagcau

SEQ ID NO: 2519249 - RNA, 19 nt, Homo sapiens
  misc_RNA (1)...(19): siRNA sense strand
gggaaauggagcgaaggaa

SEQ ID NO: 2519250 - RNA, 19 nt, Homo sapiens
  misc_RNA (1)...(19): siRNA sense strand
ggagaugcugggagggagu

SEQ ID NO: 2519251 - RNA, 19 nt, Homo sapiens
  misc_RNA (1)...(19): siRNA sense strand
ggaaauagccauugcccug

SEQ ID NO: 2519252 - RNA, 19 nt, Homo sapiens
  misc_RNA (1)...(19): siRNA sense strand
cggucacugcaucgggaaa

SEQ ID NO: 2519253 - RNA, 19 nt, Homo sapiens
  misc_RNA (1)...(19): siRNA sense strand
cuacaaggaugagcgggaa

SEQ ID NO: 2519254 - RNA, 19 nt, Homo sapiens
  misc_RNA (1)...(19): siRNA sense strand
aagagaaggggaagggaga

SEQ ID NO: 2519255 - RNA, 19 nt, Homo sapiens
  misc_RNA (1)...(19): siRNA sense strand
ggaaacuagucuuuaccca

SEQ ID NO: 2519256 - RNA, 19 nt, Homo sapiens
  misc_RNA (1)...(19): siRNA sense strand
ggguggaggaauugaacaa

SEQ ID NO: 2519257 - RNA, 19 nt, Homo sapiens
  misc_RNA (1)...(19): siRNA sense strand
agguagaaaagguggaaaa

SEQ ID NO: 2519258 - RNA, 19 nt, Homo sapiens
  misc_RNA (1)...(19): siRNA sense strand
ugggaagauuacugaggaa

SEQ ID NO: 2519259 - RNA, 19 nt, Homo sapiens
  misc_RNA (1)...(19): siRNA sense strand
uggacuuagaugagcuuaa

SEQ ID NO: 2519260 - RNA, 19 nt, Homo sapiens
  misc_RNA (1)...(19): siRNA sense strand
uggaaagacugcugcacca

SEQ ID NO: 2519261 - RNA, 19 nt, Homo sapiens
  misc_RNA (1)...(19): siRNA sense strand
ccuacaaggguaagaagga

SEQ ID NO: 2519262 - RNA, 19 nt, Homo sapiens
  misc_RNA (1)...(19): siRNA sense strand
ccugaugaccguuuggcaa

SEQ ID NO: 2519263 - RNA, 19 nt, Homo sapiens
  misc_RNA (1)...(19): siRNA sense strand
cauucuggguguagggagu

SEQ ID NO: 2519264 - RNA, 19 nt, Homo sapiens
  misc_RNA (1)...(19): siRNA sense strand
ugauauugucccuguggua

SEQ ID NO: 2519265 - RNA, 19 nt, Homo sapiens
  misc_RNA (1)...(19): siRNA sense strand
cgacagacuuccugccaac

SEQ ID NO: 2519266 - RNA, 19 nt, Homo sapiens
  misc_RNA (1)...(19): siRNA sense strand
agugcaacaugcuggaaca

SEQ ID NO: 2519267 - RNA, 19 nt, Homo sapiens
  misc_RNA (1)...(19): siRNA sense strand
aagcacgaccagcgggaau

SEQ ID NO: 2519268 - RNA, 19 nt, Homo sapiens
  misc_RNA (1)...(19): siRNA sense strand
uuacugaggaagaggucau

SEQ ID NO: 2519269 - RNA, 19 nt, Homo sapiens
  misc_RNA (1)...(19): siRNA sense strand
acaaggguaagaaggacaa

SEQ ID NO: 2519270 - RNA, 19 nt, Homo sapiens
  misc_RNA (1)...(19): siRNA sense strand
aggaagagguaccggagga

SEQ ID NO: 2519271 - RNA, 19 nt, Homo sapiens
  misc_RNA (1)...(19): siRNA sense strand
cggcaagaaugucgggaag

SEQ ID NO: 2519272 - RNA, 19 nt, Homo sapiens
  misc_RNA (1)...(19): siRNA sense strand
cggaggaagcugaagaagu

SEQ ID NO: 2519273 - RNA, 19 nt, Homo sapiens
  misc_RNA (1)...(19): siRNA sense strand
ugguauccuucgugcgcua

SEQ ID NO: 2519274 - RNA, 19 nt, Homo sapiens
  misc_RNA (1)...(19): siRNA sense strand
gcuacgagccacuggagga

SEQ ID NO: 2519275 - RNA, 19 nt, Homo sapiens
  misc_RNA (1)...(19): siRNA sense strand
gaagcaaggcggagagcag

SEQ ID NO: 2519276 - RNA, 19 nt, Homo sapiens
  misc_RNA (1)...(19): siRNA sense strand
cgggaaggucaucaucaaa

SEQ ID NO: 2519277 - RNA, 19 nt, Homo sapiens
  misc_RNA (1)...(19): siRNA sense strand
gaucuaaaucaauggccaa

SEQ ID NO: 2519278 - RNA, 19 nt, Homo sapiens
  misc_RNA (1)...(19): siRNA sense strand
gcgagagguuggcugggaa

SEQ ID NO: 2519279 - RNA, 19 nt, Homo sapiens
  misc_RNA (1)...(19): siRNA sense strand
uggaaaggaaacaacuaaa

SEQ ID NO: 2519280 - RNA, 19 nt, Homo sapiens
  misc_RNA (1)...(19): siRNA sense strand
ggaucuaaaucaauggcca

SEQ ID NO: 2519281 - RNA, 19 nt, Homo sapiens
  misc_RNA (1)...(19): siRNA sense strand
auuuggaaagagaaggaaa

SEQ ID NO: 2519282 - RNA, 19 nt, Homo sapiens
  misc_RNA (1)...(19): siRNA sense strand
uuuggaaagagaaggaaau

SEQ ID NO: 2519283 - RNA, 19 nt, Homo sapiens
  misc_RNA (1)...(19): siRNA sense strand
guaaaagagcuguggaauc

SEQ ID NO: 2519284 - RNA, 19 nt, Homo sapiens
  misc_RNA (1)...(19): siRNA sense strand
uggcugggaagaagggcaa

SEQ ID NO: 2519285 - RNA, 19 nt, Homo sapiens
  misc_RNA (1)...(19): siRNA sense strand
uugcaaaagcgcugaucua

SEQ ID NO: 2519286 - RNA, 19 nt, Homo sapiens
  misc_RNA (1)...(19): siRNA sense strand
cuacagaauccgggagcca

SEQ ID NO: 2519287 - RNA, 19 nt, Homo sapiens
  misc_RNA (1)...(19): siRNA sense strand
uggcaacaaacgagaucuu

SEQ ID NO: 2519288 - RNA, 19 nt, Homo sapiens
  misc_RNA (1)...(19): siRNA sense strand
acuuguguuuggaaaggaa

SEQ ID NO: 2519289 - RNA, 19 nt, Homo sapiens
  misc_RNA (1)...(19): siRNA sense strand
agaagaaaggcaaaggcaa

SEQ ID NO: 2519290 - RNA, 19 nt, Homo sapiens
  misc_RNA (1)...(19): siRNA sense strand
ccauacaagaucagcgaau

SEQ ID NO: 2519291 - RNA, 19 nt, Homo sapiens
  misc_RNA (1)...(19): siRNA sense strand
acaagaagaagaaaggcaa

SEQ ID NO: 2519292 - RNA, 19 nt, Homo sapiens
  misc_RNA (1)...(19): siRNA sense strand
gaagaaaggcaaaggcaag

SEQ ID NO: 2519293 - RNA, 19 nt, Homo sapiens
  misc_RNA (1)...(19): siRNA sense strand
ggacagacgugugggagga

SEQ ID NO: 2519294 - RNA, 19 nt, Homo sapiens
  misc_RNA (1)...(19): siRNA sense strand
aggaggugagcgaggacaa

SEQ ID NO: 2519295 - RNA, 19 nt, Homo sapiens
  misc_RNA (1)...(19): siRNA sense strand
auacaagaucagcgaauca

SEQ ID NO: 2519296 - RNA, 19 nt, Homo sapiens
  misc_RNA (1)...(19): siRNA sense strand
gacaagaagaagaaaggca

SEQ ID NO: 2519297 - RNA, 19 nt, Homo sapiens
  misc_RNA (1)...(19): siRNA sense strand
aagacaugcugguggccau

SEQ ID NO: 2519298 - RNA, 19 nt, Homo sapiens
  misc_RNA (1)...(19): siRNA sense strand
caucaaagguauaccgcug

SEQ ID NO: 2519299 - RNA, 19 nt, Homo sapiens
  misc_RNA (1)...(19): siRNA sense strand
aggccaacugcgagggcuu

SEQ ID NO: 2519300 - RNA, 19 nt, Homo sapiens
  misc_RNA (1)...(19): siRNA sense strand
ccugcuaccuggacgccaa

SEQ ID NO: 2519301 - RNA, 19 nt, Homo sapiens
  misc_RNA (1)...(19): siRNA sense strand
agccacggccagaggacaa

SEQ ID NO: 2519302 - RNA, 19 nt, Homo sapiens
  misc_RNA (1)...(19): siRNA sense strand
augcagaagcugugugucu

SEQ ID NO: 2519303 - RNA, 19 nt, Homo sapiens
  misc_RNA (1)...(19): siRNA sense strand
agaucuggacggugguaga

SEQ ID NO: 2519304 - RNA, 19 nt, Homo sapiens
  misc_RNA (1)...(19): siRNA sense strand
agagaagcgaccuugcaaa

SEQ ID NO: 2519305 - RNA, 19 nt, Homo sapiens
  misc_RNA (1)...(19): siRNA sense strand
agaaagaauucgagcucca

SEQ ID NO: 2519306 - RNA, 19 nt, Homo sapiens
  misc_RNA (1)...(19): siRNA sense strand
ccaaagaacucgaugugca

SEQ ID NO: 2519307 - RNA, 19 nt, Homo sapiens
  misc_RNA (1)...(19): siRNA sense strand
gagaguaccucaaggagca

SEQ ID NO: 2519308 - RNA, 19 nt, Homo sapiens
  misc_RNA (1)...(19): siRNA sense strand
gagaaggaacuguuggaga

SEQ ID NO: 2519309 - RNA, 19 nt, Homo sapiens
  misc_RNA (1)...(19): siRNA sense strand
uggaugugguagacagcaa

SEQ ID NO: 2519310 - RNA, 19 nt, Homo sapiens
  misc_RNA (1)...(19): siRNA sense strand
cggucaaccuggagcuuca

SEQ ID NO: 2519311 - RNA, 19 nt, Homo sapiens
  misc_RNA (1)...(19): siRNA sense strand
gcgcaucaaucuuggagga

SEQ ID NO: 2519312 - RNA, 19 nt, Homo sapiens
  misc_RNA (1)...(19): siRNA sense strand
gagaagaacaggcugggau

SEQ ID NO: 2519313 - RNA, 19 nt, Homo sapiens
  misc_RNA (1)...(19): siRNA sense strand
ccagaauggagaaggaacu

SEQ ID NO: 2519314 - RNA, 19 nt, Homo sapiens
  misc_RNA (1)...(19): siRNA sense strand
cugaggauuauguggaaga

SEQ ID NO: 2519315 - RNA, 19 nt, Homo sapiens
  misc_RNA (1)...(19): siRNA sense strand
ggaaacaccuggaguggag

SEQ ID NO: 2519316 - RNA, 19 nt, Homo sapiens
  misc_RNA (1)...(19): siRNA sense strand
agaaaagggaggagaguac

SEQ ID NO: 2519317 - RNA, 19 nt, Homo sapiens
  misc_RNA (1)...(19): siRNA sense strand
cugcaugagcacagcuaca

SEQ ID NO: 2519318 - RNA, 19 nt, Homo sapiens
  misc_RNA (1)...(19): siRNA sense strand
ccaagguugccuauggaau

SEQ ID NO: 2519319 - RNA, 19 nt, Homo sapiens
  misc_RNA (1)...(19): siRNA sense strand
cuguucagcccguguuuaa

SEQ ID NO: 2519320 - RNA, 19 nt, Homo sapiens
  misc_RNA (1)...(19): siRNA sense strand
ucagcuauuuguugggaca

SEQ ID NO: 2519321 - RNA, 19 nt, Homo sapiens
  misc_RNA (1)...(19): siRNA sense strand
cacaauaagccaaagaacu

SEQ ID NO: 2519322 - RNA, 19 nt, Homo sapiens
  misc_RNA (1)...(19): siRNA sense strand
cuauuuguugggacagaaa

SEQ ID NO: 2519323 - RNA, 19 nt, Homo sapiens
  misc_RNA (1)...(19): siRNA sense strand
caucaaucuuggaggaagc

SEQ ID NO: 2519324 - RNA, 19 nt, Homo sapiens
  misc_RNA (1)...(19): siRNA sense strand
uggagcaggcuaagcagaa

SEQ ID NO: 2519325 - RNA, 19 nt, Homo sapiens
  misc_RNA (1)...(19): siRNA sense strand
ccacaauaagccaaagaac

SEQ ID NO: 2519326 - RNA, 19 nt, Homo sapiens
  misc_RNA (1)...(19): siRNA sense strand
cgcugaggauuauguggaa

SEQ ID NO: 2519327 - RNA, 19 nt, Homo sapiens
  misc_RNA (1)...(19): siRNA sense strand
gcccagagaaagagaggca

SEQ ID NO: 2519328 - RNA, 19 nt, Homo sapiens
  misc_RNA (1)...(19): siRNA sense strand
gucuucaggcccagagaaa

SEQ ID NO: 2519329 - RNA, 19 nt, Homo sapiens
  misc_RNA (1)...(19): siRNA sense strand
gggcuauggaggugaugga

SEQ ID NO: 2519330 - RNA, 19 nt, Homo sapiens
  misc_RNA (1)...(19): siRNA sense strand
cggcagaaacuggacacaa

SEQ ID NO: 2519331 - RNA, 19 nt, Homo sapiens
  misc_RNA (1)...(19): siRNA sense strand
ggucaucaccagccggaga

SEQ ID NO: 2519332 - RNA, 19 nt, Homo sapiens
  misc_RNA (1)...(19): siRNA sense strand
ccauuugcagccagaggaa

SEQ ID NO: 2519333 - RNA, 19 nt, Homo sapiens
  misc_RNA (1)...(19): siRNA sense strand
cuauggaggugauggacgu

SEQ ID NO: 2519334 - RNA, 19 nt, Homo sapiens
  misc_RNA (1)...(19): siRNA sense strand
ggagaugaaucaaggcguu

SEQ ID NO: 2519335 - RNA, 19 nt, Homo sapiens
  misc_RNA (1)...(19): siRNA sense strand
cggaaagagaagcaugcaa

SEQ ID NO: 2519336 - RNA, 19 nt, Homo sapiens
  misc_RNA (1)...(19): siRNA sense strand
ugaaacagcugcaggccuu

SEQ ID NO: 2519337 - RNA, 19 nt, Homo sapiens
  misc_RNA (1)...(19): siRNA sense strand
ccaaaauuacugaggucaa

SEQ ID NO: 2519338 - RNA, 19 nt, Homo sapiens
  misc_RNA (1)...(19): siRNA sense strand
ugucaguacagcucggaaa

SEQ ID NO: 2519339 - RNA, 19 nt, Homo sapiens
  misc_RNA (1)...(19): siRNA sense strand
ucgauuuagcagaaagcaa

SEQ ID NO: 2519340 - RNA, 19 nt, Homo sapiens
  misc_RNA (1)...(19): siRNA sense strand
gaggaucaacugaggccaa

SEQ ID NO: 2519341 - RNA, 19 nt, Homo sapiens
  misc_RNA (1)...(19): siRNA sense strand
uauuacagaaccagagcaa

SEQ ID NO: 2519342 - RNA, 19 nt, Homo sapiens
  misc_RNA (1)...(19): siRNA sense strand
ugaaaguuuuagagccaaa

SEQ ID NO: 2519343 - RNA, 19 nt, Homo sapiens
  misc_RNA (1)...(19): siRNA sense strand
acuaccagcaggaggcuaa

SEQ ID NO: 2519344 - RNA, 19 nt, Homo sapiens
  misc_RNA (1)...(19): siRNA sense strand
cuugaaaguuuuagagcca

SEQ ID NO: 2519345 - RNA, 19 nt, Homo sapiens
  misc_RNA (1)...(19): siRNA sense strand
ggaaagagaagcaugcaac

SEQ ID NO: 2519346 - RNA, 19 nt, Homo sapiens
  misc_RNA (1)...(19): siRNA sense strand
uguggaaguguuugcuaaa

SEQ ID NO: 2519347 - RNA, 19 nt, Homo sapiens
  misc_RNA (1)...(19): siRNA sense strand
ugcaaggaucagugaaaca

SEQ ID NO: 2519348 - RNA, 19 nt, Homo sapiens
  misc_RNA (1)...(19): siRNA sense strand
guggcugagaugaaggaau

SEQ ID NO: 2519349 - RNA, 19 nt, Homo sapiens
  misc_RNA (1)...(19): siRNA sense strand
uggaugaacugcaaggauc

SEQ ID NO: 2519350 - RNA, 19 nt, Homo sapiens
  misc_RNA (1)...(19): siRNA sense strand
ccucagaauuauagcgugu

SEQ ID NO: 2519351 - RNA, 19 nt, Homo sapiens
  misc_RNA (1)...(19): siRNA sense strand
ccagagaaugaaugggaga

SEQ ID NO: 2519352 - RNA, 19 nt, Homo sapiens
  misc_RNA (1)...(19): siRNA sense strand
cugacggagugcugggcaa

SEQ ID NO: 2519353 - RNA, 19 nt, Homo sapiens
  misc_RNA (1)...(19): siRNA sense strand
agaaugaaugggagauaca

SEQ ID NO: 2519354 - RNA, 19 nt, Homo sapiens
  misc_RNA (1)...(19): siRNA sense strand
gggaauuuuguuaccgaaa

SEQ ID NO: 2519355 - RNA, 19 nt, Homo sapiens
  misc_RNA (1)...(19): siRNA sense strand
gugcgcuaccagagaauga

SEQ ID NO: 2519356 - RNA, 19 nt, Homo sapiens
  misc_RNA (1)...(19): siRNA sense strand
cugaaaucuuccagcugaa

SEQ ID NO: 2519357 - RNA, 19 nt, Homo sapiens
  misc_RNA (1)...(19): siRNA sense strand
gcccaagagcucagacaca

SEQ ID NO: 2519358 - RNA, 19 nt, Homo sapiens
  misc_RNA (1)...(19): siRNA sense strand
ccauggaccccgagaauga

SEQ ID NO: 2519359 - RNA, 19 nt, Homo sapiens
  misc_RNA (1)...(19): siRNA sense strand
gauuccaggugcagcccaa

SEQ ID NO: 2519360 - RNA, 19 nt, Homo sapiens
  misc_RNA (1)...(19): siRNA sense strand
aggaagaggaggaggauga

SEQ ID NO: 2519361 - RNA, 19 nt, Homo sapiens
  misc_RNA (1)...(19): siRNA sense strand
aagaaagcuuugaaggaau

SEQ ID NO: 2519362 - RNA, 19 nt, Homo sapiens
  misc_RNA (1)...(19): siRNA sense strand
ccugggaaugcuugagaaa

SEQ ID NO: 2519363 - RNA, 19 nt, Homo sapiens
  misc_RNA (1)...(19): siRNA sense strand
uuaacaaagcacaggaaga

SEQ ID NO: 2519364 - RNA, 19 nt, Homo sapiens
  misc_RNA (1)...(19): siRNA sense strand
caccauugucugaggaaga

SEQ ID NO: 2519365 - RNA, 19 nt, Homo sapiens
  misc_RNA (1)...(19): siRNA sense strand
aggcagaagaaguagaguu

SEQ ID NO: 2519366 - RNA, 19 nt, Homo sapiens
  misc_RNA (1)...(19): siRNA sense strand
gcuaaggagaauggaacaa

SEQ ID NO: 2519367 - RNA, 19 nt, Homo sapiens
  misc_RNA (1)...(19): siRNA sense strand
guaccaaacaagaacccaa

SEQ ID NO: 2519368 - RNA, 19 nt, Homo sapiens
  misc_RNA (1)...(19): siRNA sense strand
ucuauaacuucaaggcaga

SEQ ID NO: 2519369 - RNA, 19 nt, Homo sapiens
  misc_RNA (1)...(19): siRNA sense strand
acucaaacaaugaagcuau

SEQ ID NO: 2519370 - RNA, 19 nt, Homo sapiens
  misc_RNA (1)...(19): siRNA sense strand
guguuuaucaucuggacaa

SEQ ID NO: 2519371 - RNA, 19 nt, Homo sapiens
  misc_RNA (1)...(19): siRNA sense strand
gaaaaugagaaguaccaaa

SEQ ID NO: 2519372 - RNA, 19 nt, Homo sapiens
  misc_RNA (1)...(19): siRNA sense strand
gggaaauaucaaacaucau

SEQ ID NO: 2519373 - RNA, 19 nt, Homo sapiens
  misc_RNA (1)...(19): siRNA sense strand
ucauagucagucugggaua

SEQ ID NO: 2519374 - RNA, 19 nt, Homo sapiens
  misc_RNA (1)...(19): siRNA sense strand
cugaggaagaggaggagga

SEQ ID NO: 2519375 - RNA, 19 nt, Homo sapiens
  misc_RNA (1)...(19): siRNA sense strand
aaacaggaggcuaaggaga

SEQ ID NO: 2519376 - RNA, 19 nt, Homo sapiens
  misc_RNA (1)...(19): siRNA sense strand
uaccuuuauuggagacaaa

SEQ ID NO: 2519377 - RNA, 19 nt, Homo sapiens
  misc_RNA (1)...(19): siRNA sense strand
aggaggaggaugaacaaaa

SEQ ID NO: 2519378 - RNA, 19 nt, Homo sapiens
  misc_RNA (1)...(19): siRNA sense strand
aagcacaggaagaugauuu

SEQ ID NO: 2519379 - RNA, 19 nt, Homo sapiens
  misc_RNA (1)...(19): siRNA sense strand
aagcuuugaaggaaugaaa

SEQ ID NO: 2519380 - RNA, 19 nt, Homo sapiens
  misc_RNA (1)...(19): siRNA sense strand
aagaggaggaggaugaaca

SEQ ID NO: 2519381 - RNA, 19 nt, Homo sapiens
  misc_RNA (1)...(19): siRNA sense strand
ugucugaggaagaggagga

SEQ ID NO: 2519382 - RNA, 19 nt, Homo sapiens
  misc_RNA (1)...(19): siRNA sense strand
aacaggaggcuaaggagaa

SEQ ID NO: 2519383 - RNA, 19 nt, Homo sapiens
  misc_RNA (1)...(19): siRNA sense strand
ggagaauggaacaaaccuu

SEQ ID NO: 2519384 - RNA, 19 nt, Homo sapiens
  misc_RNA (1)...(19): siRNA sense strand
ggcuaaggagaauggaaca

SEQ ID NO: 2519385 - RNA, 19 nt, Homo sapiens
  misc_RNA (1)...(19): siRNA sense strand
cuucggaggaacauuguaa

SEQ ID NO: 2519386 - RNA, 19 nt, Homo sapiens
  misc_RNA (1)...(19): siRNA sense strand
acccaauggaaauaguaaa

SEQ ID NO: 2519387 - RNA, 19 nt, Homo sapiens
  misc_RNA (1)...(19): siRNA sense strand
gaggcuaaggagaauggaa

SEQ ID NO: 2519388 - RNA, 19 nt, Homo sapiens
  misc_RNA (1)...(19): siRNA sense strand
uccugaaguuugauggaga

SEQ ID NO: 2519389 - RNA, 19 nt, Homo sapiens
  misc_RNA (1)...(19): siRNA sense strand
caucauagucagucuggga

SEQ ID NO: 2519390 - RNA, 19 nt, Homo sapiens
  misc_RNA (1)...(19): siRNA sense strand
uauuaaaacuucggaggaa

SEQ ID NO: 2519391 - RNA, 19 nt, Homo sapiens
  misc_RNA (1)...(19): siRNA sense strand
agaggaggaggaugaacaa

SEQ ID NO: 2519392 - RNA, 19 nt, Homo sapiens
  misc_RNA (1)...(19): siRNA sense strand
gcuuugaaggaaugaaaau

SEQ ID NO: 2519393 - RNA, 19 nt, Homo sapiens
  misc_RNA (1)...(19): siRNA sense strand
agacaaaaccgcaaugcau

SEQ ID NO: 2519394 - RNA, 19 nt, Homo sapiens
  misc_RNA (1)...(19): siRNA sense strand
gcugaaagacugaauauua

SEQ ID NO: 2519395 - RNA, 19 nt, Homo sapiens
  misc_RNA (1)...(19): siRNA sense strand
gggaaauguugaagcgcca

SEQ ID NO: 2519396 - RNA, 19 nt, Homo sapiens
  misc_RNA (1)...(19): siRNA sense strand
aaguaagggaugaagauga

SEQ ID NO: 2519397 - RNA, 19 nt, Homo sapiens
  misc_RNA (1)...(19): siRNA sense strand
ugugaagaaguuagaagaa

SEQ ID NO: 2519398 - RNA, 19 nt, Homo sapiens
  misc_RNA (1)...(19): siRNA sense strand
gcuuccagcaauagagaca

SEQ ID NO: 2519399 - RNA, 19 nt, Homo sapiens
  misc_RNA (1)...(19): siRNA sense strand
cagcaauagagacagggua

SEQ ID NO: 2519400 - RNA, 19 nt, Homo sapiens
  misc_RNA (1)...(19): siRNA sense strand
aaacagaauuaugaggaga

SEQ ID NO: 2519401 - RNA, 19 nt, Homo sapiens
  misc_RNA (1)...(19): siRNA sense strand
aggagagacuuuugcgcaa

SEQ ID NO: 2519402 - RNA, 19 nt, Homo sapiens
  misc_RNA (1)...(19): siRNA sense strand
uguuucaagucaagcggaa

SEQ ID NO: 2519403 - RNA, 19 nt, Homo sapiens
  misc_RNA (1)...(19): siRNA sense strand
cuguuaguuuagacuguaa

SEQ ID NO: 2519404 - RNA, 19 nt, Homo sapiens
  misc_RNA (1)...(19): siRNA sense strand
aucugaagcuagugagcau

SEQ ID NO: 2519405 - RNA, 19 nt, Homo sapiens
  misc_RNA (1)...(19): siRNA sense strand
gcaucguguuucaagucaa

SEQ ID NO: 2519406 - RNA, 19 nt, Homo sapiens
  misc_RNA (1)...(19): siRNA sense strand
aagcaaagcucgcagcgca

SEQ ID NO: 2519407 - RNA, 19 nt, Homo sapiens
  misc_RNA (1)...(19): siRNA sense strand
ccgagaaguaagggaugaa

SEQ ID NO: 2519408 - RNA, 19 nt, Homo sapiens
  misc_RNA (1)...(19): siRNA sense strand
agaauuaugaggagaugca

SEQ ID NO: 2519409 - RNA, 19 nt, Homo sapiens
  misc_RNA (1)...(19): siRNA sense strand
gguugaguacacagugaau

SEQ ID NO: 2519410 - RNA, 19 nt, Homo sapiens
  misc_RNA (1)...(19): siRNA sense strand
aagcaauugcagaaguuga

SEQ ID NO: 2519411 - RNA, 19 nt, Homo sapiens
  misc_RNA (1)...(19): siRNA sense strand
uagaagaauccuuggcacu

SEQ ID NO: 2519412 - RNA, 19 nt, Homo sapiens
  misc_RNA (1)...(19): siRNA sense strand
agacuguaagcuaaggcaa

SEQ ID NO: 2519413 - RNA, 19 nt, Homo sapiens
  misc_RNA (1)...(19): siRNA sense strand
cagaaguugauguggguac

SEQ ID NO: 2519414 - RNA, 19 nt, Homo sapiens
  misc_RNA (1)...(19): siRNA sense strand
ugguggagcugcgggaaau

SEQ ID NO: 2519415 - RNA, 19 nt, Homo sapiens
  misc_RNA (1)...(19): siRNA sense strand
ccuccaaguuugugcgcau

SEQ ID NO: 2519416 - RNA, 19 nt, Homo sapiens
  misc_RNA (1)...(19): siRNA sense strand
uugaagaguuucuggagga

SEQ ID NO: 2519417 - RNA, 19 nt, Homo sapiens
  misc_RNA (1)...(19): siRNA sense strand
ccgaguuuccuuuggguga

SEQ ID NO: 2519418 - RNA, 19 nt, Homo sapiens
  misc_RNA (1)...(19): siRNA sense strand
aggacagcaucuuggacuu

SEQ ID NO: 2519419 - RNA, 19 nt, Homo sapiens
  misc_RNA (1)...(19): siRNA sense strand
acucaggugugaagccgua

SEQ ID NO: 2519420 - RNA, 19 nt, Homo sapiens
  misc_RNA (1)...(19): siRNA sense strand
acaucaaggugcaccgcuu

SEQ ID NO: 2519421 - RNA, 19 nt, Homo sapiens
  misc_RNA (1)...(19): siRNA sense strand
gagaaagauuuguuggaga

SEQ ID NO: 2519422 - RNA, 19 nt, Homo sapiens
  misc_RNA (1)...(19): siRNA sense strand
gcauaguguccauggaaaa

SEQ ID NO: 2519423 - RNA, 19 nt, Homo sapiens
  misc_RNA (1)...(19): siRNA sense strand
caucauuguccauggguga

SEQ ID NO: 2519424 - RNA, 19 nt, Homo sapiens
  misc_RNA (1)...(19): siRNA sense strand
cugcauuaaccauggaaaa

SEQ ID NO: 2519425 - RNA, 19 nt, Homo sapiens
  misc_RNA (1)...(19): siRNA sense strand
ugagagagucccagagcca

SEQ ID NO: 2519426 - RNA, 19 nt, Homo sapiens
  misc_RNA (1)...(19): siRNA sense strand
uggacggagagcagcauaa

SEQ ID NO: 2519427 - RNA, 19 nt, Homo sapiens
  misc_RNA (1)...(19): siRNA sense strand
ggacaaauggccuaccuga

SEQ ID NO: 2519428 - RNA, 19 nt, Homo sapiens
  misc_RNA (1)...(19): siRNA sense strand
uggcuaucauuguuggcua

SEQ ID NO: 2519429 - RNA, 19 nt, Homo sapiens
  misc_RNA (1)...(19): siRNA sense strand
gagaagaaguacugguugc

SEQ ID NO: 2519430 - RNA, 19 nt, Homo sapiens
  misc_RNA (1)...(19): siRNA sense strand
ggagagagagccaagagga

SEQ ID NO: 2519431 - RNA, 19 nt, Homo sapiens
  misc_RNA (1)...(19): siRNA sense strand
agaaagauuuguuggagag

SEQ ID NO: 2519432 - RNA, 19 nt, Homo sapiens
  misc_RNA (1)...(19): siRNA sense strand
ggaacagauaagaauggau

SEQ ID NO: 2519433 - RNA, 19 nt, Homo sapiens
  misc_RNA (1)...(19): siRNA sense strand
gcagcauaaacccaggaaa

SEQ ID NO: 2519434 - RNA, 19 nt, Homo sapiens
  misc_RNA (1)...(19): siRNA sense strand
gccaagaggagaagcccau

SEQ ID NO: 2519435 - RNA, 19 nt, Homo sapiens
  misc_RNA (1)...(19): siRNA sense strand
cauuagaggcauucagaag

SEQ ID NO: 2519436 - RNA, 19 nt, Homo sapiens
  misc_RNA (1)...(19): siRNA sense strand
ucaggaaguucuuaggcga

SEQ ID NO: 2519437 - RNA, 19 nt, Homo sapiens
  misc_RNA (1)...(19): siRNA sense strand
gcuccuaacucauugggaa

SEQ ID NO: 2519438 - RNA, 19 nt, Homo sapiens
  misc_RNA (1)...(19): siRNA sense strand
ugacauaugcauugggagu

SEQ ID NO: 2519439 - RNA, 19 nt, Homo sapiens
  misc_RNA (1)...(19): siRNA sense strand
gcaugcagugaaaggaaca

SEQ ID NO: 2519440 - RNA, 19 nt, Homo sapiens
  misc_RNA (1)...(19): siRNA sense strand
gagucagcguggugggcaa

SEQ ID NO: 2519441 - RNA, 19 nt, Homo sapiens
  misc_RNA (1)...(19): siRNA sense strand
ccauuuugcuagugaaaga

SEQ ID NO: 2519442 - RNA, 19 nt, Homo sapiens
  misc_RNA (1)...(19): siRNA sense strand
cauuagggaggaagaucaa

SEQ ID NO: 2519443 - RNA, 19 nt, Homo sapiens
  misc_RNA (1)...(19): siRNA sense strand
cguccacgaucgaagaaaa

SEQ ID NO: 2519444 - RNA, 19 nt, Homo sapiens
  misc_RNA (1)...(19): siRNA sense strand
ucauuagggaggaagauca

SEQ ID NO: 2519445 - RNA, 19 nt, Homo sapiens
  misc_RNA (1)...(19): siRNA sense strand
ccuccuagccacacagcuu

SEQ ID NO: 2519446 - RNA, 19 nt, Homo sapiens
  misc_RNA (1)...(19): siRNA sense strand
agaagaaggcuauuggucu

SEQ ID NO: 2519447 - RNA, 19 nt, Homo sapiens
  misc_RNA (1)...(19): siRNA sense strand
cagggaagucgaagggcaa

SEQ ID NO: 2519448 - RNA, 19 nt, Homo sapiens
  misc_RNA (1)...(19): siRNA sense strand
uggaaauggcucuggacau

SEQ ID NO: 2519449 - RNA, 19 nt, Homo sapiens
  misc_RNA (1)...(19): siRNA sense strand
agcuggagguagaggaaga

SEQ ID NO: 2519450 - RNA, 19 nt, Homo sapiens
  misc_RNA (1)...(19): siRNA sense strand
agucgaagggcaaagacaa

SEQ ID NO: 2519451 - RNA, 19 nt, Homo sapiens
  misc_RNA (1)...(19): siRNA sense strand
cgucagaggugcugcugca

SEQ ID NO: 2519452 - RNA, 19 nt, Homo sapiens
  misc_RNA (1)...(19): siRNA sense strand
aaagacaaggagaggaaaa

SEQ ID NO: 2519453 - RNA, 19 nt, Homo sapiens
  misc_RNA (1)...(19): siRNA sense strand
uugaagaggcacauggaga

SEQ ID NO: 2519454 - RNA, 19 nt, Homo sapiens
  misc_RNA (1)...(19): siRNA sense strand
cugcaaugguucacgcuga

SEQ ID NO: 2519455 - RNA, 19 nt, Homo sapiens
  misc_RNA (1)...(19): siRNA sense strand
ccuccauaaagaagagaca

SEQ ID NO: 2519456 - RNA, 19 nt, Homo sapiens
  misc_RNA (1)...(19): siRNA sense strand
ugggaagccaauuggagaa

SEQ ID NO: 2519457 - RNA, 19 nt, Homo sapiens
  misc_RNA (1)...(19): siRNA sense strand
cucuggagcuggagguaga

SEQ ID NO: 2519458 - RNA, 19 nt, Homo sapiens
  misc_RNA (1)...(19): siRNA sense strand
ccauauauuaguggagaga

SEQ ID NO: 2519459 - RNA, 19 nt, Homo sapiens
  misc_RNA (1)...(19): siRNA sense strand
uggagaagcugcuggcgga

SEQ ID NO: 2519460 - RNA, 19 nt, Homo sapiens
  misc_RNA (1)...(19): siRNA sense strand
cugcagaacaccagugacu

SEQ ID NO: 2519461 - RNA, 19 nt, Homo sapiens
  misc_RNA (1)...(19): siRNA sense strand
cggcgcugccuacgagaaa

SEQ ID NO: 2519462 - RNA, 19 nt, Homo sapiens
  misc_RNA (1)...(19): siRNA sense strand
cagaaggccugcaggugga

SEQ ID NO: 2519463 - RNA, 19 nt, Homo sapiens
  misc_RNA (1)...(19): siRNA sense strand
cugaagaggaggaugguuc

SEQ ID NO: 2519464 - RNA, 19 nt, Homo sapiens
  misc_RNA (1)...(19): siRNA sense strand
gcaccaagccaucggguag

SEQ ID NO: 2519465 - RNA, 19 nt, Homo sapiens
  misc_RNA (1)...(19): siRNA sense strand
uccauaaagaagagacaga

SEQ ID NO: 2519466 - RNA, 19 nt, Homo sapiens
  misc_RNA (1)...(19): siRNA sense strand
acgagaaacccaaguucau

SEQ ID NO: 2519467 - RNA, 19 nt, Homo sapiens
  misc_RNA (1)...(19): siRNA sense strand
aaagagaagccuagcgaag

SEQ ID NO: 2519468 - RNA, 19 nt, Homo sapiens
  misc_RNA (1)...(19): siRNA sense strand
ggaggaugguucuggccca

SEQ ID NO: 2519469 - RNA, 19 nt, Homo sapiens
  misc_RNA (1)...(19): siRNA sense strand
aggacauggcccugaacau

SEQ ID NO: 2519470 - RNA, 19 nt, Homo sapiens
  misc_RNA (1)...(19): siRNA sense strand
ucagagacgaugagggaug

SEQ ID NO: 2519471 - RNA, 19 nt, Homo sapiens
  misc_RNA (1)...(19): siRNA sense strand
cagcaguuccggaagcaga

SEQ ID NO: 2519472 - RNA, 19 nt, Homo sapiens
  misc_RNA (1)...(19): siRNA sense strand
gcgaggaccugaagaggag

SEQ ID NO: 2519473 - RNA, 19 nt, Homo sapiens
  misc_RNA (1)...(19): siRNA sense strand
aaggaaaggugcaggcggu

SEQ ID NO: 2519474 - RNA, 19 nt, Homo sapiens
  misc_RNA (1)...(19): siRNA sense strand
agacccaggcccaggugua

SEQ ID NO: 2519475 - RNA, 19 nt, Homo sapiens
  misc_RNA (1)...(19): siRNA sense strand
agguguacagugaggacau

SEQ ID NO: 2519476 - RNA, 19 nt, Homo sapiens
  misc_RNA (1)...(19): siRNA sense strand
agguagaggaagagggugc

SEQ ID NO: 2519477 - RNA, 19 nt, Homo sapiens
  misc_RNA (1)...(19): siRNA sense strand
ucagggaagucgaagggca

SEQ ID NO: 2519478 - RNA, 19 nt, Homo sapiens
  misc_RNA (1)...(19): siRNA sense strand
gaacaauggugucuggaga

SEQ ID NO: 2519479 - RNA, 19 nt, Homo sapiens
  misc_RNA (1)...(19): siRNA sense strand
agagauaauaagagagagu

SEQ ID NO: 2519480 - RNA, 19 nt, Homo sapiens
  misc_RNA (1)...(19): siRNA sense strand
gggcauuugcagagcauca

SEQ ID NO: 2519481 - RNA, 19 nt, Homo sapiens
  misc_RNA (1)...(19): siRNA sense strand
agauaauaagagagagucu

SEQ ID NO: 2519482 - RNA, 19 nt, Homo sapiens
  misc_RNA (1)...(19): siRNA sense strand
ucucagaauuggagggcuc

SEQ ID NO: 2519483 - RNA, 19 nt, Homo sapiens
  misc_RNA (1)...(19): siRNA sense strand
uaaaacaggcagagaacau

SEQ ID NO: 2519484 - RNA, 19 nt, Homo sapiens
  misc_RNA (1)...(19): siRNA sense strand
uggcauauguggagacgcu

SEQ ID NO: 2519485 - RNA, 19 nt, Homo sapiens
  misc_RNA (1)...(19): siRNA sense strand
cuaaagaagaacugcugga

SEQ ID NO: 2519486 - RNA, 19 nt, Homo sapiens
  misc_RNA (1)...(19): siRNA sense strand
ugguaaaacaggcagagaa

SEQ ID NO: 2519487 - RNA, 19 nt, Homo sapiens
  misc_RNA (1)...(19): siRNA sense strand
gguaaaacaggcagagaac

SEQ ID NO: 2519488 - RNA, 19 nt, Homo sapiens
  misc_RNA (1)...(19): siRNA sense strand
gagaacaucugcaggcaag

SEQ ID NO: 2519489 - RNA, 19 nt, Homo sapiens
  misc_RNA (1)...(19): siRNA sense strand
aauccagccaagagauaau

SEQ ID NO: 2519490 - RNA, 19 nt, Homo sapiens
  misc_RNA (1)...(19): siRNA sense strand
uggcagaaggacaagaaga

SEQ ID NO: 2519491 - RNA, 19 nt, Homo sapiens
  misc_RNA (1)...(19): siRNA sense strand
aaggacaagaagagguauu

SEQ ID NO: 2519492 - RNA, 19 nt, Homo sapiens
  misc_RNA (1)...(19): siRNA sense strand
gaagaagacuccagagagg

SEQ ID NO: 2519493 - RNA, 19 nt, Homo sapiens
  misc_RNA (1)...(19): siRNA sense strand
uaacuguggcagaaggaca

SEQ ID NO: 2519494 - RNA, 19 nt, Homo sapiens
  misc_RNA (1)...(19): siRNA sense strand
cuuaaggaauggauggcua

SEQ ID NO: 2519495 - RNA, 19 nt, Homo sapiens
  misc_RNA (1)...(19): siRNA sense strand
auguaugcguugucagaaa

SEQ ID NO: 2519496 - RNA, 19 nt, Homo sapiens
  misc_RNA (1)...(19): siRNA sense strand
ugaugauagcagugacuaa

SEQ ID NO: 2519497 - RNA, 19 nt, Homo sapiens
  misc_RNA (1)...(19): siRNA sense strand
acuaaguugugcaggaaaa

SEQ ID NO: 2519498 - RNA, 19 nt, Homo sapiens
  misc_RNA (1)...(19): siRNA sense strand
ccucuaagccugugcggau

SEQ ID NO: 2519499 - RNA, 19 nt, Homo sapiens
  misc_RNA (1)...(19): siRNA sense strand
ucuuauuggagaaggagua

SEQ ID NO: 2519500 - RNA, 19 nt, Homo sapiens
  misc_RNA (1)...(19): siRNA sense strand
cggagaaaucagaauggau

SEQ ID NO: 2519501 - RNA, 19 nt, Homo sapiens
  misc_RNA (1)...(19): siRNA sense strand
gaucagacucuuacagcca

SEQ ID NO: 2519502 - RNA, 19 nt, Homo sapiens
  misc_RNA (1)...(19): siRNA sense strand
ggagaaaucagaauggaug

SEQ ID NO: 2519503 - RNA, 19 nt, Homo sapiens
  misc_RNA (1)...(19): siRNA sense strand
uggcuaaucaagacaccaa

SEQ ID NO: 2519504 - RNA, 19 nt, Homo sapiens
  misc_RNA (1)...(19): siRNA sense strand
auauugucauccagaagaa

SEQ ID NO: 2519505 - RNA, 19 nt, Homo sapiens
  misc_RNA (1)...(19): siRNA sense strand
uugacuaaguugugcagga

SEQ ID NO: 2519506 - RNA, 19 nt, Homo sapiens
  misc_RNA (1)...(19): siRNA sense strand
gcuacggagaaaucagaau

SEQ ID NO: 2519507 - RNA, 19 nt, Homo sapiens
  misc_RNA (1)...(19): siRNA sense strand
augcguugucagaaagcaa

SEQ ID NO: 2519508 - RNA, 19 nt, Homo sapiens
  misc_RNA (1)...(19): siRNA sense strand
gcgccaguguguagagaaa

SEQ ID NO: 2519509 - RNA, 19 nt, Homo sapiens
  misc_RNA (1)...(19): siRNA sense strand
cuuuaaagccaguguguau

SEQ ID NO: 2519510 - RNA, 19 nt, Homo sapiens
  misc_RNA (1)...(19): siRNA sense strand
ugaaaaugguugaggaaca

SEQ ID NO: 2519511 - RNA, 19 nt, Homo sapiens
  misc_RNA (1)...(19): siRNA sense strand
ccaaaagaaaggaagaaaa

SEQ ID NO: 2519512 - RNA, 19 nt, Homo sapiens
  misc_RNA (1)...(19): siRNA sense strand
caugagaggcauagagaca

SEQ ID NO: 2519513 - RNA, 19 nt, Homo sapiens
  misc_RNA (1)...(19): siRNA sense strand
ggauaugguuaauaggaga

SEQ ID NO: 2519514 - RNA, 19 nt, Homo sapiens
  misc_RNA (1)...(19): siRNA sense strand
agaaauagauaaugcgguu

SEQ ID NO: 2519515 - RNA, 19 nt, Homo sapiens
  misc_RNA (1)...(19): siRNA sense strand
aaagauuagugaagagaca

SEQ ID NO: 2519516 - RNA, 19 nt, Homo sapiens
  misc_RNA (1)...(19): siRNA sense strand
acaaagaagaacauggcaa

SEQ ID NO: 2519517 - RNA, 19 nt, Homo sapiens
  misc_RNA (1)...(19): siRNA sense strand
cagcauagauggaagucga

SEQ ID NO: 2519518 - RNA, 19 nt, Homo sapiens
  misc_RNA (1)...(19): siRNA sense strand
ggucagacuuaaugaggca

SEQ ID NO: 2519519 - RNA, 19 nt, Homo sapiens
  misc_RNA (1)...(19): siRNA sense strand
gauuaaggcagaagauaca

SEQ ID NO: 2519520 - RNA, 19 nt, Homo sapiens
  misc_RNA (1)...(19): siRNA sense strand
uugaaugccaucagagaua

SEQ ID NO: 2519521 - RNA, 19 nt, Homo sapiens
  misc_RNA (1)...(19): siRNA sense strand
gugacgaagacgaauguaa

SEQ ID NO: 2519522 - RNA, 19 nt, Homo sapiens
  misc_RNA (1)...(19): siRNA sense strand
cugcuagacuugacaggaa

SEQ ID NO: 2519523 - RNA, 19 nt, Homo sapiens
  misc_RNA (1)...(19): siRNA sense strand
agauuagugaagagacaaa

SEQ ID NO: 2519524 - RNA, 19 nt, Homo sapiens
  misc_RNA (1)...(19): siRNA sense strand
ggccaagacaagaagaauu

SEQ ID NO: 2519525 - RNA, 19 nt, Homo sapiens
  misc_RNA (1)...(19): siRNA sense strand
agauguuguugcuaagaaa

SEQ ID NO: 2519526 - RNA, 19 nt, Homo sapiens
  misc_RNA (1)...(19): siRNA sense strand
aggcauagagacagugcua

SEQ ID NO: 2519527 - RNA, 19 nt, Homo sapiens
  misc_RNA (1)...(19): siRNA sense strand
uaacacaagaaaugagcaa

SEQ ID NO: 2519528 - RNA, 19 nt, Homo sapiens
  misc_RNA (1)...(19): siRNA sense strand
caacaauggaagugggaag

SEQ ID NO: 2519529 - RNA, 19 nt, Homo sapiens
  misc_RNA (1)...(19): siRNA sense strand
agaaaaggacaaagaagaa

SEQ ID NO: 2519530 - RNA, 19 nt, Homo sapiens
  misc_RNA (1)...(19): siRNA sense strand
ggcagaagauacaggcaga

SEQ ID NO: 2519531 - RNA, 19 nt, Homo sapiens
  misc_RNA (1)...(19): siRNA sense strand
agacagugcuacuaaucaa

SEQ ID NO: 2519532 - RNA, 19 nt, Homo sapiens
  misc_RNA (1)...(19): siRNA sense strand
gagaaaaugucacaagcaa

SEQ ID NO: 2519533 - RNA, 19 nt, Homo sapiens
  misc_RNA (1)...(19): siRNA sense strand
uugaacagaugaaggaaga

SEQ ID NO: 2519534 - RNA, 19 nt, Homo sapiens
  misc_RNA (1)...(19): siRNA sense strand
cugcaucaauucuggacaa

SEQ ID NO: 2519535 - RNA, 19 nt, Homo sapiens
  misc_RNA (1)...(19): siRNA sense strand
gagaggaaauaaugaggca

SEQ ID NO: 2519536 - RNA, 19 nt, Homo sapiens
  misc_RNA (1)...(19): siRNA sense strand
agaugaugcuuauagacaa

SEQ ID NO: 2519537 - RNA, 19 nt, Homo sapiens
  misc_RNA (1)...(19): siRNA sense strand
aagaugaagcucaggaaaa

SEQ ID NO: 2519538 - RNA, 19 nt, Homo sapiens
  misc_RNA (1)...(19): siRNA sense strand
aggaacauauggagcaaca

SEQ ID NO: 2519539 - RNA, 19 nt, Homo sapiens
  misc_RNA (1)...(19): siRNA sense strand
uggauaugaaagagaaaga

SEQ ID NO: 2519540 - RNA, 19 nt, Homo sapiens
  misc_RNA (1)...(19): siRNA sense strand
guguguagagaaagaggaa

SEQ ID NO: 2519541 - RNA, 19 nt, Homo sapiens
  misc_RNA (1)...(19): siRNA sense strand
ugguuaaaagagagaguaa

SEQ ID NO: 2519542 - RNA, 19 nt, Homo sapiens
  misc_RNA (1)...(19): siRNA sense strand
acuuaaugaggcagaacaa

SEQ ID NO: 2519543 - RNA, 19 nt, Homo sapiens
  misc_RNA (1)...(19): siRNA sense strand
gguuuaaguacaaugaaga

SEQ ID NO: 2519544 - RNA, 19 nt, Homo sapiens
  misc_RNA (1)...(19): siRNA sense strand
auuuagaguccuugaaaca

SEQ ID NO: 2519545 - RNA, 19 nt, Homo sapiens
  misc_RNA (1)...(19): siRNA sense strand
auaaugcgguuguggcaaa

SEQ ID NO: 2519546 - RNA, 19 nt, Homo sapiens
  misc_RNA (1)...(19): siRNA sense strand
uggaugaauuugaugucua

SEQ ID NO: 2519547 - RNA, 19 nt, Homo sapiens
  misc_RNA (1)...(19): siRNA sense strand
gagaacuggauaugaaaga

SEQ ID NO: 2519548 - RNA, 19 nt, Homo sapiens
  misc_RNA (1)...(19): siRNA sense strand
ggagaauugccauggacuu

SEQ ID NO: 2519549 - RNA, 19 nt, Homo sapiens
  misc_RNA (1)...(19): siRNA sense strand
gcauagagacagugcuacu

SEQ ID NO: 2519550 - RNA, 19 nt, Homo sapiens
  misc_RNA (1)...(19): siRNA sense strand
ugaaagagaaagaacuaga

SEQ ID NO: 2519551 - RNA, 19 nt, Homo sapiens
  misc_RNA (1)...(19): siRNA sense strand
gcaccagaauguauggcau

SEQ ID NO: 2519552 - RNA, 19 nt, Homo sapiens
  misc_RNA (1)...(19): siRNA sense strand
cgauaauaguuucugaguu

SEQ ID NO: 2519553 - RNA, 19 nt, Homo sapiens
  misc_RNA (1)...(19): siRNA sense strand
cgauuaaggcagaagauac

SEQ ID NO: 2519554 - RNA, 19 nt, Homo sapiens
  misc_RNA (1)...(19): siRNA sense strand
ugugaaagauggacagaac

SEQ ID NO: 2519555 - RNA, 19 nt, Homo sapiens
  misc_RNA (1)...(19): siRNA sense strand
gccaguguguagagaaaga

SEQ ID NO: 2519556 - RNA, 19 nt, Homo sapiens
  misc_RNA (1)...(19): siRNA sense strand
gcaacugaaagaauugaaa

SEQ ID NO: 2519557 - RNA, 19 nt, Homo sapiens
  misc_RNA (1)...(19): siRNA sense strand
ggaagaugaagcucaggaa

SEQ ID NO: 2519558 - RNA, 19 nt, Homo sapiens
  misc_RNA (1)...(19): siRNA sense strand
gaacuggauaugaaagaga

SEQ ID NO: 2519559 - RNA, 19 nt, Homo sapiens
  misc_RNA (1)...(19): siRNA sense strand
aagccaguguguaugguaa

SEQ ID NO: 2519560 - RNA, 19 nt, Homo sapiens
  misc_RNA (1)...(19): siRNA sense strand
ggagaaugagguugaaaau

SEQ ID NO: 2519561 - RNA, 19 nt, Homo sapiens
  misc_RNA (1)...(19): siRNA sense strand
cccagagcguauagaagua

SEQ ID NO: 2519562 - RNA, 19 nt, Homo sapiens
  misc_RNA (1)...(19): siRNA sense strand
aaagaagagcugauugcaa

SEQ ID NO: 2519563 - RNA, 19 nt, Homo sapiens
  misc_RNA (1)...(19): siRNA sense strand
cugaacgguuggaaagaca

SEQ ID NO: 2519564 - RNA, 19 nt, Homo sapiens
  misc_RNA (1)...(19): siRNA sense strand
agcacagauucaagacaua

SEQ ID NO: 2519565 - RNA, 19 nt, Homo sapiens
  misc_RNA (1)...(19): siRNA sense strand
uagagaaagaggaacguuu

SEQ ID NO: 2519566 - RNA, 19 nt, Homo sapiens
  misc_RNA (1)...(19): siRNA sense strand
gaacgguuggaaagacaaa

SEQ ID NO: 2519567 - RNA, 19 nt, Homo sapiens
  misc_RNA (1)...(19): siRNA sense strand
aggaagagucagagguucu

SEQ ID NO: 2519568 - RNA, 19 nt, Homo sapiens
  misc_RNA (1)...(19): siRNA sense strand
cagaauauaaagaaggagu

SEQ ID NO: 2519569 - RNA, 19 nt, Homo sapiens
  misc_RNA (1)...(19): siRNA sense strand
cagagcugccggaggacaa

SEQ ID NO: 2519570 - RNA, 19 nt, Homo sapiens
  misc_RNA (1)...(19): siRNA sense strand
acaacaaaauggaacacaa

SEQ ID NO: 2519571 - RNA, 19 nt, Homo sapiens
  misc_RNA (1)...(19): siRNA sense strand
uugcaggacgaguggaaau

SEQ ID NO: 2519572 - RNA, 19 nt, Homo sapiens
  misc_RNA (1)...(19): siRNA sense strand
aguuaauggcugucgccua

SEQ ID NO: 2519573 - RNA, 19 nt, Homo sapiens
  misc_RNA (1)...(19): siRNA sense strand
uuuccaaguucauggcaau

SEQ ID NO: 2519574 - RNA, 19 nt, Homo sapiens
  misc_RNA (1)...(19): siRNA sense strand
guggaguguugcaggacga

SEQ ID NO: 2519575 - RNA, 19 nt, Homo sapiens
  misc_RNA (1)...(19): siRNA sense strand
uugaaagaggaguggacuu

SEQ ID NO: 2519576 - RNA, 19 nt, Homo sapiens
  misc_RNA (1)...(19): siRNA sense strand
uuggaaaguuuauaggcau

SEQ ID NO: 2519577 - RNA, 19 nt, Homo sapiens
  misc_RNA (1)...(19): siRNA sense strand
auauaaagaaggaguugga

SEQ ID NO: 2519578 - RNA, 19 nt, Homo sapiens
  misc_RNA (1)...(19): siRNA sense strand
guuggaaaguuuauaggca

SEQ ID NO: 2519579 - RNA, 19 nt, Homo sapiens
  misc_RNA (1)...(19): siRNA sense strand
guuuccaaguucauggcaa

SEQ ID NO: 2519580 - RNA, 19 nt, Homo sapiens
  misc_RNA (1)...(19): siRNA sense strand
ccaacaacccuggaggcua

SEQ ID NO: 2519581 - RNA, 19 nt, Homo sapiens
  misc_RNA (1)...(19): siRNA sense strand
caacaacccuggaggcuag

SEQ ID NO: 2519582 - RNA, 19 nt, Homo sapiens
  misc_RNA (1)...(19): siRNA sense strand
agugauugaagguggagau

SEQ ID NO: 2519583 - RNA, 19 nt, Homo sapiens
  misc_RNA (1)...(19): siRNA sense strand
agacacuacuacaacaaaa

SEQ ID NO: 2519584 - RNA, 19 nt, Homo sapiens
  misc_RNA (1)...(19): siRNA sense strand
acaaaauggaacacaagaa

SEQ ID NO: 2519585 - RNA, 19 nt, Homo sapiens
  misc_RNA (1)...(19): siRNA sense strand
gcauggacuuguugggaga

SEQ ID NO: 2519586 - RNA, 19 nt, Homo sapiens
  misc_RNA (1)...(19): siRNA sense strand
acacaagaguucaggacca

SEQ ID NO: 2519587 - RNA, 19 nt, Homo sapiens
  misc_RNA (1)...(19): siRNA sense strand
cagcauuaugugagaccaa

SEQ ID NO: 2519588 - RNA, 19 nt, Homo sapiens
  misc_RNA (1)...(19): siRNA sense strand
gcagaaaacaagaggcuca

SEQ ID NO: 2519589 - RNA, 19 nt, Homo sapiens
  misc_RNA (1)...(19): siRNA sense strand
cugaagacguggcuggcau

SEQ ID NO: 2519590 - RNA, 19 nt, Homo sapiens
  misc_RNA (1)...(19): siRNA sense strand
cuucuuuaguugacuggaa

SEQ ID NO: 2519591 - RNA, 19 nt, Homo sapiens
  misc_RNA (1)...(19): siRNA sense strand
ccuucaagcagcugacaca

SEQ ID NO: 2519592 - RNA, 19 nt, Homo sapiens
  misc_RNA (1)...(19): siRNA sense strand
gcauuaugugagaccaaau

SEQ ID NO: 2519593 - RNA, 19 nt, Homo sapiens
  misc_RNA (1)...(19): siRNA sense strand
uggucgacucccagcauua

SEQ ID NO: 2519594 - RNA, 19 nt, Homo sapiens
  misc_RNA (1)...(19): siRNA sense strand
cucaauuuggauagagauu

SEQ ID NO: 2519595 - RNA, 19 nt, Homo sapiens
  misc_RNA (1)...(19): siRNA sense strand
cauuucaguguaaagguaa

SEQ ID NO: 2519596 - RNA, 19 nt, Homo sapiens
  misc_RNA (1)...(19): siRNA sense strand
augcagaagcgcagaucaa

SEQ ID NO: 2519597 - RNA, 19 nt, Homo sapiens
  misc_RNA (1)...(19): siRNA sense strand
gaagaaauccacagcccua

SEQ ID NO: 2519598 - RNA, 19 nt, Homo sapiens
  misc_RNA (1)...(19): siRNA sense strand
cuguggaggucuagaucau

SEQ ID NO: 2519599 - RNA, 19 nt, Homo sapiens
  misc_RNA (1)...(19): siRNA sense strand
ggagcuugaaggaggguga

SEQ ID NO: 2519600 - RNA, 19 nt, Homo sapiens
  misc_RNA (1)...(19): siRNA sense strand
ucuuugugcaccagaguaa

SEQ ID NO: 2519601 - RNA, 19 nt, Homo sapiens
  misc_RNA (1)...(19): siRNA sense strand
aggaagaagaagaaaucca

SEQ ID NO: 2519602 - RNA, 19 nt, Homo sapiens
  misc_RNA (1)...(19): siRNA sense strand
gcagaagcgcagaucaaaa

SEQ ID NO: 2519603 - RNA, 19 nt, Homo sapiens
  misc_RNA (1)...(19): siRNA sense strand
ggccaaaaggaaagagcau

SEQ ID NO: 2519604 - RNA, 19 nt, Homo sapiens
  misc_RNA (1)...(19): siRNA sense strand
cuuucgagaggaagaagaa

SEQ ID NO: 2519605 - RNA, 19 nt, Homo sapiens
  misc_RNA (1)...(19): siRNA sense strand
agggugaggcaguggaguu

SEQ ID NO: 2519606 - RNA, 19 nt, Homo sapiens
  misc_RNA (1)...(19): siRNA sense strand
ccuacuuucgagaggaaga

SEQ ID NO: 2519607 - RNA, 19 nt, Homo sapiens
  misc_RNA (1)...(19): siRNA sense strand
ugaaggagggugaggcagu

SEQ ID NO: 2519608 - RNA, 19 nt, Homo sapiens
  misc_RNA (1)...(19): siRNA sense strand
acuuaaaggagcugacaga

SEQ ID NO: 2519609 - RNA, 19 nt, Homo sapiens
  misc_RNA (1)...(19): siRNA sense strand
cggugguaucccugggcaa

SEQ ID NO: 2519610 - RNA, 19 nt, Homo sapiens
  misc_RNA (1)...(19): siRNA sense strand
gagaaaaccugucugguca

SEQ ID NO: 2519611 - RNA, 19 nt, Homo sapiens
  misc_RNA (1)...(19): siRNA sense strand
gggcaugacuuaaaggagc

SEQ ID NO: 2519612 - RNA, 19 nt, Homo sapiens
  misc_RNA (1)...(19): siRNA sense strand
uuagcaagguggugccaga

SEQ ID NO: 2519613 - RNA, 19 nt, Homo sapiens
  misc_RNA (1)...(19): siRNA sense strand
aggaaaagaaagaggccua

SEQ ID NO: 2519614 - RNA, 19 nt, Homo sapiens
  misc_RNA (1)...(19): siRNA sense strand
gcuuaaaguugaaacagga

SEQ ID NO: 2519615 - RNA, 19 nt, Homo sapiens
  misc_RNA (1)...(19): siRNA sense strand
ggccauaaugacuggguga

SEQ ID NO: 2519616 - RNA, 19 nt, Homo sapiens
  misc_RNA (1)...(19): siRNA sense strand
uaauggacgccgagaacau

SEQ ID NO: 2519617 - RNA, 19 nt, Homo sapiens
  misc_RNA (1)...(19): siRNA sense strand
ugaaacaggaaaagaaaga

SEQ ID NO: 2519618 - RNA, 19 nt, Homo sapiens
  misc_RNA (1)...(19): siRNA sense strand
gauaagacagugagggccu

SEQ ID NO: 2519619 - RNA, 19 nt, Homo sapiens
  misc_RNA (1)...(19): siRNA sense strand
cugucugcuuccaaggaua

SEQ ID NO: 2519620 - RNA, 19 nt, Homo sapiens
  misc_RNA (1)...(19): siRNA sense strand
ggaccaugagacuguggaa

SEQ ID NO: 2519621 - RNA, 19 nt, Homo sapiens
  misc_RNA (1)...(19): siRNA sense strand
guugaaacaggaaaagaaa

SEQ ID NO: 2519622 - RNA, 19 nt, Homo sapiens
  misc_RNA (1)...(19): siRNA sense strand
ggaucauggaaucugcaua

SEQ ID NO: 2519623 - RNA, 19 nt, Homo sapiens
  misc_RNA (1)...(19): siRNA sense strand
cuuugguaaucaaguacaa

SEQ ID NO: 2519624 - RNA, 19 nt, Homo sapiens
  misc_RNA (1)...(19): siRNA sense strand
aguugaaacaggaaaagaa

SEQ ID NO: 2519625 - RNA, 19 nt, Homo sapiens
  misc_RNA (1)...(19): siRNA sense strand
accaggugccggagaaauu

SEQ ID NO: 2519626 - RNA, 19 nt, Homo sapiens
  misc_RNA (1)...(19): siRNA sense strand
caaucaagugacuggguuu

SEQ ID NO: 2519627 - RNA, 19 nt, Homo sapiens
  misc_RNA (1)...(19): siRNA sense strand
ucaacaaaccaguucgcua

SEQ ID NO: 2519628 - RNA, 19 nt, Homo sapiens
  misc_RNA (1)...(19): siRNA sense strand
uugccauuaaggagagaaa

SEQ ID NO: 2519629 - RNA, 19 nt, Homo sapiens
  misc_RNA (1)...(19): siRNA sense strand
guauuagagcaaucaacaa

SEQ ID NO: 2519630 - RNA, 19 nt, Homo sapiens
  misc_RNA (1)...(19): siRNA sense strand
gguucucauucaaggauca

SEQ ID NO: 2519631 - RNA, 19 nt, Homo sapiens
  misc_RNA (1)...(19): siRNA sense strand
cguacuuugucauggagau

SEQ ID NO: 2519632 - RNA, 19 nt, Homo sapiens
  misc_RNA (1)...(19): siRNA sense strand
acuuugucauggagauauu

SEQ ID NO: 2519633 - RNA, 19 nt, Homo sapiens
  misc_RNA (1)...(19): siRNA sense strand
ggggaaggcaaaugagcuu

SEQ ID NO: 2519634 - RNA, 19 nt, Homo sapiens
  misc_RNA (1)...(19): siRNA sense strand
cuuuaaagacugugacccu

SEQ ID NO: 2519635 - RNA, 19 nt, Homo sapiens
  misc_RNA (1)...(19): siRNA sense strand
gagccagagaagaggccaa

SEQ ID NO: 2519636 - RNA, 19 nt, Homo sapiens
  misc_RNA (1)...(19): siRNA sense strand
cagaacagaaagaggcuga

SEQ ID NO: 2519637 - RNA, 19 nt, Homo sapiens
  misc_RNA (1)...(19): siRNA sense strand
acauauaacaccagcggca

SEQ ID NO: 2519638 - RNA, 19 nt, Homo sapiens
  misc_RNA (1)...(19): siRNA sense strand
uggaugagcuggauggugu

SEQ ID NO: 2519639 - RNA, 19 nt, Homo sapiens
  misc_RNA (1)...(19): siRNA sense strand
agguuaaagaagaaggagu

SEQ ID NO: 2519640 - RNA, 19 nt, Homo sapiens
  misc_RNA (1)...(19): siRNA sense strand
acagauucgcauccggaaa

SEQ ID NO: 2519641 - RNA, 19 nt, Homo sapiens
  misc_RNA (1)...(19): siRNA sense strand
ccgagcacugacagcgaaa

SEQ ID NO: 2519642 - RNA, 19 nt, Homo sapiens
  misc_RNA (1)...(19): siRNA sense strand
ccugaaaggguuacggucu

SEQ ID NO: 2519643 - RNA, 19 nt, Homo sapiens
  misc_RNA (1)...(19): siRNA sense strand
guguaaacaaugugggaaa

SEQ ID NO: 2519644 - RNA, 19 nt, Homo sapiens
  misc_RNA (1)...(19): siRNA sense strand
gugucaagcaugugggcaa

SEQ ID NO: 2519645 - RNA, 19 nt, Homo sapiens
  misc_RNA (1)...(19): siRNA sense strand
guguaaacaauguggaaaa

SEQ ID NO: 2519646 - RNA, 19 nt, Homo sapiens
  misc_RNA (1)...(19): siRNA sense strand
guguaaacaauguggaaaa

SEQ ID NO: 2519647 - RNA, 19 nt, Homo sapiens
  misc_RNA (1)...(19): siRNA sense strand
gcucuauaaaugugaacaa

SEQ ID NO: 2519648 - RNA, 19 nt, Homo sapiens
  misc_RNA (1)...(19): siRNA sense strand
ccuuaugaguguaaacaau

SEQ ID NO: 2519649 - RNA, 19 nt, Homo sapiens
  misc_RNA (1)...(19): siRNA sense strand
ccuuaugaguguaaacaau

SEQ ID NO: 2519650 - RNA, 19 nt, Homo sapiens
  misc_RNA (1)...(19): siRNA sense strand
ccuuaugaguguaaacaau

SEQ ID NO: 2519651 - RNA, 19 nt, Homo sapiens
  misc_RNA (1)...(19): siRNA sense strand
ccguauaagugucaagcau

SEQ ID NO: 2519652 - RNA, 19 nt, Homo sapiens
  misc_RNA (1)...(19): siRNA sense strand
augcaagcagugugggaaa

SEQ ID NO: 2519653 - RNA, 19 nt, Homo sapiens
  misc_RNA (1)...(19): siRNA sense strand
auuuaaagccaauggguca

SEQ ID NO: 2519654 - RNA, 19 nt, Homo sapiens
  misc_RNA (1)...(19): siRNA sense strand
gaacaaugugggaaggcuu

SEQ ID NO: 2519655 - RNA, 19 nt, Homo sapiens
  misc_RNA (1)...(19): siRNA sense strand
aaucuaaggaacagacaau

SEQ ID NO: 2519656 - RNA, 19 nt, Homo sapiens
  misc_RNA (1)...(19): siRNA sense strand
guuuagagaacaugugaga

SEQ ID NO: 2519657 - RNA, 19 nt, Homo sapiens
  misc_RNA (1)...(19): siRNA sense strand
guuuagagaacaugugaga

SEQ ID NO: 2519658 - RNA, 19 nt, Homo sapiens
  misc_RNA (1)...(19): siRNA sense strand
gaguguaaacaauguggaa

SEQ ID NO: 2519659 - RNA, 19 nt, Homo sapiens
  misc_RNA (1)...(19): siRNA sense strand
gaguguaaacaauguggaa

SEQ ID NO: 2519660 - RNA, 19 nt, Homo sapiens
  misc_RNA (1)...(19): siRNA sense strand
ggacucaauuuaaagccaa

SEQ ID NO: 2519661 - RNA, 19 nt, Homo sapiens
  misc_RNA (1)...(19): siRNA sense strand
uuucaaagacacaugacaa

SEQ ID NO: 2519662 - RNA, 19 nt, Homo sapiens
  misc_RNA (1)...(19): siRNA sense strand
agguaaucaauauggagaa

SEQ ID NO: 2519663 - RNA, 19 nt, Homo sapiens
  misc_RNA (1)...(19): siRNA sense strand
augucagcacugugggaaa

SEQ ID NO: 2519664 - RNA, 19 nt, Homo sapiens
  misc_RNA (1)...(19): siRNA sense strand
agacaugagaagacgcaca

SEQ ID NO: 2519665 - RNA, 19 nt, Homo sapiens
  misc_RNA (1)...(19): siRNA sense strand
ugucaagcaugugggcaaa

SEQ ID NO: 2519666 - RNA, 19 nt, Homo sapiens
  misc_RNA (1)...(19): siRNA sense strand
gaugcacacaggacagaaa

SEQ ID NO: 2519667 - RNA, 19 nt, Homo sapiens
  misc_RNA (1)...(19): siRNA sense strand
ggucugaaaccuugcgagu

SEQ ID NO: 2519668 - RNA, 19 nt, Homo sapiens
  misc_RNA (1)...(19): siRNA sense strand
aggaacagacaauaccaaa

SEQ ID NO: 2519669 - RNA, 19 nt, Homo sapiens
  misc_RNA (1)...(19): siRNA sense strand
gcguuuaauggguucgcaa

SEQ ID NO: 2519670 - RNA, 19 nt, Homo sapiens
  misc_RNA (1)...(19): siRNA sense strand
aggauguggcuguggacuu

SEQ ID NO: 2519671 - RNA, 19 nt, Homo sapiens
  misc_RNA (1)...(19): siRNA sense strand
acacugaggagaagccgua

SEQ ID NO: 2519672 - RNA, 19 nt, Homo sapiens
  misc_RNA (1)...(19): siRNA sense strand
gacucacacagcagagaaa

SEQ ID NO: 2519673 - RNA, 19 nt, Homo sapiens
  misc_RNA (1)...(19): siRNA sense strand
ggucauuugaggacgcaca

SEQ ID NO: 2519674 - RNA, 19 nt, Homo sapiens
  misc_RNA (1)...(19): siRNA sense strand
ggucauuugaggacgcaca

SEQ ID NO: 2519675 - RNA, 19 nt, Homo sapiens
  misc_RNA (1)...(19): siRNA sense strand
ggucauuugaggaugcaca

SEQ ID NO: 2519676 - RNA, 19 nt, Homo sapiens
  misc_RNA (1)...(19): siRNA sense strand
ccagaucauuccaagguca

SEQ ID NO: 2519677 - RNA, 19 nt, Homo sapiens
  misc_RNA (1)...(19): siRNA sense strand
ccaucaaaugccagaucuu

SEQ ID NO: 2519678 - RNA, 19 nt, Homo sapiens
  misc_RNA (1)...(19): siRNA sense strand
augugaugcuggagaccuu

SEQ ID NO: 2519679 - RNA, 19 nt, Homo sapiens
  misc_RNA (1)...(19): siRNA sense strand
ccuacacagucacggaaga

SEQ ID NO: 2519680 - RNA, 19 nt, Homo sapiens
  misc_RNA (1)...(19): siRNA sense strand
acaaaagacaggccauaua

SEQ ID NO: 2519681 - RNA, 19 nt, Homo sapiens
  misc_RNA (1)...(19): siRNA sense strand
agaaaccuuaugaguguaa

SEQ ID NO: 2519682 - RNA, 19 nt, Homo sapiens
  misc_RNA (1)...(19): siRNA sense strand
aucauaugguggacagauu

SEQ ID NO: 2519683 - RNA, 19 nt, Homo sapiens
  misc_RNA (1)...(19): siRNA sense strand
gcaggauauguacgggcaa

SEQ ID NO: 2519684 - RNA, 19 nt, Homo sapiens
  misc_RNA (1)...(19): siRNA sense strand
cguaaagacucacacagca

SEQ ID NO: 2519685 - RNA, 19 nt, Homo sapiens
  misc_RNA (1)...(19): siRNA sense strand
cauauaaaugucaggaaug

SEQ ID NO: 2519686 - RNA, 19 nt, Homo sapiens
  misc_RNA (1)...(19): siRNA sense strand
ccucgacauuucaaagaca

SEQ ID NO: 2519687 - RNA, 19 nt, Homo sapiens
  misc_RNA (1)...(19): siRNA sense strand
ccagagcauuccaagguca

SEQ ID NO: 2519688 - RNA, 19 nt, Homo sapiens
  misc_RNA (1)...(19): siRNA sense strand
auguaaacaaugugggaug

SEQ ID NO: 2519689 - RNA, 19 nt, Homo sapiens
  misc_RNA (1)...(19): siRNA sense strand
gcaucaaguauauggacaa

SEQ ID NO: 2519690 - RNA, 19 nt, Homo sapiens
  misc_RNA (1)...(19): siRNA sense strand
cugcaggacaagauggaaa

SEQ ID NO: 2519691 - RNA, 19 nt, Homo sapiens
  misc_RNA (1)...(19): siRNA sense strand
gcgccaaagaccaaggaau

SEQ ID NO: 2519692 - RNA, 19 nt, Homo sapiens
  misc_RNA (1)...(19): siRNA sense strand
cugcaggaucugaggauuu

SEQ ID NO: 2519693 - RNA, 19 nt, Homo sapiens
  misc_RNA (1)...(19): siRNA sense strand
cuauugaguuugugcgaga

SEQ ID NO: 2519694 - RNA, 19 nt, Homo sapiens
  misc_RNA (1)...(19): siRNA sense strand
ucaaaaggacauagcaaaa

SEQ ID NO: 2519695 - RNA, 19 nt, Homo sapiens
  misc_RNA (1)...(19): siRNA sense strand
cagcaguacaagugcagaa

SEQ ID NO: 2519696 - RNA, 19 nt, Homo sapiens
  misc_RNA (1)...(19): siRNA sense strand
aggagaugcagaagaaauu

SEQ ID NO: 2519697 - RNA, 19 nt, Homo sapiens
  misc_RNA (1)...(19): siRNA sense strand
cgccaagaagagagaggua

SEQ ID NO: 2519698 - RNA, 19 nt, Homo sapiens
  misc_RNA (1)...(19): siRNA sense strand
ccacaaugcgagucaccaa

SEQ ID NO: 2519699 - RNA, 19 nt, Homo sapiens
  misc_RNA (1)...(19): siRNA sense strand
cagaagaaauugcagacca

SEQ ID NO: 2519700 - RNA, 19 nt, Homo sapiens
  misc_RNA (1)...(19): siRNA sense strand
aguaaaaggagaugcagaa

SEQ ID NO: 2519701 - RNA, 19 nt, Homo sapiens
  misc_RNA (1)...(19): siRNA sense strand
aaggagaugcagaagaaau

SEQ ID NO: 2519702 - RNA, 19 nt, Homo sapiens
  misc_RNA (1)...(19): siRNA sense strand
agaggaggaaagaaauaaa

SEQ ID NO: 2519703 - RNA, 19 nt, Homo sapiens
  misc_RNA (1)...(19): siRNA sense strand
gcuuauaaggaaaugcaga

SEQ ID NO: 2519704 - RNA, 19 nt, Homo sapiens
  misc_RNA (1)...(19): siRNA sense strand
guacaagugcagaaagcca

SEQ ID NO: 2519705 - RNA, 19 nt, Homo sapiens
  misc_RNA (1)...(19): siRNA sense strand
ggacagucacaauagaaaa

SEQ ID NO: 2519706 - RNA, 19 nt, Homo sapiens
  misc_RNA (1)...(19): siRNA sense strand
gaugagaaguugaagacac

SEQ ID NO: 2519707 - RNA, 19 nt, Homo sapiens
  misc_RNA (1)...(19): siRNA sense strand
ccaagaagagagagguauc

SEQ ID NO: 2519708 - RNA, 19 nt, Homo sapiens
  misc_RNA (1)...(19): siRNA sense strand
ccaaacugccagaggaucu

SEQ ID NO: 2519709 - RNA, 19 nt, Homo sapiens
  misc_RNA (1)...(19): siRNA sense strand
gaugaugagaaguugaaga

SEQ ID NO: 2519710 - RNA, 19 nt, Homo sapiens
  misc_RNA (1)...(19): siRNA sense strand
aggacagucacaauagaaa

SEQ ID NO: 2519711 - RNA, 19 nt, Homo sapiens
  misc_RNA (1)...(19): siRNA sense strand
gaucugaggauuugggaac

SEQ ID NO: 2519712 - RNA, 19 nt, Homo sapiens
  misc_RNA (1)...(19): siRNA sense strand
ccuacagcgcccugaggua

SEQ ID NO: 2519713 - RNA, 19 nt, Homo sapiens
  misc_RNA (1)...(19): siRNA sense strand
gccgaaaagaucucagaaa

SEQ ID NO: 2519714 - RNA, 19 nt, Homo sapiens
  misc_RNA (1)...(19): siRNA sense strand
cgaaaagaucucagaaauc

SEQ ID NO: 2519715 - RNA, 19 nt, Homo sapiens
  misc_RNA (1)...(19): siRNA sense strand
augagaaguugaagacacu

SEQ ID NO: 2519716 - RNA, 19 nt, Homo sapiens
  misc_RNA (1)...(19): siRNA sense strand
uguaacaccaugagggcca

SEQ ID NO: 2519717 - RNA, 19 nt, Homo sapiens
  misc_RNA (1)...(19): siRNA sense strand
agaaacugaaagaggagga

SEQ ID NO: 2519718 - RNA, 19 nt, Homo sapiens
  misc_RNA (1)...(19): siRNA sense strand
ggaagaugcccggaggaca

SEQ ID NO: 2519719 - RNA, 19 nt, Homo sapiens
  misc_RNA (1)...(19): siRNA sense strand
aagccaaugaagagcauca

SEQ ID NO: 2519720 - RNA, 19 nt, Homo sapiens
  misc_RNA (1)...(19): siRNA sense strand
acugggagcuagagucaca

SEQ ID NO: 2519721 - RNA, 19 nt, Homo sapiens
  misc_RNA (1)...(19): siRNA sense strand
ggaucugaggauuugggaa

SEQ ID NO: 2519722 - RNA, 19 nt, Homo sapiens
  misc_RNA (1)...(19): siRNA sense strand
ccaugaagccugugaucac

SEQ ID NO: 2519723 - RNA, 19 nt, Homo sapiens
  misc_RNA (1)...(19): siRNA sense strand
agaagaaauugcagaccac

SEQ ID NO: 2519724 - RNA, 19 nt, Homo sapiens
  misc_RNA (1)...(19): siRNA sense strand
uugaagacacugggagcua

SEQ ID NO: 2519725 - RNA, 19 nt, Homo sapiens
  misc_RNA (1)...(19): siRNA sense strand
aagcaagagcaccauuaaa

SEQ ID NO: 2519726 - RNA, 19 nt, Homo sapiens
  misc_RNA (1)...(19): siRNA sense strand
ccaugagggccaaguuuua

SEQ ID NO: 2519727 - RNA, 19 nt, Homo sapiens
  misc_RNA (1)...(19): siRNA sense strand
ccucaugaagcgccaagaa

SEQ ID NO: 2519728 - RNA, 19 nt, Homo sapiens
  misc_RNA (1)...(19): siRNA sense strand
ugccagaggaucuaaagaa

SEQ ID NO: 2519729 - RNA, 19 nt, Homo sapiens
  misc_RNA (1)...(19): siRNA sense strand
cuuucuaccaggugggcau

SEQ ID NO: 2519730 - RNA, 19 nt, Homo sapiens
  misc_RNA (1)...(19): siRNA sense strand
cccaagaaguucaucgcga

SEQ ID NO: 2519731 - RNA, 19 nt, Homo sapiens
  misc_RNA (1)...(19): siRNA sense strand
aggaagaggccaagagaca

SEQ ID NO: 2519732 - RNA, 19 nt, Homo sapiens
  misc_RNA (1)...(19): siRNA sense strand
augaauaagugcugggaga

SEQ ID NO: 2519733 - RNA, 19 nt, Homo sapiens
  misc_RNA (1)...(19): siRNA sense strand
aggucauagcagaggauaa

SEQ ID NO: 2519734 - RNA, 19 nt, Homo sapiens
  misc_RNA (1)...(19): siRNA sense strand
ugagagaggaagaggccaa

SEQ ID NO: 2519735 - RNA, 19 nt, Homo sapiens
  misc_RNA (1)...(19): siRNA sense strand
ccagaauggcuuuggaaca

SEQ ID NO: 2519736 - RNA, 19 nt, Homo sapiens
  misc_RNA (1)...(19): siRNA sense strand
caauuuauuccgugagcaa

SEQ ID NO: 2519737 - RNA, 19 nt, Homo sapiens
  misc_RNA (1)...(19): siRNA sense strand
gcgaaguggucaacggcau

SEQ ID NO: 2519738 - RNA, 19 nt, Homo sapiens
  misc_RNA (1)...(19): siRNA sense strand
cccaguauccuuugagaaa

SEQ ID NO: 2519739 - RNA, 19 nt, Homo sapiens
  misc_RNA (1)...(19): siRNA sense strand
cagcauguaugaaggcgaa

SEQ ID NO: 2519740 - RNA, 19 nt, Homo sapiens
  misc_RNA (1)...(19): siRNA sense strand
gaccaaacucauaguggaa

SEQ ID NO: 2519741 - RNA, 19 nt, Homo sapiens
  misc_RNA (1)...(19): siRNA sense strand
gauuaaaauaugagggcga

SEQ ID NO: 2519742 - RNA, 19 nt, Homo sapiens
  misc_RNA (1)...(19): siRNA sense strand
cuacauuuauggaggucau

SEQ ID NO: 2519743 - RNA, 19 nt, Homo sapiens
  misc_RNA (1)...(19): siRNA sense strand
cugaugaugugucuggaaa

SEQ ID NO: 2519744 - RNA, 19 nt, Homo sapiens
  misc_RNA (1)...(19): siRNA sense strand
caacaauacuuuugagaac

SEQ ID NO: 2519745 - RNA, 19 nt, Homo sapiens
  misc_RNA (1)...(19): siRNA sense strand
gccaaaacguucagcagaa

SEQ ID NO: 2519746 - RNA, 19 nt, Homo sapiens
  misc_RNA (1)...(19): siRNA sense strand
gucuguaagucaugaaaga

SEQ ID NO: 2519747 - RNA, 19 nt, Homo sapiens
  misc_RNA (1)...(19): siRNA sense strand
aggaugaucgagaggaaga

SEQ ID NO: 2519748 - RNA, 19 nt, Homo sapiens
  misc_RNA (1)...(19): siRNA sense strand
ggaaagcuaugaaggggaa

SEQ ID NO: 2519749 - RNA, 19 nt, Homo sapiens
  misc_RNA (1)...(19): siRNA sense strand
ccaauaagaaacauggcau

SEQ ID NO: 2519750 - RNA, 19 nt, Homo sapiens
  misc_RNA (1)...(19): siRNA sense strand
agggcgacuuugugaagaa

SEQ ID NO: 2519751 - RNA, 19 nt, Homo sapiens
  misc_RNA (1)...(19): siRNA sense strand
gggaggaugagguggcuga

SEQ ID NO: 2519752 - RNA, 19 nt, Homo sapiens
  misc_RNA (1)...(19): siRNA sense strand
aaauaagggcagacagguu

SEQ ID NO: 2519753 - RNA, 19 nt, Homo sapiens
  misc_RNA (1)...(19): siRNA sense strand
ggaagauggaagaugacga

SEQ ID NO: 2519754 - RNA, 19 nt, Homo sapiens
  misc_RNA (1)...(19): siRNA sense strand
ggccaagagacaugacuau

SEQ ID NO: 2519755 - RNA, 19 nt, Homo sapiens
  misc_RNA (1)...(19): siRNA sense strand
agaauuaacagcagcuaca

SEQ ID NO: 2519756 - RNA, 19 nt, Homo sapiens
  misc_RNA (1)...(19): siRNA sense strand
cguguugguacgagggaga

SEQ ID NO: 2519757 - RNA, 19 nt, Homo sapiens
  misc_RNA (1)...(19): siRNA sense strand
gggaagacaacaugcgcca

SEQ ID NO: 2519758 - RNA, 19 nt, Homo sapiens
  misc_RNA (1)...(19): siRNA sense strand
gagccuacgaugaagauga

SEQ ID NO: 2519759 - RNA, 19 nt, Homo sapiens
  misc_RNA (1)...(19): siRNA sense strand
gcaagaaauaugagagacc

SEQ ID NO: 2519760 - RNA, 19 nt, Homo sapiens
  misc_RNA (1)...(19): siRNA sense strand
ggaguuuguaaauggauau

SEQ ID NO: 2519761 - RNA, 19 nt, Homo sapiens
  misc_RNA (1)...(19): siRNA sense strand
gcuugauggcagugaaagu

SEQ ID NO: 2519762 - RNA, 19 nt, Homo sapiens
  misc_RNA (1)...(19): siRNA sense strand
gaguucaacacguggguca

SEQ ID NO: 2519763 - RNA, 19 nt, Homo sapiens
  misc_RNA (1)...(19): siRNA sense strand
caacgaagugaaacccaaa

SEQ ID NO: 2519764 - RNA, 19 nt, Homo sapiens
  misc_RNA (1)...(19): siRNA sense strand
gaaauauauacgaaggcca

SEQ ID NO: 2519765 - RNA, 19 nt, Homo sapiens
  misc_RNA (1)...(19): siRNA sense strand
augauggaauugacagcaa

SEQ ID NO: 2519766 - RNA, 19 nt, Homo sapiens
  misc_RNA (1)...(19): siRNA sense strand
ggaaaagguucgugggcug

SEQ ID NO: 2519767 - RNA, 19 nt, Homo sapiens
  misc_RNA (1)...(19): siRNA sense strand
auaccuuucugaugacaaa

SEQ ID NO: 2519768 - RNA, 19 nt, Homo sapiens
  misc_RNA (1)...(19): siRNA sense strand
cuacgaugaagaugagaca

SEQ ID NO: 2519769 - RNA, 19 nt, Homo sapiens
  misc_RNA (1)...(19): siRNA sense strand
cgaacugaucagaaagcuu

SEQ ID NO: 2519770 - RNA, 19 nt, Homo sapiens
  misc_RNA (1)...(19): siRNA sense strand
acauaccaguugaagaaau

SEQ ID NO: 2519771 - RNA, 19 nt, Homo sapiens
  misc_RNA (1)...(19): siRNA sense strand
gaagaagcuaucaaggaga

SEQ ID NO: 2519772 - RNA, 19 nt, Homo sapiens
  misc_RNA (1)...(19): siRNA sense strand
cagaaagcuugauggcagu

SEQ ID NO: 2519773 - RNA, 19 nt, Homo sapiens
  misc_RNA (1)...(19): siRNA sense strand
uccaaaugccugccagaua

SEQ ID NO: 2519774 - RNA, 19 nt, Homo sapiens
  misc_RNA (1)...(19): siRNA sense strand
caucuguguuacugaccaa

SEQ ID NO: 2519775 - RNA, 19 nt, Homo sapiens
  misc_RNA (1)...(19): siRNA sense strand
caggauauuaagugccaau

SEQ ID NO: 2519776 - RNA, 19 nt, Homo sapiens
  misc_RNA (1)...(19): siRNA sense strand
uaaggaaaucagagcccaa

SEQ ID NO: 2519777 - RNA, 19 nt, Homo sapiens
  misc_RNA (1)...(19): siRNA sense strand
acaucuucaucuugagaga

SEQ ID NO: 2519778 - RNA, 19 nt, Homo sapiens
  misc_RNA (1)...(19): siRNA sense strand
augaaggcgaaguggucaa

SEQ ID NO: 2519779 - RNA, 19 nt, Homo sapiens
  misc_RNA (1)...(19): siRNA sense strand
gcagcucaacgaagugaaa

SEQ ID NO: 2519780 - RNA, 19 nt, Homo sapiens
  misc_RNA (1)...(19): siRNA sense strand
augagagacccaaggauga

SEQ ID NO: 2519781 - RNA, 19 nt, Homo sapiens
  misc_RNA (1)...(19): siRNA sense strand
ucaacgaagugaaacccaa

SEQ ID NO: 2519782 - RNA, 19 nt, Homo sapiens
  misc_RNA (1)...(19): siRNA sense strand
gcgacuuugugaagaaugu

SEQ ID NO: 2519783 - RNA, 19 nt, Homo sapiens
  misc_RNA (1)...(19): siRNA sense strand
uggucaacggcaugaggaa

SEQ ID NO: 2519784 - RNA, 19 nt, Homo sapiens
  misc_RNA (1)...(19): siRNA sense strand
ucagaaagcuugauggcag

SEQ ID NO: 2519785 - RNA, 19 nt, Homo sapiens
  misc_RNA (1)...(19): siRNA sense strand
cugucgagcuggugggcaa

SEQ ID NO: 2519786 - RNA, 19 nt, Homo sapiens
  misc_RNA (1)...(19): siRNA sense strand
caucagugccagaagagga

SEQ ID NO: 2519787 - RNA, 19 nt, Homo sapiens
  misc_RNA (1)...(19): siRNA sense strand
cgaaguuauugcacagacu

SEQ ID NO: 2519788 - RNA, 19 nt, Homo sapiens
  misc_RNA (1)...(19): siRNA sense strand
acgcaauacuuaccgacau

SEQ ID NO: 2519789 - RNA, 19 nt, Homo sapiens
  misc_RNA (1)...(19): siRNA sense strand
aagagaagcauauacgaca

SEQ ID NO: 2519790 - RNA, 19 nt, Homo sapiens
  misc_RNA (1)...(19): siRNA sense strand
ccuacaaaugcaaaugaga

SEQ ID NO: 2519791 - RNA, 19 nt, Homo sapiens
  misc_RNA (1)...(19): siRNA sense strand
gcacaaagcaagaggcauc

SEQ ID NO: 2519792 - RNA, 19 nt, Homo sapiens
  misc_RNA (1)...(19): siRNA sense strand
cuggaaagggagagggaga

SEQ ID NO: 2519793 - RNA, 19 nt, Homo sapiens
  misc_RNA (1)...(19): siRNA sense strand
uggcagaggagcggagaaa

SEQ ID NO: 2519794 - RNA, 19 nt, Homo sapiens
  misc_RNA (1)...(19): siRNA sense strand
uggucagggaagagaacaa

SEQ ID NO: 2519795 - RNA, 19 nt, Homo sapiens
  misc_RNA (1)...(19): siRNA sense strand
acauaguacaggagacaca

SEQ ID NO: 2519796 - RNA, 19 nt, Homo sapiens
  misc_RNA (1)...(19): siRNA sense strand
cagaagugaggaaggugaa

SEQ ID NO: 2519797 - RNA, 19 nt, Homo sapiens
  misc_RNA (1)...(19): siRNA sense strand
ccagaagugaggaagguga

SEQ ID NO: 2519798 - RNA, 19 nt, Homo sapiens
  misc_RNA (1)...(19): siRNA sense strand
gggagcaagagguggcaga

SEQ ID NO: 2519799 - RNA, 19 nt, Homo sapiens
  misc_RNA (1)...(19): siRNA sense strand
acaagaacgccauggcaga

SEQ ID NO: 2519800 - RNA, 19 nt, Homo sapiens
  misc_RNA (1)...(19): siRNA sense strand
ccaucaagccccaggugaa

SEQ ID NO: 2519801 - RNA, 19 nt, Homo sapiens
  misc_RNA (1)...(19): siRNA sense strand
uggcguggacaguggaaga

SEQ ID NO: 2519802 - RNA, 19 nt, Homo sapiens
  misc_RNA (1)...(19): siRNA sense strand
gagcacaaagcaagaggca

SEQ ID NO: 2519803 - RNA, 19 nt, Homo sapiens
  misc_RNA (1)...(19): siRNA sense strand
cagaggacggggaggacaa

SEQ ID NO: 2519804 - RNA, 19 nt, Homo sapiens
  misc_RNA (1)...(19): siRNA sense strand
gggacauaguacaggagac

SEQ ID NO: 2519805 - RNA, 19 nt, Homo sapiens
  misc_RNA (1)...(19): siRNA sense strand
gggcagagaaagaaggagc

SEQ ID NO: 2519806 - RNA, 19 nt, Homo sapiens
  misc_RNA (1)...(19): siRNA sense strand
agaacgugguugacaggga

SEQ ID NO: 2519807 - RNA, 19 nt, Homo sapiens
  misc_RNA (1)...(19): siRNA sense strand
cugcagaagucccagucau

SEQ ID NO: 2519808 - RNA, 19 nt, Homo sapiens
  misc_RNA (1)...(19): siRNA sense strand
ugaggaaggugaaccgcau

SEQ ID NO: 2519809 - RNA, 19 nt, Homo sapiens
  misc_RNA (1)...(19): siRNA sense strand
acgccagugaggaggauga

SEQ ID NO: 2519810 - RNA, 19 nt, Homo sapiens
  misc_RNA (1)...(19): siRNA sense strand
gcgccugcuucgaggugau

SEQ ID NO: 2519811 - RNA, 19 nt, Homo sapiens
  misc_RNA (1)...(19): siRNA sense strand
gcuucuacaacgaguacau

SEQ ID NO: 2519812 - RNA, 19 nt, Homo sapiens
  misc_RNA (1)...(19): siRNA sense strand
gcaugaaggcagaagccaa

SEQ ID NO: 2519813 - RNA, 19 nt, Homo sapiens
  misc_RNA (1)...(19): siRNA sense strand
aggaagaggaagaggaugu

SEQ ID NO: 2519814 - RNA, 19 nt, Homo sapiens
  misc_RNA (1)...(19): siRNA sense strand
acucggaggaagaggaaga

SEQ ID NO: 2519815 - RNA, 19 nt, Homo sapiens
  misc_RNA (1)...(19): siRNA sense strand
aggcagagcuggcuggcuu

SEQ ID NO: 2519816 - RNA, 19 nt, Homo sapiens
  misc_RNA (1)...(19): siRNA sense strand
agacagagagugaaagcga

SEQ ID NO: 2519817 - RNA, 19 nt, Homo sapiens
  misc_RNA (1)...(19): siRNA sense strand
cagugguggaugugaagaa

SEQ ID NO: 2519818 - RNA, 19 nt, Homo sapiens
  misc_RNA (1)...(19): siRNA sense strand
ccagugaggcagaggagga

SEQ ID NO: 2519819 - RNA, 19 nt, Homo sapiens
  misc_RNA (1)...(19): siRNA sense strand
cggaggaagaggaagagga

SEQ ID NO: 2519820 - RNA, 19 nt, Homo sapiens
  misc_RNA (1)...(19): siRNA sense strand
acuuugaguugcuggauca

SEQ ID NO: 2519821 - RNA, 19 nt, Homo sapiens
  misc_RNA (1)...(19): siRNA sense strand
acauugucuuguugaguau

SEQ ID NO: 2519822 - RNA, 19 nt, Homo sapiens
  misc_RNA (1)...(19): siRNA sense strand
cccaggaggugaugagcca

SEQ ID NO: 2519823 - RNA, 19 nt, Homo sapiens
  misc_RNA (1)...(19): siRNA sense strand
agucagaccaagaagcuca

SEQ ID NO: 2519824 - RNA, 19 nt, Homo sapiens
  misc_RNA (1)...(19): siRNA sense strand
agagugaaagcgaggcaga

SEQ ID NO: 2519825 - RNA, 19 nt, Homo sapiens
  misc_RNA (1)...(19): siRNA sense strand
acgacaagaggaagcguca

SEQ ID NO: 2519826 - RNA, 19 nt, Homo sapiens
  misc_RNA (1)...(19): siRNA sense strand
cugaggaagaagaggcacu

SEQ ID NO: 2519827 - RNA, 19 nt, Homo sapiens
  misc_RNA (1)...(19): siRNA sense strand
agaggaagcgucaggggaa

SEQ ID NO: 2519828 - RNA, 19 nt, Homo sapiens
  misc_RNA (1)...(19): siRNA sense strand
uggccaacacggagaucaa

SEQ ID NO: 2519829 - RNA, 19 nt, Homo sapiens
  misc_RNA (1)...(19): siRNA sense strand
ccgacaaggccacggacau

SEQ ID NO: 2519830 - RNA, 19 nt, Homo sapiens
  misc_RNA (1)...(19): siRNA sense strand
caggaauggauuagccaca

SEQ ID NO: 2519831 - RNA, 19 nt, Homo sapiens
  misc_RNA (1)...(19): siRNA sense strand
acacggagaucaacagcca

SEQ ID NO: 2519832 - RNA, 19 nt, Homo sapiens
  misc_RNA (1)...(19): siRNA sense strand
aaguacgaguccagcgaga

SEQ ID NO: 2519833 - RNA, 19 nt, Homo sapiens
  misc_RNA (1)...(19): siRNA sense strand
aggaaaagacgcuguccaa

SEQ ID NO: 2519834 - RNA, 19 nt, Homo sapiens
  misc_RNA (1)...(19): siRNA sense strand
cugacuuauucgagugguu

SEQ ID NO: 2519835 - RNA, 19 nt, Homo sapiens
  misc_RNA (1)...(19): siRNA sense strand
cugcagcugaagagcgaau

SEQ ID NO: 2519836 - RNA, 19 nt, Homo sapiens
  misc_RNA (1)...(19): siRNA sense strand
gcucagaagccaaagagga

SEQ ID NO: 2519837 - RNA, 19 nt, Homo sapiens
  misc_RNA (1)...(19): siRNA sense strand
cucagaagccaaagaggaa

SEQ ID NO: 2519838 - RNA, 19 nt, Homo sapiens
  misc_RNA (1)...(19): siRNA sense strand
uggauuggauguuuggcaa

SEQ ID NO: 2519839 - RNA, 19 nt, Homo sapiens
  misc_RNA (1)...(19): siRNA sense strand
ggaaaggagcccagaggug

SEQ ID NO: 2519840 - RNA, 19 nt, Homo sapiens
  misc_RNA (1)...(19): siRNA sense strand
guaagaagccgguggugac

SEQ ID NO: 2519841 - RNA, 19 nt, Homo sapiens
  misc_RNA (1)...(19): siRNA sense strand
aguaagaagccggugguga

SEQ ID NO: 2519842 - RNA, 19 nt, Homo sapiens
  misc_RNA (1)...(19): siRNA sense strand
aauggagggaagagagaaa

SEQ ID NO: 2519843 - RNA, 19 nt, Homo sapiens
  misc_RNA (1)...(19): siRNA sense strand
agagagaaaugcaugggaa

SEQ ID NO: 2519844 - RNA, 19 nt, Homo sapiens
  misc_RNA (1)...(19): siRNA sense strand
guguaagacaugcagucaa

SEQ ID NO: 2519845 - RNA, 19 nt, Homo sapiens
  misc_RNA (1)...(19): siRNA sense strand
uuaauuuacucaaggcaca

SEQ ID NO: 2519846 - RNA, 19 nt, Homo sapiens
  misc_RNA (1)...(19): siRNA sense strand
agagaaaugcaugggaaaa

SEQ ID NO: 2519847 - RNA, 19 nt, Homo sapiens
  misc_RNA (1)...(19): siRNA sense strand
aggaaaugugcuaggaaua

SEQ ID NO: 2519848 - RNA, 19 nt, Homo sapiens
  misc_RNA (1)...(19): siRNA sense strand
caaugaagaaauaggcaaa

SEQ ID NO: 2519849 - RNA, 19 nt, Homo sapiens
  misc_RNA (1)...(19): siRNA sense strand
ccaaaugaaagaagaucaa

SEQ ID NO: 2519850 - RNA, 19 nt, Homo sapiens
  misc_RNA (1)...(19): siRNA sense strand
ugggaagggaacuggaaua

SEQ ID NO: 2519851 - RNA, 19 nt, Homo sapiens
  misc_RNA (1)...(19): siRNA sense strand
aagaaagagcagagaggga

SEQ ID NO: 2519852 - RNA, 19 nt, Homo sapiens
  misc_RNA (1)...(19): siRNA sense strand
gguguuuaccagugcaaua

SEQ ID NO: 2519853 - RNA, 19 nt, Homo sapiens
  misc_RNA (1)...(19): siRNA sense strand
ggcucgaagaggaaagaaa

SEQ ID NO: 2519854 - RNA, 19 nt, Homo sapiens
  misc_RNA (1)...(19): siRNA sense strand
gcaaaaucccugaaggaau

SEQ ID NO: 2519855 - RNA, 19 nt, Homo sapiens
  misc_RNA (1)...(19): siRNA sense strand
gugaucaggccaaaggaaa

SEQ ID NO: 2519856 - RNA, 19 nt, Homo sapiens
  misc_RNA (1)...(19): siRNA sense strand
cugagagaguggagagacu

SEQ ID NO: 2519857 - RNA, 19 nt, Homo sapiens
  misc_RNA (1)...(19): siRNA sense strand
ugauauuacagcugagaga

SEQ ID NO: 2519858 - RNA, 19 nt, Homo sapiens
  misc_RNA (1)...(19): siRNA sense strand
gaaagagcagagagggaga

SEQ ID NO: 2519859 - RNA, 19 nt, Homo sapiens
  misc_RNA (1)...(19): siRNA sense strand
aaggaaaacuggagcaaca

SEQ ID NO: 2519860 - RNA, 19 nt, Homo sapiens
  misc_RNA (1)...(19): siRNA sense strand
ugauaguggaacugaaauu

SEQ ID NO: 2519861 - RNA, 19 nt, Homo sapiens
  misc_RNA (1)...(19): siRNA sense strand
uggaauaucuagaggaggu

SEQ ID NO: 2519862 - RNA, 19 nt, Homo sapiens
  misc_RNA (1)...(19): siRNA sense strand
ccaaaacauccaagugaaa

SEQ ID NO: 2519863 - RNA, 19 nt, Homo sapiens
  misc_RNA (1)...(19): siRNA sense strand
agcaacagguggaaaguau

SEQ ID NO: 2519864 - RNA, 19 nt, Homo sapiens
  misc_RNA (1)...(19): siRNA sense strand
acccuaaaguucagaucaa

SEQ ID NO: 2519865 - RNA, 19 nt, Homo sapiens
  misc_RNA (1)...(19): siRNA sense strand
cuggaugacuuaaaagaaa

SEQ ID NO: 2519866 - RNA, 19 nt, Homo sapiens
  misc_RNA (1)...(19): siRNA sense strand
aaguuaagguacauggaca

SEQ ID NO: 2519867 - RNA, 19 nt, Homo sapiens
  misc_RNA (1)...(19): siRNA sense strand
caagagaaaauuugggaau

SEQ ID NO: 2519868 - RNA, 19 nt, Homo sapiens
  misc_RNA (1)...(19): siRNA sense strand
gcuugauaguggaacugaa

SEQ ID NO: 2519869 - RNA, 19 nt, Homo sapiens
  misc_RNA (1)...(19): siRNA sense strand
gcucgaagaggaaagaaaa

SEQ ID NO: 2519870 - RNA, 19 nt, Homo sapiens
  misc_RNA (1)...(19): siRNA sense strand
gcuaggaauaggaggccuu

SEQ ID NO: 2519871 - RNA, 19 nt, Homo sapiens
  misc_RNA (1)...(19): siRNA sense strand
gcucguaaaaggaaugaaa

SEQ ID NO: 2519872 - RNA, 19 nt, Homo sapiens
  misc_RNA (1)...(19): siRNA sense strand
ucaaugaagaaauaggcaa

SEQ ID NO: 2519873 - RNA, 19 nt, Homo sapiens
  misc_RNA (1)...(19): siRNA sense strand
agacaaaggcaugcagaga

SEQ ID NO: 2519874 - RNA, 19 nt, Homo sapiens
  misc_RNA (1)...(19): siRNA sense strand
caucagaagacccaagaga

SEQ ID NO: 2519875 - RNA, 19 nt, Homo sapiens
  misc_RNA (1)...(19): siRNA sense strand
gggaagggaacuggaauau

SEQ ID NO: 2519876 - RNA, 19 nt, Homo sapiens
  misc_RNA (1)...(19): siRNA sense strand
gcuuuggaauugagcacuu

SEQ ID NO: 2519877 - RNA, 19 nt, Homo sapiens
  misc_RNA (1)...(19): siRNA sense strand
cuugauaguggaacugaaa

SEQ ID NO: 2519878 - RNA, 19 nt, Homo sapiens
  misc_RNA (1)...(19): siRNA sense strand
gugcucaacaguuuggaua

SEQ ID NO: 2519879 - RNA, 19 nt, Homo sapiens
  misc_RNA (1)...(19): siRNA sense strand
ugggagugccauugaaaca

SEQ ID NO: 2519880 - RNA, 19 nt, Homo sapiens
  misc_RNA (1)...(19): siRNA sense strand
cuacauuaugcaacaggua

SEQ ID NO: 2519881 - RNA, 19 nt, Homo sapiens
  misc_RNA (1)...(19): siRNA sense strand
caagaggugacgagcaaca

SEQ ID NO: 2519882 - RNA, 19 nt, Homo sapiens
  misc_RNA (1)...(19): siRNA sense strand
guauaugacuggagcacug

SEQ ID NO: 2519883 - RNA, 19 nt, Homo sapiens
  misc_RNA (1)...(19): siRNA sense strand
guacaguugauccuggaaa

SEQ ID NO: 2519884 - RNA, 19 nt, Homo sapiens
  misc_RNA (1)...(19): siRNA sense strand
aggaauaggaggccuucaa

SEQ ID NO: 2519885 - RNA, 19 nt, Homo sapiens
  misc_RNA (1)...(19): siRNA sense strand
agaagaagucacccagauu

SEQ ID NO: 2519886 - RNA, 19 nt, Homo sapiens
  misc_RNA (1)...(19): siRNA sense strand
cuaaaguccuagaagaaag

SEQ ID NO: 2519887 - RNA, 19 nt, Homo sapiens
  misc_RNA (1)...(19): siRNA sense strand
acaccaaaugaaagaagau

SEQ ID NO: 2519888 - RNA, 19 nt, Homo sapiens
  misc_RNA (1)...(19): siRNA sense strand
guaugaugcuguuuugaaa

SEQ ID NO: 2519889 - RNA, 19 nt, Homo sapiens
  misc_RNA (1)...(19): siRNA sense strand
cagaauaagccaaggccuc

SEQ ID NO: 2519890 - RNA, 19 nt, Homo sapiens
  misc_RNA (1)...(19): siRNA sense strand
cgugagcgugcaagacaaa

SEQ ID NO: 2519891 - RNA, 19 nt, Homo sapiens
  misc_RNA (1)...(19): siRNA sense strand
cauugaaacauguccaaaa

SEQ ID NO: 2519892 - RNA, 19 nt, Homo sapiens
  misc_RNA (1)...(19): siRNA sense strand
agacugaaucccaagugaa

SEQ ID NO: 2519893 - RNA, 19 nt, Homo sapiens
  misc_RNA (1)...(19): siRNA sense strand
uaugaaauccagugccauu

SEQ ID NO: 2519894 - RNA, 19 nt, Homo sapiens
  misc_RNA (1)...(19): siRNA sense strand
gaugauucaacuccagaaa

SEQ ID NO: 2519895 - RNA, 19 nt, Homo sapiens
  misc_RNA (1)...(19): siRNA sense strand
gacugaaucccaagugaau

SEQ ID NO: 2519896 - RNA, 19 nt, Homo sapiens
  misc_RNA (1)...(19): siRNA sense strand
ggggagauuacuauauaaa

SEQ ID NO: 2519897 - RNA, 19 nt, Homo sapiens
  misc_RNA (1)...(19): siRNA sense strand
gagagaguggagagacuga

SEQ ID NO: 2519898 - RNA, 19 nt, Homo sapiens
  misc_RNA (1)...(19): siRNA sense strand
acgugagcgugcaagacaa

SEQ ID NO: 2519899 - RNA, 19 nt, Homo sapiens
  misc_RNA (1)...(19): siRNA sense strand
cgaagaggaaagaaaauuu

SEQ ID NO: 2519900 - RNA, 19 nt, Homo sapiens
  misc_RNA (1)...(19): siRNA sense strand
acuaugaaauccagugcca

SEQ ID NO: 2519901 - RNA, 19 nt, Homo sapiens
  misc_RNA (1)...(19): siRNA sense strand
aggccaugguucagaguau

SEQ ID NO: 2519902 - RNA, 19 nt, Homo sapiens
  misc_RNA (1)...(19): siRNA sense strand
gcgcaaucacucaggaaca

SEQ ID NO: 2519903 - RNA, 19 nt, Homo sapiens
  misc_RNA (1)...(19): siRNA sense strand
cuggaggagcugagcgcaa

SEQ ID NO: 2519904 - RNA, 19 nt, Homo sapiens
  misc_RNA (1)...(19): siRNA sense strand
guggaguaccagcggcaaa

SEQ ID NO: 2519905 - RNA, 19 nt, Homo sapiens
  misc_RNA (1)...(19): siRNA sense strand
gguucagaguauugaguuc

SEQ ID NO: 2519906 - RNA, 19 nt, Homo sapiens
  misc_RNA (1)...(19): siRNA sense strand
gcgucacggagcaggacaa

SEQ ID NO: 2519907 - RNA, 19 nt, Homo sapiens
  misc_RNA (1)...(19): siRNA sense strand
ugcucaagaagaagcgaua

SEQ ID NO: 2519908 - RNA, 19 nt, Homo sapiens
  misc_RNA (1)...(19): siRNA sense strand
cgggacaagcugaggcagu

SEQ ID NO: 2519909 - RNA, 19 nt, Homo sapiens
  misc_RNA (1)...(19): siRNA sense strand
cugaagcagcagcgggaca

SEQ ID NO: 2519910 - RNA, 19 nt, Homo sapiens
  misc_RNA (1)...(19): siRNA sense strand
uggagaggauccuggacga

SEQ ID NO: 2519911 - RNA, 19 nt, Homo sapiens
  misc_RNA (1)...(19): siRNA sense strand
aggcaguaccagaagagga

SEQ ID NO: 2519912 - RNA, 19 nt, Homo sapiens
  misc_RNA (1)...(19): siRNA sense strand
ucgaaaugaaagugaugga

SEQ ID NO: 2519913 - RNA, 19 nt, Homo sapiens
  misc_RNA (1)...(19): siRNA sense strand
uggacaggacggagaacca

SEQ ID NO: 2519914 - RNA, 19 nt, Homo sapiens
  misc_RNA (1)...(19): siRNA sense strand
aggaaaauggagagagaua

SEQ ID NO: 2519915 - RNA, 19 nt, Homo sapiens
  misc_RNA (1)...(19): siRNA sense strand
ggcaugagguggacggcaa

SEQ ID NO: 2519916 - RNA, 19 nt, Homo sapiens
  misc_RNA (1)...(19): siRNA sense strand
cugacaaagcugacaguau

SEQ ID NO: 2519917 - RNA, 19 nt, Homo sapiens
  misc_RNA (1)...(19): siRNA sense strand
agaggaaaauggagagaga

SEQ ID NO: 2519918 - RNA, 19 nt, Homo sapiens
  misc_RNA (1)...(19): siRNA sense strand
uggcaaagaacgaggugga

SEQ ID NO: 2519919 - RNA, 19 nt, Homo sapiens
  misc_RNA (1)...(19): siRNA sense strand
ccgacaagcugcagugcca

SEQ ID NO: 2519920 - RNA, 19 nt, Homo sapiens
  misc_RNA (1)...(19): siRNA sense strand
uagaaauggcaaagaacga

SEQ ID NO: 2519921 - RNA, 19 nt, Homo sapiens
  misc_RNA (1)...(19): siRNA sense strand
auggagagagauauggaaa

SEQ ID NO: 2519922 - RNA, 19 nt, Homo sapiens
  misc_RNA (1)...(19): siRNA sense strand
uggacaagguucuggagca

SEQ ID NO: 2519923 - RNA, 19 nt, Homo sapiens
  misc_RNA (1)...(19): siRNA sense strand
gagaaagaggagcugaaaa

SEQ ID NO: 2519924 - RNA, 19 nt, Homo sapiens
  misc_RNA (1)...(19): siRNA sense strand
gcgaagugcgcaagggucu

SEQ ID NO: 2519925 - RNA, 19 nt, Homo sapiens
  misc_RNA (1)...(19): siRNA sense strand
ccuugguagaaauggcaaa

SEQ ID NO: 2519926 - RNA, 19 nt, Homo sapiens
  misc_RNA (1)...(19): siRNA sense strand
uggagagagauauggaaaa

SEQ ID NO: 2519927 - RNA, 19 nt, Homo sapiens
  misc_RNA (1)...(19): siRNA sense strand
acgcacacagggucagaaa

SEQ ID NO: 2519928 - RNA, 19 nt, Homo sapiens
  misc_RNA (1)...(19): siRNA sense strand
caaagaacgagguggacgu

SEQ ID NO: 2519929 - RNA, 19 nt, Homo sapiens
  misc_RNA (1)...(19): siRNA sense strand
cugaaaagcaugaagagga

SEQ ID NO: 2519930 - RNA, 19 nt, Homo sapiens
  misc_RNA (1)...(19): siRNA sense strand
aaaagcaugaagaggaaaa

SEQ ID NO: 2519931 - RNA, 19 nt, Homo sapiens
  misc_RNA (1)...(19): siRNA sense strand
uguggaagggcaagaugaa

SEQ ID NO: 2519932 - RNA, 19 nt, Homo sapiens
  misc_RNA (1)...(19): siRNA sense strand
gguagaaauggcaaagaac

SEQ ID NO: 2519933 - RNA, 19 nt, Homo sapiens
  misc_RNA (1)...(19): siRNA sense strand
uaaacgaagccaagcgguu

SEQ ID NO: 2519934 - RNA, 19 nt, Homo sapiens
  misc_RNA (1)...(19): siRNA sense strand
ccuucauguuugaggguca

SEQ ID NO: 2519935 - RNA, 19 nt, Homo sapiens
  misc_RNA (1)...(19): siRNA sense strand
ccagggaugaagauggaaa

SEQ ID NO: 2519936 - RNA, 19 nt, Homo sapiens
  misc_RNA (1)...(19): siRNA sense strand
ugacauuaugcaugcuaaa

SEQ ID NO: 2519937 - RNA, 19 nt, Homo sapiens
  misc_RNA (1)...(19): siRNA sense strand
uggaggagcuggaguggga

SEQ ID NO: 2519938 - RNA, 19 nt, Homo sapiens
  misc_RNA (1)...(19): siRNA sense strand
ccgagaagagauucaggaa

SEQ ID NO: 2519939 - RNA, 19 nt, Homo sapiens
  misc_RNA (1)...(19): siRNA sense strand
agagaagaugagugauuau

SEQ ID NO: 2519940 - RNA, 19 nt, Homo sapiens
  misc_RNA (1)...(19): siRNA sense strand
gaaaggaacugucagacga

SEQ ID NO: 2519941 - RNA, 19 nt, Homo sapiens
  misc_RNA (1)...(19): siRNA sense strand
gagaagaagguacuggaca

SEQ ID NO: 2519942 - RNA, 19 nt, Homo sapiens
  misc_RNA (1)...(19): siRNA sense strand
gccaaugcacggaggacau

SEQ ID NO: 2519943 - RNA, 19 nt, Homo sapiens
  misc_RNA (1)...(19): siRNA sense strand
cgaggauauccgagccgaa

SEQ ID NO: 2519944 - RNA, 19 nt, Homo sapiens
  misc_RNA (1)...(19): siRNA sense strand
agaaaugccgagaagagau

SEQ ID NO: 2519945 - RNA, 19 nt, Homo sapiens
  misc_RNA (1)...(19): siRNA sense strand
ggaaucaucugcuugguca

SEQ ID NO: 2519946 - RNA, 19 nt, Homo sapiens
  misc_RNA (1)...(19): siRNA sense strand
cuguaugucauguggaaga

SEQ ID NO: 2519947 - RNA, 19 nt, Homo sapiens
  misc_RNA (1)...(19): siRNA sense strand
gcaacacaguggaggugga

SEQ ID NO: 2519948 - RNA, 19 nt, Homo sapiens
  misc_RNA (1)...(19): siRNA sense strand
gcgaugaugcugcuggcaa

SEQ ID NO: 2519949 - RNA, 19 nt, Homo sapiens
  misc_RNA (1)...(19): siRNA sense strand
agguggauuucuacggcua

SEQ ID NO: 2519950 - RNA, 19 nt, Homo sapiens
  misc_RNA (1)...(19): siRNA sense strand
cgaugaugcugcuggcaac

SEQ ID NO: 2519951 - RNA, 19 nt, Homo sapiens
  misc_RNA (1)...(19): siRNA sense strand
cagaaaaugagaagacaaa

SEQ ID NO: 2519952 - RNA, 19 nt, Homo sapiens
  misc_RNA (1)...(19): siRNA sense strand
agaaaugagaacugugcua

SEQ ID NO: 2519953 - RNA, 19 nt, Homo sapiens
  misc_RNA (1)...(19): siRNA sense strand
ggcaaauauagauggaauu

SEQ ID NO: 2519954 - RNA, 19 nt, Homo sapiens
  misc_RNA (1)...(19): siRNA sense strand
ccgaaaaucagaaggaaga

SEQ ID NO: 2519955 - RNA, 19 nt, Homo sapiens
  misc_RNA (1)...(19): siRNA sense strand
uggaaacagcaguguggaa

SEQ ID NO: 2519956 - RNA, 19 nt, Homo sapiens
  misc_RNA (1)...(19): siRNA sense strand
uggagcagcagguggcaaa

SEQ ID NO: 2519957 - RNA, 19 nt, Homo sapiens
  misc_RNA (1)...(19): siRNA sense strand
ccauagagaagagggaauu

SEQ ID NO: 2519958 - RNA, 19 nt, Homo sapiens
  misc_RNA (1)...(19): siRNA sense strand
acuugaagccagaaacaau

SEQ ID NO: 2519959 - RNA, 19 nt, Homo sapiens
  misc_RNA (1)...(19): siRNA sense strand
uggaagggauggagcagca

SEQ ID NO: 2519960 - RNA, 19 nt, Homo sapiens
  misc_RNA (1)...(19): siRNA sense strand
aggaaguaccauagagaag

SEQ ID NO: 2519961 - RNA, 19 nt, Homo sapiens
  misc_RNA (1)...(19): siRNA sense strand
gaauaguaaacaagggauc

SEQ ID NO: 2519962 - RNA, 19 nt, Homo sapiens
  misc_RNA (1)...(19): siRNA sense strand
agaacagaaaugagauuca

SEQ ID NO: 2519963 - RNA, 19 nt, Homo sapiens
  misc_RNA (1)...(19): siRNA sense strand
accauagagaagagggaau

SEQ ID NO: 2519964 - RNA, 19 nt, Homo sapiens
  misc_RNA (1)...(19): siRNA sense strand
cuccaaagcuacaccaaaa

SEQ ID NO: 2519965 - RNA, 19 nt, Homo sapiens
  misc_RNA (1)...(19): siRNA sense strand
cacagaugaaagugauuua

SEQ ID NO: 2519966 - RNA, 19 nt, Homo sapiens
  misc_RNA (1)...(19): siRNA sense strand
agaaaacaaugauggugaa

SEQ ID NO: 2519967 - RNA, 19 nt, Homo sapiens
  misc_RNA (1)...(19): siRNA sense strand
guaccauagagaagaggga

SEQ ID NO: 2519968 - RNA, 19 nt, Homo sapiens
  misc_RNA (1)...(19): siRNA sense strand
ugacaauuggaaagugaca

SEQ ID NO: 2519969 - RNA, 19 nt, Homo sapiens
  misc_RNA (1)...(19): siRNA sense strand
cucuuugagucuucagaua

SEQ ID NO: 2519970 - RNA, 19 nt, Homo sapiens
  misc_RNA (1)...(19): siRNA sense strand
ucagaaaaugagaagacaa

SEQ ID NO: 2519971 - RNA, 19 nt, Homo sapiens
  misc_RNA (1)...(19): siRNA sense strand
cgauuacaacauaugacua

SEQ ID NO: 2519972 - RNA, 19 nt, Homo sapiens
  misc_RNA (1)...(19): siRNA sense strand
ccuccaaagcuacaccaaa

SEQ ID NO: 2519973 - RNA, 19 nt, Homo sapiens
  misc_RNA (1)...(19): siRNA sense strand
agagaagagggaauucaaa

SEQ ID NO: 2519974 - RNA, 19 nt, Homo sapiens
  misc_RNA (1)...(19): siRNA sense strand
caaaagugagacagccaaa

SEQ ID NO: 2519975 - RNA, 19 nt, Homo sapiens
  misc_RNA (1)...(19): siRNA sense strand
cugcucacccauugaacaa

SEQ ID NO: 2519976 - RNA, 19 nt, Homo sapiens
  misc_RNA (1)...(19): siRNA sense strand
cagaauaguaaacaaggga

SEQ ID NO: 2519977 - RNA, 19 nt, Homo sapiens
  misc_RNA (1)...(19): siRNA sense strand
cagcaguguggaagaaaau

SEQ ID NO: 2519978 - RNA, 19 nt, Homo sapiens
  misc_RNA (1)...(19): siRNA sense strand
auuaaggcaccgaagagaa

SEQ ID NO: 2519979 - RNA, 19 nt, Homo sapiens
  misc_RNA (1)...(19): siRNA sense strand
ugaugaaggacgaggacaa

SEQ ID NO: 2519980 - RNA, 19 nt, Homo sapiens
  misc_RNA (1)...(19): siRNA sense strand
gguuugacgcagaagguga

SEQ ID NO: 2519981 - RNA, 19 nt, Homo sapiens
  misc_RNA (1)...(19): siRNA sense strand
ggguuugagugugggacaa

SEQ ID NO: 2519982 - RNA, 19 nt, Homo sapiens
  misc_RNA (1)...(19): siRNA sense strand
gggaagaaccggaagaagg

SEQ ID NO: 2519983 - RNA, 19 nt, Homo sapiens
  misc_RNA (1)...(19): siRNA sense strand
ggucaucggcacugggagu

SEQ ID NO: 2519984 - RNA, 19 nt, Homo sapiens
  misc_RNA (1)...(19): siRNA sense strand
aaggaagguuugacgcaga

SEQ ID NO: 2519985 - RNA, 19 nt, Homo sapiens
  misc_RNA (1)...(19): siRNA sense strand
uauucugggaugugacuaa

SEQ ID NO: 2519986 - RNA, 19 nt, Homo sapiens
  misc_RNA (1)...(19): siRNA sense strand
ggcuaaacuacgaggccca

SEQ ID NO: 2519987 - RNA, 19 nt, Homo sapiens
  misc_RNA (1)...(19): siRNA sense strand
accgaagggccaagaaaca

SEQ ID NO: 2519988 - RNA, 19 nt, Homo sapiens
  misc_RNA (1)...(19): siRNA sense strand
ggaugggccuugaagccuu

SEQ ID NO: 2519989 - RNA, 19 nt, Homo sapiens
  misc_RNA (1)...(19): siRNA sense strand
gcaaggagaucgaggugga

SEQ ID NO: 2519990 - RNA, 19 nt, Homo sapiens
  misc_RNA (1)...(19): siRNA sense strand
cgugaagcgguaugagaaa

SEQ ID NO: 2519991 - RNA, 19 nt, Homo sapiens
  misc_RNA (1)...(19): siRNA sense strand
gcagaaauugugaggcaga

SEQ ID NO: 2519992 - RNA, 19 nt, Homo sapiens
  misc_RNA (1)...(19): siRNA sense strand
cagcagagcuuccaggaca

SEQ ID NO: 2519993 - RNA, 19 nt, Homo sapiens
  misc_RNA (1)...(19): siRNA sense strand
uugcagaaauugugaggca

SEQ ID NO: 2519994 - RNA, 19 nt, Homo sapiens
  misc_RNA (1)...(19): siRNA sense strand
ggaacaaaguggaccugga

SEQ ID NO: 2519995 - RNA, 19 nt, Homo sapiens
  misc_RNA (1)...(19): siRNA sense strand
cuggaaagugagagagaag

SEQ ID NO: 2519996 - RNA, 19 nt, Homo sapiens
  misc_RNA (1)...(19): siRNA sense strand
guaaaacaaugguggacga

SEQ ID NO: 2519997 - RNA, 19 nt, Homo sapiens
  misc_RNA (1)...(19): siRNA sense strand
ucaagaacggccagggcuu

SEQ ID NO: 2519998 - RNA, 19 nt, Homo sapiens
  misc_RNA (1)...(19): siRNA sense strand
cagucaucuugguugggaa

SEQ ID NO: 2519999 - RNA, 19 nt, Homo sapiens
  misc_RNA (1)...(19): siRNA sense strand
aguacaaagugguggugcu

SEQ ID NO: 2520000 - RNA, 19 nt, Homo sapiens
  misc_RNA (1)...(19): siRNA sense strand
ucgaggacuucuaccgcaa

SEQ ID NO: 2520001 - RNA, 19 nt, Homo sapiens
  misc_RNA (1)...(19): siRNA sense strand
uggacgaacucuuugcaga

SEQ ID NO: 2520002 - RNA, 19 nt, Homo sapiens
  misc_RNA (1)...(19): siRNA sense strand
ucaucuugguugggaacaa

SEQ ID NO: 2520003 - RNA, 19 nt, Homo sapiens
  misc_RNA (1)...(19): siRNA sense strand
gguaugagaaagugccagu

SEQ ID NO: 2520004 - RNA, 19 nt, Homo sapiens
  misc_RNA (1)...(19): siRNA sense strand
ccucagacccacaggccaa

SEQ ID NO: 2520005 - RNA, 19 nt, Homo sapiens
  misc_RNA (1)...(19): siRNA sense strand
gcccaauauuccaagggua

SEQ ID NO: 2520006 - RNA, 19 nt, Homo sapiens
  misc_RNA (1)...(19): siRNA sense strand
gagaagaacuccaggccuc

SEQ ID NO: 2520007 - RNA, 19 nt, Homo sapiens
  misc_RNA (1)...(19): siRNA sense strand
caacaacaauggagagcag

SEQ ID NO: 2520008 - RNA, 19 nt, Homo sapiens
  misc_RNA (1)...(19): siRNA sense strand
ugauuuacugucagagaau

SEQ ID NO: 2520009 - RNA, 19 nt, Homo sapiens
  misc_RNA (1)...(19): siRNA sense strand
gcggaaaagcuuauaccaa

SEQ ID NO: 2520010 - RNA, 19 nt, Homo sapiens
  misc_RNA (1)...(19): siRNA sense strand
ggaaaguuguucauggucu

SEQ ID NO: 2520011 - RNA, 19 nt, Homo sapiens
  misc_RNA (1)...(19): siRNA sense strand
ccaacaacaacaauggaga

SEQ ID NO: 2520012 - RNA, 19 nt, Homo sapiens
  misc_RNA (1)...(19): siRNA sense strand
uauucuugcaacugggaaa

SEQ ID NO: 2520013 - RNA, 19 nt, Homo sapiens
  misc_RNA (1)...(19): siRNA sense strand
cuacgagaacugcggaaaa

SEQ ID NO: 2520014 - RNA, 19 nt, Homo sapiens
  misc_RNA (1)...(19): siRNA sense strand
aggcugagauggaacagga

SEQ ID NO: 2520015 - RNA, 19 nt, Homo sapiens
  misc_RNA (1)...(19): siRNA sense strand
cugcuuuacuggaggaaga

SEQ ID NO: 2520016 - RNA, 19 nt, Homo sapiens
  misc_RNA (1)...(19): siRNA sense strand
uggauuggaaguaggauaa

SEQ ID NO: 2520017 - RNA, 19 nt, Homo sapiens
  misc_RNA (1)...(19): siRNA sense strand
cuugagacuggcagagaaa

SEQ ID NO: 2520018 - RNA, 19 nt, Homo sapiens
  misc_RNA (1)...(19): siRNA sense strand
acaaaagagcagauugaaa

SEQ ID NO: 2520019 - RNA, 19 nt, Homo sapiens
  misc_RNA (1)...(19): siRNA sense strand
ccacagauccugaugcaga

SEQ ID NO: 2520020 - RNA, 19 nt, Homo sapiens
  misc_RNA (1)...(19): siRNA sense strand
gauaagaaucccaaaacaa

SEQ ID NO: 2520021 - RNA, 19 nt, Homo sapiens
  misc_RNA (1)...(19): siRNA sense strand
uggaggaagaacugaagaa

SEQ ID NO: 2520022 - RNA, 19 nt, Homo sapiens
  misc_RNA (1)...(19): siRNA sense strand
ugaacaaggagcugcgaga

SEQ ID NO: 2520023 - RNA, 19 nt, Homo sapiens
  misc_RNA (1)...(19): siRNA sense strand
auggauuggaaguaggaua

SEQ ID NO: 2520024 - RNA, 19 nt, Homo sapiens
  misc_RNA (1)...(19): siRNA sense strand
cagugcugccugugaguaa

SEQ ID NO: 2520025 - RNA, 19 nt, Homo sapiens
  misc_RNA (1)...(19): siRNA sense strand
acaauggauacaagguuua

SEQ ID NO: 2520026 - RNA, 19 nt, Homo sapiens
  misc_RNA (1)...(19): siRNA sense strand
cuaaaauucugaaggcaau

SEQ ID NO: 2520027 - RNA, 19 nt, Homo sapiens
  misc_RNA (1)...(19): siRNA sense strand
aaacaaaagagcagauuga

SEQ ID NO: 2520028 - RNA, 19 nt, Homo sapiens
  misc_RNA (1)...(19): siRNA sense strand
gcucaaagcaguugcaggu

SEQ ID NO: 2520029 - RNA, 19 nt, Homo sapiens
  misc_RNA (1)...(19): siRNA sense strand
agcaacugguuaagguuua

SEQ ID NO: 2520030 - RNA, 19 nt, Homo sapiens
  misc_RNA (1)...(19): siRNA sense strand
ccgaaugacuuuugggacu

SEQ ID NO: 2520031 - RNA, 19 nt, Homo sapiens
  misc_RNA (1)...(19): siRNA sense strand
gauacaagguuuacuggga

SEQ ID NO: 2520032 - RNA, 19 nt, Homo sapiens
  misc_RNA (1)...(19): siRNA sense strand
uacaagguuuacugggaaa

SEQ ID NO: 2520033 - RNA, 19 nt, Homo sapiens
  misc_RNA (1)...(19): siRNA sense strand
ccuugagacuggcagagaa

SEQ ID NO: 2520034 - RNA, 19 nt, Homo sapiens
  misc_RNA (1)...(19): siRNA sense strand
gcaggagauacauggaaga

SEQ ID NO: 2520035 - RNA, 19 nt, Homo sapiens
  misc_RNA (1)...(19): siRNA sense strand
ugagacuggcagagaaaga

SEQ ID NO: 2520036 - RNA, 19 nt, Homo sapiens
  misc_RNA (1)...(19): siRNA sense strand
agacuggcagagaaagaaa

SEQ ID NO: 2520037 - RNA, 19 nt, Homo sapiens
  misc_RNA (1)...(19): siRNA sense strand
ucuaaaauucugaaggcaa

SEQ ID NO: 2520038 - RNA, 19 nt, Homo sapiens
  misc_RNA (1)...(19): siRNA sense strand
uuugauugcuggaagaaaa

SEQ ID NO: 2520039 - RNA, 19 nt, Homo sapiens
  misc_RNA (1)...(19): siRNA sense strand
auacaagguuuacugggaa

SEQ ID NO: 2520040 - RNA, 19 nt, Homo sapiens
  misc_RNA (1)...(19): siRNA sense strand
gguuuuaaauggauuggaa

SEQ ID NO: 2520041 - RNA, 19 nt, Homo sapiens
  misc_RNA (1)...(19): siRNA sense strand
cugcagucuugcuggccaa

SEQ ID NO: 2520042 - RNA, 19 nt, Homo sapiens
  misc_RNA (1)...(19): siRNA sense strand
ucggacaaguggaacagaa

SEQ ID NO: 2520043 - RNA, 19 nt, Homo sapiens
  misc_RNA (1)...(19): siRNA sense strand
ggggcaggguuuugcuaua

SEQ ID NO: 2520044 - RNA, 19 nt, Homo sapiens
  misc_RNA (1)...(19): siRNA sense strand
ucgaagaccaccuugaaau

SEQ ID NO: 2520045 - RNA, 19 nt, Homo sapiens
  misc_RNA (1)...(19): siRNA sense strand
cagacuggcagcagcagaa

SEQ ID NO: 2520046 - RNA, 19 nt, Homo sapiens
  misc_RNA (1)...(19): siRNA sense strand
ggauaaagauggggugagu

SEQ ID NO: 2520047 - RNA, 19 nt, Homo sapiens
  misc_RNA (1)...(19): siRNA sense strand
cugguuaagguuuaugaaa

SEQ ID NO: 2520048 - RNA, 19 nt, Homo sapiens
  misc_RNA (1)...(19): siRNA sense strand
gaggaagaacugaagaaac

SEQ ID NO: 2520049 - RNA, 19 nt, Homo sapiens
  misc_RNA (1)...(19): siRNA sense strand
auaauagaccuccuggaaa

SEQ ID NO: 2520050 - RNA, 19 nt, Homo sapiens
  misc_RNA (1)...(19): siRNA sense strand
uuguggaacauuugcuaua

SEQ ID NO: 2520051 - RNA, 19 nt, Homo sapiens
  misc_RNA (1)...(19): siRNA sense strand
ggaugguggauguuugauu

SEQ ID NO: 2520052 - RNA, 19 nt, Homo sapiens
  misc_RNA (1)...(19): siRNA sense strand
ccuucggacaaguggaaca

SEQ ID NO: 2520053 - RNA, 19 nt, Homo sapiens
  misc_RNA (1)...(19): siRNA sense strand
gacauuugcaggagauaca

SEQ ID NO: 2520054 - RNA, 19 nt, Homo sapiens
  misc_RNA (1)...(19): siRNA sense strand
aggcuuugugguuggguau

SEQ ID NO: 2520055 - RNA, 19 nt, Homo sapiens
  misc_RNA (1)...(19): siRNA sense strand
cguuaaauguccaaauccu

SEQ ID NO: 2520056 - RNA, 19 nt, Homo sapiens
  misc_RNA (1)...(19): siRNA sense strand
gcugaugugaagaacguuu

SEQ ID NO: 2520057 - RNA, 19 nt, Homo sapiens
  misc_RNA (1)...(19): siRNA sense strand
uugaaaaccuguuacggaa

SEQ ID NO: 2520058 - RNA, 19 nt, Homo sapiens
  misc_RNA (1)...(19): siRNA sense strand
ccuccuggaaaaugggaaa

SEQ ID NO: 2520059 - RNA, 19 nt, Homo sapiens
  misc_RNA (1)...(19): siRNA sense strand
caggacauuugcaggagau

SEQ ID NO: 2520060 - RNA, 19 nt, Homo sapiens
  misc_RNA (1)...(19): siRNA sense strand
aggcaauugcacuuaaaga

SEQ ID NO: 2520061 - RNA, 19 nt, Homo sapiens
  misc_RNA (1)...(19): siRNA sense strand
aggaagaagaagaagaaga

SEQ ID NO: 2520062 - RNA, 19 nt, Homo sapiens
  misc_RNA (1)...(19): siRNA sense strand
gaagaaagucccaaggaga

SEQ ID NO: 2520063 - RNA, 19 nt, Homo sapiens
  misc_RNA (1)...(19): siRNA sense strand
cgguguggaacgaggagaa

SEQ ID NO: 2520064 - RNA, 19 nt, Homo sapiens
  misc_RNA (1)...(19): siRNA sense strand
agaauauagcacagaugaa

SEQ ID NO: 2520065 - RNA, 19 nt, Homo sapiens
  misc_RNA (1)...(19): siRNA sense strand
aggaggaagaagaagaaga

SEQ ID NO: 2520066 - RNA, 19 nt, Homo sapiens
  misc_RNA (1)...(19): siRNA sense strand
caacagaauaaauugcaga

SEQ ID NO: 2520067 - RNA, 19 nt, Homo sapiens
  misc_RNA (1)...(19): siRNA sense strand
guggugaaacaauggaaga

SEQ ID NO: 2520068 - RNA, 19 nt, Homo sapiens
  misc_RNA (1)...(19): siRNA sense strand
cagugaaguaauuauggaa

SEQ ID NO: 2520069 - RNA, 19 nt, Homo sapiens
  misc_RNA (1)...(19): siRNA sense strand
acugggagucauaggaaaa

SEQ ID NO: 2520070 - RNA, 19 nt, Homo sapiens
  misc_RNA (1)...(19): siRNA sense strand
aauuauggaaagcaagcaa

SEQ ID NO: 2520071 - RNA, 19 nt, Homo sapiens
  misc_RNA (1)...(19): siRNA sense strand
cagaauaaauugcagacug

SEQ ID NO: 2520072 - RNA, 19 nt, Homo sapiens
  misc_RNA (1)...(19): siRNA sense strand
uggugaaacaauggaagaa

SEQ ID NO: 2520073 - RNA, 19 nt, Homo sapiens
  misc_RNA (1)...(19): siRNA sense strand
gccaugagguggaggacgu

SEQ ID NO: 2520074 - RNA, 19 nt, Homo sapiens
  misc_RNA (1)...(19): siRNA sense strand
gccaugagguggaggacgu

SEQ ID NO: 2520075 - RNA, 19 nt, Homo sapiens
  misc_RNA (1)...(19): siRNA sense strand
aguucauacuggagagaaa

SEQ ID NO: 2520076 - RNA, 19 nt, Homo sapiens
  misc_RNA (1)...(19): siRNA sense strand
auguaaagaauguggcaaa

SEQ ID NO: 2520077 - RNA, 19 nt, Homo sapiens
  misc_RNA (1)...(19): siRNA sense strand
caaauaugaauguggcaaa

SEQ ID NO: 2520078 - RNA, 19 nt, Homo sapiens
  misc_RNA (1)...(19): siRNA sense strand
aauucauacuggagacaaa

SEQ ID NO: 2520079 - RNA, 19 nt, Homo sapiens
  misc_RNA (1)...(19): siRNA sense strand
aauucauacuggacagaaa

SEQ ID NO: 2520080 - RNA, 19 nt, Homo sapiens
  misc_RNA (1)...(19): siRNA sense strand
augugaagaauguggcaaa

SEQ ID NO: 2520081 - RNA, 19 nt, Homo sapiens
  misc_RNA (1)...(19): siRNA sense strand
augugaagaauguggcaaa

SEQ ID NO: 2520082 - RNA, 19 nt, Homo sapiens
  misc_RNA (1)...(19): siRNA sense strand
augugaagaauguggcaaa

SEQ ID NO: 2520083 - RNA, 19 nt, Homo sapiens
  misc_RNA (1)...(19): siRNA sense strand
augugaagaauguggcaaa

SEQ ID NO: 2520084 - RNA, 19 nt, Homo sapiens
  misc_RNA (1)...(19): siRNA sense strand
augugaagaauguggcaaa

SEQ ID NO: 2520085 - RNA, 19 nt, Homo sapiens
  misc_RNA (1)...(19): siRNA sense strand
augugaagaauguggcaaa

SEQ ID NO: 2520086 - RNA, 19 nt, Homo sapiens
  misc_RNA (1)...(19): siRNA sense strand
augugaagaauguggcaaa

SEQ ID NO: 2520087 - RNA, 19 nt, Homo sapiens
  misc_RNA (1)...(19): siRNA sense strand
augugaagaauguggcaaa

SEQ ID NO: 2520088 - RNA, 19 nt, Homo sapiens
  misc_RNA (1)...(19): siRNA sense strand
augugaagaauguggcaaa

SEQ ID NO: 2520089 - RNA, 19 nt, Homo sapiens
  misc_RNA (1)...(19): siRNA sense strand
augugaagaauguggcaaa

SEQ ID NO: 2520090 - RNA, 19 nt, Homo sapiens
  misc_RNA (1)...(19): siRNA sense strand
augugaagaauguggcaaa

SEQ ID NO: 2520091 - RNA, 19 nt, Homo sapiens
  misc_RNA (1)...(19): siRNA sense strand
augugaagaauguggcaaa

SEQ ID NO: 2520092 - RNA, 19 nt, Homo sapiens
  misc_RNA (1)...(19): siRNA sense strand
aauucauacuggacacaaa

SEQ ID NO: 2520093 - RNA, 19 nt, Homo sapiens
  misc_RNA (1)...(19): siRNA sense strand
cugaagagacuguacaaaa

SEQ ID NO: 2520094 - RNA, 19 nt, Homo sapiens
  misc_RNA (1)...(19): siRNA sense strand
acacaaaacauacuggaaa

SEQ ID NO: 2520095 - RNA, 19 nt, Homo sapiens
  misc_RNA (1)...(19): siRNA sense strand
acaccuuacuacacauaaa

SEQ ID NO: 2520096 - RNA, 19 nt, Homo sapiens
  misc_RNA (1)...(19): siRNA sense strand
acaacuacccagagcaaaa

SEQ ID NO: 2520097 - RNA, 19 nt, Homo sapiens
  misc_RNA (1)...(19): siRNA sense strand
ugacaacuacccagagcaa

SEQ ID NO: 2520098 - RNA, 19 nt, Homo sapiens
  misc_RNA (1)...(19): siRNA sense strand
uggcaaagcuuuuaaacga

SEQ ID NO: 2520099 - RNA, 19 nt, Homo sapiens
  misc_RNA (1)...(19): siRNA sense strand
uggcaaagcuuuuaaacga

SEQ ID NO: 2520100 - RNA, 19 nt, Homo sapiens
  misc_RNA (1)...(19): siRNA sense strand
uguaaagaauguggcaaau

SEQ ID NO: 2520101 - RNA, 19 nt, Homo sapiens
  misc_RNA (1)...(19): siRNA sense strand
ucacaucuuaguagacaua

SEQ ID NO: 2520102 - RNA, 19 nt, Homo sapiens
  misc_RNA (1)...(19): siRNA sense strand
uguaaagcuuauaaggagu

SEQ ID NO: 2520103 - RNA, 19 nt, Homo sapiens
  misc_RNA (1)...(19): siRNA sense strand
ccuuacuaaacauaggaua

SEQ ID NO: 2520104 - RNA, 19 nt, Homo sapiens
  misc_RNA (1)...(19): siRNA sense strand
cuaauucauacuagagaga

SEQ ID NO: 2520105 - RNA, 19 nt, Homo sapiens
  misc_RNA (1)...(19): siRNA sense strand
agagagaaacccuauaaau

SEQ ID NO: 2520106 - RNA, 19 nt, Homo sapiens
  misc_RNA (1)...(19): siRNA sense strand
augugaacaauauggcaaa

SEQ ID NO: 2520107 - RNA, 19 nt, Homo sapiens
  misc_RNA (1)...(19): siRNA sense strand
aaccaguauuugacaacua

SEQ ID NO: 2520108 - RNA, 19 nt, Homo sapiens
  misc_RNA (1)...(19): siRNA sense strand
ggcaaagcuuauaaggagu

SEQ ID NO: 2520109 - RNA, 19 nt, Homo sapiens
  misc_RNA (1)...(19): siRNA sense strand
uggcaaaaccuuuagugua

SEQ ID NO: 2520110 - RNA, 19 nt, Homo sapiens
  misc_RNA (1)...(19): siRNA sense strand
auacagaagagaaacccua

SEQ ID NO: 2520111 - RNA, 19 nt, Homo sapiens
  misc_RNA (1)...(19): siRNA sense strand
uggcaaagcuuuuaaccau

SEQ ID NO: 2520112 - RNA, 19 nt, Homo sapiens
  misc_RNA (1)...(19): siRNA sense strand
uggcaaagcuuauaaggag

SEQ ID NO: 2520113 - RNA, 19 nt, Homo sapiens
  misc_RNA (1)...(19): siRNA sense strand
aguguaaugugcacaaaga

SEQ ID NO: 2520114 - RNA, 19 nt, Homo sapiens
  misc_RNA (1)...(19): siRNA sense strand
cuaaaccaguauuugacaa

SEQ ID NO: 2520115 - RNA, 19 nt, Homo sapiens
  misc_RNA (1)...(19): siRNA sense strand
ugauaagaaacccuacaaa

SEQ ID NO: 2520116 - RNA, 19 nt, Homo sapiens
  misc_RNA (1)...(19): siRNA sense strand
agaauguggcaaagcuuau

SEQ ID NO: 2520117 - RNA, 19 nt, Homo sapiens
  misc_RNA (1)...(19): siRNA sense strand
guggcaaagcccuuaguau

SEQ ID NO: 2520118 - RNA, 19 nt, Homo sapiens
  misc_RNA (1)...(19): siRNA sense strand
gggaaaaggaagaagggaa

SEQ ID NO: 2520119 - RNA, 19 nt, Homo sapiens
  misc_RNA (1)...(19): siRNA sense strand
ccaagaaaggagaacgaga

SEQ ID NO: 2520120 - RNA, 19 nt, Homo sapiens
  misc_RNA (1)...(19): siRNA sense strand
gagaugaugucuuggagga

SEQ ID NO: 2520121 - RNA, 19 nt, Homo sapiens
  misc_RNA (1)...(19): siRNA sense strand
ggaugaacuugaccggcua

SEQ ID NO: 2520122 - RNA, 19 nt, Homo sapiens
  misc_RNA (1)...(19): siRNA sense strand
uucccaagcaccagagaaa

SEQ ID NO: 2520123 - RNA, 19 nt, Homo sapiens
  misc_RNA (1)...(19): siRNA sense strand
ugucaagaucugagugcuu

SEQ ID NO: 2520124 - RNA, 19 nt, Homo sapiens
  misc_RNA (1)...(19): siRNA sense strand
gggaaggauguuuggacca

SEQ ID NO: 2520125 - RNA, 19 nt, Homo sapiens
  misc_RNA (1)...(19): siRNA sense strand
ggcccaaugagaagggaga

SEQ ID NO: 2520126 - RNA, 19 nt, Homo sapiens
  misc_RNA (1)...(19): siRNA sense strand
augagaagggagaguauga

SEQ ID NO: 2520127 - RNA, 19 nt, Homo sapiens
  misc_RNA (1)...(19): siRNA sense strand
ggaaaaggaagaagggaag

SEQ ID NO: 2520128 - RNA, 19 nt, Homo sapiens
  misc_RNA (1)...(19): siRNA sense strand
gggaauaaacggaaccaug

SEQ ID NO: 2520129 - RNA, 19 nt, Homo sapiens
  misc_RNA (1)...(19): siRNA sense strand
aggagauauuaaugcauca

SEQ ID NO: 2520130 - RNA, 19 nt, Homo sapiens
  misc_RNA (1)...(19): siRNA sense strand
ccggauaccaugcugggaa

SEQ ID NO: 2520131 - RNA, 19 nt, Homo sapiens
  misc_RNA (1)...(19): siRNA sense strand
gauguuuggaccaggaaga

SEQ ID NO: 2520132 - RNA, 19 nt, Homo sapiens
  misc_RNA (1)...(19): siRNA sense strand
gaccaggaagagaguacaa

SEQ ID NO: 2520133 - RNA, 19 nt, Homo sapiens
  misc_RNA (1)...(19): siRNA sense strand
caucaaagguucuugcuuc

SEQ ID NO: 2520134 - RNA, 19 nt, Homo sapiens
  misc_RNA (1)...(19): siRNA sense strand
cugaagacaucaaagguuc

SEQ ID NO: 2520135 - RNA, 19 nt, Homo sapiens
  misc_RNA (1)...(19): siRNA sense strand
caggaagagaguacaacuu

SEQ ID NO: 2520136 - RNA, 19 nt, Homo sapiens
  misc_RNA (1)...(19): siRNA sense strand
cuuagagauacuugugauu

SEQ ID NO: 2520137 - RNA, 19 nt, Homo sapiens
  misc_RNA (1)...(19): siRNA sense strand
caacacuauccgaugucaa

SEQ ID NO: 2520138 - RNA, 19 nt, Homo sapiens
  misc_RNA (1)...(19): siRNA sense strand
gaaacaguagugugggcuu

SEQ ID NO: 2520139 - RNA, 19 nt, Homo sapiens
  misc_RNA (1)...(19): siRNA sense strand
uuuuauugcuccagaaaga

SEQ ID NO: 2520140 - RNA, 19 nt, Homo sapiens
  misc_RNA (1)...(19): siRNA sense strand
gaaaggagaacgagagugc

SEQ ID NO: 2520141 - RNA, 19 nt, Homo sapiens
  misc_RNA (1)...(19): siRNA sense strand
ugucaugggaaaaggaaga

SEQ ID NO: 2520142 - RNA, 19 nt, Homo sapiens
  misc_RNA (1)...(19): siRNA sense strand
ugagauugcugaaggcauc

SEQ ID NO: 2520143 - RNA, 19 nt, Homo sapiens
  misc_RNA (1)...(19): siRNA sense strand
cagugaaggugcugaggca

SEQ ID NO: 2520144 - RNA, 19 nt, Homo sapiens
  misc_RNA (1)...(19): siRNA sense strand
cagaaugagaucagugcca

SEQ ID NO: 2520145 - RNA, 19 nt, Homo sapiens
  misc_RNA (1)...(19): siRNA sense strand
ucacguacaucaaggacca

SEQ ID NO: 2520146 - RNA, 19 nt, Homo sapiens
  misc_RNA (1)...(19): siRNA sense strand
cccagagcacugagggcaa

SEQ ID NO: 2520147 - RNA, 19 nt, Homo sapiens
  misc_RNA (1)...(19): siRNA sense strand
gggagagugagcaggcaca

SEQ ID NO: 2520148 - RNA, 19 nt, Homo sapiens
  misc_RNA (1)...(19): siRNA sense strand
ggcaguaccuggaaaggca

SEQ ID NO: 2520149 - RNA, 19 nt, Homo sapiens
  misc_RNA (1)...(19): siRNA sense strand
gaaugagaucagugccaca

SEQ ID NO: 2520150 - RNA, 19 nt, Homo sapiens
  misc_RNA (1)...(19): siRNA sense strand
uggaguuguuugaggagca

SEQ ID NO: 2520151 - RNA, 19 nt, Homo sapiens
  misc_RNA (1)...(19): siRNA sense strand
gggagaauguggaugacag

SEQ ID NO: 2520152 - RNA, 19 nt, Homo sapiens
  misc_RNA (1)...(19): siRNA sense strand
aggcaucagaggaggaauc

SEQ ID NO: 2520153 - RNA, 19 nt, Homo sapiens
  misc_RNA (1)...(19): siRNA sense strand
cgucaagauuugugcggua

SEQ ID NO: 2520154 - RNA, 19 nt, Homo sapiens
  misc_RNA (1)...(19): siRNA sense strand
cgguagaugcaaaggcaaa

SEQ ID NO: 2520155 - RNA, 19 nt, Homo sapiens
  misc_RNA (1)...(19): siRNA sense strand
cuuaccgaguggaggauau

SEQ ID NO: 2520156 - RNA, 19 nt, Homo sapiens
  misc_RNA (1)...(19): siRNA sense strand
cagucaaccuggaggccua

SEQ ID NO: 2520157 - RNA, 19 nt, Homo sapiens
  misc_RNA (1)...(19): siRNA sense strand
gugguagaacagagaguua

SEQ ID NO: 2520158 - RNA, 19 nt, Homo sapiens
  misc_RNA (1)...(19): siRNA sense strand
acgcagauugugaaggaua

SEQ ID NO: 2520159 - RNA, 19 nt, Homo sapiens
  misc_RNA (1)...(19): siRNA sense strand
cgcagauugugaaggauaa

SEQ ID NO: 2520160 - RNA, 19 nt, Homo sapiens
  misc_RNA (1)...(19): siRNA sense strand
caaagagagcagugcauau

SEQ ID NO: 2520161 - RNA, 19 nt, Homo sapiens
  misc_RNA (1)...(19): siRNA sense strand
ccgacaaccacgacagcaa

SEQ ID NO: 2520162 - RNA, 19 nt, Homo sapiens
  misc_RNA (1)...(19): siRNA sense strand
ccacauacccagagcccau

SEQ ID NO: 2520163 - RNA, 19 nt, Homo sapiens
  misc_RNA (1)...(19): siRNA sense strand
aagaaaugccugaaagcuu

SEQ ID NO: 2520164 - RNA, 19 nt, Homo sapiens
  misc_RNA (1)...(19): siRNA sense strand
uggacaaguauaugaagaa

SEQ ID NO: 2520165 - RNA, 19 nt, Homo sapiens
  misc_RNA (1)...(19): siRNA sense strand
gugugcagcuccugggcaa

SEQ ID NO: 2520166 - RNA, 19 nt, Homo sapiens
  misc_RNA (1)...(19): siRNA sense strand
gaaagagaaauuagagcca

SEQ ID NO: 2520167 - RNA, 19 nt, Homo sapiens
  misc_RNA (1)...(19): siRNA sense strand
aagaagaggacgccgacaa

SEQ ID NO: 2520168 - RNA, 19 nt, Homo sapiens
  misc_RNA (1)...(19): siRNA sense strand
caaacaaaauggaagguca

SEQ ID NO: 2520169 - RNA, 19 nt, Homo sapiens
  misc_RNA (1)...(19): siRNA sense strand
agaauucagaugcgaguaa

SEQ ID NO: 2520170 - RNA, 19 nt, Homo sapiens
  misc_RNA (1)...(19): siRNA sense strand
uggaacaagcaguagagaa

SEQ ID NO: 2520171 - RNA, 19 nt, Homo sapiens
  misc_RNA (1)...(19): siRNA sense strand
gguagaacagagaguuauu

SEQ ID NO: 2520172 - RNA, 19 nt, Homo sapiens
  misc_RNA (1)...(19): siRNA sense strand
guucaugcuuucuggccaa

SEQ ID NO: 2520173 - RNA, 19 nt, Homo sapiens
  misc_RNA (1)...(19): siRNA sense strand
aaaccaaagcagcggauca

SEQ ID NO: 2520174 - RNA, 19 nt, Homo sapiens
  misc_RNA (1)...(19): siRNA sense strand
auuaagaccagcaaacaaa

SEQ ID NO: 2520175 - RNA, 19 nt, Homo sapiens
  misc_RNA (1)...(19): siRNA sense strand
ggaaagacaauucgccaga

SEQ ID NO: 2520176 - RNA, 19 nt, Homo sapiens
  misc_RNA (1)...(19): siRNA sense strand
cucaagacuuucuguuaaa

SEQ ID NO: 2520177 - RNA, 19 nt, Homo sapiens
  misc_RNA (1)...(19): siRNA sense strand
agcaggaguuacagaauuu

SEQ ID NO: 2520178 - RNA, 19 nt, Homo sapiens
  misc_RNA (1)...(19): siRNA sense strand
aauaaagggagcaugguuu

SEQ ID NO: 2520179 - RNA, 19 nt, Homo sapiens
  misc_RNA (1)...(19): siRNA sense strand
gggcagugaaaucagaaau

SEQ ID NO: 2520180 - RNA, 19 nt, Homo sapiens
  misc_RNA (1)...(19): siRNA sense strand
aagcuuauuagcagacaua

SEQ ID NO: 2520181 - RNA, 19 nt, Homo sapiens
  misc_RNA (1)...(19): siRNA sense strand
gcauauuaccacuccguuu

SEQ ID NO: 2520182 - RNA, 19 nt, Homo sapiens
  misc_RNA (1)...(19): siRNA sense strand
aaauauucgcuuagcucaa

SEQ ID NO: 2520183 - RNA, 19 nt, Homo sapiens
  misc_RNA (1)...(19): siRNA sense strand
gguuggauacugugguaga

SEQ ID NO: 2520184 - RNA, 19 nt, Homo sapiens
  misc_RNA (1)...(19): siRNA sense strand
gugcucgaguaaugcauaa

SEQ ID NO: 2520185 - RNA, 19 nt, Homo sapiens
  misc_RNA (1)...(19): siRNA sense strand
ggaugcauuucuaaggaca

SEQ ID NO: 2520186 - RNA, 19 nt, Homo sapiens
  misc_RNA (1)...(19): siRNA sense strand
auggaaacuuugaagagau

SEQ ID NO: 2520187 - RNA, 19 nt, Homo sapiens
  misc_RNA (1)...(19): siRNA sense strand
auuaaagaagagagcucaa

SEQ ID NO: 2520188 - RNA, 19 nt, Homo sapiens
  misc_RNA (1)...(19): siRNA sense strand
cggaagaaacaguguaccu

SEQ ID NO: 2520189 - RNA, 19 nt, Homo sapiens
  misc_RNA (1)...(19): siRNA sense strand
uauuaagaccagcaaacaa

SEQ ID NO: 2520190 - RNA, 19 nt, Homo sapiens
  misc_RNA (1)...(19): siRNA sense strand
gaucaauggugaaucagca

SEQ ID NO: 2520191 - RNA, 19 nt, Homo sapiens
  misc_RNA (1)...(19): siRNA sense strand
uccaagaacugaaggaucu

SEQ ID NO: 2520192 - RNA, 19 nt, Homo sapiens
  misc_RNA (1)...(19): siRNA sense strand
agacaauucgccagaaguu

SEQ ID NO: 2520193 - RNA, 19 nt, Homo sapiens
  misc_RNA (1)...(19): siRNA sense strand
cugaaagcuuauuagcaga

SEQ ID NO: 2520194 - RNA, 19 nt, Homo sapiens
  misc_RNA (1)...(19): siRNA sense strand
ggguugauuugaacagcau

SEQ ID NO: 2520195 - RNA, 19 nt, Homo sapiens
  misc_RNA (1)...(19): siRNA sense strand
agaugacagugguagaaaa

SEQ ID NO: 2520196 - RNA, 19 nt, Homo sapiens
  misc_RNA (1)...(19): siRNA sense strand
agcucuaacugacaagaaa

SEQ ID NO: 2520197 - RNA, 19 nt, Homo sapiens
  misc_RNA (1)...(19): siRNA sense strand
caaccaguauccagcucaa

SEQ ID NO: 2520198 - RNA, 19 nt, Homo sapiens
  misc_RNA (1)...(19): siRNA sense strand
gcacuuaaacaaugguaac

SEQ ID NO: 2520199 - RNA, 19 nt, Homo sapiens
  misc_RNA (1)...(19): siRNA sense strand
ucuguaggaaagagaaauu

SEQ ID NO: 2520200 - RNA, 19 nt, Homo sapiens
  misc_RNA (1)...(19): siRNA sense strand
aggaagugucauuaaccaa

SEQ ID NO: 2520201 - RNA, 19 nt, Homo sapiens
  misc_RNA (1)...(19): siRNA sense strand
cugaagaagaggacgccga

SEQ ID NO: 2520202 - RNA, 19 nt, Homo sapiens
  misc_RNA (1)...(19): siRNA sense strand
guaucauuacuaugggauu

SEQ ID NO: 2520203 - RNA, 19 nt, Homo sapiens
  misc_RNA (1)...(19): siRNA sense strand
ugucauuaaccaaggacca

SEQ ID NO: 2520204 - RNA, 19 nt, Homo sapiens
  misc_RNA (1)...(19): siRNA sense strand
ucggaucaauggugaauca

SEQ ID NO: 2520205 - RNA, 19 nt, Homo sapiens
  misc_RNA (1)...(19): siRNA sense strand
uuucuaaggacaagguuga

SEQ ID NO: 2520206 - RNA, 19 nt, Homo sapiens
  misc_RNA (1)...(19): siRNA sense strand
augcaagaaaugccugaaa

SEQ ID NO: 2520207 - RNA, 19 nt, Homo sapiens
  misc_RNA (1)...(19): siRNA sense strand
augacaaagagcaggaguu

SEQ ID NO: 2520208 - RNA, 19 nt, Homo sapiens
  misc_RNA (1)...(19): siRNA sense strand
gcagauugugaaggauaaa

SEQ ID NO: 2520209 - RNA, 19 nt, Homo sapiens
  misc_RNA (1)...(19): siRNA sense strand
gcaaggaaugccugaccau

SEQ ID NO: 2520210 - RNA, 19 nt, Homo sapiens
  misc_RNA (1)...(19): siRNA sense strand
auggagacccaguuuaaua

SEQ ID NO: 2520211 - RNA, 19 nt, Homo sapiens
  misc_RNA (1)...(19): siRNA sense strand
gcucuaacugacaagaaaa

SEQ ID NO: 2520212 - RNA, 19 nt, Homo sapiens
  misc_RNA (1)...(19): siRNA sense strand
cugugaagaaugaaagcca

SEQ ID NO: 2520213 - RNA, 19 nt, Homo sapiens
  misc_RNA (1)...(19): siRNA sense strand
augugaaggaguuugcuua

SEQ ID NO: 2520214 - RNA, 19 nt, Homo sapiens
  misc_RNA (1)...(19): siRNA sense strand
ucauuaaagaagagagcuc

SEQ ID NO: 2520215 - RNA, 19 nt, Homo sapiens
  misc_RNA (1)...(19): siRNA sense strand
agaagagagcucaagacuu

SEQ ID NO: 2520216 - RNA, 19 nt, Homo sapiens
  misc_RNA (1)...(19): siRNA sense strand
gaugcauuucuaaggacaa

SEQ ID NO: 2520217 - RNA, 19 nt, Homo sapiens
  misc_RNA (1)...(19): siRNA sense strand
ucagaaaugcacuuaaaca

SEQ ID NO: 2520218 - RNA, 19 nt, Homo sapiens
  misc_RNA (1)...(19): siRNA sense strand
ggauacuauggaagcaaca

SEQ ID NO: 2520219 - RNA, 19 nt, Homo sapiens
  misc_RNA (1)...(19): siRNA sense strand
gagcugugccagacgaaaa

SEQ ID NO: 2520220 - RNA, 19 nt, Homo sapiens
  misc_RNA (1)...(19): siRNA sense strand
cagaugaggaccagccaga

SEQ ID NO: 2520221 - RNA, 19 nt, Homo sapiens
  misc_RNA (1)...(19): siRNA sense strand
ugugauauccuguggcuga

SEQ ID NO: 2520222 - RNA, 19 nt, Homo sapiens
  misc_RNA (1)...(19): siRNA sense strand
cgcucuagccucagauaaa

SEQ ID NO: 2520223 - RNA, 19 nt, Homo sapiens
  misc_RNA (1)...(19): siRNA sense strand
cggagaagcugaugaggcu

SEQ ID NO: 2520224 - RNA, 19 nt, Homo sapiens
  misc_RNA (1)...(19): siRNA sense strand
ccaucaaccgccagaucaa

SEQ ID NO: 2520225 - RNA, 19 nt, Homo sapiens
  misc_RNA (1)...(19): siRNA sense strand
uggaaaagaacgugaacca

SEQ ID NO: 2520226 - RNA, 19 nt, Homo sapiens
  misc_RNA (1)...(19): siRNA sense strand
augaaaacaagcagaacua

SEQ ID NO: 2520227 - RNA, 19 nt, Homo sapiens
  misc_RNA (1)...(19): siRNA sense strand
gugcucuacucuuggaaaa

SEQ ID NO: 2520228 - RNA, 19 nt, Homo sapiens
  misc_RNA (1)...(19): siRNA sense strand
cacacauacccuuggaaau

SEQ ID NO: 2520229 - RNA, 19 nt, Homo sapiens
  misc_RNA (1)...(19): siRNA sense strand
cuaucaaagaacuagguga

SEQ ID NO: 2520230 - RNA, 19 nt, Homo sapiens
  misc_RNA (1)...(19): siRNA sense strand
augacguggccuugaacaa

SEQ ID NO: 2520231 - RNA, 19 nt, Homo sapiens
  misc_RNA (1)...(19): siRNA sense strand
aggugaagucuaucaaaga

SEQ ID NO: 2520232 - RNA, 19 nt, Homo sapiens
  misc_RNA (1)...(19): siRNA sense strand
ggaacaggacgacugggaa

SEQ ID NO: 2520233 - RNA, 19 nt, Homo sapiens
  misc_RNA (1)...(19): siRNA sense strand
ucaagaagccggaacagga

SEQ ID NO: 2520234 - RNA, 19 nt, Homo sapiens
  misc_RNA (1)...(19): siRNA sense strand
acaucaagaagccggaaca

SEQ ID NO: 2520235 - RNA, 19 nt, Homo sapiens
  misc_RNA (1)...(19): siRNA sense strand
uggauaaggaaccgggcaa

SEQ ID NO: 2520236 - RNA, 19 nt, Homo sapiens
  misc_RNA (1)...(19): siRNA sense strand
ccaccgaggaggaagucaa

SEQ ID NO: 2520237 - RNA, 19 nt, Homo sapiens
  misc_RNA (1)...(19): siRNA sense strand
caaccaagguggaaggcgu

SEQ ID NO: 2520238 - RNA, 19 nt, Homo sapiens
  misc_RNA (1)...(19): siRNA sense strand
aggcguucggaguggauaa

SEQ ID NO: 2520239 - RNA, 19 nt, Homo sapiens
  misc_RNA (1)...(19): siRNA sense strand
ggauaaggaaccgggcaau

SEQ ID NO: 2520240 - RNA, 19 nt, Homo sapiens
  misc_RNA (1)...(19): siRNA sense strand
uggagacaacuaagggauu

SEQ ID NO: 2520241 - RNA, 19 nt, Homo sapiens
  misc_RNA (1)...(19): siRNA sense strand
ggcaauuuggagacaacua

SEQ ID NO: 2520242 - RNA, 19 nt, Homo sapiens
  misc_RNA (1)...(19): siRNA sense strand
gguggaaggcguucggagu

SEQ ID NO: 2520243 - RNA, 19 nt, Homo sapiens
  misc_RNA (1)...(19): siRNA sense strand
gugaauaaauacaugcaga

SEQ ID NO: 2520244 - RNA, 19 nt, Homo sapiens
  misc_RNA (1)...(19): siRNA sense strand
gaucauaaguuaaagaccu

SEQ ID NO: 2520245 - RNA, 19 nt, Homo sapiens
  misc_RNA (1)...(19): siRNA sense strand
ccacugaaauacugggaac

SEQ ID NO: 2520246 - RNA, 19 nt, Homo sapiens
  misc_RNA (1)...(19): siRNA sense strand
ucucagaaauauagaccca

SEQ ID NO: 2520247 - RNA, 19 nt, Homo sapiens
  misc_RNA (1)...(19): siRNA sense strand
guuccgaauacacaagaaa

SEQ ID NO: 2520248 - RNA, 19 nt, Homo sapiens
  misc_RNA (1)...(19): siRNA sense strand
ggaaagaauaaaagcagga

SEQ ID NO: 2520249 - RNA, 19 nt, Homo sapiens
  misc_RNA (1)...(19): siRNA sense strand
aguauaagaagaagaugga

SEQ ID NO: 2520250 - RNA, 19 nt, Homo sapiens
  misc_RNA (1)...(19): siRNA sense strand
gccaagaugaccagaaaau

SEQ ID NO: 2520251 - RNA, 19 nt, Homo sapiens
  misc_RNA (1)...(19): siRNA sense strand
gauaucuggaacaggguau

SEQ ID NO: 2520252 - RNA, 19 nt, Homo sapiens
  misc_RNA (1)...(19): siRNA sense strand
ggguauugcaacuucucua

SEQ ID NO: 2520253 - RNA, 19 nt, Homo sapiens
  misc_RNA (1)...(19): siRNA sense strand
caucagaacugguauguga

SEQ ID NO: 2520254 - RNA, 19 nt, Homo sapiens
  misc_RNA (1)...(19): siRNA sense strand
gguaugugauugauggauu

SEQ ID NO: 2520255 - RNA, 19 nt, Homo sapiens
  misc_RNA (1)...(19): siRNA sense strand
gugaauaaauacaugcaga

SEQ ID NO: 2520256 - RNA, 19 nt, Homo sapiens
  misc_RNA (1)...(19): siRNA sense strand
gaucauaaguuaaagaccu

SEQ ID NO: 2520257 - RNA, 19 nt, Homo sapiens
  misc_RNA (1)...(19): siRNA sense strand
guaugugauugauggauuu

SEQ ID NO: 2520258 - RNA, 19 nt, Homo sapiens
  misc_RNA (1)...(19): siRNA sense strand
gcaaaugguggguauggaa

SEQ ID NO: 2520259 - RNA, 19 nt, Homo sapiens
  misc_RNA (1)...(19): siRNA sense strand
ccacugaaauacugggaac

SEQ ID NO: 2520260 - RNA, 19 nt, Homo sapiens
  misc_RNA (1)...(19): siRNA sense strand
ucucagaaauauagaccca

SEQ ID NO: 2520261 - RNA, 19 nt, Homo sapiens
  misc_RNA (1)...(19): siRNA sense strand
cacagcaaaugguggguau

SEQ ID NO: 2520262 - RNA, 19 nt, Homo sapiens
  misc_RNA (1)...(19): siRNA sense strand
ggaaagaauaaaagcagga

SEQ ID NO: 2520263 - RNA, 19 nt, Homo sapiens
  misc_RNA (1)...(19): siRNA sense strand
guuccgaauacacaagaaa

SEQ ID NO: 2520264 - RNA, 19 nt, Homo sapiens
  misc_RNA (1)...(19): siRNA sense strand
ggcaauauuaucaagaaca

SEQ ID NO: 2520265 - RNA, 19 nt, Homo sapiens
  misc_RNA (1)...(19): siRNA sense strand
aguauaagaagaagaugga

SEQ ID NO: 2520266 - RNA, 19 nt, Homo sapiens
  misc_RNA (1)...(19): siRNA sense strand
gccaagaugaccagaaaau

SEQ ID NO: 2520267 - RNA, 19 nt, Homo sapiens
  misc_RNA (1)...(19): siRNA sense strand
gauaucuggaacaggguau

SEQ ID NO: 2520268 - RNA, 19 nt, Homo sapiens
  misc_RNA (1)...(19): siRNA sense strand
agaacugguaugugauuga

SEQ ID NO: 2520269 - RNA, 19 nt, Homo sapiens
  misc_RNA (1)...(19): siRNA sense strand
ggguauugcaacuucucua

SEQ ID NO: 2520270 - RNA, 19 nt, Homo sapiens
  misc_RNA (1)...(19): siRNA sense strand
guaaguuccuccaggccaa

SEQ ID NO: 2520271 - RNA, 19 nt, Homo sapiens
  misc_RNA (1)...(19): siRNA sense strand
ccucauuggcucuggcuca

SEQ ID NO: 2520272 - RNA, 19 nt, Homo sapiens
  misc_RNA (1)...(19): siRNA sense strand
gcucagaaaagaugaacau

SEQ ID NO: 2520273 - RNA, 19 nt, Homo sapiens
  misc_RNA (1)...(19): siRNA sense strand
cuaccagucuagacagcau

SEQ ID NO: 2520274 - RNA, 19 nt, Homo sapiens
  misc_RNA (1)...(19): siRNA sense strand
cugccaaggaggacacuga

SEQ ID NO: 2520275 - RNA, 19 nt, Homo sapiens
  misc_RNA (1)...(19): siRNA sense strand
caggaaagcaggaggcuga

SEQ ID NO: 2520276 - RNA, 19 nt, Homo sapiens
  misc_RNA (1)...(19): siRNA sense strand
gugugaagcuuuccggaga

SEQ ID NO: 2520277 - RNA, 19 nt, Homo sapiens
  misc_RNA (1)...(19): siRNA sense strand
cagaaguccuggcugguga

SEQ ID NO: 2520278 - RNA, 19 nt, Homo sapiens
  misc_RNA (1)...(19): siRNA sense strand
aguccuggcuggugaggca

SEQ ID NO: 2520279 - RNA, 19 nt, Homo sapiens
  misc_RNA (1)...(19): siRNA sense strand
gaggccugguggaggucua

SEQ ID NO: 2520280 - RNA, 19 nt, Homo sapiens
  misc_RNA (1)...(19): siRNA sense strand
cggagaaggagaaccgagu

SEQ ID NO: 2520281 - RNA, 19 nt, Homo sapiens
  misc_RNA (1)...(19): siRNA sense strand
uggauguggugcugcuaau

SEQ ID NO: 2520282 - RNA, 19 nt, Homo sapiens
  misc_RNA (1)...(19): siRNA sense strand
aggagaaccgaguggaugu

SEQ ID NO: 2520283 - RNA, 19 nt, Homo sapiens
  misc_RNA (1)...(19): siRNA sense strand
gagaaaggguccucagcca

SEQ ID NO: 2520284 - RNA, 19 nt, Homo sapiens
  misc_RNA (1)...(19): siRNA sense strand
agcgaagccuggaggaaau

SEQ ID NO: 2520285 - RNA, 19 nt, Homo sapiens
  misc_RNA (1)...(19): siRNA sense strand
ggcuagaggacgugcauca

SEQ ID NO: 2520286 - RNA, 19 nt, Homo sapiens
  misc_RNA (1)...(19): siRNA sense strand
ggucacuguguuugagaau

SEQ ID NO: 2520287 - RNA, 19 nt, Homo sapiens
  misc_RNA (1)...(19): siRNA sense strand
gggcaagugaggagaagcu

SEQ ID NO: 2520288 - RNA, 19 nt, Homo sapiens
  misc_RNA (1)...(19): siRNA sense strand
agaagaagaucguccagga

SEQ ID NO: 2520289 - RNA, 19 nt, Homo sapiens
  misc_RNA (1)...(19): siRNA sense strand
agggagacauccaggagca

SEQ ID NO: 2520290 - RNA, 19 nt, Homo sapiens
  misc_RNA (1)...(19): siRNA sense strand
cuggaaaugugcugccuga

SEQ ID NO: 2520291 - RNA, 19 nt, Homo sapiens
  misc_RNA (1)...(19): siRNA sense strand
aggagcugcuggagacaga

SEQ ID NO: 2520292 - RNA, 19 nt, Homo sapiens
  misc_RNA (1)...(19): siRNA sense strand
aucgagaagcggaaugaaa

SEQ ID NO: 2520293 - RNA, 19 nt, Homo sapiens
  misc_RNA (1)...(19): siRNA sense strand
ccgagacggaggagcugaa

SEQ ID NO: 2520294 - RNA, 19 nt, Homo sapiens
  misc_RNA (1)...(19): siRNA sense strand
gaggauguggucaggguca

SEQ ID NO: 2520295 - RNA, 19 nt, Homo sapiens
  misc_RNA (1)...(19): siRNA sense strand
ggacaggacuucuggacuc

SEQ ID NO: 2520296 - RNA, 19 nt, Homo sapiens
  misc_RNA (1)...(19): siRNA sense strand
ccgcugcagcuguggcaaa

SEQ ID NO: 2520297 - RNA, 19 nt, Homo sapiens
  misc_RNA (1)...(19): siRNA sense strand
aagcaaaccucaaggacag

SEQ ID NO: 2520298 - RNA, 19 nt, Homo sapiens
  misc_RNA (1)...(19): siRNA sense strand
guugaugagcagucgggaa

SEQ ID NO: 2520299 - RNA, 19 nt, Homo sapiens
  misc_RNA (1)...(19): siRNA sense strand
ggccguugucugaaagcaa

SEQ ID NO: 2520300 - RNA, 19 nt, Homo sapiens
  misc_RNA (1)...(19): siRNA sense strand
cagcuguggcaaacgcaaa

SEQ ID NO: 2520301 - RNA, 19 nt, Homo sapiens
  misc_RNA (1)...(19): siRNA sense strand
aaagcaaaccucaaggaca

SEQ ID NO: 2520302 - RNA, 19 nt, Homo sapiens
  misc_RNA (1)...(19): siRNA sense strand
cagaauaucccuuugccau

SEQ ID NO: 2520303 - RNA, 19 nt, Homo sapiens
  misc_RNA (1)...(19): siRNA sense strand
ggugaaggagugugggaaa

SEQ ID NO: 2520304 - RNA, 19 nt, Homo sapiens
  misc_RNA (1)...(19): siRNA sense strand
agaaagagucagaagacaa

SEQ ID NO: 2520305 - RNA, 19 nt, Homo sapiens
  misc_RNA (1)...(19): siRNA sense strand
gggaggaagacuuggaaga

SEQ ID NO: 2520306 - RNA, 19 nt, Homo sapiens
  misc_RNA (1)...(19): siRNA sense strand
ggauauggacaaagaggau

SEQ ID NO: 2520307 - RNA, 19 nt, Homo sapiens
  misc_RNA (1)...(19): siRNA sense strand
aagaagaggaggaggagga

SEQ ID NO: 2520308 - RNA, 19 nt, Homo sapiens
  misc_RNA (1)...(19): siRNA sense strand
ugaacaaucacuugggcaa

SEQ ID NO: 2520309 - RNA, 19 nt, Homo sapiens
  misc_RNA (1)...(19): siRNA sense strand
ggaugagaaagucgugaaa

SEQ ID NO: 2520310 - RNA, 19 nt, Homo sapiens
  misc_RNA (1)...(19): siRNA sense strand
cagacguggaugaagaaua

SEQ ID NO: 2520311 - RNA, 19 nt, Homo sapiens
  misc_RNA (1)...(19): siRNA sense strand
cccugaaggaggaggagaa

SEQ ID NO: 2520312 - RNA, 19 nt, Homo sapiens
  misc_RNA (1)...(19): siRNA sense strand
cguuagcaguggagaaaau

SEQ ID NO: 2520313 - RNA, 19 nt, Homo sapiens
  misc_RNA (1)...(19): siRNA sense strand
aagaaaggccagaggaaac

SEQ ID NO: 2520314 - RNA, 19 nt, Homo sapiens
  misc_RNA (1)...(19): siRNA sense strand
ugagcaaacaugcgguaaa

SEQ ID NO: 2520315 - RNA, 19 nt, Homo sapiens
  misc_RNA (1)...(19): siRNA sense strand
ccagcaaggaugagaaagu

SEQ ID NO: 2520316 - RNA, 19 nt, Homo sapiens
  misc_RNA (1)...(19): siRNA sense strand
agucagaagacaaagauga

SEQ ID NO: 2520317 - RNA, 19 nt, Homo sapiens
  misc_RNA (1)...(19): siRNA sense strand
acaaagaugaagcggugaa

SEQ ID NO: 2520318 - RNA, 19 nt, Homo sapiens
  misc_RNA (1)...(19): siRNA sense strand
aggaggaacaacugaaaga

SEQ ID NO: 2520319 - RNA, 19 nt, Homo sapiens
  misc_RNA (1)...(19): siRNA sense strand
ccaacaaccgcuauggcua

SEQ ID NO: 2520320 - RNA, 19 nt, Homo sapiens
  misc_RNA (1)...(19): siRNA sense strand
aaggagugugggaaagaaa

SEQ ID NO: 2520321 - RNA, 19 nt, Homo sapiens
  misc_RNA (1)...(19): siRNA sense strand
aaauaaaagaagaggagga

SEQ ID NO: 2520322 - RNA, 19 nt, Homo sapiens
  misc_RNA (1)...(19): siRNA sense strand
gagaggaggaacugugaca

SEQ ID NO: 2520323 - RNA, 19 nt, Homo sapiens
  misc_RNA (1)...(19): siRNA sense strand
uauucaaagcccaggaaaa

SEQ ID NO: 2520324 - RNA, 19 nt, Homo sapiens
  misc_RNA (1)...(19): siRNA sense strand
agacaaagaugaagcggug

SEQ ID NO: 2520325 - RNA, 19 nt, Homo sapiens
  misc_RNA (1)...(19): siRNA sense strand
agcccaaguucaagcacaa

SEQ ID NO: 2520326 - RNA, 19 nt, Homo sapiens
  misc_RNA (1)...(19): siRNA sense strand
aaaagaaaggccagaggaa

SEQ ID NO: 2520327 - RNA, 19 nt, Homo sapiens
  misc_RNA (1)...(19): siRNA sense strand
acacaauugcauggauaaa

SEQ ID NO: 2520328 - RNA, 19 nt, Homo sapiens
  misc_RNA (1)...(19): siRNA sense strand
aaacaauagcugccgaaga

SEQ ID NO: 2520329 - RNA, 19 nt, Homo sapiens
  misc_RNA (1)...(19): siRNA sense strand
gucagaagacaaagaugaa

SEQ ID NO: 2520330 - RNA, 19 nt, Homo sapiens
  misc_RNA (1)...(19): siRNA sense strand
aagaugaagcggugaagga

SEQ ID NO: 2520331 - RNA, 19 nt, Homo sapiens
  misc_RNA (1)...(19): siRNA sense strand
aagaggaggaggaggagga

SEQ ID NO: 2520332 - RNA, 19 nt, Homo sapiens
  misc_RNA (1)...(19): siRNA sense strand
uaaaagaagaggaggagga

SEQ ID NO: 2520333 - RNA, 19 nt, Homo sapiens
  misc_RNA (1)...(19): siRNA sense strand
acaaagaggaugcucaaaa

SEQ ID NO: 2520334 - RNA, 19 nt, Homo sapiens
  misc_RNA (1)...(19): siRNA sense strand
aggaggagaagcugaugaa

SEQ ID NO: 2520335 - RNA, 19 nt, Homo sapiens
  misc_RNA (1)...(19): siRNA sense strand
augaaagagggcagcgaga

SEQ ID NO: 2520336 - RNA, 19 nt, Homo sapiens
  misc_RNA (1)...(19): siRNA sense strand
ggccagaggaaaccagcaa

SEQ ID NO: 2520337 - RNA, 19 nt, Homo sapiens
  misc_RNA (1)...(19): siRNA sense strand
ggucaaaguccuccccaaa

SEQ ID NO: 2520338 - RNA, 19 nt, Homo sapiens
  misc_RNA (1)...(19): siRNA sense strand
caguggaccagcaaagcaa

SEQ ID NO: 2520339 - RNA, 19 nt, Homo sapiens
  misc_RNA (1)...(19): siRNA sense strand
ccaggaggaacaacugaaa

SEQ ID NO: 2520340 - RNA, 19 nt, Homo sapiens
  misc_RNA (1)...(19): siRNA sense strand
ggcagcaacaagagugauu

SEQ ID NO: 2520341 - RNA, 19 nt, Homo sapiens
  misc_RNA (1)...(19): siRNA sense strand
gcucaaaagguucugaaau

SEQ ID NO: 2520342 - RNA, 19 nt, Homo sapiens
  misc_RNA (1)...(19): siRNA sense strand
gggcagcgagaaggagaaa

SEQ ID NO: 2520343 - RNA, 19 nt, Homo sapiens
  misc_RNA (1)...(19): siRNA sense strand
cacacaauugcauggauaa

SEQ ID NO: 2520344 - RNA, 19 nt, Homo sapiens
  misc_RNA (1)...(19): siRNA sense strand
aagggaagcagcugguauu

SEQ ID NO: 2520345 - RNA, 19 nt, Homo sapiens
  misc_RNA (1)...(19): siRNA sense strand
aagaaagagucagaagaca

SEQ ID NO: 2520346 - RNA, 19 nt, Homo sapiens
  misc_RNA (1)...(19): siRNA sense strand
acaagaaagcacacacuca

SEQ ID NO: 2520347 - RNA, 19 nt, Homo sapiens
  misc_RNA (1)...(19): siRNA sense strand
ggaaauaaaagaagaggag

SEQ ID NO: 2520348 - RNA, 19 nt, Homo sapiens
  misc_RNA (1)...(19): siRNA sense strand
agaaacaauagcugccgaa

SEQ ID NO: 2520349 - RNA, 19 nt, Homo sapiens
  misc_RNA (1)...(19): siRNA sense strand
acacagacucuaaauucaa

SEQ ID NO: 2520350 - RNA, 19 nt, Homo sapiens
  misc_RNA (1)...(19): siRNA sense strand
cagcaagaugugcgggacu

SEQ ID NO: 2520351 - RNA, 19 nt, Homo sapiens
  misc_RNA (1)...(19): siRNA sense strand
aggaugagaaagucgugaa

SEQ ID NO: 2520352 - RNA, 19 nt, Homo sapiens
  misc_RNA (1)...(19): siRNA sense strand
ccuuuagacccuacaauca

SEQ ID NO: 2520353 - RNA, 19 nt, Homo sapiens
  misc_RNA (1)...(19): siRNA sense strand
gcaagaaagccgaguccuc

SEQ ID NO: 2520354 - RNA, 19 nt, Homo sapiens
  misc_RNA (1)...(19): siRNA sense strand
uuguaacagacguggauga

SEQ ID NO: 2520355 - RNA, 19 nt, Homo sapiens
  misc_RNA (1)...(19): siRNA sense strand
ccucagacaagaaagcaca

SEQ ID NO: 2520356 - RNA, 19 nt, Homo sapiens
  misc_RNA (1)...(19): siRNA sense strand
ucgugaaaagcgaggacua

SEQ ID NO: 2520357 - RNA, 19 nt, Homo sapiens
  misc_RNA (1)...(19): siRNA sense strand
ugaaggaggaggagaagcu

SEQ ID NO: 2520358 - RNA, 19 nt, Homo sapiens
  misc_RNA (1)...(19): siRNA sense strand
ugaccaaguccaaaagcaa

SEQ ID NO: 2520359 - RNA, 19 nt, Homo sapiens
  misc_RNA (1)...(19): siRNA sense strand
ugucaggcgcuuugaggau

SEQ ID NO: 2520360 - RNA, 19 nt, Homo sapiens
  misc_RNA (1)...(19): siRNA sense strand
guuuccaaaugaaggacau

SEQ ID NO: 2520361 - RNA, 19 nt, Homo sapiens
  misc_RNA (1)...(19): siRNA sense strand
gugcaguugugccgacaga

SEQ ID NO: 2520362 - RNA, 19 nt, Homo sapiens
  misc_RNA (1)...(19): siRNA sense strand
gccacuaucaagaugacaa

SEQ ID NO: 2520363 - RNA, 19 nt, Homo sapiens
  misc_RNA (1)...(19): siRNA sense strand
aagucaagaaagagucaga

SEQ ID NO: 2520364 - RNA, 19 nt, Homo sapiens
  misc_RNA (1)...(19): siRNA sense strand
ucucuaaguuuacgggacu

SEQ ID NO: 2520365 - RNA, 19 nt, Homo sapiens
  misc_RNA (1)...(19): siRNA sense strand
uggccaacgucaaguacca

SEQ ID NO: 2520366 - RNA, 19 nt, Homo sapiens
  misc_RNA (1)...(19): siRNA sense strand
auucacaguuuguaacaga

SEQ ID NO: 2520367 - RNA, 19 nt, Homo sapiens
  misc_RNA (1)...(19): siRNA sense strand
ggaaaguauucgugguaau

SEQ ID NO: 2520368 - RNA, 19 nt, Homo sapiens
  misc_RNA (1)...(19): siRNA sense strand
ggguaaaugcgguggaacu

SEQ ID NO: 2520369 - RNA, 19 nt, Homo sapiens
  misc_RNA (1)...(19): siRNA sense strand
gcaaagaaggaaaugggau

SEQ ID NO: 2520370 - RNA, 19 nt, Homo sapiens
  misc_RNA (1)...(19): siRNA sense strand
ggguggaucucgagccaga

SEQ ID NO: 2520371 - RNA, 19 nt, Homo sapiens
  misc_RNA (1)...(19): siRNA sense strand
aggaagcgccaaagggcua

SEQ ID NO: 2520372 - RNA, 19 nt, Homo sapiens
  misc_RNA (1)...(19): siRNA sense strand
cccgagaagaugucaguaa

SEQ ID NO: 2520373 - RNA, 19 nt, Homo sapiens
  misc_RNA (1)...(19): siRNA sense strand
gggaaaguauucgugguaa

SEQ ID NO: 2520374 - RNA, 19 nt, Homo sapiens
  misc_RNA (1)...(19): siRNA sense strand
ggugaugcuugcaagagua

SEQ ID NO: 2520375 - RNA, 19 nt, Homo sapiens
  misc_RNA (1)...(19): siRNA sense strand
ucauaaaggaagagccagu

SEQ ID NO: 2520376 - RNA, 19 nt, Homo sapiens
  misc_RNA (1)...(19): siRNA sense strand
cgccaaagggcuaugcgaa

SEQ ID NO: 2520377 - RNA, 19 nt, Homo sapiens
  misc_RNA (1)...(19): siRNA sense strand
agagcagcaaagaaggaaa

SEQ ID NO: 2520378 - RNA, 19 nt, Homo sapiens
  misc_RNA (1)...(19): siRNA sense strand
gaauaaugcgacaaggacu

SEQ ID NO: 2520379 - RNA, 19 nt, Homo sapiens
  misc_RNA (1)...(19): siRNA sense strand
ccauaaacgcugccaucau

SEQ ID NO: 2520380 - RNA, 19 nt, Homo sapiens
  misc_RNA (1)...(19): siRNA sense strand
cuccaauugaugagggaca

SEQ ID NO: 2520381 - RNA, 19 nt, Homo sapiens
  misc_RNA (1)...(19): siRNA sense strand
aauaaugcgacaaggacuu

SEQ ID NO: 2520382 - RNA, 19 nt, Homo sapiens
  misc_RNA (1)...(19): siRNA sense strand
gcgacaaggacuucagugu

SEQ ID NO: 2520383 - RNA, 19 nt, Homo sapiens
  misc_RNA (1)...(19): siRNA sense strand
gguaaaugcgguggaacuu

SEQ ID NO: 2520384 - RNA, 19 nt, Homo sapiens
  misc_RNA (1)...(19): siRNA sense strand
acgugauucugcaggauga

SEQ ID NO: 2520385 - RNA, 19 nt, Homo sapiens
  misc_RNA (1)...(19): siRNA sense strand
ggggaaaguauucguggua

SEQ ID NO: 2520386 - RNA, 19 nt, Homo sapiens
  misc_RNA (1)...(19): siRNA sense strand
ggauucaaagauugcagaa

SEQ ID NO: 2520387 - RNA, 19 nt, Homo sapiens
  misc_RNA (1)...(19): siRNA sense strand
gaguaaaagaaacaggaga

SEQ ID NO: 2520388 - RNA, 19 nt, Homo sapiens
  misc_RNA (1)...(19): siRNA sense strand
aggccauacugaaugauga

SEQ ID NO: 2520389 - RNA, 19 nt, Homo sapiens
  misc_RNA (1)...(19): siRNA sense strand
ccuccaugauaaaggaauc

SEQ ID NO: 2520390 - RNA, 19 nt, Homo sapiens
  misc_RNA (1)...(19): siRNA sense strand
ucuccaacccggaaauauu

SEQ ID NO: 2520391 - RNA, 19 nt, Homo sapiens
  misc_RNA (1)...(19): siRNA sense strand
cuuuugaggcagagaauga

SEQ ID NO: 2520392 - RNA, 19 nt, Homo sapiens
  misc_RNA (1)...(19): siRNA sense strand
gggaaggugaugcuugcaa

SEQ ID NO: 2520393 - RNA, 19 nt, Homo sapiens
  misc_RNA (1)...(19): siRNA sense strand
caaugauuaaccaggauga

SEQ ID NO: 2520394 - RNA, 19 nt, Homo sapiens
  misc_RNA (1)...(19): siRNA sense strand
ugaagaugccacagggauc

SEQ ID NO: 2520395 - RNA, 19 nt, Homo sapiens
  misc_RNA (1)...(19): siRNA sense strand
aagcacuggaagagaaaua

SEQ ID NO: 2520396 - RNA, 19 nt, Homo sapiens
  misc_RNA (1)...(19): siRNA sense strand
uggaagagaaauauggaga

SEQ ID NO: 2520397 - RNA, 19 nt, Homo sapiens
  misc_RNA (1)...(19): siRNA sense strand
gagaaaucagugagggacu

SEQ ID NO: 2520398 - RNA, 19 nt, Homo sapiens
  misc_RNA (1)...(19): siRNA sense strand
accagaggucauugagaaa

SEQ ID NO: 2520399 - RNA, 19 nt, Homo sapiens
  misc_RNA (1)...(19): siRNA sense strand
cgauccuccucgagagaga

SEQ ID NO: 2520400 - RNA, 19 nt, Homo sapiens
  misc_RNA (1)...(19): siRNA sense strand
uugagaaaucagugaggga

SEQ ID NO: 2520401 - RNA, 19 nt, Homo sapiens
  misc_RNA (1)...(19): siRNA sense strand
ugcagaaagcacuggaaga

SEQ ID NO: 2520402 - RNA, 19 nt, Homo sapiens
  misc_RNA (1)...(19): siRNA sense strand
ggcuacaacaugcggucaa

SEQ ID NO: 2520403 - RNA, 19 nt, Homo sapiens
  misc_RNA (1)...(19): siRNA sense strand
cagaaaagggcaagcucau

SEQ ID NO: 2520404 - RNA, 19 nt, Homo sapiens
  misc_RNA (1)...(19): siRNA sense strand
ggacuuagaacacuggcau

SEQ ID NO: 2520405 - RNA, 19 nt, Homo sapiens
  misc_RNA (1)...(19): siRNA sense strand
cagugagggacuuagaaca

SEQ ID NO: 2520406 - RNA, 19 nt, Homo sapiens
  misc_RNA (1)...(19): siRNA sense strand
gaaugauauaacugagcaa

SEQ ID NO: 2520407 - RNA, 19 nt, Homo sapiens
  misc_RNA (1)...(19): siRNA sense strand
agacaaaaugggaaggcaa

SEQ ID NO: 2520408 - RNA, 19 nt, Homo sapiens
  misc_RNA (1)...(19): siRNA sense strand
ccuguggcuaauagagaaa

SEQ ID NO: 2520409 - RNA, 19 nt, Homo sapiens
  misc_RNA (1)...(19): siRNA sense strand
agaagaaauguguggaaac

SEQ ID NO: 2520410 - RNA, 19 nt, Homo sapiens
  misc_RNA (1)...(19): siRNA sense strand
gacaaaaugggaaggcaaa

SEQ ID NO: 2520411 - RNA, 19 nt, Homo sapiens
  misc_RNA (1)...(19): siRNA sense strand
augaaguuguggaagcauu

SEQ ID NO: 2520412 - RNA, 19 nt, Homo sapiens
  misc_RNA (1)...(19): siRNA sense strand
acuuggagaaccaggaaaa

SEQ ID NO: 2520413 - RNA, 19 nt, Homo sapiens
  misc_RNA (1)...(19): siRNA sense strand
gcuuuuacuuucuggaaga

SEQ ID NO: 2520414 - RNA, 19 nt, Homo sapiens
  misc_RNA (1)...(19): siRNA sense strand
ccaccaaaugugacaaaau

SEQ ID NO: 2520415 - RNA, 19 nt, Homo sapiens
  misc_RNA (1)...(19): siRNA sense strand
gggauguagugaagaggca

SEQ ID NO: 2520416 - RNA, 19 nt, Homo sapiens
  misc_RNA (1)...(19): siRNA sense strand
agguaagagccgaccacaa

SEQ ID NO: 2520417 - RNA, 19 nt, Homo sapiens
  misc_RNA (1)...(19): siRNA sense strand
ggcucaacuggcagaauaa

SEQ ID NO: 2520418 - RNA, 19 nt, Homo sapiens
  misc_RNA (1)...(19): siRNA sense strand
gagccgaccacaaggcaga

SEQ ID NO: 2520419 - RNA, 19 nt, Homo sapiens
  misc_RNA (1)...(19): siRNA sense strand
cuguauugcccuugagaaa

SEQ ID NO: 2520420 - RNA, 19 nt, Homo sapiens
  misc_RNA (1)...(19): siRNA sense strand
cugcgaaagugcugacaaa

SEQ ID NO: 2520421 - RNA, 19 nt, Homo sapiens
  misc_RNA (1)...(19): siRNA sense strand
guuacuagacagagaacaa

SEQ ID NO: 2520422 - RNA, 19 nt, Homo sapiens
  misc_RNA (1)...(19): siRNA sense strand
cugagaagguguaaagaga

SEQ ID NO: 2520423 - RNA, 19 nt, Homo sapiens
  misc_RNA (1)...(19): siRNA sense strand
aacaauaugcucagagaaa

SEQ ID NO: 2520424 - RNA, 19 nt, Homo sapiens
  misc_RNA (1)...(19): siRNA sense strand
gcuucuacuucaaggaaau

SEQ ID NO: 2520425 - RNA, 19 nt, Homo sapiens
  misc_RNA (1)...(19): siRNA sense strand
ggaucaaagacagggaaua

SEQ ID NO: 2520426 - RNA, 19 nt, Homo sapiens
  misc_RNA (1)...(19): siRNA sense strand
aaagagugggaaagagaaa

SEQ ID NO: 2520427 - RNA, 19 nt, Homo sapiens
  misc_RNA (1)...(19): siRNA sense strand
ccgagaaccauuuggauau

SEQ ID NO: 2520428 - RNA, 19 nt, Homo sapiens
  misc_RNA (1)...(19): siRNA sense strand
cuucaggaucuuagagcua

SEQ ID NO: 2520429 - RNA, 19 nt, Homo sapiens
  misc_RNA (1)...(19): siRNA sense strand
ugauuauggcagaggagaa

SEQ ID NO: 2520430 - RNA, 19 nt, Homo sapiens
  misc_RNA (1)...(19): siRNA sense strand
cuaccaagggccagggauu

SEQ ID NO: 2520431 - RNA, 19 nt, Homo sapiens
  misc_RNA (1)...(19): siRNA sense strand
aggaagacauuuacaguca

SEQ ID NO: 2520432 - RNA, 19 nt, Homo sapiens
  misc_RNA (1)...(19): siRNA sense strand
cuucuaaggauaugagaga

SEQ ID NO: 2520433 - RNA, 19 nt, Homo sapiens
  misc_RNA (1)...(19): siRNA sense strand
cagagaaaucagaaugcua

SEQ ID NO: 2520434 - RNA, 19 nt, Homo sapiens
  misc_RNA (1)...(19): siRNA sense strand
ccauggacgcccuaggaaa

SEQ ID NO: 2520435 - RNA, 19 nt, Homo sapiens
  misc_RNA (1)...(19): siRNA sense strand
ucuaaggauaugagagaca

SEQ ID NO: 2520436 - RNA, 19 nt, Homo sapiens
  misc_RNA (1)...(19): siRNA sense strand
gggauaaugugaaugcaga

SEQ ID NO: 2520437 - RNA, 19 nt, Homo sapiens
  misc_RNA (1)...(19): siRNA sense strand
auccaaaccaugugugaaa

SEQ ID NO: 2520438 - RNA, 19 nt, Homo sapiens
  misc_RNA (1)...(19): siRNA sense strand
gccgagaaccauuuggaua

SEQ ID NO: 2520439 - RNA, 19 nt, Homo sapiens
  misc_RNA (1)...(19): siRNA sense strand
aggaaaugcuggacggucu

SEQ ID NO: 2520440 - RNA, 19 nt, Homo sapiens
  misc_RNA (1)...(19): siRNA sense strand
uacaaaggccuguggcaua

SEQ ID NO: 2520441 - RNA, 19 nt, Homo sapiens
  misc_RNA (1)...(19): siRNA sense strand
gaucaaagugccugggacu

SEQ ID NO: 2520442 - RNA, 19 nt, Homo sapiens
  misc_RNA (1)...(19): siRNA sense strand
caguauaaagacaaagaga

SEQ ID NO: 2520443 - RNA, 19 nt, Homo sapiens
  misc_RNA (1)...(19): siRNA sense strand
ucgccaggguugaggcaau

SEQ ID NO: 2520444 - RNA, 19 nt, Homo sapiens
  misc_RNA (1)...(19): siRNA sense strand
gcuaugugucccagaguau

SEQ ID NO: 2520445 - RNA, 19 nt, Homo sapiens
  misc_RNA (1)...(19): siRNA sense strand
agauacugccugagauaau

SEQ ID NO: 2520446 - RNA, 19 nt, Homo sapiens
  misc_RNA (1)...(19): siRNA sense strand
acaggaagaagguggaaga

SEQ ID NO: 2520447 - RNA, 19 nt, Homo sapiens
  misc_RNA (1)...(19): siRNA sense strand
ggaaucuguccgagaaaca

SEQ ID NO: 2520448 - RNA, 19 nt, Homo sapiens
  misc_RNA (1)...(19): siRNA sense strand
ggaaagagaaagagccuuc

SEQ ID NO: 2520449 - RNA, 19 nt, Homo sapiens
  misc_RNA (1)...(19): siRNA sense strand
ucaaagaauccuuauggaa

SEQ ID NO: 2520450 - RNA, 19 nt, Homo sapiens
  misc_RNA (1)...(19): siRNA sense strand
gggaucaaagacagggaau

SEQ ID NO: 2520451 - RNA, 19 nt, Homo sapiens
  misc_RNA (1)...(19): siRNA sense strand
gacaaaugauauugaggca

SEQ ID NO: 2520452 - RNA, 19 nt, Homo sapiens
  misc_RNA (1)...(19): siRNA sense strand
gacacuuaguacagaggaa

SEQ ID NO: 2520453 - RNA, 19 nt, Homo sapiens
  misc_RNA (1)...(19): siRNA sense strand
uggaguuacuagacagaga

SEQ ID NO: 2520454 - RNA, 19 nt, Homo sapiens
  misc_RNA (1)...(19): siRNA sense strand
uggcagaggagaagaagca

SEQ ID NO: 2520455 - RNA, 19 nt, Homo sapiens
  misc_RNA (1)...(19): siRNA sense strand
gaaugaaaaggaagaggaa

SEQ ID NO: 2520456 - RNA, 19 nt, Homo sapiens
  misc_RNA (1)...(19): siRNA sense strand
agaccaugaugugggauaa

SEQ ID NO: 2520457 - RNA, 19 nt, Homo sapiens
  misc_RNA (1)...(19): siRNA sense strand
gugaugacgugcagguuca

SEQ ID NO: 2520458 - RNA, 19 nt, Homo sapiens
  misc_RNA (1)...(19): siRNA sense strand
gaggaaucuguccgagaaa

SEQ ID NO: 2520459 - RNA, 19 nt, Homo sapiens
  misc_RNA (1)...(19): siRNA sense strand
gcucucagguucugggcau

SEQ ID NO: 2520460 - RNA, 19 nt, Homo sapiens
  misc_RNA (1)...(19): siRNA sense strand
uguccaagaugcugaggau

SEQ ID NO: 2520461 - RNA, 19 nt, Homo sapiens
  misc_RNA (1)...(19): siRNA sense strand
ccauuagguaucucaguaa

SEQ ID NO: 2520462 - RNA, 19 nt, Homo sapiens
  misc_RNA (1)...(19): siRNA sense strand
uggaaaaucugaaaaguga

SEQ ID NO: 2520463 - RNA, 19 nt, Homo sapiens
  misc_RNA (1)...(19): siRNA sense strand
cagacaaggacaaggagca

SEQ ID NO: 2520464 - RNA, 19 nt, Homo sapiens
  misc_RNA (1)...(19): siRNA sense strand
guguaaagagacaagcauu

SEQ ID NO: 2520465 - RNA, 19 nt, Homo sapiens
  misc_RNA (1)...(19): siRNA sense strand
ggaugaugcaauuguccaa

SEQ ID NO: 2520466 - RNA, 19 nt, Homo sapiens
  misc_RNA (1)...(19): siRNA sense strand
gcugaugagcccagguuga

SEQ ID NO: 2520467 - RNA, 19 nt, Homo sapiens
  misc_RNA (1)...(19): siRNA sense strand
agugaaggccagacagaca

SEQ ID NO: 2520468 - RNA, 19 nt, Homo sapiens
  misc_RNA (1)...(19): siRNA sense strand
ugaagaaacauaagcaguu

SEQ ID NO: 2520469 - RNA, 19 nt, Homo sapiens
  misc_RNA (1)...(19): siRNA sense strand
aggaaauagugcugcaaac

SEQ ID NO: 2520470 - RNA, 19 nt, Homo sapiens
  misc_RNA (1)...(19): siRNA sense strand
gagcccagguugagggauc

SEQ ID NO: 2520471 - RNA, 19 nt, Homo sapiens
  misc_RNA (1)...(19): siRNA sense strand
aagaccaugaugugggaua

SEQ ID NO: 2520472 - RNA, 19 nt, Homo sapiens
  misc_RNA (1)...(19): siRNA sense strand
acucagagccuaaaacaaa

SEQ ID NO: 2520473 - RNA, 19 nt, Homo sapiens
  misc_RNA (1)...(19): siRNA sense strand
caauagggcuuuugaagau

SEQ ID NO: 2520474 - RNA, 19 nt, Homo sapiens
  misc_RNA (1)...(19): siRNA sense strand
agcaauaacuccacugaga

SEQ ID NO: 2520475 - RNA, 19 nt, Homo sapiens
  misc_RNA (1)...(19): siRNA sense strand
cugcaaaugaguuucacaa

SEQ ID NO: 2520476 - RNA, 19 nt, Homo sapiens
  misc_RNA (1)...(19): siRNA sense strand
aaugcuagcuggugagguu

SEQ ID NO: 2520477 - RNA, 19 nt, Homo sapiens
  misc_RNA (1)...(19): siRNA sense strand
gagagaaggccuugcaaag

SEQ ID NO: 2520478 - RNA, 19 nt, Homo sapiens
  misc_RNA (1)...(19): siRNA sense strand
ucaaaaucgucauggguga

SEQ ID NO: 2520479 - RNA, 19 nt, Homo sapiens
  misc_RNA (1)...(19): siRNA sense strand
guggcaacacggagucaua

SEQ ID NO: 2520480 - RNA, 19 nt, Homo sapiens
  misc_RNA (1)...(19): siRNA sense strand
ggauaugagagacaacaau

SEQ ID NO: 2520481 - RNA, 19 nt, Homo sapiens
  misc_RNA (1)...(19): siRNA sense strand
acauggggcuggugcaaua

SEQ ID NO: 2520482 - RNA, 19 nt, Homo sapiens
  misc_RNA (1)...(19): siRNA sense strand
cagcaaaugggcaguuaca

SEQ ID NO: 2520483 - RNA, 19 nt, Homo sapiens
  misc_RNA (1)...(19): siRNA sense strand
cuuccagaucacugcgaaa

SEQ ID NO: 2520484 - RNA, 19 nt, Homo sapiens
  misc_RNA (1)...(19): siRNA sense strand
acgugcagguucagaucaa

SEQ ID NO: 2520485 - RNA, 19 nt, Homo sapiens
  misc_RNA (1)...(19): siRNA sense strand
aggccgacuuccagggcaa

SEQ ID NO: 2520486 - RNA, 19 nt, Homo sapiens
  misc_RNA (1)...(19): siRNA sense strand
agcugaagcaggagcagaa

SEQ ID NO: 2520487 - RNA, 19 nt, Homo sapiens
  misc_RNA (1)...(19): siRNA sense strand
ccaucugccuggaggucuu

SEQ ID NO: 2520488 - RNA, 19 nt, Homo sapiens
  misc_RNA (1)...(19): siRNA sense strand
gcgagaaggaccaggagcu

SEQ ID NO: 2520489 - RNA, 19 nt, Homo sapiens
  misc_RNA (1)...(19): siRNA sense strand
cagccagccguaagggcaa

SEQ ID NO: 2520490 - RNA, 19 nt, Homo sapiens
  misc_RNA (1)...(19): siRNA sense strand
cguaagggcaagcugaaca

SEQ ID NO: 2520491 - RNA, 19 nt, Homo sapiens
  misc_RNA (1)...(19): siRNA sense strand
gugaacaaccggacccgaa

SEQ ID NO: 2520492 - RNA, 19 nt, Homo sapiens
  misc_RNA (1)...(19): siRNA sense strand
aagcugaccguguggaaaa

SEQ ID NO: 2520493 - RNA, 19 nt, Homo sapiens
  misc_RNA (1)...(19): siRNA sense strand
agaaggaccaggagcucau

SEQ ID NO: 2520494 - RNA, 19 nt, Homo sapiens
  misc_RNA (1)...(19): siRNA sense strand
ucucugagcugaagcagga

SEQ ID NO: 2520495 - RNA, 19 nt, Homo sapiens
  misc_RNA (1)...(19): siRNA sense strand
uggaggaagcagagauaaa

SEQ ID NO: 2520496 - RNA, 19 nt, Homo sapiens
  misc_RNA (1)...(19): siRNA sense strand
ccgugaagcuggugaguac

SEQ ID NO: 2520497 - RNA, 19 nt, Homo sapiens
  misc_RNA (1)...(19): siRNA sense strand
uuuaaucgggcgagagaaa

SEQ ID NO: 2520498 - RNA, 19 nt, Homo sapiens
  misc_RNA (1)...(19): siRNA sense strand
aggaggaacccaaggaaga

SEQ ID NO: 2520499 - RNA, 19 nt, Homo sapiens
  misc_RNA (1)...(19): siRNA sense strand
aagugaaagaggagccuaa

SEQ ID NO: 2520500 - RNA, 19 nt, Homo sapiens
  misc_RNA (1)...(19): siRNA sense strand
ggaaguuggccgagaagca

SEQ ID NO: 2520501 - RNA, 19 nt, Homo sapiens
  misc_RNA (1)...(19): siRNA sense strand
agaacauguuugagcguca

SEQ ID NO: 2520502 - RNA, 19 nt, Homo sapiens
  misc_RNA (1)...(19): siRNA sense strand
aggaacagaaugaccaaua

SEQ ID NO: 2520503 - RNA, 19 nt, Homo sapiens
  misc_RNA (1)...(19): siRNA sense strand
aggaggagggacagagcua

SEQ ID NO: 2520504 - RNA, 19 nt, Homo sapiens
  misc_RNA (1)...(19): siRNA sense strand
cauggaggaagcagagaua

SEQ ID NO: 2520505 - RNA, 19 nt, Homo sapiens
  misc_RNA (1)...(19): siRNA sense strand
aagggaaggaggagggaca

SEQ ID NO: 2520506 - RNA, 19 nt, Homo sapiens
  misc_RNA (1)...(19): siRNA sense strand
caugaaacucucagcggaa

SEQ ID NO: 2520507 - RNA, 19 nt, Homo sapiens
  misc_RNA (1)...(19): siRNA sense strand
agggaagggaagugugcua

SEQ ID NO: 2520508 - RNA, 19 nt, Homo sapiens
  misc_RNA (1)...(19): siRNA sense strand
aggcagugaugggaagaaa

SEQ ID NO: 2520509 - RNA, 19 nt, Homo sapiens
  misc_RNA (1)...(19): siRNA sense strand
cagaagaggaaaguggaaa

SEQ ID NO: 2520510 - RNA, 19 nt, Homo sapiens
  misc_RNA (1)...(19): siRNA sense strand
caagguaagugguugccaa

SEQ ID NO: 2520511 - RNA, 19 nt, Homo sapiens
  misc_RNA (1)...(19): siRNA sense strand
aagccaaggugaaggagga

SEQ ID NO: 2520512 - RNA, 19 nt, Homo sapiens
  misc_RNA (1)...(19): siRNA sense strand
uccaagaaggucagugaaa

SEQ ID NO: 2520513 - RNA, 19 nt, Homo sapiens
  misc_RNA (1)...(19): siRNA sense strand
aaagauaguccuagaggca

SEQ ID NO: 2520514 - RNA, 19 nt, Homo sapiens
  misc_RNA (1)...(19): siRNA sense strand
ggacagagcuaguggggac

SEQ ID NO: 2520515 - RNA, 19 nt, Homo sapiens
  misc_RNA (1)...(19): siRNA sense strand
ucagagaagaaaccagaaa

SEQ ID NO: 2520516 - RNA, 19 nt, Homo sapiens
  misc_RNA (1)...(19): siRNA sense strand
cagaagacacauuuagaca

SEQ ID NO: 2520517 - RNA, 19 nt, Homo sapiens
  misc_RNA (1)...(19): siRNA sense strand
ccuccgaguauguggccaa

SEQ ID NO: 2520518 - RNA, 19 nt, Homo sapiens
  misc_RNA (1)...(19): siRNA sense strand
cguuggagcugguggcacu

SEQ ID NO: 2520519 - RNA, 19 nt, Homo sapiens
  misc_RNA (1)...(19): siRNA sense strand
acagugagguccugcgaga

SEQ ID NO: 2520520 - RNA, 19 nt, Homo sapiens
  misc_RNA (1)...(19): siRNA sense strand
aggaaacacagauggugaa

SEQ ID NO: 2520521 - RNA, 19 nt, Homo sapiens
  misc_RNA (1)...(19): siRNA sense strand
cugaggagaccaugcgauu

SEQ ID NO: 2520522 - RNA, 19 nt, Homo sapiens
  misc_RNA (1)...(19): siRNA sense strand
ccaaggugaaggaggagau

SEQ ID NO: 2520523 - RNA, 19 nt, Homo sapiens
  misc_RNA (1)...(19): siRNA sense strand
cagaaaagauaguccuaga

SEQ ID NO: 2520524 - RNA, 19 nt, Homo sapiens
  misc_RNA (1)...(19): siRNA sense strand
gcugcuaagugccgugcaa

SEQ ID NO: 2520525 - RNA, 19 nt, Homo sapiens
  misc_RNA (1)...(19): siRNA sense strand
ggaagcaggagcagcccaa

SEQ ID NO: 2520526 - RNA, 19 nt, Homo sapiens
  misc_RNA (1)...(19): siRNA sense strand
ugaggaaaagccagagaaa

SEQ ID NO: 2520527 - RNA, 19 nt, Homo sapiens
  misc_RNA (1)...(19): siRNA sense strand
ccagagaaaggguucgaau

SEQ ID NO: 2520528 - RNA, 19 nt, Homo sapiens
  misc_RNA (1)...(19): siRNA sense strand
cggaaagcuacaaggaaac

SEQ ID NO: 2520529 - RNA, 19 nt, Homo sapiens
  misc_RNA (1)...(19): siRNA sense strand
agaggcaggaaauggauua

SEQ ID NO: 2520530 - RNA, 19 nt, Homo sapiens
  misc_RNA (1)...(19): siRNA sense strand
cugugacgugugugggaaa

SEQ ID NO: 2520531 - RNA, 19 nt, Homo sapiens
  misc_RNA (1)...(19): siRNA sense strand
agaagcaggaacagaauga

SEQ ID NO: 2520532 - RNA, 19 nt, Homo sapiens
  misc_RNA (1)...(19): siRNA sense strand
caauaugugguuugguuau

SEQ ID NO: 2520533 - RNA, 19 nt, Homo sapiens
  misc_RNA (1)...(19): siRNA sense strand
cggaagaauaucagcucca

SEQ ID NO: 2520534 - RNA, 19 nt, Homo sapiens
  misc_RNA (1)...(19): siRNA sense strand
aaggaaacacagaugguga

SEQ ID NO: 2520535 - RNA, 19 nt, Homo sapiens
  misc_RNA (1)...(19): siRNA sense strand
ucagaagaggaaaguggaa

SEQ ID NO: 2520536 - RNA, 19 nt, Homo sapiens
  misc_RNA (1)...(19): siRNA sense strand
gcagcaaagggaaggagga

SEQ ID NO: 2520537 - RNA, 19 nt, Homo sapiens
  misc_RNA (1)...(19): siRNA sense strand
gugcaaaucugaaccagca

SEQ ID NO: 2520538 - RNA, 19 nt, Homo sapiens
  misc_RNA (1)...(19): siRNA sense strand
gggaacaaucugcugguca

SEQ ID NO: 2520539 - RNA, 19 nt, Homo sapiens
  misc_RNA (1)...(19): siRNA sense strand
cgagaagcaggaacagaau

SEQ ID NO: 2520540 - RNA, 19 nt, Homo sapiens
  misc_RNA (1)...(19): siRNA sense strand
gauuugggaccgagcucaa

SEQ ID NO: 2520541 - RNA, 19 nt, Homo sapiens
  misc_RNA (1)...(19): siRNA sense strand
gcacuuuaaucgggcgaga

SEQ ID NO: 2520542 - RNA, 19 nt, Homo sapiens
  misc_RNA (1)...(19): siRNA sense strand
gcaggaacagaaugaccaa

SEQ ID NO: 2520543 - RNA, 19 nt, Homo sapiens
  misc_RNA (1)...(19): siRNA sense strand
agaggaaaguggaaagccu

SEQ ID NO: 2520544 - RNA, 19 nt, Homo sapiens
  misc_RNA (1)...(19): siRNA sense strand
ggaaaguguuuggccgaca

SEQ ID NO: 2520545 - RNA, 19 nt, Homo sapiens
  misc_RNA (1)...(19): siRNA sense strand
uggccgagaagcaggaaca

SEQ ID NO: 2520546 - RNA, 19 nt, Homo sapiens
  misc_RNA (1)...(19): siRNA sense strand
ucaggauaucucugugaaa

SEQ ID NO: 2520547 - RNA, 19 nt, Homo sapiens
  misc_RNA (1)...(19): siRNA sense strand
uggugaaggaggaacccaa

SEQ ID NO: 2520548 - RNA, 19 nt, Homo sapiens
  misc_RNA (1)...(19): siRNA sense strand
uggugaagauuaaagagga

SEQ ID NO: 2520549 - RNA, 19 nt, Homo sapiens
  misc_RNA (1)...(19): siRNA sense strand
aagguaagugguugccaaa

SEQ ID NO: 2520550 - RNA, 19 nt, Homo sapiens
  misc_RNA (1)...(19): siRNA sense strand
aggaagaguuacuggaagc

SEQ ID NO: 2520551 - RNA, 19 nt, Homo sapiens
  misc_RNA (1)...(19): siRNA sense strand
gugaaggagaacacuggua

SEQ ID NO: 2520552 - RNA, 19 nt, Homo sapiens
  misc_RNA (1)...(19): siRNA sense strand
agaagacacauuuagacaa

SEQ ID NO: 2520553 - RNA, 19 nt, Homo sapiens
  misc_RNA (1)...(19): siRNA sense strand
uggacaaggagcaguggau

SEQ ID NO: 2520554 - RNA, 19 nt, Homo sapiens
  misc_RNA (1)...(19): siRNA sense strand
ccggacaccuccuugggaa

SEQ ID NO: 2520555 - RNA, 19 nt, Homo sapiens
  misc_RNA (1)...(19): siRNA sense strand
gcucagugaaggagaacac

SEQ ID NO: 2520556 - RNA, 19 nt, Homo sapiens
  misc_RNA (1)...(19): siRNA sense strand
gacaaggagcaguggaugu

SEQ ID NO: 2520557 - RNA, 19 nt, Homo sapiens
  misc_RNA (1)...(19): siRNA sense strand
gaggaagcagagauaaaga

SEQ ID NO: 2520558 - RNA, 19 nt, Homo sapiens
  misc_RNA (1)...(19): siRNA sense strand
aggccagucccguaagaaa

SEQ ID NO: 2520559 - RNA, 19 nt, Homo sapiens
  misc_RNA (1)...(19): siRNA sense strand
uggacgagaccuaccgaaa

SEQ ID NO: 2520560 - RNA, 19 nt, Homo sapiens
  misc_RNA (1)...(19): siRNA sense strand
uggcggaguacgagagcuu

SEQ ID NO: 2520561 - RNA, 19 nt, Homo sapiens
  misc_RNA (1)...(19): siRNA sense strand
cugauguggacgagaccua

SEQ ID NO: 2520562 - RNA, 19 nt, Homo sapiens
  misc_RNA (1)...(19): siRNA sense strand
uguccuaggcaaagcauau

SEQ ID NO: 2520563 - RNA, 19 nt, Homo sapiens
  misc_RNA (1)...(19): siRNA sense strand
ccuccaagaaggaagcaga

SEQ ID NO: 2520564 - RNA, 19 nt, Homo sapiens
  misc_RNA (1)...(19): siRNA sense strand
agggaggacuacacggaca

SEQ ID NO: 2520565 - RNA, 19 nt, Homo sapiens
  misc_RNA (1)...(19): siRNA sense strand
ggucagagcugucagggag

SEQ ID NO: 2520566 - RNA, 19 nt, Homo sapiens
  misc_RNA (1)...(19): siRNA sense strand
ccaaacaccucuaacggaa

SEQ ID NO: 2520567 - RNA, 19 nt, Homo sapiens
  misc_RNA (1)...(19): siRNA sense strand
gaucaauggaagaacaaaa

SEQ ID NO: 2520568 - RNA, 19 nt, Homo sapiens
  misc_RNA (1)...(19): siRNA sense strand
cagaacgagccauggacaa

SEQ ID NO: 2520569 - RNA, 19 nt, Homo sapiens
  misc_RNA (1)...(19): siRNA sense strand
cuugcugagcugugggaua

SEQ ID NO: 2520570 - RNA, 19 nt, Homo sapiens
  misc_RNA (1)...(19): siRNA sense strand
ccaagcagagagagagaca

SEQ ID NO: 2520571 - RNA, 19 nt, Homo sapiens
  misc_RNA (1)...(19): siRNA sense strand
guccaagcagagagagaga

SEQ ID NO: 2520572 - RNA, 19 nt, Homo sapiens
  misc_RNA (1)...(19): siRNA sense strand
acuuugaacuucuggacca

SEQ ID NO: 2520573 - RNA, 19 nt, Homo sapiens
  misc_RNA (1)...(19): siRNA sense strand
auguccaagcagagagaga

SEQ ID NO: 2520574 - RNA, 19 nt, Homo sapiens
  misc_RNA (1)...(19): siRNA sense strand
ugugauaggaacugagcaa

SEQ ID NO: 2520575 - RNA, 19 nt, Homo sapiens
  misc_RNA (1)...(19): siRNA sense strand
cggcauucagaccgagaua

SEQ ID NO: 2520576 - RNA, 19 nt, Homo sapiens
  misc_RNA (1)...(19): siRNA sense strand
cauaaaauggcuuggagaa

SEQ ID NO: 2520577 - RNA, 19 nt, Homo sapiens
  misc_RNA (1)...(19): siRNA sense strand
ccacaauauuggauacgga

SEQ ID NO: 2520578 - RNA, 19 nt, Homo sapiens
  misc_RNA (1)...(19): siRNA sense strand
aagagugaggacuggaaua

SEQ ID NO: 2520579 - RNA, 19 nt, Homo sapiens
  misc_RNA (1)...(19): siRNA sense strand
cuuuaaugcacgaauagaa

SEQ ID NO: 2520580 - RNA, 19 nt, Homo sapiens
  misc_RNA (1)...(19): siRNA sense strand
acaauauuggauacggaaa

SEQ ID NO: 2520581 - RNA, 19 nt, Homo sapiens
  misc_RNA (1)...(19): siRNA sense strand
agaaauugugauaggaacu

SEQ ID NO: 2520582 - RNA, 19 nt, Homo sapiens
  misc_RNA (1)...(19): siRNA sense strand
cuggaauaucuuugaugua

SEQ ID NO: 2520583 - RNA, 19 nt, Homo sapiens
  misc_RNA (1)...(19): siRNA sense strand
aggaacugagcaagugaua

SEQ ID NO: 2520584 - RNA, 19 nt, Homo sapiens
  misc_RNA (1)...(19): siRNA sense strand
uuggagaaguuauggcuga

SEQ ID NO: 2520585 - RNA, 19 nt, Homo sapiens
  misc_RNA (1)...(19): siRNA sense strand
aaauacaggaagaggccuu

SEQ ID NO: 2520586 - RNA, 19 nt, Homo sapiens
  misc_RNA (1)...(19): siRNA sense strand
gaggagucucagccagaaa

SEQ ID NO: 2520587 - RNA, 19 nt, Homo sapiens
  misc_RNA (1)...(19): siRNA sense strand
gaaaugaagagguuggauc

SEQ ID NO: 2520588 - RNA, 19 nt, Homo sapiens
  misc_RNA (1)...(19): siRNA sense strand
gcauaaaauggcuuggaga

SEQ ID NO: 2520589 - RNA, 19 nt, Homo sapiens
  misc_RNA (1)...(19): siRNA sense strand
ugauaggaacugagcaagu

SEQ ID NO: 2520590 - RNA, 19 nt, Homo sapiens
  misc_RNA (1)...(19): siRNA sense strand
ccuuagaggaaagcauaaa

SEQ ID NO: 2520591 - RNA, 19 nt, Homo sapiens
  misc_RNA (1)...(19): siRNA sense strand
aggaagaggaagaggacga

SEQ ID NO: 2520592 - RNA, 19 nt, Homo sapiens
  misc_RNA (1)...(19): siRNA sense strand
aggaagaggacgaggacca

SEQ ID NO: 2520593 - RNA, 19 nt, Homo sapiens
  misc_RNA (1)...(19): siRNA sense strand
acgaggaagaugaggauga

SEQ ID NO: 2520594 - RNA, 19 nt, Homo sapiens
  misc_RNA (1)...(19): siRNA sense strand
augacuacgacgaggaaga

SEQ ID NO: 2520595 - RNA, 19 nt, Homo sapiens
  misc_RNA (1)...(19): siRNA sense strand
agcaggaggaagaggaaga

SEQ ID NO: 2520596 - RNA, 19 nt, Homo sapiens
  misc_RNA (1)...(19): siRNA sense strand
aggaggaagaggaagagga

SEQ ID NO: 2520597 - RNA, 19 nt, Homo sapiens
  misc_RNA (1)...(19): siRNA sense strand
aagagaaggcagagggauu

SEQ ID NO: 2520598 - RNA, 19 nt, Homo sapiens
  misc_RNA (1)...(19): siRNA sense strand
aggaauauugggaggagua

SEQ ID NO: 2520599 - RNA, 19 nt, Homo sapiens
  misc_RNA (1)...(19): siRNA sense strand
caguaugugaagauagaua

SEQ ID NO: 2520600 - RNA, 19 nt, Homo sapiens
  misc_RNA (1)...(19): siRNA sense strand
gagugaacgacaugcuaaa

SEQ ID NO: 2520601 - RNA, 19 nt, Homo sapiens
  misc_RNA (1)...(19): siRNA sense strand
uuaugaguguggagagcaa

SEQ ID NO: 2520602 - RNA, 19 nt, Homo sapiens
  misc_RNA (1)...(19): siRNA sense strand
ggaagaugccguggagcaa

SEQ ID NO: 2520603 - RNA, 19 nt, Homo sapiens
  misc_RNA (1)...(19): siRNA sense strand
cuggaagauacuagaaaga

SEQ ID NO: 2520604 - RNA, 19 nt, Homo sapiens
  misc_RNA (1)...(19): siRNA sense strand
uugaaagagaccaggaaaa

SEQ ID NO: 2520605 - RNA, 19 nt, Homo sapiens
  misc_RNA (1)...(19): siRNA sense strand
cagaaaauuuggugcuuau

SEQ ID NO: 2520606 - RNA, 19 nt, Homo sapiens
  misc_RNA (1)...(19): siRNA sense strand
aagaagcgaugaaggaaaa

SEQ ID NO: 2520607 - RNA, 19 nt, Homo sapiens
  misc_RNA (1)...(19): siRNA sense strand
aggaagaugccguggagca

SEQ ID NO: 2520608 - RNA, 19 nt, Homo sapiens
  misc_RNA (1)...(19): siRNA sense strand
gcaaauaaguaaugcugag

SEQ ID NO: 2520609 - RNA, 19 nt, Homo sapiens
  misc_RNA (1)...(19): siRNA sense strand
aagagaaugcagagaaaau

SEQ ID NO: 2520610 - RNA, 19 nt, Homo sapiens
  misc_RNA (1)...(19): siRNA sense strand
aauauugggaggaguacaa

SEQ ID NO: 2520611 - RNA, 19 nt, Homo sapiens
  misc_RNA (1)...(19): siRNA sense strand
uggaauugccagaaacaca

SEQ ID NO: 2520612 - RNA, 19 nt, Homo sapiens
  misc_RNA (1)...(19): siRNA sense strand
gcgcaugcaaauaaguaau

SEQ ID NO: 2520613 - RNA, 19 nt, Homo sapiens
  misc_RNA (1)...(19): siRNA sense strand
acucagggaaagcaaauaa

SEQ ID NO: 2520614 - RNA, 19 nt, Homo sapiens
  misc_RNA (1)...(19): siRNA sense strand
auagaagagaagucagaau

SEQ ID NO: 2520615 - RNA, 19 nt, Homo sapiens
  misc_RNA (1)...(19): siRNA sense strand
gaagaacagauuuggcaca

SEQ ID NO: 2520616 - RNA, 19 nt, Homo sapiens
  misc_RNA (1)...(19): siRNA sense strand
uacuaaaggaacugaguga

SEQ ID NO: 2520617 - RNA, 19 nt, Homo sapiens
  misc_RNA (1)...(19): siRNA sense strand
uugaagaagcgaugaagga

SEQ ID NO: 2520618 - RNA, 19 nt, Homo sapiens
  misc_RNA (1)...(19): siRNA sense strand
agaaaaugucagaacacua

SEQ ID NO: 2520619 - RNA, 19 nt, Homo sapiens
  misc_RNA (1)...(19): siRNA sense strand
auauagaagagaagucaga

SEQ ID NO: 2520620 - RNA, 19 nt, Homo sapiens
  misc_RNA (1)...(19): siRNA sense strand
ggauacacaugacgggcca

SEQ ID NO: 2520621 - RNA, 19 nt, Homo sapiens
  misc_RNA (1)...(19): siRNA sense strand
aggcguugcuggcgacuau

SEQ ID NO: 2520622 - RNA, 19 nt, Homo sapiens
  misc_RNA (1)...(19): siRNA sense strand
agaagugccaccugaagaa

SEQ ID NO: 2520623 - RNA, 19 nt, Homo sapiens
  misc_RNA (1)...(19): siRNA sense strand
gaguguggagagcaagaaa

SEQ ID NO: 2520624 - RNA, 19 nt, Homo sapiens
  misc_RNA (1)...(19): siRNA sense strand
acaggaaggaaguugaaga

SEQ ID NO: 2520625 - RNA, 19 nt, Homo sapiens
  misc_RNA (1)...(19): siRNA sense strand
gcuuaaaagaagaacagau

SEQ ID NO: 2520626 - RNA, 19 nt, Homo sapiens
  misc_RNA (1)...(19): siRNA sense strand
gcgacuauaucuuacccaa

SEQ ID NO: 2520627 - RNA, 19 nt, Homo sapiens
  misc_RNA (1)...(19): siRNA sense strand
cuaaaggaacugagugaag

SEQ ID NO: 2520628 - RNA, 19 nt, Homo sapiens
  misc_RNA (1)...(19): siRNA sense strand
gggauugccaguuguaaca

SEQ ID NO: 2520629 - RNA, 19 nt, Homo sapiens
  misc_RNA (1)...(19): siRNA sense strand
caguuaaagagaaugcaga

SEQ ID NO: 2520630 - RNA, 19 nt, Homo sapiens
  misc_RNA (1)...(19): siRNA sense strand
caaaagaaggaaugggcca

SEQ ID NO: 2520631 - RNA, 19 nt, Homo sapiens
  misc_RNA (1)...(19): siRNA sense strand
ucuuuggaauugccagaaa

SEQ ID NO: 2520632 - RNA, 19 nt, Homo sapiens
  misc_RNA (1)...(19): siRNA sense strand
augaggaugagaaggauuu

SEQ ID NO: 2520633 - RNA, 19 nt, Homo sapiens
  misc_RNA (1)...(19): siRNA sense strand
ugagugaagagaaggcaga

SEQ ID NO: 2520634 - RNA, 19 nt, Homo sapiens
  misc_RNA (1)...(19): siRNA sense strand
uaaguaaugcugagaaacu

SEQ ID NO: 2520635 - RNA, 19 nt, Homo sapiens
  misc_RNA (1)...(19): siRNA sense strand
aaguaaugcugagaaacua

SEQ ID NO: 2520636 - RNA, 19 nt, Homo sapiens
  misc_RNA (1)...(19): siRNA sense strand
ccagaaacacauauagaag

SEQ ID NO: 2520637 - RNA, 19 nt, Homo sapiens
  misc_RNA (1)...(19): siRNA sense strand
guuugaaagagaccaggaa

SEQ ID NO: 2520638 - RNA, 19 nt, Homo sapiens
  misc_RNA (1)...(19): siRNA sense strand
uuugaaagagaccaggaaa

SEQ ID NO: 2520639 - RNA, 19 nt, Homo sapiens
  misc_RNA (1)...(19): siRNA sense strand
gcuguaaagcucauugaca

SEQ ID NO: 2520640 - RNA, 19 nt, Homo sapiens
  misc_RNA (1)...(19): siRNA sense strand
ggugcuuauugaucaacua

SEQ ID NO: 2520641 - RNA, 19 nt, Homo sapiens
  misc_RNA (1)...(19): siRNA sense strand
acaucaacacaguuaaaga

SEQ ID NO: 2520642 - RNA, 19 nt, Homo sapiens
  misc_RNA (1)...(19): siRNA sense strand
aggagugaguaucgaucaa

SEQ ID NO: 2520643 - RNA, 19 nt, Homo sapiens
  misc_RNA (1)...(19): siRNA sense strand
ucugauaaacugugggaac

SEQ ID NO: 2520644 - RNA, 19 nt, Homo sapiens
  misc_RNA (1)...(19): siRNA sense strand
aggaaaucaguguggcuua

SEQ ID NO: 2520645 - RNA, 19 nt, Homo sapiens
  misc_RNA (1)...(19): siRNA sense strand
augaauuacaucugggaau

SEQ ID NO: 2520646 - RNA, 19 nt, Homo sapiens
  misc_RNA (1)...(19): siRNA sense strand
gaauauagaucaugacccu

SEQ ID NO: 2520647 - RNA, 19 nt, Homo sapiens
  misc_RNA (1)...(19): siRNA sense strand
cguuagaagucuugaugcu

SEQ ID NO: 2520648 - RNA, 19 nt, Homo sapiens
  misc_RNA (1)...(19): siRNA sense strand
cccaaggaauauagaucau

SEQ ID NO: 2520649 - RNA, 19 nt, Homo sapiens
  misc_RNA (1)...(19): siRNA sense strand
gguugauggucucaguuau

SEQ ID NO: 2520650 - RNA, 19 nt, Homo sapiens
  misc_RNA (1)...(19): siRNA sense strand
gaacaaggguggagggacc

SEQ ID NO: 2520651 - RNA, 19 nt, Homo sapiens
  misc_RNA (1)...(19): siRNA sense strand
aggaagaagaagagaccca

SEQ ID NO: 2520652 - RNA, 19 nt, Homo sapiens
  misc_RNA (1)...(19): siRNA sense strand
cugugauggccaagaggaa

SEQ ID NO: 2520653 - RNA, 19 nt, Homo sapiens
  misc_RNA (1)...(19): siRNA sense strand
ccaagaggaaacaagggaa

SEQ ID NO: 2520654 - RNA, 19 nt, Homo sapiens
  misc_RNA (1)...(19): siRNA sense strand
cagcagaguuucaggcaug

SEQ ID NO: 2520655 - RNA, 19 nt, Homo sapiens
  misc_RNA (1)...(19): siRNA sense strand
gacuagaaggucagggcau

SEQ ID NO: 2520656 - RNA, 19 nt, Homo sapiens
  misc_RNA (1)...(19): siRNA sense strand
gugacauaugccacaguaa

SEQ ID NO: 2520657 - RNA, 19 nt, Homo sapiens
  misc_RNA (1)...(19): siRNA sense strand
acacauuaggcuugacuca

SEQ ID NO: 2520658 - RNA, 19 nt, Homo sapiens
  misc_RNA (1)...(19): siRNA sense strand
aggaagaggaugcuggcga

SEQ ID NO: 2520659 - RNA, 19 nt, Homo sapiens
  misc_RNA (1)...(19): siRNA sense strand
cugcagguggaaaugguua

SEQ ID NO: 2520660 - RNA, 19 nt, Homo sapiens
  misc_RNA (1)...(19): siRNA sense strand
caagaggaaacaagggaac

SEQ ID NO: 2520661 - RNA, 19 nt, Homo sapiens
  misc_RNA (1)...(19): siRNA sense strand
gaaacaagggaacaggcuu

SEQ ID NO: 2520662 - RNA, 19 nt, Homo sapiens
  misc_RNA (1)...(19): siRNA sense strand
aggaggagguggaggagga

SEQ ID NO: 2520663 - RNA, 19 nt, Homo sapiens
  misc_RNA (1)...(19): siRNA sense strand
acgaagugucggaggacga

SEQ ID NO: 2520664 - RNA, 19 nt, Homo sapiens
  misc_RNA (1)...(19): siRNA sense strand
aggacgaggaggcggauca

SEQ ID NO: 2520665 - RNA, 19 nt, Homo sapiens
  misc_RNA (1)...(19): siRNA sense strand
cggcaguguugguggagug

SEQ ID NO: 2520666 - RNA, 19 nt, Homo sapiens
  misc_RNA (1)...(19): siRNA sense strand
agaacuaucuggaggguga

SEQ ID NO: 2520667 - RNA, 19 nt, Homo sapiens
  misc_RNA (1)...(19): siRNA sense strand
gggugaaggagcaaagaau

SEQ ID NO: 2520668 - RNA, 19 nt, Homo sapiens
  misc_RNA (1)...(19): siRNA sense strand
agacauuacaagagacuau

SEQ ID NO: 2520669 - RNA, 19 nt, Homo sapiens
  misc_RNA (1)...(19): siRNA sense strand
ggaaagacaagaagcagca

SEQ ID NO: 2520670 - RNA, 19 nt, Homo sapiens
  misc_RNA (1)...(19): siRNA sense strand
agaaaagggcaaaagacaa

SEQ ID NO: 2520671 - RNA, 19 nt, Homo sapiens
  misc_RNA (1)...(19): siRNA sense strand
gaaaugaaguccaaccuga

SEQ ID NO: 2520672 - RNA, 19 nt, Homo sapiens
  misc_RNA (1)...(19): siRNA sense strand
uggaaaagucugaggacca

SEQ ID NO: 2520673 - RNA, 19 nt, Homo sapiens
  misc_RNA (1)...(19): siRNA sense strand
gggcaaaagacaaauguga

SEQ ID NO: 2520674 - RNA, 19 nt, Homo sapiens
  misc_RNA (1)...(19): siRNA sense strand
gcaaaagacaaaugugaca

SEQ ID NO: 2520675 - RNA, 19 nt, Homo sapiens
  misc_RNA (1)...(19): siRNA sense strand
gaggaacagucaugcccaa

SEQ ID NO: 2520676 - RNA, 19 nt, Homo sapiens
  misc_RNA (1)...(19): siRNA sense strand
agcuagacaaggagaguuu

SEQ ID NO: 2520677 - RNA, 19 nt, Homo sapiens
  misc_RNA (1)...(19): siRNA sense strand
ccaugaaagaaauaggcau

SEQ ID NO: 2520678 - RNA, 19 nt, Homo sapiens
  misc_RNA (1)...(19): siRNA sense strand
caauaagacaguaagggca

SEQ ID NO: 2520679 - RNA, 19 nt, Homo sapiens
  misc_RNA (1)...(19): siRNA sense strand
auuaagaaugccugccaaa

SEQ ID NO: 2520680 - RNA, 19 nt, Homo sapiens
  misc_RNA (1)...(19): siRNA sense strand
agacuguggccaagacauu

SEQ ID NO: 2520681 - RNA, 19 nt, Homo sapiens
  misc_RNA (1)...(19): siRNA sense strand
aagaaaagggcaaaagaca

SEQ ID NO: 2520682 - RNA, 19 nt, Homo sapiens
  misc_RNA (1)...(19): siRNA sense strand
caaaugugacagugagacu

SEQ ID NO: 2520683 - RNA, 19 nt, Homo sapiens
  misc_RNA (1)...(19): siRNA sense strand
uaugcaaggaggcaggaaa

SEQ ID NO: 2520684 - RNA, 19 nt, Homo sapiens
  misc_RNA (1)...(19): siRNA sense strand
aaaauacaccucugagaaa

SEQ ID NO: 2520685 - RNA, 19 nt, Homo sapiens
  misc_RNA (1)...(19): siRNA sense strand
aagacaaaugugacaguga

SEQ ID NO: 2520686 - RNA, 19 nt, Homo sapiens
  misc_RNA (1)...(19): siRNA sense strand
auuugaagcuagacaagga

SEQ ID NO: 2520687 - RNA, 19 nt, Homo sapiens
  misc_RNA (1)...(19): siRNA sense strand
gacaaaugugacagugaga

SEQ ID NO: 2520688 - RNA, 19 nt, Homo sapiens
  misc_RNA (1)...(19): siRNA sense strand
aaacaaaucccaauccaga

SEQ ID NO: 2520689 - RNA, 19 nt, Homo sapiens
  misc_RNA (1)...(19): siRNA sense strand
agacaaagccccagcuguu

SEQ ID NO: 2520690 - RNA, 19 nt, Homo sapiens
  misc_RNA (1)...(19): siRNA sense strand
cggaggagauauaaaagau

SEQ ID NO: 2520691 - RNA, 19 nt, Homo sapiens
  misc_RNA (1)...(19): siRNA sense strand
ccugaagcaccuugaaguu

SEQ ID NO: 2520692 - RNA, 19 nt, Homo sapiens
  misc_RNA (1)...(19): siRNA sense strand
aaacaggugccaagaacca

SEQ ID NO: 2520693 - RNA, 19 nt, Homo sapiens
  misc_RNA (1)...(19): siRNA sense strand
agucaugcccaauaagaca

SEQ ID NO: 2520694 - RNA, 19 nt, Homo sapiens
  misc_RNA (1)...(19): siRNA sense strand
aggacaagguggugcagac

SEQ ID NO: 2520695 - RNA, 19 nt, Homo sapiens
  misc_RNA (1)...(19): siRNA sense strand
cgucccaggccauaagauu

SEQ ID NO: 2520696 - RNA, 19 nt, Homo sapiens
  misc_RNA (1)...(19): siRNA sense strand
aagaugggacuguagaaau

SEQ ID NO: 2520697 - RNA, 19 nt, Homo sapiens
  misc_RNA (1)...(19): siRNA sense strand
gcuggaagguuaaucauaa

SEQ ID NO: 2520698 - RNA, 19 nt, Homo sapiens
  misc_RNA (1)...(19): siRNA sense strand
cuuuaaauauacugggcau

SEQ ID NO: 2520699 - RNA, 19 nt, Homo sapiens
  misc_RNA (1)...(19): siRNA sense strand
ucuuaugagugcaucaaua

SEQ ID NO: 2520700 - RNA, 19 nt, Homo sapiens
  misc_RNA (1)...(19): siRNA sense strand
cuggaagguuaaucauaaa

SEQ ID NO: 2520701 - RNA, 19 nt, Homo sapiens
  misc_RNA (1)...(19): siRNA sense strand
cggugaaauugcuuugaau

SEQ ID NO: 2520702 - RNA, 19 nt, Homo sapiens
  misc_RNA (1)...(19): siRNA sense strand
acgaaauaccgaggcuaua

SEQ ID NO: 2520703 - RNA, 19 nt, Homo sapiens
  misc_RNA (1)...(19): siRNA sense strand
agaccuauuggaugcuaaa

SEQ ID NO: 2520704 - RNA, 19 nt, Homo sapiens
  misc_RNA (1)...(19): siRNA sense strand
ggaauaugauggaugagca

SEQ ID NO: 2520705 - RNA, 19 nt, Homo sapiens
  misc_RNA (1)...(19): siRNA sense strand
uagcaaaucuaaauggcau

SEQ ID NO: 2520706 - RNA, 19 nt, Homo sapiens
  misc_RNA (1)...(19): siRNA sense strand
gcuagaggaugaaacgaga

SEQ ID NO: 2520707 - RNA, 19 nt, Homo sapiens
  misc_RNA (1)...(19): siRNA sense strand
agaaaagaauugaugggau

SEQ ID NO: 2520708 - RNA, 19 nt, Homo sapiens
  misc_RNA (1)...(19): siRNA sense strand
aggacgguauucaggaaau

SEQ ID NO: 2520709 - RNA, 19 nt, Homo sapiens
  misc_RNA (1)...(19): siRNA sense strand
aggaagacugugaggaauc

SEQ ID NO: 2520710 - RNA, 19 nt, Homo sapiens
  misc_RNA (1)...(19): siRNA sense strand
ggagguggauggaccguga

SEQ ID NO: 2520711 - RNA, 19 nt, Homo sapiens
  misc_RNA (1)...(19): siRNA sense strand
guuuaacgaguguggucua

SEQ ID NO: 2520712 - RNA, 19 nt, Homo sapiens
  misc_RNA (1)...(19): siRNA sense strand
auaugauggaugagcaaca

SEQ ID NO: 2520713 - RNA, 19 nt, Homo sapiens
  misc_RNA (1)...(19): siRNA sense strand
guacaucauucuacggacu

SEQ ID NO: 2520714 - RNA, 19 nt, Homo sapiens
  misc_RNA (1)...(19): siRNA sense strand
ggauuacagaggaggugga

SEQ ID NO: 2520715 - RNA, 19 nt, Homo sapiens
  misc_RNA (1)...(19): siRNA sense strand
ggugaaaagccaugagaaa

SEQ ID NO: 2520716 - RNA, 19 nt, Homo sapiens
  misc_RNA (1)...(19): siRNA sense strand
agaauggaaaggagguaua

SEQ ID NO: 2520717 - RNA, 19 nt, Homo sapiens
  misc_RNA (1)...(19): siRNA sense strand
uaggaaagaaccagaggaa

SEQ ID NO: 2520718 - RNA, 19 nt, Homo sapiens
  misc_RNA (1)...(19): siRNA sense strand
agauugacacugagggcaa

SEQ ID NO: 2520719 - RNA, 19 nt, Homo sapiens
  misc_RNA (1)...(19): siRNA sense strand
caggcaaagcacuggcaua

SEQ ID NO: 2520720 - RNA, 19 nt, Homo sapiens
  misc_RNA (1)...(19): siRNA sense strand
agcuguauuugaugagaaa

SEQ ID NO: 2520721 - RNA, 19 nt, Homo sapiens
  misc_RNA (1)...(19): siRNA sense strand
guggaaagugagauucaaa

SEQ ID NO: 2520722 - RNA, 19 nt, Homo sapiens
  misc_RNA (1)...(19): siRNA sense strand
guguaauagccguccaauu

SEQ ID NO: 2520723 - RNA, 19 nt, Homo sapiens
  misc_RNA (1)...(19): siRNA sense strand
aagaaguaccugcaugaaa

SEQ ID NO: 2520724 - RNA, 19 nt, Homo sapiens
  misc_RNA (1)...(19): siRNA sense strand
cagcuagcauuguuggcaa

SEQ ID NO: 2520725 - RNA, 19 nt, Homo sapiens
  misc_RNA (1)...(19): siRNA sense strand
cuguaaagauaugggacuu

SEQ ID NO: 2520726 - RNA, 19 nt, Homo sapiens
  misc_RNA (1)...(19): siRNA sense strand
cugagaaauacuuuaggaa

SEQ ID NO: 2520727 - RNA, 19 nt, Homo sapiens
  misc_RNA (1)...(19): siRNA sense strand
aagauggagcuguggauau

SEQ ID NO: 2520728 - RNA, 19 nt, Homo sapiens
  misc_RNA (1)...(19): siRNA sense strand
uacacuaaauguugggcaa

SEQ ID NO: 2520729 - RNA, 19 nt, Homo sapiens
  misc_RNA (1)...(19): siRNA sense strand
aggcaaagcacuggcauau

SEQ ID NO: 2520730 - RNA, 19 nt, Homo sapiens
  misc_RNA (1)...(19): siRNA sense strand
aggauaaaguuuugagacu

SEQ ID NO: 2520731 - RNA, 19 nt, Homo sapiens
  misc_RNA (1)...(19): siRNA sense strand
ugaugaagcccauggacga

SEQ ID NO: 2520732 - RNA, 19 nt, Homo sapiens
  misc_RNA (1)...(19): siRNA sense strand
ugucagaccaucagaagau

SEQ ID NO: 2520733 - RNA, 19 nt, Homo sapiens
  misc_RNA (1)...(19): siRNA sense strand
guuuugagacucugggaua

SEQ ID NO: 2520734 - RNA, 19 nt, Homo sapiens
  misc_RNA (1)...(19): siRNA sense strand
gaagccagcaagaggguga

SEQ ID NO: 2520735 - RNA, 19 nt, Homo sapiens
  misc_RNA (1)...(19): siRNA sense strand
gggaguuaugauggagaaa

SEQ ID NO: 2520736 - RNA, 19 nt, Homo sapiens
  misc_RNA (1)...(19): siRNA sense strand
gggauauauauaagaagca

SEQ ID NO: 2520737 - RNA, 19 nt, Homo sapiens
  misc_RNA (1)...(19): siRNA sense strand
ucucuaaaccagugggugu

SEQ ID NO: 2520738 - RNA, 19 nt, Homo sapiens
  misc_RNA (1)...(19): siRNA sense strand
gcuuggagagagaaaucaa

SEQ ID NO: 2520739 - RNA, 19 nt, Homo sapiens
  misc_RNA (1)...(19): siRNA sense strand
gaaaggagguauacagcac

SEQ ID NO: 2520740 - RNA, 19 nt, Homo sapiens
  misc_RNA (1)...(19): siRNA sense strand
cuugauggaugguugaaaa

SEQ ID NO: 2520741 - RNA, 19 nt, Homo sapiens
  misc_RNA (1)...(19): siRNA sense strand
cugcaguauuugugugacu

SEQ ID NO: 2520742 - RNA, 19 nt, Homo sapiens
  misc_RNA (1)...(19): siRNA sense strand
gaccaucagaagauauaaa

SEQ ID NO: 2520743 - RNA, 19 nt, Homo sapiens
  misc_RNA (1)...(19): siRNA sense strand
aguaccugcaugaaagaaa

SEQ ID NO: 2520744 - RNA, 19 nt, Homo sapiens
  misc_RNA (1)...(19): siRNA sense strand
aagcuguauuugaugagaa

SEQ ID NO: 2520745 - RNA, 19 nt, Homo sapiens
  misc_RNA (1)...(19): siRNA sense strand
gcaagauggagcuguggau

SEQ ID NO: 2520746 - RNA, 19 nt, Homo sapiens
  misc_RNA (1)...(19): siRNA sense strand
uaguggaguuggaucgauu

SEQ ID NO: 2520747 - RNA, 19 nt, Homo sapiens
  misc_RNA (1)...(19): siRNA sense strand
cugcaugaaagaaacacaa

SEQ ID NO: 2520748 - RNA, 19 nt, Homo sapiens
  misc_RNA (1)...(19): siRNA sense strand
gauuaucacucucggcuca

SEQ ID NO: 2520749 - RNA, 19 nt, Homo sapiens
  misc_RNA (1)...(19): siRNA sense strand
gguugaaaaucuggaauau

SEQ ID NO: 2520750 - RNA, 19 nt, Homo sapiens
  misc_RNA (1)...(19): siRNA sense strand
ggaaagaaguaccugcaug

SEQ ID NO: 2520751 - RNA, 19 nt, Homo sapiens
  misc_RNA (1)...(19): siRNA sense strand
caggagaucuugauggaug

SEQ ID NO: 2520752 - RNA, 19 nt, Homo sapiens
  misc_RNA (1)...(19): siRNA sense strand
aagcacuggcauauugaaa

SEQ ID NO: 2520753 - RNA, 19 nt, Homo sapiens
  misc_RNA (1)...(19): siRNA sense strand
uuuaguggaaagugagauu

SEQ ID NO: 2520754 - RNA, 19 nt, Homo sapiens
  misc_RNA (1)...(19): siRNA sense strand
gcaugaaagaaacacaaaa

SEQ ID NO: 2520755 - RNA, 19 nt, Homo sapiens
  misc_RNA (1)...(19): siRNA sense strand
ccacuuugaugaagcccau

SEQ ID NO: 2520756 - RNA, 19 nt, Homo sapiens
  misc_RNA (1)...(19): siRNA sense strand
ugguugaaaaucuggaaua

SEQ ID NO: 2520757 - RNA, 19 nt, Homo sapiens
  misc_RNA (1)...(19): siRNA sense strand
ggggaguuaugauggagaa

SEQ ID NO: 2520758 - RNA, 19 nt, Homo sapiens
  misc_RNA (1)...(19): siRNA sense strand
acauuggagcccuggaaga

SEQ ID NO: 2520759 - RNA, 19 nt, Homo sapiens
  misc_RNA (1)...(19): siRNA sense strand
agagcugccugaagugaau

SEQ ID NO: 2520760 - RNA, 19 nt, Homo sapiens
  misc_RNA (1)...(19): siRNA sense strand
uuuaauaaccagcuagcau

SEQ ID NO: 2520761 - RNA, 19 nt, Homo sapiens
  misc_RNA (1)...(19): siRNA sense strand
uggaacaauagcacagaga

SEQ ID NO: 2520762 - RNA, 19 nt, Homo sapiens
  misc_RNA (1)...(19): siRNA sense strand
gcaagagggugaaaagcca

SEQ ID NO: 2520763 - RNA, 19 nt, Homo sapiens
  misc_RNA (1)...(19): siRNA sense strand
ggaucgauuauuaugucua

SEQ ID NO: 2520764 - RNA, 19 nt, Homo sapiens
  misc_RNA (1)...(19): siRNA sense strand
auacaaugucagaccauca

SEQ ID NO: 2520765 - RNA, 19 nt, Homo sapiens
  misc_RNA (1)...(19): siRNA sense strand
aggaaaugcuacagagacu

SEQ ID NO: 2520766 - RNA, 19 nt, Homo sapiens
  misc_RNA (1)...(19): siRNA sense strand
cugaugagcaagaaagaau

SEQ ID NO: 2520767 - RNA, 19 nt, Homo sapiens
  misc_RNA (1)...(19): siRNA sense strand
gggagguggacguggaaaa

SEQ ID NO: 2520768 - RNA, 19 nt, Homo sapiens
  misc_RNA (1)...(19): siRNA sense strand
augaagagugugagcagaa

SEQ ID NO: 2520769 - RNA, 19 nt, Homo sapiens
  misc_RNA (1)...(19): siRNA sense strand
uugaacacaucgagggaga

SEQ ID NO: 2520770 - RNA, 19 nt, Homo sapiens
  misc_RNA (1)...(19): siRNA sense strand
agaaacugaaggagaguga

SEQ ID NO: 2520771 - RNA, 19 nt, Homo sapiens
  misc_RNA (1)...(19): siRNA sense strand
cagagcuuccggagagaaa

SEQ ID NO: 2520772 - RNA, 19 nt, Homo sapiens
  misc_RNA (1)...(19): siRNA sense strand
gggagagagaacauggaga

SEQ ID NO: 2520773 - RNA, 19 nt, Homo sapiens
  misc_RNA (1)...(19): siRNA sense strand
cugagaacuaugagauuga

SEQ ID NO: 2520774 - RNA, 19 nt, Homo sapiens
  misc_RNA (1)...(19): siRNA sense strand
ggagaaacuugaagcagcu

SEQ ID NO: 2520775 - RNA, 19 nt, Homo sapiens
  misc_RNA (1)...(19): siRNA sense strand
auggagaaacugaaggaga

SEQ ID NO: 2520776 - RNA, 19 nt, Homo sapiens
  misc_RNA (1)...(19): siRNA sense strand
ugauucaggaagaggaaca

SEQ ID NO: 2520777 - RNA, 19 nt, Homo sapiens
  misc_RNA (1)...(19): siRNA sense strand
gcaccuuggcauugcucaa

SEQ ID NO: 2520778 - RNA, 19 nt, Homo sapiens
  misc_RNA (1)...(19): siRNA sense strand
gcauauugacugaugagca

SEQ ID NO: 2520779 - RNA, 19 nt, Homo sapiens
  misc_RNA (1)...(19): siRNA sense strand
cugcugagaauuacaggaa

SEQ ID NO: 2520780 - RNA, 19 nt, Homo sapiens
  misc_RNA (1)...(19): siRNA sense strand
gagcaagaaagaauggcga

SEQ ID NO: 2520781 - RNA, 19 nt, Homo sapiens
  misc_RNA (1)...(19): siRNA sense strand
aggaagaggaacaaaauuu

SEQ ID NO: 2520782 - RNA, 19 nt, Homo sapiens
  misc_RNA (1)...(19): siRNA sense strand
uguugaaugaagaguguga

SEQ ID NO: 2520783 - RNA, 19 nt, Homo sapiens
  misc_RNA (1)...(19): siRNA sense strand
ccagguggcaagugggcau

SEQ ID NO: 2520784 - RNA, 19 nt, Homo sapiens
  misc_RNA (1)...(19): siRNA sense strand
gggagaaacuugaagcagc

SEQ ID NO: 2520785 - RNA, 19 nt, Homo sapiens
  misc_RNA (1)...(19): siRNA sense strand
uggagaaacugaaggagag

SEQ ID NO: 2520786 - RNA, 19 nt, Homo sapiens
  misc_RNA (1)...(19): siRNA sense strand
gagagaaagucuugcucac

SEQ ID NO: 2520787 - RNA, 19 nt, Homo sapiens
  misc_RNA (1)...(19): siRNA sense strand
acccagaaagauuggauuu

SEQ ID NO: 2520788 - RNA, 19 nt, Homo sapiens
  misc_RNA (1)...(19): siRNA sense strand
cgaucaagcuugccaccga

SEQ ID NO: 2520789 - RNA, 19 nt, Homo sapiens
  misc_RNA (1)...(19): siRNA sense strand
gaaugaagagugugagcag

SEQ ID NO: 2520790 - RNA, 19 nt, Homo sapiens
  misc_RNA (1)...(19): siRNA sense strand
ggcaaagaugagugggaua

SEQ ID NO: 2520791 - RNA, 19 nt, Homo sapiens
  misc_RNA (1)...(19): siRNA sense strand
cggugaaggugaagggaac

SEQ ID NO: 2520792 - RNA, 19 nt, Homo sapiens
  misc_RNA (1)...(19): siRNA sense strand
ccaaagacggugaagguga

SEQ ID NO: 2520793 - RNA, 19 nt, Homo sapiens
  misc_RNA (1)...(19): siRNA sense strand
gggcaaagcucccugcuca

SEQ ID NO: 2520794 - RNA, 19 nt, Homo sapiens
  misc_RNA (1)...(19): siRNA sense strand
caacagaagcugcugguga

SEQ ID NO: 2520795 - RNA, 19 nt, Homo sapiens
  misc_RNA (1)...(19): siRNA sense strand
uggugaaauccauggagaa

SEQ ID NO: 2520796 - RNA, 19 nt, Homo sapiens
  misc_RNA (1)...(19): siRNA sense strand
agagcuaagugaagcccaa

SEQ ID NO: 2520797 - RNA, 19 nt, Homo sapiens
  misc_RNA (1)...(19): siRNA sense strand
caggagaggagaaggucau

SEQ ID NO: 2520798 - RNA, 19 nt, Homo sapiens
  misc_RNA (1)...(19): siRNA sense strand
ucagcaaacuucuagggaa

SEQ ID NO: 2520799 - RNA, 19 nt, Homo sapiens
  misc_RNA (1)...(19): siRNA sense strand
agacccaacaaguggagaa

SEQ ID NO: 2520800 - RNA, 19 nt, Homo sapiens
  misc_RNA (1)...(19): siRNA sense strand
acacccgaguggagggaga

SEQ ID NO: 2520801 - RNA, 19 nt, Homo sapiens
  misc_RNA (1)...(19): siRNA sense strand
gcugagccgaguagggcaa

SEQ ID NO: 2520802 - RNA, 19 nt, Homo sapiens
  misc_RNA (1)...(19): siRNA sense strand
gggacguacacgaaggcuu

SEQ ID NO: 2520803 - RNA, 19 nt, Homo sapiens
  misc_RNA (1)...(19): siRNA sense strand
caacaaguggagaagcuga

SEQ ID NO: 2520804 - RNA, 19 nt, Homo sapiens
  misc_RNA (1)...(19): siRNA sense strand
gggcucuagacaagggaca

SEQ ID NO: 2520805 - RNA, 19 nt, Homo sapiens
  misc_RNA (1)...(19): siRNA sense strand
guggagagcacgauggaac

SEQ ID NO: 2520806 - RNA, 19 nt, Homo sapiens
  misc_RNA (1)...(19): siRNA sense strand
acggugaaggugaagggaa

SEQ ID NO: 2520807 - RNA, 19 nt, Homo sapiens
  misc_RNA (1)...(19): siRNA sense strand
agcugauggucaaaggcaa

SEQ ID NO: 2520808 - RNA, 19 nt, Homo sapiens
  misc_RNA (1)...(19): siRNA sense strand
cuggugaaauccauggaga

SEQ ID NO: 2520809 - RNA, 19 nt, Homo sapiens
  misc_RNA (1)...(19): siRNA sense strand
cccaacaaguggagaagcu

SEQ ID NO: 2520810 - RNA, 19 nt, Homo sapiens
  misc_RNA (1)...(19): siRNA sense strand
ggaagcaaauggacuguua

SEQ ID NO: 2520811 - RNA, 19 nt, Homo sapiens
  misc_RNA (1)...(19): siRNA sense strand
cagcagugcacgcgagcua

SEQ ID NO: 2520812 - RNA, 19 nt, Homo sapiens
  misc_RNA (1)...(19): siRNA sense strand
ccaugaagguggaaaauuu

SEQ ID NO: 2520813 - RNA, 19 nt, Homo sapiens
  misc_RNA (1)...(19): siRNA sense strand
agaugugaauggaagcaaa

SEQ ID NO: 2520814 - RNA, 19 nt, Homo sapiens
  misc_RNA (1)...(19): siRNA sense strand
cggaauacauggugcugga

SEQ ID NO: 2520815 - RNA, 19 nt, Homo sapiens
  misc_RNA (1)...(19): siRNA sense strand
agugauaaagagugggaca

SEQ ID NO: 2520816 - RNA, 19 nt, Homo sapiens
  misc_RNA (1)...(19): siRNA sense strand
cagcaaugacacauggauu

SEQ ID NO: 2520817 - RNA, 19 nt, Homo sapiens
  misc_RNA (1)...(19): siRNA sense strand
uggcauuacaagaugacua

SEQ ID NO: 2520818 - RNA, 19 nt, Homo sapiens
  misc_RNA (1)...(19): siRNA sense strand
gaguaaaagguauggaaca

SEQ ID NO: 2520819 - RNA, 19 nt, Homo sapiens
  misc_RNA (1)...(19): siRNA sense strand
cauaauauccucagagaag

SEQ ID NO: 2520820 - RNA, 19 nt, Homo sapiens
  misc_RNA (1)...(19): siRNA sense strand
ggaucagaguucaugccaa

SEQ ID NO: 2520821 - RNA, 19 nt, Homo sapiens
  misc_RNA (1)...(19): siRNA sense strand
aaagaucaacugacagaaa

SEQ ID NO: 2520822 - RNA, 19 nt, Homo sapiens
  misc_RNA (1)...(19): siRNA sense strand
cauaauggacaguuggaca

SEQ ID NO: 2520823 - RNA, 19 nt, Homo sapiens
  misc_RNA (1)...(19): siRNA sense strand
ucaugaaacaggagccauu

SEQ ID NO: 2520824 - RNA, 19 nt, Homo sapiens
  misc_RNA (1)...(19): siRNA sense strand
cuggaggauuuguuuaaua

SEQ ID NO: 2520825 - RNA, 19 nt, Homo sapiens
  misc_RNA (1)...(19): siRNA sense strand
acuggcaagcugugaguaa

SEQ ID NO: 2520826 - RNA, 19 nt, Homo sapiens
  misc_RNA (1)...(19): siRNA sense strand
caacuuacuuagucgcauu

SEQ ID NO: 2520827 - RNA, 19 nt, Homo sapiens
  misc_RNA (1)...(19): siRNA sense strand
cugcguggcuaaggagaaa

SEQ ID NO: 2520828 - RNA, 19 nt, Homo sapiens
  misc_RNA (1)...(19): siRNA sense strand
agaucaaagcagcaaagua

SEQ ID NO: 2520829 - RNA, 19 nt, Homo sapiens
  misc_RNA (1)...(19): siRNA sense strand
ccauagaugaccagaguac

SEQ ID NO: 2520830 - RNA, 19 nt, Homo sapiens
  misc_RNA (1)...(19): siRNA sense strand
uggaggaacaccagaggau

SEQ ID NO: 2520831 - RNA, 19 nt, Homo sapiens
  misc_RNA (1)...(19): siRNA sense strand
gaucagaguucaugccaac

SEQ ID NO: 2520832 - RNA, 19 nt, Homo sapiens
  misc_RNA (1)...(19): siRNA sense strand
ccacaugccaacuuacuua

SEQ ID NO: 2520833 - RNA, 19 nt, Homo sapiens
  misc_RNA (1)...(19): siRNA sense strand
ggaacaauaucuggcucaa

SEQ ID NO: 2520834 - RNA, 19 nt, Homo sapiens
  misc_RNA (1)...(19): siRNA sense strand
augccaacuuacagacaau

SEQ ID NO: 2520835 - RNA, 19 nt, Homo sapiens
  misc_RNA (1)...(19): siRNA sense strand
auccuaaacucccaagaaa

SEQ ID NO: 2520836 - RNA, 19 nt, Homo sapiens
  misc_RNA (1)...(19): siRNA sense strand
acauaauauccucagagaa

SEQ ID NO: 2520837 - RNA, 19 nt, Homo sapiens
  misc_RNA (1)...(19): siRNA sense strand
gugaaauacaggaacucuu

SEQ ID NO: 2520838 - RNA, 19 nt, Homo sapiens
  misc_RNA (1)...(19): siRNA sense strand
gucccuauucuuuggauaa

SEQ ID NO: 2520839 - RNA, 19 nt, Homo sapiens
  misc_RNA (1)...(19): siRNA sense strand
gcagcaaaguauucccaga

SEQ ID NO: 2520840 - RNA, 19 nt, Homo sapiens
  misc_RNA (1)...(19): siRNA sense strand
gggaagugauaaagagugg

SEQ ID NO: 2520841 - RNA, 19 nt, Homo sapiens
  misc_RNA (1)...(19): siRNA sense strand
gcugcguggcuaaggagaa

SEQ ID NO: 2520842 - RNA, 19 nt, Homo sapiens
  misc_RNA (1)...(19): siRNA sense strand
uggccaugaagguggaaaa

SEQ ID NO: 2520843 - RNA, 19 nt, Homo sapiens
  misc_RNA (1)...(19): siRNA sense strand
gguuuuauguuauggcauu

SEQ ID NO: 2520844 - RNA, 19 nt, Homo sapiens
  misc_RNA (1)...(19): siRNA sense strand
cuuaacagauauauggagu

SEQ ID NO: 2520845 - RNA, 19 nt, Homo sapiens
  misc_RNA (1)...(19): siRNA sense strand
ucgcaaaauggguggauca

SEQ ID NO: 2520846 - RNA, 19 nt, Homo sapiens
  misc_RNA (1)...(19): siRNA sense strand
gaguaugccaucagcacau

SEQ ID NO: 2520847 - RNA, 19 nt, Homo sapiens
  misc_RNA (1)...(19): siRNA sense strand
uggcaagcugugaguaaaa

SEQ ID NO: 2520848 - RNA, 19 nt, Homo sapiens
  misc_RNA (1)...(19): siRNA sense strand
ggcuaaggagaaacacaua

SEQ ID NO: 2520849 - RNA, 19 nt, Homo sapiens
  misc_RNA (1)...(19): siRNA sense strand
gaugugaauggaagcaaau

SEQ ID NO: 2520850 - RNA, 19 nt, Homo sapiens
  misc_RNA (1)...(19): siRNA sense strand
agaaaggggcaaggagaua

SEQ ID NO: 2520851 - RNA, 19 nt, Homo sapiens
  misc_RNA (1)...(19): siRNA sense strand
ugacuagagcuguggccau

SEQ ID NO: 2520852 - RNA, 19 nt, Homo sapiens
  misc_RNA (1)...(19): siRNA sense strand
uugcugaagaagaugaaau

SEQ ID NO: 2520853 - RNA, 19 nt, Homo sapiens
  misc_RNA (1)...(19): siRNA sense strand
ugccuugggaagugauaaa

SEQ ID NO: 2520854 - RNA, 19 nt, Homo sapiens
  misc_RNA (1)...(19): siRNA sense strand
guugauugaugaugccuuu

SEQ ID NO: 2520855 - RNA, 19 nt, Homo sapiens
  misc_RNA (1)...(19): siRNA sense strand
auggaaaacuggggacuaa

SEQ ID NO: 2520856 - RNA, 19 nt, Homo sapiens
  misc_RNA (1)...(19): siRNA sense strand
aaagaagaugugaauggaa

SEQ ID NO: 2520857 - RNA, 19 nt, Homo sapiens
  misc_RNA (1)...(19): siRNA sense strand
aagaagaugugaauggaag

SEQ ID NO: 2520858 - RNA, 19 nt, Homo sapiens
  misc_RNA (1)...(19): siRNA sense strand
gaauggaagcaaauggacu

SEQ ID NO: 2520859 - RNA, 19 nt, Homo sapiens
  misc_RNA (1)...(19): siRNA sense strand
cagaaaggggcaaggagau

SEQ ID NO: 2520860 - RNA, 19 nt, Homo sapiens
  misc_RNA (1)...(19): siRNA sense strand
caaaagaucaacugacaga

SEQ ID NO: 2520861 - RNA, 19 nt, Homo sapiens
  misc_RNA (1)...(19): siRNA sense strand
gcaaauggacuguuacaac

SEQ ID NO: 2520862 - RNA, 19 nt, Homo sapiens
  misc_RNA (1)...(19): siRNA sense strand
gugauaaagagugggacau

SEQ ID NO: 2520863 - RNA, 19 nt, Homo sapiens
  misc_RNA (1)...(19): siRNA sense strand
gcuagaucaaagcagcaaa

SEQ ID NO: 2520864 - RNA, 19 nt, Homo sapiens
  misc_RNA (1)...(19): siRNA sense strand
agggagaaccguaacuaca

SEQ ID NO: 2520865 - RNA, 19 nt, Homo sapiens
  misc_RNA (1)...(19): siRNA sense strand
ucaguaacauguuggagga

SEQ ID NO: 2520866 - RNA, 19 nt, Homo sapiens
  misc_RNA (1)...(19): siRNA sense strand
ccagaggaucagaguucau

SEQ ID NO: 2520867 - RNA, 19 nt, Homo sapiens
  misc_RNA (1)...(19): siRNA sense strand
ggaagagucgagagcccaa

SEQ ID NO: 2520868 - RNA, 19 nt, Homo sapiens
  misc_RNA (1)...(19): siRNA sense strand
ccgagagguaugacaucaa

SEQ ID NO: 2520869 - RNA, 19 nt, Homo sapiens
  misc_RNA (1)...(19): siRNA sense strand
caucaaaggcugcgaggug

SEQ ID NO: 2520870 - RNA, 19 nt, Homo sapiens
  misc_RNA (1)...(19): siRNA sense strand
accucaacuuucagggcaa

SEQ ID NO: 2520871 - RNA, 19 nt, Homo sapiens
  misc_RNA (1)...(19): siRNA sense strand
cuggagcaccuguggaaga

SEQ ID NO: 2520872 - RNA, 19 nt, Homo sapiens
  misc_RNA (1)...(19): siRNA sense strand
uguggaagacacugcgcua

SEQ ID NO: 2520873 - RNA, 19 nt, Homo sapiens
  misc_RNA (1)...(19): siRNA sense strand
aggucagaguaaacaguaa

SEQ ID NO: 2520874 - RNA, 19 nt, Homo sapiens
  misc_RNA (1)...(19): siRNA sense strand
ccuuugaaucagaaacuaa

SEQ ID NO: 2520875 - RNA, 19 nt, Homo sapiens
  misc_RNA (1)...(19): siRNA sense strand
gaagaagagaaaagagaga

SEQ ID NO: 2520876 - RNA, 19 nt, Homo sapiens
  misc_RNA (1)...(19): siRNA sense strand
auucauaaccagggaacaa

SEQ ID NO: 2520877 - RNA, 19 nt, Homo sapiens
  misc_RNA (1)...(19): siRNA sense strand
aggagaacaaagacgacua

SEQ ID NO: 2520878 - RNA, 19 nt, Homo sapiens
  misc_RNA (1)...(19): siRNA sense strand
agaagagaaaagagagauu

SEQ ID NO: 2520879 - RNA, 19 nt, Homo sapiens
  misc_RNA (1)...(19): siRNA sense strand
acuaaagaagacagacauu

SEQ ID NO: 2520880 - RNA, 19 nt, Homo sapiens
  misc_RNA (1)...(19): siRNA sense strand
uggcaaacuaauuguugaa

SEQ ID NO: 2520881 - RNA, 19 nt, Homo sapiens
  misc_RNA (1)...(19): siRNA sense strand
augcaaaggaugaaccaga

SEQ ID NO: 2520882 - RNA, 19 nt, Homo sapiens
  misc_RNA (1)...(19): siRNA sense strand
gggaguaaaacgaccuaua

SEQ ID NO: 2520883 - RNA, 19 nt, Homo sapiens
  misc_RNA (1)...(19): siRNA sense strand
uugaaggaaugcuggacau

SEQ ID NO: 2520884 - RNA, 19 nt, Homo sapiens
  misc_RNA (1)...(19): siRNA sense strand
gaaucagaaacuaagguca

SEQ ID NO: 2520885 - RNA, 19 nt, Homo sapiens
  misc_RNA (1)...(19): siRNA sense strand
cuucuauaaccaugaaaca

SEQ ID NO: 2520886 - RNA, 19 nt, Homo sapiens
  misc_RNA (1)...(19): siRNA sense strand
cccugaagccacaugcaaa

SEQ ID NO: 2520887 - RNA, 19 nt, Homo sapiens
  misc_RNA (1)...(19): siRNA sense strand
gaagacagacauuccgcua

SEQ ID NO: 2520888 - RNA, 19 nt, Homo sapiens
  misc_RNA (1)...(19): siRNA sense strand
agagacugaagauggcaaa

SEQ ID NO: 2520889 - RNA, 19 nt, Homo sapiens
  misc_RNA (1)...(19): siRNA sense strand
gagagacugaagauggcaa

SEQ ID NO: 2520890 - RNA, 19 nt, Homo sapiens
  misc_RNA (1)...(19): siRNA sense strand
aggucagaguaaacaguaa

SEQ ID NO: 2520891 - RNA, 19 nt, Homo sapiens
  misc_RNA (1)...(19): siRNA sense strand
ccuuugaaucagaaacuaa

SEQ ID NO: 2520892 - RNA, 19 nt, Homo sapiens
  misc_RNA (1)...(19): siRNA sense strand
gaagaagagaaaagagaga

SEQ ID NO: 2520893 - RNA, 19 nt, Homo sapiens
  misc_RNA (1)...(19): siRNA sense strand
auucauaaccagggaacaa

SEQ ID NO: 2520894 - RNA, 19 nt, Homo sapiens
  misc_RNA (1)...(19): siRNA sense strand
aggagaacaaagacgacua

SEQ ID NO: 2520895 - RNA, 19 nt, Homo sapiens
  misc_RNA (1)...(19): siRNA sense strand
agaagagaaaagagagauu

SEQ ID NO: 2520896 - RNA, 19 nt, Homo sapiens
  misc_RNA (1)...(19): siRNA sense strand
acuaaagaagacagacauu

SEQ ID NO: 2520897 - RNA, 19 nt, Homo sapiens
  misc_RNA (1)...(19): siRNA sense strand
uggcaaacuaauuguugaa

SEQ ID NO: 2520898 - RNA, 19 nt, Homo sapiens
  misc_RNA (1)...(19): siRNA sense strand
augcaaaggaugaaccaga

SEQ ID NO: 2520899 - RNA, 19 nt, Homo sapiens
  misc_RNA (1)...(19): siRNA sense strand
gggaguaaaacgaccuaua

SEQ ID NO: 2520900 - RNA, 19 nt, Homo sapiens
  misc_RNA (1)...(19): siRNA sense strand
uugaaggaaugcuggacau

SEQ ID NO: 2520901 - RNA, 19 nt, Homo sapiens
  misc_RNA (1)...(19): siRNA sense strand
gaaucagaaacuaagguca

SEQ ID NO: 2520902 - RNA, 19 nt, Homo sapiens
  misc_RNA (1)...(19): siRNA sense strand
cuucuauaaccaugaaaca

SEQ ID NO: 2520903 - RNA, 19 nt, Homo sapiens
  misc_RNA (1)...(19): siRNA sense strand
cccugaagccacaugcaaa

SEQ ID NO: 2520904 - RNA, 19 nt, Homo sapiens
  misc_RNA (1)...(19): siRNA sense strand
gaagacagacauuccgcua

SEQ ID NO: 2520905 - RNA, 19 nt, Homo sapiens
  misc_RNA (1)...(19): siRNA sense strand
agagacugaagauggcaaa

SEQ ID NO: 2520906 - RNA, 19 nt, Homo sapiens
  misc_RNA (1)...(19): siRNA sense strand
gaggaaaagaugacuauga

SEQ ID NO: 2520907 - RNA, 19 nt, Homo sapiens
  misc_RNA (1)...(19): siRNA sense strand
gagagacugaagauggcaa

SEQ ID NO: 2520908 - RNA, 19 nt, Homo sapiens
  misc_RNA (1)...(19): siRNA sense strand
cguacuucgacgaggacga

SEQ ID NO: 2520909 - RNA, 19 nt, Homo sapiens
  misc_RNA (1)...(19): siRNA sense strand
cagaaaacucaacagcaaa

SEQ ID NO: 2520910 - RNA, 19 nt, Homo sapiens
  misc_RNA (1)...(19): siRNA sense strand
cuagagaagcugaagguga

SEQ ID NO: 2520911 - RNA, 19 nt, Homo sapiens
  misc_RNA (1)...(19): siRNA sense strand
cagccagacccuagcacaa

SEQ ID NO: 2520912 - RNA, 19 nt, Homo sapiens
  misc_RNA (1)...(19): siRNA sense strand
gugaggagaaacaaagcaa

SEQ ID NO: 2520913 - RNA, 19 nt, Homo sapiens
  misc_RNA (1)...(19): siRNA sense strand
gaaacaaagcaauagcaca

SEQ ID NO: 2520914 - RNA, 19 nt, Homo sapiens
  misc_RNA (1)...(19): siRNA sense strand
ggguggaaaaugaaauaua

SEQ ID NO: 2520915 - RNA, 19 nt, Homo sapiens
  misc_RNA (1)...(19): siRNA sense strand
cugaagaugaacagaaacu

SEQ ID NO: 2520916 - RNA, 19 nt, Homo sapiens
  misc_RNA (1)...(19): siRNA sense strand
aggcgugaggagaaacaaa

SEQ ID NO: 2520917 - RNA, 19 nt, Homo sapiens
  misc_RNA (1)...(19): siRNA sense strand
gaccaaauggggaggagua

SEQ ID NO: 2520918 - RNA, 19 nt, Homo sapiens
  misc_RNA (1)...(19): siRNA sense strand
aaacaaagcaauagcacag

SEQ ID NO: 2520919 - RNA, 19 nt, Homo sapiens
  misc_RNA (1)...(19): siRNA sense strand
aaugaugaccggugcaaca

SEQ ID NO: 2520920 - RNA, 19 nt, Homo sapiens
  misc_RNA (1)...(19): siRNA sense strand
cggugcaacaugaagaaca

SEQ ID NO: 2520921 - RNA, 19 nt, Homo sapiens
  misc_RNA (1)...(19): siRNA sense strand
agaagcugaaggugaggaa

SEQ ID NO: 2520922 - RNA, 19 nt, Homo sapiens
  misc_RNA (1)...(19): siRNA sense strand
aggccuuguuauaaaguca

SEQ ID NO: 2520923 - RNA, 19 nt, Homo sapiens
  misc_RNA (1)...(19): siRNA sense strand
ggagggacacagaggccuu

SEQ ID NO: 2520924 - RNA, 19 nt, Homo sapiens
  misc_RNA (1)...(19): siRNA sense strand
gguuuggaucuguagaaaa

SEQ ID NO: 2520925 - RNA, 19 nt, Homo sapiens
  misc_RNA (1)...(19): siRNA sense strand
gcacaaagaagcaacacac

SEQ ID NO: 2520926 - RNA, 19 nt, Homo sapiens
  misc_RNA (1)...(19): siRNA sense strand
uuuaaugcgccaugggaaa

SEQ ID NO: 2520927 - RNA, 19 nt, Homo sapiens
  misc_RNA (1)...(19): siRNA sense strand
ccuagagaugggaagguaa

SEQ ID NO: 2520928 - RNA, 19 nt, Homo sapiens
  misc_RNA (1)...(19): siRNA sense strand
cuguaaauuauguuggaga

SEQ ID NO: 2520929 - RNA, 19 nt, Homo sapiens
  misc_RNA (1)...(19): siRNA sense strand
auguaugguaugaaagcaa

SEQ ID NO: 2520930 - RNA, 19 nt, Homo sapiens
  misc_RNA (1)...(19): siRNA sense strand
guggaagaaugguggcugu

SEQ ID NO: 2520931 - RNA, 19 nt, Homo sapiens
  misc_RNA (1)...(19): siRNA sense strand
cgcuggugcuacagaguuu

SEQ ID NO: 2520932 - RNA, 19 nt, Homo sapiens
  misc_RNA (1)...(19): siRNA sense strand
caauuaaguaacaacguga

SEQ ID NO: 2520933 - RNA, 19 nt, Homo sapiens
  misc_RNA (1)...(19): siRNA sense strand
cuuuaaugcgccaugggaa

SEQ ID NO: 2520934 - RNA, 19 nt, Homo sapiens
  misc_RNA (1)...(19): siRNA sense strand
ccaaagaagcgcuauggca

SEQ ID NO: 2520935 - RNA, 19 nt, Homo sapiens
  misc_RNA (1)...(19): siRNA sense strand
cugcaaaagaacugcguga

SEQ ID NO: 2520936 - RNA, 19 nt, Homo sapiens
  misc_RNA (1)...(19): siRNA sense strand
ucaaggacucggagcgcau

SEQ ID NO: 2520937 - RNA, 19 nt, Homo sapiens
  misc_RNA (1)...(19): siRNA sense strand
cuuggcaauuaauggaaau

SEQ ID NO: 2520938 - RNA, 19 nt, Homo sapiens
  misc_RNA (1)...(19): siRNA sense strand
agaacagcuuacaaacaau

SEQ ID NO: 2520939 - RNA, 19 nt, Homo sapiens
  misc_RNA (1)...(19): siRNA sense strand
agaggagaucaaagagaaa

SEQ ID NO: 2520940 - RNA, 19 nt, Homo sapiens
  misc_RNA (1)...(19): siRNA sense strand
ucagcaaagaggagaucaa

SEQ ID NO: 2520941 - RNA, 19 nt, Homo sapiens
  misc_RNA (1)...(19): siRNA sense strand
uggacaaggaagaagauga

SEQ ID NO: 2520942 - RNA, 19 nt, Homo sapiens
  misc_RNA (1)...(19): siRNA sense strand
gggaagugaucgaggcccu

SEQ ID NO: 2520943 - RNA, 19 nt, Homo sapiens
  misc_RNA (1)...(19): siRNA sense strand
aggaggacgccgaggacuu

SEQ ID NO: 2520944 - RNA, 19 nt, Homo sapiens
  misc_RNA (1)...(19): siRNA sense strand
acaaggaagaagaugaaca

SEQ ID NO: 2520945 - RNA, 19 nt, Homo sapiens
  misc_RNA (1)...(19): siRNA sense strand
cuuuauaagcguugucaca

SEQ ID NO: 2520946 - RNA, 19 nt, Homo sapiens
  misc_RNA (1)...(19): siRNA sense strand
agaaagagaaggaaaccca

SEQ ID NO: 2520947 - RNA, 19 nt, Homo sapiens
  misc_RNA (1)...(19): siRNA sense strand
ggaagaagaugaacagcug

SEQ ID NO: 2520948 - RNA, 19 nt, Homo sapiens
  misc_RNA (1)...(19): siRNA sense strand
uggaagaagcccuccguga

SEQ ID NO: 2520949 - RNA, 19 nt, Homo sapiens
  misc_RNA (1)...(19): siRNA sense strand
agaucaaagagaaaguuca

SEQ ID NO: 2520950 - RNA, 19 nt, Homo sapiens
  misc_RNA (1)...(19): siRNA sense strand
acaugaaauuggagagugg

SEQ ID NO: 2520951 - RNA, 19 nt, Homo sapiens
  misc_RNA (1)...(19): siRNA sense strand
gcacaaacacugucgggga

SEQ ID NO: 2520952 - RNA, 19 nt, Homo sapiens
  misc_RNA (1)...(19): siRNA sense strand
ugaucgaggcccugcucaa

SEQ ID NO: 2520953 - RNA, 19 nt, Homo sapiens
  misc_RNA (1)...(19): siRNA sense strand
gaaauuggagagugggaag

SEQ ID NO: 2520954 - RNA, 19 nt, Homo sapiens
  misc_RNA (1)...(19): siRNA sense strand
ggaaaagagaagagacaaa

SEQ ID NO: 2520955 - RNA, 19 nt, Homo sapiens
  misc_RNA (1)...(19): siRNA sense strand
cagcugagauugugggcaa

SEQ ID NO: 2520956 - RNA, 19 nt, Homo sapiens
  misc_RNA (1)...(19): siRNA sense strand
agaaagagccagaggagga

SEQ ID NO: 2520957 - RNA, 19 nt, Homo sapiens
  misc_RNA (1)...(19): siRNA sense strand
gugcagaagcagaagaaga

SEQ ID NO: 2520958 - RNA, 19 nt, Homo sapiens
  misc_RNA (1)...(19): siRNA sense strand
agaagaugcaggagaagaa

SEQ ID NO: 2520959 - RNA, 19 nt, Homo sapiens
  misc_RNA (1)...(19): siRNA sense strand
gaaacaacacgcugggcaa

SEQ ID NO: 2520960 - RNA, 19 nt, Homo sapiens
  misc_RNA (1)...(19): siRNA sense strand
agaaaaugcaggagaagaa

SEQ ID NO: 2520961 - RNA, 19 nt, Homo sapiens
  misc_RNA (1)...(19): siRNA sense strand
agaagaagcugcaggagca

SEQ ID NO: 2520962 - RNA, 19 nt, Homo sapiens
  misc_RNA (1)...(19): siRNA sense strand
agaagaagcugcaggagca

SEQ ID NO: 2520963 - RNA, 19 nt, Homo sapiens
  misc_RNA (1)...(19): siRNA sense strand
cuucaaaggcagucaguga

SEQ ID NO: 2520964 - RNA, 19 nt, Homo sapiens
  misc_RNA (1)...(19): siRNA sense strand
ggggaaaagagaagagaca

SEQ ID NO: 2520965 - RNA, 19 nt, Homo sapiens
  misc_RNA (1)...(19): siRNA sense strand
cagaagaagaugcaggaga

SEQ ID NO: 2520966 - RNA, 19 nt, Homo sapiens
  misc_RNA (1)...(19): siRNA sense strand
gcaacagcugagagagcaa

SEQ ID NO: 2520967 - RNA, 19 nt, Homo sapiens
  misc_RNA (1)...(19): siRNA sense strand
ugaagaaguugaaggagca

SEQ ID NO: 2520968 - RNA, 19 nt, Homo sapiens
  misc_RNA (1)...(19): siRNA sense strand
gcccaagaaacaacagaaa

SEQ ID NO: 2520969 - RNA, 19 nt, Homo sapiens
  misc_RNA (1)...(19): siRNA sense strand
gcacagauggagugaucau

SEQ ID NO: 2520970 - RNA, 19 nt, Homo sapiens
  misc_RNA (1)...(19): siRNA sense strand
aagagaaagaugaagucua

SEQ ID NO: 2520971 - RNA, 19 nt, Homo sapiens
  misc_RNA (1)...(19): siRNA sense strand
caguaugguccacaagaaa

SEQ ID NO: 2520972 - RNA, 19 nt, Homo sapiens
  misc_RNA (1)...(19): siRNA sense strand
caggaagaugagagucaaa

SEQ ID NO: 2520973 - RNA, 19 nt, Homo sapiens
  misc_RNA (1)...(19): siRNA sense strand
cagaggaggagcagcagaa

SEQ ID NO: 2520974 - RNA, 19 nt, Homo sapiens
  misc_RNA (1)...(19): siRNA sense strand
agaugaaaacugugggcaa

SEQ ID NO: 2520975 - RNA, 19 nt, Homo sapiens
  misc_RNA (1)...(19): siRNA sense strand
agacaaagucaauccaaaa

SEQ ID NO: 2520976 - RNA, 19 nt, Homo sapiens
  misc_RNA (1)...(19): siRNA sense strand
cagcagaaugcauuggaau

SEQ ID NO: 2520977 - RNA, 19 nt, Homo sapiens
  misc_RNA (1)...(19): siRNA sense strand
auugaugccugcagagcaa

SEQ ID NO: 2520978 - RNA, 19 nt, Homo sapiens
  misc_RNA (1)...(19): siRNA sense strand
acauuuaccagcugagauu

SEQ ID NO: 2520979 - RNA, 19 nt, Homo sapiens
  misc_RNA (1)...(19): siRNA sense strand
ugaugaagagaaagaugaa

SEQ ID NO: 2520980 - RNA, 19 nt, Homo sapiens
  misc_RNA (1)...(19): siRNA sense strand
agagaagagacaaagucaa

SEQ ID NO: 2520981 - RNA, 19 nt, Homo sapiens
  misc_RNA (1)...(19): siRNA sense strand
aagaugaagucuaccaaaa

SEQ ID NO: 2520982 - RNA, 19 nt, Homo sapiens
  misc_RNA (1)...(19): siRNA sense strand
agaugcaggagaagaagaa

SEQ ID NO: 2520983 - RNA, 19 nt, Homo sapiens
  misc_RNA (1)...(19): siRNA sense strand
acaagauucagaugaggaa

SEQ ID NO: 2520984 - RNA, 19 nt, Homo sapiens
  misc_RNA (1)...(19): siRNA sense strand
agcaaaggaaggugcagaa

SEQ ID NO: 2520985 - RNA, 19 nt, Homo sapiens
  misc_RNA (1)...(19): siRNA sense strand
cuacaggagcggaagaagu

SEQ ID NO: 2520986 - RNA, 19 nt, Homo sapiens
  misc_RNA (1)...(19): siRNA sense strand
gcaacaggaagaugagagu

SEQ ID NO: 2520987 - RNA, 19 nt, Homo sapiens
  misc_RNA (1)...(19): siRNA sense strand
acuucagacucaaccauaa

SEQ ID NO: 2520988 - RNA, 19 nt, Homo sapiens
  misc_RNA (1)...(19): siRNA sense strand
gcaugaaagccguguacgu

SEQ ID NO: 2520989 - RNA, 19 nt, Homo sapiens
  misc_RNA (1)...(19): siRNA sense strand
aaaugcaggagaagaagaa

SEQ ID NO: 2520990 - RNA, 19 nt, Homo sapiens
  misc_RNA (1)...(19): siRNA sense strand
ugaugaagaaguugaagga

SEQ ID NO: 2520991 - RNA, 19 nt, Homo sapiens
  misc_RNA (1)...(19): siRNA sense strand
cagcuagaagagaggacuu

SEQ ID NO: 2520992 - RNA, 19 nt, Homo sapiens
  misc_RNA (1)...(19): siRNA sense strand
cugaugaagagaaagauga

SEQ ID NO: 2520993 - RNA, 19 nt, Homo sapiens
  misc_RNA (1)...(19): siRNA sense strand
agcagaaugcauuggaauu

SEQ ID NO: 2520994 - RNA, 19 nt, Homo sapiens
  misc_RNA (1)...(19): siRNA sense strand
ugucgaacauggugauagu

SEQ ID NO: 2520995 - RNA, 19 nt, Homo sapiens
  misc_RNA (1)...(19): siRNA sense strand
aggacacacuagcaugaaa

SEQ ID NO: 2520996 - RNA, 19 nt, Homo sapiens
  misc_RNA (1)...(19): siRNA sense strand
aguugaaggagcagcuaga

SEQ ID NO: 2520997 - RNA, 19 nt, Homo sapiens
  misc_RNA (1)...(19): siRNA sense strand
gcuucuaucaagaugaaaa

SEQ ID NO: 2520998 - RNA, 19 nt, Homo sapiens
  misc_RNA (1)...(19): siRNA sense strand
aacaggaagaugagaguca

SEQ ID NO: 2520999 - RNA, 19 nt, Homo sapiens
  misc_RNA (1)...(19): siRNA sense strand
ggacucagcuccugcagca

SEQ ID NO: 2521000 - RNA, 19 nt, Homo sapiens
  misc_RNA (1)...(19): siRNA sense strand
gagcaaaggaaggugcaga

SEQ ID NO: 2521001 - RNA, 19 nt, Homo sapiens
  misc_RNA (1)...(19): siRNA sense strand
caggagcagaggcggcaaa

SEQ ID NO: 2521002 - RNA, 19 nt, Homo sapiens
  misc_RNA (1)...(19): siRNA sense strand
aggaggagcagcagaagca

SEQ ID NO: 2521003 - RNA, 19 nt, Homo sapiens
  misc_RNA (1)...(19): siRNA sense strand
acucaaauaagccgugcua

SEQ ID NO: 2521004 - RNA, 19 nt, Homo sapiens
  misc_RNA (1)...(19): siRNA sense strand
aauugauauugcagagguu

SEQ ID NO: 2521005 - RNA, 19 nt, Homo sapiens
  misc_RNA (1)...(19): siRNA sense strand
agcagaaaaugcaggagaa

SEQ ID NO: 2521006 - RNA, 19 nt, Homo sapiens
  misc_RNA (1)...(19): siRNA sense strand
augaagagaaagaugaagu

SEQ ID NO: 2521007 - RNA, 19 nt, Homo sapiens
  misc_RNA (1)...(19): siRNA sense strand
gagcagaaaaugcaggaga

SEQ ID NO: 2521008 - RNA, 19 nt, Homo sapiens
  misc_RNA (1)...(19): siRNA sense strand
agaagcuacaggagcggaa

SEQ ID NO: 2521009 - RNA, 19 nt, Homo sapiens
  misc_RNA (1)...(19): siRNA sense strand
augaagaaguugaaggagc

SEQ ID NO: 2521010 - RNA, 19 nt, Homo sapiens
  misc_RNA (1)...(19): siRNA sense strand
agguaggagucgagggacc

SEQ ID NO: 2521011 - RNA, 19 nt, Homo sapiens
  misc_RNA (1)...(19): siRNA sense strand
ccaaauugauauugcagag

SEQ ID NO: 2521012 - RNA, 19 nt, Homo sapiens
  misc_RNA (1)...(19): siRNA sense strand
aggaaggugcagaagcaga

SEQ ID NO: 2521013 - RNA, 19 nt, Homo sapiens
  misc_RNA (1)...(19): siRNA sense strand
agaagaagaagcugcagga

SEQ ID NO: 2521014 - RNA, 19 nt, Homo sapiens
  misc_RNA (1)...(19): siRNA sense strand
agaagaagaagcugcagga

SEQ ID NO: 2521015 - RNA, 19 nt, Homo sapiens
  misc_RNA (1)...(19): siRNA sense strand
ucugccugaugaagagaaa

SEQ ID NO: 2521016 - RNA, 19 nt, Homo sapiens
  misc_RNA (1)...(19): siRNA sense strand
ccggauuauuggagcagaa

SEQ ID NO: 2521017 - RNA, 19 nt, Homo sapiens
  misc_RNA (1)...(19): siRNA sense strand
aggcaagggacgcgagaga

SEQ ID NO: 2521018 - RNA, 19 nt, Homo sapiens
  misc_RNA (1)...(19): siRNA sense strand
acuugaaggagcugggaau

SEQ ID NO: 2521019 - RNA, 19 nt, Homo sapiens
  misc_RNA (1)...(19): siRNA sense strand
aggaacaagagguggacau

SEQ ID NO: 2521020 - RNA, 19 nt, Homo sapiens
  misc_RNA (1)...(19): siRNA sense strand
agaaauuggagaccagcaa

SEQ ID NO: 2521021 - RNA, 19 nt, Homo sapiens
  misc_RNA (1)...(19): siRNA sense strand
gugacaagcugaaagcagu

SEQ ID NO: 2521022 - RNA, 19 nt, Homo sapiens
  misc_RNA (1)...(19): siRNA sense strand
gagcagaaacccagccauc

SEQ ID NO: 2521023 - RNA, 19 nt, Homo sapiens
  misc_RNA (1)...(19): siRNA sense strand
ggagcugggaauuaagaca

SEQ ID NO: 2521024 - RNA, 19 nt, Homo sapiens
  misc_RNA (1)...(19): siRNA sense strand
cgacgaucauggugggcca

SEQ ID NO: 2521025 - RNA, 19 nt, Homo sapiens
  misc_RNA (1)...(19): siRNA sense strand
acaaccagcuucugcccaa

SEQ ID NO: 2521026 - RNA, 19 nt, Homo sapiens
  misc_RNA (1)...(19): siRNA sense strand
acgacaguggagagaaaca

SEQ ID NO: 2521027 - RNA, 19 nt, Homo sapiens
  misc_RNA (1)...(19): siRNA sense strand
cgacgaucauggugggcca

SEQ ID NO: 2521028 - RNA, 19 nt, Homo sapiens
  misc_RNA (1)...(19): siRNA sense strand
acaaccagcuucugcccaa

SEQ ID NO: 2521029 - RNA, 19 nt, Homo sapiens
  misc_RNA (1)...(19): siRNA sense strand
acgacaguggagagaaaca

SEQ ID NO: 2521030 - RNA, 19 nt, Homo sapiens
  misc_RNA (1)...(19): siRNA sense strand
caucaugaaccaaaggaca

SEQ ID NO: 2521031 - RNA, 19 nt, Homo sapiens
  misc_RNA (1)...(19): siRNA sense strand
uuaucuacagcuugagaaa

SEQ ID NO: 2521032 - RNA, 19 nt, Homo sapiens
  misc_RNA (1)...(19): siRNA sense strand
uggacagaaauaagugaau

SEQ ID NO: 2521033 - RNA, 19 nt, Homo sapiens
  misc_RNA (1)...(19): siRNA sense strand
aauuuauccucaugagcuu

SEQ ID NO: 2521034 - RNA, 19 nt, Homo sapiens
  misc_RNA (1)...(19): siRNA sense strand
agccauggguccugggaau

SEQ ID NO: 2521035 - RNA, 19 nt, Homo sapiens
  misc_RNA (1)...(19): siRNA sense strand
cccaaauagaagagcucaa

SEQ ID NO: 2521036 - RNA, 19 nt, Homo sapiens
  misc_RNA (1)...(19): siRNA sense strand
auguagacuuugagagugu

SEQ ID NO: 2521037 - RNA, 19 nt, Homo sapiens
  misc_RNA (1)...(19): siRNA sense strand
cuggaauucagaagagauu

SEQ ID NO: 2521038 - RNA, 19 nt, Homo sapiens
  misc_RNA (1)...(19): siRNA sense strand
gacuaugaaaagagaguua

SEQ ID NO: 2521039 - RNA, 19 nt, Homo sapiens
  misc_RNA (1)...(19): siRNA sense strand
aggaaaauaaugaggacau

SEQ ID NO: 2521040 - RNA, 19 nt, Homo sapiens
  misc_RNA (1)...(19): siRNA sense strand
cugacuauggacagacaaa

SEQ ID NO: 2521041 - RNA, 19 nt, Homo sapiens
  misc_RNA (1)...(19): siRNA sense strand
uggacagacaaaugguuua

SEQ ID NO: 2521042 - RNA, 19 nt, Homo sapiens
  misc_RNA (1)...(19): siRNA sense strand
cccugaaaccagcgaggaa

SEQ ID NO: 2521043 - RNA, 19 nt, Homo sapiens
  misc_RNA (1)...(19): siRNA sense strand
ucccagaguaugagauuau

SEQ ID NO: 2521044 - RNA, 19 nt, Homo sapiens
  misc_RNA (1)...(19): siRNA sense strand
augugggauguuagagaaa

SEQ ID NO: 2521045 - RNA, 19 nt, Homo sapiens
  misc_RNA (1)...(19): siRNA sense strand
cugaaaccagcgaggaaaa

SEQ ID NO: 2521046 - RNA, 19 nt, Homo sapiens
  misc_RNA (1)...(19): siRNA sense strand
ccugaaaccagcgaggaaa

SEQ ID NO: 2521047 - RNA, 19 nt, Homo sapiens
  misc_RNA (1)...(19): siRNA sense strand
gauuccagaaggagcagaa

SEQ ID NO: 2521048 - RNA, 19 nt, Homo sapiens
  misc_RNA (1)...(19): siRNA sense strand
gugggauguuagagaaauc

SEQ ID NO: 2521049 - RNA, 19 nt, Homo sapiens
  misc_RNA (1)...(19): siRNA sense strand
agguuguugcagugaacua

SEQ ID NO: 2521050 - RNA, 19 nt, Homo sapiens
  misc_RNA (1)...(19): siRNA sense strand
ccucagaagaagcuguuga

SEQ ID NO: 2521051 - RNA, 19 nt, Homo sapiens
  misc_RNA (1)...(19): siRNA sense strand
auagaagagcucaaaguca

SEQ ID NO: 2521052 - RNA, 19 nt, Homo sapiens
  misc_RNA (1)...(19): siRNA sense strand
gggaaacagaagaggauga

SEQ ID NO: 2521053 - RNA, 19 nt, Homo sapiens
  misc_RNA (1)...(19): siRNA sense strand
gggcagagacuguugggua

SEQ ID NO: 2521054 - RNA, 19 nt, Homo sapiens
  misc_RNA (1)...(19): siRNA sense strand
agaaagaaaugaagcgagu

SEQ ID NO: 2521055 - RNA, 19 nt, Homo sapiens
  misc_RNA (1)...(19): siRNA sense strand
gggcauuggaagacaaaga

SEQ ID NO: 2521056 - RNA, 19 nt, Homo sapiens
  misc_RNA (1)...(19): siRNA sense strand
aggcaaugucuuaaugaaa

SEQ ID NO: 2521057 - RNA, 19 nt, Homo sapiens
  misc_RNA (1)...(19): siRNA sense strand
aagacaacucagagguaaa

SEQ ID NO: 2521058 - RNA, 19 nt, Homo sapiens
  misc_RNA (1)...(19): siRNA sense strand
gggcaaagccacaagucau

SEQ ID NO: 2521059 - RNA, 19 nt, Homo sapiens
  misc_RNA (1)...(19): siRNA sense strand
ucaaacaagaguuggaaau

SEQ ID NO: 2521060 - RNA, 19 nt, Homo sapiens
  misc_RNA (1)...(19): siRNA sense strand
cuuuagaggagguagaaau

SEQ ID NO: 2521061 - RNA, 19 nt, Homo sapiens
  misc_RNA (1)...(19): siRNA sense strand
agaguaaagaagaagcuua

SEQ ID NO: 2521062 - RNA, 19 nt, Homo sapiens
  misc_RNA (1)...(19): siRNA sense strand
agaagauggcucaggaaaa

SEQ ID NO: 2521063 - RNA, 19 nt, Homo sapiens
  misc_RNA (1)...(19): siRNA sense strand
aaacagaagaggaugacau

SEQ ID NO: 2521064 - RNA, 19 nt, Homo sapiens
  misc_RNA (1)...(19): siRNA sense strand
aagaagaagcuuuggcuca

SEQ ID NO: 2521065 - RNA, 19 nt, Homo sapiens
  misc_RNA (1)...(19): siRNA sense strand
cgagaaagggagaagaaag

SEQ ID NO: 2521066 - RNA, 19 nt, Homo sapiens
  misc_RNA (1)...(19): siRNA sense strand
uggcagaugcuuucagaau

SEQ ID NO: 2521067 - RNA, 19 nt, Homo sapiens
  misc_RNA (1)...(19): siRNA sense strand
cagaauugucaaaugaaga

SEQ ID NO: 2521068 - RNA, 19 nt, Homo sapiens
  misc_RNA (1)...(19): siRNA sense strand
gcauggcaauacugggcaa

SEQ ID NO: 2521069 - RNA, 19 nt, Homo sapiens
  misc_RNA (1)...(19): siRNA sense strand
ucaccaaggaguaagaaga

SEQ ID NO: 2521070 - RNA, 19 nt, Homo sapiens
  misc_RNA (1)...(19): siRNA sense strand
aaacugaacuugaggcauc

SEQ ID NO: 2521071 - RNA, 19 nt, Homo sapiens
  misc_RNA (1)...(19): siRNA sense strand
aaacuuuagaggagguaga

SEQ ID NO: 2521072 - RNA, 19 nt, Homo sapiens
  misc_RNA (1)...(19): siRNA sense strand
uggcguaagacuucagaau

SEQ ID NO: 2521073 - RNA, 19 nt, Homo sapiens
  misc_RNA (1)...(19): siRNA sense strand
ccgagaaagggagaagaaa

SEQ ID NO: 2521074 - RNA, 19 nt, Homo sapiens
  misc_RNA (1)...(19): siRNA sense strand
uuucaguauuccaagcaua

SEQ ID NO: 2521075 - RNA, 19 nt, Homo sapiens
  misc_RNA (1)...(19): siRNA sense strand
cuaagaggauggaagacca

SEQ ID NO: 2521076 - RNA, 19 nt, Homo sapiens
  misc_RNA (1)...(19): siRNA sense strand
cagaaggugauuuagggua

SEQ ID NO: 2521077 - RNA, 19 nt, Homo sapiens
  misc_RNA (1)...(19): siRNA sense strand
ugacaugacagaaggugau

SEQ ID NO: 2521078 - RNA, 19 nt, Homo sapiens
  misc_RNA (1)...(19): siRNA sense strand
aagcuuacgugauggcaga

SEQ ID NO: 2521079 - RNA, 19 nt, Homo sapiens
  misc_RNA (1)...(19): siRNA sense strand
cugggaaacagaagaggau

SEQ ID NO: 2521080 - RNA, 19 nt, Homo sapiens
  misc_RNA (1)...(19): siRNA sense strand
augcaguccucaaagagaa

SEQ ID NO: 2521081 - RNA, 19 nt, Homo sapiens
  misc_RNA (1)...(19): siRNA sense strand
gcagaagauggcucaggaa

SEQ ID NO: 2521082 - RNA, 19 nt, Homo sapiens
  misc_RNA (1)...(19): siRNA sense strand
aagaagaagcuuacgugau

SEQ ID NO: 2521083 - RNA, 19 nt, Homo sapiens
  misc_RNA (1)...(19): siRNA sense strand
uaaugaaacuuuagaggag

SEQ ID NO: 2521084 - RNA, 19 nt, Homo sapiens
  misc_RNA (1)...(19): siRNA sense strand
aagaggaagcauugaaaau

SEQ ID NO: 2521085 - RNA, 19 nt, Homo sapiens
  misc_RNA (1)...(19): siRNA sense strand
auaucaaacagcagaagau

SEQ ID NO: 2521086 - RNA, 19 nt, Homo sapiens
  misc_RNA (1)...(19): siRNA sense strand
aggagguagaaauguuaaa

SEQ ID NO: 2521087 - RNA, 19 nt, Homo sapiens
  misc_RNA (1)...(19): siRNA sense strand
gaaagugaaaacagaagaa

SEQ ID NO: 2521088 - RNA, 19 nt, Homo sapiens
  misc_RNA (1)...(19): siRNA sense strand
caaaugaagaauuaaggca

SEQ ID NO: 2521089 - RNA, 19 nt, Homo sapiens
  misc_RNA (1)...(19): siRNA sense strand
gacaugcagcucugggaaa

SEQ ID NO: 2521090 - RNA, 19 nt, Homo sapiens
  misc_RNA (1)...(19): siRNA sense strand
acgacaaaguagcacugua

SEQ ID NO: 2521091 - RNA, 19 nt, Homo sapiens
  misc_RNA (1)...(19): siRNA sense strand
ggcuucaggucuugagcuu

SEQ ID NO: 2521092 - RNA, 19 nt, Homo sapiens
  misc_RNA (1)...(19): siRNA sense strand
gaaaacaguucuaagagga

SEQ ID NO: 2521093 - RNA, 19 nt, Homo sapiens
  misc_RNA (1)...(19): siRNA sense strand
gggugauccuauacauuca

SEQ ID NO: 2521094 - RNA, 19 nt, Homo sapiens
  misc_RNA (1)...(19): siRNA sense strand
uccgagaaagggagaagaa

SEQ ID NO: 2521095 - RNA, 19 nt, Homo sapiens
  misc_RNA (1)...(19): siRNA sense strand
caaaacagauccuuggaga

SEQ ID NO: 2521096 - RNA, 19 nt, Homo sapiens
  misc_RNA (1)...(19): siRNA sense strand
ggaagcaccuuaaagagga

SEQ ID NO: 2521097 - RNA, 19 nt, Homo sapiens
  misc_RNA (1)...(19): siRNA sense strand
agaauuucccuuucaacaa

SEQ ID NO: 2521098 - RNA, 19 nt, Homo sapiens
  misc_RNA (1)...(19): siRNA sense strand
acaaaguagcacuguagau

SEQ ID NO: 2521099 - RNA, 19 nt, Homo sapiens
  misc_RNA (1)...(19): siRNA sense strand
caggcuaaacugugaaaau

SEQ ID NO: 2521100 - RNA, 19 nt, Homo sapiens
  misc_RNA (1)...(19): siRNA sense strand
guauggccucggaaggaaa

SEQ ID NO: 2521101 - RNA, 19 nt, Homo sapiens
  misc_RNA (1)...(19): siRNA sense strand
acucucaaauagauccaaa

SEQ ID NO: 2521102 - RNA, 19 nt, Homo sapiens
  misc_RNA (1)...(19): siRNA sense strand
auuccaagcauaagagcca

SEQ ID NO: 2521103 - RNA, 19 nt, Homo sapiens
  misc_RNA (1)...(19): siRNA sense strand
uugcaaaacucauggauaa

SEQ ID NO: 2521104 - RNA, 19 nt, Homo sapiens
  misc_RNA (1)...(19): siRNA sense strand
agcagaaagaagagaauua

SEQ ID NO: 2521105 - RNA, 19 nt, Homo sapiens
  misc_RNA (1)...(19): siRNA sense strand
augaagacaucgaggaaca

SEQ ID NO: 2521106 - RNA, 19 nt, Homo sapiens
  misc_RNA (1)...(19): siRNA sense strand
ugaaagugcaugugaagaa

SEQ ID NO: 2521107 - RNA, 19 nt, Homo sapiens
  misc_RNA (1)...(19): siRNA sense strand
gcagaagagggcacagaaa

SEQ ID NO: 2521108 - RNA, 19 nt, Homo sapiens
  misc_RNA (1)...(19): siRNA sense strand
ugacauuagagaaggaaau

SEQ ID NO: 2521109 - RNA, 19 nt, Homo sapiens
  misc_RNA (1)...(19): siRNA sense strand
cuugagagauugaggcgua

SEQ ID NO: 2521110 - RNA, 19 nt, Homo sapiens
  misc_RNA (1)...(19): siRNA sense strand
gaggaacagaagaaaguaa

SEQ ID NO: 2521111 - RNA, 19 nt, Homo sapiens
  misc_RNA (1)...(19): siRNA sense strand
gacaaaugagacugagaaa

SEQ ID NO: 2521112 - RNA, 19 nt, Homo sapiens
  misc_RNA (1)...(19): siRNA sense strand
caagagagcugcuggcaca

SEQ ID NO: 2521113 - RNA, 19 nt, Homo sapiens
  misc_RNA (1)...(19): siRNA sense strand
gcgacaaagucuggaauau

SEQ ID NO: 2521114 - RNA, 19 nt, Homo sapiens
  misc_RNA (1)...(19): siRNA sense strand
ugacagauuaccagaacaa

SEQ ID NO: 2521115 - RNA, 19 nt, Homo sapiens
  misc_RNA (1)...(19): siRNA sense strand
ggaaaagaagcaagaggaa

SEQ ID NO: 2521116 - RNA, 19 nt, Homo sapiens
  misc_RNA (1)...(19): siRNA sense strand
ggauaaaauuagucuggua

SEQ ID NO: 2521117 - RNA, 19 nt, Homo sapiens
  misc_RNA (1)...(19): siRNA sense strand
agaagagggcacagaaauu

SEQ ID NO: 2521118 - RNA, 19 nt, Homo sapiens
  misc_RNA (1)...(19): siRNA sense strand
cgucauugguaaagcagau

SEQ ID NO: 2521119 - RNA, 19 nt, Homo sapiens
  misc_RNA (1)...(19): siRNA sense strand
aggcguaccuugacagauu

SEQ ID NO: 2521120 - RNA, 19 nt, Homo sapiens
  misc_RNA (1)...(19): siRNA sense strand
gggagaagaaugagaugga

SEQ ID NO: 2521121 - RNA, 19 nt, Homo sapiens
  misc_RNA (1)...(19): siRNA sense strand
gugcagucuuacaggagaa

SEQ ID NO: 2521122 - RNA, 19 nt, Homo sapiens
  misc_RNA (1)...(19): siRNA sense strand
aaacgaagugugaaugaaa

SEQ ID NO: 2521123 - RNA, 19 nt, Homo sapiens
  misc_RNA (1)...(19): siRNA sense strand
cuacgaaacagaagauaga

SEQ ID NO: 2521124 - RNA, 19 nt, Homo sapiens
  misc_RNA (1)...(19): siRNA sense strand
acacacuggcccugaaaua

SEQ ID NO: 2521125 - RNA, 19 nt, Homo sapiens
  misc_RNA (1)...(19): siRNA sense strand
agaagaaugcagaagauuu

SEQ ID NO: 2521126 - RNA, 19 nt, Homo sapiens
  misc_RNA (1)...(19): siRNA sense strand
cagaaagagcagcgcauuu

SEQ ID NO: 2521127 - RNA, 19 nt, Homo sapiens
  misc_RNA (1)...(19): siRNA sense strand
cuacaggaagcguuggaaa

SEQ ID NO: 2521128 - RNA, 19 nt, Homo sapiens
  misc_RNA (1)...(19): siRNA sense strand
acaaagaauguguugcuaa

SEQ ID NO: 2521129 - RNA, 19 nt, Homo sapiens
  misc_RNA (1)...(19): siRNA sense strand
ggugauacccaaagguuga

SEQ ID NO: 2521130 - RNA, 19 nt, Homo sapiens
  misc_RNA (1)...(19): siRNA sense strand
aaacauugaagcagaaaga

SEQ ID NO: 2521131 - RNA, 19 nt, Homo sapiens
  misc_RNA (1)...(19): siRNA sense strand
ugucaacuguagaggaaaa

SEQ ID NO: 2521132 - RNA, 19 nt, Homo sapiens
  misc_RNA (1)...(19): siRNA sense strand
gcuaaugccaacagaccaa

SEQ ID NO: 2521133 - RNA, 19 nt, Homo sapiens
  misc_RNA (1)...(19): siRNA sense strand
ggaagcagaaagaagagaa

SEQ ID NO: 2521134 - RNA, 19 nt, Homo sapiens
  misc_RNA (1)...(19): siRNA sense strand
gaaaagaauuugaggcaac

SEQ ID NO: 2521135 - RNA, 19 nt, Homo sapiens
  misc_RNA (1)...(19): siRNA sense strand
aagaacuaguaauggcuaa

SEQ ID NO: 2521136 - RNA, 19 nt, Homo sapiens
  misc_RNA (1)...(19): siRNA sense strand
gugaaaauaacgugaaaga

SEQ ID NO: 2521137 - RNA, 19 nt, Homo sapiens
  misc_RNA (1)...(19): siRNA sense strand
cuguuguccuugagagauu

SEQ ID NO: 2521138 - RNA, 19 nt, Homo sapiens
  misc_RNA (1)...(19): siRNA sense strand
gugcagaccgagaggcuuu

SEQ ID NO: 2521139 - RNA, 19 nt, Homo sapiens
  misc_RNA (1)...(19): siRNA sense strand
aagauggagcugagaagaa

SEQ ID NO: 2521140 - RNA, 19 nt, Homo sapiens
  misc_RNA (1)...(19): siRNA sense strand
gcacaagagagcuuugcaa

SEQ ID NO: 2521141 - RNA, 19 nt, Homo sapiens
  misc_RNA (1)...(19): siRNA sense strand
ggaaaaggcauguaaugaa

SEQ ID NO: 2521142 - RNA, 19 nt, Homo sapiens
  misc_RNA (1)...(19): siRNA sense strand
auaaggaugcagaggagaa

SEQ ID NO: 2521143 - RNA, 19 nt, Homo sapiens
  misc_RNA (1)...(19): siRNA sense strand
gaucaaagcccaagagagc

SEQ ID NO: 2521144 - RNA, 19 nt, Homo sapiens
  misc_RNA (1)...(19): siRNA sense strand
augcagaagauuugaacau

SEQ ID NO: 2521145 - RNA, 19 nt, Homo sapiens
  misc_RNA (1)...(19): siRNA sense strand
agacagcauuggaggaguu

SEQ ID NO: 2521146 - RNA, 19 nt, Homo sapiens
  misc_RNA (1)...(19): siRNA sense strand
acaagaagaacaaugggaa

SEQ ID NO: 2521147 - RNA, 19 nt, Homo sapiens
  misc_RNA (1)...(19): siRNA sense strand
gaagcagaaagaagagaau

SEQ ID NO: 2521148 - RNA, 19 nt, Homo sapiens
  misc_RNA (1)...(19): siRNA sense strand
aaaugaagacaucgaggaa

SEQ ID NO: 2521149 - RNA, 19 nt, Homo sapiens
  misc_RNA (1)...(19): siRNA sense strand
caugagagcaguagaaaau

SEQ ID NO: 2521150 - RNA, 19 nt, Homo sapiens
  misc_RNA (1)...(19): siRNA sense strand
acaucgaggaacagaagaa

SEQ ID NO: 2521151 - RNA, 19 nt, Homo sapiens
  misc_RNA (1)...(19): siRNA sense strand
aagaggaagccaagaugaa

SEQ ID NO: 2521152 - RNA, 19 nt, Homo sapiens
  misc_RNA (1)...(19): siRNA sense strand
agggagaagcauugcgaca

SEQ ID NO: 2521153 - RNA, 19 nt, Homo sapiens
  misc_RNA (1)...(19): siRNA sense strand
guuugaaagugcaugugaa

SEQ ID NO: 2521154 - RNA, 19 nt, Homo sapiens
  misc_RNA (1)...(19): siRNA sense strand
ugaauuacaggaagaacua

SEQ ID NO: 2521155 - RNA, 19 nt, Homo sapiens
  misc_RNA (1)...(19): siRNA sense strand
gagaagaaugagauggagu

SEQ ID NO: 2521156 - RNA, 19 nt, Homo sapiens
  misc_RNA (1)...(19): siRNA sense strand
ggaacagaagaaaguaauu

SEQ ID NO: 2521157 - RNA, 19 nt, Homo sapiens
  misc_RNA (1)...(19): siRNA sense strand
aaugaaacagaguuggaua

SEQ ID NO: 2521158 - RNA, 19 nt, Homo sapiens
  misc_RNA (1)...(19): siRNA sense strand
agauagacucucacacuaa

SEQ ID NO: 2521159 - RNA, 19 nt, Homo sapiens
  misc_RNA (1)...(19): siRNA sense strand
cagaagagggcacagaaau

SEQ ID NO: 2521160 - RNA, 19 nt, Homo sapiens
  misc_RNA (1)...(19): siRNA sense strand
gugcaugugaagaacuaaa

SEQ ID NO: 2521161 - RNA, 19 nt, Homo sapiens
  misc_RNA (1)...(19): siRNA sense strand
agauggagcugagaagaaa

SEQ ID NO: 2521162 - RNA, 19 nt, Homo sapiens
  misc_RNA (1)...(19): siRNA sense strand
ucacaugagagcaguagaa

SEQ ID NO: 2521163 - RNA, 19 nt, Homo sapiens
  misc_RNA (1)...(19): siRNA sense strand
gaacaaugggaagcagaaa

SEQ ID NO: 2521164 - RNA, 19 nt, Homo sapiens
  misc_RNA (1)...(19): siRNA sense strand
agugaggaaauuagaagaa

SEQ ID NO: 2521165 - RNA, 19 nt, Homo sapiens
  misc_RNA (1)...(19): siRNA sense strand
cuaguagagacaugugaaa

SEQ ID NO: 2521166 - RNA, 19 nt, Homo sapiens
  misc_RNA (1)...(19): siRNA sense strand
aaagauuagccgaggcaca

SEQ ID NO: 2521167 - RNA, 19 nt, Homo sapiens
  misc_RNA (1)...(19): siRNA sense strand
caaaauugcaaucgagaau

SEQ ID NO: 2521168 - RNA, 19 nt, Homo sapiens
  misc_RNA (1)...(19): siRNA sense strand
ugaacuugauucuacgaaa

SEQ ID NO: 2521169 - RNA, 19 nt, Homo sapiens
  misc_RNA (1)...(19): siRNA sense strand
auaaaggaacuucaggaua

SEQ ID NO: 2521170 - RNA, 19 nt, Homo sapiens
  misc_RNA (1)...(19): siRNA sense strand
ggauaaacuggcugauguu

SEQ ID NO: 2521171 - RNA, 19 nt, Homo sapiens
  misc_RNA (1)...(19): siRNA sense strand
cggcgaaguuugacggucu

SEQ ID NO: 2521172 - RNA, 19 nt, Homo sapiens
  misc_RNA (1)...(19): siRNA sense strand
gggagguccgagaagagaa

SEQ ID NO: 2521173 - RNA, 19 nt, Homo sapiens
  misc_RNA (1)...(19): siRNA sense strand
gggaagaagaggaccgaga

SEQ ID NO: 2521174 - RNA, 19 nt, Homo sapiens
  misc_RNA (1)...(19): siRNA sense strand
gcccgaagcucaaggacga

SEQ ID NO: 2521175 - RNA, 19 nt, Homo sapiens
  misc_RNA (1)...(19): siRNA sense strand
agaaagugggcucggagaa

SEQ ID NO: 2521176 - RNA, 19 nt, Homo sapiens
  misc_RNA (1)...(19): siRNA sense strand
gggacuuccugcagagcga

SEQ ID NO: 2521177 - RNA, 19 nt, Homo sapiens
  misc_RNA (1)...(19): siRNA sense strand
gcgaagacuacgaggaggu

SEQ ID NO: 2521178 - RNA, 19 nt, Homo sapiens
  misc_RNA (1)...(19): siRNA sense strand
ggagugaggaucaggagga

SEQ ID NO: 2521179 - RNA, 19 nt, Homo sapiens
  misc_RNA (1)...(19): siRNA sense strand
ucacacaggaggaggagga

SEQ ID NO: 2521180 - RNA, 19 nt, Homo sapiens
  misc_RNA (1)...(19): siRNA sense strand
gcaagugguacucgcgcaa

SEQ ID NO: 2521181 - RNA, 19 nt, Homo sapiens
  misc_RNA (1)...(19): siRNA sense strand
aguccaagaagaacaagaa

SEQ ID NO: 2521182 - RNA, 19 nt, Homo sapiens
  misc_RNA (1)...(19): siRNA sense strand
gcgagaagccucugagcac

SEQ ID NO: 2521183 - RNA, 19 nt, Homo sapiens
  misc_RNA (1)...(19): siRNA sense strand
gagaauuuccagaaggucu

SEQ ID NO: 2521184 - RNA, 19 nt, Homo sapiens
  misc_RNA (1)...(19): siRNA sense strand
gggaagaagaagaaagugg

SEQ ID NO: 2521185 - RNA, 19 nt, Homo sapiens
  misc_RNA (1)...(19): siRNA sense strand
ucuacuuugcagauggaaa

SEQ ID NO: 2521186 - RNA, 19 nt, Homo sapiens
  misc_RNA (1)...(19): siRNA sense strand
gguacaaaagggaagaaga

SEQ ID NO: 2521187 - RNA, 19 nt, Homo sapiens
  misc_RNA (1)...(19): siRNA sense strand
cgugagcacuuccgggaga

SEQ ID NO: 2521188 - RNA, 19 nt, Homo sapiens
  misc_RNA (1)...(19): siRNA sense strand
gcagcaagaagguagcaca

SEQ ID NO: 2521189 - RNA, 19 nt, Homo sapiens
  misc_RNA (1)...(19): siRNA sense strand
agaagaagaaagugggcuc

SEQ ID NO: 2521190 - RNA, 19 nt, Homo sapiens
  misc_RNA (1)...(19): siRNA sense strand
agaggaaccuucagcucau

SEQ ID NO: 2521191 - RNA, 19 nt, Homo sapiens
  misc_RNA (1)...(19): siRNA sense strand
ucagcgaguucaagagcca

SEQ ID NO: 2521192 - RNA, 19 nt, Homo sapiens
  misc_RNA (1)...(19): siRNA sense strand
aaguugggaagaagaagaa

SEQ ID NO: 2521193 - RNA, 19 nt, Homo sapiens
  misc_RNA (1)...(19): siRNA sense strand
gccagguggucuuugggaa

SEQ ID NO: 2521194 - RNA, 19 nt, Homo sapiens
  misc_RNA (1)...(19): siRNA sense strand
gauuaagaaacgagcgaac

SEQ ID NO: 2521195 - RNA, 19 nt, Homo sapiens
  misc_RNA (1)...(19): siRNA sense strand
gugcagauugacuggaaga

SEQ ID NO: 2521196 - RNA, 19 nt, Homo sapiens
  misc_RNA (1)...(19): siRNA sense strand
cagauuaagaaacgagcga

SEQ ID NO: 2521197 - RNA, 19 nt, Homo sapiens
  misc_RNA (1)...(19): siRNA sense strand
gauuuaacugaguaugcaa

SEQ ID NO: 2521198 - RNA, 19 nt, Homo sapiens
  misc_RNA (1)...(19): siRNA sense strand
cgaacaaagcagcaccuga

SEQ ID NO: 2521199 - RNA, 19 nt, Homo sapiens
  misc_RNA (1)...(19): siRNA sense strand
ccuggaaacagcacaucaa

SEQ ID NO: 2521200 - RNA, 19 nt, Homo sapiens
  misc_RNA (1)...(19): siRNA sense strand
aaucaaacguucaagccaa

SEQ ID NO: 2521201 - RNA, 19 nt, Homo sapiens
  misc_RNA (1)...(19): siRNA sense strand
gcacagaagagaaaccaga

SEQ ID NO: 2521202 - RNA, 19 nt, Homo sapiens
  misc_RNA (1)...(19): siRNA sense strand
agagaaaccagaaggagga

SEQ ID NO: 2521203 - RNA, 19 nt, Homo sapiens
  misc_RNA (1)...(19): siRNA sense strand
cggaauuuggguugcagaa

SEQ ID NO: 2521204 - RNA, 19 nt, Homo sapiens
  misc_RNA (1)...(19): siRNA sense strand
ggaacaucucuguagcaau

SEQ ID NO: 2521205 - RNA, 19 nt, Homo sapiens
  misc_RNA (1)...(19): siRNA sense strand
agaagagaaaccagaagga

SEQ ID NO: 2521206 - RNA, 19 nt, Homo sapiens
  misc_RNA (1)...(19): siRNA sense strand
gggaggaagaugagcaaaa

SEQ ID NO: 2521207 - RNA, 19 nt, Homo sapiens
  misc_RNA (1)...(19): siRNA sense strand
ucgaugaggaugagcgcaa

SEQ ID NO: 2521208 - RNA, 19 nt, Homo sapiens
  misc_RNA (1)...(19): siRNA sense strand
uggcggugaugcagggcaa

SEQ ID NO: 2521209 - RNA, 19 nt, Homo sapiens
  misc_RNA (1)...(19): siRNA sense strand
cugcaggaugggaggaaga

SEQ ID NO: 2521210 - RNA, 19 nt, Homo sapiens
  misc_RNA (1)...(19): siRNA sense strand
cagcagaaguacggcgaga

SEQ ID NO: 2521211 - RNA, 19 nt, Homo sapiens
  misc_RNA (1)...(19): siRNA sense strand
auuuacaggaccagaacaa

SEQ ID NO: 2521212 - RNA, 19 nt, Homo sapiens
  misc_RNA (1)...(19): siRNA sense strand
uggucgugguuaaggccaa

SEQ ID NO: 2521213 - RNA, 19 nt, Homo sapiens
  misc_RNA (1)...(19): siRNA sense strand
agacagccgugaagaggga

SEQ ID NO: 2521214 - RNA, 19 nt, Homo sapiens
  misc_RNA (1)...(19): siRNA sense strand
aggacaccuuugagagcau

SEQ ID NO: 2521215 - RNA, 19 nt, Homo sapiens
  misc_RNA (1)...(19): siRNA sense strand
cgacaagaccacagcggac

SEQ ID NO: 2521216 - RNA, 19 nt, Homo sapiens
  misc_RNA (1)...(19): siRNA sense strand
ccaucuccuccgugagcaa

SEQ ID NO: 2521217 - RNA, 19 nt, Homo sapiens
  misc_RNA (1)...(19): siRNA sense strand
guuuggucgaggagugaua

SEQ ID NO: 2521218 - RNA, 19 nt, Homo sapiens
  misc_RNA (1)...(19): siRNA sense strand
aggauguauuccagguaga

SEQ ID NO: 2521219 - RNA, 19 nt, Homo sapiens
  misc_RNA (1)...(19): siRNA sense strand
gaggagugauagcgggacu

SEQ ID NO: 2521220 - RNA, 19 nt, Homo sapiens
  misc_RNA (1)...(19): siRNA sense strand
gguuguggaacuagaaaau

SEQ ID NO: 2521221 - RNA, 19 nt, Homo sapiens
  misc_RNA (1)...(19): siRNA sense strand
ggugguuacuggagcccau

SEQ ID NO: 2521222 - RNA, 19 nt, Homo sapiens
  misc_RNA (1)...(19): siRNA sense strand
gaaucaagacuguggagac

SEQ ID NO: 2521223 - RNA, 19 nt, Homo sapiens
  misc_RNA (1)...(19): siRNA sense strand
gcuuugucuuaaauggaau

SEQ ID NO: 2521224 - RNA, 19 nt, Homo sapiens
  misc_RNA (1)...(19): siRNA sense strand
ggaaaaguuuggucgagga

SEQ ID NO: 2521225 - RNA, 19 nt, Homo sapiens
  misc_RNA (1)...(19): siRNA sense strand
ccaacauguuaaagagaga

SEQ ID NO: 2521226 - RNA, 19 nt, Homo sapiens
  misc_RNA (1)...(19): siRNA sense strand
ccgcauuuguucugggcaa

SEQ ID NO: 2521227 - RNA, 19 nt, Homo sapiens
  misc_RNA (1)...(19): siRNA sense strand
acaagaacuaaauggguaa

SEQ ID NO: 2521228 - RNA, 19 nt, Homo sapiens
  misc_RNA (1)...(19): siRNA sense strand
cggcauuccugguggcaga

SEQ ID NO: 2521229 - RNA, 19 nt, Homo sapiens
  misc_RNA (1)...(19): siRNA sense strand
cugagaaccgggaggaaau

SEQ ID NO: 2521230 - RNA, 19 nt, Homo sapiens
  misc_RNA (1)...(19): siRNA sense strand
cacaagaacuaaaugggua

SEQ ID NO: 2521231 - RNA, 19 nt, Homo sapiens
  misc_RNA (1)...(19): siRNA sense strand
uggcagauucacugauuaa

SEQ ID NO: 2521232 - RNA, 19 nt, Homo sapiens
  misc_RNA (1)...(19): siRNA sense strand
ccugagaaccgggaggaaa

SEQ ID NO: 2521233 - RNA, 19 nt, Homo sapiens
  misc_RNA (1)...(19): siRNA sense strand
aaguagaacuggacugcau

SEQ ID NO: 2521234 - RNA, 19 nt, Homo sapiens
  misc_RNA (1)...(19): siRNA sense strand
cgauaguacccgugugguu

SEQ ID NO: 2521235 - RNA, 19 nt, Homo sapiens
  misc_RNA (1)...(19): siRNA sense strand
ccuggaagagcuaaagaau

SEQ ID NO: 2521236 - RNA, 19 nt, Homo sapiens
  misc_RNA (1)...(19): siRNA sense strand
ucaaugacaugguggcuga

SEQ ID NO: 2521237 - RNA, 19 nt, Homo sapiens
  misc_RNA (1)...(19): siRNA sense strand
ucuauagaauacuggaaca

SEQ ID NO: 2521238 - RNA, 19 nt, Homo sapiens
  misc_RNA (1)...(19): siRNA sense strand
ccauggaaacaaacagaga

SEQ ID NO: 2521239 - RNA, 19 nt, Homo sapiens
  misc_RNA (1)...(19): siRNA sense strand
ggauuucacaagaacuaaa

SEQ ID NO: 2521240 - RNA, 19 nt, Homo sapiens
  misc_RNA (1)...(19): siRNA sense strand
uagaaaugguagauaucga

SEQ ID NO: 2521241 - RNA, 19 nt, Homo sapiens
  misc_RNA (1)...(19): siRNA sense strand
gaggaaaacuagagaagac

SEQ ID NO: 2521242 - RNA, 19 nt, Homo sapiens
  misc_RNA (1)...(19): siRNA sense strand
gcaggucagugaaggguca

SEQ ID NO: 2521243 - RNA, 19 nt, Homo sapiens
  misc_RNA (1)...(19): siRNA sense strand
aaggauuucacaagaacua

SEQ ID NO: 2521244 - RNA, 19 nt, Homo sapiens
  misc_RNA (1)...(19): siRNA sense strand
cuaaagaaugcucgggcca

SEQ ID NO: 2521245 - RNA, 19 nt, Homo sapiens
  misc_RNA (1)...(19): siRNA sense strand
ggucauggauuauauggga

SEQ ID NO: 2521246 - RNA, 19 nt, Homo sapiens
  misc_RNA (1)...(19): siRNA sense strand
uugcaaucuucuucaacua

SEQ ID NO: 2521247 - RNA, 19 nt, Homo sapiens
  misc_RNA (1)...(19): siRNA sense strand
aaacaaacagagaagaacu

SEQ ID NO: 2521248 - RNA, 19 nt, Homo sapiens
  misc_RNA (1)...(19): siRNA sense strand
gaguccagcuucugcgaca

SEQ ID NO: 2521249 - RNA, 19 nt, Homo sapiens
  misc_RNA (1)...(19): siRNA sense strand
cgaacacuuacgagaguca

SEQ ID NO: 2521250 - RNA, 19 nt, Homo sapiens
  misc_RNA (1)...(19): siRNA sense strand
gugauagguuucaugacau

SEQ ID NO: 2521251 - RNA, 19 nt, Homo sapiens
  misc_RNA (1)...(19): siRNA sense strand
cugaggcauugcaggagaa

SEQ ID NO: 2521252 - RNA, 19 nt, Homo sapiens
  misc_RNA (1)...(19): siRNA sense strand
ccugaauaaugauaagacu

SEQ ID NO: 2521253 - RNA, 19 nt, Homo sapiens
  misc_RNA (1)...(19): siRNA sense strand
uaucccgguuugagagcua

SEQ ID NO: 2521254 - RNA, 19 nt, Homo sapiens
  misc_RNA (1)...(19): siRNA sense strand
acgggagggcuguguacaa

SEQ ID NO: 2521255 - RNA, 19 nt, Homo sapiens
  misc_RNA (1)...(19): siRNA sense strand
cuuacuggugggaaauaua

SEQ ID NO: 2521256 - RNA, 19 nt, Homo sapiens
  misc_RNA (1)...(19): siRNA sense strand
cugaaggcgaggaagcgaa

SEQ ID NO: 2521257 - RNA, 19 nt, Homo sapiens
  misc_RNA (1)...(19): siRNA sense strand
caaaaguacuucagcaacu

SEQ ID NO: 2521258 - RNA, 19 nt, Homo sapiens
  misc_RNA (1)...(19): siRNA sense strand
gaagauuuccagaagacca

SEQ ID NO: 2521259 - RNA, 19 nt, Homo sapiens
  misc_RNA (1)...(19): siRNA sense strand
gaaaacuagagaagaccaa

SEQ ID NO: 2521260 - RNA, 19 nt, Homo sapiens
  misc_RNA (1)...(19): siRNA sense strand
aguuuggagugauagguuu

SEQ ID NO: 2521261 - RNA, 19 nt, Homo sapiens
  misc_RNA (1)...(19): siRNA sense strand
ugguagauaucgauaguac

SEQ ID NO: 2521262 - RNA, 19 nt, Homo sapiens
  misc_RNA (1)...(19): siRNA sense strand
ggaaaguagaacuggacug

SEQ ID NO: 2521263 - RNA, 19 nt, Homo sapiens
  misc_RNA (1)...(19): siRNA sense strand
cugucgagcggcugaggaa

SEQ ID NO: 2521264 - RNA, 19 nt, Homo sapiens
  misc_RNA (1)...(19): siRNA sense strand
ucugauaacaugugccuga

SEQ ID NO: 2521265 - RNA, 19 nt, Homo sapiens
  misc_RNA (1)...(19): siRNA sense strand
ggacuggagaauugggaaa

SEQ ID NO: 2521266 - RNA, 19 nt, Homo sapiens
  misc_RNA (1)...(19): siRNA sense strand
cgccaaagguauugagaac

SEQ ID NO: 2521267 - RNA, 19 nt, Homo sapiens
  misc_RNA (1)...(19): siRNA sense strand
aguuaauggccuaguaaau

SEQ ID NO: 2521268 - RNA, 19 nt, Homo sapiens
  misc_RNA (1)...(19): siRNA sense strand
acauguauucuuugggaua

SEQ ID NO: 2521269 - RNA, 19 nt, Homo sapiens
  misc_RNA (1)...(19): siRNA sense strand
uaguaaugcagaugugaaa

SEQ ID NO: 2521270 - RNA, 19 nt, Homo sapiens
  misc_RNA (1)...(19): siRNA sense strand
gaguaauaguaaugcagau

SEQ ID NO: 2521271 - RNA, 19 nt, Homo sapiens
  misc_RNA (1)...(19): siRNA sense strand
cagaaauucaagcuggaaa

SEQ ID NO: 2521272 - RNA, 19 nt, Homo sapiens
  misc_RNA (1)...(19): siRNA sense strand
uguguaacaacaaggaaua

SEQ ID NO: 2521273 - RNA, 19 nt, Homo sapiens
  misc_RNA (1)...(19): siRNA sense strand
ggauauaaaugauugugga

SEQ ID NO: 2521274 - RNA, 19 nt, Homo sapiens
  misc_RNA (1)...(19): siRNA sense strand
cuauauaggaaccgguuau

SEQ ID NO: 2521275 - RNA, 19 nt, Homo sapiens
  misc_RNA (1)...(19): siRNA sense strand
cuauguauugggaggacaa

SEQ ID NO: 2521276 - RNA, 19 nt, Homo sapiens
  misc_RNA (1)...(19): siRNA sense strand
agaaauucaagcuggaaaa

SEQ ID NO: 2521277 - RNA, 19 nt, Homo sapiens
  misc_RNA (1)...(19): siRNA sense strand
auauaaugggacuggagaa

SEQ ID NO: 2521278 - RNA, 19 nt, Homo sapiens
  misc_RNA (1)...(19): siRNA sense strand
cagaacaggaucucaacaa

SEQ ID NO: 2521279 - RNA, 19 nt, Homo sapiens
  misc_RNA (1)...(19): siRNA sense strand
ccacuguugagaagcguua

SEQ ID NO: 2521280 - RNA, 19 nt, Homo sapiens
  misc_RNA (1)...(19): siRNA sense strand
cagaugugaaauuuggaaa

SEQ ID NO: 2521281 - RNA, 19 nt, Homo sapiens
  misc_RNA (1)...(19): siRNA sense strand
guucaaacccaguugcaca

SEQ ID NO: 2521282 - RNA, 19 nt, Homo sapiens
  misc_RNA (1)...(19): siRNA sense strand
gcgccaaagguauugagaa

SEQ ID NO: 2521283 - RNA, 19 nt, Homo sapiens
  misc_RNA (1)...(19): siRNA sense strand
uauuguaguuaauggccua

SEQ ID NO: 2521284 - RNA, 19 nt, Homo sapiens
  misc_RNA (1)...(19): siRNA sense strand
cguuaugaaaugaagaguu

SEQ ID NO: 2521285 - RNA, 19 nt, Homo sapiens
  misc_RNA (1)...(19): siRNA sense strand
auguaugccaaaugugaaa

SEQ ID NO: 2521286 - RNA, 19 nt, Homo sapiens
  misc_RNA (1)...(19): siRNA sense strand
acaacaaggaauagcacca

SEQ ID NO: 2521287 - RNA, 19 nt, Homo sapiens
  misc_RNA (1)...(19): siRNA sense strand
uagcagaacaggaucucaa

SEQ ID NO: 2521288 - RNA, 19 nt, Homo sapiens
  misc_RNA (1)...(19): siRNA sense strand
ggacauaagccgagauggc

SEQ ID NO: 2521289 - RNA, 19 nt, Homo sapiens
  misc_RNA (1)...(19): siRNA sense strand
auuuaugguccuucgauua

SEQ ID NO: 2521290 - RNA, 19 nt, Homo sapiens
  misc_RNA (1)...(19): siRNA sense strand
ccagaagucaccagagcca

SEQ ID NO: 2521291 - RNA, 19 nt, Homo sapiens
  misc_RNA (1)...(19): siRNA sense strand
uugagaagcguuaugaaau

SEQ ID NO: 2521292 - RNA, 19 nt, Homo sapiens
  misc_RNA (1)...(19): siRNA sense strand
acacaggaagccaaaggua

SEQ ID NO: 2521293 - RNA, 19 nt, Homo sapiens
  misc_RNA (1)...(19): siRNA sense strand
ucauaaagagaaugcaguu

SEQ ID NO: 2521294 - RNA, 19 nt, Homo sapiens
  misc_RNA (1)...(19): siRNA sense strand
ccuucgauuauuagggaca

SEQ ID NO: 2521295 - RNA, 19 nt, Homo sapiens
  misc_RNA (1)...(19): siRNA sense strand
guaucauucuuuggugaaa

SEQ ID NO: 2521296 - RNA, 19 nt, Homo sapiens
  misc_RNA (1)...(19): siRNA sense strand
ccgcgaugguugggagcuu

SEQ ID NO: 2521297 - RNA, 19 nt, Homo sapiens
  misc_RNA (1)...(19): siRNA sense strand
uauaaugggacuggagaau

SEQ ID NO: 2521298 - RNA, 19 nt, Homo sapiens
  misc_RNA (1)...(19): siRNA sense strand
aaucuuaggcccugcuauu

SEQ ID NO: 2521299 - RNA, 19 nt, Homo sapiens
  misc_RNA (1)...(19): siRNA sense strand
cacaggaagccaaagguau

SEQ ID NO: 2521300 - RNA, 19 nt, Homo sapiens
  misc_RNA (1)...(19): siRNA sense strand
ggucuuacggcuggaggaa

SEQ ID NO: 2521301 - RNA, 19 nt, Homo sapiens
  misc_RNA (1)...(19): siRNA sense strand
ucuuacggcuggaggaacu

SEQ ID NO: 2521302 - RNA, 19 nt, Homo sapiens
  misc_RNA (1)...(19): siRNA sense strand
cugaugucacugaggauga

SEQ ID NO: 2521303 - RNA, 19 nt, Homo sapiens
  misc_RNA (1)...(19): siRNA sense strand
cagaugugucauuucauaa

SEQ ID NO: 2521304 - RNA, 19 nt, Homo sapiens
  misc_RNA (1)...(19): siRNA sense strand
ggauaaaaggccugaggaa

SEQ ID NO: 2521305 - RNA, 19 nt, Homo sapiens
  misc_RNA (1)...(19): siRNA sense strand
agauauugacgaugaggaa

SEQ ID NO: 2521306 - RNA, 19 nt, Homo sapiens
  misc_RNA (1)...(19): siRNA sense strand
ccuaaugaggauaaggcaa

SEQ ID NO: 2521307 - RNA, 19 nt, Homo sapiens
  misc_RNA (1)...(19): siRNA sense strand
auaaaaggccugaggaaau

SEQ ID NO: 2521308 - RNA, 19 nt, Homo sapiens
  misc_RNA (1)...(19): siRNA sense strand
ccauuaagaaggaugaaca

SEQ ID NO: 2521309 - RNA, 19 nt, Homo sapiens
  misc_RNA (1)...(19): siRNA sense strand
uugacaaauuagagacaga

SEQ ID NO: 2521310 - RNA, 19 nt, Homo sapiens
  misc_RNA (1)...(19): siRNA sense strand
gauaaaaggccugaggaaa

SEQ ID NO: 2521311 - RNA, 19 nt, Homo sapiens
  misc_RNA (1)...(19): siRNA sense strand
gauuaugagccaagaugau

SEQ ID NO: 2521312 - RNA, 19 nt, Homo sapiens
  misc_RNA (1)...(19): siRNA sense strand
cugaaugaacugaaacgaa

SEQ ID NO: 2521313 - RNA, 19 nt, Homo sapiens
  misc_RNA (1)...(19): siRNA sense strand
auuuaagcccuaugugaua

SEQ ID NO: 2521314 - RNA, 19 nt, Homo sapiens
  misc_RNA (1)...(19): siRNA sense strand
gcaagaagaagccaggaga

SEQ ID NO: 2521315 - RNA, 19 nt, Homo sapiens
  misc_RNA (1)...(19): siRNA sense strand
cacuagaauuuaagcccua

SEQ ID NO: 2521316 - RNA, 19 nt, Homo sapiens
  misc_RNA (1)...(19): siRNA sense strand
auauugacgaugaggaaga

SEQ ID NO: 2521317 - RNA, 19 nt, Homo sapiens
  misc_RNA (1)...(19): siRNA sense strand
uagggaagucaacgggaua

SEQ ID NO: 2521318 - RNA, 19 nt, Homo sapiens
  misc_RNA (1)...(19): siRNA sense strand
cgaagaagugacaccguau

SEQ ID NO: 2521319 - RNA, 19 nt, Homo sapiens
  misc_RNA (1)...(19): siRNA sense strand
agugaagcauuuaaggaca

SEQ ID NO: 2521320 - RNA, 19 nt, Homo sapiens
  misc_RNA (1)...(19): siRNA sense strand
caggaaaggagauuggcuu

SEQ ID NO: 2521321 - RNA, 19 nt, Homo sapiens
  misc_RNA (1)...(19): siRNA sense strand
ggaaagucaauauggucau

SEQ ID NO: 2521322 - RNA, 19 nt, Homo sapiens
  misc_RNA (1)...(19): siRNA sense strand
ggugaugaacuuagggaag

SEQ ID NO: 2521323 - RNA, 19 nt, Homo sapiens
  misc_RNA (1)...(19): siRNA sense strand
auguaugaaugcaagaaga

SEQ ID NO: 2521324 - RNA, 19 nt, Homo sapiens
  misc_RNA (1)...(19): siRNA sense strand
aauuagagacagagaccca

SEQ ID NO: 2521325 - RNA, 19 nt, Homo sapiens
  misc_RNA (1)...(19): siRNA sense strand
cgaucauuguggccagaau

SEQ ID NO: 2521326 - RNA, 19 nt, Homo sapiens
  misc_RNA (1)...(19): siRNA sense strand
cggcgacaaacuaaugaaa

SEQ ID NO: 2521327 - RNA, 19 nt, Homo sapiens
  misc_RNA (1)...(19): siRNA sense strand
auacuguggcucagaagaa

SEQ ID NO: 2521328 - RNA, 19 nt, Homo sapiens
  misc_RNA (1)...(19): siRNA sense strand
acagauaauggaaagucaa

SEQ ID NO: 2521329 - RNA, 19 nt, Homo sapiens
  misc_RNA (1)...(19): siRNA sense strand
ccucaaagcauuuccagga

SEQ ID NO: 2521330 - RNA, 19 nt, Homo sapiens
  misc_RNA (1)...(19): siRNA sense strand
cauuuaaggacacuagaau

SEQ ID NO: 2521331 - RNA, 19 nt, Homo sapiens
  misc_RNA (1)...(19): siRNA sense strand
aaauaauccgucuggucaa

SEQ ID NO: 2521332 - RNA, 19 nt, Homo sapiens
  misc_RNA (1)...(19): siRNA sense strand
aggcaagauguuuaucaaa

SEQ ID NO: 2521333 - RNA, 19 nt, Homo sapiens
  misc_RNA (1)...(19): siRNA sense strand
aagcgaaacacgaagcuga

SEQ ID NO: 2521334 - RNA, 19 nt, Homo sapiens
  misc_RNA (1)...(19): siRNA sense strand
augaaugcaagaagaguga

SEQ ID NO: 2521335 - RNA, 19 nt, Homo sapiens
  misc_RNA (1)...(19): siRNA sense strand
caaaagaaggcaagauguu

SEQ ID NO: 2521336 - RNA, 19 nt, Homo sapiens
  misc_RNA (1)...(19): siRNA sense strand
acgaagaagugacaccgua

SEQ ID NO: 2521337 - RNA, 19 nt, Homo sapiens
  misc_RNA (1)...(19): siRNA sense strand
cacagauaauggaaaguca

SEQ ID NO: 2521338 - RNA, 19 nt, Homo sapiens
  misc_RNA (1)...(19): siRNA sense strand
cagauaauggaaagucaau

SEQ ID NO: 2521339 - RNA, 19 nt, Homo sapiens
  misc_RNA (1)...(19): siRNA sense strand
gccugaagauauugacgau

SEQ ID NO: 2521340 - RNA, 19 nt, Homo sapiens
  misc_RNA (1)...(19): siRNA sense strand
ccccauaccaccagagcaa

SEQ ID NO: 2521341 - RNA, 19 nt, Homo sapiens
  misc_RNA (1)...(19): siRNA sense strand
guuugagacagauguacaa

SEQ ID NO: 2521342 - RNA, 19 nt, Homo sapiens
  misc_RNA (1)...(19): siRNA sense strand
acaccguaucggcgacaaa

SEQ ID NO: 2521343 - RNA, 19 nt, Homo sapiens
  misc_RNA (1)...(19): siRNA sense strand
uggaaagucaauaugguca

SEQ ID NO: 2521344 - RNA, 19 nt, Homo sapiens
  misc_RNA (1)...(19): siRNA sense strand
ccauaccaccagagcaaga

SEQ ID NO: 2521345 - RNA, 19 nt, Homo sapiens
  misc_RNA (1)...(19): siRNA sense strand
agcauuuguuugagacaga

SEQ ID NO: 2521346 - RNA, 19 nt, Homo sapiens
  misc_RNA (1)...(19): siRNA sense strand
cuccaucaauagagcguuu

SEQ ID NO: 2521347 - RNA, 19 nt, Homo sapiens
  misc_RNA (1)...(19): siRNA sense strand
cugcacagauaauggaaag

SEQ ID NO: 2521348 - RNA, 19 nt, Homo sapiens
  misc_RNA (1)...(19): siRNA sense strand
gccauuaaacagugagauc

SEQ ID NO: 2521349 - RNA, 19 nt, Homo sapiens
  misc_RNA (1)...(19): siRNA sense strand
ugucaaaacccaaugugaa

SEQ ID NO: 2521350 - RNA, 19 nt, Homo sapiens
  misc_RNA (1)...(19): siRNA sense strand
gggauauguuuggugaaaa

SEQ ID NO: 2521351 - RNA, 19 nt, Homo sapiens
  misc_RNA (1)...(19): siRNA sense strand
cagaaucaugagaggagga

SEQ ID NO: 2521352 - RNA, 19 nt, Homo sapiens
  misc_RNA (1)...(19): siRNA sense strand
caugagaggaggagcugca

SEQ ID NO: 2521353 - RNA, 19 nt, Homo sapiens
  misc_RNA (1)...(19): siRNA sense strand
ugaucuggccgaagagcuu

SEQ ID NO: 2521354 - RNA, 19 nt, Homo sapiens
  misc_RNA (1)...(19): siRNA sense strand
acacgaagcugaugccaac

SEQ ID NO: 2521355 - RNA, 19 nt, Homo sapiens
  misc_RNA (1)...(19): siRNA sense strand
ggcaagaauagcaggaaaa

SEQ ID NO: 2521356 - RNA, 19 nt, Homo sapiens
  misc_RNA (1)...(19): siRNA sense strand
uggagaaagaacugcggaa

SEQ ID NO: 2521357 - RNA, 19 nt, Homo sapiens
  misc_RNA (1)...(19): siRNA sense strand
caccguagcucuaggcuga

SEQ ID NO: 2521358 - RNA, 19 nt, Homo sapiens
  misc_RNA (1)...(19): siRNA sense strand
gcuucaaguccuucugcaa

SEQ ID NO: 2521359 - RNA, 19 nt, Homo sapiens
  misc_RNA (1)...(19): siRNA sense strand
cacacuggcccgaggagaa

SEQ ID NO: 2521360 - RNA, 19 nt, Homo sapiens
  misc_RNA (1)...(19): siRNA sense strand
auaaggaaguaaagcucau

SEQ ID NO: 2521361 - RNA, 19 nt, Homo sapiens
  misc_RNA (1)...(19): siRNA sense strand
gcucugaggucguggaacg

SEQ ID NO: 2521362 - RNA, 19 nt, Homo sapiens
  misc_RNA (1)...(19): siRNA sense strand
uagauuaccggcagcgcaa

SEQ ID NO: 2521363 - RNA, 19 nt, Homo sapiens
  misc_RNA (1)...(19): siRNA sense strand
gcauuggaaagaagggagu

SEQ ID NO: 2521364 - RNA, 19 nt, Homo sapiens
  misc_RNA (1)...(19): siRNA sense strand
gggagagcacucagaggca

SEQ ID NO: 2521365 - RNA, 19 nt, Homo sapiens
  misc_RNA (1)...(19): siRNA sense strand
cugaagaggacaaggagag

SEQ ID NO: 2521366 - RNA, 19 nt, Homo sapiens
  misc_RNA (1)...(19): siRNA sense strand
guggaaggaguguggucau

SEQ ID NO: 2521367 - RNA, 19 nt, Homo sapiens
  misc_RNA (1)...(19): siRNA sense strand
gaagaaagaugcaggagca

SEQ ID NO: 2521368 - RNA, 19 nt, Homo sapiens
  misc_RNA (1)...(19): siRNA sense strand
ggaaacagcugaagagcag

SEQ ID NO: 2521369 - RNA, 19 nt, Homo sapiens
  misc_RNA (1)...(19): siRNA sense strand
cagaaauauuggaaggaag

SEQ ID NO: 2521370 - RNA, 19 nt, Homo sapiens
  misc_RNA (1)...(19): siRNA sense strand
acgcauugaaggugagaca

SEQ ID NO: 2521371 - RNA, 19 nt, Homo sapiens
  misc_RNA (1)...(19): siRNA sense strand
uggaaacagacauggagaa

SEQ ID NO: 2521372 - RNA, 19 nt, Homo sapiens
  misc_RNA (1)...(19): siRNA sense strand
caggagaagugguggaccu

SEQ ID NO: 2521373 - RNA, 19 nt, Homo sapiens
  misc_RNA (1)...(19): siRNA sense strand
uggcaauguacaaagggaa

SEQ ID NO: 2521374 - RNA, 19 nt, Homo sapiens
  misc_RNA (1)...(19): siRNA sense strand
aggcagcaguagagaagga

SEQ ID NO: 2521375 - RNA, 19 nt, Homo sapiens
  misc_RNA (1)...(19): siRNA sense strand
gccucaaccagguggcaaa

SEQ ID NO: 2521376 - RNA, 19 nt, Homo sapiens
  misc_RNA (1)...(19): siRNA sense strand
aggaauaguuggaagcaug

SEQ ID NO: 2521377 - RNA, 19 nt, Homo sapiens
  misc_RNA (1)...(19): siRNA sense strand
agaaauauuggaaggaagu

SEQ ID NO: 2521378 - RNA, 19 nt, Homo sapiens
  misc_RNA (1)...(19): siRNA sense strand
gggcacagugggaaaggau

SEQ ID NO: 2521379 - RNA, 19 nt, Homo sapiens
  misc_RNA (1)...(19): siRNA sense strand
acauggagaaugagaaagu

SEQ ID NO: 2521380 - RNA, 19 nt, Homo sapiens
  misc_RNA (1)...(19): siRNA sense strand
aagaagaagaaacaggaga

SEQ ID NO: 2521381 - RNA, 19 nt, Homo sapiens
  misc_RNA (1)...(19): siRNA sense strand
cuuuaggaccagaagccaa

SEQ ID NO: 2521382 - RNA, 19 nt, Homo sapiens
  misc_RNA (1)...(19): siRNA sense strand
uuacaaaagcucaagguuu

SEQ ID NO: 2521383 - RNA, 19 nt, Homo sapiens
  misc_RNA (1)...(19): siRNA sense strand
caggagcauauguggaaau

SEQ ID NO: 2521384 - RNA, 19 nt, Homo sapiens
  misc_RNA (1)...(19): siRNA sense strand
guggaaaugaucaggagca

SEQ ID NO: 2521385 - RNA, 19 nt, Homo sapiens
  misc_RNA (1)...(19): siRNA sense strand
ucuagaaagaauucccaaa

SEQ ID NO: 2521386 - RNA, 19 nt, Homo sapiens
  misc_RNA (1)...(19): siRNA sense strand
uggaaaugaucaggagcau

SEQ ID NO: 2521387 - RNA, 19 nt, Homo sapiens
  misc_RNA (1)...(19): siRNA sense strand
auacuaaugaagaggacca

SEQ ID NO: 2521388 - RNA, 19 nt, Homo sapiens
  misc_RNA (1)...(19): siRNA sense strand
cagacauggagaaugagaa

SEQ ID NO: 2521389 - RNA, 19 nt, Homo sapiens
  misc_RNA (1)...(19): siRNA sense strand
agaugcaggagcagggaca

SEQ ID NO: 2521390 - RNA, 19 nt, Homo sapiens
  misc_RNA (1)...(19): siRNA sense strand
cagaagucagcuuguggaa

SEQ ID NO: 2521391 - RNA, 19 nt, Homo sapiens
  misc_RNA (1)...(19): siRNA sense strand
caaagagaauguaacacca

SEQ ID NO: 2521392 - RNA, 19 nt, Homo sapiens
  misc_RNA (1)...(19): siRNA sense strand
gugaaggggcugaaaccaa

SEQ ID NO: 2521393 - RNA, 19 nt, Homo sapiens
  misc_RNA (1)...(19): siRNA sense strand
aaaccaaagaagaagaaac

SEQ ID NO: 2521394 - RNA, 19 nt, Homo sapiens
  misc_RNA (1)...(19): siRNA sense strand
ucuaaaaggaaaugcugaa

SEQ ID NO: 2521395 - RNA, 19 nt, Homo sapiens
  misc_RNA (1)...(19): siRNA sense strand
aaggaaaugcugaagcuca

SEQ ID NO: 2521396 - RNA, 19 nt, Homo sapiens
  misc_RNA (1)...(19): siRNA sense strand
aaacaggagaaguggugga

SEQ ID NO: 2521397 - RNA, 19 nt, Homo sapiens
  misc_RNA (1)...(19): siRNA sense strand
guggaaacagacauggaga

SEQ ID NO: 2521398 - RNA, 19 nt, Homo sapiens
  misc_RNA (1)...(19): siRNA sense strand
cugaaaccaaagaagaaga

SEQ ID NO: 2521399 - RNA, 19 nt, Homo sapiens
  misc_RNA (1)...(19): siRNA sense strand
augaagaggaccaacgcau

SEQ ID NO: 2521400 - RNA, 19 nt, Homo sapiens
  misc_RNA (1)...(19): siRNA sense strand
ggaaggagucagagcgcga

SEQ ID NO: 2521401 - RNA, 19 nt, Homo sapiens
  misc_RNA (1)...(19): siRNA sense strand
cagaggagccaaaggccaa

SEQ ID NO: 2521402 - RNA, 19 nt, Homo sapiens
  misc_RNA (1)...(19): siRNA sense strand
caagaaugugagagaacca

SEQ ID NO: 2521403 - RNA, 19 nt, Homo sapiens
  misc_RNA (1)...(19): siRNA sense strand
cgaagaaagaagcugcuga

SEQ ID NO: 2521404 - RNA, 19 nt, Homo sapiens
  misc_RNA (1)...(19): siRNA sense strand
agucagagcgcgagaagcu

SEQ ID NO: 2521405 - RNA, 19 nt, Homo sapiens
  misc_RNA (1)...(19): siRNA sense strand
cuguuagcccgaagaaaga

SEQ ID NO: 2521406 - RNA, 19 nt, Homo sapiens
  misc_RNA (1)...(19): siRNA sense strand
gagaggaaagggaaggagu

SEQ ID NO: 2521407 - RNA, 19 nt, Homo sapiens
  misc_RNA (1)...(19): siRNA sense strand
aguuaagucaucaggagau

SEQ ID NO: 2521408 - RNA, 19 nt, Homo sapiens
  misc_RNA (1)...(19): siRNA sense strand
cugaggagaggaaagggaa

SEQ ID NO: 2521409 - RNA, 19 nt, Homo sapiens
  misc_RNA (1)...(19): siRNA sense strand
gaaagaugccacugccuca

SEQ ID NO: 2521410 - RNA, 19 nt, Homo sapiens
  misc_RNA (1)...(19): siRNA sense strand
uugaagacucugggauuaa

SEQ ID NO: 2521411 - RNA, 19 nt, Homo sapiens
  misc_RNA (1)...(19): siRNA sense strand
ggaaggagucagagcgcga

SEQ ID NO: 2521412 - RNA, 19 nt, Homo sapiens
  misc_RNA (1)...(19): siRNA sense strand
cagaggagccaaaggccaa

SEQ ID NO: 2521413 - RNA, 19 nt, Homo sapiens
  misc_RNA (1)...(19): siRNA sense strand
caagaaugugagagaacca

SEQ ID NO: 2521414 - RNA, 19 nt, Homo sapiens
  misc_RNA (1)...(19): siRNA sense strand
cgaagaaagaagcugcuga

SEQ ID NO: 2521415 - RNA, 19 nt, Homo sapiens
  misc_RNA (1)...(19): siRNA sense strand
agucagagcgcgagaagcu

SEQ ID NO: 2521416 - RNA, 19 nt, Homo sapiens
  misc_RNA (1)...(19): siRNA sense strand
cuguuagcccgaagaaaga

SEQ ID NO: 2521417 - RNA, 19 nt, Homo sapiens
  misc_RNA (1)...(19): siRNA sense strand
gagaggaaagggaaggagu

SEQ ID NO: 2521418 - RNA, 19 nt, Homo sapiens
  misc_RNA (1)...(19): siRNA sense strand
aguuaagucaucaggagau

SEQ ID NO: 2521419 - RNA, 19 nt, Homo sapiens
  misc_RNA (1)...(19): siRNA sense strand
cugaggagaggaaagggaa

SEQ ID NO: 2521420 - RNA, 19 nt, Homo sapiens
  misc_RNA (1)...(19): siRNA sense strand
gaaagaugccacugccuca

SEQ ID NO: 2521421 - RNA, 19 nt, Homo sapiens
  misc_RNA (1)...(19): siRNA sense strand
uugaagacucugggauuaa

SEQ ID NO: 2521422 - RNA, 19 nt, Homo sapiens
  misc_RNA (1)...(19): siRNA sense strand
augacaggcacaauagaaa

SEQ ID NO: 2521423 - RNA, 19 nt, Homo sapiens
  misc_RNA (1)...(19): siRNA sense strand
caauagaaacaacggggaa

SEQ ID NO: 2521424 - RNA, 19 nt, Homo sapiens
  misc_RNA (1)...(19): siRNA sense strand
ggagaaaaucagcuggaca

SEQ ID NO: 2521425 - RNA, 19 nt, Homo sapiens
  misc_RNA (1)...(19): siRNA sense strand
aggaaugaugacaggcaca

SEQ ID NO: 2521426 - RNA, 19 nt, Homo sapiens
  misc_RNA (1)...(19): siRNA sense strand
ggagaaucuuccuggaggu

SEQ ID NO: 2521427 - RNA, 19 nt, Homo sapiens
  misc_RNA (1)...(19): siRNA sense strand
gcguugacuagaaagaaga

SEQ ID NO: 2521428 - RNA, 19 nt, Homo sapiens
  misc_RNA (1)...(19): siRNA sense strand
gaagcuguguccaggcaga

SEQ ID NO: 2521429 - RNA, 19 nt, Homo sapiens
  misc_RNA (1)...(19): siRNA sense strand
guguagugacugugguaaa

SEQ ID NO: 2521430 - RNA, 19 nt, Homo sapiens
  misc_RNA (1)...(19): siRNA sense strand
augcaagcaaugugggaaa

SEQ ID NO: 2521431 - RNA, 19 nt, Homo sapiens
  misc_RNA (1)...(19): siRNA sense strand
ggaaagugcacauuggaga

SEQ ID NO: 2521432 - RNA, 19 nt, Homo sapiens
  misc_RNA (1)...(19): siRNA sense strand
ggagaaaggccuuacgagu

SEQ ID NO: 2521433 - RNA, 19 nt, Homo sapiens
  misc_RNA (1)...(19): siRNA sense strand
ccuuacgagugcagcaaau

SEQ ID NO: 2521434 - RNA, 19 nt, Homo sapiens
  misc_RNA (1)...(19): siRNA sense strand
ggacagggcacaugggaag

SEQ ID NO: 2521435 - RNA, 19 nt, Homo sapiens
  misc_RNA (1)...(19): siRNA sense strand
gaauguagccuguguggga

SEQ ID NO: 2521436 - RNA, 19 nt, Homo sapiens
  misc_RNA (1)...(19): siRNA sense strand
cagaaaggcgucaggagga

SEQ ID NO: 2521437 - RNA, 19 nt, Homo sapiens
  misc_RNA (1)...(19): siRNA sense strand
augugaugcuggagaacuu

SEQ ID NO: 2521438 - RNA, 19 nt, Homo sapiens
  misc_RNA (1)...(19): siRNA sense strand
ccgucuaagcugaggaaac

SEQ ID NO: 2521439 - RNA, 19 nt, Homo sapiens
  misc_RNA (1)...(19): siRNA sense strand
gcaagaaguccauguggca

SEQ ID NO: 2521440 - RNA, 19 nt, Homo sapiens
  misc_RNA (1)...(19): siRNA sense strand
aauucacacuggagaaaca

SEQ ID NO: 2521441 - RNA, 19 nt, Homo sapiens
  misc_RNA (1)...(19): siRNA sense strand
guguaaugaaugugggaag

SEQ ID NO: 2521442 - RNA, 19 nt, Homo sapiens
  misc_RNA (1)...(19): siRNA sense strand
gaggauucacacuggagaa

SEQ ID NO: 2521443 - RNA, 19 nt, Homo sapiens
  misc_RNA (1)...(19): siRNA sense strand
gggaaaccaagaaggcaca

SEQ ID NO: 2521444 - RNA, 19 nt, Homo sapiens
  misc_RNA (1)...(19): siRNA sense strand
uggugauguuugaggaugu

SEQ ID NO: 2521445 - RNA, 19 nt, Homo sapiens
  misc_RNA (1)...(19): siRNA sense strand
caggagagguuuuggucuu

SEQ ID NO: 2521446 - RNA, 19 nt, Homo sapiens
  misc_RNA (1)...(19): siRNA sense strand
aagaaguccauguggcaga

SEQ ID NO: 2521447 - RNA, 19 nt, Homo sapiens
  misc_RNA (1)...(19): siRNA sense strand
ccucauucggcaccggaaa

SEQ ID NO: 2521448 - RNA, 19 nt, Homo sapiens
  misc_RNA (1)...(19): siRNA sense strand
cgguauauuucuccaggga

SEQ ID NO: 2521449 - RNA, 19 nt, Homo sapiens
  misc_RNA (1)...(19): siRNA sense strand
aggacagggcacaugggaa

SEQ ID NO: 2521450 - RNA, 19 nt, Homo sapiens
  misc_RNA (1)...(19): siRNA sense strand
auguagccugugugggaaa

SEQ ID NO: 2521451 - RNA, 19 nt, Homo sapiens
  misc_RNA (1)...(19): siRNA sense strand
ucuuaugaauguacagagu

SEQ ID NO: 2521452 - RNA, 19 nt, Homo sapiens
  misc_RNA (1)...(19): siRNA sense strand
ggagcaucgagguggccaa

SEQ ID NO: 2521453 - RNA, 19 nt, Homo sapiens
  misc_RNA (1)...(19): siRNA sense strand
ggaaauacagcacacgaca

SEQ ID NO: 2521454 - RNA, 19 nt, Homo sapiens
  misc_RNA (1)...(19): siRNA sense strand
ccuaagaaccagggaggga

SEQ ID NO: 2521455 - RNA, 19 nt, Homo sapiens
  misc_RNA (1)...(19): siRNA sense strand
cugcgguaguucugggcaa

SEQ ID NO: 2521456 - RNA, 19 nt, Homo sapiens
  misc_RNA (1)...(19): siRNA sense strand
ggaacaagaucuauguccu

SEQ ID NO: 2521457 - RNA, 19 nt, Homo sapiens
  misc_RNA (1)...(19): siRNA sense strand
agccugcgcaugagggaua

SEQ ID NO: 2521458 - RNA, 19 nt, Homo sapiens
  misc_RNA (1)...(19): siRNA sense strand
cugcugagacacuggacau

SEQ ID NO: 2521459 - RNA, 19 nt, Homo sapiens
  misc_RNA (1)...(19): siRNA sense strand
aggccuuccugauggauga

SEQ ID NO: 2521460 - RNA, 19 nt, Homo sapiens
  misc_RNA (1)...(19): siRNA sense strand
guggagagcuuuagccuug

SEQ ID NO: 2521461 - RNA, 19 nt, Homo sapiens
  misc_RNA (1)...(19): siRNA sense strand
auaaagaagaugaggcaau

SEQ ID NO: 2521462 - RNA, 19 nt, Homo sapiens
  misc_RNA (1)...(19): siRNA sense strand
agaacaagacacaggagaa

SEQ ID NO: 2521463 - RNA, 19 nt, Homo sapiens
  misc_RNA (1)...(19): siRNA sense strand
agaaggaagauguggaaga

SEQ ID NO: 2521464 - RNA, 19 nt, Homo sapiens
  misc_RNA (1)...(19): siRNA sense strand
ggaagaagacuaugagcca

SEQ ID NO: 2521465 - RNA, 19 nt, Homo sapiens
  misc_RNA (1)...(19): siRNA sense strand
caggaaaggaagaugaaga

SEQ ID NO: 2521466 - RNA, 19 nt, Homo sapiens
  misc_RNA (1)...(19): siRNA sense strand
acacaggagaagagugcaa

SEQ ID NO: 2521467 - RNA, 19 nt, Homo sapiens
  misc_RNA (1)...(19): siRNA sense strand
aagauaaaucccagcuaaa

SEQ ID NO: 2521468 - RNA, 19 nt, Homo sapiens
  misc_RNA (1)...(19): siRNA sense strand
ccagcaaggaagaaggcaa

SEQ ID NO: 2521469 - RNA, 19 nt, Homo sapiens
  misc_RNA (1)...(19): siRNA sense strand
cagcaaggaagaaggcaau

SEQ ID NO: 2521470 - RNA, 19 nt, Homo sapiens
  misc_RNA (1)...(19): siRNA sense strand
uaaugauaauguugggcaa

SEQ ID NO: 2521471 - RNA, 19 nt, Homo sapiens
  misc_RNA (1)...(19): siRNA sense strand
cuuucuagaugaugaggaa

SEQ ID NO: 2521472 - RNA, 19 nt, Homo sapiens
  misc_RNA (1)...(19): siRNA sense strand
gaaacaaggucaagaggac

SEQ ID NO: 2521473 - RNA, 19 nt, Homo sapiens
  misc_RNA (1)...(19): siRNA sense strand
gggaaguggaaaagaagaa

SEQ ID NO: 2521474 - RNA, 19 nt, Homo sapiens
  misc_RNA (1)...(19): siRNA sense strand
cugcaaucacauuaaguaa

SEQ ID NO: 2521475 - RNA, 19 nt, Homo sapiens
  misc_RNA (1)...(19): siRNA sense strand
auaacagacaagagaguau

SEQ ID NO: 2521476 - RNA, 19 nt, Homo sapiens
  misc_RNA (1)...(19): siRNA sense strand
aggaagaugaagagaagga

SEQ ID NO: 2521477 - RNA, 19 nt, Homo sapiens
  misc_RNA (1)...(19): siRNA sense strand
gaguaugaccugaacgaca

SEQ ID NO: 2521478 - RNA, 19 nt, Homo sapiens
  misc_RNA (1)...(19): siRNA sense strand
acuaaugcacagagaaaca

SEQ ID NO: 2521479 - RNA, 19 nt, Homo sapiens
  misc_RNA (1)...(19): siRNA sense strand
acauaaagaagaugaggca

SEQ ID NO: 2521480 - RNA, 19 nt, Homo sapiens
  misc_RNA (1)...(19): siRNA sense strand
guguacaaaucgugggcca

SEQ ID NO: 2521481 - RNA, 19 nt, Homo sapiens
  misc_RNA (1)...(19): siRNA sense strand
aagaugaagagaaggaaga

SEQ ID NO: 2521482 - RNA, 19 nt, Homo sapiens
  misc_RNA (1)...(19): siRNA sense strand
cuggaaggaagcacagaaa

SEQ ID NO: 2521483 - RNA, 19 nt, Homo sapiens
  misc_RNA (1)...(19): siRNA sense strand
aauagaggaacuugguaaa

SEQ ID NO: 2521484 - RNA, 19 nt, Homo sapiens
  misc_RNA (1)...(19): siRNA sense strand
cugaaggaaacaaggucaa

SEQ ID NO: 2521485 - RNA, 19 nt, Homo sapiens
  misc_RNA (1)...(19): siRNA sense strand
ggaagauguggaagagcuu

SEQ ID NO: 2521486 - RNA, 19 nt, Homo sapiens
  misc_RNA (1)...(19): siRNA sense strand
cagaaauagccaagaccca

SEQ ID NO: 2521487 - RNA, 19 nt, Homo sapiens
  misc_RNA (1)...(19): siRNA sense strand
agcaaucaguggagguaau

SEQ ID NO: 2521488 - RNA, 19 nt, Homo sapiens
  misc_RNA (1)...(19): siRNA sense strand
aaauacaucagcagaacaa

SEQ ID NO: 2521489 - RNA, 19 nt, Homo sapiens
  misc_RNA (1)...(19): siRNA sense strand
augaugaggaagaagacua

SEQ ID NO: 2521490 - RNA, 19 nt, Homo sapiens
  misc_RNA (1)...(19): siRNA sense strand
ccucacaacuggaaggaag

SEQ ID NO: 2521491 - RNA, 19 nt, Homo sapiens
  misc_RNA (1)...(19): siRNA sense strand
aguaacacagagaugaaua

SEQ ID NO: 2521492 - RNA, 19 nt, Homo sapiens
  misc_RNA (1)...(19): siRNA sense strand
ugauuauggagguguacaa

SEQ ID NO: 2521493 - RNA, 19 nt, Homo sapiens
  misc_RNA (1)...(19): siRNA sense strand
agaaaauacaucagcagaa

SEQ ID NO: 2521494 - RNA, 19 nt, Homo sapiens
  misc_RNA (1)...(19): siRNA sense strand
agagaaggaagauguggaa

SEQ ID NO: 2521495 - RNA, 19 nt, Homo sapiens
  misc_RNA (1)...(19): siRNA sense strand
gaaaagaagaaaucugcaa

SEQ ID NO: 2521496 - RNA, 19 nt, Homo sapiens
  misc_RNA (1)...(19): siRNA sense strand
gcaauuaauuucaucagga

SEQ ID NO: 2521497 - RNA, 19 nt, Homo sapiens
  misc_RNA (1)...(19): siRNA sense strand
acauuaaguaacacagaga

SEQ ID NO: 2521498 - RNA, 19 nt, Homo sapiens
  misc_RNA (1)...(19): siRNA sense strand
ccucugaaguggaaaugca

SEQ ID NO: 2521499 - RNA, 19 nt, Homo sapiens
  misc_RNA (1)...(19): siRNA sense strand
ucaucaggaaguucagaaa

SEQ ID NO: 2521500 - RNA, 19 nt, Homo sapiens
  misc_RNA (1)...(19): siRNA sense strand
ggaaacaaggucaagagga

SEQ ID NO: 2521501 - RNA, 19 nt, Homo sapiens
  misc_RNA (1)...(19): siRNA sense strand
guaauguaauccagggaag

SEQ ID NO: 2521502 - RNA, 19 nt, Homo sapiens
  misc_RNA (1)...(19): siRNA sense strand
cauucugaguccagcucua

SEQ ID NO: 2521503 - RNA, 19 nt, Homo sapiens
  misc_RNA (1)...(19): siRNA sense strand
gcugcgaaucaaaccgaua

SEQ ID NO: 2521504 - RNA, 19 nt, Homo sapiens
  misc_RNA (1)...(19): siRNA sense strand
caacuuggauguuagcaga

SEQ ID NO: 2521505 - RNA, 19 nt, Homo sapiens
  misc_RNA (1)...(19): siRNA sense strand
gaagaagacuaugagccaa

SEQ ID NO: 2521506 - RNA, 19 nt, Homo sapiens
  misc_RNA (1)...(19): siRNA sense strand
aggaagauguggaagagcu

SEQ ID NO: 2521507 - RNA, 19 nt, Homo sapiens
  misc_RNA (1)...(19): siRNA sense strand
gcuaaacacaacccagcaa

SEQ ID NO: 2521508 - RNA, 19 nt, Homo sapiens
  misc_RNA (1)...(19): siRNA sense strand
gggaaccaggaaaggaaga

SEQ ID NO: 2521509 - RNA, 19 nt, Homo sapiens
  misc_RNA (1)...(19): siRNA sense strand
ugcaauguaccuuaagaaa

SEQ ID NO: 2521510 - RNA, 19 nt, Homo sapiens
  misc_RNA (1)...(19): siRNA sense strand
agacaagagaguauccaga

SEQ ID NO: 2521511 - RNA, 19 nt, Homo sapiens
  misc_RNA (1)...(19): siRNA sense strand
uagugauuauggaggugua

SEQ ID NO: 2521512 - RNA, 19 nt, Homo sapiens
  misc_RNA (1)...(19): siRNA sense strand
cagaacaagacacaggaga

SEQ ID NO: 2521513 - RNA, 19 nt, Homo sapiens
  misc_RNA (1)...(19): siRNA sense strand
augaagagaaggaagaugu

SEQ ID NO: 2521514 - RNA, 19 nt, Homo sapiens
  misc_RNA (1)...(19): siRNA sense strand
caacaaaugugaaugcaga

SEQ ID NO: 2521515 - RNA, 19 nt, Homo sapiens
  misc_RNA (1)...(19): siRNA sense strand
uguaaauguuccugcaaaa

SEQ ID NO: 2521516 - RNA, 19 nt, Homo sapiens
  misc_RNA (1)...(19): siRNA sense strand
acauaggagagaugagcuu

SEQ ID NO: 2521517 - RNA, 19 nt, Homo sapiens
  misc_RNA (1)...(19): siRNA sense strand
caguucgaggaaagggaaa

SEQ ID NO: 2521518 - RNA, 19 nt, Homo sapiens
  misc_RNA (1)...(19): siRNA sense strand
ggaaagggaaaggggcaaa

SEQ ID NO: 2521519 - RNA, 19 nt, Homo sapiens
  misc_RNA (1)...(19): siRNA sense strand
aggaguacccugaugagau

SEQ ID NO: 2521520 - RNA, 19 nt, Homo sapiens
  misc_RNA (1)...(19): siRNA sense strand
gaggaaagggaaaggggca

SEQ ID NO: 2521521 - RNA, 19 nt, Homo sapiens
  misc_RNA (1)...(19): siRNA sense strand
cguacuugcagaugugaca

SEQ ID NO: 2521522 - RNA, 19 nt, Homo sapiens
  misc_RNA (1)...(19): siRNA sense strand
agaaagagcuacaggagga

SEQ ID NO: 2521523 - RNA, 19 nt, Homo sapiens
  misc_RNA (1)...(19): siRNA sense strand
cagaaaacggaguggaaaa

SEQ ID NO: 2521524 - RNA, 19 nt, Homo sapiens
  misc_RNA (1)...(19): siRNA sense strand
ugauaaauggaaagagcaa

SEQ ID NO: 2521525 - RNA, 19 nt, Homo sapiens
  misc_RNA (1)...(19): siRNA sense strand
cugagagagaagacagaaa

SEQ ID NO: 2521526 - RNA, 19 nt, Homo sapiens
  misc_RNA (1)...(19): siRNA sense strand
aggaagagauggaggacuc

SEQ ID NO: 2521527 - RNA, 19 nt, Homo sapiens
  misc_RNA (1)...(19): siRNA sense strand
ggaaagagcaagaguggac

SEQ ID NO: 2521528 - RNA, 19 nt, Homo sapiens
  misc_RNA (1)...(19): siRNA sense strand
guggaaaacagaagaaaca

SEQ ID NO: 2521529 - RNA, 19 nt, Homo sapiens
  misc_RNA (1)...(19): siRNA sense strand
ggaaaagaaaagugaagga

SEQ ID NO: 2521530 - RNA, 19 nt, Homo sapiens
  misc_RNA (1)...(19): siRNA sense strand
ucaggaagguggaagggau

SEQ ID NO: 2521531 - RNA, 19 nt, Homo sapiens
  misc_RNA (1)...(19): siRNA sense strand
cugacgagcucaagggugu

SEQ ID NO: 2521532 - RNA, 19 nt, Homo sapiens
  misc_RNA (1)...(19): siRNA sense strand
aagaggacucagagggaga

SEQ ID NO: 2521533 - RNA, 19 nt, Homo sapiens
  misc_RNA (1)...(19): siRNA sense strand
gaccaaacuuuauggggaa

SEQ ID NO: 2521534 - RNA, 19 nt, Homo sapiens
  misc_RNA (1)...(19): siRNA sense strand
cugagaagaaagagcuaca

SEQ ID NO: 2521535 - RNA, 19 nt, Homo sapiens
  misc_RNA (1)...(19): siRNA sense strand
gagagaaacccaagcccuu

SEQ ID NO: 2521536 - RNA, 19 nt, Homo sapiens
  misc_RNA (1)...(19): siRNA sense strand
uuucugaagaugagaguga

SEQ ID NO: 2521537 - RNA, 19 nt, Homo sapiens
  misc_RNA (1)...(19): siRNA sense strand
augaagagcacauggcuga

SEQ ID NO: 2521538 - RNA, 19 nt, Homo sapiens
  misc_RNA (1)...(19): siRNA sense strand
gcucgaaagcauggggaua

SEQ ID NO: 2521539 - RNA, 19 nt, Homo sapiens
  misc_RNA (1)...(19): siRNA sense strand
ggagaauauugcuggcauc

SEQ ID NO: 2521540 - RNA, 19 nt, Homo sapiens
  misc_RNA (1)...(19): siRNA sense strand
agcacauggcugagaagaa

SEQ ID NO: 2521541 - RNA, 19 nt, Homo sapiens
  misc_RNA (1)...(19): siRNA sense strand
uagaagagcuacgggccaa

SEQ ID NO: 2521542 - RNA, 19 nt, Homo sapiens
  misc_RNA (1)...(19): siRNA sense strand
ggaccaaacuuuaugggga

SEQ ID NO: 2521543 - RNA, 19 nt, Homo sapiens
  misc_RNA (1)...(19): siRNA sense strand
gggauaaggaaggaugcaa

SEQ ID NO: 2521544 - RNA, 19 nt, Homo sapiens
  misc_RNA (1)...(19): siRNA sense strand
gcgaaggagagacaggaga

SEQ ID NO: 2521545 - RNA, 19 nt, Homo sapiens
  misc_RNA (1)...(19): siRNA sense strand
aggaaggaugcaaagggaa

SEQ ID NO: 2521546 - RNA, 19 nt, Homo sapiens
  misc_RNA (1)...(19): siRNA sense strand
gggccaagcuaaaguggac

SEQ ID NO: 2521547 - RNA, 19 nt, Homo sapiens
  misc_RNA (1)...(19): siRNA sense strand
cuggaagagaagcucgaaa

SEQ ID NO: 2521548 - RNA, 19 nt, Homo sapiens
  misc_RNA (1)...(19): siRNA sense strand
cucauucaucagagggaaa

SEQ ID NO: 2521549 - RNA, 19 nt, Homo sapiens
  misc_RNA (1)...(19): siRNA sense strand
ggauccacaaggugccaaa

SEQ ID NO: 2521550 - RNA, 19 nt, Homo sapiens
  misc_RNA (1)...(19): siRNA sense strand
cagaggaagagauggagga

SEQ ID NO: 2521551 - RNA, 19 nt, Homo sapiens
  misc_RNA (1)...(19): siRNA sense strand
uggccagggcucaggaaca

SEQ ID NO: 2521552 - RNA, 19 nt, Homo sapiens
  misc_RNA (1)...(19): siRNA sense strand
caguggaagagguguuaga

SEQ ID NO: 2521553 - RNA, 19 nt, Homo sapiens
  misc_RNA (1)...(19): siRNA sense strand
ggggaaauagauaaacuaa

SEQ ID NO: 2521554 - RNA, 19 nt, Homo sapiens
  misc_RNA (1)...(19): siRNA sense strand
cuacacuagaagagaaacu

SEQ ID NO: 2521555 - RNA, 19 nt, Homo sapiens
  misc_RNA (1)...(19): siRNA sense strand
gaguccagcgggagcagaa

SEQ ID NO: 2521556 - RNA, 19 nt, Homo sapiens
  misc_RNA (1)...(19): siRNA sense strand
aagugaaggaacugcauga

SEQ ID NO: 2521557 - RNA, 19 nt, Homo sapiens
  misc_RNA (1)...(19): siRNA sense strand
ggcugagaagaaagagcua

SEQ ID NO: 2521558 - RNA, 19 nt, Homo sapiens
  misc_RNA (1)...(19): siRNA sense strand
ugaagaggacucagaggga

SEQ ID NO: 2521559 - RNA, 19 nt, Homo sapiens
  misc_RNA (1)...(19): siRNA sense strand
uggaggacacccuggaaga

SEQ ID NO: 2521560 - RNA, 19 nt, Homo sapiens
  misc_RNA (1)...(19): siRNA sense strand
gaugagagugacuuggaga

SEQ ID NO: 2521561 - RNA, 19 nt, Homo sapiens
  misc_RNA (1)...(19): siRNA sense strand
aacagaagaaacaggaaca

SEQ ID NO: 2521562 - RNA, 19 nt, Homo sapiens
  misc_RNA (1)...(19): siRNA sense strand
gaagaaacaggaacagcca

SEQ ID NO: 2521563 - RNA, 19 nt, Homo sapiens
  misc_RNA (1)...(19): siRNA sense strand
aagagcuacaggaggagaa

SEQ ID NO: 2521564 - RNA, 19 nt, Homo sapiens
  misc_RNA (1)...(19): siRNA sense strand
caggaacaagcuaggauca

SEQ ID NO: 2521565 - RNA, 19 nt, Homo sapiens
  misc_RNA (1)...(19): siRNA sense strand
cagaagaccuacugggcca

SEQ ID NO: 2521566 - RNA, 19 nt, Homo sapiens
  misc_RNA (1)...(19): siRNA sense strand
aguggaugaucguggacua

SEQ ID NO: 2521567 - RNA, 19 nt, Homo sapiens
  misc_RNA (1)...(19): siRNA sense strand
gcaugguggugguggcuga

SEQ ID NO: 2521568 - RNA, 19 nt, Homo sapiens
  misc_RNA (1)...(19): siRNA sense strand
aggccaaccuagaguggau

SEQ ID NO: 2521569 - RNA, 19 nt, Homo sapiens
  misc_RNA (1)...(19): siRNA sense strand
ggaacaacuaccagcacau

SEQ ID NO: 2521570 - RNA, 19 nt, Homo sapiens
  misc_RNA (1)...(19): siRNA sense strand
agagcuuccuggaggccaa

SEQ ID NO: 2521571 - RNA, 19 nt, Homo sapiens
  misc_RNA (1)...(19): siRNA sense strand
ccuucgagacuguguucaa

SEQ ID NO: 2521572 - RNA, 19 nt, Homo sapiens
  misc_RNA (1)...(19): siRNA sense strand
cguauaacaaccaguggau

SEQ ID NO: 2521573 - RNA, 19 nt, Homo sapiens
  misc_RNA (1)...(19): siRNA sense strand
ggaugcaggaagagaugga

SEQ ID NO: 2521574 - RNA, 19 nt, Homo sapiens
  misc_RNA (1)...(19): siRNA sense strand
ugaaaggccuggaggacag

SEQ ID NO: 2521575 - RNA, 19 nt, Homo sapiens
  misc_RNA (1)...(19): siRNA sense strand
cugaacaagaccaagauca

SEQ ID NO: 2521576 - RNA, 19 nt, Homo sapiens
  misc_RNA (1)...(19): siRNA sense strand
acgaaggccgugugagcuu

SEQ ID NO: 2521577 - RNA, 19 nt, Homo sapiens
  misc_RNA (1)...(19): siRNA sense strand
ucgaguaugaagucggcua

SEQ ID NO: 2521578 - RNA, 19 nt, Homo sapiens
  misc_RNA (1)...(19): siRNA sense strand
guucaaugccagugggcug

SEQ ID NO: 2521579 - RNA, 19 nt, Homo sapiens
  misc_RNA (1)...(19): siRNA sense strand
cgugguagaucaagccuca

SEQ ID NO: 2521580 - RNA, 19 nt, Homo sapiens
  misc_RNA (1)...(19): siRNA sense strand
cugcaaugugauagagaua

SEQ ID NO: 2521581 - RNA, 19 nt, Homo sapiens
  misc_RNA (1)...(19): siRNA sense strand
aggcauuauagcugagaaa

SEQ ID NO: 2521582 - RNA, 19 nt, Homo sapiens
  misc_RNA (1)...(19): siRNA sense strand
ccagcauggcagacagaaa

SEQ ID NO: 2521583 - RNA, 19 nt, Homo sapiens
  misc_RNA (1)...(19): siRNA sense strand
ggaauaugucugaggagga

SEQ ID NO: 2521584 - RNA, 19 nt, Homo sapiens
  misc_RNA (1)...(19): siRNA sense strand
guuuagaggugcagcucca

SEQ ID NO: 2521585 - RNA, 19 nt, Homo sapiens
  misc_RNA (1)...(19): siRNA sense strand
gcagauuucuugcgagcca

SEQ ID NO: 2521586 - RNA, 19 nt, Homo sapiens
  misc_RNA (1)...(19): siRNA sense strand
cagaaugguaagggaggaa

SEQ ID NO: 2521587 - RNA, 19 nt, Homo sapiens
  misc_RNA (1)...(19): siRNA sense strand
aggaagaggauugggauga

SEQ ID NO: 2521588 - RNA, 19 nt, Homo sapiens
  misc_RNA (1)...(19): siRNA sense strand
acugagauggagaggucaa

SEQ ID NO: 2521589 - RNA, 19 nt, Homo sapiens
  misc_RNA (1)...(19): siRNA sense strand
ccugugacaacgagaguga

SEQ ID NO: 2521590 - RNA, 19 nt, Homo sapiens
  misc_RNA (1)...(19): siRNA sense strand
caguggugguucuggcuau

SEQ ID NO: 2521591 - RNA, 19 nt, Homo sapiens
  misc_RNA (1)...(19): siRNA sense strand
ugguaagggaggaagagga

SEQ ID NO: 2521592 - RNA, 19 nt, Homo sapiens
  misc_RNA (1)...(19): siRNA sense strand
gugacaaggcccagguuuu

SEQ ID NO: 2521593 - RNA, 19 nt, Homo sapiens
  misc_RNA (1)...(19): siRNA sense strand
cguagagccaggaagcgaa

SEQ ID NO: 2521594 - RNA, 19 nt, Homo sapiens
  misc_RNA (1)...(19): siRNA sense strand
ugugacugcccaugguaaa

SEQ ID NO: 2521595 - RNA, 19 nt, Homo sapiens
  misc_RNA (1)...(19): siRNA sense strand
gggaggaagaggauuggga

SEQ ID NO: 2521596 - RNA, 19 nt, Homo sapiens
  misc_RNA (1)...(19): siRNA sense strand
caaaugagcaggagcggcu

SEQ ID NO: 2521597 - RNA, 19 nt, Homo sapiens
  misc_RNA (1)...(19): siRNA sense strand
cagucagcccuguggcauu

SEQ ID NO: 2521598 - RNA, 19 nt, Homo sapiens
  misc_RNA (1)...(19): siRNA sense strand
ugugauagagauagaugau

SEQ ID NO: 2521599 - RNA, 19 nt, Homo sapiens
  misc_RNA (1)...(19): siRNA sense strand
gaggaagaggauugggaug

SEQ ID NO: 2521600 - RNA, 19 nt, Homo sapiens
  misc_RNA (1)...(19): siRNA sense strand
ggucugagucaauggugga

SEQ ID NO: 2521601 - RNA, 19 nt, Homo sapiens
  misc_RNA (1)...(19): siRNA sense strand
ggggagaugcguagagcca

SEQ ID NO: 2521602 - RNA, 19 nt, Homo sapiens
  misc_RNA (1)...(19): siRNA sense strand
ccaaaggguucaaaggcga

SEQ ID NO: 2521603 - RNA, 19 nt, Homo sapiens
  misc_RNA (1)...(19): siRNA sense strand
cugcaaaggaagagaacag

SEQ ID NO: 2521604 - RNA, 19 nt, Homo sapiens
  misc_RNA (1)...(19): siRNA sense strand
ggaaggauccaaaggguuc

SEQ ID NO: 2521605 - RNA, 19 nt, Homo sapiens
  misc_RNA (1)...(19): siRNA sense strand
cggaaggauccaaaggguu

SEQ ID NO: 2521606 - RNA, 19 nt, Homo sapiens
  misc_RNA (1)...(19): siRNA sense strand
guucaaaggcgaagggugc

SEQ ID NO: 2521607 - RNA, 19 nt, Homo sapiens
  misc_RNA (1)...(19): siRNA sense strand
acuuaaugauuguuggcaa

SEQ ID NO: 2521608 - RNA, 19 nt, Homo sapiens
  misc_RNA (1)...(19): siRNA sense strand
gcaaggaaauaccagccaa

SEQ ID NO: 2521609 - RNA, 19 nt, Homo sapiens
  misc_RNA (1)...(19): siRNA sense strand
uggugauacccaagaaaca

SEQ ID NO: 2521610 - RNA, 19 nt, Homo sapiens
  misc_RNA (1)...(19): siRNA sense strand
aucgaaugguggugaauga

SEQ ID NO: 2521611 - RNA, 19 nt, Homo sapiens
  misc_RNA (1)...(19): siRNA sense strand
agaucauccgcaaggaaau

SEQ ID NO: 2521612 - RNA, 19 nt, Homo sapiens
  misc_RNA (1)...(19): siRNA sense strand
augaaagucuucuuggaca

SEQ ID NO: 2521613 - RNA, 19 nt, Homo sapiens
  misc_RNA (1)...(19): siRNA sense strand
cuuaaugauuguuggcaag

SEQ ID NO: 2521614 - RNA, 19 nt, Homo sapiens
  misc_RNA (1)...(19): siRNA sense strand
uguucuacggcaagagcua

SEQ ID NO: 2521615 - RNA, 19 nt, Homo sapiens
  misc_RNA (1)...(19): siRNA sense strand
cugaagggauggagggagc

SEQ ID NO: 2521616 - RNA, 19 nt, Homo sapiens
  misc_RNA (1)...(19): siRNA sense strand
ccaaagaacugauggcgaa

SEQ ID NO: 2521617 - RNA, 19 nt, Homo sapiens
  misc_RNA (1)...(19): siRNA sense strand
aggcauuauuucugcgaga

SEQ ID NO: 2521618 - RNA, 19 nt, Homo sapiens
  misc_RNA (1)...(19): siRNA sense strand
ugaagugggaagcgaggaa

SEQ ID NO: 2521619 - RNA, 19 nt, Homo sapiens
  misc_RNA (1)...(19): siRNA sense strand
ggaaauaccauucaggugu

SEQ ID NO: 2521620 - RNA, 19 nt, Homo sapiens
  misc_RNA (1)...(19): siRNA sense strand
ccgcugacuucgagcagga

SEQ ID NO: 2521621 - RNA, 19 nt, Homo sapiens
  misc_RNA (1)...(19): siRNA sense strand
caaagaacugauggcgaaa

SEQ ID NO: 2521622 - RNA, 19 nt, Homo sapiens
  misc_RNA (1)...(19): siRNA sense strand
ugagguaccugaagcccaa

SEQ ID NO: 2521623 - RNA, 19 nt, Homo sapiens
  misc_RNA (1)...(19): siRNA sense strand
ugcaaggacuacaaggaga

SEQ ID NO: 2521624 - RNA, 19 nt, Homo sapiens
  misc_RNA (1)...(19): siRNA sense strand
ggugggagauugaacggga

SEQ ID NO: 2521625 - RNA, 19 nt, Homo sapiens
  misc_RNA (1)...(19): siRNA sense strand
ggagauugaacgggagcuu

SEQ ID NO: 2521626 - RNA, 19 nt, Homo sapiens
  misc_RNA (1)...(19): siRNA sense strand
gcuuaaacgacaugagaga

SEQ ID NO: 2521627 - RNA, 19 nt, Homo sapiens
  misc_RNA (1)...(19): siRNA sense strand
aguucacacuggagagaaa

SEQ ID NO: 2521628 - RNA, 19 nt, Homo sapiens
  misc_RNA (1)...(19): siRNA sense strand
gugccauguaugugggaaa

SEQ ID NO: 2521629 - RNA, 19 nt, Homo sapiens
  misc_RNA (1)...(19): siRNA sense strand
aagucacaauggagagaaa

SEQ ID NO: 2521630 - RNA, 19 nt, Homo sapiens
  misc_RNA (1)...(19): siRNA sense strand
aagaauaagcuuacugcaa

SEQ ID NO: 2521631 - RNA, 19 nt, Homo sapiens
  misc_RNA (1)...(19): siRNA sense strand
augcaaugacuuaggagaa

SEQ ID NO: 2521632 - RNA, 19 nt, Homo sapiens
  misc_RNA (1)...(19): siRNA sense strand
ccuuagacgacaugagaga

SEQ ID NO: 2521633 - RNA, 19 nt, Homo sapiens
  misc_RNA (1)...(19): siRNA sense strand
ccuuagacaacaugagaga

SEQ ID NO: 2521634 - RNA, 19 nt, Homo sapiens
  misc_RNA (1)...(19): siRNA sense strand
agguagagaaguuggcauu

SEQ ID NO: 2521635 - RNA, 19 nt, Homo sapiens
  misc_RNA (1)...(19): siRNA sense strand
ccuuagacaacaugaaaga

SEQ ID NO: 2521636 - RNA, 19 nt, Homo sapiens
  misc_RNA (1)...(19): siRNA sense strand
acugcaagguagagaaguu

SEQ ID NO: 2521637 - RNA, 19 nt, Homo sapiens
  misc_RNA (1)...(19): siRNA sense strand
uuaaacgacaugagagaau

SEQ ID NO: 2521638 - RNA, 19 nt, Homo sapiens
  misc_RNA (1)...(19): siRNA sense strand
augauucacacuagagaaa

SEQ ID NO: 2521639 - RNA, 19 nt, Homo sapiens
  misc_RNA (1)...(19): siRNA sense strand
agauaaaccauauggaugu

SEQ ID NO: 2521640 - RNA, 19 nt, Homo sapiens
  misc_RNA (1)...(19): siRNA sense strand
uggacacaucccagagaaa

SEQ ID NO: 2521641 - RNA, 19 nt, Homo sapiens
  misc_RNA (1)...(19): siRNA sense strand
aacucacacuggagagaaa

SEQ ID NO: 2521642 - RNA, 19 nt, Homo sapiens
  misc_RNA (1)...(19): siRNA sense strand
cugcaaaucaguugugcuu

SEQ ID NO: 2521643 - RNA, 19 nt, Homo sapiens
  misc_RNA (1)...(19): siRNA sense strand
ccuuagaaaacaugagaga

SEQ ID NO: 2521644 - RNA, 19 nt, Homo sapiens
  misc_RNA (1)...(19): siRNA sense strand
aacucacaauggagagaaa

SEQ ID NO: 2521645 - RNA, 19 nt, Homo sapiens
  misc_RNA (1)...(19): siRNA sense strand
uggagcaaguagagaaacu

SEQ ID NO: 2521646 - RNA, 19 nt, Homo sapiens
  misc_RNA (1)...(19): siRNA sense strand
augccaucuaugugggaaa

SEQ ID NO: 2521647 - RNA, 19 nt, Homo sapiens
  misc_RNA (1)...(19): siRNA sense strand
ugggaaaaccuuuagcaaa

SEQ ID NO: 2521648 - RNA, 19 nt, Homo sapiens
  misc_RNA (1)...(19): siRNA sense strand
gagauaaaccauauggaug

SEQ ID NO: 2521649 - RNA, 19 nt, Homo sapiens
  misc_RNA (1)...(19): siRNA sense strand
cgacaugagaugauucaca

SEQ ID NO: 2521650 - RNA, 19 nt, Homo sapiens
  misc_RNA (1)...(19): siRNA sense strand
cgacaugagaugauucaca

SEQ ID NO: 2521651 - RNA, 19 nt, Homo sapiens
  misc_RNA (1)...(19): siRNA sense strand
ccuuagacaacaugagcga

SEQ ID NO: 2521652 - RNA, 19 nt, Homo sapiens
  misc_RNA (1)...(19): siRNA sense strand
ggcaaacagcucugcaaau

SEQ ID NO: 2521653 - RNA, 19 nt, Homo sapiens
  misc_RNA (1)...(19): siRNA sense strand
augucaucuaugugggaaa

SEQ ID NO: 2521654 - RNA, 19 nt, Homo sapiens
  misc_RNA (1)...(19): siRNA sense strand
gagagaagccauauggaug

SEQ ID NO: 2521655 - RNA, 19 nt, Homo sapiens
  misc_RNA (1)...(19): siRNA sense strand
augucaucuaugugggaaa

SEQ ID NO: 2521656 - RNA, 19 nt, Homo sapiens
  misc_RNA (1)...(19): siRNA sense strand
augucaucuaugugggaaa

SEQ ID NO: 2521657 - RNA, 19 nt, Homo sapiens
  misc_RNA (1)...(19): siRNA sense strand
aauuggagcaaguagagaa

SEQ ID NO: 2521658 - RNA, 19 nt, Homo sapiens
  misc_RNA (1)...(19): siRNA sense strand
gcggaaaagccuucaauca

SEQ ID NO: 2521659 - RNA, 19 nt, Homo sapiens
  misc_RNA (1)...(19): siRNA sense strand
auuggagcaaguagagaaa

SEQ ID NO: 2521660 - RNA, 19 nt, Homo sapiens
  misc_RNA (1)...(19): siRNA sense strand
acacaaagaauaagcuuac

SEQ ID NO: 2521661 - RNA, 19 nt, Homo sapiens
  misc_RNA (1)...(19): siRNA sense strand
gagaacucacacuggagaa

SEQ ID NO: 2521662 - RNA, 19 nt, Homo sapiens
  misc_RNA (1)...(19): siRNA sense strand
cugaaucuucugugcuuaa

SEQ ID NO: 2521663 - RNA, 19 nt, Homo sapiens
  misc_RNA (1)...(19): siRNA sense strand
uggcaaacagcucugcaaa

SEQ ID NO: 2521664 - RNA, 19 nt, Homo sapiens
  misc_RNA (1)...(19): siRNA sense strand
caagaugugauguuggaga

SEQ ID NO: 2521665 - RNA, 19 nt, Homo sapiens
  misc_RNA (1)...(19): siRNA sense strand
agagagauaacauuggaau

SEQ ID NO: 2521666 - RNA, 19 nt, Homo sapiens
  misc_RNA (1)...(19): siRNA sense strand
ccuuagacgacaugagaug

SEQ ID NO: 2521667 - RNA, 19 nt, Homo sapiens
  misc_RNA (1)...(19): siRNA sense strand
augucgugugugugggaaa

SEQ ID NO: 2521668 - RNA, 19 nt, Homo sapiens
  misc_RNA (1)...(19): siRNA sense strand
gagagaaaccacacggaug

SEQ ID NO: 2521669 - RNA, 19 nt, Homo sapiens
  misc_RNA (1)...(19): siRNA sense strand
caguaaaaguucuaaccuu

SEQ ID NO: 2521670 - RNA, 19 nt, Homo sapiens
  misc_RNA (1)...(19): siRNA sense strand
gagagaaaccacauggaug

SEQ ID NO: 2521671 - RNA, 19 nt, Homo sapiens
  misc_RNA (1)...(19): siRNA sense strand
acuuaggagauaaaccaua

SEQ ID NO: 2521672 - RNA, 19 nt, Homo sapiens
  misc_RNA (1)...(19): siRNA sense strand
gagaacucacuuaggagau

SEQ ID NO: 2521673 - RNA, 19 nt, Homo sapiens
  misc_RNA (1)...(19): siRNA sense strand
acaugaaagaacucacaau

SEQ ID NO: 2521674 - RNA, 19 nt, Homo sapiens
  misc_RNA (1)...(19): siRNA sense strand
aggauaucauuguagacuu

SEQ ID NO: 2521675 - RNA, 19 nt, Homo sapiens
  misc_RNA (1)...(19): siRNA sense strand
cgacaugagagaauucaca

SEQ ID NO: 2521676 - RNA, 19 nt, Homo sapiens
  misc_RNA (1)...(19): siRNA sense strand
gggaagaaacagagcacuc

SEQ ID NO: 2521677 - RNA, 19 nt, Homo sapiens
  misc_RNA (1)...(19): siRNA sense strand
ucaaacaauccauggacga

SEQ ID NO: 2521678 - RNA, 19 nt, Homo sapiens
  misc_RNA (1)...(19): siRNA sense strand
ggcgaagagaagcuacaaa

SEQ ID NO: 2521679 - RNA, 19 nt, Homo sapiens
  misc_RNA (1)...(19): siRNA sense strand
acacaaagcuggagaggag

SEQ ID NO: 2521680 - RNA, 19 nt, Homo sapiens
  misc_RNA (1)...(19): siRNA sense strand
gaaccaugacagaggcaga

SEQ ID NO: 2521681 - RNA, 19 nt, Homo sapiens
  misc_RNA (1)...(19): siRNA sense strand
augcaguggcccauggaaa

SEQ ID NO: 2521682 - RNA, 19 nt, Homo sapiens
  misc_RNA (1)...(19): siRNA sense strand
acaaaugaagagagaacca

SEQ ID NO: 2521683 - RNA, 19 nt, Homo sapiens
  misc_RNA (1)...(19): siRNA sense strand
caauuaaagaugaggcucu

SEQ ID NO: 2521684 - RNA, 19 nt, Homo sapiens
  misc_RNA (1)...(19): siRNA sense strand
uugcauuagcagaggcaga

SEQ ID NO: 2521685 - RNA, 19 nt, Homo sapiens
  misc_RNA (1)...(19): siRNA sense strand
aggagggagcagccagaaa

SEQ ID NO: 2521686 - RNA, 19 nt, Homo sapiens
  misc_RNA (1)...(19): siRNA sense strand
guugaagaucacugaccua

SEQ ID NO: 2521687 - RNA, 19 nt, Homo sapiens
  misc_RNA (1)...(19): siRNA sense strand
ucaccaggacugagggcuu

SEQ ID NO: 2521688 - RNA, 19 nt, Homo sapiens
  misc_RNA (1)...(19): siRNA sense strand
auggaaagacugaugagau

SEQ ID NO: 2521689 - RNA, 19 nt, Homo sapiens
  misc_RNA (1)...(19): siRNA sense strand
gggacagagaagaugcuga

SEQ ID NO: 2521690 - RNA, 19 nt, Homo sapiens
  misc_RNA (1)...(19): siRNA sense strand
auggaaagaauaaugguga

SEQ ID NO: 2521691 - RNA, 19 nt, Homo sapiens
  misc_RNA (1)...(19): siRNA sense strand
aagcuggagaggaggcauu

SEQ ID NO: 2521692 - RNA, 19 nt, Homo sapiens
  misc_RNA (1)...(19): siRNA sense strand
ucacaugugcaguggacca

SEQ ID NO: 2521693 - RNA, 19 nt, Homo sapiens
  misc_RNA (1)...(19): siRNA sense strand
agacaaagauacagaagcc

SEQ ID NO: 2521694 - RNA, 19 nt, Homo sapiens
  misc_RNA (1)...(19): siRNA sense strand
cgaaaaguacagagggaag

SEQ ID NO: 2521695 - RNA, 19 nt, Homo sapiens
  misc_RNA (1)...(19): siRNA sense strand
caggaagcuggguuugaaa

SEQ ID NO: 2521696 - RNA, 19 nt, Homo sapiens
  misc_RNA (1)...(19): siRNA sense strand
auggugaagaugaggacau

SEQ ID NO: 2521697 - RNA, 19 nt, Homo sapiens
  misc_RNA (1)...(19): siRNA sense strand
gugagugucaagagggaau

SEQ ID NO: 2521698 - RNA, 19 nt, Homo sapiens
  misc_RNA (1)...(19): siRNA sense strand
ggaugugggcagcgugcaa

SEQ ID NO: 2521699 - RNA, 19 nt, Homo sapiens
  misc_RNA (1)...(19): siRNA sense strand
aguuagaguuccaggccca

SEQ ID NO: 2521700 - RNA, 19 nt, Homo sapiens
  misc_RNA (1)...(19): siRNA sense strand
acgcugaggcugaagaaca

SEQ ID NO: 2521701 - RNA, 19 nt, Homo sapiens
  misc_RNA (1)...(19): siRNA sense strand
ccauugagcgcauaggcua

SEQ ID NO: 2521702 - RNA, 19 nt, Homo sapiens
  misc_RNA (1)...(19): siRNA sense strand
gaguagaccaggacggcca

SEQ ID NO: 2521703 - RNA, 19 nt, Homo sapiens
  misc_RNA (1)...(19): siRNA sense strand
uccaagaagguucaggaaa

SEQ ID NO: 2521704 - RNA, 19 nt, Homo sapiens
  misc_RNA (1)...(19): siRNA sense strand
aggcacugcuguuggcuga

SEQ ID NO: 2521705 - RNA, 19 nt, Homo sapiens
  misc_RNA (1)...(19): siRNA sense strand
cgcauaggcuacaagguga

SEQ ID NO: 2521706 - RNA, 19 nt, Homo sapiens
  misc_RNA (1)...(19): siRNA sense strand
gcuucuacgcucucagcaa

SEQ ID NO: 2521707 - RNA, 19 nt, Homo sapiens
  misc_RNA (1)...(19): siRNA sense strand
ccucagcaccauagagacu

SEQ ID NO: 2521708 - RNA, 19 nt, Homo sapiens
  misc_RNA (1)...(19): siRNA sense strand
caggugacgcugaggcuga

SEQ ID NO: 2521709 - RNA, 19 nt, Homo sapiens
  misc_RNA (1)...(19): siRNA sense strand
agggauaugcaaagauaaa

SEQ ID NO: 2521710 - RNA, 19 nt, Homo sapiens
  misc_RNA (1)...(19): siRNA sense strand
caaagauaaaggaggaaaa

SEQ ID NO: 2521711 - RNA, 19 nt, Homo sapiens
  misc_RNA (1)...(19): siRNA sense strand
ccucagaaugaaucggaaa

SEQ ID NO: 2521712 - RNA, 19 nt, Homo sapiens
  misc_RNA (1)...(19): siRNA sense strand
augcaaagauaaaggagga

SEQ ID NO: 2521713 - RNA, 19 nt, Homo sapiens
  misc_RNA (1)...(19): siRNA sense strand
acagaagacgauugugaaa

SEQ ID NO: 2521714 - RNA, 19 nt, Homo sapiens
  misc_RNA (1)...(19): siRNA sense strand
aggcaaagaggaaagucaa

SEQ ID NO: 2521715 - RNA, 19 nt, Homo sapiens
  misc_RNA (1)...(19): siRNA sense strand
aggccuagcucgaccucaa

SEQ ID NO: 2521716 - RNA, 19 nt, Homo sapiens
  misc_RNA (1)...(19): siRNA sense strand
cguucauaucucagaguuu

SEQ ID NO: 2521717 - RNA, 19 nt, Homo sapiens
  misc_RNA (1)...(19): siRNA sense strand
agccggaguaugagcaaua

SEQ ID NO: 2521718 - RNA, 19 nt, Homo sapiens
  misc_RNA (1)...(19): siRNA sense strand
gggaacucaaugaaggcaa

SEQ ID NO: 2521719 - RNA, 19 nt, Homo sapiens
  misc_RNA (1)...(19): siRNA sense strand
uguaauacugaaaggccua

SEQ ID NO: 2521720 - RNA, 19 nt, Homo sapiens
  misc_RNA (1)...(19): siRNA sense strand
uggggaaacuuaaggagaa

SEQ ID NO: 2521721 - RNA, 19 nt, Homo sapiens
  misc_RNA (1)...(19): siRNA sense strand
agaaugaaucggaaacaca

SEQ ID NO: 2521722 - RNA, 19 nt, Homo sapiens
  misc_RNA (1)...(19): siRNA sense strand
augccacauuagaggacaa

SEQ ID NO: 2521723 - RNA, 19 nt, Homo sapiens
  misc_RNA (1)...(19): siRNA sense strand
cagcacagugguugcaaau

SEQ ID NO: 2521724 - RNA, 19 nt, Homo sapiens
  misc_RNA (1)...(19): siRNA sense strand
gugcacaaucauuaccaaa

SEQ ID NO: 2521725 - RNA, 19 nt, Homo sapiens
  misc_RNA (1)...(19): siRNA sense strand
cuaaaguauuccugcacca

SEQ ID NO: 2521726 - RNA, 19 nt, Homo sapiens
  misc_RNA (1)...(19): siRNA sense strand
aaguuaugccucagaauga

SEQ ID NO: 2521727 - RNA, 19 nt, Homo sapiens
  misc_RNA (1)...(19): siRNA sense strand
acugaaaggccuagcucga

SEQ ID NO: 2521728 - RNA, 19 nt, Homo sapiens
  misc_RNA (1)...(19): siRNA sense strand
cucaaacaaacguguauaa

SEQ ID NO: 2521729 - RNA, 19 nt, Homo sapiens
  misc_RNA (1)...(19): siRNA sense strand
ggaaguuaugccucagaau

SEQ ID NO: 2521730 - RNA, 19 nt, Homo sapiens
  misc_RNA (1)...(19): siRNA sense strand
ugugaaacuacgaucaaau

SEQ ID NO: 2521731 - RNA, 19 nt, Homo sapiens
  misc_RNA (1)...(19): siRNA sense strand
aaggcaaagaggaaaguca

SEQ ID NO: 2521732 - RNA, 19 nt, Homo sapiens
  misc_RNA (1)...(19): siRNA sense strand
caaagaggaaagucaacau

SEQ ID NO: 2521733 - RNA, 19 nt, Homo sapiens
  misc_RNA (1)...(19): siRNA sense strand
cacagagaaauuugaagaa

SEQ ID NO: 2521734 - RNA, 19 nt, Homo sapiens
  misc_RNA (1)...(19): siRNA sense strand
ggucaugugauaguggaaa

SEQ ID NO: 2521735 - RNA, 19 nt, Homo sapiens
  misc_RNA (1)...(19): siRNA sense strand
aaacuuaaggagaaggagu

SEQ ID NO: 2521736 - RNA, 19 nt, Homo sapiens
  misc_RNA (1)...(19): siRNA sense strand
gcacauuaauuauggccag

SEQ ID NO: 2521737 - RNA, 19 nt, Homo sapiens
  misc_RNA (1)...(19): siRNA sense strand
aagaaguugagauggcaau

SEQ ID NO: 2521738 - RNA, 19 nt, Homo sapiens
  misc_RNA (1)...(19): siRNA sense strand
gugauuaagaagugggcaa

SEQ ID NO: 2521739 - RNA, 19 nt, Homo sapiens
  misc_RNA (1)...(19): siRNA sense strand
acacagcugcagagagaaa

SEQ ID NO: 2521740 - RNA, 19 nt, Homo sapiens
  misc_RNA (1)...(19): siRNA sense strand
guacuagacuuucgggcua

SEQ ID NO: 2521741 - RNA, 19 nt, Homo sapiens
  misc_RNA (1)...(19): siRNA sense strand
aggaagagauuaagcgaug

SEQ ID NO: 2521742 - RNA, 19 nt, Homo sapiens
  misc_RNA (1)...(19): siRNA sense strand
cuggaauagucaaaugauu

SEQ ID NO: 2521743 - RNA, 19 nt, Homo sapiens
  misc_RNA (1)...(19): siRNA sense strand
gaaacaugucagcagcaaa

SEQ ID NO: 2521744 - RNA, 19 nt, Homo sapiens
  misc_RNA (1)...(19): siRNA sense strand
gccuaguuguuaaggaaga

SEQ ID NO: 2521745 - RNA, 19 nt, Homo sapiens
  misc_RNA (1)...(19): siRNA sense strand
acagaauuugacuggaaua

SEQ ID NO: 2521746 - RNA, 19 nt, Homo sapiens
  misc_RNA (1)...(19): siRNA sense strand
agauauagucagauguguu

SEQ ID NO: 2521747 - RNA, 19 nt, Homo sapiens
  misc_RNA (1)...(19): siRNA sense strand
augccuaguuguuaaggaa

SEQ ID NO: 2521748 - RNA, 19 nt, Homo sapiens
  misc_RNA (1)...(19): siRNA sense strand
caguauacuaccuguaaga

SEQ ID NO: 2521749 - RNA, 19 nt, Homo sapiens
  misc_RNA (1)...(19): siRNA sense strand
uggaacaaauacagccaga

SEQ ID NO: 2521750 - RNA, 19 nt, Homo sapiens
  misc_RNA (1)...(19): siRNA sense strand
agcagauacuggaguuauu

SEQ ID NO: 2521751 - RNA, 19 nt, Homo sapiens
  misc_RNA (1)...(19): siRNA sense strand
gguacuuuaagcagcuaua

SEQ ID NO: 2521752 - RNA, 19 nt, Homo sapiens
  misc_RNA (1)...(19): siRNA sense strand
ucgugaagccaaagccauu

SEQ ID NO: 2521753 - RNA, 19 nt, Homo sapiens
  misc_RNA (1)...(19): siRNA sense strand
aagaaagaacucugucgaa

SEQ ID NO: 2521754 - RNA, 19 nt, Homo sapiens
  misc_RNA (1)...(19): siRNA sense strand
ccagagcagugcacgaaaa

SEQ ID NO: 2521755 - RNA, 19 nt, Homo sapiens
  misc_RNA (1)...(19): siRNA sense strand
agagauuaagcgaugaaaa

SEQ ID NO: 2521756 - RNA, 19 nt, Homo sapiens
  misc_RNA (1)...(19): siRNA sense strand
gagaaaucacacugccuga

SEQ ID NO: 2521757 - RNA, 19 nt, Homo sapiens
  misc_RNA (1)...(19): siRNA sense strand
ucagcugauucgagcaaaa

SEQ ID NO: 2521758 - RNA, 19 nt, Homo sapiens
  misc_RNA (1)...(19): siRNA sense strand
agucaguuguguggaguuu

SEQ ID NO: 2521759 - RNA, 19 nt, Homo sapiens
  misc_RNA (1)...(19): siRNA sense strand
gaccugagcccaagggaua

SEQ ID NO: 2521760 - RNA, 19 nt, Homo sapiens
  misc_RNA (1)...(19): siRNA sense strand
ucauaaacaaagcaggaaa

SEQ ID NO: 2521761 - RNA, 19 nt, Homo sapiens
  misc_RNA (1)...(19): siRNA sense strand
cugaagaagaccacgacaa

SEQ ID NO: 2521762 - RNA, 19 nt, Homo sapiens
  misc_RNA (1)...(19): siRNA sense strand
uggauaaagaccacgcaaa

SEQ ID NO: 2521763 - RNA, 19 nt, Homo sapiens
  misc_RNA (1)...(19): siRNA sense strand
aggcaauuccagaaaguga

SEQ ID NO: 2521764 - RNA, 19 nt, Homo sapiens
  misc_RNA (1)...(19): siRNA sense strand
caggaaagcugcaguccca

SEQ ID NO: 2521765 - RNA, 19 nt, Homo sapiens
  misc_RNA (1)...(19): siRNA sense strand
acagaagcauugaagccaa

SEQ ID NO: 2521766 - RNA, 19 nt, Homo sapiens
  misc_RNA (1)...(19): siRNA sense strand
uggaagaauggaagaaagu

SEQ ID NO: 2521767 - RNA, 19 nt, Homo sapiens
  misc_RNA (1)...(19): siRNA sense strand
aggcugugauugagaagga

SEQ ID NO: 2521768 - RNA, 19 nt, Homo sapiens
  misc_RNA (1)...(19): siRNA sense strand
aaacaaagcaggaaagcug

SEQ ID NO: 2521769 - RNA, 19 nt, Homo sapiens
  misc_RNA (1)...(19): siRNA sense strand
gauugaagaacguggccga

SEQ ID NO: 2521770 - RNA, 19 nt, Homo sapiens
  misc_RNA (1)...(19): siRNA sense strand
aauggaagaaaguggccaa

SEQ ID NO: 2521771 - RNA, 19 nt, Homo sapiens
  misc_RNA (1)...(19): siRNA sense strand
aggccagauuccagagagu

SEQ ID NO: 2521772 - RNA, 19 nt, Homo sapiens
  misc_RNA (1)...(19): siRNA sense strand
gccagauuccagagaguga

SEQ ID NO: 2521773 - RNA, 19 nt, Homo sapiens
  misc_RNA (1)...(19): siRNA sense strand
cagugauugaagaagaaau

SEQ ID NO: 2521774 - RNA, 19 nt, Homo sapiens
  misc_RNA (1)...(19): siRNA sense strand
gggaaauaacccaccuuca

SEQ ID NO: 2521775 - RNA, 19 nt, Homo sapiens
  misc_RNA (1)...(19): siRNA sense strand
gugaggagauggaggcuug

SEQ ID NO: 2521776 - RNA, 19 nt, Homo sapiens
  misc_RNA (1)...(19): siRNA sense strand
aaggagaagacaugcugaa

SEQ ID NO: 2521777 - RNA, 19 nt, Homo sapiens
  misc_RNA (1)...(19): siRNA sense strand
gcugaaacugcagaagaaa

SEQ ID NO: 2521778 - RNA, 19 nt, Homo sapiens
  misc_RNA (1)...(19): siRNA sense strand
cagaaagugaagcugaaga

SEQ ID NO: 2521779 - RNA, 19 nt, Homo sapiens
  misc_RNA (1)...(19): siRNA sense strand
uucaagaacagauggaaga

SEQ ID NO: 2521780 - RNA, 19 nt, Homo sapiens
  misc_RNA (1)...(19): siRNA sense strand
ccucaagugaacaggugau

SEQ ID NO: 2521781 - RNA, 19 nt, Homo sapiens
  misc_RNA (1)...(19): siRNA sense strand
gagcuauccaguuugggaa

SEQ ID NO: 2521782 - RNA, 19 nt, Homo sapiens
  misc_RNA (1)...(19): siRNA sense strand
agauggaagaauggaagaa

SEQ ID NO: 2521783 - RNA, 19 nt, Homo sapiens
  misc_RNA (1)...(19): siRNA sense strand
gaagaaaucucaaugcuag

SEQ ID NO: 2521784 - RNA, 19 nt, Homo sapiens
  misc_RNA (1)...(19): siRNA sense strand
ccugcagaccugagcccaa

SEQ ID NO: 2521785 - RNA, 19 nt, Homo sapiens
  misc_RNA (1)...(19): siRNA sense strand
ccaucgaguccuugagaaa

SEQ ID NO: 2521786 - RNA, 19 nt, Homo sapiens
  misc_RNA (1)...(19): siRNA sense strand
ccuuguaaauggaacgaaa

SEQ ID NO: 2521787 - RNA, 19 nt, Homo sapiens
  misc_RNA (1)...(19): siRNA sense strand
ggugagaccaguagaggaa

SEQ ID NO: 2521788 - RNA, 19 nt, Homo sapiens
  misc_RNA (1)...(19): siRNA sense strand
augcuaaagaagaguguaa

SEQ ID NO: 2521789 - RNA, 19 nt, Homo sapiens
  misc_RNA (1)...(19): siRNA sense strand
cgaaaguagaaguccauaa

SEQ ID NO: 2521790 - RNA, 19 nt, Homo sapiens
  misc_RNA (1)...(19): siRNA sense strand
caaacaaaucagagcucaa

SEQ ID NO: 2521791 - RNA, 19 nt, Homo sapiens
  misc_RNA (1)...(19): siRNA sense strand
agccuaaucuggugguaaa

SEQ ID NO: 2521792 - RNA, 19 nt, Homo sapiens
  misc_RNA (1)...(19): siRNA sense strand
gaacgaaaguagaagucca

SEQ ID NO: 2521793 - RNA, 19 nt, Homo sapiens
  misc_RNA (1)...(19): siRNA sense strand
ccucaaacgaagaugucua

SEQ ID NO: 2521794 - RNA, 19 nt, Homo sapiens
  misc_RNA (1)...(19): siRNA sense strand
gaagaguguaacagaggaa

SEQ ID NO: 2521795 - RNA, 19 nt, Homo sapiens
  misc_RNA (1)...(19): siRNA sense strand
gaggaaaagccgagaggau

SEQ ID NO: 2521796 - RNA, 19 nt, Homo sapiens
  misc_RNA (1)...(19): siRNA sense strand
aauuaaaccagcuggagaa

SEQ ID NO: 2521797 - RNA, 19 nt, Homo sapiens
  misc_RNA (1)...(19): siRNA sense strand
gcuaaagaagaguguaaca

SEQ ID NO: 2521798 - RNA, 19 nt, Homo sapiens
  misc_RNA (1)...(19): siRNA sense strand
gucaaaagagagugaguua

SEQ ID NO: 2521799 - RNA, 19 nt, Homo sapiens
  misc_RNA (1)...(19): siRNA sense strand
agauaaguccacagucaaa

SEQ ID NO: 2521800 - RNA, 19 nt, Homo sapiens
  misc_RNA (1)...(19): siRNA sense strand
cgaagcaaauaaugagcau

SEQ ID NO: 2521801 - RNA, 19 nt, Homo sapiens
  misc_RNA (1)...(19): siRNA sense strand
gauuggaccuggaggaacu

SEQ ID NO: 2521802 - RNA, 19 nt, Homo sapiens
  misc_RNA (1)...(19): siRNA sense strand
cuacauuccucgaaguaca

SEQ ID NO: 2521803 - RNA, 19 nt, Homo sapiens
  misc_RNA (1)...(19): siRNA sense strand
ccauaagcuucgaaacuca

SEQ ID NO: 2521804 - RNA, 19 nt, Homo sapiens
  misc_RNA (1)...(19): siRNA sense strand
guucuuuguugaugcuaaa

SEQ ID NO: 2521805 - RNA, 19 nt, Homo sapiens
  misc_RNA (1)...(19): siRNA sense strand
aagccuugguggaaagaau

SEQ ID NO: 2521806 - RNA, 19 nt, Homo sapiens
  misc_RNA (1)...(19): siRNA sense strand
cuaaguucccagaggguuu

SEQ ID NO: 2521807 - RNA, 19 nt, Homo sapiens
  misc_RNA (1)...(19): siRNA sense strand
gaacaagaaauuaugcaga

SEQ ID NO: 2521808 - RNA, 19 nt, Homo sapiens
  misc_RNA (1)...(19): siRNA sense strand
gggucuuuguggaguauau

SEQ ID NO: 2521809 - RNA, 19 nt, Homo sapiens
  misc_RNA (1)...(19): siRNA sense strand
ugaaucuaccaaaggaaua

SEQ ID NO: 2521810 - RNA, 19 nt, Homo sapiens
  misc_RNA (1)...(19): siRNA sense strand
acaagagcguauacaggaa

SEQ ID NO: 2521811 - RNA, 19 nt, Homo sapiens
  misc_RNA (1)...(19): siRNA sense strand
agacugaaucacacugaaa

SEQ ID NO: 2521812 - RNA, 19 nt, Homo sapiens
  misc_RNA (1)...(19): siRNA sense strand
gcuuggagaguaugaggua

SEQ ID NO: 2521813 - RNA, 19 nt, Homo sapiens
  misc_RNA (1)...(19): siRNA sense strand
uguaaggauuucugaggau

SEQ ID NO: 2521814 - RNA, 19 nt, Homo sapiens
  misc_RNA (1)...(19): siRNA sense strand
gaaugucugcggaaggaaa

SEQ ID NO: 2521815 - RNA, 19 nt, Homo sapiens
  misc_RNA (1)...(19): siRNA sense strand
aagaaaugccacagaagga

SEQ ID NO: 2521816 - RNA, 19 nt, Homo sapiens
  misc_RNA (1)...(19): siRNA sense strand
aggaguuggagaaggagua

SEQ ID NO: 2521817 - RNA, 19 nt, Homo sapiens
  misc_RNA (1)...(19): siRNA sense strand
ccacuauggagcugguauu

SEQ ID NO: 2521818 - RNA, 19 nt, Homo sapiens
  misc_RNA (1)...(19): siRNA sense strand
gguucuuuguugaugcuaa

SEQ ID NO: 2521819 - RNA, 19 nt, Homo sapiens
  misc_RNA (1)...(19): siRNA sense strand
uagaaugaaacaaggguca

SEQ ID NO: 2521820 - RNA, 19 nt, Homo sapiens
  misc_RNA (1)...(19): siRNA sense strand
gcccacaggaguuggagaa

SEQ ID NO: 2521821 - RNA, 19 nt, Homo sapiens
  misc_RNA (1)...(19): siRNA sense strand
ucaacuuggcaauggcaaa

SEQ ID NO: 2521822 - RNA, 19 nt, Homo sapiens
  misc_RNA (1)...(19): siRNA sense strand
aaacaggacucaaaagcaa

SEQ ID NO: 2521823 - RNA, 19 nt, Homo sapiens
  misc_RNA (1)...(19): siRNA sense strand
uuggagaguaugagguaau

SEQ ID NO: 2521824 - RNA, 19 nt, Homo sapiens
  misc_RNA (1)...(19): siRNA sense strand
gcggaaggaaauaagguca

SEQ ID NO: 2521825 - RNA, 19 nt, Homo sapiens
  misc_RNA (1)...(19): siRNA sense strand
ccacagaaggacugguguu

SEQ ID NO: 2521826 - RNA, 19 nt, Homo sapiens
  misc_RNA (1)...(19): siRNA sense strand
cagcuguugugaagaguga

SEQ ID NO: 2521827 - RNA, 19 nt, Homo sapiens
  misc_RNA (1)...(19): siRNA sense strand
uaaggauuucugaggauaa

SEQ ID NO: 2521828 - RNA, 19 nt, Homo sapiens
  misc_RNA (1)...(19): siRNA sense strand
ggcacaaacaggacucaaa

SEQ ID NO: 2521829 - RNA, 19 nt, Homo sapiens
  misc_RNA (1)...(19): siRNA sense strand
ucaaaagcaacuagacaua

SEQ ID NO: 2521830 - RNA, 19 nt, Homo sapiens
  misc_RNA (1)...(19): siRNA sense strand
acuccgaauccuuggguau

SEQ ID NO: 2521831 - RNA, 19 nt, Homo sapiens
  misc_RNA (1)...(19): siRNA sense strand
aguuaaauguaguggagac

SEQ ID NO: 2521832 - RNA, 19 nt, Homo sapiens
  misc_RNA (1)...(19): siRNA sense strand
uguacaaagacaagcguca

SEQ ID NO: 2521833 - RNA, 19 nt, Homo sapiens
  misc_RNA (1)...(19): siRNA sense strand
cgauaugucaugccagaau

SEQ ID NO: 2521834 - RNA, 19 nt, Homo sapiens
  misc_RNA (1)...(19): siRNA sense strand
aggauguccagcagguaaa

SEQ ID NO: 2521835 - RNA, 19 nt, Homo sapiens
  misc_RNA (1)...(19): siRNA sense strand
ccaccgaagcaaauaauga

SEQ ID NO: 2521836 - RNA, 19 nt, Homo sapiens
  misc_RNA (1)...(19): siRNA sense strand
cuuaaaugugacagaacuu

SEQ ID NO: 2521837 - RNA, 19 nt, Homo sapiens
  misc_RNA (1)...(19): siRNA sense strand
ccaccuguucagucagaua

SEQ ID NO: 2521838 - RNA, 19 nt, Homo sapiens
  misc_RNA (1)...(19): siRNA sense strand
cccuaaagauacaugggau

SEQ ID NO: 2521839 - RNA, 19 nt, Homo sapiens
  misc_RNA (1)...(19): siRNA sense strand
agacucagccaaagcaaau

SEQ ID NO: 2521840 - RNA, 19 nt, Homo sapiens
  misc_RNA (1)...(19): siRNA sense strand
cacaggaguuggagaagga

SEQ ID NO: 2521841 - RNA, 19 nt, Homo sapiens
  misc_RNA (1)...(19): siRNA sense strand
gugccgaacaagaaauuau

SEQ ID NO: 2521842 - RNA, 19 nt, Homo sapiens
  misc_RNA (1)...(19): siRNA sense strand
gguuaccucuacaggcuaa

SEQ ID NO: 2521843 - RNA, 19 nt, Homo sapiens
  misc_RNA (1)...(19): siRNA sense strand
cuguaauacugaaagccau

SEQ ID NO: 2521844 - RNA, 19 nt, Homo sapiens
  misc_RNA (1)...(19): siRNA sense strand
aaauuaaaccagcuggaga

SEQ ID NO: 2521845 - RNA, 19 nt, Homo sapiens
  misc_RNA (1)...(19): siRNA sense strand
aaagagacuguauggaauu

SEQ ID NO: 2521846 - RNA, 19 nt, Homo sapiens
  misc_RNA (1)...(19): siRNA sense strand
cagggauucgucagaguua

SEQ ID NO: 2521847 - RNA, 19 nt, Homo sapiens
  misc_RNA (1)...(19): siRNA sense strand
cuacccagacuuuggaaau

SEQ ID NO: 2521848 - RNA, 19 nt, Homo sapiens
  misc_RNA (1)...(19): siRNA sense strand
cuacaggcuaagaugggaa

SEQ ID NO: 2521849 - RNA, 19 nt, Homo sapiens
  misc_RNA (1)...(19): siRNA sense strand
ccuaaagauacaugggaug

SEQ ID NO: 2521850 - RNA, 19 nt, Homo sapiens
  misc_RNA (1)...(19): siRNA sense strand
cgcaaagccuacagcacca

SEQ ID NO: 2521851 - RNA, 19 nt, Homo sapiens
  misc_RNA (1)...(19): siRNA sense strand
cugcguguacuuuggcaua

SEQ ID NO: 2521852 - RNA, 19 nt, Homo sapiens
  misc_RNA (1)...(19): siRNA sense strand
gagccuaccuggaggacca

SEQ ID NO: 2521853 - RNA, 19 nt, Homo sapiens
  misc_RNA (1)...(19): siRNA sense strand
agacagugggagaggccaa

SEQ ID NO: 2521854 - RNA, 19 nt, Homo sapiens
  misc_RNA (1)...(19): siRNA sense strand
gagaacgcuucgugggaca

SEQ ID NO: 2521855 - RNA, 19 nt, Homo sapiens
  misc_RNA (1)...(19): siRNA sense strand
ggugauggguucagagccu

SEQ ID NO: 2521856 - RNA, 19 nt, Homo sapiens
  misc_RNA (1)...(19): siRNA sense strand
ccuggauccucgugggcau

SEQ ID NO: 2521857 - RNA, 19 nt, Homo sapiens
  misc_RNA (1)...(19): siRNA sense strand
gggagcaggugauggguuc

SEQ ID NO: 2521858 - RNA, 19 nt, Homo sapiens
  misc_RNA (1)...(19): siRNA sense strand
ggcuggaaucagagacuuu

SEQ ID NO: 2521859 - RNA, 19 nt, Homo sapiens
  misc_RNA (1)...(19): siRNA sense strand
agcuaaggcugcugggcga

SEQ ID NO: 2521860 - RNA, 19 nt, Homo sapiens
  misc_RNA (1)...(19): siRNA sense strand
ggauacgggagcaggugau

SEQ ID NO: 2521861 - RNA, 19 nt, Homo sapiens
  misc_RNA (1)...(19): siRNA sense strand
augcagaggggcaggagaa

SEQ ID NO: 2521862 - RNA, 19 nt, Homo sapiens
  misc_RNA (1)...(19): siRNA sense strand
gagacguccaggaggcaga

SEQ ID NO: 2521863 - RNA, 19 nt, Homo sapiens
  misc_RNA (1)...(19): siRNA sense strand
agaaauaggaagugaccaa

SEQ ID NO: 2521864 - RNA, 19 nt, Homo sapiens
  misc_RNA (1)...(19): siRNA sense strand
caguauaaauggagcaaca

SEQ ID NO: 2521865 - RNA, 19 nt, Homo sapiens
  misc_RNA (1)...(19): siRNA sense strand
agaagaaaguagugaggau

SEQ ID NO: 2521866 - RNA, 19 nt, Homo sapiens
  misc_RNA (1)...(19): siRNA sense strand
ugaaguaguugaagggaau

SEQ ID NO: 2521867 - RNA, 19 nt, Homo sapiens
  misc_RNA (1)...(19): siRNA sense strand
aggaaaguuuggagaagaa

SEQ ID NO: 2521868 - RNA, 19 nt, Homo sapiens
  misc_RNA (1)...(19): siRNA sense strand
gggagaagagauugugaua

SEQ ID NO: 2521869 - RNA, 19 nt, Homo sapiens
  misc_RNA (1)...(19): siRNA sense strand
guucagaagaucaagguaa

SEQ ID NO: 2521870 - RNA, 19 nt, Homo sapiens
  misc_RNA (1)...(19): siRNA sense strand
gggaagagucugaggagga

SEQ ID NO: 2521871 - RNA, 19 nt, Homo sapiens
  misc_RNA (1)...(19): siRNA sense strand
gaauaauagccguccaaua

SEQ ID NO: 2521872 - RNA, 19 nt, Homo sapiens
  misc_RNA (1)...(19): siRNA sense strand
cugcaggaguacagauuaa

SEQ ID NO: 2521873 - RNA, 19 nt, Homo sapiens
  misc_RNA (1)...(19): siRNA sense strand
gcuuugagaucuuggaaau

SEQ ID NO: 2521874 - RNA, 19 nt, Homo sapiens
  misc_RNA (1)...(19): siRNA sense strand
gagugugguuaaugggaaa

SEQ ID NO: 2521875 - RNA, 19 nt, Homo sapiens
  misc_RNA (1)...(19): siRNA sense strand
acauaaagcaucagaauca

SEQ ID NO: 2521876 - RNA, 19 nt, Homo sapiens
  misc_RNA (1)...(19): siRNA sense strand
caaccgaguccgagggaau

SEQ ID NO: 2521877 - RNA, 19 nt, Homo sapiens
  misc_RNA (1)...(19): siRNA sense strand
gcacuaacuuugagggcca

SEQ ID NO: 2521878 - RNA, 19 nt, Homo sapiens
  misc_RNA (1)...(19): siRNA sense strand
ggauaauguuguuggggua

SEQ ID NO: 2521879 - RNA, 19 nt, Homo sapiens
  misc_RNA (1)...(19): siRNA sense strand
guacauaugcccagauaau

SEQ ID NO: 2521880 - RNA, 19 nt, Homo sapiens
  misc_RNA (1)...(19): siRNA sense strand
cagaacaaaccaaaggaaa

SEQ ID NO: 2521881 - RNA, 19 nt, Homo sapiens
  misc_RNA (1)...(19): siRNA sense strand
cugauaauguugaguggaa

SEQ ID NO: 2521882 - RNA, 19 nt, Homo sapiens
  misc_RNA (1)...(19): siRNA sense strand
gauaauguugaguggaaua

SEQ ID NO: 2521883 - RNA, 19 nt, Homo sapiens
  misc_RNA (1)...(19): siRNA sense strand
gcaugcagcaauugagaua

SEQ ID NO: 2521884 - RNA, 19 nt, Homo sapiens
  misc_RNA (1)...(19): siRNA sense strand
agaaggauuuguugugaaa

SEQ ID NO: 2521885 - RNA, 19 nt, Homo sapiens
  misc_RNA (1)...(19): siRNA sense strand
uguaagaggcugugcaauu

SEQ ID NO: 2521886 - RNA, 19 nt, Homo sapiens
  misc_RNA (1)...(19): siRNA sense strand
agaacaaaccaaaggaaaa

SEQ ID NO: 2521887 - RNA, 19 nt, Homo sapiens
  misc_RNA (1)...(19): siRNA sense strand
uggcaaucaucacgagaaa

SEQ ID NO: 2521888 - RNA, 19 nt, Homo sapiens
  misc_RNA (1)...(19): siRNA sense strand
caaaauaguuggugaagau

SEQ ID NO: 2521889 - RNA, 19 nt, Homo sapiens
  misc_RNA (1)...(19): siRNA sense strand
augcaggaaucaugaguua

SEQ ID NO: 2521890 - RNA, 19 nt, Homo sapiens
  misc_RNA (1)...(19): siRNA sense strand
aaagauaccaagugacaaa

SEQ ID NO: 2521891 - RNA, 19 nt, Homo sapiens
  misc_RNA (1)...(19): siRNA sense strand
cgaaauacacugggacaaa

SEQ ID NO: 2521892 - RNA, 19 nt, Homo sapiens
  misc_RNA (1)...(19): siRNA sense strand
caaagguauuaguuggaaa

SEQ ID NO: 2521893 - RNA, 19 nt, Homo sapiens
  misc_RNA (1)...(19): siRNA sense strand
ccaauggagcggugauuaa

SEQ ID NO: 2521894 - RNA, 19 nt, Homo sapiens
  misc_RNA (1)...(19): siRNA sense strand
aaucaacaguucagagcaa

SEQ ID NO: 2521895 - RNA, 19 nt, Homo sapiens
  misc_RNA (1)...(19): siRNA sense strand
gcagaaacacugugaacuu

SEQ ID NO: 2521896 - RNA, 19 nt, Homo sapiens
  misc_RNA (1)...(19): siRNA sense strand
cugaacaauaccaggguua

SEQ ID NO: 2521897 - RNA, 19 nt, Homo sapiens
  misc_RNA (1)...(19): siRNA sense strand
gguguauguuggaggaaaa

SEQ ID NO: 2521898 - RNA, 19 nt, Homo sapiens
  misc_RNA (1)...(19): siRNA sense strand
cuggaauggucgauguuaa

SEQ ID NO: 2521899 - RNA, 19 nt, Homo sapiens
  misc_RNA (1)...(19): siRNA sense strand
guucagagcaauagagguu

SEQ ID NO: 2521900 - RNA, 19 nt, Homo sapiens
  misc_RNA (1)...(19): siRNA sense strand
ccuaaauauggcaguauaa

SEQ ID NO: 2521901 - RNA, 19 nt, Homo sapiens
  misc_RNA (1)...(19): siRNA sense strand
aggcuggaauugagacuaa

SEQ ID NO: 2521902 - RNA, 19 nt, Homo sapiens
  misc_RNA (1)...(19): siRNA sense strand
gcaauagagguuaaugaaa

SEQ ID NO: 2521903 - RNA, 19 nt, Homo sapiens
  misc_RNA (1)...(19): siRNA sense strand
augaaguaguugaagggaa

SEQ ID NO: 2521904 - RNA, 19 nt, Homo sapiens
  misc_RNA (1)...(19): siRNA sense strand
gaauggaagugcuggacau

SEQ ID NO: 2521905 - RNA, 19 nt, Homo sapiens
  misc_RNA (1)...(19): siRNA sense strand
gugaagugagugugguuaa

SEQ ID NO: 2521906 - RNA, 19 nt, Homo sapiens
  misc_RNA (1)...(19): siRNA sense strand
gauucaaggaagaagacua

SEQ ID NO: 2521907 - RNA, 19 nt, Homo sapiens
  misc_RNA (1)...(19): siRNA sense strand
augcagcaauugagauaaa

SEQ ID NO: 2521908 - RNA, 19 nt, Homo sapiens
  misc_RNA (1)...(19): siRNA sense strand
auaaauagagggaccaaua

SEQ ID NO: 2521909 - RNA, 19 nt, Homo sapiens
  misc_RNA (1)...(19): siRNA sense strand
uaucugaacuccaggaaau

SEQ ID NO: 2521910 - RNA, 19 nt, Homo sapiens
  misc_RNA (1)...(19): siRNA sense strand
guuugaagcaagagcagaa

SEQ ID NO: 2521911 - RNA, 19 nt, Homo sapiens
  misc_RNA (1)...(19): siRNA sense strand
acuuugugauggugaauaa

SEQ ID NO: 2521912 - RNA, 19 nt, Homo sapiens
  misc_RNA (1)...(19): siRNA sense strand
gggaagaaucucaguuaca

SEQ ID NO: 2521913 - RNA, 19 nt, Homo sapiens
  misc_RNA (1)...(19): siRNA sense strand
agaagaugguauugaacau

SEQ ID NO: 2521914 - RNA, 19 nt, Homo sapiens
  misc_RNA (1)...(19): siRNA sense strand
ggacagauggauuggacau

SEQ ID NO: 2521915 - RNA, 19 nt, Homo sapiens
  misc_RNA (1)...(19): siRNA sense strand
aguucuaguuggaggugaa

SEQ ID NO: 2521916 - RNA, 19 nt, Homo sapiens
  misc_RNA (1)...(19): siRNA sense strand
gaggauuagcuuacauaaa

SEQ ID NO: 2521917 - RNA, 19 nt, Homo sapiens
  misc_RNA (1)...(19): siRNA sense strand
cauaaaaggcucuggauuu

SEQ ID NO: 2521918 - RNA, 19 nt, Homo sapiens
  misc_RNA (1)...(19): siRNA sense strand
gcacaauaccagcugagaa

SEQ ID NO: 2521919 - RNA, 19 nt, Homo sapiens
  misc_RNA (1)...(19): siRNA sense strand
ccauugaauuggaauacua

SEQ ID NO: 2521920 - RNA, 19 nt, Homo sapiens
  misc_RNA (1)...(19): siRNA sense strand
gaacauggauuguagcuga

SEQ ID NO: 2521921 - RNA, 19 nt, Homo sapiens
  misc_RNA (1)...(19): siRNA sense strand
uggaaguaauauugcacua

SEQ ID NO: 2521922 - RNA, 19 nt, Homo sapiens
  misc_RNA (1)...(19): siRNA sense strand
gaauauucuuagagcacuu

SEQ ID NO: 2521923 - RNA, 19 nt, Homo sapiens
  misc_RNA (1)...(19): siRNA sense strand
cauucaagcuuauggacau

SEQ ID NO: 2521924 - RNA, 19 nt, Homo sapiens
  misc_RNA (1)...(19): siRNA sense strand
gaacaauaccaggguuaaa

SEQ ID NO: 2521925 - RNA, 19 nt, Homo sapiens
  misc_RNA (1)...(19): siRNA sense strand
acacagucaaggagagaau

SEQ ID NO: 2521926 - RNA, 19 nt, Homo sapiens
  misc_RNA (1)...(19): siRNA sense strand
uucuagaacuggaagauaa

SEQ ID NO: 2521927 - RNA, 19 nt, Homo sapiens
  misc_RNA (1)...(19): siRNA sense strand
gauuguucuuagaggaaau

SEQ ID NO: 2521928 - RNA, 19 nt, Homo sapiens
  misc_RNA (1)...(19): siRNA sense strand
cuauaaugggcaacgguua

SEQ ID NO: 2521929 - RNA, 19 nt, Homo sapiens
  misc_RNA (1)...(19): siRNA sense strand
gucaauuacuugugaugua

SEQ ID NO: 2521930 - RNA, 19 nt, Homo sapiens
  misc_RNA (1)...(19): siRNA sense strand
agucaaggagagaaugaaa

SEQ ID NO: 2521931 - RNA, 19 nt, Homo sapiens
  misc_RNA (1)...(19): siRNA sense strand
gcaggagggagaagagauu

SEQ ID NO: 2521932 - RNA, 19 nt, Homo sapiens
  misc_RNA (1)...(19): siRNA sense strand
gagcuggacuauugggaga

SEQ ID NO: 2521933 - RNA, 19 nt, Homo sapiens
  misc_RNA (1)...(19): siRNA sense strand
agggaagagaaaugaagaa

SEQ ID NO: 2521934 - RNA, 19 nt, Homo sapiens
  misc_RNA (1)...(19): siRNA sense strand
uuuauagagggaagagaaa

SEQ ID NO: 2521935 - RNA, 19 nt, Homo sapiens
  misc_RNA (1)...(19): siRNA sense strand
auuuauagagggaagagaa

SEQ ID NO: 2521936 - RNA, 19 nt, Homo sapiens
  misc_RNA (1)...(19): siRNA sense strand
cuauaacaaggcagggcaa

SEQ ID NO: 2521937 - RNA, 19 nt, Homo sapiens
  misc_RNA (1)...(19): siRNA sense strand
ggugauuuauagagggaag

SEQ ID NO: 2521938 - RNA, 19 nt, Homo sapiens
  misc_RNA (1)...(19): siRNA sense strand
augcauucuccaugauuaa

SEQ ID NO: 2521939 - RNA, 19 nt, Homo sapiens
  misc_RNA (1)...(19): siRNA sense strand
cagugacagaguugagauu

SEQ ID NO: 2521940 - RNA, 19 nt, Homo sapiens
  misc_RNA (1)...(19): siRNA sense strand
caucaauuacacagugaca

SEQ ID NO: 2521941 - RNA, 19 nt, Homo sapiens
  misc_RNA (1)...(19): siRNA sense strand
aaguaaugaugcuggaucu

SEQ ID NO: 2521942 - RNA, 19 nt, Homo sapiens
  misc_RNA (1)...(19): siRNA sense strand
agcaaaucaucuucagcaa

SEQ ID NO: 2521943 - RNA, 19 nt, Homo sapiens
  misc_RNA (1)...(19): siRNA sense strand
gggugaaauuauauaggcu

SEQ ID NO: 2521944 - RNA, 19 nt, Homo sapiens
  misc_RNA (1)...(19): siRNA sense strand
ccgaacuguaugaaaccaa

SEQ ID NO: 2521945 - RNA, 19 nt, Homo sapiens
  misc_RNA (1)...(19): siRNA sense strand
ccaaggcuguagaugggua

SEQ ID NO: 2521946 - RNA, 19 nt, Homo sapiens
  misc_RNA (1)...(19): siRNA sense strand
ccggaagagugacgaucca

SEQ ID NO: 2521947 - RNA, 19 nt, Homo sapiens
  misc_RNA (1)...(19): siRNA sense strand
gggcagagaagcaaggaac

SEQ ID NO: 2521948 - RNA, 19 nt, Homo sapiens
  misc_RNA (1)...(19): siRNA sense strand
ucucuguggagguggagua

SEQ ID NO: 2521949 - RNA, 19 nt, Homo sapiens
  misc_RNA (1)...(19): siRNA sense strand
gaacagacaugaugcgguc

SEQ ID NO: 2521950 - RNA, 19 nt, Homo sapiens
  misc_RNA (1)...(19): siRNA sense strand
cauaaaagagacuggaaaa

SEQ ID NO: 2521951 - RNA, 19 nt, Homo sapiens
  misc_RNA (1)...(19): siRNA sense strand
cggaaagguuuaaagggau

SEQ ID NO: 2521952 - RNA, 19 nt, Homo sapiens
  misc_RNA (1)...(19): siRNA sense strand
acggaaagguuuaaaggga

SEQ ID NO: 2521953 - RNA, 19 nt, Homo sapiens
  misc_RNA (1)...(19): siRNA sense strand
ccggauugcaauaaugaaa

SEQ ID NO: 2521954 - RNA, 19 nt, Homo sapiens
  misc_RNA (1)...(19): siRNA sense strand
ccauaaaagagacuggaaa

SEQ ID NO: 2521955 - RNA, 19 nt, Homo sapiens
  misc_RNA (1)...(19): siRNA sense strand
acacuaugggcuauggaaa

SEQ ID NO: 2521956 - RNA, 19 nt, Homo sapiens
  misc_RNA (1)...(19): siRNA sense strand
gggauggacucuagaaaug

SEQ ID NO: 2521957 - RNA, 19 nt, Homo sapiens
  misc_RNA (1)...(19): siRNA sense strand
guuuagauuuggcuggcaa

SEQ ID NO: 2521958 - RNA, 19 nt, Homo sapiens
  misc_RNA (1)...(19): siRNA sense strand
cauucaaagacaugcagaa

SEQ ID NO: 2521959 - RNA, 19 nt, Homo sapiens
  misc_RNA (1)...(19): siRNA sense strand
ugcauuucuuugaggauua

SEQ ID NO: 2521960 - RNA, 19 nt, Homo sapiens
  misc_RNA (1)...(19): siRNA sense strand
acacagacucaggaagaaa

SEQ ID NO: 2521961 - RNA, 19 nt, Homo sapiens
  misc_RNA (1)...(19): siRNA sense strand
ggauagagacuuaccagga

SEQ ID NO: 2521962 - RNA, 19 nt, Homo sapiens
  misc_RNA (1)...(19): siRNA sense strand
ugaucaaaugcucaagaaa

SEQ ID NO: 2521963 - RNA, 19 nt, Homo sapiens
  misc_RNA (1)...(19): siRNA sense strand
auucaaagacaugcagaaa

SEQ ID NO: 2521964 - RNA, 19 nt, Homo sapiens
  misc_RNA (1)...(19): siRNA sense strand
gcagcaaauauaaagucua

SEQ ID NO: 2521965 - RNA, 19 nt, Homo sapiens
  misc_RNA (1)...(19): siRNA sense strand
uuacacagacucaggaaga

SEQ ID NO: 2521966 - RNA, 19 nt, Homo sapiens
  misc_RNA (1)...(19): siRNA sense strand
guuuaaagggauuucaaca

SEQ ID NO: 2521967 - RNA, 19 nt, Homo sapiens
  misc_RNA (1)...(19): siRNA sense strand
cuggaauguuugccaagaa

SEQ ID NO: 2521968 - RNA, 19 nt, Homo sapiens
  misc_RNA (1)...(19): siRNA sense strand
ggaaaacacaggcagcaaa

SEQ ID NO: 2521969 - RNA, 19 nt, Homo sapiens
  misc_RNA (1)...(19): siRNA sense strand
aauaaaagggauagagacu

SEQ ID NO: 2521970 - RNA, 19 nt, Homo sapiens
  misc_RNA (1)...(19): siRNA sense strand
gugcugauauugaucgaga

SEQ ID NO: 2521971 - RNA, 19 nt, Homo sapiens
  misc_RNA (1)...(19): siRNA sense strand
ucuagagacuucagcccua

SEQ ID NO: 2521972 - RNA, 19 nt, Homo sapiens
  misc_RNA (1)...(19): siRNA sense strand
aggcagugguuccagaaaa

SEQ ID NO: 2521973 - RNA, 19 nt, Homo sapiens
  misc_RNA (1)...(19): siRNA sense strand
cacuaugggcuauggaaaa

SEQ ID NO: 2521974 - RNA, 19 nt, Homo sapiens
  misc_RNA (1)...(19): siRNA sense strand
ugggaaugaaucugaccaa

SEQ ID NO: 2521975 - RNA, 19 nt, Homo sapiens
  misc_RNA (1)...(19): siRNA sense strand
gcaugaugucuauaaugaa

SEQ ID NO: 2521976 - RNA, 19 nt, Homo sapiens
  misc_RNA (1)...(19): siRNA sense strand
gaucgagaugggaagguga

SEQ ID NO: 2521977 - RNA, 19 nt, Homo sapiens
  misc_RNA (1)...(19): siRNA sense strand
gccaauuacaacacaaaga

SEQ ID NO: 2521978 - RNA, 19 nt, Homo sapiens
  misc_RNA (1)...(19): siRNA sense strand
cuaucaaggcuucuagaga

SEQ ID NO: 2521979 - RNA, 19 nt, Homo sapiens
  misc_RNA (1)...(19): siRNA sense strand
aaccaaaacuuaagcugaa

SEQ ID NO: 2521980 - RNA, 19 nt, Homo sapiens
  misc_RNA (1)...(19): siRNA sense strand
uggaauguuugccaagaau

SEQ ID NO: 2521981 - RNA, 19 nt, Homo sapiens
  misc_RNA (1)...(19): siRNA sense strand
auaugaugccuaugugaau

SEQ ID NO: 2521982 - RNA, 19 nt, Homo sapiens
  misc_RNA (1)...(19): siRNA sense strand
caucuucaccauugaucaa

SEQ ID NO: 2521983 - RNA, 19 nt, Homo sapiens
  misc_RNA (1)...(19): siRNA sense strand
gcaagaugaucguggggaa

SEQ ID NO: 2521984 - RNA, 19 nt, Homo sapiens
  misc_RNA (1)...(19): siRNA sense strand
agaagagaucaaagagauu

SEQ ID NO: 2521985 - RNA, 19 nt, Homo sapiens
  misc_RNA (1)...(19): siRNA sense strand
cacuagaagaagagaucaa

SEQ ID NO: 2521986 - RNA, 19 nt, Homo sapiens
  misc_RNA (1)...(19): siRNA sense strand
gggagaaggugaaggacac

SEQ ID NO: 2521987 - RNA, 19 nt, Homo sapiens
  misc_RNA (1)...(19): siRNA sense strand
cugaagagggagaagguga

SEQ ID NO: 2521988 - RNA, 19 nt, Homo sapiens
  misc_RNA (1)...(19): siRNA sense strand
ugaacaugugcaagauaaa

SEQ ID NO: 2521989 - RNA, 19 nt, Homo sapiens
  misc_RNA (1)...(19): siRNA sense strand
agggagaaggugaaggaca

SEQ ID NO: 2521990 - RNA, 19 nt, Homo sapiens
  misc_RNA (1)...(19): siRNA sense strand
uugccaaaugggagguuua

SEQ ID NO: 2521991 - RNA, 19 nt, Homo sapiens
  misc_RNA (1)...(19): siRNA sense strand
gggaaaacagaccaagaaa

SEQ ID NO: 2521992 - RNA, 19 nt, Homo sapiens
  misc_RNA (1)...(19): siRNA sense strand
cguucaaggaggagcagca

SEQ ID NO: 2521993 - RNA, 19 nt, Homo sapiens
  misc_RNA (1)...(19): siRNA sense strand
cagaagaacuggaguccug

SEQ ID NO: 2521994 - RNA, 19 nt, Homo sapiens
  misc_RNA (1)...(19): siRNA sense strand
ucccaugacuagagaggca

SEQ ID NO: 2521995 - RNA, 19 nt, Homo sapiens
  misc_RNA (1)...(19): siRNA sense strand
gauaaaagcaagcugccua

SEQ ID NO: 2521996 - RNA, 19 nt, Homo sapiens
  misc_RNA (1)...(19): siRNA sense strand
caguuugcgaauaggguga

SEQ ID NO: 2521997 - RNA, 19 nt, Homo sapiens
  misc_RNA (1)...(19): siRNA sense strand
gaucaaagagauucgucga

SEQ ID NO: 2521998 - RNA, 19 nt, Homo sapiens
  misc_RNA (1)...(19): siRNA sense strand
augaggugacaaagagauu

SEQ ID NO: 2521999 - RNA, 19 nt, Homo sapiens
  misc_RNA (1)...(19): siRNA sense strand
ggugugauucagagagcca

SEQ ID NO: 2522000 - RNA, 19 nt, Homo sapiens
  misc_RNA (1)...(19): siRNA sense strand
gagcgaggagccaaggaga

SEQ ID NO: 2522001 - RNA, 19 nt, Homo sapiens
  misc_RNA (1)...(19): siRNA sense strand
gagcaaacauccaugacca

SEQ ID NO: 2522002 - RNA, 19 nt, Homo sapiens
  misc_RNA (1)...(19): siRNA sense strand
ggaccaaagacgagggcac

SEQ ID NO: 2522003 - RNA, 19 nt, Homo sapiens
  misc_RNA (1)...(19): siRNA sense strand
ccaaugaacuuccggcaga

SEQ ID NO: 2522004 - RNA, 19 nt, Homo sapiens
  misc_RNA (1)...(19): siRNA sense strand
acauagacugugugaggga

SEQ ID NO: 2522005 - RNA, 19 nt, Homo sapiens
  misc_RNA (1)...(19): siRNA sense strand
uauugaaagcagccaacaa

SEQ ID NO: 2522006 - RNA, 19 nt, Homo sapiens
  misc_RNA (1)...(19): siRNA sense strand
ugggcagccaggagaggaa

SEQ ID NO: 2522007 - RNA, 19 nt, Homo sapiens
  misc_RNA (1)...(19): siRNA sense strand
aaguaaagaaggucccaga

SEQ ID NO: 2522008 - RNA, 19 nt, Homo sapiens
  misc_RNA (1)...(19): siRNA sense strand
gacccaucccugagaaaca

SEQ ID NO: 2522009 - RNA, 19 nt, Homo sapiens
  misc_RNA (1)...(19): siRNA sense strand
gcuaugaggugguggugga

SEQ ID NO: 2522010 - RNA, 19 nt, Homo sapiens
  misc_RNA (1)...(19): siRNA sense strand
ugauaaagcuggaacucga

SEQ ID NO: 2522011 - RNA, 19 nt, Homo sapiens
  misc_RNA (1)...(19): siRNA sense strand
cgcaauaaaagaagcaaaa

SEQ ID NO: 2522012 - RNA, 19 nt, Homo sapiens
  misc_RNA (1)...(19): siRNA sense strand
ccgcaauaaaagaagcaaa

SEQ ID NO: 2522013 - RNA, 19 nt, Homo sapiens
  misc_RNA (1)...(19): siRNA sense strand
gggaaagaaagcaggaccu

SEQ ID NO: 2522014 - RNA, 19 nt, Homo sapiens
  misc_RNA (1)...(19): siRNA sense strand
augagguggugguggauga

SEQ ID NO: 2522015 - RNA, 19 nt, Homo sapiens
  misc_RNA (1)...(19): siRNA sense strand
aagcaaugaaggagcagau

SEQ ID NO: 2522016 - RNA, 19 nt, Homo sapiens
  misc_RNA (1)...(19): siRNA sense strand
agguggugguggaugagaa

SEQ ID NO: 2522017 - RNA, 19 nt, Homo sapiens
  misc_RNA (1)...(19): siRNA sense strand
cuauagucagguagaagua

SEQ ID NO: 2522018 - RNA, 19 nt, Homo sapiens
  misc_RNA (1)...(19): siRNA sense strand
agccauacucugaagaaga

SEQ ID NO: 2522019 - RNA, 19 nt, Homo sapiens
  misc_RNA (1)...(19): siRNA sense strand
ucuacagggccaaggguca

SEQ ID NO: 2522020 - RNA, 19 nt, Homo sapiens
  misc_RNA (1)...(19): siRNA sense strand
aagcaaaagcaaugaagga

SEQ ID NO: 2522021 - RNA, 19 nt, Homo sapiens
  misc_RNA (1)...(19): siRNA sense strand
gcguguucgccgcaauaaa

SEQ ID NO: 2522022 - RNA, 19 nt, Homo sapiens
  misc_RNA (1)...(19): siRNA sense strand
cgggcaagaccaacuacaa

SEQ ID NO: 2522023 - RNA, 19 nt, Homo sapiens
  misc_RNA (1)...(19): siRNA sense strand
agcagauggcccaguuaaa

SEQ ID NO: 2522024 - RNA, 19 nt, Homo sapiens
  misc_RNA (1)...(19): siRNA sense strand
gcuaguguucauugagaca

SEQ ID NO: 2522025 - RNA, 19 nt, Homo sapiens
  misc_RNA (1)...(19): siRNA sense strand
ccucaacaucuuagagaag

SEQ ID NO: 2522026 - RNA, 19 nt, Homo sapiens
  misc_RNA (1)...(19): siRNA sense strand
cuaugaagcaacagccuca

SEQ ID NO: 2522027 - RNA, 19 nt, Homo sapiens
  misc_RNA (1)...(19): siRNA sense strand
guucauugagacagggacu

SEQ ID NO: 2522028 - RNA, 19 nt, Homo sapiens
  misc_RNA (1)...(19): siRNA sense strand
gugaagaaucaauggcuaa

SEQ ID NO: 2522029 - RNA, 19 nt, Homo sapiens
  misc_RNA (1)...(19): siRNA sense strand
ggaaagaaugagauggaga

SEQ ID NO: 2522030 - RNA, 19 nt, Homo sapiens
  misc_RNA (1)...(19): siRNA sense strand
auguaugacuggagaauuu

SEQ ID NO: 2522031 - RNA, 19 nt, Homo sapiens
  misc_RNA (1)...(19): siRNA sense strand
gcgaaagagucaugaaucu

SEQ ID NO: 2522032 - RNA, 19 nt, Homo sapiens
  misc_RNA (1)...(19): siRNA sense strand
uggaagaaggaaagaagaa

SEQ ID NO: 2522033 - RNA, 19 nt, Homo sapiens
  misc_RNA (1)...(19): siRNA sense strand
gauuaaagaaguuggagau

SEQ ID NO: 2522034 - RNA, 19 nt, Homo sapiens
  misc_RNA (1)...(19): siRNA sense strand
cgaaauaccuccagcagca

SEQ ID NO: 2522035 - RNA, 19 nt, Homo sapiens
  misc_RNA (1)...(19): siRNA sense strand
caguuauggaagaaggaaa

SEQ ID NO: 2522036 - RNA, 19 nt, Homo sapiens
  misc_RNA (1)...(19): siRNA sense strand
gguuuaacacguuggcaua

SEQ ID NO: 2522037 - RNA, 19 nt, Homo sapiens
  misc_RNA (1)...(19): siRNA sense strand
gauuuuaacuggaggagua

SEQ ID NO: 2522038 - RNA, 19 nt, Homo sapiens
  misc_RNA (1)...(19): siRNA sense strand
uggcaauagggcagauaaa

SEQ ID NO: 2522039 - RNA, 19 nt, Homo sapiens
  misc_RNA (1)...(19): siRNA sense strand
gaaaagaaccaaagaugaa

SEQ ID NO: 2522040 - RNA, 19 nt, Homo sapiens
  misc_RNA (1)...(19): siRNA sense strand
ggugaagaaucaauggcua

SEQ ID NO: 2522041 - RNA, 19 nt, Homo sapiens
  misc_RNA (1)...(19): siRNA sense strand
guuuaaagaaguacggauu

SEQ ID NO: 2522042 - RNA, 19 nt, Homo sapiens
  misc_RNA (1)...(19): siRNA sense strand
aggcauaaccauuucauua

SEQ ID NO: 2522043 - RNA, 19 nt, Homo sapiens
  misc_RNA (1)...(19): siRNA sense strand
ggaagaaggaaagaagaaa

SEQ ID NO: 2522044 - RNA, 19 nt, Homo sapiens
  misc_RNA (1)...(19): siRNA sense strand
ggaaaguaaaccagaagau

SEQ ID NO: 2522045 - RNA, 19 nt, Homo sapiens
  misc_RNA (1)...(19): siRNA sense strand
ucucauuccuacagagcua

SEQ ID NO: 2522046 - RNA, 19 nt, Homo sapiens
  misc_RNA (1)...(19): siRNA sense strand
cuucauuggauuuggacua

SEQ ID NO: 2522047 - RNA, 19 nt, Homo sapiens
  misc_RNA (1)...(19): siRNA sense strand
aagaauggucuguggaaaa

SEQ ID NO: 2522048 - RNA, 19 nt, Homo sapiens
  misc_RNA (1)...(19): siRNA sense strand
gaagaaggaaagaagaaaa

SEQ ID NO: 2522049 - RNA, 19 nt, Homo sapiens
  misc_RNA (1)...(19): siRNA sense strand
ggauaguaaugaaggaaag

SEQ ID NO: 2522050 - RNA, 19 nt, Homo sapiens
  misc_RNA (1)...(19): siRNA sense strand
uaauagucuugguggaaau

SEQ ID NO: 2522051 - RNA, 19 nt, Homo sapiens
  misc_RNA (1)...(19): siRNA sense strand
guaaugaaggaaagaauga

SEQ ID NO: 2522052 - RNA, 19 nt, Homo sapiens
  misc_RNA (1)...(19): siRNA sense strand
agaaaugccaucugaagaa

SEQ ID NO: 2522053 - RNA, 19 nt, Homo sapiens
  misc_RNA (1)...(19): siRNA sense strand
agaaauaacuugaugaggu

SEQ ID NO: 2522054 - RNA, 19 nt, Homo sapiens
  misc_RNA (1)...(19): siRNA sense strand
ggaaagaagaaaagaacca

SEQ ID NO: 2522055 - RNA, 19 nt, Homo sapiens
  misc_RNA (1)...(19): siRNA sense strand
aggcugaauaugaggaaaa

SEQ ID NO: 2522056 - RNA, 19 nt, Homo sapiens
  misc_RNA (1)...(19): siRNA sense strand
gagcaaaacaucacuguaa

SEQ ID NO: 2522057 - RNA, 19 nt, Homo sapiens
  misc_RNA (1)...(19): siRNA sense strand
ccauauugggucagaugaa

SEQ ID NO: 2522058 - RNA, 19 nt, Homo sapiens
  misc_RNA (1)...(19): siRNA sense strand
cugcaguaccccagagaaa

SEQ ID NO: 2522059 - RNA, 19 nt, Homo sapiens
  misc_RNA (1)...(19): siRNA sense strand
agaccaucaaacagagaaa

SEQ ID NO: 2522060 - RNA, 19 nt, Homo sapiens
  misc_RNA (1)...(19): siRNA sense strand
gcuaaguaugugaggcuau

SEQ ID NO: 2522061 - RNA, 19 nt, Homo sapiens
  misc_RNA (1)...(19): siRNA sense strand
ggaaauaaucggaggucug

SEQ ID NO: 2522062 - RNA, 19 nt, Homo sapiens
  misc_RNA (1)...(19): siRNA sense strand
gcaagguguuggugaaaau

SEQ ID NO: 2522063 - RNA, 19 nt, Homo sapiens
  misc_RNA (1)...(19): siRNA sense strand
ucugauauguggaugggaa

SEQ ID NO: 2522064 - RNA, 19 nt, Homo sapiens
  misc_RNA (1)...(19): siRNA sense strand
caccaaagaaucagaauca

SEQ ID NO: 2522065 - RNA, 19 nt, Homo sapiens
  misc_RNA (1)...(19): siRNA sense strand
ugaaauacucagaugugaa

SEQ ID NO: 2522066 - RNA, 19 nt, Homo sapiens
  misc_RNA (1)...(19): siRNA sense strand
ugagaaaguccgugagauc

SEQ ID NO: 2522067 - RNA, 19 nt, Homo sapiens
  misc_RNA (1)...(19): siRNA sense strand
agaugugcauucagauuaa

SEQ ID NO: 2522068 - RNA, 19 nt, Homo sapiens
  misc_RNA (1)...(19): siRNA sense strand
agauuaaagaaguuggaga

SEQ ID NO: 2522069 - RNA, 19 nt, Homo sapiens
  misc_RNA (1)...(19): siRNA sense strand
gagacgucaaacagggaaa

SEQ ID NO: 2522070 - RNA, 19 nt, Homo sapiens
  misc_RNA (1)...(19): siRNA sense strand
aagcauuaguugccuguaa

SEQ ID NO: 2522071 - RNA, 19 nt, Homo sapiens
  misc_RNA (1)...(19): siRNA sense strand
gaaagaaugagauggagau

SEQ ID NO: 2522072 - RNA, 19 nt, Homo sapiens
  misc_RNA (1)...(19): siRNA sense strand
aacagaagaaggagggaau

SEQ ID NO: 2522073 - RNA, 19 nt, Homo sapiens
  misc_RNA (1)...(19): siRNA sense strand
acaaagauccccaguguaa

SEQ ID NO: 2522074 - RNA, 19 nt, Homo sapiens
  misc_RNA (1)...(19): siRNA sense strand
gaucugaagaggaaugauu

SEQ ID NO: 2522075 - RNA, 19 nt, Homo sapiens
  misc_RNA (1)...(19): siRNA sense strand
cagaagaacuaaaacagua

SEQ ID NO: 2522076 - RNA, 19 nt, Homo sapiens
  misc_RNA (1)...(19): siRNA sense strand
acuuugaccaagagggaau

SEQ ID NO: 2522077 - RNA, 19 nt, Homo sapiens
  misc_RNA (1)...(19): siRNA sense strand
gaaauugaugugugugcaa

SEQ ID NO: 2522078 - RNA, 19 nt, Homo sapiens
  misc_RNA (1)...(19): siRNA sense strand
cucuaaagcuacagaagga

SEQ ID NO: 2522079 - RNA, 19 nt, Homo sapiens
  misc_RNA (1)...(19): siRNA sense strand
gcauggauuuacagagguu

SEQ ID NO: 2522080 - RNA, 19 nt, Homo sapiens
  misc_RNA (1)...(19): siRNA sense strand
auucagcuguggaaagaaa

SEQ ID NO: 2522081 - RNA, 19 nt, Homo sapiens
  misc_RNA (1)...(19): siRNA sense strand
uggauaguaaugaaggaaa

SEQ ID NO: 2522082 - RNA, 19 nt, Homo sapiens
  misc_RNA (1)...(19): siRNA sense strand
aaccaaagaucaagaaacu

SEQ ID NO: 2522083 - RNA, 19 nt, Homo sapiens
  misc_RNA (1)...(19): siRNA sense strand
cagcaaaucuaggagaaga

SEQ ID NO: 2522084 - RNA, 19 nt, Homo sapiens
  misc_RNA (1)...(19): siRNA sense strand
cugcuuaaagaauggcaaa

SEQ ID NO: 2522085 - RNA, 19 nt, Homo sapiens
  misc_RNA (1)...(19): siRNA sense strand
guaagagaagaaagaaaga

SEQ ID NO: 2522086 - RNA, 19 nt, Homo sapiens
  misc_RNA (1)...(19): siRNA sense strand
cuuaacagaagaagaucaa

SEQ ID NO: 2522087 - RNA, 19 nt, Homo sapiens
  misc_RNA (1)...(19): siRNA sense strand
augucaaauuugucagcaa

SEQ ID NO: 2522088 - RNA, 19 nt, Homo sapiens
  misc_RNA (1)...(19): siRNA sense strand
gagaaaugccaucugaaga

SEQ ID NO: 2522089 - RNA, 19 nt, Homo sapiens
  misc_RNA (1)...(19): siRNA sense strand
ccguugaauuauuagaaca

SEQ ID NO: 2522090 - RNA, 19 nt, Homo sapiens
  misc_RNA (1)...(19): siRNA sense strand
cagaaagcgucggaagcua

SEQ ID NO: 2522091 - RNA, 19 nt, Homo sapiens
  misc_RNA (1)...(19): siRNA sense strand
auguaaagauuguggcaaa

SEQ ID NO: 2522092 - RNA, 19 nt, Homo sapiens
  misc_RNA (1)...(19): siRNA sense strand
aagucauacuggagagaaa

SEQ ID NO: 2522093 - RNA, 19 nt, Homo sapiens
  misc_RNA (1)...(19): siRNA sense strand
augugaagaaugugggaaa

SEQ ID NO: 2522094 - RNA, 19 nt, Homo sapiens
  misc_RNA (1)...(19): siRNA sense strand
augugaagaaugugggaaa

SEQ ID NO: 2522095 - RNA, 19 nt, Homo sapiens
  misc_RNA (1)...(19): siRNA sense strand
aagugauguuagagaacua

SEQ ID NO: 2522096 - RNA, 19 nt, Homo sapiens
  misc_RNA (1)...(19): siRNA sense strand
aacucaugcuggagagaaa

SEQ ID NO: 2522097 - RNA, 19 nt, Homo sapiens
  misc_RNA (1)...(19): siRNA sense strand
aacucauacuggagagaaa

SEQ ID NO: 2522098 - RNA, 19 nt, Homo sapiens
  misc_RNA (1)...(19): siRNA sense strand
aacucauacuggagagaaa

SEQ ID NO: 2522099 - RNA, 19 nt, Homo sapiens
  misc_RNA (1)...(19): siRNA sense strand
augugaagaauguggcaaa

SEQ ID NO: 2522100 - RNA, 19 nt, Homo sapiens
  misc_RNA (1)...(19): siRNA sense strand
augugaagaauguggcaaa

SEQ ID NO: 2522101 - RNA, 19 nt, Homo sapiens
  misc_RNA (1)...(19): siRNA sense strand
augugaagaauguggcaaa

SEQ ID NO: 2522102 - RNA, 19 nt, Homo sapiens
  misc_RNA (1)...(19): siRNA sense strand
cuuacuacacacaggauaa

SEQ ID NO: 2522103 - RNA, 19 nt, Homo sapiens
  misc_RNA (1)...(19): siRNA sense strand
ccuggaauauaaagagaca

SEQ ID NO: 2522104 - RNA, 19 nt, Homo sapiens
  misc_RNA (1)...(19): siRNA sense strand
augggaagaaugugguaaa

SEQ ID NO: 2522105 - RNA, 19 nt, Homo sapiens
  misc_RNA (1)...(19): siRNA sense strand
auguacagaauguggcaaa

SEQ ID NO: 2522106 - RNA, 19 nt, Homo sapiens
  misc_RNA (1)...(19): siRNA sense strand
acaccuuacuacacauaaa

SEQ ID NO: 2522107 - RNA, 19 nt, Homo sapiens
  misc_RNA (1)...(19): siRNA sense strand
ccauugacguuuagggaug

SEQ ID NO: 2522108 - RNA, 19 nt, Homo sapiens
  misc_RNA (1)...(19): siRNA sense strand
aguguaaagugcacaaaga

SEQ ID NO: 2522109 - RNA, 19 nt, Homo sapiens
  misc_RNA (1)...(19): siRNA sense strand
gaagaaugugggaaagcau

SEQ ID NO: 2522110 - RNA, 19 nt, Homo sapiens
  misc_RNA (1)...(19): siRNA sense strand
aggaaagugauguuagaga

SEQ ID NO: 2522111 - RNA, 19 nt, Homo sapiens
  misc_RNA (1)...(19): siRNA sense strand
gaagaaugugggaaagcuu

SEQ ID NO: 2522112 - RNA, 19 nt, Homo sapiens
  misc_RNA (1)...(19): siRNA sense strand
augugaagaaugcggcaaa

SEQ ID NO: 2522113 - RNA, 19 nt, Homo sapiens
  misc_RNA (1)...(19): siRNA sense strand
guguaaagugcacaaagaa

SEQ ID NO: 2522114 - RNA, 19 nt, Homo sapiens
  misc_RNA (1)...(19): siRNA sense strand
ugauaacuacccagagcaa

SEQ ID NO: 2522115 - RNA, 19 nt, Homo sapiens
  misc_RNA (1)...(19): siRNA sense strand
cuuacuacacacaggagaa

SEQ ID NO: 2522116 - RNA, 19 nt, Homo sapiens
  misc_RNA (1)...(19): siRNA sense strand
gacaugagaugguagccaa

SEQ ID NO: 2522117 - RNA, 19 nt, Homo sapiens
  misc_RNA (1)...(19): siRNA sense strand
augugaggaauguggcaaa

SEQ ID NO: 2522118 - RNA, 19 nt, Homo sapiens
  misc_RNA (1)...(19): siRNA sense strand
gaaaauauggacaugacaa

SEQ ID NO: 2522119 - RNA, 19 nt, Homo sapiens
  misc_RNA (1)...(19): siRNA sense strand
auaacuacccagagcaaca

SEQ ID NO: 2522120 - RNA, 19 nt, Homo sapiens
  misc_RNA (1)...(19): siRNA sense strand
acaugagaugguagccaaa

SEQ ID NO: 2522121 - RNA, 19 nt, Homo sapiens
  misc_RNA (1)...(19): siRNA sense strand
aaccaguguuugauaacua

SEQ ID NO: 2522122 - RNA, 19 nt, Homo sapiens
  misc_RNA (1)...(19): siRNA sense strand
ggauaauucauacuggaga

SEQ ID NO: 2522123 - RNA, 19 nt, Homo sapiens
  misc_RNA (1)...(19): siRNA sense strand
ccuacaaaugugaggaaug

SEQ ID NO: 2522124 - RNA, 19 nt, Homo sapiens
  misc_RNA (1)...(19): siRNA sense strand
gguuuguauaggaaaguga

SEQ ID NO: 2522125 - RNA, 19 nt, Homo sapiens
  misc_RNA (1)...(19): siRNA sense strand
gggaagaaugugguaaaga

SEQ ID NO: 2522126 - RNA, 19 nt, Homo sapiens
  misc_RNA (1)...(19): siRNA sense strand
uaagauaacucaugcugga

SEQ ID NO: 2522127 - RNA, 19 nt, Homo sapiens
  misc_RNA (1)...(19): siRNA sense strand
ugcacaaagaacaugauaa

SEQ ID NO: 2522128 - RNA, 19 nt, Homo sapiens
  misc_RNA (1)...(19): siRNA sense strand
cguuuagggauguggccau

SEQ ID NO: 2522129 - RNA, 19 nt, Homo sapiens
  misc_RNA (1)...(19): siRNA sense strand
guuuagggauguggccaua

SEQ ID NO: 2522130 - RNA, 19 nt, Homo sapiens
  misc_RNA (1)...(19): siRNA sense strand
gaagaaugugguaaagacu

SEQ ID NO: 2522131 - RNA, 19 nt, Homo sapiens
  misc_RNA (1)...(19): siRNA sense strand
gagaaguagaagacuaaaa

SEQ ID NO: 2522132 - RNA, 19 nt, Homo sapiens
  misc_RNA (1)...(19): siRNA sense strand
cagagaugccacuggucaa

SEQ ID NO: 2522133 - RNA, 19 nt, Homo sapiens
  misc_RNA (1)...(19): siRNA sense strand
agaagagagacaaggggaa

SEQ ID NO: 2522134 - RNA, 19 nt, Homo sapiens
  misc_RNA (1)...(19): siRNA sense strand
cauacagagaaguagaaga

SEQ ID NO: 2522135 - RNA, 19 nt, Homo sapiens
  misc_RNA (1)...(19): siRNA sense strand
ccguaacugaagauggcua

SEQ ID NO: 2522136 - RNA, 19 nt, Homo sapiens
  misc_RNA (1)...(19): siRNA sense strand
uggucaaguccuuagauau

SEQ ID NO: 2522137 - RNA, 19 nt, Homo sapiens
  misc_RNA (1)...(19): siRNA sense strand
gcuauauucauuacgguga

SEQ ID NO: 2522138 - RNA, 19 nt, Homo sapiens
  misc_RNA (1)...(19): siRNA sense strand
ggcaagaacuucaggcaca

SEQ ID NO: 2522139 - RNA, 19 nt, Homo sapiens
  misc_RNA (1)...(19): siRNA sense strand
gcccagaagaggaaagcaa

SEQ ID NO: 2522140 - RNA, 19 nt, Homo sapiens
  misc_RNA (1)...(19): siRNA sense strand
acgugauguuggagaacua

SEQ ID NO: 2522141 - RNA, 19 nt, Homo sapiens
  misc_RNA (1)...(19): siRNA sense strand
aaauacagauggaagggaa

SEQ ID NO: 2522142 - RNA, 19 nt, Homo sapiens
  misc_RNA (1)...(19): siRNA sense strand
aauucauacuggagagaga

SEQ ID NO: 2522143 - RNA, 19 nt, Homo sapiens
  misc_RNA (1)...(19): siRNA sense strand
ccacaagaagagaaagcau

SEQ ID NO: 2522144 - RNA, 19 nt, Homo sapiens
  misc_RNA (1)...(19): siRNA sense strand
ucucaggaggaguggaaau

SEQ ID NO: 2522145 - RNA, 19 nt, Homo sapiens
  misc_RNA (1)...(19): siRNA sense strand
auguaacgaauguggcaaa

SEQ ID NO: 2522146 - RNA, 19 nt, Homo sapiens
  misc_RNA (1)...(19): siRNA sense strand
ggagagaauucacugcgua

SEQ ID NO: 2522147 - RNA, 19 nt, Homo sapiens
  misc_RNA (1)...(19): siRNA sense strand
aaagcauacauuagaggaa

SEQ ID NO: 2522148 - RNA, 19 nt, Homo sapiens
  misc_RNA (1)...(19): siRNA sense strand
auucaaaccuugcacgaca

SEQ ID NO: 2522149 - RNA, 19 nt, Homo sapiens
  misc_RNA (1)...(19): siRNA sense strand
aagcaaaggagucagggau

SEQ ID NO: 2522150 - RNA, 19 nt, Homo sapiens
  misc_RNA (1)...(19): siRNA sense strand
gaagaagcccagaagagga

SEQ ID NO: 2522151 - RNA, 19 nt, Homo sapiens
  misc_RNA (1)...(19): siRNA sense strand
aaauguaacgaauguggaa

SEQ ID NO: 2522152 - RNA, 19 nt, Homo sapiens
  misc_RNA (1)...(19): siRNA sense strand
uaacgaauguggaagagca

SEQ ID NO: 2522153 - RNA, 19 nt, Homo sapiens
  misc_RNA (1)...(19): siRNA sense strand
aagaagcccagaagaggaa

SEQ ID NO: 2522154 - RNA, 19 nt, Homo sapiens
  misc_RNA (1)...(19): siRNA sense strand
acucccacaagaagagaaa

SEQ ID NO: 2522155 - RNA, 19 nt, Homo sapiens
  misc_RNA (1)...(19): siRNA sense strand
guggaagagcauuucacaa

SEQ ID NO: 2522156 - RNA, 19 nt, Homo sapiens
  misc_RNA (1)...(19): siRNA sense strand
aauacagauggaagggaau

SEQ ID NO: 2522157 - RNA, 19 nt, Homo sapiens
  misc_RNA (1)...(19): siRNA sense strand
aauucauacuggagagaag

SEQ ID NO: 2522158 - RNA, 19 nt, Homo sapiens
  misc_RNA (1)...(19): siRNA sense strand
auguaacgaauguggaaga

SEQ ID NO: 2522159 - RNA, 19 nt, Homo sapiens
  misc_RNA (1)...(19): siRNA sense strand
cccagaagaggaaagcaaa

SEQ ID NO: 2522160 - RNA, 19 nt, Homo sapiens
  misc_RNA (1)...(19): siRNA sense strand
auucacaccuuguagaaca

SEQ ID NO: 2522161 - RNA, 19 nt, Homo sapiens
  misc_RNA (1)...(19): siRNA sense strand
uguaaugaguguggcaaga

SEQ ID NO: 2522162 - RNA, 19 nt, Homo sapiens
  misc_RNA (1)...(19): siRNA sense strand
gaagcaaugcagaaaacaa

SEQ ID NO: 2522163 - RNA, 19 nt, Homo sapiens
  misc_RNA (1)...(19): siRNA sense strand
agcauacauuagaggaaaa

SEQ ID NO: 2522164 - RNA, 19 nt, Homo sapiens
  misc_RNA (1)...(19): siRNA sense strand
uuguagaacauuggagaau

SEQ ID NO: 2522165 - RNA, 19 nt, Homo sapiens
  misc_RNA (1)...(19): siRNA sense strand
acaagguguuuaaucgcaa

SEQ ID NO: 2522166 - RNA, 19 nt, Homo sapiens
  misc_RNA (1)...(19): siRNA sense strand
uguuggagaacuacaggaa

SEQ ID NO: 2522167 - RNA, 19 nt, Homo sapiens
  misc_RNA (1)...(19): siRNA sense strand
cuuguagaacauuggagaa

SEQ ID NO: 2522168 - RNA, 19 nt, Homo sapiens
  misc_RNA (1)...(19): siRNA sense strand
gugaaugugacaagguguu

SEQ ID NO: 2522169 - RNA, 19 nt, Homo sapiens
  misc_RNA (1)...(19): siRNA sense strand
guguaaugcauguggcaag

SEQ ID NO: 2522170 - RNA, 19 nt, Homo sapiens
  misc_RNA (1)...(19): siRNA sense strand
ccuuguagaacauuggaga

SEQ ID NO: 2522171 - RNA, 19 nt, Homo sapiens
  misc_RNA (1)...(19): siRNA sense strand
ccuugauucugcaaaguca

SEQ ID NO: 2522172 - RNA, 19 nt, Homo sapiens
  misc_RNA (1)...(19): siRNA sense strand
uggaagggaaugugucaga

SEQ ID NO: 2522173 - RNA, 19 nt, Homo sapiens
  misc_RNA (1)...(19): siRNA sense strand
uggcaaggucuucaaucaa

SEQ ID NO: 2522174 - RNA, 19 nt, Homo sapiens
  misc_RNA (1)...(19): siRNA sense strand
caacaaacuucaagggcaa

SEQ ID NO: 2522175 - RNA, 19 nt, Homo sapiens
  misc_RNA (1)...(19): siRNA sense strand
uagauaaacuugaagcaga

SEQ ID NO: 2522176 - RNA, 19 nt, Homo sapiens
  misc_RNA (1)...(19): siRNA sense strand
ccaaauauauccuggugca

SEQ ID NO: 2522177 - RNA, 19 nt, Homo sapiens
  misc_RNA (1)...(19): siRNA sense strand
cuuccaugggcaaggauaa

SEQ ID NO: 2522178 - RNA, 19 nt, Homo sapiens
  misc_RNA (1)...(19): siRNA sense strand
ccuucaagcaguacaagaa

SEQ ID NO: 2522179 - RNA, 19 nt, Homo sapiens
  misc_RNA (1)...(19): siRNA sense strand
caagagaaaucuagagcag

SEQ ID NO: 2522180 - RNA, 19 nt, Homo sapiens
  misc_RNA (1)...(19): siRNA sense strand
uuaccaaaguccaugaaaa

SEQ ID NO: 2522181 - RNA, 19 nt, Homo sapiens
  misc_RNA (1)...(19): siRNA sense strand
ucaacaaacuucaagggca

SEQ ID NO: 2522182 - RNA, 19 nt, Homo sapiens
  misc_RNA (1)...(19): siRNA sense strand
aaauaagaccacagaucca

SEQ ID NO: 2522183 - RNA, 19 nt, Homo sapiens
  misc_RNA (1)...(19): siRNA sense strand
aagcaguacaagaacguuu

SEQ ID NO: 2522184 - RNA, 19 nt, Homo sapiens
  misc_RNA (1)...(19): siRNA sense strand
ugaugauacgaauggagaa

SEQ ID NO: 2522185 - RNA, 19 nt, Homo sapiens
  misc_RNA (1)...(19): siRNA sense strand
agauaaacuugaagcagac

SEQ ID NO: 2522186 - RNA, 19 nt, Homo sapiens
  misc_RNA (1)...(19): siRNA sense strand
aggcaaacaucaugguccu

SEQ ID NO: 2522187 - RNA, 19 nt, Homo sapiens
  misc_RNA (1)...(19): siRNA sense strand
agagaaaucuagagcagug

SEQ ID NO: 2522188 - RNA, 19 nt, Homo sapiens
  misc_RNA (1)...(19): siRNA sense strand
acaucaugguccuguugaa

SEQ ID NO: 2522189 - RNA, 19 nt, Homo sapiens
  misc_RNA (1)...(19): siRNA sense strand
caguugaaggaaaguauga

SEQ ID NO: 2522190 - RNA, 19 nt, Homo sapiens
  misc_RNA (1)...(19): siRNA sense strand
aauuacaguugaaggaaag

SEQ ID NO: 2522191 - RNA, 19 nt, Homo sapiens
  misc_RNA (1)...(19): siRNA sense strand
aggagugggcagugggaaa

SEQ ID NO: 2522192 - RNA, 19 nt, Homo sapiens
  misc_RNA (1)...(19): siRNA sense strand
ugggaaaguuggcagcuca

SEQ ID NO: 2522193 - RNA, 19 nt, Homo sapiens
  misc_RNA (1)...(19): siRNA sense strand
cagagaaacuguuggcaga

SEQ ID NO: 2522194 - RNA, 19 nt, Homo sapiens
  misc_RNA (1)...(19): siRNA sense strand
cggagaacccagaggauac

SEQ ID NO: 2522195 - RNA, 19 nt, Homo sapiens
  misc_RNA (1)...(19): siRNA sense strand
agaggauaccuaugagaga

SEQ ID NO: 2522196 - RNA, 19 nt, Homo sapiens
  misc_RNA (1)...(19): siRNA sense strand
acgcugagcugcaagcaca

SEQ ID NO: 2522197 - RNA, 19 nt, Homo sapiens
  misc_RNA (1)...(19): siRNA sense strand
guuggaaacaagagcgacu

SEQ ID NO: 2522198 - RNA, 19 nt, Homo sapiens
  misc_RNA (1)...(19): siRNA sense strand
guuuaugacaucugggaac

SEQ ID NO: 2522199 - RNA, 19 nt, Homo sapiens
  misc_RNA (1)...(19): siRNA sense strand
gcaaauacauccaaggaga

SEQ ID NO: 2522200 - RNA, 19 nt, Homo sapiens
  misc_RNA (1)...(19): siRNA sense strand
caguagaaagugaggcaaa

SEQ ID NO: 2522201 - RNA, 19 nt, Homo sapiens
  misc_RNA (1)...(19): siRNA sense strand
aagcaagaggagaaggaaa

SEQ ID NO: 2522202 - RNA, 19 nt, Homo sapiens
  misc_RNA (1)...(19): siRNA sense strand
ggucaacagaagaggugaa

SEQ ID NO: 2522203 - RNA, 19 nt, Homo sapiens
  misc_RNA (1)...(19): siRNA sense strand
gcggagaacaugagccuga

SEQ ID NO: 2522204 - RNA, 19 nt, Homo sapiens
  misc_RNA (1)...(19): siRNA sense strand
agcaagaggagaaggaaaa

SEQ ID NO: 2522205 - RNA, 19 nt, Homo sapiens
  misc_RNA (1)...(19): siRNA sense strand
guuggauggaggagaguau

SEQ ID NO: 2522206 - RNA, 19 nt, Homo sapiens
  misc_RNA (1)...(19): siRNA sense strand
uccaaggagaugaaggaua

SEQ ID NO: 2522207 - RNA, 19 nt, Homo sapiens
  misc_RNA (1)...(19): siRNA sense strand
cucccauguuagagagcaa

SEQ ID NO: 2522208 - RNA, 19 nt, Homo sapiens
  misc_RNA (1)...(19): siRNA sense strand
ggauguaagaauugucaca

SEQ ID NO: 2522209 - RNA, 19 nt, Homo sapiens
  misc_RNA (1)...(19): siRNA sense strand
gguguuuacaagauacaaa

SEQ ID NO: 2522210 - RNA, 19 nt, Homo sapiens
  misc_RNA (1)...(19): siRNA sense strand
aaguaaagcuggugagugg

SEQ ID NO: 2522211 - RNA, 19 nt, Homo sapiens
  misc_RNA (1)...(19): siRNA sense strand
aagacuaccaugaggauca

SEQ ID NO: 2522212 - RNA, 19 nt, Homo sapiens
  misc_RNA (1)...(19): siRNA sense strand
gaaucaggagaaagccaaa

SEQ ID NO: 2522213 - RNA, 19 nt, Homo sapiens
  misc_RNA (1)...(19): siRNA sense strand
ccaagcaagaggagaagga

SEQ ID NO: 2522214 - RNA, 19 nt, Homo sapiens
  misc_RNA (1)...(19): siRNA sense strand
aguagaaagugaggcaaau

SEQ ID NO: 2522215 - RNA, 19 nt, Homo sapiens
  misc_RNA (1)...(19): siRNA sense strand
ccaaagugucggagguuuc

SEQ ID NO: 2522216 - RNA, 19 nt, Homo sapiens
  misc_RNA (1)...(19): siRNA sense strand
auguaagaauugucacaga

SEQ ID NO: 2522217 - RNA, 19 nt, Homo sapiens
  misc_RNA (1)...(19): siRNA sense strand
guuucaagucucucaggaa

SEQ ID NO: 2522218 - RNA, 19 nt, Homo sapiens
  misc_RNA (1)...(19): siRNA sense strand
gcugaagaauccaggagcu

SEQ ID NO: 2522219 - RNA, 19 nt, Homo sapiens
  misc_RNA (1)...(19): siRNA sense strand
gcaauuuuauccaggucaa

SEQ ID NO: 2522220 - RNA, 19 nt, Homo sapiens
  misc_RNA (1)...(19): siRNA sense strand
caugaggaucaauaagcaa

SEQ ID NO: 2522221 - RNA, 19 nt, Homo sapiens
  misc_RNA (1)...(19): siRNA sense strand
ggugaguggucgagccuac

SEQ ID NO: 2522222 - RNA, 19 nt, Homo sapiens
  misc_RNA (1)...(19): siRNA sense strand
aggauaagaccucugaaga

SEQ ID NO: 2522223 - RNA, 19 nt, Homo sapiens
  misc_RNA (1)...(19): siRNA sense strand
cagagaaacuagugcucac

SEQ ID NO: 2522224 - RNA, 19 nt, Homo sapiens
  misc_RNA (1)...(19): siRNA sense strand
aaguaagagugaguugaaa

SEQ ID NO: 2522225 - RNA, 19 nt, Homo sapiens
  misc_RNA (1)...(19): siRNA sense strand
augaauacuaccuggacua

SEQ ID NO: 2522226 - RNA, 19 nt, Homo sapiens
  misc_RNA (1)...(19): siRNA sense strand
agaagaagcugaaagccca

SEQ ID NO: 2522227 - RNA, 19 nt, Homo sapiens
  misc_RNA (1)...(19): siRNA sense strand
augaauacuaccuggacua

SEQ ID NO: 2522228 - RNA, 19 nt, Homo sapiens
  misc_RNA (1)...(19): siRNA sense strand
agaagaagcugaaagccca

SEQ ID NO: 2522229 - RNA, 19 nt, Homo sapiens
  misc_RNA (1)...(19): siRNA sense strand
aggaagggccagaggacaa

SEQ ID NO: 2522230 - RNA, 19 nt, Homo sapiens
  misc_RNA (1)...(19): siRNA sense strand
gcuaugaccuacugggugu

SEQ ID NO: 2522231 - RNA, 19 nt, Homo sapiens
  misc_RNA (1)...(19): siRNA sense strand
aggauaaggucaucgagga

SEQ ID NO: 2522232 - RNA, 19 nt, Homo sapiens
  misc_RNA (1)...(19): siRNA sense strand
ccuaugaagagacgcgaau

SEQ ID NO: 2522233 - RNA, 19 nt, Homo sapiens
  misc_RNA (1)...(19): siRNA sense strand
cgcgaauguuggauggaca

SEQ ID NO: 2522234 - RNA, 19 nt, Homo sapiens
  misc_RNA (1)...(19): siRNA sense strand
ggucauuaccuguugccuu

SEQ ID NO: 2522235 - RNA, 19 nt, Homo sapiens
  misc_RNA (1)...(19): siRNA sense strand
ucaucaaggauaaggucau

SEQ ID NO: 2522236 - RNA, 19 nt, Homo sapiens
  misc_RNA (1)...(19): siRNA sense strand
ccagauacugucagagaac

SEQ ID NO: 2522237 - RNA, 19 nt, Homo sapiens
  misc_RNA (1)...(19): siRNA sense strand
ugaagaaagaaguggguga

SEQ ID NO: 2522238 - RNA, 19 nt, Homo sapiens
  misc_RNA (1)...(19): siRNA sense strand
ggugaauaaugcugggaca

SEQ ID NO: 2522239 - RNA, 19 nt, Homo sapiens
  misc_RNA (1)...(19): siRNA sense strand
caucagaacuucaggccuu

SEQ ID NO: 2522240 - RNA, 19 nt, Homo sapiens
  misc_RNA (1)...(19): siRNA sense strand
ggucaacauccuaggacau

SEQ ID NO: 2522241 - RNA, 19 nt, Homo sapiens
  misc_RNA (1)...(19): siRNA sense strand
gcauauugguucuguggga

SEQ ID NO: 2522242 - RNA, 19 nt, Homo sapiens
  misc_RNA (1)...(19): siRNA sense strand
cucuaaaucaggugaagaa

SEQ ID NO: 2522243 - RNA, 19 nt, Homo sapiens
  misc_RNA (1)...(19): siRNA sense strand
auguaacaaucguggugaa

SEQ ID NO: 2522244 - RNA, 19 nt, Homo sapiens
  misc_RNA (1)...(19): siRNA sense strand
auauugguucugugggaua

SEQ ID NO: 2522245 - RNA, 19 nt, Homo sapiens
  misc_RNA (1)...(19): siRNA sense strand
aagucugauagauggaaua

SEQ ID NO: 2522246 - RNA, 19 nt, Homo sapiens
  misc_RNA (1)...(19): siRNA sense strand
cgacagagcauauugguuc

SEQ ID NO: 2522247 - RNA, 19 nt, Homo sapiens
  misc_RNA (1)...(19): siRNA sense strand
ggagagaaaucauggccac

SEQ ID NO: 2522248 - RNA, 19 nt, Homo sapiens
  misc_RNA (1)...(19): siRNA sense strand
aggcagacuacuuaugaau

SEQ ID NO: 2522249 - RNA, 19 nt, Homo sapiens
  misc_RNA (1)...(19): siRNA sense strand
agaugaagucguaagaagu

SEQ ID NO: 2522250 - RNA, 19 nt, Homo sapiens
  misc_RNA (1)...(19): siRNA sense strand
cagcaacagagaagagauc

SEQ ID NO: 2522251 - RNA, 19 nt, Homo sapiens
  misc_RNA (1)...(19): siRNA sense strand
gagaagagaucuaucgcuc

SEQ ID NO: 2522252 - RNA, 19 nt, Homo sapiens
  misc_RNA (1)...(19): siRNA sense strand
aggucaacauccuaggaca

SEQ ID NO: 2522253 - RNA, 19 nt, Homo sapiens
  misc_RNA (1)...(19): siRNA sense strand
acuuggagucguuggugaa

SEQ ID NO: 2522254 - RNA, 19 nt, Homo sapiens
  misc_RNA (1)...(19): siRNA sense strand
aacuucaggccuugggaaa

SEQ ID NO: 2522255 - RNA, 19 nt, Homo sapiens
  misc_RNA (1)...(19): siRNA sense strand
agaaacagaucgagcacug

SEQ ID NO: 2522256 - RNA, 19 nt, Homo sapiens
  misc_RNA (1)...(19): siRNA sense strand
gcuucagagcagaggauuc

SEQ ID NO: 2522257 - RNA, 19 nt, Homo sapiens
  misc_RNA (1)...(19): siRNA sense strand
ccgugcagaaccagaaaca

SEQ ID NO: 2522258 - RNA, 19 nt, Homo sapiens
  misc_RNA (1)...(19): siRNA sense strand
ccaucaacgccgaggagua

SEQ ID NO: 2522259 - RNA, 19 nt, Homo sapiens
  misc_RNA (1)...(19): siRNA sense strand
uggugaagucggagaagaa

SEQ ID NO: 2522260 - RNA, 19 nt, Homo sapiens
  misc_RNA (1)...(19): siRNA sense strand
agacagaaaugaagaccca

SEQ ID NO: 2522261 - RNA, 19 nt, Homo sapiens
  misc_RNA (1)...(19): siRNA sense strand
ugaaaggcucggugaggaa

SEQ ID NO: 2522262 - RNA, 19 nt, Homo sapiens
  misc_RNA (1)...(19): siRNA sense strand
ggaaagacaaucuggcuca

SEQ ID NO: 2522263 - RNA, 19 nt, Homo sapiens
  misc_RNA (1)...(19): siRNA sense strand
agaggauggaugagggaga

SEQ ID NO: 2522264 - RNA, 19 nt, Homo sapiens
  misc_RNA (1)...(19): siRNA sense strand
uugagaauucagagggcua

SEQ ID NO: 2522265 - RNA, 19 nt, Homo sapiens
  misc_RNA (1)...(19): siRNA sense strand
gagaagaaccgccagguca

SEQ ID NO: 2522266 - RNA, 19 nt, Homo sapiens
  misc_RNA (1)...(19): siRNA sense strand
ccgaggaguacaugagcau

SEQ ID NO: 2522267 - RNA, 19 nt, Homo sapiens
  misc_RNA (1)...(19): siRNA sense strand
uguucaggauccagaaaga

SEQ ID NO: 2522268 - RNA, 19 nt, Homo sapiens
  misc_RNA (1)...(19): siRNA sense strand
aggcagaagaucuuucaaa

SEQ ID NO: 2522269 - RNA, 19 nt, Homo sapiens
  misc_RNA (1)...(19): siRNA sense strand
agguacagcaucugaucaa

SEQ ID NO: 2522270 - RNA, 19 nt, Homo sapiens
  misc_RNA (1)...(19): siRNA sense strand
ggcugaagacagaaaugaa

SEQ ID NO: 2522271 - RNA, 19 nt, Homo sapiens
  misc_RNA (1)...(19): siRNA sense strand
caucauugugggugcucua

SEQ ID NO: 2522272 - RNA, 19 nt, Homo sapiens
  misc_RNA (1)...(19): siRNA sense strand
ggacagacucggagacgcu

SEQ ID NO: 2522273 - RNA, 19 nt, Homo sapiens
  misc_RNA (1)...(19): siRNA sense strand
gagugaucuucaaguucaa

SEQ ID NO: 2522274 - RNA, 19 nt, Homo sapiens
  misc_RNA (1)...(19): siRNA sense strand
ugaagguguuugacagcau

SEQ ID NO: 2522275 - RNA, 19 nt, Homo sapiens
  misc_RNA (1)...(19): siRNA sense strand
ggaugugcuaagacaguuu

SEQ ID NO: 2522276 - RNA, 19 nt, Homo sapiens
  misc_RNA (1)...(19): siRNA sense strand
guuccuggaguuugagaau

SEQ ID NO: 2522277 - RNA, 19 nt, Homo sapiens
  misc_RNA (1)...(19): siRNA sense strand
agaugagcuucuugagagu

SEQ ID NO: 2522278 - RNA, 19 nt, Homo sapiens
  misc_RNA (1)...(19): siRNA sense strand
agaagaaccgccaggucau

SEQ ID NO: 2522279 - RNA, 19 nt, Homo sapiens
  misc_RNA (1)...(19): siRNA sense strand
cauugaaccggaugugcua

SEQ ID NO: 2522280 - RNA, 19 nt, Homo sapiens
  misc_RNA (1)...(19): siRNA sense strand
gggccuggaaugcucgaaa

SEQ ID NO: 2522281 - RNA, 19 nt, Homo sapiens
  misc_RNA (1)...(19): siRNA sense strand
ucaugaggaagucaggaaa

SEQ ID NO: 2522282 - RNA, 19 nt, Homo sapiens
  misc_RNA (1)...(19): siRNA sense strand
caucaggaucuuugagaag

SEQ ID NO: 2522283 - RNA, 19 nt, Homo sapiens
  misc_RNA (1)...(19): siRNA sense strand
cugaagacagaaaugaaga

SEQ ID NO: 2522284 - RNA, 19 nt, Homo sapiens
  misc_RNA (1)...(19): siRNA sense strand
ggagaggauggaugaggga

SEQ ID NO: 2522285 - RNA, 19 nt, Homo sapiens
  misc_RNA (1)...(19): siRNA sense strand
cuuccagguccuacagaau

SEQ ID NO: 2522286 - RNA, 19 nt, Homo sapiens
  misc_RNA (1)...(19): siRNA sense strand
aggaaugggcucuuugaga

SEQ ID NO: 2522287 - RNA, 19 nt, Homo sapiens
  misc_RNA (1)...(19): siRNA sense strand
ccuccagauccuuggcuuu

SEQ ID NO: 2522288 - RNA, 19 nt, Homo sapiens
  misc_RNA (1)...(19): siRNA sense strand
acgaggagagggaggugaa

SEQ ID NO: 2522289 - RNA, 19 nt, Homo sapiens
  misc_RNA (1)...(19): siRNA sense strand
gaggugaauccguggcaga

SEQ ID NO: 2522290 - RNA, 19 nt, Homo sapiens
  misc_RNA (1)...(19): siRNA sense strand
ucucuuaagaaguuggaaa

SEQ ID NO: 2522291 - RNA, 19 nt, Homo sapiens
  misc_RNA (1)...(19): siRNA sense strand
ccucuauaccaguggcuga

SEQ ID NO: 2522292 - RNA, 19 nt, Homo sapiens
  misc_RNA (1)...(19): siRNA sense strand
gguacaauuaugaggguag

SEQ ID NO: 2522293 - RNA, 19 nt, Homo sapiens
  misc_RNA (1)...(19): siRNA sense strand
ugacaaggcauauagggau

SEQ ID NO: 2522294 - RNA, 19 nt, Homo sapiens
  misc_RNA (1)...(19): siRNA sense strand
cugacaaggcauauaggga

SEQ ID NO: 2522295 - RNA, 19 nt, Homo sapiens
  misc_RNA (1)...(19): siRNA sense strand
cuucagaggugggagguca

SEQ ID NO: 2522296 - RNA, 19 nt, Homo sapiens
  misc_RNA (1)...(19): siRNA sense strand
uuauggugacugagaacaa

SEQ ID NO: 2522297 - RNA, 19 nt, Homo sapiens
  misc_RNA (1)...(19): siRNA sense strand
ccaagaagucggaggaacc

SEQ ID NO: 2522298 - RNA, 19 nt, Homo sapiens
  misc_RNA (1)...(19): siRNA sense strand
ccagaguggugcaagcuca

SEQ ID NO: 2522299 - RNA, 19 nt, Homo sapiens
  misc_RNA (1)...(19): siRNA sense strand
acgcaaacccugagccugu

SEQ ID NO: 2522300 - RNA, 19 nt, Homo sapiens
  misc_RNA (1)...(19): siRNA sense strand
agccagagucggaggucuu

SEQ ID NO: 2522301 - RNA, 19 nt, Homo sapiens
  misc_RNA (1)...(19): siRNA sense strand
cagccaaaccggcgagaag

SEQ ID NO: 2522302 - RNA, 19 nt, Homo sapiens
  misc_RNA (1)...(19): siRNA sense strand
uguccgaugcuaaggucaa

SEQ ID NO: 2522303 - RNA, 19 nt, Homo sapiens
  misc_RNA (1)...(19): siRNA sense strand
agguauuuccagagaauga

SEQ ID NO: 2522304 - RNA, 19 nt, Homo sapiens
  misc_RNA (1)...(19): siRNA sense strand
gcagagaacuaaaggaacc

SEQ ID NO: 2522305 - RNA, 19 nt, Homo sapiens
  misc_RNA (1)...(19): siRNA sense strand
ugacaaggaucaugcagga

SEQ ID NO: 2522306 - RNA, 19 nt, Homo sapiens
  misc_RNA (1)...(19): siRNA sense strand
aauauaaacuucugccuga

SEQ ID NO: 2522307 - RNA, 19 nt, Homo sapiens
  misc_RNA (1)...(19): siRNA sense strand
cuuaaaacuuacugaacga

SEQ ID NO: 2522308 - RNA, 19 nt, Homo sapiens
  misc_RNA (1)...(19): siRNA sense strand
aaguaugugagaaggauga

SEQ ID NO: 2522309 - RNA, 19 nt, Homo sapiens
  misc_RNA (1)...(19): siRNA sense strand
uuggauaguugguggcagu

SEQ ID NO: 2522310 - RNA, 19 nt, Homo sapiens
  misc_RNA (1)...(19): siRNA sense strand
gguaggaagaccugguucu

SEQ ID NO: 2522311 - RNA, 19 nt, Homo sapiens
  misc_RNA (1)...(19): siRNA sense strand
acuaaaggaaccuccacaa

SEQ ID NO: 2522312 - RNA, 19 nt, Homo sapiens
  misc_RNA (1)...(19): siRNA sense strand
guggaaacaagcaggacua

SEQ ID NO: 2522313 - RNA, 19 nt, Homo sapiens
  misc_RNA (1)...(19): siRNA sense strand
aaguagaggaggucaguuu

SEQ ID NO: 2522314 - RNA, 19 nt, Homo sapiens
  misc_RNA (1)...(19): siRNA sense strand
agagaaacuagaagauaca

SEQ ID NO: 2522315 - RNA, 19 nt, Homo sapiens
  misc_RNA (1)...(19): siRNA sense strand
guuucuuuguggaggauuu

SEQ ID NO: 2522316 - RNA, 19 nt, Homo sapiens
  misc_RNA (1)...(19): siRNA sense strand
ugauggaaacauuggaaca

SEQ ID NO: 2522317 - RNA, 19 nt, Homo sapiens
  misc_RNA (1)...(19): siRNA sense strand
agcauggaauugaggauau

SEQ ID NO: 2522318 - RNA, 19 nt, Homo sapiens
  misc_RNA (1)...(19): siRNA sense strand
aaaccaggagaguuagaaa

SEQ ID NO: 2522319 - RNA, 19 nt, Homo sapiens
  misc_RNA (1)...(19): siRNA sense strand
gauaauaaauuuaggaggc

SEQ ID NO: 2522320 - RNA, 19 nt, Homo sapiens
  misc_RNA (1)...(19): siRNA sense strand
uuacaagaauggugaccca

SEQ ID NO: 2522321 - RNA, 19 nt, Homo sapiens
  misc_RNA (1)...(19): siRNA sense strand
aaauugaaguagaggaggu

SEQ ID NO: 2522322 - RNA, 19 nt, Homo sapiens
  misc_RNA (1)...(19): siRNA sense strand
uauuaaacccagugccaga

SEQ ID NO: 2522323 - RNA, 19 nt, Homo sapiens
  misc_RNA (1)...(19): siRNA sense strand
cuauguagaugaaaaggaa

SEQ ID NO: 2522324 - RNA, 19 nt, Homo sapiens
  misc_RNA (1)...(19): siRNA sense strand
uuuggaagcuuuugugaaa

SEQ ID NO: 2522325 - RNA, 19 nt, Homo sapiens
  misc_RNA (1)...(19): siRNA sense strand
ucaagagaaacuagaagau

SEQ ID NO: 2522326 - RNA, 19 nt, Homo sapiens
  misc_RNA (1)...(19): siRNA sense strand
gcuuacagugccaagaauu

SEQ ID NO: 2522327 - RNA, 19 nt, Homo sapiens
  misc_RNA (1)...(19): siRNA sense strand
ccaaauugaaguagaggag

SEQ ID NO: 2522328 - RNA, 19 nt, Homo sapiens
  misc_RNA (1)...(19): siRNA sense strand
ggaccaauggaaagcaagu

SEQ ID NO: 2522329 - RNA, 19 nt, Homo sapiens
  misc_RNA (1)...(19): siRNA sense strand
augauguggcaauuagaaa

SEQ ID NO: 2522330 - RNA, 19 nt, Homo sapiens
  misc_RNA (1)...(19): siRNA sense strand
agaaagauguagaagcccu

SEQ ID NO: 2522331 - RNA, 19 nt, Homo sapiens
  misc_RNA (1)...(19): siRNA sense strand
aauaaauuuaggaggccau

SEQ ID NO: 2522332 - RNA, 19 nt, Homo sapiens
  misc_RNA (1)...(19): siRNA sense strand
aggccauggacgagagucu

SEQ ID NO: 2522333 - RNA, 19 nt, Homo sapiens
  misc_RNA (1)...(19): siRNA sense strand
auugugaauuugaggaagu

SEQ ID NO: 2522334 - RNA, 19 nt, Homo sapiens
  misc_RNA (1)...(19): siRNA sense strand
guuauuaaacccagugcca

SEQ ID NO: 2522335 - RNA, 19 nt, Homo sapiens
  misc_RNA (1)...(19): siRNA sense strand
uggcaauuagaaagaugua

SEQ ID NO: 2522336 - RNA, 19 nt, Homo sapiens
  misc_RNA (1)...(19): siRNA sense strand
ccauucaaagccagaguga

SEQ ID NO: 2522337 - RNA, 19 nt, Homo sapiens
  misc_RNA (1)...(19): siRNA sense strand
uguuaaagaagaaagccuu

SEQ ID NO: 2522338 - RNA, 19 nt, Homo sapiens
  misc_RNA (1)...(19): siRNA sense strand
gggaaugacagauaccuca

SEQ ID NO: 2522339 - RNA, 19 nt, Homo sapiens
  misc_RNA (1)...(19): siRNA sense strand
gucaagagaaacuagaaga

SEQ ID NO: 2522340 - RNA, 19 nt, Homo sapiens
  misc_RNA (1)...(19): siRNA sense strand
caagcauggaauugaggau

SEQ ID NO: 2522341 - RNA, 19 nt, Homo sapiens
  misc_RNA (1)...(19): siRNA sense strand
ccucaaaguguaacagcaa

SEQ ID NO: 2522342 - RNA, 19 nt, Homo sapiens
  misc_RNA (1)...(19): siRNA sense strand
aggaacagaagaagaagaa

SEQ ID NO: 2522343 - RNA, 19 nt, Homo sapiens
  misc_RNA (1)...(19): siRNA sense strand
ccaagaagaauaaagguga

SEQ ID NO: 2522344 - RNA, 19 nt, Homo sapiens
  misc_RNA (1)...(19): siRNA sense strand
acuacaagagacagauaaa

SEQ ID NO: 2522345 - RNA, 19 nt, Homo sapiens
  misc_RNA (1)...(19): siRNA sense strand
uggaaaggaaguugaugaa

SEQ ID NO: 2522346 - RNA, 19 nt, Homo sapiens
  misc_RNA (1)...(19): siRNA sense strand
agucaaauaccaagcaaaa

SEQ ID NO: 2522347 - RNA, 19 nt, Homo sapiens
  misc_RNA (1)...(19): siRNA sense strand
gccaauacuacaagagaca

SEQ ID NO: 2522348 - RNA, 19 nt, Homo sapiens
  misc_RNA (1)...(19): siRNA sense strand
uugaaguggcugaggguga

SEQ ID NO: 2522349 - RNA, 19 nt, Homo sapiens
  misc_RNA (1)...(19): siRNA sense strand
aagaagaagaaccggaaga

SEQ ID NO: 2522350 - RNA, 19 nt, Homo sapiens
  misc_RNA (1)...(19): siRNA sense strand
ggauguuagccguaaucaa

SEQ ID NO: 2522351 - RNA, 19 nt, Homo sapiens
  misc_RNA (1)...(19): siRNA sense strand
aagaagaaccggaagaaac

SEQ ID NO: 2522352 - RNA, 19 nt, Homo sapiens
  misc_RNA (1)...(19): siRNA sense strand
agaagaaaucaaagucaga

SEQ ID NO: 2522353 - RNA, 19 nt, Homo sapiens
  misc_RNA (1)...(19): siRNA sense strand
agaagaagaagaaccggaa

SEQ ID NO: 2522354 - RNA, 19 nt, Homo sapiens
  misc_RNA (1)...(19): siRNA sense strand
ucugaaacuagcugggaau

SEQ ID NO: 2522355 - RNA, 19 nt, Homo sapiens
  misc_RNA (1)...(19): siRNA sense strand
gaggaacagaagaagaaga

SEQ ID NO: 2522356 - RNA, 19 nt, Homo sapiens
  misc_RNA (1)...(19): siRNA sense strand
caauacuacaagagacaga

SEQ ID NO: 2522357 - RNA, 19 nt, Homo sapiens
  misc_RNA (1)...(19): siRNA sense strand
gagucaagacacuggagau

SEQ ID NO: 2522358 - RNA, 19 nt, Homo sapiens
  misc_RNA (1)...(19): siRNA sense strand
ggugaggagaaguggaacu

SEQ ID NO: 2522359 - RNA, 19 nt, Homo sapiens
  misc_RNA (1)...(19): siRNA sense strand
cuggagaugcuaauacaaa

SEQ ID NO: 2522360 - RNA, 19 nt, Homo sapiens
  misc_RNA (1)...(19): siRNA sense strand
caggugaggagaaguggaa

SEQ ID NO: 2522361 - RNA, 19 nt, Homo sapiens
  misc_RNA (1)...(19): siRNA sense strand
aaaggaaguugaugaagga

SEQ ID NO: 2522362 - RNA, 19 nt, Homo sapiens
  misc_RNA (1)...(19): siRNA sense strand
caauggaggaggcuggaau

SEQ ID NO: 2522363 - RNA, 19 nt, Homo sapiens
  misc_RNA (1)...(19): siRNA sense strand
cagccgaaguacucgucaa

SEQ ID NO: 2522364 - RNA, 19 nt, Homo sapiens
  misc_RNA (1)...(19): siRNA sense strand
aagucaaauaccaagcaaa

SEQ ID NO: 2522365 - RNA, 19 nt, Homo sapiens
  misc_RNA (1)...(19): siRNA sense strand
auggaaaggaaguugauga

SEQ ID NO: 2522366 - RNA, 19 nt, Homo sapiens
  misc_RNA (1)...(19): siRNA sense strand
ggaaggaguuggagugacc

SEQ ID NO: 2522367 - RNA, 19 nt, Homo sapiens
  misc_RNA (1)...(19): siRNA sense strand
agaagaagaaccggaagaa

SEQ ID NO: 2522368 - RNA, 19 nt, Homo sapiens
  misc_RNA (1)...(19): siRNA sense strand
agaagaaccggaagaaacu

SEQ ID NO: 2522369 - RNA, 19 nt, Homo sapiens
  misc_RNA (1)...(19): siRNA sense strand
gaacagaagaagaagaacc

SEQ ID NO: 2522370 - RNA, 19 nt, Homo sapiens
  misc_RNA (1)...(19): siRNA sense strand
gaagauaacucuacugcac

SEQ ID NO: 2522371 - RNA, 19 nt, Homo sapiens
  misc_RNA (1)...(19): siRNA sense strand
augauaaagaaaagggaga

SEQ ID NO: 2522372 - RNA, 19 nt, Homo sapiens
  misc_RNA (1)...(19): siRNA sense strand
cagaagaagaagaaccgga

SEQ ID NO: 2522373 - RNA, 19 nt, Homo sapiens
  misc_RNA (1)...(19): siRNA sense strand
gucugaaacuagcugggaa

SEQ ID NO: 2522374 - RNA, 19 nt, Homo sapiens
  misc_RNA (1)...(19): siRNA sense strand
ggacuguugaaguggcuga

SEQ ID NO: 2522375 - RNA, 19 nt, Homo sapiens
  misc_RNA (1)...(19): siRNA sense strand
gcguaaacgugauaaggug

SEQ ID NO: 2522376 - RNA, 19 nt, Homo sapiens
  misc_RNA (1)...(19): siRNA sense strand
caggaaagaggaaagcuga

SEQ ID NO: 2522377 - RNA, 19 nt, Homo sapiens
  misc_RNA (1)...(19): siRNA sense strand
agagauuagagaagaccuu

SEQ ID NO: 2522378 - RNA, 19 nt, Homo sapiens
  misc_RNA (1)...(19): siRNA sense strand
gcaacuuuaaaucuggaaa

SEQ ID NO: 2522379 - RNA, 19 nt, Homo sapiens
  misc_RNA (1)...(19): siRNA sense strand
gaaaggaaguugaugaagg

SEQ ID NO: 2522380 - RNA, 19 nt, Homo sapiens
  misc_RNA (1)...(19): siRNA sense strand
cucuaaaacccguccaaaa

SEQ ID NO: 2522381 - RNA, 19 nt, Homo sapiens
  misc_RNA (1)...(19): siRNA sense strand
uuggaaugcaccagcagaa

SEQ ID NO: 2522382 - RNA, 19 nt, Homo sapiens
  misc_RNA (1)...(19): siRNA sense strand
gaacagccucacagggcaa

SEQ ID NO: 2522383 - RNA, 19 nt, Homo sapiens
  misc_RNA (1)...(19): siRNA sense strand
gcugaaaguuuaagggagc

SEQ ID NO: 2522384 - RNA, 19 nt, Homo sapiens
  misc_RNA (1)...(19): siRNA sense strand
cggcauaagaaccucaaga

SEQ ID NO: 2522385 - RNA, 19 nt, Homo sapiens
  misc_RNA (1)...(19): siRNA sense strand
aguacgaggaggagccaga

SEQ ID NO: 2522386 - RNA, 19 nt, Homo sapiens
  misc_RNA (1)...(19): siRNA sense strand
acgacgacguggaguacga

SEQ ID NO: 2522387 - RNA, 19 nt, Homo sapiens
  misc_RNA (1)...(19): siRNA sense strand
acguggaguacgaggagga

SEQ ID NO: 2522388 - RNA, 19 nt, Homo sapiens
  misc_RNA (1)...(19): siRNA sense strand
gggacagauucaugggagu

SEQ ID NO: 2522389 - RNA, 19 nt, Homo sapiens
  misc_RNA (1)...(19): siRNA sense strand
aguacuuggugguggacga

SEQ ID NO: 2522390 - RNA, 19 nt, Homo sapiens
  misc_RNA (1)...(19): siRNA sense strand
agucugugaagcagcgaua

SEQ ID NO: 2522391 - RNA, 19 nt, Homo sapiens
  misc_RNA (1)...(19): siRNA sense strand
ccaucuuggguguguuuaa

SEQ ID NO: 2522392 - RNA, 19 nt, Homo sapiens
  misc_RNA (1)...(19): siRNA sense strand
cugugaaugcagugauuga

SEQ ID NO: 2522393 - RNA, 19 nt, Homo sapiens
  misc_RNA (1)...(19): siRNA sense strand
ugguggacgaggcgauuaa

SEQ ID NO: 2522394 - RNA, 19 nt, Homo sapiens
  misc_RNA (1)...(19): siRNA sense strand
gauucaugggagugaggau

SEQ ID NO: 2522395 - RNA, 19 nt, Homo sapiens
  misc_RNA (1)...(19): siRNA sense strand
gggaugucugguugaucaa

SEQ ID NO: 2522396 - RNA, 19 nt, Homo sapiens
  misc_RNA (1)...(19): siRNA sense strand
ccuagaaacaggagaauau

SEQ ID NO: 2522397 - RNA, 19 nt, Homo sapiens
  misc_RNA (1)...(19): siRNA sense strand
gcccaaugguggagggaca

SEQ ID NO: 2522398 - RNA, 19 nt, Homo sapiens
  misc_RNA (1)...(19): siRNA sense strand
cugcaguucauuagggaaa

SEQ ID NO: 2522399 - RNA, 19 nt, Homo sapiens
  misc_RNA (1)...(19): siRNA sense strand
gcucuaagaccuacagcaa

SEQ ID NO: 2522400 - RNA, 19 nt, Homo sapiens
  misc_RNA (1)...(19): siRNA sense strand
ggagagaacuacaaggagu

SEQ ID NO: 2522401 - RNA, 19 nt, Homo sapiens
  misc_RNA (1)...(19): siRNA sense strand
uggaagauaaagugaagaa

SEQ ID NO: 2522402 - RNA, 19 nt, Homo sapiens
  misc_RNA (1)...(19): siRNA sense strand
agauguggcaagagauuua

SEQ ID NO: 2522403 - RNA, 19 nt, Homo sapiens
  misc_RNA (1)...(19): siRNA sense strand
cuucuugaauggagggaga

SEQ ID NO: 2522404 - RNA, 19 nt, Homo sapiens
  misc_RNA (1)...(19): siRNA sense strand
uccaaggagcugugaaaua

SEQ ID NO: 2522405 - RNA, 19 nt, Homo sapiens
  misc_RNA (1)...(19): siRNA sense strand
uguccaaggagcugugaaa

SEQ ID NO: 2522406 - RNA, 19 nt, Homo sapiens
  misc_RNA (1)...(19): siRNA sense strand
gacaagaagauuuggccaa

SEQ ID NO: 2522407 - RNA, 19 nt, Homo sapiens
  misc_RNA (1)...(19): siRNA sense strand
gcagacaccugaaaggcua

SEQ ID NO: 2522408 - RNA, 19 nt, Homo sapiens
  misc_RNA (1)...(19): siRNA sense strand
augcagugcuugacagauu

SEQ ID NO: 2522409 - RNA, 19 nt, Homo sapiens
  misc_RNA (1)...(19): siRNA sense strand
gagaagagccugucgcuga

SEQ ID NO: 2522410 - RNA, 19 nt, Homo sapiens
  misc_RNA (1)...(19): siRNA sense strand
agucagagauggacagcca

SEQ ID NO: 2522411 - RNA, 19 nt, Homo sapiens
  misc_RNA (1)...(19): siRNA sense strand
agaaaguuauacuggaaga

SEQ ID NO: 2522412 - RNA, 19 nt, Homo sapiens
  misc_RNA (1)...(19): siRNA sense strand
cagcuuuggcuuugaaauu

SEQ ID NO: 2522413 - RNA, 19 nt, Homo sapiens
  misc_RNA (1)...(19): siRNA sense strand
gaauggagggagacaagaa

SEQ ID NO: 2522414 - RNA, 19 nt, Homo sapiens
  misc_RNA (1)...(19): siRNA sense strand
gugaagaucaugagcuaca

SEQ ID NO: 2522415 - RNA, 19 nt, Homo sapiens
  misc_RNA (1)...(19): siRNA sense strand
gaaacaggcuagaucccaa

SEQ ID NO: 2522416 - RNA, 19 nt, Homo sapiens
  misc_RNA (1)...(19): siRNA sense strand
cuuuauggguagaggucga

SEQ ID NO: 2522417 - RNA, 19 nt, Homo sapiens
  misc_RNA (1)...(19): siRNA sense strand
cuuccaggcucaagaguca

SEQ ID NO: 2522418 - RNA, 19 nt, Homo sapiens
  misc_RNA (1)...(19): siRNA sense strand
agaaggaagcuaugaggau

SEQ ID NO: 2522419 - RNA, 19 nt, Homo sapiens
  misc_RNA (1)...(19): siRNA sense strand
gggaaacggaagagauugu

SEQ ID NO: 2522420 - RNA, 19 nt, Homo sapiens
  misc_RNA (1)...(19): siRNA sense strand
aggcugccauggugggaaa

SEQ ID NO: 2522421 - RNA, 19 nt, Homo sapiens
  misc_RNA (1)...(19): siRNA sense strand
uggacagggaggagaguga

SEQ ID NO: 2522422 - RNA, 19 nt, Homo sapiens
  misc_RNA (1)...(19): siRNA sense strand
gggacagagccaacaguuu

SEQ ID NO: 2522423 - RNA, 19 nt, Homo sapiens
  misc_RNA (1)...(19): siRNA sense strand
gcuuuggcuuugaaauuaa

SEQ ID NO: 2522424 - RNA, 19 nt, Homo sapiens
  misc_RNA (1)...(19): siRNA sense strand
guguugaugcugaggguca

SEQ ID NO: 2522425 - RNA, 19 nt, Homo sapiens
  misc_RNA (1)...(19): siRNA sense strand
aguuguuacuggaugaaau

SEQ ID NO: 2522426 - RNA, 19 nt, Homo sapiens
  misc_RNA (1)...(19): siRNA sense strand
uagcagcacuggaagggaa

SEQ ID NO: 2522427 - RNA, 19 nt, Homo sapiens
  misc_RNA (1)...(19): siRNA sense strand
cugccuagaaacaggagaa

SEQ ID NO: 2522428 - RNA, 19 nt, Homo sapiens
  misc_RNA (1)...(19): siRNA sense strand
aaucacggcuugaggacau

SEQ ID NO: 2522429 - RNA, 19 nt, Homo sapiens
  misc_RNA (1)...(19): siRNA sense strand
ggaaggaaaugcauggaac

SEQ ID NO: 2522430 - RNA, 19 nt, Homo sapiens
  misc_RNA (1)...(19): siRNA sense strand
ugugagcugcagagggaaa

SEQ ID NO: 2522431 - RNA, 19 nt, Homo sapiens
  misc_RNA (1)...(19): siRNA sense strand
ccaccaacccaaagagacu

SEQ ID NO: 2522432 - RNA, 19 nt, Homo sapiens
  misc_RNA (1)...(19): siRNA sense strand
gugcaauagggaagcccaa

SEQ ID NO: 2522433 - RNA, 19 nt, Homo sapiens
  misc_RNA (1)...(19): siRNA sense strand
cccgacaaccugcgagaaa

SEQ ID NO: 2522434 - RNA, 19 nt, Homo sapiens
  misc_RNA (1)...(19): siRNA sense strand
agagagccuuggugggcaa

SEQ ID NO: 2522435 - RNA, 19 nt, Homo sapiens
  misc_RNA (1)...(19): siRNA sense strand
ggaagaaaguuauacugga

SEQ ID NO: 2522436 - RNA, 19 nt, Homo sapiens
  misc_RNA (1)...(19): siRNA sense strand
cuucaucagaucaggaaau

SEQ ID NO: 2522437 - RNA, 19 nt, Homo sapiens
  misc_RNA (1)...(19): siRNA sense strand
aaggaugguacuaugaaua

SEQ ID NO: 2522438 - RNA, 19 nt, Homo sapiens
  misc_RNA (1)...(19): siRNA sense strand
uggcaagagauuuagguga

SEQ ID NO: 2522439 - RNA, 19 nt, Homo sapiens
  misc_RNA (1)...(19): siRNA sense strand
cugccaagcugcuagugaa

SEQ ID NO: 2522440 - RNA, 19 nt, Homo sapiens
  misc_RNA (1)...(19): siRNA sense strand
cugucagcucgcagagaua

SEQ ID NO: 2522441 - RNA, 19 nt, Homo sapiens
  misc_RNA (1)...(19): siRNA sense strand
gagauaacagagagugcau

SEQ ID NO: 2522442 - RNA, 19 nt, Homo sapiens
  misc_RNA (1)...(19): siRNA sense strand
guggagcgguuuacagcaa

SEQ ID NO: 2522443 - RNA, 19 nt, Homo sapiens
  misc_RNA (1)...(19): siRNA sense strand
ccugugagcugcagaggga

SEQ ID NO: 2522444 - RNA, 19 nt, Homo sapiens
  misc_RNA (1)...(19): siRNA sense strand
caccacaacacuucagaaa

SEQ ID NO: 2522445 - RNA, 19 nt, Homo sapiens
  misc_RNA (1)...(19): siRNA sense strand
cauaugaccaggagagcca

SEQ ID NO: 2522446 - RNA, 19 nt, Homo sapiens
  misc_RNA (1)...(19): siRNA sense strand
uagggaaacggaagagauu

SEQ ID NO: 2522447 - RNA, 19 nt, Homo sapiens
  misc_RNA (1)...(19): siRNA sense strand
cggguuugcugcagacuuu

SEQ ID NO: 2522448 - RNA, 19 nt, Homo sapiens
  misc_RNA (1)...(19): siRNA sense strand
cguuuaggagugaauguua

SEQ ID NO: 2522449 - RNA, 19 nt, Homo sapiens
  misc_RNA (1)...(19): siRNA sense strand
acauugaaguccacaccua

SEQ ID NO: 2522450 - RNA, 19 nt, Homo sapiens
  misc_RNA (1)...(19): siRNA sense strand
ccagaagcccauugcucaa

SEQ ID NO: 2522451 - RNA, 19 nt, Homo sapiens
  misc_RNA (1)...(19): siRNA sense strand
gggcucagcagcaggcaau

SEQ ID NO: 2522452 - RNA, 19 nt, Homo sapiens
  misc_RNA (1)...(19): siRNA sense strand
agagugaagaggaggaguu

SEQ ID NO: 2522453 - RNA, 19 nt, Homo sapiens
  misc_RNA (1)...(19): siRNA sense strand
aggaugguacuaugaauaa

SEQ ID NO: 2522454 - RNA, 19 nt, Homo sapiens
  misc_RNA (1)...(19): siRNA sense strand
gguacuaugaauaagccaa

SEQ ID NO: 2522455 - RNA, 19 nt, Homo sapiens
  misc_RNA (1)...(19): siRNA sense strand
ccaagcugcuagugaagau

SEQ ID NO: 2522456 - RNA, 19 nt, Homo sapiens
  misc_RNA (1)...(19): siRNA sense strand
ccaauaucuucgaguacca

SEQ ID NO: 2522457 - RNA, 19 nt, Homo sapiens
  misc_RNA (1)...(19): siRNA sense strand
gcaaaggcugugaagcaau

SEQ ID NO: 2522458 - RNA, 19 nt, Homo sapiens
  misc_RNA (1)...(19): siRNA sense strand
ucuaagaccuacagcaagu

SEQ ID NO: 2522459 - RNA, 19 nt, Homo sapiens
  misc_RNA (1)...(19): siRNA sense strand
gcuaagaaggaugguacua

SEQ ID NO: 2522460 - RNA, 19 nt, Homo sapiens
  misc_RNA (1)...(19): siRNA sense strand
uggaacucgaagugcaaua

SEQ ID NO: 2522461 - RNA, 19 nt, Homo sapiens
  misc_RNA (1)...(19): siRNA sense strand
gcgaaaaggcagagguuga

SEQ ID NO: 2522462 - RNA, 19 nt, Homo sapiens
  misc_RNA (1)...(19): siRNA sense strand
acuaauuggagcagaggua

SEQ ID NO: 2522463 - RNA, 19 nt, Homo sapiens
  misc_RNA (1)...(19): siRNA sense strand
ggucacauggagagaaaca

SEQ ID NO: 2522464 - RNA, 19 nt, Homo sapiens
  misc_RNA (1)...(19): siRNA sense strand
ugaagaaguuaaagggcgu

SEQ ID NO: 2522465 - RNA, 19 nt, Homo sapiens
  misc_RNA (1)...(19): siRNA sense strand
aggcagagguugaaaagau

SEQ ID NO: 2522466 - RNA, 19 nt, Homo sapiens
  misc_RNA (1)...(19): siRNA sense strand
cagcaaggucacauggaga

SEQ ID NO: 2522467 - RNA, 19 nt, Homo sapiens
  misc_RNA (1)...(19): siRNA sense strand
ugccaucauuggugguaaa

SEQ ID NO: 2522468 - RNA, 19 nt, Homo sapiens
  misc_RNA (1)...(19): siRNA sense strand
ccacaugguuuacuggaca

SEQ ID NO: 2522469 - RNA, 19 nt, Homo sapiens
  misc_RNA (1)...(19): siRNA sense strand
aggaaaccuauuuggaauu

SEQ ID NO: 2522470 - RNA, 19 nt, Homo sapiens
  misc_RNA (1)...(19): siRNA sense strand
uaugaagcucaaagguaua

SEQ ID NO: 2522471 - RNA, 19 nt, Homo sapiens
  misc_RNA (1)...(19): siRNA sense strand
ggugguaauugguguggca

SEQ ID NO: 2522472 - RNA, 19 nt, Homo sapiens
  misc_RNA (1)...(19): siRNA sense strand
aggcuaugguguugagaag

SEQ ID NO: 2522473 - RNA, 19 nt, Homo sapiens
  misc_RNA (1)...(19): siRNA sense strand
ggacugugcacguugguca

SEQ ID NO: 2522474 - RNA, 19 nt, Homo sapiens
  misc_RNA (1)...(19): siRNA sense strand
accagaaacuguaggccuu

SEQ ID NO: 2522475 - RNA, 19 nt, Homo sapiens
  misc_RNA (1)...(19): siRNA sense strand
caaagguauagaugcaaau

SEQ ID NO: 2522476 - RNA, 19 nt, Homo sapiens
  misc_RNA (1)...(19): siRNA sense strand
augggauggaccagcgaaa

SEQ ID NO: 2522477 - RNA, 19 nt, Homo sapiens
  misc_RNA (1)...(19): siRNA sense strand
aggaggagacaguuaugaa

SEQ ID NO: 2522478 - RNA, 19 nt, Homo sapiens
  misc_RNA (1)...(19): siRNA sense strand
aagucugcuuauugguuua

SEQ ID NO: 2522479 - RNA, 19 nt, Homo sapiens
  misc_RNA (1)...(19): siRNA sense strand
cguacaaagacugagacaa

SEQ ID NO: 2522480 - RNA, 19 nt, Homo sapiens
  misc_RNA (1)...(19): siRNA sense strand
gguaauugguguggcaacu

SEQ ID NO: 2522481 - RNA, 19 nt, Homo sapiens
  misc_RNA (1)...(19): siRNA sense strand
ggggauuuauacuggguuu

SEQ ID NO: 2522482 - RNA, 19 nt, Homo sapiens
  misc_RNA (1)...(19): siRNA sense strand
caaacuuguguguaagaga

SEQ ID NO: 2522483 - RNA, 19 nt, Homo sapiens
  misc_RNA (1)...(19): siRNA sense strand
aagcacaggaggagacagu

SEQ ID NO: 2522484 - RNA, 19 nt, Homo sapiens
  misc_RNA (1)...(19): siRNA sense strand
aaaugaaccaacagaagga

SEQ ID NO: 2522485 - RNA, 19 nt, Homo sapiens
  misc_RNA (1)...(19): siRNA sense strand
uggaucuguucuuggauuu

SEQ ID NO: 2522486 - RNA, 19 nt, Homo sapiens
  misc_RNA (1)...(19): siRNA sense strand
ccguaggcauugcaguauu

SEQ ID NO: 2522487 - RNA, 19 nt, Homo sapiens
  misc_RNA (1)...(19): siRNA sense strand
aauacgaagagaaggacaa

SEQ ID NO: 2522488 - RNA, 19 nt, Homo sapiens
  misc_RNA (1)...(19): siRNA sense strand
ccgaggaggaggacgcuau

SEQ ID NO: 2522489 - RNA, 19 nt, Homo sapiens
  misc_RNA (1)...(19): siRNA sense strand
ggaaagcgcugcugcugca

SEQ ID NO: 2522490 - RNA, 19 nt, Homo sapiens
  misc_RNA (1)...(19): siRNA sense strand
ccaacaaggcugagcuccu

SEQ ID NO: 2522491 - RNA, 19 nt, Homo sapiens
  misc_RNA (1)...(19): siRNA sense strand
cagaggacgaggagagcau

SEQ ID NO: 2522492 - RNA, 19 nt, Homo sapiens
  misc_RNA (1)...(19): siRNA sense strand
gcguggagagaaaggccaa

SEQ ID NO: 2522493 - RNA, 19 nt, Homo sapiens
  misc_RNA (1)...(19): siRNA sense strand
gagagaaaggccaagcuga

SEQ ID NO: 2522494 - RNA, 19 nt, Homo sapiens
  misc_RNA (1)...(19): siRNA sense strand
agucagaggacgaggagag

SEQ ID NO: 2522495 - RNA, 19 nt, Homo sapiens
  misc_RNA (1)...(19): siRNA sense strand
cuucagucgacaagggaaa

SEQ ID NO: 2522496 - RNA, 19 nt, Homo sapiens
  misc_RNA (1)...(19): siRNA sense strand
ccugauaaagagaggaaga

SEQ ID NO: 2522497 - RNA, 19 nt, Homo sapiens
  misc_RNA (1)...(19): siRNA sense strand
caauagaaaaucaggacaa

SEQ ID NO: 2522498 - RNA, 19 nt, Homo sapiens
  misc_RNA (1)...(19): siRNA sense strand
cugauaaagagaggaagaa

SEQ ID NO: 2522499 - RNA, 19 nt, Homo sapiens
  misc_RNA (1)...(19): siRNA sense strand
ggaagaagaucacccggga

SEQ ID NO: 2522500 - RNA, 19 nt, Homo sapiens
  misc_RNA (1)...(19): siRNA sense strand
gaagaagaucacccgggaa

SEQ ID NO: 2522501 - RNA, 19 nt, Homo sapiens
  misc_RNA (1)...(19): siRNA sense strand
uugacuggaaggagcuaaa

SEQ ID NO: 2522502 - RNA, 19 nt, Homo sapiens
  misc_RNA (1)...(19): siRNA sense strand
acaagggaaauuacggcua

SEQ ID NO: 2522503 - RNA, 19 nt, Homo sapiens
  misc_RNA (1)...(19): siRNA sense strand
gagauaaagagaaugggaa

SEQ ID NO: 2522504 - RNA, 19 nt, Homo sapiens
  misc_RNA (1)...(19): siRNA sense strand
gggaaaaggaagagcaacu

SEQ ID NO: 2522505 - RNA, 19 nt, Homo sapiens
  misc_RNA (1)...(19): siRNA sense strand
uguugaucccagagauaaa

SEQ ID NO: 2522506 - RNA, 19 nt, Homo sapiens
  misc_RNA (1)...(19): siRNA sense strand
guacagagaaguagcagca

SEQ ID NO: 2522507 - RNA, 19 nt, Homo sapiens
  misc_RNA (1)...(19): siRNA sense strand
agauaaagagaaugggaac

SEQ ID NO: 2522508 - RNA, 19 nt, Homo sapiens
  misc_RNA (1)...(19): siRNA sense strand
ucggcaucaucgagauaaa

SEQ ID NO: 2522509 - RNA, 19 nt, Homo sapiens
  misc_RNA (1)...(19): siRNA sense strand
cuuguugaucccagagaua

SEQ ID NO: 2522510 - RNA, 19 nt, Homo sapiens
  misc_RNA (1)...(19): siRNA sense strand
gauaaagagaaugggaaca

SEQ ID NO: 2522511 - RNA, 19 nt, Homo sapiens
  misc_RNA (1)...(19): siRNA sense strand
acacagacagagagugcau

SEQ ID NO: 2522512 - RNA, 19 nt, Homo sapiens
  misc_RNA (1)...(19): siRNA sense strand
acacagagcaagaccgagu

SEQ ID NO: 2522513 - RNA, 19 nt, Homo sapiens
  misc_RNA (1)...(19): siRNA sense strand
uuaaagagacuggggaaaa

SEQ ID NO: 2522514 - RNA, 19 nt, Homo sapiens
  misc_RNA (1)...(19): siRNA sense strand
gucuacaaacacagagcaa

SEQ ID NO: 2522515 - RNA, 19 nt, Homo sapiens
  misc_RNA (1)...(19): siRNA sense strand
agagcaacuuauaccgcaa

SEQ ID NO: 2522516 - RNA, 19 nt, Homo sapiens
  misc_RNA (1)...(19): siRNA sense strand
caaugaagguagcgaggag

SEQ ID NO: 2522517 - RNA, 19 nt, Homo sapiens
  misc_RNA (1)...(19): siRNA sense strand
cugaagaauacucugaaaa

SEQ ID NO: 2522518 - RNA, 19 nt, Homo sapiens
  misc_RNA (1)...(19): siRNA sense strand
aauuaaagagacuggggaa

SEQ ID NO: 2522519 - RNA, 19 nt, Homo sapiens
  misc_RNA (1)...(19): siRNA sense strand
accagaaccaauugaggaa

SEQ ID NO: 2522520 - RNA, 19 nt, Homo sapiens
  misc_RNA (1)...(19): siRNA sense strand
agaucaacuuaaggagauu

SEQ ID NO: 2522521 - RNA, 19 nt, Homo sapiens
  misc_RNA (1)...(19): siRNA sense strand
acuuaaggagauugcaaaa

SEQ ID NO: 2522522 - RNA, 19 nt, Homo sapiens
  misc_RNA (1)...(19): siRNA sense strand
gcaucaucgagauaaagaa

SEQ ID NO: 2522523 - RNA, 19 nt, Homo sapiens
  misc_RNA (1)...(19): siRNA sense strand
ggaagaaggcagaggaaaa

SEQ ID NO: 2522524 - RNA, 19 nt, Homo sapiens
  misc_RNA (1)...(19): siRNA sense strand
acucaggacuucugggaaa

SEQ ID NO: 2522525 - RNA, 19 nt, Homo sapiens
  misc_RNA (1)...(19): siRNA sense strand
agaagaaaucggaggaaga

SEQ ID NO: 2522526 - RNA, 19 nt, Homo sapiens
  misc_RNA (1)...(19): siRNA sense strand
ugacagaagaacagaagaa

SEQ ID NO: 2522527 - RNA, 19 nt, Homo sapiens
  misc_RNA (1)...(19): siRNA sense strand
gccaauguccagagggaua

SEQ ID NO: 2522528 - RNA, 19 nt, Homo sapiens
  misc_RNA (1)...(19): siRNA sense strand
gagcaaaggaugugggauc

SEQ ID NO: 2522529 - RNA, 19 nt, Homo sapiens
  misc_RNA (1)...(19): siRNA sense strand
uaauaaagaucaucggcaa

SEQ ID NO: 2522530 - RNA, 19 nt, Homo sapiens
  misc_RNA (1)...(19): siRNA sense strand
acaucgaagacgugaauaa

SEQ ID NO: 2522531 - RNA, 19 nt, Homo sapiens
  misc_RNA (1)...(19): siRNA sense strand
gggauauaugugugugaaa

SEQ ID NO: 2522532 - RNA, 19 nt, Homo sapiens
  misc_RNA (1)...(19): siRNA sense strand
aagagaaagaugaggauga

SEQ ID NO: 2522533 - RNA, 19 nt, Homo sapiens
  misc_RNA (1)...(19): siRNA sense strand
agaaagaugaggaugaauu

SEQ ID NO: 2522534 - RNA, 19 nt, Homo sapiens
  misc_RNA (1)...(19): siRNA sense strand
gggaaaacguacaugauau

SEQ ID NO: 2522535 - RNA, 19 nt, Homo sapiens
  misc_RNA (1)...(19): siRNA sense strand
aggcgaaauagcagaacaa

SEQ ID NO: 2522536 - RNA, 19 nt, Homo sapiens
  misc_RNA (1)...(19): siRNA sense strand
uggaagaagcagaacagaa

SEQ ID NO: 2522537 - RNA, 19 nt, Homo sapiens
  misc_RNA (1)...(19): siRNA sense strand
gcuauuuacuggagagugu

SEQ ID NO: 2522538 - RNA, 19 nt, Homo sapiens
  misc_RNA (1)...(19): siRNA sense strand
ugaaagacgcauugcagaa

SEQ ID NO: 2522539 - RNA, 19 nt, Homo sapiens
  misc_RNA (1)...(19): siRNA sense strand
accaauugcuguaggagaa

SEQ ID NO: 2522540 - RNA, 19 nt, Homo sapiens
  misc_RNA (1)...(19): siRNA sense strand
cugaaacugaaaugagaaa

SEQ ID NO: 2522541 - RNA, 19 nt, Homo sapiens
  misc_RNA (1)...(19): siRNA sense strand
caucaaaucucucaggaca

SEQ ID NO: 2522542 - RNA, 19 nt, Homo sapiens
  misc_RNA (1)...(19): siRNA sense strand
ugagacugcucgauggaaa

SEQ ID NO: 2522543 - RNA, 19 nt, Homo sapiens
  misc_RNA (1)...(19): siRNA sense strand
aaagaaguuuggaggucaa

SEQ ID NO: 2522544 - RNA, 19 nt, Homo sapiens
  misc_RNA (1)...(19): siRNA sense strand
gggaguggauagagaccau

SEQ ID NO: 2522545 - RNA, 19 nt, Homo sapiens
  misc_RNA (1)...(19): siRNA sense strand
cggcgcaccuguagaagaa

SEQ ID NO: 2522546 - RNA, 19 nt, Homo sapiens
  misc_RNA (1)...(19): siRNA sense strand
ggaugagggugguugugaa

SEQ ID NO: 2522547 - RNA, 19 nt, Homo sapiens
  misc_RNA (1)...(19): siRNA sense strand
aaacagaugaccagaguga

SEQ ID NO: 2522548 - RNA, 19 nt, Homo sapiens
  misc_RNA (1)...(19): siRNA sense strand
caaacaaacuccagcucau

SEQ ID NO: 2522549 - RNA, 19 nt, Homo sapiens
  misc_RNA (1)...(19): siRNA sense strand
ccuaugaccgggugacaaa

SEQ ID NO: 2522550 - RNA, 19 nt, Homo sapiens
  misc_RNA (1)...(19): siRNA sense strand
cgccaauguggaaggauua

SEQ ID NO: 2522551 - RNA, 19 nt, Homo sapiens
  misc_RNA (1)...(19): siRNA sense strand
cuaaacaacaagaaagaca

SEQ ID NO: 2522552 - RNA, 19 nt, Homo sapiens
  misc_RNA (1)...(19): siRNA sense strand
acagaugaccagagugaau

SEQ ID NO: 2522553 - RNA, 19 nt, Homo sapiens
  misc_RNA (1)...(19): siRNA sense strand
gggaagagaaagaugagga

SEQ ID NO: 2522554 - RNA, 19 nt, Homo sapiens
  misc_RNA (1)...(19): siRNA sense strand
gaggauaacgagagccgua

SEQ ID NO: 2522555 - RNA, 19 nt, Homo sapiens
  misc_RNA (1)...(19): siRNA sense strand
ccgacgacacggagagaga

SEQ ID NO: 2522556 - RNA, 19 nt, Homo sapiens
  misc_RNA (1)...(19): siRNA sense strand
ucacaaugaugguggaaac

SEQ ID NO: 2522557 - RNA, 19 nt, Homo sapiens
  misc_RNA (1)...(19): siRNA sense strand
cgaaagacgauuaagacga

SEQ ID NO: 2522558 - RNA, 19 nt, Homo sapiens
  misc_RNA (1)...(19): siRNA sense strand
uucaaaggauggauggaua

SEQ ID NO: 2522559 - RNA, 19 nt, Homo sapiens
  misc_RNA (1)...(19): siRNA sense strand
gaggaacauaguauagaaa

SEQ ID NO: 2522560 - RNA, 19 nt, Homo sapiens
  misc_RNA (1)...(19): siRNA sense strand
auuacgugcugcugggaaa

SEQ ID NO: 2522561 - RNA, 19 nt, Homo sapiens
  misc_RNA (1)...(19): siRNA sense strand
ucgccaauguggaaggauu

SEQ ID NO: 2522562 - RNA, 19 nt, Homo sapiens
  misc_RNA (1)...(19): siRNA sense strand
uaauguaggauuuggguau

SEQ ID NO: 2522563 - RNA, 19 nt, Homo sapiens
  misc_RNA (1)...(19): siRNA sense strand
cagccuaaguaugaagaaa

SEQ ID NO: 2522564 - RNA, 19 nt, Homo sapiens
  misc_RNA (1)...(19): siRNA sense strand
acagaagaacagaagaaau

SEQ ID NO: 2522565 - RNA, 19 nt, Homo sapiens
  misc_RNA (1)...(19): siRNA sense strand
ggauagagaccauguggga

SEQ ID NO: 2522566 - RNA, 19 nt, Homo sapiens
  misc_RNA (1)...(19): siRNA sense strand
uggaacuacaagugguaua

SEQ ID NO: 2522567 - RNA, 19 nt, Homo sapiens
  misc_RNA (1)...(19): siRNA sense strand
caaugaugguggaaacaga

SEQ ID NO: 2522568 - RNA, 19 nt, Homo sapiens
  misc_RNA (1)...(19): siRNA sense strand
augagaaagagaaggucaa

SEQ ID NO: 2522569 - RNA, 19 nt, Homo sapiens
  misc_RNA (1)...(19): siRNA sense strand
agauucaaguguugucaaa

SEQ ID NO: 2522570 - RNA, 19 nt, Homo sapiens
  misc_RNA (1)...(19): siRNA sense strand
cggucauccuggagaacuu

SEQ ID NO: 2522571 - RNA, 19 nt, Homo sapiens
  misc_RNA (1)...(19): siRNA sense strand
ccugaggaauaaauguaua

SEQ ID NO: 2522572 - RNA, 19 nt, Homo sapiens
  misc_RNA (1)...(19): siRNA sense strand
ggaagagaaagaugaggau

SEQ ID NO: 2522573 - RNA, 19 nt, Homo sapiens
  misc_RNA (1)...(19): siRNA sense strand
ucuaacaaauacaguggaa

SEQ ID NO: 2522574 - RNA, 19 nt, Homo sapiens
  misc_RNA (1)...(19): siRNA sense strand
gggaacaaccacugaaacu

SEQ ID NO: 2522575 - RNA, 19 nt, Homo sapiens
  misc_RNA (1)...(19): siRNA sense strand
uggucauggugauuggaaa

SEQ ID NO: 2522576 - RNA, 19 nt, Homo sapiens
  misc_RNA (1)...(19): siRNA sense strand
uggaagaaagcaaagagaa

SEQ ID NO: 2522577 - RNA, 19 nt, Homo sapiens
  misc_RNA (1)...(19): siRNA sense strand
aaacaaugguggaaccuga

SEQ ID NO: 2522578 - RNA, 19 nt, Homo sapiens
  misc_RNA (1)...(19): siRNA sense strand
ugaagaaagugcagagccu

SEQ ID NO: 2522579 - RNA, 19 nt, Homo sapiens
  misc_RNA (1)...(19): siRNA sense strand
aggagagaguggagagaug

SEQ ID NO: 2522580 - RNA, 19 nt, Homo sapiens
  misc_RNA (1)...(19): siRNA sense strand
gcgaaugggaagaugcaca

SEQ ID NO: 2522581 - RNA, 19 nt, Homo sapiens
  misc_RNA (1)...(19): siRNA sense strand
guggaagaaggcagaggaa

SEQ ID NO: 2522582 - RNA, 19 nt, Homo sapiens
  misc_RNA (1)...(19): siRNA sense strand
agauacaccuucacaggaa

SEQ ID NO: 2522583 - RNA, 19 nt, Homo sapiens
  misc_RNA (1)...(19): siRNA sense strand
ccuacgaggaacagaauca

SEQ ID NO: 2522584 - RNA, 19 nt, Homo sapiens
  misc_RNA (1)...(19): siRNA sense strand
agaaaucggaggaagaaaa

SEQ ID NO: 2522585 - RNA, 19 nt, Homo sapiens
  misc_RNA (1)...(19): siRNA sense strand
agagaaagaugaggaugaa

SEQ ID NO: 2522586 - RNA, 19 nt, Homo sapiens
  misc_RNA (1)...(19): siRNA sense strand
agaaagagaaggucaaguu

SEQ ID NO: 2522587 - RNA, 19 nt, Homo sapiens
  misc_RNA (1)...(19): siRNA sense strand
aguggaagaacuugaagaa

SEQ ID NO: 2522588 - RNA, 19 nt, Homo sapiens
  misc_RNA (1)...(19): siRNA sense strand
ccgcauuaccauagaguca

SEQ ID NO: 2522589 - RNA, 19 nt, Homo sapiens
  misc_RNA (1)...(19): siRNA sense strand
uugcaggagacgagagaau

SEQ ID NO: 2522590 - RNA, 19 nt, Homo sapiens
  misc_RNA (1)...(19): siRNA sense strand
ggaccucagugcugggcua

SEQ ID NO: 2522591 - RNA, 19 nt, Homo sapiens
  misc_RNA (1)...(19): siRNA sense strand
uggaagaggacaagcgcau

SEQ ID NO: 2522592 - RNA, 19 nt, Homo sapiens
  misc_RNA (1)...(19): siRNA sense strand
gcuaugugcugaagggcca

SEQ ID NO: 2522593 - RNA, 19 nt, Homo sapiens
  misc_RNA (1)...(19): siRNA sense strand
ccaacuggccagagcccua

SEQ ID NO: 2522594 - RNA, 19 nt, Homo sapiens
  misc_RNA (1)...(19): siRNA sense strand
uggaaaucaaggucaagaa

SEQ ID NO: 2522595 - RNA, 19 nt, Homo sapiens
  misc_RNA (1)...(19): siRNA sense strand
gaauaucagccuccgggaa

SEQ ID NO: 2522596 - RNA, 19 nt, Homo sapiens
  misc_RNA (1)...(19): siRNA sense strand
uugcagagguuguguccca

SEQ ID NO: 2522597 - RNA, 19 nt, Homo sapiens
  misc_RNA (1)...(19): siRNA sense strand
ugcauguggaagaggacaa

SEQ ID NO: 2522598 - RNA, 19 nt, Homo sapiens
  misc_RNA (1)...(19): siRNA sense strand
cagccuggaugguugccaa

SEQ ID NO: 2522599 - RNA, 19 nt, Homo sapiens
  misc_RNA (1)...(19): siRNA sense strand
guguauuaaaccagccaaa

SEQ ID NO: 2522600 - RNA, 19 nt, Homo sapiens
  misc_RNA (1)...(19): siRNA sense strand
cagauggggucgaggauuu

SEQ ID NO: 2522601 - RNA, 19 nt, Homo sapiens
  misc_RNA (1)...(19): siRNA sense strand
gggucgaggauuuggucuu

SEQ ID NO: 2522602 - RNA, 19 nt, Homo sapiens
  misc_RNA (1)...(19): siRNA sense strand
acuuugugcugaaggaguu

SEQ ID NO: 2522603 - RNA, 19 nt, Homo sapiens
  misc_RNA (1)...(19): siRNA sense strand
uggcagaagcaguggugaa

SEQ ID NO: 2522604 - RNA, 19 nt, Homo sapiens
  misc_RNA (1)...(19): siRNA sense strand
agucaaaacaugucagaau

SEQ ID NO: 2522605 - RNA, 19 nt, Homo sapiens
  misc_RNA (1)...(19): siRNA sense strand
ccauguuaaagaagaggaa

SEQ ID NO: 2522606 - RNA, 19 nt, Homo sapiens
  misc_RNA (1)...(19): siRNA sense strand
acaucagagagaaaggaaa

SEQ ID NO: 2522607 - RNA, 19 nt, Homo sapiens
  misc_RNA (1)...(19): siRNA sense strand
ggaaucaagaucagggcuu

SEQ ID NO: 2522608 - RNA, 19 nt, Homo sapiens
  misc_RNA (1)...(19): siRNA sense strand
gaacauacacaguggggau

SEQ ID NO: 2522609 - RNA, 19 nt, Homo sapiens
  misc_RNA (1)...(19): siRNA sense strand
uugucaaaguaucuggaaa

SEQ ID NO: 2522610 - RNA, 19 nt, Homo sapiens
  misc_RNA (1)...(19): siRNA sense strand
ugguacagugagugagauu

SEQ ID NO: 2522611 - RNA, 19 nt, Homo sapiens
  misc_RNA (1)...(19): siRNA sense strand
agaaucuggaggaagguua

SEQ ID NO: 2522612 - RNA, 19 nt, Homo sapiens
  misc_RNA (1)...(19): siRNA sense strand
cagagagaaaggaaaugaa

SEQ ID NO: 2522613 - RNA, 19 nt, Homo sapiens
  misc_RNA (1)...(19): siRNA sense strand
aguuaaaaggaaagagcuu

SEQ ID NO: 2522614 - RNA, 19 nt, Homo sapiens
  misc_RNA (1)...(19): siRNA sense strand
auauggauuucaagcacaa

SEQ ID NO: 2522615 - RNA, 19 nt, Homo sapiens
  misc_RNA (1)...(19): siRNA sense strand
caucuuacagagugcagaa

SEQ ID NO: 2522616 - RNA, 19 nt, Homo sapiens
  misc_RNA (1)...(19): siRNA sense strand
aguuugaacagcaaggaga

SEQ ID NO: 2522617 - RNA, 19 nt, Homo sapiens
  misc_RNA (1)...(19): siRNA sense strand
auguuaaagaagaggaaag

SEQ ID NO: 2522618 - RNA, 19 nt, Homo sapiens
  misc_RNA (1)...(19): siRNA sense strand
cauuaaugacacugaguuc

SEQ ID NO: 2522619 - RNA, 19 nt, Homo sapiens
  misc_RNA (1)...(19): siRNA sense strand
agagaaaggaaaugaaguc

SEQ ID NO: 2522620 - RNA, 19 nt, Homo sapiens
  misc_RNA (1)...(19): siRNA sense strand
ccuccaagucagccagaaa

SEQ ID NO: 2522621 - RNA, 19 nt, Homo sapiens
  misc_RNA (1)...(19): siRNA sense strand
cuuuaauggcuuuggggua

SEQ ID NO: 2522622 - RNA, 19 nt, Homo sapiens
  misc_RNA (1)...(19): siRNA sense strand
cccugaaacaugaggagaa

SEQ ID NO: 2522623 - RNA, 19 nt, Homo sapiens
  misc_RNA (1)...(19): siRNA sense strand
ggaacggagauuuggccaa

SEQ ID NO: 2522624 - RNA, 19 nt, Homo sapiens
  misc_RNA (1)...(19): siRNA sense strand
ugaggagaagggagagaau

SEQ ID NO: 2522625 - RNA, 19 nt, Homo sapiens
  misc_RNA (1)...(19): siRNA sense strand
acaucaggauauucagcaa

SEQ ID NO: 2522626 - RNA, 19 nt, Homo sapiens
  misc_RNA (1)...(19): siRNA sense strand
ucgaaucuggagagagaau

SEQ ID NO: 2522627 - RNA, 19 nt, Homo sapiens
  misc_RNA (1)...(19): siRNA sense strand
ccuuuagacuccuggcuca

SEQ ID NO: 2522628 - RNA, 19 nt, Homo sapiens
  misc_RNA (1)...(19): siRNA sense strand
uggaaaaccgagaccauua

SEQ ID NO: 2522629 - RNA, 19 nt, Homo sapiens
  misc_RNA (1)...(19): siRNA sense strand
auugaaggguugcaggaca

SEQ ID NO: 2522630 - RNA, 19 nt, Homo sapiens
  misc_RNA (1)...(19): siRNA sense strand
aacaugaggagaagggaga

SEQ ID NO: 2522631 - RNA, 19 nt, Homo sapiens
  misc_RNA (1)...(19): siRNA sense strand
agaagggagagaaugagaa

SEQ ID NO: 2522632 - RNA, 19 nt, Homo sapiens
  misc_RNA (1)...(19): siRNA sense strand
cgccuggaacugaaugaaa

SEQ ID NO: 2522633 - RNA, 19 nt, Homo sapiens
  misc_RNA (1)...(19): siRNA sense strand
cuaaagaaacggaaggaga

SEQ ID NO: 2522634 - RNA, 19 nt, Homo sapiens
  misc_RNA (1)...(19): siRNA sense strand
guguagaggcccagccaaa

SEQ ID NO: 2522635 - RNA, 19 nt, Homo sapiens
  misc_RNA (1)...(19): siRNA sense strand
aggcagaagaggaggcaca

SEQ ID NO: 2522636 - RNA, 19 nt, Homo sapiens
  misc_RNA (1)...(19): siRNA sense strand
guacacgaccagcgggaaa

SEQ ID NO: 2522637 - RNA, 19 nt, Homo sapiens
  misc_RNA (1)...(19): siRNA sense strand
gcucugggcaugaggacaa

SEQ ID NO: 2522638 - RNA, 19 nt, Homo sapiens
  misc_RNA (1)...(19): siRNA sense strand
gggagaugcaagaggcaga

SEQ ID NO: 2522639 - RNA, 19 nt, Homo sapiens
  misc_RNA (1)...(19): siRNA sense strand
aggcgcaguuagaggaaau

SEQ ID NO: 2522640 - RNA, 19 nt, Homo sapiens
  misc_RNA (1)...(19): siRNA sense strand
ccauguacuuggagacaca

SEQ ID NO: 2522641 - RNA, 19 nt, Homo sapiens
  misc_RNA (1)...(19): siRNA sense strand
aagcugagcaggagggaga

SEQ ID NO: 2522642 - RNA, 19 nt, Homo sapiens
  misc_RNA (1)...(19): siRNA sense strand
aggaugaagcagaaagaga

SEQ ID NO: 2522643 - RNA, 19 nt, Homo sapiens
  misc_RNA (1)...(19): siRNA sense strand
ggaaacuaaagaagggaca

SEQ ID NO: 2522644 - RNA, 19 nt, Homo sapiens
  misc_RNA (1)...(19): siRNA sense strand
gggucaaggcucugggcau

SEQ ID NO: 2522645 - RNA, 19 nt, Homo sapiens
  misc_RNA (1)...(19): siRNA sense strand
ucaggagagagaagggaaa

SEQ ID NO: 2522646 - RNA, 19 nt, Homo sapiens
  misc_RNA (1)...(19): siRNA sense strand
aggacaacuugcaggguga

SEQ ID NO: 2522647 - RNA, 19 nt, Homo sapiens
  misc_RNA (1)...(19): siRNA sense strand
aggaagaaagugagcccua

SEQ ID NO: 2522648 - RNA, 19 nt, Homo sapiens
  misc_RNA (1)...(19): siRNA sense strand
cagaagaagggcugcaaga

SEQ ID NO: 2522649 - RNA, 19 nt, Homo sapiens
  misc_RNA (1)...(19): siRNA sense strand
cagaagaagggcugcaaga

SEQ ID NO: 2522650 - RNA, 19 nt, Homo sapiens
  misc_RNA (1)...(19): siRNA sense strand
cagaagaagggcugcaaga

SEQ ID NO: 2522651 - RNA, 19 nt, Homo sapiens
  misc_RNA (1)...(19): siRNA sense strand
cagaagaagggcugcaaga

SEQ ID NO: 2522652 - RNA, 19 nt, Homo sapiens
  misc_RNA (1)...(19): siRNA sense strand
cagaagaagggcugcaaga

SEQ ID NO: 2522653 - RNA, 19 nt, Homo sapiens
  misc_RNA (1)...(19): siRNA sense strand
cagaagaagggcugcaaga

SEQ ID NO: 2522654 - RNA, 19 nt, Homo sapiens
  misc_RNA (1)...(19): siRNA sense strand
uggcagaaagacucagaaa

SEQ ID NO: 2522655 - RNA, 19 nt, Homo sapiens
  misc_RNA (1)...(19): siRNA sense strand
gagaagaccuugaggagug

SEQ ID NO: 2522656 - RNA, 19 nt, Homo sapiens
  misc_RNA (1)...(19): siRNA sense strand
guucucagucacaggaaua

SEQ ID NO: 2522657 - RNA, 19 nt, Homo sapiens
  misc_RNA (1)...(19): siRNA sense strand
gagacucaacagagacaaa

SEQ ID NO: 2522658 - RNA, 19 nt, Homo sapiens
  misc_RNA (1)...(19): siRNA sense strand
aguuagaggaaguuaaaga

SEQ ID NO: 2522659 - RNA, 19 nt, Homo sapiens
  misc_RNA (1)...(19): siRNA sense strand
ccaggaggcagaagaggaa

SEQ ID NO: 2522660 - RNA, 19 nt, Homo sapiens
  misc_RNA (1)...(19): siRNA sense strand
ccucagaucuccugcgcuu

SEQ ID NO: 2522661 - RNA, 19 nt, Homo sapiens
  misc_RNA (1)...(19): siRNA sense strand
aggcagagacgcaaggaca

SEQ ID NO: 2522662 - RNA, 19 nt, Homo sapiens
  misc_RNA (1)...(19): siRNA sense strand
ccaaugaggaugaagcaga

SEQ ID NO: 2522663 - RNA, 19 nt, Homo sapiens
  misc_RNA (1)...(19): siRNA sense strand
gggcauaagugaaagggga

SEQ ID NO: 2522664 - RNA, 19 nt, Homo sapiens
  misc_RNA (1)...(19): siRNA sense strand
ggacacaggccucugggaa

SEQ ID NO: 2522665 - RNA, 19 nt, Homo sapiens
  misc_RNA (1)...(19): siRNA sense strand
gggagagggcauaagugaa

SEQ ID NO: 2522666 - RNA, 19 nt, Homo sapiens
  misc_RNA (1)...(19): siRNA sense strand
guuagaggaaauugaagaa

SEQ ID NO: 2522667 - RNA, 19 nt, Homo sapiens
  misc_RNA (1)...(19): siRNA sense strand
cccagaaggcagaagguau

SEQ ID NO: 2522668 - RNA, 19 nt, Homo sapiens
  misc_RNA (1)...(19): siRNA sense strand
agaagggacagaaggagaa

SEQ ID NO: 2522669 - RNA, 19 nt, Homo sapiens
  misc_RNA (1)...(19): siRNA sense strand
ucucaaagaggaaggacuu

SEQ ID NO: 2522670 - RNA, 19 nt, Homo sapiens
  misc_RNA (1)...(19): siRNA sense strand
aggcagaagaggaggccca

SEQ ID NO: 2522671 - RNA, 19 nt, Homo sapiens
  misc_RNA (1)...(19): siRNA sense strand
aggcagaagaggaggccca

SEQ ID NO: 2522672 - RNA, 19 nt, Homo sapiens
  misc_RNA (1)...(19): siRNA sense strand
gaggagaaacucaagguga

SEQ ID NO: 2522673 - RNA, 19 nt, Homo sapiens
  misc_RNA (1)...(19): siRNA sense strand
gggugcaguuagaggaagu

SEQ ID NO: 2522674 - RNA, 19 nt, Homo sapiens
  misc_RNA (1)...(19): siRNA sense strand
agccaaagucagaagguga

SEQ ID NO: 2522675 - RNA, 19 nt, Homo sapiens
  misc_RNA (1)...(19): siRNA sense strand
aagaagggacagaaggaga

SEQ ID NO: 2522676 - RNA, 19 nt, Homo sapiens
  misc_RNA (1)...(19): siRNA sense strand
cuggaguggacgaggguga

SEQ ID NO: 2522677 - RNA, 19 nt, Homo sapiens
  misc_RNA (1)...(19): siRNA sense strand
aggcagagggagaugcaau

SEQ ID NO: 2522678 - RNA, 19 nt, Homo sapiens
  misc_RNA (1)...(19): siRNA sense strand
gguuggacggccugagcaa

SEQ ID NO: 2522679 - RNA, 19 nt, Homo sapiens
  misc_RNA (1)...(19): siRNA sense strand
cauaugaguuggcggacga

SEQ ID NO: 2522680 - RNA, 19 nt, Homo sapiens
  misc_RNA (1)...(19): siRNA sense strand
agguugaaguggagaccca

SEQ ID NO: 2522681 - RNA, 19 nt, Homo sapiens
  misc_RNA (1)...(19): siRNA sense strand
cggcaaagccucagaucuc

SEQ ID NO: 2522682 - RNA, 19 nt, Homo sapiens
  misc_RNA (1)...(19): siRNA sense strand
cagaagauguagaggcccu

SEQ ID NO: 2522683 - RNA, 19 nt, Homo sapiens
  misc_RNA (1)...(19): siRNA sense strand
agccagagucagaagguau

SEQ ID NO: 2522684 - RNA, 19 nt, Homo sapiens
  misc_RNA (1)...(19): siRNA sense strand
cagaagguguagaggccca

SEQ ID NO: 2522685 - RNA, 19 nt, Homo sapiens
  misc_RNA (1)...(19): siRNA sense strand
agccagagucagaagguau

SEQ ID NO: 2522686 - RNA, 19 nt, Homo sapiens
  misc_RNA (1)...(19): siRNA sense strand
agccagagucagaagguau

SEQ ID NO: 2522687 - RNA, 19 nt, Homo sapiens
  misc_RNA (1)...(19): siRNA sense strand
aagcagaaagagacaguga

SEQ ID NO: 2522688 - RNA, 19 nt, Homo sapiens
  misc_RNA (1)...(19): siRNA sense strand
ggacagaaggagaagggcu

SEQ ID NO: 2522689 - RNA, 19 nt, Homo sapiens
  misc_RNA (1)...(19): siRNA sense strand
ggaaguuaaagaagggcca

SEQ ID NO: 2522690 - RNA, 19 nt, Homo sapiens
  misc_RNA (1)...(19): siRNA sense strand
cgcagagggcacagaggaa

SEQ ID NO: 2522691 - RNA, 19 nt, Homo sapiens
  misc_RNA (1)...(19): siRNA sense strand
gugaagaggcccaggaggu

SEQ ID NO: 2522692 - RNA, 19 nt, Homo sapiens
  misc_RNA (1)...(19): siRNA sense strand
gggugcaguuagaggaaac

SEQ ID NO: 2522693 - RNA, 19 nt, Homo sapiens
  misc_RNA (1)...(19): siRNA sense strand
gggugcaguuagaggaaac

SEQ ID NO: 2522694 - RNA, 19 nt, Homo sapiens
  misc_RNA (1)...(19): siRNA sense strand
gggugcaguuagaggaaac

SEQ ID NO: 2522695 - RNA, 19 nt, Homo sapiens
  misc_RNA (1)...(19): siRNA sense strand
gggugcaguuagaggaaac

SEQ ID NO: 2522696 - RNA, 19 nt, Homo sapiens
  misc_RNA (1)...(19): siRNA sense strand
gggugcaguuagaggaaac

SEQ ID NO: 2522697 - RNA, 19 nt, Homo sapiens
  misc_RNA (1)...(19): siRNA sense strand
gggugcaguuagaggaaac

SEQ ID NO: 2522698 - RNA, 19 nt, Homo sapiens
  misc_RNA (1)...(19): siRNA sense strand
cagucuaggagauggccaa

SEQ ID NO: 2522699 - RNA, 19 nt, Homo sapiens
  misc_RNA (1)...(19): siRNA sense strand
ggagaaaugcacagaaaau

SEQ ID NO: 2522700 - RNA, 19 nt, Homo sapiens
  misc_RNA (1)...(19): siRNA sense strand
cuggaaguuuacagcaaua

SEQ ID NO: 2522701 - RNA, 19 nt, Homo sapiens
  misc_RNA (1)...(19): siRNA sense strand
guauagaagcaaauagcau

SEQ ID NO: 2522702 - RNA, 19 nt, Homo sapiens
  misc_RNA (1)...(19): siRNA sense strand
gauucaucuucaaggagaa

SEQ ID NO: 2522703 - RNA, 19 nt, Homo sapiens
  misc_RNA (1)...(19): siRNA sense strand
ugacagaaguggaggccuc

SEQ ID NO: 2522704 - RNA, 19 nt, Homo sapiens
  misc_RNA (1)...(19): siRNA sense strand
cucugauguuguugaauua

SEQ ID NO: 2522705 - RNA, 19 nt, Homo sapiens
  misc_RNA (1)...(19): siRNA sense strand
cuggaagauugccuggaua

SEQ ID NO: 2522706 - RNA, 19 nt, Homo sapiens
  misc_RNA (1)...(19): siRNA sense strand
gcaaauuaauauagugcug

SEQ ID NO: 2522707 - RNA, 19 nt, Homo sapiens
  misc_RNA (1)...(19): siRNA sense strand
aguacuuggugauaaacaa

SEQ ID NO: 2522708 - RNA, 19 nt, Homo sapiens
  misc_RNA (1)...(19): siRNA sense strand
ggauucaucuucaaggaga

SEQ ID NO: 2522709 - RNA, 19 nt, Homo sapiens
  misc_RNA (1)...(19): siRNA sense strand
cuaauuggucagauggauu

SEQ ID NO: 2522710 - RNA, 19 nt, Homo sapiens
  misc_RNA (1)...(19): siRNA sense strand
uggaagauugccuggauau

SEQ ID NO: 2522711 - RNA, 19 nt, Homo sapiens
  misc_RNA (1)...(19): siRNA sense strand
cuggagagcagaagcauca

SEQ ID NO: 2522712 - RNA, 19 nt, Homo sapiens
  misc_RNA (1)...(19): siRNA sense strand
ucuugaucuuugugaguuu

SEQ ID NO: 2522713 - RNA, 19 nt, Homo sapiens
  misc_RNA (1)...(19): siRNA sense strand
cuagcaagucgcagaauca

SEQ ID NO: 2522714 - RNA, 19 nt, Homo sapiens
  misc_RNA (1)...(19): siRNA sense strand
aaagaaugacccauggcua

SEQ ID NO: 2522715 - RNA, 19 nt, Homo sapiens
  misc_RNA (1)...(19): siRNA sense strand
gcuucuagacaguucacaa

SEQ ID NO: 2522716 - RNA, 19 nt, Homo sapiens
  misc_RNA (1)...(19): siRNA sense strand
aaguuauggucuugaucuu

SEQ ID NO: 2522717 - RNA, 19 nt, Homo sapiens
  misc_RNA (1)...(19): siRNA sense strand
aagagaugaaucagugaau

SEQ ID NO: 2522718 - RNA, 19 nt, Homo sapiens
  misc_RNA (1)...(19): siRNA sense strand
agcucaugcuggaaguuua

SEQ ID NO: 2522719 - RNA, 19 nt, Homo sapiens
  misc_RNA (1)...(19): siRNA sense strand
cugucuguauagaagcaaa

SEQ ID NO: 2522720 - RNA, 19 nt, Homo sapiens
  misc_RNA (1)...(19): siRNA sense strand
gaauaaguauggaacugga

SEQ ID NO: 2522721 - RNA, 19 nt, Homo sapiens
  misc_RNA (1)...(19): siRNA sense strand
gugcaacacacuuugaaca

SEQ ID NO: 2522722 - RNA, 19 nt, Homo sapiens
  misc_RNA (1)...(19): siRNA sense strand
gugauugcaaugacaacua

SEQ ID NO: 2522723 - RNA, 19 nt, Homo sapiens
  misc_RNA (1)...(19): siRNA sense strand
aaacaguucuggagagcag

SEQ ID NO: 2522724 - RNA, 19 nt, Homo sapiens
  misc_RNA (1)...(19): siRNA sense strand
ccuucaggaauuagugaca

SEQ ID NO: 2522725 - RNA, 19 nt, Homo sapiens
  misc_RNA (1)...(19): siRNA sense strand
acgacaccuuuguggacua

SEQ ID NO: 2522726 - RNA, 19 nt, Homo sapiens
  misc_RNA (1)...(19): siRNA sense strand
cugucgaggcugcaacaaa

SEQ ID NO: 2522727 - RNA, 19 nt, Homo sapiens
  misc_RNA (1)...(19): siRNA sense strand
caaagaugagagugcacau

SEQ ID NO: 2522728 - RNA, 19 nt, Homo sapiens
  misc_RNA (1)...(19): siRNA sense strand
gcgccaacuuccugcagca

SEQ ID NO: 2522729 - RNA, 19 nt, Homo sapiens
  misc_RNA (1)...(19): siRNA sense strand
augaagaacaggagaagaa

SEQ ID NO: 2522730 - RNA, 19 nt, Homo sapiens
  misc_RNA (1)...(19): siRNA sense strand
uagugaagaaagugaguaa

SEQ ID NO: 2522731 - RNA, 19 nt, Homo sapiens
  misc_RNA (1)...(19): siRNA sense strand
cuauugaaggagaggcaaa

SEQ ID NO: 2522732 - RNA, 19 nt, Homo sapiens
  misc_RNA (1)...(19): siRNA sense strand
ugaaugaagaacaggagaa

SEQ ID NO: 2522733 - RNA, 19 nt, Homo sapiens
  misc_RNA (1)...(19): siRNA sense strand
cggauaaagaccaaaucaa

SEQ ID NO: 2522734 - RNA, 19 nt, Homo sapiens
  misc_RNA (1)...(19): siRNA sense strand
aaggauaucuggaaggaga

SEQ ID NO: 2522735 - RNA, 19 nt, Homo sapiens
  misc_RNA (1)...(19): siRNA sense strand
auugauaccaagaguguaa

SEQ ID NO: 2522736 - RNA, 19 nt, Homo sapiens
  misc_RNA (1)...(19): siRNA sense strand
ccgucagaguguucagcaa

SEQ ID NO: 2522737 - RNA, 19 nt, Homo sapiens
  misc_RNA (1)...(19): siRNA sense strand
gggugguagugaagaaagu

SEQ ID NO: 2522738 - RNA, 19 nt, Homo sapiens
  misc_RNA (1)...(19): siRNA sense strand
aguuuaaggaugcgcggaa

SEQ ID NO: 2522739 - RNA, 19 nt, Homo sapiens
  misc_RNA (1)...(19): siRNA sense strand
gugaagaaagugaguaaac

SEQ ID NO: 2522740 - RNA, 19 nt, Homo sapiens
  misc_RNA (1)...(19): siRNA sense strand
gaagaacaggagaagaaaa

SEQ ID NO: 2522741 - RNA, 19 nt, Homo sapiens
  misc_RNA (1)...(19): siRNA sense strand
cgagagagcuguuggaagg

SEQ ID NO: 2522742 - RNA, 19 nt, Homo sapiens
  misc_RNA (1)...(19): siRNA sense strand
ccaauaaguuuaaggaugc

SEQ ID NO: 2522743 - RNA, 19 nt, Homo sapiens
  misc_RNA (1)...(19): siRNA sense strand
acgaucaauuuaagcagaa

SEQ ID NO: 2522744 - RNA, 19 nt, Homo sapiens
  misc_RNA (1)...(19): siRNA sense strand
cgcgagcaggugugagaaa

SEQ ID NO: 2522745 - RNA, 19 nt, Homo sapiens
  misc_RNA (1)...(19): siRNA sense strand
aagaacaggagaagaaaau

SEQ ID NO: 2522746 - RNA, 19 nt, Homo sapiens
  misc_RNA (1)...(19): siRNA sense strand
aaacaaguauauagcccau

SEQ ID NO: 2522747 - RNA, 19 nt, Homo sapiens
  misc_RNA (1)...(19): siRNA sense strand
uggaagaucugguaccuga

SEQ ID NO: 2522748 - RNA, 19 nt, Homo sapiens
  misc_RNA (1)...(19): siRNA sense strand
aguucuuacuccugaccaa

SEQ ID NO: 2522749 - RNA, 19 nt, Homo sapiens
  misc_RNA (1)...(19): siRNA sense strand
accaauaaguuuaaggaug

SEQ ID NO: 2522750 - RNA, 19 nt, Homo sapiens
  misc_RNA (1)...(19): siRNA sense strand
ucuaaagacccgucagagu

SEQ ID NO: 2522751 - RNA, 19 nt, Homo sapiens
  misc_RNA (1)...(19): siRNA sense strand
cccagaaagcuacgaucaa

SEQ ID NO: 2522752 - RNA, 19 nt, Homo sapiens
  misc_RNA (1)...(19): siRNA sense strand
caccaagaauucuggacca

SEQ ID NO: 2522753 - RNA, 19 nt, Homo sapiens
  misc_RNA (1)...(19): siRNA sense strand
cgucagaguguucagcaau

SEQ ID NO: 2522754 - RNA, 19 nt, Homo sapiens
  misc_RNA (1)...(19): siRNA sense strand
cccuacaacguuugggauu

SEQ ID NO: 2522755 - RNA, 19 nt, Homo sapiens
  misc_RNA (1)...(19): siRNA sense strand
ccagaagcccuuaguggga

SEQ ID NO: 2522756 - RNA, 19 nt, Homo sapiens
  misc_RNA (1)...(19): siRNA sense strand
augaauuucccgagggugu

SEQ ID NO: 2522757 - RNA, 19 nt, Homo sapiens
  misc_RNA (1)...(19): siRNA sense strand
ccuuagugggacauaauau

SEQ ID NO: 2522758 - RNA, 19 nt, Homo sapiens
  misc_RNA (1)...(19): siRNA sense strand
aagaguguaacaaaggaua

SEQ ID NO: 2522759 - RNA, 19 nt, Homo sapiens
  misc_RNA (1)...(19): siRNA sense strand
agaguguaacaaaggauau

SEQ ID NO: 2522760 - RNA, 19 nt, Homo sapiens
  misc_RNA (1)...(19): siRNA sense strand
cuacagaagauauaccaca

SEQ ID NO: 2522761 - RNA, 19 nt, Homo sapiens
  misc_RNA (1)...(19): siRNA sense strand
acauagaguucacgggccu

SEQ ID NO: 2522762 - RNA, 19 nt, Homo sapiens
  misc_RNA (1)...(19): siRNA sense strand
cgcuauugaaggagaggca

SEQ ID NO: 2522763 - RNA, 19 nt, Homo sapiens
  misc_RNA (1)...(19): siRNA sense strand
aaggaaggcgacuggauga

SEQ ID NO: 2522764 - RNA, 19 nt, Homo sapiens
  misc_RNA (1)...(19): siRNA sense strand
gagaaauauguugagacaa

SEQ ID NO: 2522765 - RNA, 19 nt, Homo sapiens
  misc_RNA (1)...(19): siRNA sense strand
ccauaaggaggaagggagu

SEQ ID NO: 2522766 - RNA, 19 nt, Homo sapiens
  misc_RNA (1)...(19): siRNA sense strand
ucaacaaaccagaggcgga

SEQ ID NO: 2522767 - RNA, 19 nt, Homo sapiens
  misc_RNA (1)...(19): siRNA sense strand
ggaagggagugaacaggca

SEQ ID NO: 2522768 - RNA, 19 nt, Homo sapiens
  misc_RNA (1)...(19): siRNA sense strand
auaauuugcuugauggcuu

SEQ ID NO: 2522769 - RNA, 19 nt, Homo sapiens
  misc_RNA (1)...(19): siRNA sense strand
ggauaagaacacagugcac

SEQ ID NO: 2522770 - RNA, 19 nt, Homo sapiens
  misc_RNA (1)...(19): siRNA sense strand
guucugaaacugagagcau

SEQ ID NO: 2522771 - RNA, 19 nt, Homo sapiens
  misc_RNA (1)...(19): siRNA sense strand
gagagaagaucaacggcga

SEQ ID NO: 2522772 - RNA, 19 nt, Homo sapiens
  misc_RNA (1)...(19): siRNA sense strand
ggacuggacuagaggguug

SEQ ID NO: 2522773 - RNA, 19 nt, Homo sapiens
  misc_RNA (1)...(19): siRNA sense strand
cggaaauggaggauaaagu

SEQ ID NO: 2522774 - RNA, 19 nt, Homo sapiens
  misc_RNA (1)...(19): siRNA sense strand
uggugaagaaauugagaga

SEQ ID NO: 2522775 - RNA, 19 nt, Homo sapiens
  misc_RNA (1)...(19): siRNA sense strand
ccaaacaagugguggacug

SEQ ID NO: 2522776 - RNA, 19 nt, Homo sapiens
  misc_RNA (1)...(19): siRNA sense strand
ucucagucacgaagaacaa

SEQ ID NO: 2522777 - RNA, 19 nt, Homo sapiens
  misc_RNA (1)...(19): siRNA sense strand
cgugauuacuggaaccaca

SEQ ID NO: 2522778 - RNA, 19 nt, Homo sapiens
  misc_RNA (1)...(19): siRNA sense strand
ccucacugaagaaggagaa

SEQ ID NO: 2522779 - RNA, 19 nt, Homo sapiens
  misc_RNA (1)...(19): siRNA sense strand
aguuugaacgagagaagau

SEQ ID NO: 2522780 - RNA, 19 nt, Homo sapiens
  misc_RNA (1)...(19): siRNA sense strand
ggauugcuuuguagcggaa

SEQ ID NO: 2522781 - RNA, 19 nt, Homo sapiens
  misc_RNA (1)...(19): siRNA sense strand
acgaagucacucaaguuaa

SEQ ID NO: 2522782 - RNA, 19 nt, Homo sapiens
  misc_RNA (1)...(19): siRNA sense strand
ccucggugguggagcucau

SEQ ID NO: 2522783 - RNA, 19 nt, Homo sapiens
  misc_RNA (1)...(19): siRNA sense strand
cacucaaguuaaucagcaa

SEQ ID NO: 2522784 - RNA, 19 nt, Homo sapiens
  misc_RNA (1)...(19): siRNA sense strand
ucgaggucauggcaggaaa

SEQ ID NO: 2522785 - RNA, 19 nt, Homo sapiens
  misc_RNA (1)...(19): siRNA sense strand
aaauggcaucugugacaaa

SEQ ID NO: 2522786 - RNA, 19 nt, Homo sapiens
  misc_RNA (1)...(19): siRNA sense strand
aaacauuaaaccuggggaa

SEQ ID NO: 2522787 - RNA, 19 nt, Homo sapiens
  misc_RNA (1)...(19): siRNA sense strand
ggaccaggaaagccggaga

SEQ ID NO: 2522788 - RNA, 19 nt, Homo sapiens
  misc_RNA (1)...(19): siRNA sense strand
acuacaguccagaaggauu

SEQ ID NO: 2522789 - RNA, 19 nt, Homo sapiens
  misc_RNA (1)...(19): siRNA sense strand
gggccaaggugauggugga

SEQ ID NO: 2522790 - RNA, 19 nt, Homo sapiens
  misc_RNA (1)...(19): siRNA sense strand
ccaagaagcuguaugacuc

SEQ ID NO: 2522791 - RNA, 19 nt, Homo sapiens
  misc_RNA (1)...(19): siRNA sense strand
ggucauucccggagagcug

SEQ ID NO: 2522792 - RNA, 19 nt, Homo sapiens
  misc_RNA (1)...(19): siRNA sense strand
ggaaucugcgugaaggaca

SEQ ID NO: 2522793 - RNA, 19 nt, Homo sapiens
  misc_RNA (1)...(19): siRNA sense strand
caggaaugaaaaugagauu

SEQ ID NO: 2522794 - RNA, 19 nt, Homo sapiens
  misc_RNA (1)...(19): siRNA sense strand
ccuucaaugccuuagucaa

SEQ ID NO: 2522795 - RNA, 19 nt, Homo sapiens
  misc_RNA (1)...(19): siRNA sense strand
cugccagucaucauggaaa

SEQ ID NO: 2522796 - RNA, 19 nt, Homo sapiens
  misc_RNA (1)...(19): siRNA sense strand
ggggagaagaugaauguca

SEQ ID NO: 2522797 - RNA, 19 nt, Homo sapiens
  misc_RNA (1)...(19): siRNA sense strand
aggagcucauaaagggaau

SEQ ID NO: 2522798 - RNA, 19 nt, Homo sapiens
  misc_RNA (1)...(19): siRNA sense strand
uuugaaaaguggugggaua

SEQ ID NO: 2522799 - RNA, 19 nt, Homo sapiens
  misc_RNA (1)...(19): siRNA sense strand
agguagaucaugaaagaga

SEQ ID NO: 2522800 - RNA, 19 nt, Homo sapiens
  misc_RNA (1)...(19): siRNA sense strand
acacugaaggauacgguaa

SEQ ID NO: 2522801 - RNA, 19 nt, Homo sapiens
  misc_RNA (1)...(19): siRNA sense strand
cauaagauauucaggagca

SEQ ID NO: 2522802 - RNA, 19 nt, Homo sapiens
  misc_RNA (1)...(19): siRNA sense strand
gcauaaaacaggcuggauu

SEQ ID NO: 2522803 - RNA, 19 nt, Homo sapiens
  misc_RNA (1)...(19): siRNA sense strand
ugaaagagauccuggaccu

SEQ ID NO: 2522804 - RNA, 19 nt, Homo sapiens
  misc_RNA (1)...(19): siRNA sense strand
cugacauggccuaaauuaa

SEQ ID NO: 2522805 - RNA, 19 nt, Homo sapiens
  misc_RNA (1)...(19): siRNA sense strand
cugccaugaacaagagaau

SEQ ID NO: 2522806 - RNA, 19 nt, Homo sapiens
  misc_RNA (1)...(19): siRNA sense strand
caugucauucagaggguua

SEQ ID NO: 2522807 - RNA, 19 nt, Homo sapiens
  misc_RNA (1)...(19): siRNA sense strand
cacugaaggauacgguaaa

SEQ ID NO: 2522808 - RNA, 19 nt, Homo sapiens
  misc_RNA (1)...(19): siRNA sense strand
ccauguaguuccagcucca

SEQ ID NO: 2522809 - RNA, 19 nt, Homo sapiens
  misc_RNA (1)...(19): siRNA sense strand
cauaaaacaggcuggauuu

SEQ ID NO: 2522810 - RNA, 19 nt, Homo sapiens
  misc_RNA (1)...(19): siRNA sense strand
auuuaauauccuaggcaca

SEQ ID NO: 2522811 - RNA, 19 nt, Homo sapiens
  misc_RNA (1)...(19): siRNA sense strand
ugggauuucauuuggaauu

SEQ ID NO: 2522812 - RNA, 19 nt, Homo sapiens
  misc_RNA (1)...(19): siRNA sense strand
ucagaggguuagugaccau

SEQ ID NO: 2522813 - RNA, 19 nt, Homo sapiens
  misc_RNA (1)...(19): siRNA sense strand
ccauaucuucggugacauu

SEQ ID NO: 2522814 - RNA, 19 nt, Homo sapiens
  misc_RNA (1)...(19): siRNA sense strand
gguuuauaccaacagaauu

SEQ ID NO: 2522815 - RNA, 19 nt, Homo sapiens
  misc_RNA (1)...(19): siRNA sense strand
gaucauaagauauucagga

SEQ ID NO: 2522816 - RNA, 19 nt, Homo sapiens
  misc_RNA (1)...(19): siRNA sense strand
caaugacacaggagcccaa

SEQ ID NO: 2522817 - RNA, 19 nt, Homo sapiens
  misc_RNA (1)...(19): siRNA sense strand
cauuaaugacacagacacu

SEQ ID NO: 2522818 - RNA, 19 nt, Homo sapiens
  misc_RNA (1)...(19): siRNA sense strand
gaaaacaaugugagggacu

SEQ ID NO: 2522819 - RNA, 19 nt, Homo sapiens
  misc_RNA (1)...(19): siRNA sense strand
acagcugacuggagugcuu

SEQ ID NO: 2522820 - RNA, 19 nt, Homo sapiens
  misc_RNA (1)...(19): siRNA sense strand
aagaaaacaaugugaggga

SEQ ID NO: 2522821 - RNA, 19 nt, Homo sapiens
  misc_RNA (1)...(19): siRNA sense strand
cagagagagaagagagaau

SEQ ID NO: 2522822 - RNA, 19 nt, Homo sapiens
  misc_RNA (1)...(19): siRNA sense strand
gagaagagagaaugggaga

SEQ ID NO: 2522823 - RNA, 19 nt, Homo sapiens
  misc_RNA (1)...(19): siRNA sense strand
acugagagacagagagaga

SEQ ID NO: 2522824 - RNA, 19 nt, Homo sapiens
  misc_RNA (1)...(19): siRNA sense strand
agagagaaugggagacaca

SEQ ID NO: 2522825 - RNA, 19 nt, Homo sapiens
  misc_RNA (1)...(19): siRNA sense strand
ucacacacccaaagcggaa

SEQ ID NO: 2522826 - RNA, 19 nt, Homo sapiens
  misc_RNA (1)...(19): siRNA sense strand
accgacagagagagggaaa

SEQ ID NO: 2522827 - RNA, 19 nt, Homo sapiens
  misc_RNA (1)...(19): siRNA sense strand
gaaacagcuuuguggugca

SEQ ID NO: 2522828 - RNA, 19 nt, Homo sapiens
  misc_RNA (1)...(19): siRNA sense strand
gagagaagagagaauggga

SEQ ID NO: 2522829 - RNA, 19 nt, Homo sapiens
  misc_RNA (1)...(19): siRNA sense strand
aggagaaugaagacaggaa

SEQ ID NO: 2522830 - RNA, 19 nt, Homo sapiens
  misc_RNA (1)...(19): siRNA sense strand
ccucauaagaauugcagga

SEQ ID NO: 2522831 - RNA, 19 nt, Homo sapiens
  misc_RNA (1)...(19): siRNA sense strand
aggaugaggaagauaaaga

SEQ ID NO: 2522832 - RNA, 19 nt, Homo sapiens
  misc_RNA (1)...(19): siRNA sense strand
ggaaagaaaggggaggaaa

SEQ ID NO: 2522833 - RNA, 19 nt, Homo sapiens
  misc_RNA (1)...(19): siRNA sense strand
gugaguuggaccaggauga

SEQ ID NO: 2522834 - RNA, 19 nt, Homo sapiens
  misc_RNA (1)...(19): siRNA sense strand
uggaccaggaugaggaaga

SEQ ID NO: 2522835 - RNA, 19 nt, Homo sapiens
  misc_RNA (1)...(19): siRNA sense strand
gggaaagaaaggggaggaa

SEQ ID NO: 2522836 - RNA, 19 nt, Homo sapiens
  misc_RNA (1)...(19): siRNA sense strand
cgugagagccaccaggaga

SEQ ID NO: 2522837 - RNA, 19 nt, Homo sapiens
  misc_RNA (1)...(19): siRNA sense strand
uggcaguagagaugagguu

SEQ ID NO: 2522838 - RNA, 19 nt, Homo sapiens
  misc_RNA (1)...(19): siRNA sense strand
ggaacagugaguuggacca

SEQ ID NO: 2522839 - RNA, 19 nt, Homo sapiens
  misc_RNA (1)...(19): siRNA sense strand
ucaaggaccgugagagcca

SEQ ID NO: 2522840 - RNA, 19 nt, Homo sapiens
  misc_RNA (1)...(19): siRNA sense strand
accaggaugaggaagauaa

SEQ ID NO: 2522841 - RNA, 19 nt, Homo sapiens
  misc_RNA (1)...(19): siRNA sense strand
gcaguagagaugagguucu

SEQ ID NO: 2522842 - RNA, 19 nt, Homo sapiens
  misc_RNA (1)...(19): siRNA sense strand
cggagaagaucguggggua

SEQ ID NO: 2522843 - RNA, 19 nt, Homo sapiens
  misc_RNA (1)...(19): siRNA sense strand
cugcaauggaauuagcaaa

SEQ ID NO: 2522844 - RNA, 19 nt, Homo sapiens
  misc_RNA (1)...(19): siRNA sense strand
uggaauuagcaaagcauga

SEQ ID NO: 2522845 - RNA, 19 nt, Homo sapiens
  misc_RNA (1)...(19): siRNA sense strand
cuaaguugcgagaaagaau

SEQ ID NO: 2522846 - RNA, 19 nt, Homo sapiens
  misc_RNA (1)...(19): siRNA sense strand
gguacaaggaguauaucau

SEQ ID NO: 2522847 - RNA, 19 nt, Homo sapiens
  misc_RNA (1)...(19): siRNA sense strand
aagaaucaaagcuggcaaa

SEQ ID NO: 2522848 - RNA, 19 nt, Homo sapiens
  misc_RNA (1)...(19): siRNA sense strand
ucgcuaugcaggugcggaa

SEQ ID NO: 2522849 - RNA, 19 nt, Homo sapiens
  misc_RNA (1)...(19): siRNA sense strand
cagagaucacggagcuaau

SEQ ID NO: 2522850 - RNA, 19 nt, Homo sapiens
  misc_RNA (1)...(19): siRNA sense strand
aggugugacuucagcuauu

SEQ ID NO: 2522851 - RNA, 19 nt, Homo sapiens
  misc_RNA (1)...(19): siRNA sense strand
uggcauuucaguaugggaa

SEQ ID NO: 2522852 - RNA, 19 nt, Homo sapiens
  misc_RNA (1)...(19): siRNA sense strand
agauaaauucugaugucca

SEQ ID NO: 2522853 - RNA, 19 nt, Homo sapiens
  misc_RNA (1)...(19): siRNA sense strand
cacugaaagacaugcaauu

SEQ ID NO: 2522854 - RNA, 19 nt, Homo sapiens
  misc_RNA (1)...(19): siRNA sense strand
cuacagaacaccaagguug

SEQ ID NO: 2522855 - RNA, 19 nt, Homo sapiens
  misc_RNA (1)...(19): siRNA sense strand
agacagugccagaaagaaa

SEQ ID NO: 2522856 - RNA, 19 nt, Homo sapiens
  misc_RNA (1)...(19): siRNA sense strand
gggaaguuauagaaguaaa

SEQ ID NO: 2522857 - RNA, 19 nt, Homo sapiens
  misc_RNA (1)...(19): siRNA sense strand
aagaagaggaggaagaaau

SEQ ID NO: 2522858 - RNA, 19 nt, Homo sapiens
  misc_RNA (1)...(19): siRNA sense strand
gagcagaaggauugcaaau

SEQ ID NO: 2522859 - RNA, 19 nt, Homo sapiens
  misc_RNA (1)...(19): siRNA sense strand
cgaaaggagaggaagaaga

SEQ ID NO: 2522860 - RNA, 19 nt, Homo sapiens
  misc_RNA (1)...(19): siRNA sense strand
agacauaggaauuugguau

SEQ ID NO: 2522861 - RNA, 19 nt, Homo sapiens
  misc_RNA (1)...(19): siRNA sense strand
ccaaggagaagcugggcaa

SEQ ID NO: 2522862 - RNA, 19 nt, Homo sapiens
  misc_RNA (1)...(19): siRNA sense strand
aagaaacauuagagcagaa

SEQ ID NO: 2522863 - RNA, 19 nt, Homo sapiens
  misc_RNA (1)...(19): siRNA sense strand
cuaaagcagaccuggaaua

SEQ ID NO: 2522864 - RNA, 19 nt, Homo sapiens
  misc_RNA (1)...(19): siRNA sense strand
gggccaaagacauaggaau

SEQ ID NO: 2522865 - RNA, 19 nt, Homo sapiens
  misc_RNA (1)...(19): siRNA sense strand
gaucgaaugagaagagaga

SEQ ID NO: 2522866 - RNA, 19 nt, Homo sapiens
  misc_RNA (1)...(19): siRNA sense strand
ccagaaagaaacaaaucaa

SEQ ID NO: 2522867 - RNA, 19 nt, Homo sapiens
  misc_RNA (1)...(19): siRNA sense strand
gaaugagaagagagaagua

SEQ ID NO: 2522868 - RNA, 19 nt, Homo sapiens
  misc_RNA (1)...(19): siRNA sense strand
agaggaagaagaauggaaa

SEQ ID NO: 2522869 - RNA, 19 nt, Homo sapiens
  misc_RNA (1)...(19): siRNA sense strand
gagagaaguacuugauuca

SEQ ID NO: 2522870 - RNA, 19 nt, Homo sapiens
  misc_RNA (1)...(19): siRNA sense strand
ucuugaaggcauuggaauu

SEQ ID NO: 2522871 - RNA, 19 nt, Homo sapiens
  misc_RNA (1)...(19): siRNA sense strand
cagccaagucaguaaagaa

SEQ ID NO: 2522872 - RNA, 19 nt, Homo sapiens
  misc_RNA (1)...(19): siRNA sense strand
uggaaucacuaauggaaaa

SEQ ID NO: 2522873 - RNA, 19 nt, Homo sapiens
  misc_RNA (1)...(19): siRNA sense strand
gagaggaagaagaauggaa

SEQ ID NO: 2522874 - RNA, 19 nt, Homo sapiens
  misc_RNA (1)...(19): siRNA sense strand
aggaacgaaaggagaggaa

SEQ ID NO: 2522875 - RNA, 19 nt, Homo sapiens
  misc_RNA (1)...(19): siRNA sense strand
gagcaggaucgauaaacaa

SEQ ID NO: 2522876 - RNA, 19 nt, Homo sapiens
  misc_RNA (1)...(19): siRNA sense strand
uggagagaagauuggguua

SEQ ID NO: 2522877 - RNA, 19 nt, Homo sapiens
  misc_RNA (1)...(19): siRNA sense strand
uggaauucuugaaggcauu

SEQ ID NO: 2522878 - RNA, 19 nt, Homo sapiens
  misc_RNA (1)...(19): siRNA sense strand
cugcaugagggaaguuaua

SEQ ID NO: 2522879 - RNA, 19 nt, Homo sapiens
  misc_RNA (1)...(19): siRNA sense strand
gaaagaaacauuagagcag

SEQ ID NO: 2522880 - RNA, 19 nt, Homo sapiens
  misc_RNA (1)...(19): siRNA sense strand
acauuagagcagaaggauu

SEQ ID NO: 2522881 - RNA, 19 nt, Homo sapiens
  misc_RNA (1)...(19): siRNA sense strand
gaagaagaggaggaagaaa

SEQ ID NO: 2522882 - RNA, 19 nt, Homo sapiens
  misc_RNA (1)...(19): siRNA sense strand
cagaaggaacgaaaggaga

SEQ ID NO: 2522883 - RNA, 19 nt, Homo sapiens
  misc_RNA (1)...(19): siRNA sense strand
aagaaaaguacgacaagaa

SEQ ID NO: 2522884 - RNA, 19 nt, Homo sapiens
  misc_RNA (1)...(19): siRNA sense strand
ccucuuaaguacugcagau

SEQ ID NO: 2522885 - RNA, 19 nt, Homo sapiens
  misc_RNA (1)...(19): siRNA sense strand
caacaaugccacaagaagu

SEQ ID NO: 2522886 - RNA, 19 nt, Homo sapiens
  misc_RNA (1)...(19): siRNA sense strand
uggaauaauuucauggaac

SEQ ID NO: 2522887 - RNA, 19 nt, Homo sapiens
  misc_RNA (1)...(19): siRNA sense strand
gcuuauaaguauggaccuu

SEQ ID NO: 2522888 - RNA, 19 nt, Homo sapiens
  misc_RNA (1)...(19): siRNA sense strand
aagcagaacuggaacgucu

SEQ ID NO: 2522889 - RNA, 19 nt, Homo sapiens
  misc_RNA (1)...(19): siRNA sense strand
gaggaagaagaauggaaaa

SEQ ID NO: 2522890 - RNA, 19 nt, Homo sapiens
  misc_RNA (1)...(19): siRNA sense strand
ggagagaagauuggguuau

SEQ ID NO: 2522891 - RNA, 19 nt, Homo sapiens
  misc_RNA (1)...(19): siRNA sense strand
ugaaugugcucuaugaaaa

SEQ ID NO: 2522892 - RNA, 19 nt, Homo sapiens
  misc_RNA (1)...(19): siRNA sense strand
cuggaaucacuaauggaaa

SEQ ID NO: 2522893 - RNA, 19 nt, Homo sapiens
  misc_RNA (1)...(19): siRNA sense strand
ggaccugaaaggaaaauaa

SEQ ID NO: 2522894 - RNA, 19 nt, Homo sapiens
  misc_RNA (1)...(19): siRNA sense strand
acacaguggaggagaccuu

SEQ ID NO: 2522895 - RNA, 19 nt, Homo sapiens
  misc_RNA (1)...(19): siRNA sense strand
ugccggaccuggaggagaa

SEQ ID NO: 2522896 - RNA, 19 nt, Homo sapiens
  misc_RNA (1)...(19): siRNA sense strand
uggccaaggaugucaauau

SEQ ID NO: 2522897 - RNA, 19 nt, Homo sapiens
  misc_RNA (1)...(19): siRNA sense strand
cugaaugugcucuaugaaa

SEQ ID NO: 2522898 - RNA, 19 nt, Homo sapiens
  misc_RNA (1)...(19): siRNA sense strand
cggaagauuuacaggacac

SEQ ID NO: 2522899 - RNA, 19 nt, Homo sapiens
  misc_RNA (1)...(19): siRNA sense strand
gcuucaagggccaaagaca

SEQ ID NO: 2522900 - RNA, 19 nt, Homo sapiens
  misc_RNA (1)...(19): siRNA sense strand
ucgaaugagaagagagaag

SEQ ID NO: 2522901 - RNA, 19 nt, Homo sapiens
  misc_RNA (1)...(19): siRNA sense strand
cgagauggaaagugucgaa

SEQ ID NO: 2522902 - RNA, 19 nt, Homo sapiens
  misc_RNA (1)...(19): siRNA sense strand
aaacauuagagcagaagga

SEQ ID NO: 2522903 - RNA, 19 nt, Homo sapiens
  misc_RNA (1)...(19): siRNA sense strand
aaggauugcaaauggagaa

SEQ ID NO: 2522904 - RNA, 19 nt, Homo sapiens
  misc_RNA (1)...(19): siRNA sense strand
ccuuggaagauaugcagaa

SEQ ID NO: 2522905 - RNA, 19 nt, Homo sapiens
  misc_RNA (1)...(19): siRNA sense strand
ugauagacugggaagaaga

SEQ ID NO: 2522906 - RNA, 19 nt, Homo sapiens
  misc_RNA (1)...(19): siRNA sense strand
cauuagagcagaaggauug

SEQ ID NO: 2522907 - RNA, 19 nt, Homo sapiens
  misc_RNA (1)...(19): siRNA sense strand
cuucaagggccaaagacau

SEQ ID NO: 2522908 - RNA, 19 nt, Homo sapiens
  misc_RNA (1)...(19): siRNA sense strand
caguaaagaagucugccaa

SEQ ID NO: 2522909 - RNA, 19 nt, Homo sapiens
  misc_RNA (1)...(19): siRNA sense strand
agauaaaugcagcagacuu

SEQ ID NO: 2522910 - RNA, 19 nt, Homo sapiens
  misc_RNA (1)...(19): siRNA sense strand
gaaacaaaucaaauggacu

SEQ ID NO: 2522911 - RNA, 19 nt, Homo sapiens
  misc_RNA (1)...(19): siRNA sense strand
aggaauaacucucagguug

SEQ ID NO: 2522912 - RNA, 19 nt, Homo sapiens
  misc_RNA (1)...(19): siRNA sense strand
gaagaaagaagacgccaca

SEQ ID NO: 2522913 - RNA, 19 nt, Homo sapiens
  misc_RNA (1)...(19): siRNA sense strand
caugagcaggccaggcaaa

SEQ ID NO: 2522914 - RNA, 19 nt, Homo sapiens
  misc_RNA (1)...(19): siRNA sense strand
caagagagguaauugccaa

SEQ ID NO: 2522915 - RNA, 19 nt, Homo sapiens
  misc_RNA (1)...(19): siRNA sense strand
ggguauuugcaaagcccaa

SEQ ID NO: 2522916 - RNA, 19 nt, Homo sapiens
  misc_RNA (1)...(19): siRNA sense strand
ccgaaauauagcaaagcuu

SEQ ID NO: 2522917 - RNA, 19 nt, Homo sapiens
  misc_RNA (1)...(19): siRNA sense strand
agaaaugaugaccugguaa

SEQ ID NO: 2522918 - RNA, 19 nt, Homo sapiens
  misc_RNA (1)...(19): siRNA sense strand
cuuuauccuuguaccgaaa

SEQ ID NO: 2522919 - RNA, 19 nt, Homo sapiens
  misc_RNA (1)...(19): siRNA sense strand
ucugaaacugucugaagaa

SEQ ID NO: 2522920 - RNA, 19 nt, Homo sapiens
  misc_RNA (1)...(19): siRNA sense strand
cacaaauaccucagagucu

SEQ ID NO: 2522921 - RNA, 19 nt, Homo sapiens
  misc_RNA (1)...(19): siRNA sense strand
aggacuacuacgugggcaa

SEQ ID NO: 2522922 - RNA, 19 nt, Homo sapiens
  misc_RNA (1)...(19): siRNA sense strand
gcuugaacugcguggauga

SEQ ID NO: 2522923 - RNA, 19 nt, Homo sapiens
  misc_RNA (1)...(19): siRNA sense strand
uggaugacucacaggacua

SEQ ID NO: 2522924 - RNA, 19 nt, Homo sapiens
  misc_RNA (1)...(19): siRNA sense strand
ggaagaagcauccaggcaa

SEQ ID NO: 2522925 - RNA, 19 nt, Homo sapiens
  misc_RNA (1)...(19): siRNA sense strand
gggaagaagcauccaggca

SEQ ID NO: 2522926 - RNA, 19 nt, Homo sapiens
  misc_RNA (1)...(19): siRNA sense strand
caggcaagcagaaaagaaa

SEQ ID NO: 2522927 - RNA, 19 nt, Homo sapiens
  misc_RNA (1)...(19): siRNA sense strand
gccuaaacaaccuaagaga

SEQ ID NO: 2522928 - RNA, 19 nt, Homo sapiens
  misc_RNA (1)...(19): siRNA sense strand
cggauguaccagaaacuga

SEQ ID NO: 2522929 - RNA, 19 nt, Homo sapiens
  misc_RNA (1)...(19): siRNA sense strand
gaagaagcauccaggcaag

SEQ ID NO: 2522930 - RNA, 19 nt, Homo sapiens
  misc_RNA (1)...(19): siRNA sense strand
cggcugacauggugcccaa

SEQ ID NO: 2522931 - RNA, 19 nt, Homo sapiens
  misc_RNA (1)...(19): siRNA sense strand
uugcagacgaggaggagga

SEQ ID NO: 2522932 - RNA, 19 nt, Homo sapiens
  misc_RNA (1)...(19): siRNA sense strand
uggcagcaccccagaguua

SEQ ID NO: 2522933 - RNA, 19 nt, Homo sapiens
  misc_RNA (1)...(19): siRNA sense strand
cugcugagauggaggggaa

SEQ ID NO: 2522934 - RNA, 19 nt, Homo sapiens
  misc_RNA (1)...(19): siRNA sense strand
ccaaaguggugcaccguca

SEQ ID NO: 2522935 - RNA, 19 nt, Homo sapiens
  misc_RNA (1)...(19): siRNA sense strand
gcaagauccuggagcagca

SEQ ID NO: 2522936 - RNA, 19 nt, Homo sapiens
  misc_RNA (1)...(19): siRNA sense strand
gcaaagagugccaaggcca

SEQ ID NO: 2522937 - RNA, 19 nt, Homo sapiens
  misc_RNA (1)...(19): siRNA sense strand
ggccacaagcucagcgaca

SEQ ID NO: 2522938 - RNA, 19 nt, Homo sapiens
  misc_RNA (1)...(19): siRNA sense strand
gaguaaacccacaggaguc

SEQ ID NO: 2522939 - RNA, 19 nt, Homo sapiens
  misc_RNA (1)...(19): siRNA sense strand
ggauaauaggauucagaag

SEQ ID NO: 2522940 - RNA, 19 nt, Homo sapiens
  misc_RNA (1)...(19): siRNA sense strand
cgucaggacaugugcaaag

SEQ ID NO: 2522941 - RNA, 19 nt, Homo sapiens
  misc_RNA (1)...(19): siRNA sense strand
aaguugaagcugacagaaa

SEQ ID NO: 2522942 - RNA, 19 nt, Homo sapiens
  misc_RNA (1)...(19): siRNA sense strand
augaagaaguugaagcuga

SEQ ID NO: 2522943 - RNA, 19 nt, Homo sapiens
  misc_RNA (1)...(19): siRNA sense strand
ggaucagacaacuggagaa

SEQ ID NO: 2522944 - RNA, 19 nt, Homo sapiens
  misc_RNA (1)...(19): siRNA sense strand
gcauguagcugcuggcacu

SEQ ID NO: 2522945 - RNA, 19 nt, Homo sapiens
  misc_RNA (1)...(19): siRNA sense strand
gggaauuugaugagguuuu

SEQ ID NO: 2522946 - RNA, 19 nt, Homo sapiens
  misc_RNA (1)...(19): siRNA sense strand
augauuguccaguaagaaa

SEQ ID NO: 2522947 - RNA, 19 nt, Homo sapiens
  misc_RNA (1)...(19): siRNA sense strand
aaaagaaacacaagcgaga

SEQ ID NO: 2522948 - RNA, 19 nt, Homo sapiens
  misc_RNA (1)...(19): siRNA sense strand
acagguuugaagagggaau

SEQ ID NO: 2522949 - RNA, 19 nt, Homo sapiens
  misc_RNA (1)...(19): siRNA sense strand
augaagaugaagaaguuga

SEQ ID NO: 2522950 - RNA, 19 nt, Homo sapiens
  misc_RNA (1)...(19): siRNA sense strand
gaacuauacaggagagagc

SEQ ID NO: 2522951 - RNA, 19 nt, Homo sapiens
  misc_RNA (1)...(19): siRNA sense strand
aagaaauggaucagacaac

SEQ ID NO: 2522952 - RNA, 19 nt, Homo sapiens
  misc_RNA (1)...(19): siRNA sense strand
acuaagaacuauacaggag

SEQ ID NO: 2522953 - RNA, 19 nt, Homo sapiens
  misc_RNA (1)...(19): siRNA sense strand
gcgccagaagcgagagauu

SEQ ID NO: 2522954 - RNA, 19 nt, Homo sapiens
  misc_RNA (1)...(19): siRNA sense strand
agugagaagaagaagguau

SEQ ID NO: 2522955 - RNA, 19 nt, Homo sapiens
  misc_RNA (1)...(19): siRNA sense strand
gaagaagaguaaacagcca

SEQ ID NO: 2522956 - RNA, 19 nt, Homo sapiens
  misc_RNA (1)...(19): siRNA sense strand
gcaacaacucuguggugga

SEQ ID NO: 2522957 - RNA, 19 nt, Homo sapiens
  misc_RNA (1)...(19): siRNA sense strand
ccuccagugagaagaagaa

SEQ ID NO: 2522958 - RNA, 19 nt, Homo sapiens
  misc_RNA (1)...(19): siRNA sense strand
aguauuaccugcuggagga

SEQ ID NO: 2522959 - RNA, 19 nt, Homo sapiens
  misc_RNA (1)...(19): siRNA sense strand
gacaguaagcucaaggaca

SEQ ID NO: 2522960 - RNA, 19 nt, Homo sapiens
  misc_RNA (1)...(19): siRNA sense strand
guggagagcagccuggcaa

SEQ ID NO: 2522961 - RNA, 19 nt, Homo sapiens
  misc_RNA (1)...(19): siRNA sense strand
cuggaagauaucccggaaa

SEQ ID NO: 2522962 - RNA, 19 nt, Homo sapiens
  misc_RNA (1)...(19): siRNA sense strand
ggaagauaucccggaaaca

SEQ ID NO: 2522963 - RNA, 19 nt, Homo sapiens
  misc_RNA (1)...(19): siRNA sense strand
cugaagaacaacggugauu

SEQ ID NO: 2522964 - RNA, 19 nt, Homo sapiens
  misc_RNA (1)...(19): siRNA sense strand
gcugggugguggaggaaaa

SEQ ID NO: 2522965 - RNA, 19 nt, Homo sapiens
  misc_RNA (1)...(19): siRNA sense strand
ucuuggaccuagaggagga

SEQ ID NO: 2522966 - RNA, 19 nt, Homo sapiens
  misc_RNA (1)...(19): siRNA sense strand
accuagaggaggagggucu

SEQ ID NO: 2522967 - RNA, 19 nt, Homo sapiens
  misc_RNA (1)...(19): siRNA sense strand
caguaguaaccuuggugaa

SEQ ID NO: 2522968 - RNA, 19 nt, Homo sapiens
  misc_RNA (1)...(19): siRNA sense strand
aagaauauucagagagaag

SEQ ID NO: 2522969 - RNA, 19 nt, Homo sapiens
  misc_RNA (1)...(19): siRNA sense strand
acaaauauaccucgggagu

SEQ ID NO: 2522970 - RNA, 19 nt, Homo sapiens
  misc_RNA (1)...(19): siRNA sense strand
cgggaguggaggauuacaa

SEQ ID NO: 2522971 - RNA, 19 nt, Homo sapiens
  misc_RNA (1)...(19): siRNA sense strand
aucaaagagaucuggauau

SEQ ID NO: 2522972 - RNA, 19 nt, Homo sapiens
  misc_RNA (1)...(19): siRNA sense strand
gaucaauuggaauggaaaa

SEQ ID NO: 2522973 - RNA, 19 nt, Homo sapiens
  misc_RNA (1)...(19): siRNA sense strand
gcaucgacaccguggccaa

SEQ ID NO: 2522974 - RNA, 19 nt, Homo sapiens
  misc_RNA (1)...(19): siRNA sense strand
gacacaagguggcuggcua

SEQ ID NO: 2522975 - RNA, 19 nt, Homo sapiens
  misc_RNA (1)...(19): siRNA sense strand
agaucaauuggaauggaaa

SEQ ID NO: 2522976 - RNA, 19 nt, Homo sapiens
  misc_RNA (1)...(19): siRNA sense strand
ccgccuucguguacagcua

SEQ ID NO: 2522977 - RNA, 19 nt, Homo sapiens
  misc_RNA (1)...(19): siRNA sense strand
guacaaaggcugugcaacc

SEQ ID NO: 2522978 - RNA, 19 nt, Homo sapiens
  misc_RNA (1)...(19): siRNA sense strand
ggaucauggccaucaucaa

SEQ ID NO: 2522979 - RNA, 19 nt, Homo sapiens
  misc_RNA (1)...(19): siRNA sense strand
guucgauauuccaggcuca

SEQ ID NO: 2522980 - RNA, 19 nt, Homo sapiens
  misc_RNA (1)...(19): siRNA sense strand
caguacaaaggcugugcaa

SEQ ID NO: 2522981 - RNA, 19 nt, Homo sapiens
  misc_RNA (1)...(19): siRNA sense strand
ccagagagguggaucgcau

SEQ ID NO: 2522982 - RNA, 19 nt, Homo sapiens
  misc_RNA (1)...(19): siRNA sense strand
aagcaguggaucaggacaa

SEQ ID NO: 2522983 - RNA, 19 nt, Homo sapiens
  misc_RNA (1)...(19): siRNA sense strand
aggcagggacgcuggcaaa

SEQ ID NO: 2522984 - RNA, 19 nt, Homo sapiens
  misc_RNA (1)...(19): siRNA sense strand
ggccaucagcagagagaga

SEQ ID NO: 2522985 - RNA, 19 nt, Homo sapiens
  misc_RNA (1)...(19): siRNA sense strand
ccaucaucaacaagauaaa

SEQ ID NO: 2522986 - RNA, 19 nt, Homo sapiens
  misc_RNA (1)...(19): siRNA sense strand
agauaaauaugaaggaccu

SEQ ID NO: 2522987 - RNA, 19 nt, Homo sapiens
  misc_RNA (1)...(19): siRNA sense strand
caaugaaugagcagggcuu

SEQ ID NO: 2522988 - RNA, 19 nt, Homo sapiens
  misc_RNA (1)...(19): siRNA sense strand
gagagcagauggaacgaca

SEQ ID NO: 2522989 - RNA, 19 nt, Homo sapiens
  misc_RNA (1)...(19): siRNA sense strand
ggacaagugguauuggaca

SEQ ID NO: 2522990 - RNA, 19 nt, Homo sapiens
  misc_RNA (1)...(19): siRNA sense strand
aggcuauggaacuggagua

SEQ ID NO: 2522991 - RNA, 19 nt, Homo sapiens
  misc_RNA (1)...(19): siRNA sense strand
agauaaaagcuuucugcaa

SEQ ID NO: 2522992 - RNA, 19 nt, Homo sapiens
  misc_RNA (1)...(19): siRNA sense strand
auucaaacuucgagagcag

SEQ ID NO: 2522993 - RNA, 19 nt, Homo sapiens
  misc_RNA (1)...(19): siRNA sense strand
gagugaaggacgaucggau

SEQ ID NO: 2522994 - RNA, 19 nt, Homo sapiens
  misc_RNA (1)...(19): siRNA sense strand
aggacacuguggagcagaa

SEQ ID NO: 2522995 - RNA, 19 nt, Homo sapiens
  misc_RNA (1)...(19): siRNA sense strand
acuacaacguccugaagca

SEQ ID NO: 2522996 - RNA, 19 nt, Homo sapiens
  misc_RNA (1)...(19): siRNA sense strand
cuguggagcagaaggcaga

SEQ ID NO: 2522997 - RNA, 19 nt, Homo sapiens
  misc_RNA (1)...(19): siRNA sense strand
agaaggcacuggaggccau

SEQ ID NO: 2522998 - RNA, 19 nt, Homo sapiens
  misc_RNA (1)...(19): siRNA sense strand
acccgaaggugcaggaagu

SEQ ID NO: 2522999 - RNA, 19 nt, Homo sapiens
  misc_RNA (1)...(19): siRNA sense strand
ccaagcaauucaagaccca

SEQ ID NO: 2523000 - RNA, 19 nt, Homo sapiens
  misc_RNA (1)...(19): siRNA sense strand
caccagagcaguugcggau

SEQ ID NO: 2523001 - RNA, 19 nt, Homo sapiens
  misc_RNA (1)...(19): siRNA sense strand
aagugcagguggugggagu

SEQ ID NO: 2523002 - RNA, 19 nt, Homo sapiens
  misc_RNA (1)...(19): siRNA sense strand
agaggaaguacuugauaaa

SEQ ID NO: 2523003 - RNA, 19 nt, Homo sapiens
  misc_RNA (1)...(19): siRNA sense strand
ugaagcaagaagaaggaaa

SEQ ID NO: 2523004 - RNA, 19 nt, Homo sapiens
  misc_RNA (1)...(19): siRNA sense strand
guguaugaagaucgagaaa

SEQ ID NO: 2523005 - RNA, 19 nt, Homo sapiens
  misc_RNA (1)...(19): siRNA sense strand
cguuaagaagccuggacaa

SEQ ID NO: 2523006 - RNA, 19 nt, Homo sapiens
  misc_RNA (1)...(19): siRNA sense strand
aggaauugcuggugggaug

SEQ ID NO: 2523007 - RNA, 19 nt, Homo sapiens
  misc_RNA (1)...(19): siRNA sense strand
gaagcaagaagaaggaaaa

SEQ ID NO: 2523008 - RNA, 19 nt, Homo sapiens
  misc_RNA (1)...(19): siRNA sense strand
ccuuaaagagagaugugaa

SEQ ID NO: 2523009 - RNA, 19 nt, Homo sapiens
  misc_RNA (1)...(19): siRNA sense strand
gggcaaaagauaaagccua

SEQ ID NO: 2523010 - RNA, 19 nt, Homo sapiens
  misc_RNA (1)...(19): siRNA sense strand
cacgaaaaguucaagaaaa

SEQ ID NO: 2523011 - RNA, 19 nt, Homo sapiens
  misc_RNA (1)...(19): siRNA sense strand
gcaucauaccuuaaagaga

SEQ ID NO: 2523012 - RNA, 19 nt, Homo sapiens
  misc_RNA (1)...(19): siRNA sense strand
auuaaaaggcugugcaaau

SEQ ID NO: 2523013 - RNA, 19 nt, Homo sapiens
  misc_RNA (1)...(19): siRNA sense strand
auggguagccuuugauaaa

SEQ ID NO: 2523014 - RNA, 19 nt, Homo sapiens
  misc_RNA (1)...(19): siRNA sense strand
gcaacgugggaaaggagaa

SEQ ID NO: 2523015 - RNA, 19 nt, Homo sapiens
  misc_RNA (1)...(19): siRNA sense strand
cugaauauaucaaggccga

SEQ ID NO: 2523016 - RNA, 19 nt, Homo sapiens
  misc_RNA (1)...(19): siRNA sense strand
gaaagaauccagugccuga

SEQ ID NO: 2523017 - RNA, 19 nt, Homo sapiens
  misc_RNA (1)...(19): siRNA sense strand
aggagauggaagugaugua

SEQ ID NO: 2523018 - RNA, 19 nt, Homo sapiens
  misc_RNA (1)...(19): siRNA sense strand
uuaugauguuggugaguga

SEQ ID NO: 2523019 - RNA, 19 nt, Homo sapiens
  misc_RNA (1)...(19): siRNA sense strand
ccuuuaugacugugaugaa

SEQ ID NO: 2523020 - RNA, 19 nt, Homo sapiens
  misc_RNA (1)...(19): siRNA sense strand
gaagauucggagagagguu

SEQ ID NO: 2523021 - RNA, 19 nt, Homo sapiens
  misc_RNA (1)...(19): siRNA sense strand
gagaaagaauccagugccu

SEQ ID NO: 2523022 - RNA, 19 nt, Homo sapiens
  misc_RNA (1)...(19): siRNA sense strand
ugucuuugacuguuggaaa

SEQ ID NO: 2523023 - RNA, 19 nt, Homo sapiens
  misc_RNA (1)...(19): siRNA sense strand
gcaacagcuucaaccgcaa

SEQ ID NO: 2523024 - RNA, 19 nt, Homo sapiens
  misc_RNA (1)...(19): siRNA sense strand
ccagagagcucaagcaggu

SEQ ID NO: 2523025 - RNA, 19 nt, Homo sapiens
  misc_RNA (1)...(19): siRNA sense strand
ccuauuuggaagaggaagu

SEQ ID NO: 2523026 - RNA, 19 nt, Homo sapiens
  misc_RNA (1)...(19): siRNA sense strand
guuuggagaccguagagaa

SEQ ID NO: 2523027 - RNA, 19 nt, Homo sapiens
  misc_RNA (1)...(19): siRNA sense strand
gacucuaagcacacaaaua

SEQ ID NO: 2523028 - RNA, 19 nt, Homo sapiens
  misc_RNA (1)...(19): siRNA sense strand
ggguagccuuugauaaaca

SEQ ID NO: 2523029 - RNA, 19 nt, Homo sapiens
  misc_RNA (1)...(19): siRNA sense strand
uggauuacuucaagggacu

SEQ ID NO: 2523030 - RNA, 19 nt, Homo sapiens
  misc_RNA (1)...(19): siRNA sense strand
aaaacuagucacagacaaa

SEQ ID NO: 2523031 - RNA, 19 nt, Homo sapiens
  misc_RNA (1)...(19): siRNA sense strand
auagagaggaauucaggaa

SEQ ID NO: 2523032 - RNA, 19 nt, Homo sapiens
  misc_RNA (1)...(19): siRNA sense strand
ugaugaaaagccuggaaua

SEQ ID NO: 2523033 - RNA, 19 nt, Homo sapiens
  misc_RNA (1)...(19): siRNA sense strand
agaaccaagcggauggcua

SEQ ID NO: 2523034 - RNA, 19 nt, Homo sapiens
  misc_RNA (1)...(19): siRNA sense strand
ccuuaaacuacauggagca

SEQ ID NO: 2523035 - RNA, 19 nt, Homo sapiens
  misc_RNA (1)...(19): siRNA sense strand
uaaagagagaugugaagau

SEQ ID NO: 2523036 - RNA, 19 nt, Homo sapiens
  misc_RNA (1)...(19): siRNA sense strand
gccuggaauagguggagaa

SEQ ID NO: 2523037 - RNA, 19 nt, Homo sapiens
  misc_RNA (1)...(19): siRNA sense strand
acaugaagauucggagaga

SEQ ID NO: 2523038 - RNA, 19 nt, Homo sapiens
  misc_RNA (1)...(19): siRNA sense strand
auuuaaagcugcugacucu

SEQ ID NO: 2523039 - RNA, 19 nt, Homo sapiens
  misc_RNA (1)...(19): siRNA sense strand
uuggcuuagaggaggaaua

SEQ ID NO: 2523040 - RNA, 19 nt, Homo sapiens
  misc_RNA (1)...(19): siRNA sense strand
gagagagguuguagaacac

SEQ ID NO: 2523041 - RNA, 19 nt, Homo sapiens
  misc_RNA (1)...(19): siRNA sense strand
uggaagaggaaguacuuga

SEQ ID NO: 2523042 - RNA, 19 nt, Homo sapiens
  misc_RNA (1)...(19): siRNA sense strand
guucgauagauauaagcua

SEQ ID NO: 2523043 - RNA, 19 nt, Homo sapiens
  misc_RNA (1)...(19): siRNA sense strand
gcuaggaaaaguagaccaa

SEQ ID NO: 2523044 - RNA, 19 nt, Homo sapiens
  misc_RNA (1)...(19): siRNA sense strand
ccacgaaaaguucaagaaa

SEQ ID NO: 2523045 - RNA, 19 nt, Homo sapiens
  misc_RNA (1)...(19): siRNA sense strand
agguuugaagacagugaaa

SEQ ID NO: 2523046 - RNA, 19 nt, Homo sapiens
  misc_RNA (1)...(19): siRNA sense strand
uauaaagaaccaagcggau

SEQ ID NO: 2523047 - RNA, 19 nt, Homo sapiens
  misc_RNA (1)...(19): siRNA sense strand
uugaaaagaagucgcguua

SEQ ID NO: 2523048 - RNA, 19 nt, Homo sapiens
  misc_RNA (1)...(19): siRNA sense strand
cuagaauccuuauugucaa

SEQ ID NO: 2523049 - RNA, 19 nt, Homo sapiens
  misc_RNA (1)...(19): siRNA sense strand
cugcgaaauacauugacua

SEQ ID NO: 2523050 - RNA, 19 nt, Homo sapiens
  misc_RNA (1)...(19): siRNA sense strand
agauggaagugauguacca

SEQ ID NO: 2523051 - RNA, 19 nt, Homo sapiens
  misc_RNA (1)...(19): siRNA sense strand
agugcaauguccagaagau

SEQ ID NO: 2523052 - RNA, 19 nt, Homo sapiens
  misc_RNA (1)...(19): siRNA sense strand
aaguagaccaagaguuuua

SEQ ID NO: 2523053 - RNA, 19 nt, Homo sapiens
  misc_RNA (1)...(19): siRNA sense strand
aggagaaguuucacaaauc

SEQ ID NO: 2523054 - RNA, 19 nt, Homo sapiens
  misc_RNA (1)...(19): siRNA sense strand
ccagaagauccuuacauga

SEQ ID NO: 2523055 - RNA, 19 nt, Homo sapiens
  misc_RNA (1)...(19): siRNA sense strand
uaggaaaaguagaccaaga

SEQ ID NO: 2523056 - RNA, 19 nt, Homo sapiens
  misc_RNA (1)...(19): siRNA sense strand
uuacaaagauagugaccug

SEQ ID NO: 2523057 - RNA, 19 nt, Homo sapiens
  misc_RNA (1)...(19): siRNA sense strand
guguugacuuggacaggau

SEQ ID NO: 2523058 - RNA, 19 nt, Homo sapiens
  misc_RNA (1)...(19): siRNA sense strand
agcaagaauuuguaaccau

SEQ ID NO: 2523059 - RNA, 19 nt, Homo sapiens
  misc_RNA (1)...(19): siRNA sense strand
cauuuauuccuguguguau

SEQ ID NO: 2523060 - RNA, 19 nt, Homo sapiens
  misc_RNA (1)...(19): siRNA sense strand
gcagaaguauccuggccaa

SEQ ID NO: 2523061 - RNA, 19 nt, Homo sapiens
  misc_RNA (1)...(19): siRNA sense strand
cuucaaagucagauggaac

SEQ ID NO: 2523062 - RNA, 19 nt, Homo sapiens
  misc_RNA (1)...(19): siRNA sense strand
cuucaaaagacacaacaaa

SEQ ID NO: 2523063 - RNA, 19 nt, Homo sapiens
  misc_RNA (1)...(19): siRNA sense strand
agggaagugaacagugcua

SEQ ID NO: 2523064 - RNA, 19 nt, Homo sapiens
  misc_RNA (1)...(19): siRNA sense strand
aagugagggacgaaggaca

SEQ ID NO: 2523065 - RNA, 19 nt, Homo sapiens
  misc_RNA (1)...(19): siRNA sense strand
agcuguguguucuggaaua

SEQ ID NO: 2523066 - RNA, 19 nt, Homo sapiens
  misc_RNA (1)...(19): siRNA sense strand
ugacagucccuaaggaacu

SEQ ID NO: 2523067 - RNA, 19 nt, Homo sapiens
  misc_RNA (1)...(19): siRNA sense strand
cagaaguauccuggccaaa

SEQ ID NO: 2523068 - RNA, 19 nt, Homo sapiens
  misc_RNA (1)...(19): siRNA sense strand
ggguuauggcuguggcuuu

SEQ ID NO: 2523069 - RNA, 19 nt, Homo sapiens
  misc_RNA (1)...(19): siRNA sense strand
gcuuuggaggcaacggaua

SEQ ID NO: 2523070 - RNA, 19 nt, Homo sapiens
  misc_RNA (1)...(19): siRNA sense strand
uggccuaggcuauggcuau

SEQ ID NO: 2523071 - RNA, 19 nt, Homo sapiens
  misc_RNA (1)...(19): siRNA sense strand
gcuauggaggauauggauu

SEQ ID NO: 2523072 - RNA, 19 nt, Homo sapiens
  misc_RNA (1)...(19): siRNA sense strand
acacgauaucagaggucau

SEQ ID NO: 2523073 - RNA, 19 nt, Homo sapiens
  misc_RNA (1)...(19): siRNA sense strand
cuuuggaggcaacggauau

SEQ ID NO: 2523074 - RNA, 19 nt, Homo sapiens
  misc_RNA (1)...(19): siRNA sense strand
gaggcaacggauauggcua

SEQ ID NO: 2523075 - RNA, 19 nt, Homo sapiens
  misc_RNA (1)...(19): siRNA sense strand
caucaugcuauggaggaua

SEQ ID NO: 2523076 - RNA, 19 nt, Homo sapiens
  misc_RNA (1)...(19): siRNA sense strand
aaauaacagcagaggguuu

SEQ ID NO: 2523077 - RNA, 19 nt, Homo sapiens
  misc_RNA (1)...(19): siRNA sense strand
ccagugagcgaguggcaaa

SEQ ID NO: 2523078 - RNA, 19 nt, Homo sapiens
  misc_RNA (1)...(19): siRNA sense strand
ccucaaggagaaagccaaa

SEQ ID NO: 2523079 - RNA, 19 nt, Homo sapiens
  misc_RNA (1)...(19): siRNA sense strand
gguuaaugacccagagacu

SEQ ID NO: 2523080 - RNA, 19 nt, Homo sapiens
  misc_RNA (1)...(19): siRNA sense strand
ggaacaaacuggaaagcug

SEQ ID NO: 2523081 - RNA, 19 nt, Homo sapiens
  misc_RNA (1)...(19): siRNA sense strand
cugcagaaugggagguaca

SEQ ID NO: 2523082 - RNA, 19 nt, Homo sapiens
  misc_RNA (1)...(19): siRNA sense strand
ccuucuaugugauggagua

SEQ ID NO: 2523083 - RNA, 19 nt, Homo sapiens
  misc_RNA (1)...(19): siRNA sense strand
agaaauaacagcagagggu

SEQ ID NO: 2523084 - RNA, 19 nt, Homo sapiens
  misc_RNA (1)...(19): siRNA sense strand
gaacuauauuaaaggccuu

SEQ ID NO: 2523085 - RNA, 19 nt, Homo sapiens
  misc_RNA (1)...(19): siRNA sense strand
cugcaauccuacagggagu

SEQ ID NO: 2523086 - RNA, 19 nt, Homo sapiens
  misc_RNA (1)...(19): siRNA sense strand
gggcccuggaugagauuua

SEQ ID NO: 2523087 - RNA, 19 nt, Homo sapiens
  misc_RNA (1)...(19): siRNA sense strand
gagcagaaauaacagcaga

SEQ ID NO: 2523088 - RNA, 19 nt, Homo sapiens
  misc_RNA (1)...(19): siRNA sense strand
ccgaaagauuccuugcaga

SEQ ID NO: 2523089 - RNA, 19 nt, Homo sapiens
  misc_RNA (1)...(19): siRNA sense strand
cugugggacuugaagacua

SEQ ID NO: 2523090 - RNA, 19 nt, Homo sapiens
  misc_RNA (1)...(19): siRNA sense strand
gagauuuaugagagcagaa

SEQ ID NO: 2523091 - RNA, 19 nt, Homo sapiens
  misc_RNA (1)...(19): siRNA sense strand
ucuguguguuuaugggaaa

SEQ ID NO: 2523092 - RNA, 19 nt, Homo sapiens
  misc_RNA (1)...(19): siRNA sense strand
cagaagagccagaggugcu

SEQ ID NO: 2523093 - RNA, 19 nt, Homo sapiens
  misc_RNA (1)...(19): siRNA sense strand
gaacaaacuggaaagcuga

SEQ ID NO: 2523094 - RNA, 19 nt, Homo sapiens
  misc_RNA (1)...(19): siRNA sense strand
uauuaaaggccuugaugga

SEQ ID NO: 2523095 - RNA, 19 nt, Homo sapiens
  misc_RNA (1)...(19): siRNA sense strand
gcgaucacucacagggcaa

SEQ ID NO: 2523096 - RNA, 19 nt, Homo sapiens
  misc_RNA (1)...(19): siRNA sense strand
agggagagucgcugcagaa

SEQ ID NO: 2523097 - RNA, 19 nt, Homo sapiens
  misc_RNA (1)...(19): siRNA sense strand
cgagaauuugggagacuuu

SEQ ID NO: 2523098 - RNA, 19 nt, Homo sapiens
  misc_RNA (1)...(19): siRNA sense strand
gugaucuaguucugaggaa

SEQ ID NO: 2523099 - RNA, 19 nt, Homo sapiens
  misc_RNA (1)...(19): siRNA sense strand
uggagcugcuggugaggua

SEQ ID NO: 2523100 - RNA, 19 nt, Homo sapiens
  misc_RNA (1)...(19): siRNA sense strand
ccuugcaaaugcuggagua

SEQ ID NO: 2523101 - RNA, 19 nt, Homo sapiens
  misc_RNA (1)...(19): siRNA sense strand
ucagagaggaggacagcuu

SEQ ID NO: 2523102 - RNA, 19 nt, Homo sapiens
  misc_RNA (1)...(19): siRNA sense strand
auucacaccauuaagguua

SEQ ID NO: 2523103 - RNA, 19 nt, Homo sapiens
  misc_RNA (1)...(19): siRNA sense strand
cagccacagacgagccaua

SEQ ID NO: 2523104 - RNA, 19 nt, Homo sapiens
  misc_RNA (1)...(19): siRNA sense strand
aagagaugcccuucacaaa

SEQ ID NO: 2523105 - RNA, 19 nt, Homo sapiens
  misc_RNA (1)...(19): siRNA sense strand
ccaccaacauugaggcuuc

SEQ ID NO: 2523106 - RNA, 19 nt, Homo sapiens
  misc_RNA (1)...(19): siRNA sense strand
auggagaggcugaucgaau

SEQ ID NO: 2523107 - RNA, 19 nt, Homo sapiens
  misc_RNA (1)...(19): siRNA sense strand
aggagaaagccaaagcuga

SEQ ID NO: 2523108 - RNA, 19 nt, Homo sapiens
  misc_RNA (1)...(19): siRNA sense strand
ccacaggcccauuggaacu

SEQ ID NO: 2523109 - RNA, 19 nt, Homo sapiens
  misc_RNA (1)...(19): siRNA sense strand
gggauuucgcagucaaaga

SEQ ID NO: 2523110 - RNA, 19 nt, Homo sapiens
  misc_RNA (1)...(19): siRNA sense strand
cuugauggaagguggugaa

SEQ ID NO: 2523111 - RNA, 19 nt, Homo sapiens
  misc_RNA (1)...(19): siRNA sense strand
cauggauaccccagggaua

SEQ ID NO: 2523112 - RNA, 19 nt, Homo sapiens
  misc_RNA (1)...(19): siRNA sense strand
uuaugaaagcccuugcaaa

SEQ ID NO: 2523113 - RNA, 19 nt, Homo sapiens
  misc_RNA (1)...(19): siRNA sense strand
ggaagaugcaccaggcugu

SEQ ID NO: 2523114 - RNA, 19 nt, Homo sapiens
  misc_RNA (1)...(19): siRNA sense strand
acuggaaagcugaccgaau

SEQ ID NO: 2523115 - RNA, 19 nt, Homo sapiens
  misc_RNA (1)...(19): siRNA sense strand
cgguguauggacuggaaga

SEQ ID NO: 2523116 - RNA, 19 nt, Homo sapiens
  misc_RNA (1)...(19): siRNA sense strand
cagaaguaccucaaagacu

SEQ ID NO: 2523117 - RNA, 19 nt, Homo sapiens
  misc_RNA (1)...(19): siRNA sense strand
acccagagacugcaguaaa

SEQ ID NO: 2523118 - RNA, 19 nt, Homo sapiens
  misc_RNA (1)...(19): siRNA sense strand
aagccaaagcugaaggacu

SEQ ID NO: 2523119 - RNA, 19 nt, Homo sapiens
  misc_RNA (1)...(19): siRNA sense strand
ggaagggaucuguaagcca

SEQ ID NO: 2523120 - RNA, 19 nt, Homo sapiens
  misc_RNA (1)...(19): siRNA sense strand
aguaaaggaauuagaagcu

SEQ ID NO: 2523121 - RNA, 19 nt, Homo sapiens
  misc_RNA (1)...(19): siRNA sense strand
uuuacgagaauuugggaga

SEQ ID NO: 2523122 - RNA, 19 nt, Homo sapiens
  misc_RNA (1)...(19): siRNA sense strand
aggacugaccaauguggaa

SEQ ID NO: 2523123 - RNA, 19 nt, Homo sapiens
  misc_RNA (1)...(19): siRNA sense strand
agaaugggagguacagaau

SEQ ID NO: 2523124 - RNA, 19 nt, Homo sapiens
  misc_RNA (1)...(19): siRNA sense strand
ggaacuauauuaaaggccu

SEQ ID NO: 2523125 - RNA, 19 nt, Homo sapiens
  misc_RNA (1)...(19): siRNA sense strand
gacuugaagacuaugggaa

SEQ ID NO: 2523126 - RNA, 19 nt, Homo sapiens
  misc_RNA (1)...(19): siRNA sense strand
agaggcugaucccgagaaa

SEQ ID NO: 2523127 - RNA, 19 nt, Homo sapiens
  misc_RNA (1)...(19): siRNA sense strand
ugauauuacaguugggaaa

SEQ ID NO: 2523128 - RNA, 19 nt, Homo sapiens
  misc_RNA (1)...(19): siRNA sense strand
gauaagaacuucagccgua

SEQ ID NO: 2523129 - RNA, 19 nt, Homo sapiens
  misc_RNA (1)...(19): siRNA sense strand
agacagaaauccaaggaga

SEQ ID NO: 2523130 - RNA, 19 nt, Homo sapiens
  misc_RNA (1)...(19): siRNA sense strand
aguccauacaggagagaaa

SEQ ID NO: 2523131 - RNA, 19 nt, Homo sapiens
  misc_RNA (1)...(19): siRNA sense strand
aguucacacuggagagaaa

SEQ ID NO: 2523132 - RNA, 19 nt, Homo sapiens
  misc_RNA (1)...(19): siRNA sense strand
gaucauuguguuaggcaaa

SEQ ID NO: 2523133 - RNA, 19 nt, Homo sapiens
  misc_RNA (1)...(19): siRNA sense strand
cuucaaacuagaugugaua

SEQ ID NO: 2523134 - RNA, 19 nt, Homo sapiens
  misc_RNA (1)...(19): siRNA sense strand
cggaugauggagacagaaa

SEQ ID NO: 2523135 - RNA, 19 nt, Homo sapiens
  misc_RNA (1)...(19): siRNA sense strand
gauccacacgggagagaaa

SEQ ID NO: 2523136 - RNA, 19 nt, Homo sapiens
  misc_RNA (1)...(19): siRNA sense strand
aguccacacaggagagaaa

SEQ ID NO: 2523137 - RNA, 19 nt, Homo sapiens
  misc_RNA (1)...(19): siRNA sense strand
aauccaaucaggagagcaa

SEQ ID NO: 2523138 - RNA, 19 nt, Homo sapiens
  misc_RNA (1)...(19): siRNA sense strand
ggaaaauguaucugagaga

SEQ ID NO: 2523139 - RNA, 19 nt, Homo sapiens
  misc_RNA (1)...(19): siRNA sense strand
gggcauagguuacagcuca

SEQ ID NO: 2523140 - RNA, 19 nt, Homo sapiens
  misc_RNA (1)...(19): siRNA sense strand
gagagaaaugcuauaggaa

SEQ ID NO: 2523141 - RNA, 19 nt, Homo sapiens
  misc_RNA (1)...(19): siRNA sense strand
augugaagaauguaggaaa

SEQ ID NO: 2523142 - RNA, 19 nt, Homo sapiens
  misc_RNA (1)...(19): siRNA sense strand
agagaaaugcuauaggaau

SEQ ID NO: 2523143 - RNA, 19 nt, Homo sapiens
  misc_RNA (1)...(19): siRNA sense strand
acaaaugggaaguaaguga

SEQ ID NO: 2523144 - RNA, 19 nt, Homo sapiens
  misc_RNA (1)...(19): siRNA sense strand
guucaggacacaagaauca

SEQ ID NO: 2523145 - RNA, 19 nt, Homo sapiens
  misc_RNA (1)...(19): siRNA sense strand
ugaaaauggaaaaggcuua

SEQ ID NO: 2523146 - RNA, 19 nt, Homo sapiens
  misc_RNA (1)...(19): siRNA sense strand
acucuagagacaagacaua

SEQ ID NO: 2523147 - RNA, 19 nt, Homo sapiens
  misc_RNA (1)...(19): siRNA sense strand
gagaguucaaauagcauaa

SEQ ID NO: 2523148 - RNA, 19 nt, Homo sapiens
  misc_RNA (1)...(19): siRNA sense strand
gugguaagggcuuuaguaa

SEQ ID NO: 2523149 - RNA, 19 nt, Homo sapiens
  misc_RNA (1)...(19): siRNA sense strand
acauacaaaugggaaguaa

SEQ ID NO: 2523150 - RNA, 19 nt, Homo sapiens
  misc_RNA (1)...(19): siRNA sense strand
augugaugugugugggaaa

SEQ ID NO: 2523151 - RNA, 19 nt, Homo sapiens
  misc_RNA (1)...(19): siRNA sense strand
augugaugcuggagaacuu

SEQ ID NO: 2523152 - RNA, 19 nt, Homo sapiens
  misc_RNA (1)...(19): siRNA sense strand
ccuuauaugcuggcaaaua

SEQ ID NO: 2523153 - RNA, 19 nt, Homo sapiens
  misc_RNA (1)...(19): siRNA sense strand
ccuguaaaugugauguaua

SEQ ID NO: 2523154 - RNA, 19 nt, Homo sapiens
  misc_RNA (1)...(19): siRNA sense strand
gggaaguaagugacaggau

SEQ ID NO: 2523155 - RNA, 19 nt, Homo sapiens
  misc_RNA (1)...(19): siRNA sense strand
ccuucaaacuagaugugau

SEQ ID NO: 2523156 - RNA, 19 nt, Homo sapiens
  misc_RNA (1)...(19): siRNA sense strand
cuucaaggcaagaggucca

SEQ ID NO: 2523157 - RNA, 19 nt, Homo sapiens
  misc_RNA (1)...(19): siRNA sense strand
cuauaggaauggugacagu

SEQ ID NO: 2523158 - RNA, 19 nt, Homo sapiens
  misc_RNA (1)...(19): siRNA sense strand
ccucaaaucuucaagccca

SEQ ID NO: 2523159 - RNA, 19 nt, Homo sapiens
  misc_RNA (1)...(19): siRNA sense strand
gcauaauccaaucaggaga

SEQ ID NO: 2523160 - RNA, 19 nt, Homo sapiens
  misc_RNA (1)...(19): siRNA sense strand
aaaugugaugugugugaua

SEQ ID NO: 2523161 - RNA, 19 nt, Homo sapiens
  misc_RNA (1)...(19): siRNA sense strand
ggacaggagaaucuaguca

SEQ ID NO: 2523162 - RNA, 19 nt, Homo sapiens
  misc_RNA (1)...(19): siRNA sense strand
gacagaaauccaaggagau

SEQ ID NO: 2523163 - RNA, 19 nt, Homo sapiens
  misc_RNA (1)...(19): siRNA sense strand
acgggaagggcauagguua

SEQ ID NO: 2523164 - RNA, 19 nt, Homo sapiens
  misc_RNA (1)...(19): siRNA sense strand
ggcaaauaugggaacaauu

SEQ ID NO: 2523165 - RNA, 19 nt, Homo sapiens
  misc_RNA (1)...(19): siRNA sense strand
ucauguaaauguugaguac

SEQ ID NO: 2523166 - RNA, 19 nt, Homo sapiens
  misc_RNA (1)...(19): siRNA sense strand
ccauacaaaugugaagaau

SEQ ID NO: 2523167 - RNA, 19 nt, Homo sapiens
  misc_RNA (1)...(19): siRNA sense strand
ggaugauggagacagaaau

SEQ ID NO: 2523168 - RNA, 19 nt, Homo sapiens
  misc_RNA (1)...(19): siRNA sense strand
ugaucauggaguacacaaa

SEQ ID NO: 2523169 - RNA, 19 nt, Homo sapiens
  misc_RNA (1)...(19): siRNA sense strand
aaaugugagguaugugaua

SEQ ID NO: 2523170 - RNA, 19 nt, Homo sapiens
  misc_RNA (1)...(19): siRNA sense strand
ugugaagaauguaggaaag

SEQ ID NO: 2523171 - RNA, 19 nt, Homo sapiens
  misc_RNA (1)...(19): siRNA sense strand
ugaucauuguguuaggcaa

SEQ ID NO: 2523172 - RNA, 19 nt, Homo sapiens
  misc_RNA (1)...(19): siRNA sense strand
augcaaugacuguggcaaa

SEQ ID NO: 2523173 - RNA, 19 nt, Homo sapiens
  misc_RNA (1)...(19): siRNA sense strand
gggaaagccuucagccaga

SEQ ID NO: 2523174 - RNA, 19 nt, Homo sapiens
  misc_RNA (1)...(19): siRNA sense strand
auguaaugacugcgggaaa

SEQ ID NO: 2523175 - RNA, 19 nt, Homo sapiens
  misc_RNA (1)...(19): siRNA sense strand
acgugaugcuggagaccua

SEQ ID NO: 2523176 - RNA, 19 nt, Homo sapiens
  misc_RNA (1)...(19): siRNA sense strand
aauccacaccggagagaaa

SEQ ID NO: 2523177 - RNA, 19 nt, Homo sapiens
  misc_RNA (1)...(19): siRNA sense strand
agacauuuggugaggaaga

SEQ ID NO: 2523178 - RNA, 19 nt, Homo sapiens
  misc_RNA (1)...(19): siRNA sense strand
uggaaaagcuaguggagca

SEQ ID NO: 2523179 - RNA, 19 nt, Homo sapiens
  misc_RNA (1)...(19): siRNA sense strand
gcaagaaagccuucagcca

SEQ ID NO: 2523180 - RNA, 19 nt, Homo sapiens
  misc_RNA (1)...(19): siRNA sense strand
augugaugagugugggaaa

SEQ ID NO: 2523181 - RNA, 19 nt, Homo sapiens
  misc_RNA (1)...(19): siRNA sense strand
ucaugaagcaccagaggau

SEQ ID NO: 2523182 - RNA, 19 nt, Homo sapiens
  misc_RNA (1)...(19): siRNA sense strand
gcugcaccacggagagaaa

SEQ ID NO: 2523183 - RNA, 19 nt, Homo sapiens
  misc_RNA (1)...(19): siRNA sense strand
guucguaacucuggggaaa

SEQ ID NO: 2523184 - RNA, 19 nt, Homo sapiens
  misc_RNA (1)...(19): siRNA sense strand
gcucaauccuuauccgaca

SEQ ID NO: 2523185 - RNA, 19 nt, Homo sapiens
  misc_RNA (1)...(19): siRNA sense strand
aagaaagccuucagccaga

SEQ ID NO: 2523186 - RNA, 19 nt, Homo sapiens
  misc_RNA (1)...(19): siRNA sense strand
acacaggagagaagcccua

SEQ ID NO: 2523187 - RNA, 19 nt, Homo sapiens
  misc_RNA (1)...(19): siRNA sense strand
augugauauaugugagcaa

SEQ ID NO: 2523188 - RNA, 19 nt, Homo sapiens
  misc_RNA (1)...(19): siRNA sense strand
acacugaagagaagcccua

SEQ ID NO: 2523189 - RNA, 19 nt, Homo sapiens
  misc_RNA (1)...(19): siRNA sense strand
gggaagcacuuuagcgccu

SEQ ID NO: 2523190 - RNA, 19 nt, Homo sapiens
  misc_RNA (1)...(19): siRNA sense strand
gaacaucagagaagccaca

SEQ ID NO: 2523191 - RNA, 19 nt, Homo sapiens
  misc_RNA (1)...(19): siRNA sense strand
ggcaaaguuuucagccaaa

SEQ ID NO: 2523192 - RNA, 19 nt, Homo sapiens
  misc_RNA (1)...(19): siRNA sense strand
ucauccagcaccagagaau

SEQ ID NO: 2523193 - RNA, 19 nt, Homo sapiens
  misc_RNA (1)...(19): siRNA sense strand
cuacaagugcagcgagugu

SEQ ID NO: 2523194 - RNA, 19 nt, Homo sapiens
  misc_RNA (1)...(19): siRNA sense strand
cuacaagugcagcgagugu

SEQ ID NO: 2523195 - RNA, 19 nt, Homo sapiens
  misc_RNA (1)...(19): siRNA sense strand
agaacugaguacaaggagu

SEQ ID NO: 2523196 - RNA, 19 nt, Homo sapiens
  misc_RNA (1)...(19): siRNA sense strand
cggagagaaacccuauaaa

SEQ ID NO: 2523197 - RNA, 19 nt, Homo sapiens
  misc_RNA (1)...(19): siRNA sense strand
gaguugacuucacaggaga

SEQ ID NO: 2523198 - RNA, 19 nt, Homo sapiens
  misc_RNA (1)...(19): siRNA sense strand
agaagccauuugagugcaa

SEQ ID NO: 2523199 - RNA, 19 nt, Homo sapiens
  misc_RNA (1)...(19): siRNA sense strand
cuauagauggagagaacaa

SEQ ID NO: 2523200 - RNA, 19 nt, Homo sapiens
  misc_RNA (1)...(19): siRNA sense strand
gaguagaacuggaggaggu

SEQ ID NO: 2523201 - RNA, 19 nt, Homo sapiens
  misc_RNA (1)...(19): siRNA sense strand
aaagagaaacugaaggcaa

SEQ ID NO: 2523202 - RNA, 19 nt, Homo sapiens
  misc_RNA (1)...(19): siRNA sense strand
ccgcgguggcuuagagcua

SEQ ID NO: 2523203 - RNA, 19 nt, Homo sapiens
  misc_RNA (1)...(19): siRNA sense strand
aguugaagaaggaacauaa

SEQ ID NO: 2523204 - RNA, 19 nt, Homo sapiens
  misc_RNA (1)...(19): siRNA sense strand
ccugacaaucauaguguaa

SEQ ID NO: 2523205 - RNA, 19 nt, Homo sapiens
  misc_RNA (1)...(19): siRNA sense strand
guguaaaugaugagaaaug

SEQ ID NO: 2523206 - RNA, 19 nt, Homo sapiens
  misc_RNA (1)...(19): siRNA sense strand
ggaaaauacaaguugaaga

SEQ ID NO: 2523207 - RNA, 19 nt, Homo sapiens
  misc_RNA (1)...(19): siRNA sense strand
gccaaauaccagagcacau

SEQ ID NO: 2523208 - RNA, 19 nt, Homo sapiens
  misc_RNA (1)...(19): siRNA sense strand
gagaacaacaugaggcagu

SEQ ID NO: 2523209 - RNA, 19 nt, Homo sapiens
  misc_RNA (1)...(19): siRNA sense strand
ugcuauagauggagagaac

SEQ ID NO: 2523210 - RNA, 19 nt, Homo sapiens
  misc_RNA (1)...(19): siRNA sense strand
cuugaggaagagaggcaaa

SEQ ID NO: 2523211 - RNA, 19 nt, Homo sapiens
  misc_RNA (1)...(19): siRNA sense strand
gaaacuaaauaaagcucca

SEQ ID NO: 2523212 - RNA, 19 nt, Homo sapiens
  misc_RNA (1)...(19): siRNA sense strand
ggaaagaucuggcucacca

SEQ ID NO: 2523213 - RNA, 19 nt, Homo sapiens
  misc_RNA (1)...(19): siRNA sense strand
aggcaaaggaugaaagcuc

SEQ ID NO: 2523214 - RNA, 19 nt, Homo sapiens
  misc_RNA (1)...(19): siRNA sense strand
cugaaggcaaagacagcaa

SEQ ID NO: 2523215 - RNA, 19 nt, Homo sapiens
  misc_RNA (1)...(19): siRNA sense strand
ggcaaaggaugaaagcuca

SEQ ID NO: 2523216 - RNA, 19 nt, Homo sapiens
  misc_RNA (1)...(19): siRNA sense strand
ggggaaaauacaaguugaa

SEQ ID NO: 2523217 - RNA, 19 nt, Homo sapiens
  misc_RNA (1)...(19): siRNA sense strand
acaaguugaagaaggaaca

SEQ ID NO: 2523218 - RNA, 19 nt, Homo sapiens
  misc_RNA (1)...(19): siRNA sense strand
uggagauacucuggaggaa

SEQ ID NO: 2523219 - RNA, 19 nt, Homo sapiens
  misc_RNA (1)...(19): siRNA sense strand
aggaagagaggcaaaggau

SEQ ID NO: 2523220 - RNA, 19 nt, Homo sapiens
  misc_RNA (1)...(19): siRNA sense strand
gagagaacaacaugaggca

SEQ ID NO: 2523221 - RNA, 19 nt, Homo sapiens
  misc_RNA (1)...(19): siRNA sense strand
ccuagggaucggaggagau

SEQ ID NO: 2523222 - RNA, 19 nt, Homo sapiens
  misc_RNA (1)...(19): siRNA sense strand
ggagaaaaggaaacuaaau

SEQ ID NO: 2523223 - RNA, 19 nt, Homo sapiens
  misc_RNA (1)...(19): siRNA sense strand
uagaacuggaggagguaga

SEQ ID NO: 2523224 - RNA, 19 nt, Homo sapiens
  misc_RNA (1)...(19): siRNA sense strand
ggguucugcaggugauauu

SEQ ID NO: 2523225 - RNA, 19 nt, Homo sapiens
  misc_RNA (1)...(19): siRNA sense strand
cuggagaaaaggaaacuaa

SEQ ID NO: 2523226 - RNA, 19 nt, Homo sapiens
  misc_RNA (1)...(19): siRNA sense strand
agguguugcuauagaugga

SEQ ID NO: 2523227 - RNA, 19 nt, Homo sapiens
  misc_RNA (1)...(19): siRNA sense strand
ggaugaacccugucgggaa

SEQ ID NO: 2523228 - RNA, 19 nt, Homo sapiens
  misc_RNA (1)...(19): siRNA sense strand
cguacgaacagguagugaa

SEQ ID NO: 2523229 - RNA, 19 nt, Homo sapiens
  misc_RNA (1)...(19): siRNA sense strand
gcugguauuucgaaggacu

SEQ ID NO: 2523230 - RNA, 19 nt, Homo sapiens
  misc_RNA (1)...(19): siRNA sense strand
ccuccagccuacugcaaca

SEQ ID NO: 2523231 - RNA, 19 nt, Homo sapiens
  misc_RNA (1)...(19): siRNA sense strand
agcaaguagucuggagaaa

SEQ ID NO: 2523232 - RNA, 19 nt, Homo sapiens
  misc_RNA (1)...(19): siRNA sense strand
ccuuugauaagauggcuaa

SEQ ID NO: 2523233 - RNA, 19 nt, Homo sapiens
  misc_RNA (1)...(19): siRNA sense strand
aggagaaggaggaugaauc

SEQ ID NO: 2523234 - RNA, 19 nt, Homo sapiens
  misc_RNA (1)...(19): siRNA sense strand
ggcaagagcuagaagguga

SEQ ID NO: 2523235 - RNA, 19 nt, Homo sapiens
  misc_RNA (1)...(19): siRNA sense strand
gcugagccgcagugggaaa

SEQ ID NO: 2523236 - RNA, 19 nt, Homo sapiens
  misc_RNA (1)...(19): siRNA sense strand
cugcagaggacgaagcuga

SEQ ID NO: 2523237 - RNA, 19 nt, Homo sapiens
  misc_RNA (1)...(19): siRNA sense strand
cgaccuaaucauagcuaca

SEQ ID NO: 2523238 - RNA, 19 nt, Homo sapiens
  misc_RNA (1)...(19): siRNA sense strand
caacaacugcagaggacga

SEQ ID NO: 2523239 - RNA, 19 nt, Homo sapiens
  misc_RNA (1)...(19): siRNA sense strand
ggaaagagaaggagcgagg

SEQ ID NO: 2523240 - RNA, 19 nt, Homo sapiens
  misc_RNA (1)...(19): siRNA sense strand
gcuccuaccuucugggcca

SEQ ID NO: 2523241 - RNA, 19 nt, Homo sapiens
  misc_RNA (1)...(19): siRNA sense strand
uugugaaggagcagggaga

SEQ ID NO: 2523242 - RNA, 19 nt, Homo sapiens
  misc_RNA (1)...(19): siRNA sense strand
agagaaggagcgagguuca

SEQ ID NO: 2523243 - RNA, 19 nt, Homo sapiens
  misc_RNA (1)...(19): siRNA sense strand
accaagagcuggaggaggu

SEQ ID NO: 2523244 - RNA, 19 nt, Homo sapiens
  misc_RNA (1)...(19): siRNA sense strand
agguauuugugaaggagca

SEQ ID NO: 2523245 - RNA, 19 nt, Homo sapiens
  misc_RNA (1)...(19): siRNA sense strand
aggagguauuugugaagga

SEQ ID NO: 2523246 - RNA, 19 nt, Homo sapiens
  misc_RNA (1)...(19): siRNA sense strand
cagaaggcugugagaaagu

SEQ ID NO: 2523247 - RNA, 19 nt, Homo sapiens
  misc_RNA (1)...(19): siRNA sense strand
uggccagucaugaggaaca

SEQ ID NO: 2523248 - RNA, 19 nt, Homo sapiens
  misc_RNA (1)...(19): siRNA sense strand
ccgcagugggaaagagaag

SEQ ID NO: 2523249 - RNA, 19 nt, Homo sapiens
  misc_RNA (1)...(19): siRNA sense strand
ugacaagaacaaaguccau

SEQ ID NO: 2523250 - RNA, 19 nt, Homo sapiens
  misc_RNA (1)...(19): siRNA sense strand
aagcagaguuggaggcaca

SEQ ID NO: 2523251 - RNA, 19 nt, Homo sapiens
  misc_RNA (1)...(19): siRNA sense strand
gcagagaauuagaagcaga

SEQ ID NO: 2523252 - RNA, 19 nt, Homo sapiens
  misc_RNA (1)...(19): siRNA sense strand
gggaaagacaacaggaagu

SEQ ID NO: 2523253 - RNA, 19 nt, Homo sapiens
  misc_RNA (1)...(19): siRNA sense strand
agcaagagauuuaaggcaa

SEQ ID NO: 2523254 - RNA, 19 nt, Homo sapiens
  misc_RNA (1)...(19): siRNA sense strand
caggaaggaagcagagaau

SEQ ID NO: 2523255 - RNA, 19 nt, Homo sapiens
  misc_RNA (1)...(19): siRNA sense strand
guacagagguuaaaggaug

SEQ ID NO: 2523256 - RNA, 19 nt, Homo sapiens
  misc_RNA (1)...(19): siRNA sense strand
acuggaagacuuugaacaa

SEQ ID NO: 2523257 - RNA, 19 nt, Homo sapiens
  misc_RNA (1)...(19): siRNA sense strand
cgaccuggagcgagccaaa

SEQ ID NO: 2523258 - RNA, 19 nt, Homo sapiens
  misc_RNA (1)...(19): siRNA sense strand
gguuaaaggaugaagcaag

SEQ ID NO: 2523259 - RNA, 19 nt, Homo sapiens
  misc_RNA (1)...(19): siRNA sense strand
gcugaauggcaauggcaca

SEQ ID NO: 2523260 - RNA, 19 nt, Homo sapiens
  misc_RNA (1)...(19): siRNA sense strand
gcacaaaguucucucgauc

SEQ ID NO: 2523261 - RNA, 19 nt, Homo sapiens
  misc_RNA (1)...(19): siRNA sense strand
cacaauuaguacaggcuga

SEQ ID NO: 2523262 - RNA, 19 nt, Homo sapiens
  misc_RNA (1)...(19): siRNA sense strand
aucaauaugcacagagcua

SEQ ID NO: 2523263 - RNA, 19 nt, Homo sapiens
  misc_RNA (1)...(19): siRNA sense strand
auuaaggagcaguugcaua

SEQ ID NO: 2523264 - RNA, 19 nt, Homo sapiens
  misc_RNA (1)...(19): siRNA sense strand
ggaaguaacuagaaagucg

SEQ ID NO: 2523265 - RNA, 19 nt, Homo sapiens
  misc_RNA (1)...(19): siRNA sense strand
aaggaugaagcaagagauu

SEQ ID NO: 2523266 - RNA, 19 nt, Homo sapiens
  misc_RNA (1)...(19): siRNA sense strand
gcaagagauuuaaggcaag

SEQ ID NO: 2523267 - RNA, 19 nt, Homo sapiens
  misc_RNA (1)...(19): siRNA sense strand
caauaguuucacuggaaga

SEQ ID NO: 2523268 - RNA, 19 nt, Homo sapiens
  misc_RNA (1)...(19): siRNA sense strand
gagaauuagaagcagaguu

SEQ ID NO: 2523269 - RNA, 19 nt, Homo sapiens
  misc_RNA (1)...(19): siRNA sense strand
ugauaaccaaagacugaaa

SEQ ID NO: 2523270 - RNA, 19 nt, Homo sapiens
  misc_RNA (1)...(19): siRNA sense strand
uccuugaaguauaagcaaa

SEQ ID NO: 2523271 - RNA, 19 nt, Homo sapiens
  misc_RNA (1)...(19): siRNA sense strand
auagagacuugcaggcuga

SEQ ID NO: 2523272 - RNA, 19 nt, Homo sapiens
  misc_RNA (1)...(19): siRNA sense strand
guggaggcauuaaaggaga

SEQ ID NO: 2523273 - RNA, 19 nt, Homo sapiens
  misc_RNA (1)...(19): siRNA sense strand
uggaggcauuaaaggagaa

SEQ ID NO: 2523274 - RNA, 19 nt, Homo sapiens
  misc_RNA (1)...(19): siRNA sense strand
gcacagagcuauaagcagg

SEQ ID NO: 2523275 - RNA, 19 nt, Homo sapiens
  misc_RNA (1)...(19): siRNA sense strand
aauuagaagcagaguugga

SEQ ID NO: 2523276 - RNA, 19 nt, Homo sapiens
  misc_RNA (1)...(19): siRNA sense strand
caguguuagaagaugauuu

SEQ ID NO: 2523277 - RNA, 19 nt, Homo sapiens
  misc_RNA (1)...(19): siRNA sense strand
ggaaacugcuuauuggaag

SEQ ID NO: 2523278 - RNA, 19 nt, Homo sapiens
  misc_RNA (1)...(19): siRNA sense strand
ucgggaaagacaacaggaa

SEQ ID NO: 2523279 - RNA, 19 nt, Homo sapiens
  misc_RNA (1)...(19): siRNA sense strand
ggucucaguguuagaagau

SEQ ID NO: 2523280 - RNA, 19 nt, Homo sapiens
  misc_RNA (1)...(19): siRNA sense strand
caggaaguaacuagaaagu

SEQ ID NO: 2523281 - RNA, 19 nt, Homo sapiens
  misc_RNA (1)...(19): siRNA sense strand
cgacaaaggggcaguaaac

SEQ ID NO: 2523282 - RNA, 19 nt, Homo sapiens
  misc_RNA (1)...(19): siRNA sense strand
gagcgagccaaaagggcaa

SEQ ID NO: 2523283 - RNA, 19 nt, Homo sapiens
  misc_RNA (1)...(19): siRNA sense strand
gggcuuuagaauccaaauu

SEQ ID NO: 2523284 - RNA, 19 nt, Homo sapiens
  misc_RNA (1)...(19): siRNA sense strand
auccuauauuucagggaau

SEQ ID NO: 2523285 - RNA, 19 nt, Homo sapiens
  misc_RNA (1)...(19): siRNA sense strand
gcuuuggaggcuauggaua

SEQ ID NO: 2523286 - RNA, 19 nt, Homo sapiens
  misc_RNA (1)...(19): siRNA sense strand
cuuuggaggcuauggauau

SEQ ID NO: 2523287 - RNA, 19 nt, Homo sapiens
  misc_RNA (1)...(19): siRNA sense strand
gcuucggaggcuacggaua

SEQ ID NO: 2523288 - RNA, 19 nt, Homo sapiens
  misc_RNA (1)...(19): siRNA sense strand
aagaaagauagguugguuu

SEQ ID NO: 2523289 - RNA, 19 nt, Homo sapiens
  misc_RNA (1)...(19): siRNA sense strand
acauugaggaauaaggaca

SEQ ID NO: 2523290 - RNA, 19 nt, Homo sapiens
  misc_RNA (1)...(19): siRNA sense strand
aauucaucaucuugggauu

SEQ ID NO: 2523291 - RNA, 19 nt, Homo sapiens
  misc_RNA (1)...(19): siRNA sense strand
gugcauacaguguugacau

SEQ ID NO: 2523292 - RNA, 19 nt, Homo sapiens
  misc_RNA (1)...(19): siRNA sense strand
cauugaggaauaaggacau

SEQ ID NO: 2523293 - RNA, 19 nt, Homo sapiens
  misc_RNA (1)...(19): siRNA sense strand
cuuuguaggaucagagugu

SEQ ID NO: 2523294 - RNA, 19 nt, Homo sapiens
  misc_RNA (1)...(19): siRNA sense strand
aggcaaagucugagcggcu

SEQ ID NO: 2523295 - RNA, 19 nt, Homo sapiens
  misc_RNA (1)...(19): siRNA sense strand
cggccaagccucuccaaaa

SEQ ID NO: 2523296 - RNA, 19 nt, Homo sapiens
  misc_RNA (1)...(19): siRNA sense strand
gggcugggacuuggagcaa

SEQ ID NO: 2523297 - RNA, 19 nt, Homo sapiens
  misc_RNA (1)...(19): siRNA sense strand
uggaagaggaugugaaaau

SEQ ID NO: 2523298 - RNA, 19 nt, Homo sapiens
  misc_RNA (1)...(19): siRNA sense strand
agauggagcuggaagagga

SEQ ID NO: 2523299 - RNA, 19 nt, Homo sapiens
  misc_RNA (1)...(19): siRNA sense strand
ccaccugugcaacgggaaa

SEQ ID NO: 2523300 - RNA, 19 nt, Homo sapiens
  misc_RNA (1)...(19): siRNA sense strand
ggacucagauggagcugga

SEQ ID NO: 2523301 - RNA, 19 nt, Homo sapiens
  misc_RNA (1)...(19): siRNA sense strand
acgagaacuacgagcgcau

SEQ ID NO: 2523302 - RNA, 19 nt, Homo sapiens
  misc_RNA (1)...(19): siRNA sense strand
gccaagaacugcaaugcca

SEQ ID NO: 2523303 - RNA, 19 nt, Homo sapiens
  misc_RNA (1)...(19): siRNA sense strand
cguacaucauccaggagga

SEQ ID NO: 2523304 - RNA, 19 nt, Homo sapiens
  misc_RNA (1)...(19): siRNA sense strand
caugauaucucccuggaca

SEQ ID NO: 2523305 - RNA, 19 nt, Homo sapiens
  misc_RNA (1)...(19): siRNA sense strand
ccagcaaagccaaggcaga

SEQ ID NO: 2523306 - RNA, 19 nt, Homo sapiens
  misc_RNA (1)...(19): siRNA sense strand
ccggaagccugguuggcau

SEQ ID NO: 2523307 - RNA, 19 nt, Homo sapiens
  misc_RNA (1)...(19): siRNA sense strand
aagccauggacuuggugaa

SEQ ID NO: 2523308 - RNA, 19 nt, Homo sapiens
  misc_RNA (1)...(19): siRNA sense strand
ccuggaaacuugacggaga

SEQ ID NO: 2523309 - RNA, 19 nt, Homo sapiens
  misc_RNA (1)...(19): siRNA sense strand
ccgcagugcucuuggcugu

SEQ ID NO: 2523310 - RNA, 19 nt, Homo sapiens
  misc_RNA (1)...(19): siRNA sense strand
agaauggcagcaagagcaa

SEQ ID NO: 2523311 - RNA, 19 nt, Homo sapiens
  misc_RNA (1)...(19): siRNA sense strand
gagaagagcuggcagggag

SEQ ID NO: 2523312 - RNA, 19 nt, Homo sapiens
  misc_RNA (1)...(19): siRNA sense strand
cagaauggcagcaagagca

SEQ ID NO: 2523313 - RNA, 19 nt, Homo sapiens
  misc_RNA (1)...(19): siRNA sense strand
ccacccagcacgagcuaca

SEQ ID NO: 2523314 - RNA, 19 nt, Homo sapiens
  misc_RNA (1)...(19): siRNA sense strand
acaaagaggaagaggagaa

SEQ ID NO: 2523315 - RNA, 19 nt, Homo sapiens
  misc_RNA (1)...(19): siRNA sense strand
aggaagaggaagaggaaga

SEQ ID NO: 2523316 - RNA, 19 nt, Homo sapiens
  misc_RNA (1)...(19): siRNA sense strand
ugacagaauugcaggaaaa

SEQ ID NO: 2523317 - RNA, 19 nt, Homo sapiens
  misc_RNA (1)...(19): siRNA sense strand
uagcaaaagaggaggaaaa

SEQ ID NO: 2523318 - RNA, 19 nt, Homo sapiens
  misc_RNA (1)...(19): siRNA sense strand
aggaagaagagguggaaga

SEQ ID NO: 2523319 - RNA, 19 nt, Homo sapiens
  misc_RNA (1)...(19): siRNA sense strand
cagaagaucaggaggaaaa

SEQ ID NO: 2523320 - RNA, 19 nt, Homo sapiens
  misc_RNA (1)...(19): siRNA sense strand
aggaagaggagaaggaaga

SEQ ID NO: 2523321 - RNA, 19 nt, Homo sapiens
  misc_RNA (1)...(19): siRNA sense strand
uguuagagcaugagaaaga

SEQ ID NO: 2523322 - RNA, 19 nt, Homo sapiens
  misc_RNA (1)...(19): siRNA sense strand
aggaaaugguugugaaagu

SEQ ID NO: 2523323 - RNA, 19 nt, Homo sapiens
  misc_RNA (1)...(19): siRNA sense strand
aggaaauagaacaggaauu

SEQ ID NO: 2523324 - RNA, 19 nt, Homo sapiens
  misc_RNA (1)...(19): siRNA sense strand
gagaggacacagagagcaa

SEQ ID NO: 2523325 - RNA, 19 nt, Homo sapiens
  misc_RNA (1)...(19): siRNA sense strand
aagaagaacaagugcagaa

SEQ ID NO: 2523326 - RNA, 19 nt, Homo sapiens
  misc_RNA (1)...(19): siRNA sense strand
gcuaauaagaacaugaaca

SEQ ID NO: 2523327 - RNA, 19 nt, Homo sapiens
  misc_RNA (1)...(19): siRNA sense strand
aggaagaggaagaggagga

SEQ ID NO: 2523328 - RNA, 19 nt, Homo sapiens
  misc_RNA (1)...(19): siRNA sense strand
aggaaaaugaagaggacaa

SEQ ID NO: 2523329 - RNA, 19 nt, Homo sapiens
  misc_RNA (1)...(19): siRNA sense strand
ccuugaaagucccgaagaa

SEQ ID NO: 2523330 - RNA, 19 nt, Homo sapiens
  misc_RNA (1)...(19): siRNA sense strand
uggaagaagaagaagaaca

SEQ ID NO: 2523331 - RNA, 19 nt, Homo sapiens
  misc_RNA (1)...(19): siRNA sense strand
agauaagccaggaggaaca

SEQ ID NO: 2523332 - RNA, 19 nt, Homo sapiens
  misc_RNA (1)...(19): siRNA sense strand
acagagagcaacagagaga

SEQ ID NO: 2523333 - RNA, 19 nt, Homo sapiens
  misc_RNA (1)...(19): siRNA sense strand
ccacagaagaucaggagga

SEQ ID NO: 2523334 - RNA, 19 nt, Homo sapiens
  misc_RNA (1)...(19): siRNA sense strand
cugaagacauggagcgcuu

SEQ ID NO: 2523335 - RNA, 19 nt, Homo sapiens
  misc_RNA (1)...(19): siRNA sense strand
acgacaagaaugagaucaa

SEQ ID NO: 2523336 - RNA, 19 nt, Homo sapiens
  misc_RNA (1)...(19): siRNA sense strand
cugcagcaccucagggaua

SEQ ID NO: 2523337 - RNA, 19 nt, Homo sapiens
  misc_RNA (1)...(19): siRNA sense strand
ccuguuagagcaugagaaa

SEQ ID NO: 2523338 - RNA, 19 nt, Homo sapiens
  misc_RNA (1)...(19): siRNA sense strand
aagaggaagaggaggaaga

SEQ ID NO: 2523339 - RNA, 19 nt, Homo sapiens
  misc_RNA (1)...(19): siRNA sense strand
agaacaagugucaggaauu

SEQ ID NO: 2523340 - RNA, 19 nt, Homo sapiens
  misc_RNA (1)...(19): siRNA sense strand
aagugaaagaggaagcaaa

SEQ ID NO: 2523341 - RNA, 19 nt, Homo sapiens
  misc_RNA (1)...(19): siRNA sense strand
agaaagaggagauggagga

SEQ ID NO: 2523342 - RNA, 19 nt, Homo sapiens
  misc_RNA (1)...(19): siRNA sense strand
aggagauggaggaggaaaa

SEQ ID NO: 2523343 - RNA, 19 nt, Homo sapiens
  misc_RNA (1)...(19): siRNA sense strand
guagaaaaccagagugaga

SEQ ID NO: 2523344 - RNA, 19 nt, Homo sapiens
  misc_RNA (1)...(19): siRNA sense strand
ugaagaggacaaagaggaa

SEQ ID NO: 2523345 - RNA, 19 nt, Homo sapiens
  misc_RNA (1)...(19): siRNA sense strand
cugacagaauugcaggaaa

SEQ ID NO: 2523346 - RNA, 19 nt, Homo sapiens
  misc_RNA (1)...(19): siRNA sense strand
uggaugacaaugagagcua

SEQ ID NO: 2523347 - RNA, 19 nt, Homo sapiens
  misc_RNA (1)...(19): siRNA sense strand
gggaugagcuaguugcuga

SEQ ID NO: 2523348 - RNA, 19 nt, Homo sapiens
  misc_RNA (1)...(19): siRNA sense strand
uggaaaaguuacuggccaa

SEQ ID NO: 2523349 - RNA, 19 nt, Homo sapiens
  misc_RNA (1)...(19): siRNA sense strand
aggccuaugggaagaguua

SEQ ID NO: 2523350 - RNA, 19 nt, Homo sapiens
  misc_RNA (1)...(19): siRNA sense strand
aggaaaagaaagaggagau

SEQ ID NO: 2523351 - RNA, 19 nt, Homo sapiens
  misc_RNA (1)...(19): siRNA sense strand
augaggaggaagaggaaga

SEQ ID NO: 2523352 - RNA, 19 nt, Homo sapiens
  misc_RNA (1)...(19): siRNA sense strand
ccagauaagccaggaggaa

SEQ ID NO: 2523353 - RNA, 19 nt, Homo sapiens
  misc_RNA (1)...(19): siRNA sense strand
aagaggagauggaggagga

SEQ ID NO: 2523354 - RNA, 19 nt, Homo sapiens
  misc_RNA (1)...(19): siRNA sense strand
uggcagaacuggaggagac

SEQ ID NO: 2523355 - RNA, 19 nt, Homo sapiens
  misc_RNA (1)...(19): siRNA sense strand
gacaaaggaaagugugcua

SEQ ID NO: 2523356 - RNA, 19 nt, Homo sapiens
  misc_RNA (1)...(19): siRNA sense strand
ugaggaaaugguugugaaa

SEQ ID NO: 2523357 - RNA, 19 nt, Homo sapiens
  misc_RNA (1)...(19): siRNA sense strand
agaaggaagaagacaguga

SEQ ID NO: 2523358 - RNA, 19 nt, Homo sapiens
  misc_RNA (1)...(19): siRNA sense strand
agagcuauuacaagaguua

SEQ ID NO: 2523359 - RNA, 19 nt, Homo sapiens
  misc_RNA (1)...(19): siRNA sense strand
uugugaaagugcugaucaa

SEQ ID NO: 2523360 - RNA, 19 nt, Homo sapiens
  misc_RNA (1)...(19): siRNA sense strand
ggacaaagaggaagaggag

SEQ ID NO: 2523361 - RNA, 19 nt, Homo sapiens
  misc_RNA (1)...(19): siRNA sense strand
ugaacaugagagugacaua

SEQ ID NO: 2523362 - RNA, 19 nt, Homo sapiens
  misc_RNA (1)...(19): siRNA sense strand
ugagaaagaaagcgaacuu

SEQ ID NO: 2523363 - RNA, 19 nt, Homo sapiens
  misc_RNA (1)...(19): siRNA sense strand
aagaacaagugucaggaau

SEQ ID NO: 2523364 - RNA, 19 nt, Homo sapiens
  misc_RNA (1)...(19): siRNA sense strand
agaagagguggaagaagaa

SEQ ID NO: 2523365 - RNA, 19 nt, Homo sapiens
  misc_RNA (1)...(19): siRNA sense strand
ggagauuaugagauggaga

SEQ ID NO: 2523366 - RNA, 19 nt, Homo sapiens
  misc_RNA (1)...(19): siRNA sense strand
cagaaagaccugaaggaag

SEQ ID NO: 2523367 - RNA, 19 nt, Homo sapiens
  misc_RNA (1)...(19): siRNA sense strand
ccagugaggccuaugggaa

SEQ ID NO: 2523368 - RNA, 19 nt, Homo sapiens
  misc_RNA (1)...(19): siRNA sense strand
aagaagaacugcaggagcu

SEQ ID NO: 2523369 - RNA, 19 nt, Homo sapiens
  misc_RNA (1)...(19): siRNA sense strand
aagaacaauuagagaucca

SEQ ID NO: 2523370 - RNA, 19 nt, Homo sapiens
  misc_RNA (1)...(19): siRNA sense strand
gcggcaagcagcagaggau

SEQ ID NO: 2523371 - RNA, 19 nt, Homo sapiens
  misc_RNA (1)...(19): siRNA sense strand
caaaggaaagugugcuaau

SEQ ID NO: 2523372 - RNA, 19 nt, Homo sapiens
  misc_RNA (1)...(19): siRNA sense strand
aguuagaagaccuguguga

SEQ ID NO: 2523373 - RNA, 19 nt, Homo sapiens
  misc_RNA (1)...(19): siRNA sense strand
ccuccaaauguaaucgaaa

SEQ ID NO: 2523374 - RNA, 19 nt, Homo sapiens
  misc_RNA (1)...(19): siRNA sense strand
agguagaggaggaggaaga

SEQ ID NO: 2523375 - RNA, 19 nt, Homo sapiens
  misc_RNA (1)...(19): siRNA sense strand
aggagaaggaggagaaaga

SEQ ID NO: 2523376 - RNA, 19 nt, Homo sapiens
  misc_RNA (1)...(19): siRNA sense strand
aagcaaaggcccagcaaca

SEQ ID NO: 2523377 - RNA, 19 nt, Homo sapiens
  misc_RNA (1)...(19): siRNA sense strand
augaagaggaagacagaau

SEQ ID NO: 2523378 - RNA, 19 nt, Homo sapiens
  misc_RNA (1)...(19): siRNA sense strand
auguaaaggccgauggaga

SEQ ID NO: 2523379 - RNA, 19 nt, Homo sapiens
  misc_RNA (1)...(19): siRNA sense strand
aggaggaagaggaggauga

SEQ ID NO: 2523380 - RNA, 19 nt, Homo sapiens
  misc_RNA (1)...(19): siRNA sense strand
agcucaugcuggagaauua

SEQ ID NO: 2523381 - RNA, 19 nt, Homo sapiens
  misc_RNA (1)...(19): siRNA sense strand
cagggaagggauagaggaa

SEQ ID NO: 2523382 - RNA, 19 nt, Homo sapiens
  misc_RNA (1)...(19): siRNA sense strand
aagaggagaaggaggagaa

SEQ ID NO: 2523383 - RNA, 19 nt, Homo sapiens
  misc_RNA (1)...(19): siRNA sense strand
cagacgaggagcaggagaa

SEQ ID NO: 2523384 - RNA, 19 nt, Homo sapiens
  misc_RNA (1)...(19): siRNA sense strand
gaaagugcguuaaagggaa

SEQ ID NO: 2523385 - RNA, 19 nt, Homo sapiens
  misc_RNA (1)...(19): siRNA sense strand
gccucaggaugaugggaaa

SEQ ID NO: 2523386 - RNA, 19 nt, Homo sapiens
  misc_RNA (1)...(19): siRNA sense strand
aggaagaggagaaggagga

SEQ ID NO: 2523387 - RNA, 19 nt, Homo sapiens
  misc_RNA (1)...(19): siRNA sense strand
ccugagucauaaagagcua

SEQ ID NO: 2523388 - RNA, 19 nt, Homo sapiens
  misc_RNA (1)...(19): siRNA sense strand
aggagaagcugcugcgcau

SEQ ID NO: 2523389 - RNA, 19 nt, Homo sapiens
  misc_RNA (1)...(19): siRNA sense strand
augucaaggaagaggagaa

SEQ ID NO: 2523390 - RNA, 19 nt, Homo sapiens
  misc_RNA (1)...(19): siRNA sense strand
aggaucaagaggaagauaa

SEQ ID NO: 2523391 - RNA, 19 nt, Homo sapiens
  misc_RNA (1)...(19): siRNA sense strand
uggcagagcucaagggcgu

SEQ ID NO: 2523392 - RNA, 19 nt, Homo sapiens
  misc_RNA (1)...(19): siRNA sense strand
ggauguaacugguggcuug

SEQ ID NO: 2523393 - RNA, 19 nt, Homo sapiens
  misc_RNA (1)...(19): siRNA sense strand
gcucagaagacgugcgaug

SEQ ID NO: 2523394 - RNA, 19 nt, Homo sapiens
  misc_RNA (1)...(19): siRNA sense strand
agaaaaugccccauauaaa

SEQ ID NO: 2523395 - RNA, 19 nt, Homo sapiens
  misc_RNA (1)...(19): siRNA sense strand
aagaugaugaagaggaaga

SEQ ID NO: 2523396 - RNA, 19 nt, Homo sapiens
  misc_RNA (1)...(19): siRNA sense strand
ggaaagugcguuaaaggga

SEQ ID NO: 2523397 - RNA, 19 nt, Homo sapiens
  misc_RNA (1)...(19): siRNA sense strand
aggaugaagaugaugaaga

SEQ ID NO: 2523398 - RNA, 19 nt, Homo sapiens
  misc_RNA (1)...(19): siRNA sense strand
aagaggaucaagaggaaga

SEQ ID NO: 2523399 - RNA, 19 nt, Homo sapiens
  misc_RNA (1)...(19): siRNA sense strand
uguuaaugaugucaaggaa

SEQ ID NO: 2523400 - RNA, 19 nt, Homo sapiens
  misc_RNA (1)...(19): siRNA sense strand
agucagauguaaaggccga

SEQ ID NO: 2523401 - RNA, 19 nt, Homo sapiens
  misc_RNA (1)...(19): siRNA sense strand
cagaccagguagaggagga

SEQ ID NO: 2523402 - RNA, 19 nt, Homo sapiens
  misc_RNA (1)...(19): siRNA sense strand
aagaggaagauaagaacau

SEQ ID NO: 2523403 - RNA, 19 nt, Homo sapiens
  misc_RNA (1)...(19): siRNA sense strand
uagaauaugaagaugguca

SEQ ID NO: 2523404 - RNA, 19 nt, Homo sapiens
  misc_RNA (1)...(19): siRNA sense strand
accauaaguugcagcggua

SEQ ID NO: 2523405 - RNA, 19 nt, Homo sapiens
  misc_RNA (1)...(19): siRNA sense strand
agggauagaggaagaggau

SEQ ID NO: 2523406 - RNA, 19 nt, Homo sapiens
  misc_RNA (1)...(19): siRNA sense strand
uaucauacgaagaggagca

SEQ ID NO: 2523407 - RNA, 19 nt, Homo sapiens
  misc_RNA (1)...(19): siRNA sense strand
augaagaugaugaagauga

SEQ ID NO: 2523408 - RNA, 19 nt, Homo sapiens
  misc_RNA (1)...(19): siRNA sense strand
ggagcagggcaguguuaau

SEQ ID NO: 2523409 - RNA, 19 nt, Homo sapiens
  misc_RNA (1)...(19): siRNA sense strand
aggaagaggaucaagagga

SEQ ID NO: 2523410 - RNA, 19 nt, Homo sapiens
  misc_RNA (1)...(19): siRNA sense strand
uagaggaggaggaagaaaa

SEQ ID NO: 2523411 - RNA, 19 nt, Homo sapiens
  misc_RNA (1)...(19): siRNA sense strand
aagaggaggaagaggagga

SEQ ID NO: 2523412 - RNA, 19 nt, Homo sapiens
  misc_RNA (1)...(19): siRNA sense strand
cauacgaagaggagcaguu

SEQ ID NO: 2523413 - RNA, 19 nt, Homo sapiens
  misc_RNA (1)...(19): siRNA sense strand
aguuuacggugcuggagaa

SEQ ID NO: 2523414 - RNA, 19 nt, Homo sapiens
  misc_RNA (1)...(19): siRNA sense strand
gcagcaacuucgagggccu

SEQ ID NO: 2523415 - RNA, 19 nt, Homo sapiens
  misc_RNA (1)...(19): siRNA sense strand
uagaauguguccuggcaga

SEQ ID NO: 2523416 - RNA, 19 nt, Homo sapiens
  misc_RNA (1)...(19): siRNA sense strand
ggucugaagcaaaggccca

SEQ ID NO: 2523417 - RNA, 19 nt, Homo sapiens
  misc_RNA (1)...(19): siRNA sense strand
ugaugaagaggaagacaga

SEQ ID NO: 2523418 - RNA, 19 nt, Homo sapiens
  misc_RNA (1)...(19): siRNA sense strand
ugguacggaaagugcguua

SEQ ID NO: 2523419 - RNA, 19 nt, Homo sapiens
  misc_RNA (1)...(19): siRNA sense strand
aucaagaggaagauaagaa

SEQ ID NO: 2523420 - RNA, 19 nt, Homo sapiens
  misc_RNA (1)...(19): siRNA sense strand
cagcaaaggcagcgaagag

SEQ ID NO: 2523421 - RNA, 19 nt, Homo sapiens
  misc_RNA (1)...(19): siRNA sense strand
ggaaaaguacggagucaga

SEQ ID NO: 2523422 - RNA, 19 nt, Homo sapiens
  misc_RNA (1)...(19): siRNA sense strand
augaugaagaugaugaaga

SEQ ID NO: 2523423 - RNA, 19 nt, Homo sapiens
  misc_RNA (1)...(19): siRNA sense strand
uggagaacagccugagaga

SEQ ID NO: 2523424 - RNA, 19 nt, Homo sapiens
  misc_RNA (1)...(19): siRNA sense strand
uugaacugaucguggccaa

SEQ ID NO: 2523425 - RNA, 19 nt, Homo sapiens
  misc_RNA (1)...(19): siRNA sense strand
gaguugacccacaagaaaa

SEQ ID NO: 2523426 - RNA, 19 nt, Homo sapiens
  misc_RNA (1)...(19): siRNA sense strand
gggaaagggucguugccac

SEQ ID NO: 2523427 - RNA, 19 nt, Homo sapiens
  misc_RNA (1)...(19): siRNA sense strand
agaugaugaagaugaugaa

SEQ ID NO: 2523428 - RNA, 19 nt, Homo sapiens
  misc_RNA (1)...(19): siRNA sense strand
ggaaagggucguugccacu

SEQ ID NO: 2523429 - RNA, 19 nt, Homo sapiens
  misc_RNA (1)...(19): siRNA sense strand
ucagagaggaagacaaagu

SEQ ID NO: 2523430 - RNA, 19 nt, Homo sapiens
  misc_RNA (1)...(19): siRNA sense strand
ucacagaacagaaaccaga

SEQ ID NO: 2523431 - RNA, 19 nt, Homo sapiens
  misc_RNA (1)...(19): siRNA sense strand
auaugaagauggucagacu

SEQ ID NO: 2523432 - RNA, 19 nt, Homo sapiens
  misc_RNA (1)...(19): siRNA sense strand
ggaucaagaggaagauaag

SEQ ID NO: 2523433 - RNA, 19 nt, Homo sapiens
  misc_RNA (1)...(19): siRNA sense strand
augacguccuggugccaaa

SEQ ID NO: 2523434 - RNA, 19 nt, Homo sapiens
  misc_RNA (1)...(19): siRNA sense strand
cuucaagugcaaagacaaa

SEQ ID NO: 2523435 - RNA, 19 nt, Homo sapiens
  misc_RNA (1)...(19): siRNA sense strand
aggaauacaaugaggagca

SEQ ID NO: 2523436 - RNA, 19 nt, Homo sapiens
  misc_RNA (1)...(19): siRNA sense strand
acgaaaucuucuugagugu

SEQ ID NO: 2523437 - RNA, 19 nt, Homo sapiens
  misc_RNA (1)...(19): siRNA sense strand
gacucaaacauuagagaaa

SEQ ID NO: 2523438 - RNA, 19 nt, Homo sapiens
  misc_RNA (1)...(19): siRNA sense strand
ggaagaaacaaaagccaaa

SEQ ID NO: 2523439 - RNA, 19 nt, Homo sapiens
  misc_RNA (1)...(19): siRNA sense strand
cuacaacaacugugggcua

SEQ ID NO: 2523440 - RNA, 19 nt, Homo sapiens
  misc_RNA (1)...(19): siRNA sense strand
auguaaaagaggaggcuaa

SEQ ID NO: 2523441 - RNA, 19 nt, Homo sapiens
  misc_RNA (1)...(19): siRNA sense strand
aguagaaagcagacagaca

SEQ ID NO: 2523442 - RNA, 19 nt, Homo sapiens
  misc_RNA (1)...(19): siRNA sense strand
ccgaagacacguagcccua

SEQ ID NO: 2523443 - RNA, 19 nt, Homo sapiens
  misc_RNA (1)...(19): siRNA sense strand
auaaugacacagacagaaa

SEQ ID NO: 2523444 - RNA, 19 nt, Homo sapiens
  misc_RNA (1)...(19): siRNA sense strand
aaguacagcuagugggcca

SEQ ID NO: 2523445 - RNA, 19 nt, Homo sapiens
  misc_RNA (1)...(19): siRNA sense strand
ugauaaugacacagacaga

SEQ ID NO: 2523446 - RNA, 19 nt, Homo sapiens
  misc_RNA (1)...(19): siRNA sense strand
ggcuaaugcugcugcugaa

SEQ ID NO: 2523447 - RNA, 19 nt, Homo sapiens
  misc_RNA (1)...(19): siRNA sense strand
uagccaacggugugauuaa

SEQ ID NO: 2523448 - RNA, 19 nt, Homo sapiens
  misc_RNA (1)...(19): siRNA sense strand
ggcuaaucaugcugucaaa

SEQ ID NO: 2523449 - RNA, 19 nt, Homo sapiens
  misc_RNA (1)...(19): siRNA sense strand
augacacacuagaggaaga

SEQ ID NO: 2523450 - RNA, 19 nt, Homo sapiens
  misc_RNA (1)...(19): siRNA sense strand
gcugauaaugacacagaca

SEQ ID NO: 2523451 - RNA, 19 nt, Homo sapiens
  misc_RNA (1)...(19): siRNA sense strand
gcagggauuccgaggacuu

SEQ ID NO: 2523452 - RNA, 19 nt, Homo sapiens
  misc_RNA (1)...(19): siRNA sense strand
guaaaauggauguagccaa

SEQ ID NO: 2523453 - RNA, 19 nt, Homo sapiens
  misc_RNA (1)...(19): siRNA sense strand
uguuaagcccucugucaua

SEQ ID NO: 2523454 - RNA, 19 nt, Homo sapiens
  misc_RNA (1)...(19): siRNA sense strand
uuguagaaggagugaagau

SEQ ID NO: 2523455 - RNA, 19 nt, Homo sapiens
  misc_RNA (1)...(19): siRNA sense strand
agcaagaggugcaaagacu

SEQ ID NO: 2523456 - RNA, 19 nt, Homo sapiens
  misc_RNA (1)...(19): siRNA sense strand
ccacauucucaaucgggua

SEQ ID NO: 2523457 - RNA, 19 nt, Homo sapiens
  misc_RNA (1)...(19): siRNA sense strand
ggaauggagaagccagaga

SEQ ID NO: 2523458 - RNA, 19 nt, Homo sapiens
  misc_RNA (1)...(19): siRNA sense strand
uggaauaggaccaaagaug

SEQ ID NO: 2523459 - RNA, 19 nt, Homo sapiens
  misc_RNA (1)...(19): siRNA sense strand
uaaugacacacuagaggaa

SEQ ID NO: 2523460 - RNA, 19 nt, Homo sapiens
  misc_RNA (1)...(19): siRNA sense strand
acaccaacgaagagggucu

SEQ ID NO: 2523461 - RNA, 19 nt, Homo sapiens
  misc_RNA (1)...(19): siRNA sense strand
gggcuaaucaugcugucaa

SEQ ID NO: 2523462 - RNA, 19 nt, Homo sapiens
  misc_RNA (1)...(19): siRNA sense strand
cugcugaagagauccguua

SEQ ID NO: 2523463 - RNA, 19 nt, Homo sapiens
  misc_RNA (1)...(19): siRNA sense strand
ggagugaagaugcgcacau

SEQ ID NO: 2523464 - RNA, 19 nt, Homo sapiens
  misc_RNA (1)...(19): siRNA sense strand
ggaccaaagauggauggaa

SEQ ID NO: 2523465 - RNA, 19 nt, Homo sapiens
  misc_RNA (1)...(19): siRNA sense strand
aaaauaaggaggacucaaa

SEQ ID NO: 2523466 - RNA, 19 nt, Homo sapiens
  misc_RNA (1)...(19): siRNA sense strand
uccaugaggaagaaacaaa

SEQ ID NO: 2523467 - RNA, 19 nt, Homo sapiens
  misc_RNA (1)...(19): siRNA sense strand
augugggagaacagauaaa

SEQ ID NO: 2523468 - RNA, 19 nt, Homo sapiens
  misc_RNA (1)...(19): siRNA sense strand
aaacaaaagccaaaaggga

SEQ ID NO: 2523469 - RNA, 19 nt, Homo sapiens
  misc_RNA (1)...(19): siRNA sense strand
agaacagauaaaggaguua

SEQ ID NO: 2523470 - RNA, 19 nt, Homo sapiens
  misc_RNA (1)...(19): siRNA sense strand
guucaauauuacccaccua

SEQ ID NO: 2523471 - RNA, 19 nt, Homo sapiens
  misc_RNA (1)...(19): siRNA sense strand
ggaaugacagaauggggaa

SEQ ID NO: 2523472 - RNA, 19 nt, Homo sapiens
  misc_RNA (1)...(19): siRNA sense strand
ggagaacagauaaaggagu

SEQ ID NO: 2523473 - RNA, 19 nt, Homo sapiens
  misc_RNA (1)...(19): siRNA sense strand
auggauggaaugacagaau

SEQ ID NO: 2523474 - RNA, 19 nt, Homo sapiens
  misc_RNA (1)...(19): siRNA sense strand
auugaugagcugcugaaua

SEQ ID NO: 2523475 - RNA, 19 nt, Homo sapiens
  misc_RNA (1)...(19): siRNA sense strand
ccccaaaagccucaauaua

SEQ ID NO: 2523476 - RNA, 19 nt, Homo sapiens
  misc_RNA (1)...(19): siRNA sense strand
aggaagaaacaaaagccaa

SEQ ID NO: 2523477 - RNA, 19 nt, Homo sapiens
  misc_RNA (1)...(19): siRNA sense strand
ccugagacacagaggucaa

SEQ ID NO: 2523478 - RNA, 19 nt, Homo sapiens
  misc_RNA (1)...(19): siRNA sense strand
acacagaggucaagcugca

SEQ ID NO: 2523479 - RNA, 19 nt, Homo sapiens
  misc_RNA (1)...(19): siRNA sense strand
gggaacagcaggugcgacu

SEQ ID NO: 2523480 - RNA, 19 nt, Homo sapiens
  misc_RNA (1)...(19): siRNA sense strand
ccucaaugauucagagcag

SEQ ID NO: 2523481 - RNA, 19 nt, Homo sapiens
  misc_RNA (1)...(19): siRNA sense strand
gggcuauggcugcggcuau

SEQ ID NO: 2523482 - RNA, 19 nt, Homo sapiens
  misc_RNA (1)...(19): siRNA sense strand
gugaggagcuggaagagga

SEQ ID NO: 2523483 - RNA, 19 nt, Homo sapiens
  misc_RNA (1)...(19): siRNA sense strand
caguguaugggcagggcua

SEQ ID NO: 2523484 - RNA, 19 nt, Homo sapiens
  misc_RNA (1)...(19): siRNA sense strand
gugccaacaacguggaacu

SEQ ID NO: 2523485 - RNA, 19 nt, Homo sapiens
  misc_RNA (1)...(19): siRNA sense strand
gugaggaggaagaugggaa

SEQ ID NO: 2523486 - RNA, 19 nt, Homo sapiens
  misc_RNA (1)...(19): siRNA sense strand
gaaagugaguggcuggaga

SEQ ID NO: 2523487 - RNA, 19 nt, Homo sapiens
  misc_RNA (1)...(19): siRNA sense strand
guccaagugcucagagaau

SEQ ID NO: 2523488 - RNA, 19 nt, Homo sapiens
  misc_RNA (1)...(19): siRNA sense strand
cgagugagcaggacgcaga

SEQ ID NO: 2523489 - RNA, 19 nt, Homo sapiens
  misc_RNA (1)...(19): siRNA sense strand
caaccaagcagguggcuca

SEQ ID NO: 2523490 - RNA, 19 nt, Homo sapiens
  misc_RNA (1)...(19): siRNA sense strand
ggaggaggucaguggccaa

SEQ ID NO: 2523491 - RNA, 19 nt, Homo sapiens
  misc_RNA (1)...(19): siRNA sense strand
ccugaguagccgagaggau

SEQ ID NO: 2523492 - RNA, 19 nt, Homo sapiens
  misc_RNA (1)...(19): siRNA sense strand
ccggaagcaggaagagcaa

SEQ ID NO: 2523493 - RNA, 19 nt, Homo sapiens
  misc_RNA (1)...(19): siRNA sense strand
agaaagagguucaagagcu

SEQ ID NO: 2523494 - RNA, 19 nt, Homo sapiens
  misc_RNA (1)...(19): siRNA sense strand
agacacaaauucagcagga

SEQ ID NO: 2523495 - RNA, 19 nt, Homo sapiens
  misc_RNA (1)...(19): siRNA sense strand
gaaagagguucaagagcug

SEQ ID NO: 2523496 - RNA, 19 nt, Homo sapiens
  misc_RNA (1)...(19): siRNA sense strand
augcaggagcacagcagaa

SEQ ID NO: 2523497 - RNA, 19 nt, Homo sapiens
  misc_RNA (1)...(19): siRNA sense strand
cagcagaauccacagccaa

SEQ ID NO: 2523498 - RNA, 19 nt, Homo sapiens
  misc_RNA (1)...(19): siRNA sense strand
cgauggaguucgaaggcac

SEQ ID NO: 2523499 - RNA, 19 nt, Homo sapiens
  misc_RNA (1)...(19): siRNA sense strand
cagcauugcaucuggccuu

SEQ ID NO: 2523500 - RNA, 19 nt, Homo sapiens
  misc_RNA (1)...(19): siRNA sense strand
gugaagaggcauacagggu

SEQ ID NO: 2523501 - RNA, 19 nt, Homo sapiens
  misc_RNA (1)...(19): siRNA sense strand
cucaggagcaggagacgaa

SEQ ID NO: 2523502 - RNA, 19 nt, Homo sapiens
  misc_RNA (1)...(19): siRNA sense strand
gugccgagcugaacaggga

SEQ ID NO: 2523503 - RNA, 19 nt, Homo sapiens
  misc_RNA (1)...(19): siRNA sense strand
gaagaggcauacaggguuc

SEQ ID NO: 2523504 - RNA, 19 nt, Homo sapiens
  misc_RNA (1)...(19): siRNA sense strand
cauggaggcugcuggcaca

SEQ ID NO: 2523505 - RNA, 19 nt, Homo sapiens
  misc_RNA (1)...(19): siRNA sense strand
ccgcgaagauggagccucu

SEQ ID NO: 2523506 - RNA, 19 nt, Homo sapiens
  misc_RNA (1)...(19): siRNA sense strand
agaccaagcaccaggccuu

SEQ ID NO: 2523507 - RNA, 19 nt, Homo sapiens
  misc_RNA (1)...(19): siRNA sense strand
gcgucaaguaucugaucuu

SEQ ID NO: 2523508 - RNA, 19 nt, Homo sapiens
  misc_RNA (1)...(19): siRNA sense strand
aggucaagagguaggguua

SEQ ID NO: 2523509 - RNA, 19 nt, Homo sapiens
  misc_RNA (1)...(19): siRNA sense strand
gaacaagauaagaagccaa

SEQ ID NO: 2523510 - RNA, 19 nt, Homo sapiens
  misc_RNA (1)...(19): siRNA sense strand
gaaagaaagaugcgggcuu

SEQ ID NO: 2523511 - RNA, 19 nt, Homo sapiens
  misc_RNA (1)...(19): siRNA sense strand
gggaucaagaauuggcaaa

SEQ ID NO: 2523512 - RNA, 19 nt, Homo sapiens
  misc_RNA (1)...(19): siRNA sense strand
aggguuacuucgacagaaa

SEQ ID NO: 2523513 - RNA, 19 nt, Homo sapiens
  misc_RNA (1)...(19): siRNA sense strand
aagaaaauggauugggaaa

SEQ ID NO: 2523514 - RNA, 19 nt, Homo sapiens
  misc_RNA (1)...(19): siRNA sense strand
gugaaaucaaugaaagaga

SEQ ID NO: 2523515 - RNA, 19 nt, Homo sapiens
  misc_RNA (1)...(19): siRNA sense strand
uguaaaugagauagcacua

SEQ ID NO: 2523516 - RNA, 19 nt, Homo sapiens
  misc_RNA (1)...(19): siRNA sense strand
gccaaaaugcucaaggaaa

SEQ ID NO: 2523517 - RNA, 19 nt, Homo sapiens
  misc_RNA (1)...(19): siRNA sense strand
aaauggauugggaaagaaa

SEQ ID NO: 2523518 - RNA, 19 nt, Homo sapiens
  misc_RNA (1)...(19): siRNA sense strand
gcucaaggaaauaaaacaa

SEQ ID NO: 2523519 - RNA, 19 nt, Homo sapiens
  misc_RNA (1)...(19): siRNA sense strand
agaauuggcaaaugcacaa

SEQ ID NO: 2523520 - RNA, 19 nt, Homo sapiens
  misc_RNA (1)...(19): siRNA sense strand
agguggaagaguaccauaa

SEQ ID NO: 2523521 - RNA, 19 nt, Homo sapiens
  misc_RNA (1)...(19): siRNA sense strand
uugcaauuacacagagaau

SEQ ID NO: 2523522 - RNA, 19 nt, Homo sapiens
  misc_RNA (1)...(19): siRNA sense strand
agucaagagaaugggacaa

SEQ ID NO: 2523523 - RNA, 19 nt, Homo sapiens
  misc_RNA (1)...(19): siRNA sense strand
aagaauuaccacaccuuaa

SEQ ID NO: 2523524 - RNA, 19 nt, Homo sapiens
  misc_RNA (1)...(19): siRNA sense strand
gagcaauuugaaccagaaa

SEQ ID NO: 2523525 - RNA, 19 nt, Homo sapiens
  misc_RNA (1)...(19): siRNA sense strand
acgauuagaucuucgggau

SEQ ID NO: 2523526 - RNA, 19 nt, Homo sapiens
  misc_RNA (1)...(19): siRNA sense strand
ggaucaagaauuggcaaau

SEQ ID NO: 2523527 - RNA, 19 nt, Homo sapiens
  misc_RNA (1)...(19): siRNA sense strand
ggaaaauaaaagagcuguu

SEQ ID NO: 2523528 - RNA, 19 nt, Homo sapiens
  misc_RNA (1)...(19): siRNA sense strand
guaauuuagcaaugacuca

SEQ ID NO: 2523529 - RNA, 19 nt, Homo sapiens
  misc_RNA (1)...(19): siRNA sense strand
gguuacuucgacagaaauu

SEQ ID NO: 2523530 - RNA, 19 nt, Homo sapiens
  misc_RNA (1)...(19): siRNA sense strand
aagucaagagaaugggaca

SEQ ID NO: 2523531 - RNA, 19 nt, Homo sapiens
  misc_RNA (1)...(19): siRNA sense strand
auggauugggaaagaaaga

SEQ ID NO: 2523532 - RNA, 19 nt, Homo sapiens
  misc_RNA (1)...(19): siRNA sense strand
ggcaugaacugcuggguca

SEQ ID NO: 2523533 - RNA, 19 nt, Homo sapiens
  misc_RNA (1)...(19): siRNA sense strand
uggugugccucguggguca

SEQ ID NO: 2523534 - RNA, 19 nt, Homo sapiens
  misc_RNA (1)...(19): siRNA sense strand
aagucagcauccagcgcaa

SEQ ID NO: 2523535 - RNA, 19 nt, Homo sapiens
  misc_RNA (1)...(19): siRNA sense strand
ggaaagacuguuuggccaa

SEQ ID NO: 2523536 - RNA, 19 nt, Homo sapiens
  misc_RNA (1)...(19): siRNA sense strand
auguguuggugaagagaaa

SEQ ID NO: 2523537 - RNA, 19 nt, Homo sapiens
  misc_RNA (1)...(19): siRNA sense strand
ucaaagaagugauugguca

SEQ ID NO: 2523538 - RNA, 19 nt, Homo sapiens
  misc_RNA (1)...(19): siRNA sense strand
gggagaugccacaaagcaa

SEQ ID NO: 2523539 - RNA, 19 nt, Homo sapiens
  misc_RNA (1)...(19): siRNA sense strand
uugauaagcaggagcagaa

SEQ ID NO: 2523540 - RNA, 19 nt, Homo sapiens
  misc_RNA (1)...(19): siRNA sense strand
ggguggaauaaguuugaua

SEQ ID NO: 2523541 - RNA, 19 nt, Homo sapiens
  misc_RNA (1)...(19): siRNA sense strand
uggagaaagcugugagugu

SEQ ID NO: 2523542 - RNA, 19 nt, Homo sapiens
  misc_RNA (1)...(19): siRNA sense strand
auaccaaguucguggcuga

SEQ ID NO: 2523543 - RNA, 19 nt, Homo sapiens
  misc_RNA (1)...(19): siRNA sense strand
gguuguaaauggacgcuca

SEQ ID NO: 2523544 - RNA, 19 nt, Homo sapiens
  misc_RNA (1)...(19): siRNA sense strand
aggaaagacuguuuggcca

SEQ ID NO: 2523545 - RNA, 19 nt, Homo sapiens
  misc_RNA (1)...(19): siRNA sense strand
caacaucgaugcugcaaaa

SEQ ID NO: 2523546 - RNA, 19 nt, Homo sapiens
  misc_RNA (1)...(19): siRNA sense strand
caacaagggagaugccaca

SEQ ID NO: 2523547 - RNA, 19 nt, Homo sapiens
  misc_RNA (1)...(19): siRNA sense strand
gagcaaggcuacaggaagc

SEQ ID NO: 2523548 - RNA, 19 nt, Homo sapiens
  misc_RNA (1)...(19): siRNA sense strand
caaagaagugauuggucau

SEQ ID NO: 2523549 - RNA, 19 nt, Homo sapiens
  misc_RNA (1)...(19): siRNA sense strand
gcuuugagcucuuuggguu

SEQ ID NO: 2523550 - RNA, 19 nt, Homo sapiens
  misc_RNA (1)...(19): siRNA sense strand
ccugucagaccguggcaaa

SEQ ID NO: 2523551 - RNA, 19 nt, Homo sapiens
  misc_RNA (1)...(19): siRNA sense strand
gggagcaaggcuacaggaa

SEQ ID NO: 2523552 - RNA, 19 nt, Homo sapiens
  misc_RNA (1)...(19): siRNA sense strand
gaauaauccaagagcucca

SEQ ID NO: 2523553 - RNA, 19 nt, Homo sapiens
  misc_RNA (1)...(19): siRNA sense strand
caccaagcuuaccaggaaa

SEQ ID NO: 2523554 - RNA, 19 nt, Homo sapiens
  misc_RNA (1)...(19): siRNA sense strand
aagaauaauccaagagcuc

SEQ ID NO: 2523555 - RNA, 19 nt, Homo sapiens
  misc_RNA (1)...(19): siRNA sense strand
ggaagaaaauccaccgcau

SEQ ID NO: 2523556 - RNA, 19 nt, Homo sapiens
  misc_RNA (1)...(19): siRNA sense strand
aauccaagagcuccagaaa

SEQ ID NO: 2523557 - RNA, 19 nt, Homo sapiens
  misc_RNA (1)...(19): siRNA sense strand
acacuggagaagaagaaaa

SEQ ID NO: 2523558 - RNA, 19 nt, Homo sapiens
  misc_RNA (1)...(19): siRNA sense strand
gugcagaaauauaucucca

SEQ ID NO: 2523559 - RNA, 19 nt, Homo sapiens
  misc_RNA (1)...(19): siRNA sense strand
gcuccagaaacuaaugaau

SEQ ID NO: 2523560 - RNA, 19 nt, Homo sapiens
  misc_RNA (1)...(19): siRNA sense strand
cugaagcacaugaggagga

SEQ ID NO: 2523561 - RNA, 19 nt, Homo sapiens
  misc_RNA (1)...(19): siRNA sense strand
aggaaggguugguucgguu

SEQ ID NO: 2523562 - RNA, 19 nt, Homo sapiens
  misc_RNA (1)...(19): siRNA sense strand
ucacaagcagaauguacaa

SEQ ID NO: 2523563 - RNA, 19 nt, Homo sapiens
  misc_RNA (1)...(19): siRNA sense strand
acaagacacucaugcccua

SEQ ID NO: 2523564 - RNA, 19 nt, Homo sapiens
  misc_RNA (1)...(19): siRNA sense strand
ggacagaagcugagggcau

SEQ ID NO: 2523565 - RNA, 19 nt, Homo sapiens
  misc_RNA (1)...(19): siRNA sense strand
acgcaagaucagaggauaa

SEQ ID NO: 2523566 - RNA, 19 nt, Homo sapiens
  misc_RNA (1)...(19): siRNA sense strand
cagcaugagcauugaggaa

SEQ ID NO: 2523567 - RNA, 19 nt, Homo sapiens
  misc_RNA (1)...(19): siRNA sense strand
ggauauuacggcagggaga

SEQ ID NO: 2523568 - RNA, 19 nt, Homo sapiens
  misc_RNA (1)...(19): siRNA sense strand
auucaguggacaagagaaa

SEQ ID NO: 2523569 - RNA, 19 nt, Homo sapiens
  misc_RNA (1)...(19): siRNA sense strand
gucagaaacgauugagaaa

SEQ ID NO: 2523570 - RNA, 19 nt, Homo sapiens
  misc_RNA (1)...(19): siRNA sense strand
cccagaugguagaagguaa

SEQ ID NO: 2523571 - RNA, 19 nt, Homo sapiens
  misc_RNA (1)...(19): siRNA sense strand
cagaaagaucucauggcaa

SEQ ID NO: 2523572 - RNA, 19 nt, Homo sapiens
  misc_RNA (1)...(19): siRNA sense strand
cuuuagugcugaugaaaca

SEQ ID NO: 2523573 - RNA, 19 nt, Homo sapiens
  misc_RNA (1)...(19): siRNA sense strand
ggauagagacagucgcaca

SEQ ID NO: 2523574 - RNA, 19 nt, Homo sapiens
  misc_RNA (1)...(19): siRNA sense strand
auauacaguuccagaaaga

SEQ ID NO: 2523575 - RNA, 19 nt, Homo sapiens
  misc_RNA (1)...(19): siRNA sense strand
gcaaguauuucgagccuca

SEQ ID NO: 2523576 - RNA, 19 nt, Homo sapiens
  misc_RNA (1)...(19): siRNA sense strand
gcuaagaacucccgcacga

SEQ ID NO: 2523577 - RNA, 19 nt, Homo sapiens
  misc_RNA (1)...(19): siRNA sense strand
cagcaaugauccggaacaa

SEQ ID NO: 2523578 - RNA, 19 nt, Homo sapiens
  misc_RNA (1)...(19): siRNA sense strand
gggagagguccgaaaguca

SEQ ID NO: 2523579 - RNA, 19 nt, Homo sapiens
  misc_RNA (1)...(19): siRNA sense strand
ggacagggcuccuagcuca

SEQ ID NO: 2523580 - RNA, 19 nt, Homo sapiens
  misc_RNA (1)...(19): siRNA sense strand
uggacaaaguuaacagcau

SEQ ID NO: 2523581 - RNA, 19 nt, Homo sapiens
  misc_RNA (1)...(19): siRNA sense strand
ugagaugguuauuuggaau

SEQ ID NO: 2523582 - RNA, 19 nt, Homo sapiens
  misc_RNA (1)...(19): siRNA sense strand
gugaagaagaggaggagac

SEQ ID NO: 2523583 - RNA, 19 nt, Homo sapiens
  misc_RNA (1)...(19): siRNA sense strand
ugggaaaugaggauaaaga

SEQ ID NO: 2523584 - RNA, 19 nt, Homo sapiens
  misc_RNA (1)...(19): siRNA sense strand
aagcuauauuggaagaaca

SEQ ID NO: 2523585 - RNA, 19 nt, Homo sapiens
  misc_RNA (1)...(19): siRNA sense strand
cagcaucagggaagcuaua

SEQ ID NO: 2523586 - RNA, 19 nt, Homo sapiens
  misc_RNA (1)...(19): siRNA sense strand
cgaagaaggagcugacacu

SEQ ID NO: 2523587 - RNA, 19 nt, Homo sapiens
  misc_RNA (1)...(19): siRNA sense strand
ggaaaucucuacagccuga

SEQ ID NO: 2523588 - RNA, 19 nt, Homo sapiens
  misc_RNA (1)...(19): siRNA sense strand
ggacagcaaugauccggaa

SEQ ID NO: 2523589 - RNA, 19 nt, Homo sapiens
  misc_RNA (1)...(19): siRNA sense strand
cuauagaggcauccggaga

SEQ ID NO: 2523590 - RNA, 19 nt, Homo sapiens
  misc_RNA (1)...(19): siRNA sense strand
ggaauggggcucaggagaa

SEQ ID NO: 2523591 - RNA, 19 nt, Homo sapiens
  misc_RNA (1)...(19): siRNA sense strand
ugucagaaacgauugagaa

SEQ ID NO: 2523592 - RNA, 19 nt, Homo sapiens
  misc_RNA (1)...(19): siRNA sense strand
gugacauuguggagcugua

SEQ ID NO: 2523593 - RNA, 19 nt, Homo sapiens
  misc_RNA (1)...(19): siRNA sense strand
augaagauuuugaggguca

SEQ ID NO: 2523594 - RNA, 19 nt, Homo sapiens
  misc_RNA (1)...(19): siRNA sense strand
cauugaggcaagcgaagaa

SEQ ID NO: 2523595 - RNA, 19 nt, Homo sapiens
  misc_RNA (1)...(19): siRNA sense strand
ggacaaaguuaacagcaug

SEQ ID NO: 2523596 - RNA, 19 nt, Homo sapiens
  misc_RNA (1)...(19): siRNA sense strand
ccuguaacuuuguggucau

SEQ ID NO: 2523597 - RNA, 19 nt, Homo sapiens
  misc_RNA (1)...(19): siRNA sense strand
ggagaggaagaucgggaga

SEQ ID NO: 2523598 - RNA, 19 nt, Homo sapiens
  misc_RNA (1)...(19): siRNA sense strand
uauuggaagaacaggagaa

SEQ ID NO: 2523599 - RNA, 19 nt, Homo sapiens
  misc_RNA (1)...(19): siRNA sense strand
cccugggaaaugaggauaa

SEQ ID NO: 2523600 - RNA, 19 nt, Homo sapiens
  misc_RNA (1)...(19): siRNA sense strand
ccucaagguccaacaacuu

SEQ ID NO: 2523601 - RNA, 19 nt, Homo sapiens
  misc_RNA (1)...(19): siRNA sense strand
gggcauugaggcaagcgaa

SEQ ID NO: 2523602 - RNA, 19 nt, Homo sapiens
  misc_RNA (1)...(19): siRNA sense strand
cagaggcugcagagagcaa

SEQ ID NO: 2523603 - RNA, 19 nt, Homo sapiens
  misc_RNA (1)...(19): siRNA sense strand
aagaaggagcugacacuuu

SEQ ID NO: 2523604 - RNA, 19 nt, Homo sapiens
  misc_RNA (1)...(19): siRNA sense strand
gaagaagagaaauggucca

SEQ ID NO: 2523605 - RNA, 19 nt, Homo sapiens
  misc_RNA (1)...(19): siRNA sense strand
ucaaaauagcugagaaugu

SEQ ID NO: 2523606 - RNA, 19 nt, Homo sapiens
  misc_RNA (1)...(19): siRNA sense strand
gaagaggaggagacgccaa

SEQ ID NO: 2523607 - RNA, 19 nt, Homo sapiens
  misc_RNA (1)...(19): siRNA sense strand
gugaacagcaucagggaag

SEQ ID NO: 2523608 - RNA, 19 nt, Homo sapiens
  misc_RNA (1)...(19): siRNA sense strand
ccguggaucuggaugacuu

SEQ ID NO: 2523609 - RNA, 19 nt, Homo sapiens
  misc_RNA (1)...(19): siRNA sense strand
ccugggaaaugaggauaaa

SEQ ID NO: 2523610 - RNA, 19 nt, Homo sapiens
  misc_RNA (1)...(19): siRNA sense strand
gaggaaauggcuaccaaaa

SEQ ID NO: 2523611 - RNA, 19 nt, Homo sapiens
  misc_RNA (1)...(19): siRNA sense strand
agaacauugugcugaaguu

SEQ ID NO: 2523612 - RNA, 19 nt, Homo sapiens
  misc_RNA (1)...(19): siRNA sense strand
agauagaugcuucagguga

SEQ ID NO: 2523613 - RNA, 19 nt, Homo sapiens
  misc_RNA (1)...(19): siRNA sense strand
ccagaaagaucucauggca

SEQ ID NO: 2523614 - RNA, 19 nt, Homo sapiens
  misc_RNA (1)...(19): siRNA sense strand
ugagugaagaagaggagga

SEQ ID NO: 2523615 - RNA, 19 nt, Homo sapiens
  misc_RNA (1)...(19): siRNA sense strand
aggaagaaagcaccaagaa

SEQ ID NO: 2523616 - RNA, 19 nt, Homo sapiens
  misc_RNA (1)...(19): siRNA sense strand
cgaaggcaucccagcgcua

SEQ ID NO: 2523617 - RNA, 19 nt, Homo sapiens
  misc_RNA (1)...(19): siRNA sense strand
ucaaaaugcagauccaaaa

SEQ ID NO: 2523618 - RNA, 19 nt, Homo sapiens
  misc_RNA (1)...(19): siRNA sense strand
aagaguggcaggauagaga

SEQ ID NO: 2523619 - RNA, 19 nt, Homo sapiens
  misc_RNA (1)...(19): siRNA sense strand
cagaauauacaguuccaga

SEQ ID NO: 2523620 - RNA, 19 nt, Homo sapiens
  misc_RNA (1)...(19): siRNA sense strand
aggaaucucugcugcucaa

SEQ ID NO: 2523621 - RNA, 19 nt, Homo sapiens
  misc_RNA (1)...(19): siRNA sense strand
cgauggaagagcugggaaa

SEQ ID NO: 2523622 - RNA, 19 nt, Homo sapiens
  misc_RNA (1)...(19): siRNA sense strand
ggaaaggacucgauggaag

SEQ ID NO: 2523623 - RNA, 19 nt, Homo sapiens
  misc_RNA (1)...(19): siRNA sense strand
augaggaagcaaagaagaa

SEQ ID NO: 2523624 - RNA, 19 nt, Homo sapiens
  misc_RNA (1)...(19): siRNA sense strand
ggggcaaggugcuggagaa

SEQ ID NO: 2523625 - RNA, 19 nt, Homo sapiens
  misc_RNA (1)...(19): siRNA sense strand
agaagaaggccugggaaca

SEQ ID NO: 2523626 - RNA, 19 nt, Homo sapiens
  misc_RNA (1)...(19): siRNA sense strand
aagaagaaggccugggaac

SEQ ID NO: 2523627 - RNA, 19 nt, Homo sapiens
  misc_RNA (1)...(19): siRNA sense strand
gcccggagggaaugaggaa

SEQ ID NO: 2523628 - RNA, 19 nt, Homo sapiens
  misc_RNA (1)...(19): siRNA sense strand
gaacuuagaauaaaggaca

SEQ ID NO: 2523629 - RNA, 19 nt, Homo sapiens
  misc_RNA (1)...(19): siRNA sense strand
ccacaugaccacuaggaca

SEQ ID NO: 2523630 - RNA, 19 nt, Homo sapiens
  misc_RNA (1)...(19): siRNA sense strand
cuucaaaagaccacacaaa

SEQ ID NO: 2523631 - RNA, 19 nt, Homo sapiens
  misc_RNA (1)...(19): siRNA sense strand
cauggaugacagagaccaa

SEQ ID NO: 2523632 - RNA, 19 nt, Homo sapiens
  misc_RNA (1)...(19): siRNA sense strand
uggcaggugcuucaggaaa

SEQ ID NO: 2523633 - RNA, 19 nt, Homo sapiens
  misc_RNA (1)...(19): siRNA sense strand
aguacauggaugacagaga

SEQ ID NO: 2523634 - RNA, 19 nt, Homo sapiens
  misc_RNA (1)...(19): siRNA sense strand
ccuaaacacaaaugcugaa

SEQ ID NO: 2523635 - RNA, 19 nt, Homo sapiens
  misc_RNA (1)...(19): siRNA sense strand
uggagaaacuagaccagca

SEQ ID NO: 2523636 - RNA, 19 nt, Homo sapiens
  misc_RNA (1)...(19): siRNA sense strand
aggacauuauggagaaacu

SEQ ID NO: 2523637 - RNA, 19 nt, Homo sapiens
  misc_RNA (1)...(19): siRNA sense strand
acuaauggcaggugcuuca

SEQ ID NO: 2523638 - RNA, 19 nt, Homo sapiens
  misc_RNA (1)...(19): siRNA sense strand
guugaaaugaugaagaacu

SEQ ID NO: 2523639 - RNA, 19 nt, Homo sapiens
  misc_RNA (1)...(19): siRNA sense strand
gggcaaggaaccaaggaug

SEQ ID NO: 2523640 - RNA, 19 nt, Homo sapiens
  misc_RNA (1)...(19): siRNA sense strand
gaagcaauaugguggggau

SEQ ID NO: 2523641 - RNA, 19 nt, Homo sapiens
  misc_RNA (1)...(19): siRNA sense strand
gcuucgaugaccugggcua

SEQ ID NO: 2523642 - RNA, 19 nt, Homo sapiens
  misc_RNA (1)...(19): siRNA sense strand
gcuucggaggcuauggaua

SEQ ID NO: 2523643 - RNA, 19 nt, Homo sapiens
  misc_RNA (1)...(19): siRNA sense strand
gcuauggaggauauggauu

SEQ ID NO: 2523644 - RNA, 19 nt, Homo sapiens
  misc_RNA (1)...(19): siRNA sense strand
caucaugcuauggaggaua

SEQ ID NO: 2523645 - RNA, 19 nt, Homo sapiens
  misc_RNA (1)...(19): siRNA sense strand
uggaaugcuauguaagaaa

SEQ ID NO: 2523646 - RNA, 19 nt, Homo sapiens
  misc_RNA (1)...(19): siRNA sense strand
gugucaaggcugugguuau

SEQ ID NO: 2523647 - RNA, 19 nt, Homo sapiens
  misc_RNA (1)...(19): siRNA sense strand
ccauggugaacgacagaaa

SEQ ID NO: 2523648 - RNA, 19 nt, Homo sapiens
  misc_RNA (1)...(19): siRNA sense strand
uguucaaccacgaggagaa

SEQ ID NO: 2523649 - RNA, 19 nt, Homo sapiens
  misc_RNA (1)...(19): siRNA sense strand
ugacaggggaguaaggaaa

SEQ ID NO: 2523650 - RNA, 19 nt, Homo sapiens
  misc_RNA (1)...(19): siRNA sense strand
cggacgacgacgaggagau

SEQ ID NO: 2523651 - RNA, 19 nt, Homo sapiens
  misc_RNA (1)...(19): siRNA sense strand
ggauuuauacccugggcca

SEQ ID NO: 2523652 - RNA, 19 nt, Homo sapiens
  misc_RNA (1)...(19): siRNA sense strand
ggaaagcaaucgaagaccu

SEQ ID NO: 2523653 - RNA, 19 nt, Homo sapiens
  misc_RNA (1)...(19): siRNA sense strand
ugacgggguacgaggauua

SEQ ID NO: 2523654 - RNA, 19 nt, Homo sapiens
  misc_RNA (1)...(19): siRNA sense strand
ccgaagaaacacacccaga

SEQ ID NO: 2523655 - RNA, 19 nt, Homo sapiens
  misc_RNA (1)...(19): siRNA sense strand
gggaguaaggaaagcaauc

SEQ ID NO: 2523656 - RNA, 19 nt, Homo sapiens
  misc_RNA (1)...(19): siRNA sense strand
acccagacgaugacagcua

SEQ ID NO: 2523657 - RNA, 19 nt, Homo sapiens
  misc_RNA (1)...(19): siRNA sense strand
gguuaugaccagagaugac

SEQ ID NO: 2523658 - RNA, 19 nt, Homo sapiens
  misc_RNA (1)...(19): siRNA sense strand
agagcaaccuacucggaca

SEQ ID NO: 2523659 - RNA, 19 nt, Homo sapiens
  misc_RNA (1)...(19): siRNA sense strand
cugaagaagcugaagaaaa

SEQ ID NO: 2523660 - RNA, 19 nt, Homo sapiens
  misc_RNA (1)...(19): siRNA sense strand
cauuagagaaggaggugau

SEQ ID NO: 2523661 - RNA, 19 nt, Homo sapiens
  misc_RNA (1)...(19): siRNA sense strand
aaaacaggacagugagaaa

SEQ ID NO: 2523662 - RNA, 19 nt, Homo sapiens
  misc_RNA (1)...(19): siRNA sense strand
cucaagaagcagaagaaga

SEQ ID NO: 2523663 - RNA, 19 nt, Homo sapiens
  misc_RNA (1)...(19): siRNA sense strand
ugccagaagacauggagaa

SEQ ID NO: 2523664 - RNA, 19 nt, Homo sapiens
  misc_RNA (1)...(19): siRNA sense strand
ugaaggaagggaaaagaaa

SEQ ID NO: 2523665 - RNA, 19 nt, Homo sapiens
  misc_RNA (1)...(19): siRNA sense strand
acuguggauaauagaguua

SEQ ID NO: 2523666 - RNA, 19 nt, Homo sapiens
  misc_RNA (1)...(19): siRNA sense strand
aggugaugcaguaugacua

SEQ ID NO: 2523667 - RNA, 19 nt, Homo sapiens
  misc_RNA (1)...(19): siRNA sense strand
aagaagcagaagaagaaaa

SEQ ID NO: 2523668 - RNA, 19 nt, Homo sapiens
  misc_RNA (1)...(19): siRNA sense strand
uagagaaggaggugaugca

SEQ ID NO: 2523669 - RNA, 19 nt, Homo sapiens
  misc_RNA (1)...(19): siRNA sense strand
cagaagacauggagaacgc

SEQ ID NO: 2523670 - RNA, 19 nt, Homo sapiens
  misc_RNA (1)...(19): siRNA sense strand
gaaguuuacuagagcggaa

SEQ ID NO: 2523671 - RNA, 19 nt, Homo sapiens
  misc_RNA (1)...(19): siRNA sense strand
cuuaguaaagacugggaaa

SEQ ID NO: 2523672 - RNA, 19 nt, Homo sapiens
  misc_RNA (1)...(19): siRNA sense strand
ggagaugauugcagggaug

SEQ ID NO: 2523673 - RNA, 19 nt, Homo sapiens
  misc_RNA (1)...(19): siRNA sense strand
auacaaccaaagagagcaa

SEQ ID NO: 2523674 - RNA, 19 nt, Homo sapiens
  misc_RNA (1)...(19): siRNA sense strand
augcuguggucaugggauu

SEQ ID NO: 2523675 - RNA, 19 nt, Homo sapiens
  misc_RNA (1)...(19): siRNA sense strand
agguauuacaagaggaaag

SEQ ID NO: 2523676 - RNA, 19 nt, Homo sapiens
  misc_RNA (1)...(19): siRNA sense strand
gguagaucucaguggcaca

SEQ ID NO: 2523677 - RNA, 19 nt, Homo sapiens
  misc_RNA (1)...(19): siRNA sense strand
aaccaaagagagcaagcaa

SEQ ID NO: 2523678 - RNA, 19 nt, Homo sapiens
  misc_RNA (1)...(19): siRNA sense strand
gcuuuggaggcuacggaua

SEQ ID NO: 2523679 - RNA, 19 nt, Homo sapiens
  misc_RNA (1)...(19): siRNA sense strand
gcuuuggaggcuauggaua

SEQ ID NO: 2523680 - RNA, 19 nt, Homo sapiens
  misc_RNA (1)...(19): siRNA sense strand
cuuuggaggcuauggauau

SEQ ID NO: 2523681 - RNA, 19 nt, Homo sapiens
  misc_RNA (1)...(19): siRNA sense strand
guacaauggaggauacgga

SEQ ID NO: 2523682 - RNA, 19 nt, Homo sapiens
  misc_RNA (1)...(19): siRNA sense strand
cuuuggaagcuacggauau

SEQ ID NO: 2523683 - RNA, 19 nt, Homo sapiens
  misc_RNA (1)...(19): siRNA sense strand
cuuuggaggcuacggauau

SEQ ID NO: 2523684 - RNA, 19 nt, Homo sapiens
  misc_RNA (1)...(19): siRNA sense strand
gcaauauguuuaucggaga

SEQ ID NO: 2523685 - RNA, 19 nt, Homo sapiens
  misc_RNA (1)...(19): siRNA sense strand
uggacuuguuacuggacua

SEQ ID NO: 2523686 - RNA, 19 nt, Homo sapiens
  misc_RNA (1)...(19): siRNA sense strand
cuuagaaacacuuggagga

SEQ ID NO: 2523687 - RNA, 19 nt, Homo sapiens
  misc_RNA (1)...(19): siRNA sense strand
ggagaauaugggaagaaac

SEQ ID NO: 2523688 - RNA, 19 nt, Homo sapiens
  misc_RNA (1)...(19): siRNA sense strand
agaaacacuuggaggaguc

SEQ ID NO: 2523689 - RNA, 19 nt, Homo sapiens
  misc_RNA (1)...(19): siRNA sense strand
aggagaaagcccugaauaa

SEQ ID NO: 2523690 - RNA, 19 nt, Homo sapiens
  misc_RNA (1)...(19): siRNA sense strand
cgauaaaccagcaguaaaa

SEQ ID NO: 2523691 - RNA, 19 nt, Homo sapiens
  misc_RNA (1)...(19): siRNA sense strand
uugaaaagcuggaggauga

SEQ ID NO: 2523692 - RNA, 19 nt, Homo sapiens
  misc_RNA (1)...(19): siRNA sense strand
gcauggagaagcagggauu

SEQ ID NO: 2523693 - RNA, 19 nt, Homo sapiens
  misc_RNA (1)...(19): siRNA sense strand
ggaaagagcaggaagucca

SEQ ID NO: 2523694 - RNA, 19 nt, Homo sapiens
  misc_RNA (1)...(19): siRNA sense strand
agauacagaaagugaacua

SEQ ID NO: 2523695 - RNA, 19 nt, Homo sapiens
  misc_RNA (1)...(19): siRNA sense strand
agaacgggcaacugagaaa

SEQ ID NO: 2523696 - RNA, 19 nt, Homo sapiens
  misc_RNA (1)...(19): siRNA sense strand
uggauaaauugcaaggaga

SEQ ID NO: 2523697 - RNA, 19 nt, Homo sapiens
  misc_RNA (1)...(19): siRNA sense strand
agaacaugaugaagaugaa

SEQ ID NO: 2523698 - RNA, 19 nt, Homo sapiens
  misc_RNA (1)...(19): siRNA sense strand
cugcaaguguuaggagaaa

SEQ ID NO: 2523699 - RNA, 19 nt, Homo sapiens
  misc_RNA (1)...(19): siRNA sense strand
caaagaacgcuuaagaaaa

SEQ ID NO: 2523700 - RNA, 19 nt, Homo sapiens
  misc_RNA (1)...(19): siRNA sense strand
ccaaauaaagagaaagaac

SEQ ID NO: 2523701 - RNA, 19 nt, Homo sapiens
  misc_RNA (1)...(19): siRNA sense strand
agaaaugcuacuugcuaaa

SEQ ID NO: 2523702 - RNA, 19 nt, Homo sapiens
  misc_RNA (1)...(19): siRNA sense strand
acgauaaaccagcaguaaa

SEQ ID NO: 2523703 - RNA, 19 nt, Homo sapiens
  misc_RNA (1)...(19): siRNA sense strand
gggaaagagaagaacuuga

SEQ ID NO: 2523704 - RNA, 19 nt, Homo sapiens
  misc_RNA (1)...(19): siRNA sense strand
gcaacugagaaaaggguaa

SEQ ID NO: 2523705 - RNA, 19 nt, Homo sapiens
  misc_RNA (1)...(19): siRNA sense strand
gaguacaaaccauggaaga

SEQ ID NO: 2523706 - RNA, 19 nt, Homo sapiens
  misc_RNA (1)...(19): siRNA sense strand
aggucagaauucaggaaau

SEQ ID NO: 2523707 - RNA, 19 nt, Homo sapiens
  misc_RNA (1)...(19): siRNA sense strand
ugaaugggaaagagaagaa

SEQ ID NO: 2523708 - RNA, 19 nt, Homo sapiens
  misc_RNA (1)...(19): siRNA sense strand
guugcuugcugaaaggaaa

SEQ ID NO: 2523709 - RNA, 19 nt, Homo sapiens
  misc_RNA (1)...(19): siRNA sense strand
cuccaaauaaagagaaaga

SEQ ID NO: 2523710 - RNA, 19 nt, Homo sapiens
  misc_RNA (1)...(19): siRNA sense strand
agacaggcauggagaagca

SEQ ID NO: 2523711 - RNA, 19 nt, Homo sapiens
  misc_RNA (1)...(19): siRNA sense strand
ggaugaaugggaaagagaa

SEQ ID NO: 2523712 - RNA, 19 nt, Homo sapiens
  misc_RNA (1)...(19): siRNA sense strand
caagagaaagaacgggcaa

SEQ ID NO: 2523713 - RNA, 19 nt, Homo sapiens
  misc_RNA (1)...(19): siRNA sense strand
aagaaagagaggcaggcaa

SEQ ID NO: 2523714 - RNA, 19 nt, Homo sapiens
  misc_RNA (1)...(19): siRNA sense strand
cuguagaagaugaaauuga

SEQ ID NO: 2523715 - RNA, 19 nt, Homo sapiens
  misc_RNA (1)...(19): siRNA sense strand
aagcuaauuugauggaaca

SEQ ID NO: 2523716 - RNA, 19 nt, Homo sapiens
  misc_RNA (1)...(19): siRNA sense strand
gcugaaaggaaaagggcau

SEQ ID NO: 2523717 - RNA, 19 nt, Homo sapiens
  misc_RNA (1)...(19): siRNA sense strand
agguacugaucaagaaaga

SEQ ID NO: 2523718 - RNA, 19 nt, Homo sapiens
  misc_RNA (1)...(19): siRNA sense strand
agugaacuauuuaggacaa

SEQ ID NO: 2523719 - RNA, 19 nt, Homo sapiens
  misc_RNA (1)...(19): siRNA sense strand
aaacaaaugggaagaacca

SEQ ID NO: 2523720 - RNA, 19 nt, Homo sapiens
  misc_RNA (1)...(19): siRNA sense strand
cuggaggaugaaugggaaa

SEQ ID NO: 2523721 - RNA, 19 nt, Homo sapiens
  misc_RNA (1)...(19): siRNA sense strand
ccugcaaguguuaggagaa

SEQ ID NO: 2523722 - RNA, 19 nt, Homo sapiens
  misc_RNA (1)...(19): siRNA sense strand
aggagaggaagaagaaaga

SEQ ID NO: 2523723 - RNA, 19 nt, Homo sapiens
  misc_RNA (1)...(19): siRNA sense strand
aggaaauguuagaagucca

SEQ ID NO: 2523724 - RNA, 19 nt, Homo sapiens
  misc_RNA (1)...(19): siRNA sense strand
gcugcaugccagagugauu

SEQ ID NO: 2523725 - RNA, 19 nt, Homo sapiens
  misc_RNA (1)...(19): siRNA sense strand
gagaggaagaagaaagacu

SEQ ID NO: 2523726 - RNA, 19 nt, Homo sapiens
  misc_RNA (1)...(19): siRNA sense strand
ccuuacagaaacugaaaga

SEQ ID NO: 2523727 - RNA, 19 nt, Homo sapiens
  misc_RNA (1)...(19): siRNA sense strand
acuaguuucagcagaguua

SEQ ID NO: 2523728 - RNA, 19 nt, Homo sapiens
  misc_RNA (1)...(19): siRNA sense strand
aauuaaggagcuaucgaaa

SEQ ID NO: 2523729 - RNA, 19 nt, Homo sapiens
  misc_RNA (1)...(19): siRNA sense strand
aggagagagaacuggauau

SEQ ID NO: 2523730 - RNA, 19 nt, Homo sapiens
  misc_RNA (1)...(19): siRNA sense strand
acuccaagauucucgaaau

SEQ ID NO: 2523731 - RNA, 19 nt, Homo sapiens
  misc_RNA (1)...(19): siRNA sense strand
uaaauugcaaggagaggaa

SEQ ID NO: 2523732 - RNA, 19 nt, Homo sapiens
  misc_RNA (1)...(19): siRNA sense strand
ugaucaagaaagagaggca

SEQ ID NO: 2523733 - RNA, 19 nt, Homo sapiens
  misc_RNA (1)...(19): siRNA sense strand
ucguaaaacaggagguuga

SEQ ID NO: 2523734 - RNA, 19 nt, Homo sapiens
  misc_RNA (1)...(19): siRNA sense strand
aggaugaaugggaaagaga

SEQ ID NO: 2523735 - RNA, 19 nt, Homo sapiens
  misc_RNA (1)...(19): siRNA sense strand
cuugcuaaacugaaugaaa

SEQ ID NO: 2523736 - RNA, 19 nt, Homo sapiens
  misc_RNA (1)...(19): siRNA sense strand
gaaaagccagagugggaaa

SEQ ID NO: 2523737 - RNA, 19 nt, Homo sapiens
  misc_RNA (1)...(19): siRNA sense strand
gcuggaggaugaaugggaa

SEQ ID NO: 2523738 - RNA, 19 nt, Homo sapiens
  misc_RNA (1)...(19): siRNA sense strand
gagccacuucggaaagaua

SEQ ID NO: 2523739 - RNA, 19 nt, Homo sapiens
  misc_RNA (1)...(19): siRNA sense strand
aauaaaggcagcagagauc

SEQ ID NO: 2523740 - RNA, 19 nt, Homo sapiens
  misc_RNA (1)...(19): siRNA sense strand
aguuaaaguuagaugacac

SEQ ID NO: 2523741 - RNA, 19 nt, Homo sapiens
  misc_RNA (1)...(19): siRNA sense strand
uaaaacaggagguugaaaa

SEQ ID NO: 2523742 - RNA, 19 nt, Homo sapiens
  misc_RNA (1)...(19): siRNA sense strand
ggaaagagaagaaaagcca

SEQ ID NO: 2523743 - RNA, 19 nt, Homo sapiens
  misc_RNA (1)...(19): siRNA sense strand
aagaaaagccagaguggga

SEQ ID NO: 2523744 - RNA, 19 nt, Homo sapiens
  misc_RNA (1)...(19): siRNA sense strand
gugggaaacuggaagguac

SEQ ID NO: 2523745 - RNA, 19 nt, Homo sapiens
  misc_RNA (1)...(19): siRNA sense strand
uccuuuaacuccagaaaca

SEQ ID NO: 2523746 - RNA, 19 nt, Homo sapiens
  misc_RNA (1)...(19): siRNA sense strand
caaaacaagaaguggaaaa

SEQ ID NO: 2523747 - RNA, 19 nt, Homo sapiens
  misc_RNA (1)...(19): siRNA sense strand
gggacaaagauguagaaga

SEQ ID NO: 2523748 - RNA, 19 nt, Homo sapiens
  misc_RNA (1)...(19): siRNA sense strand
gucaagagucagugccaaa

SEQ ID NO: 2523749 - RNA, 19 nt, Homo sapiens
  misc_RNA (1)...(19): siRNA sense strand
aggagaaaguuuagugaac

SEQ ID NO: 2523750 - RNA, 19 nt, Homo sapiens
  misc_RNA (1)...(19): siRNA sense strand
agagagaacgaauggaaaa

SEQ ID NO: 2523751 - RNA, 19 nt, Homo sapiens
  misc_RNA (1)...(19): siRNA sense strand
aguuauauuugaaggggaa

SEQ ID NO: 2523752 - RNA, 19 nt, Homo sapiens
  misc_RNA (1)...(19): siRNA sense strand
aaauggaagaacaggaaaa

SEQ ID NO: 2523753 - RNA, 19 nt, Homo sapiens
  misc_RNA (1)...(19): siRNA sense strand
ccacugagagagaacgaau

SEQ ID NO: 2523754 - RNA, 19 nt, Homo sapiens
  misc_RNA (1)...(19): siRNA sense strand
gcauuauacaagugaugau

SEQ ID NO: 2523755 - RNA, 19 nt, Homo sapiens
  misc_RNA (1)...(19): siRNA sense strand
aaagaaaaucggaagagaa

SEQ ID NO: 2523756 - RNA, 19 nt, Homo sapiens
  misc_RNA (1)...(19): siRNA sense strand
caaaauacugagagaagau

SEQ ID NO: 2523757 - RNA, 19 nt, Homo sapiens
  misc_RNA (1)...(19): siRNA sense strand
ccagaagauccucagacaa

SEQ ID NO: 2523758 - RNA, 19 nt, Homo sapiens
  misc_RNA (1)...(19): siRNA sense strand
gugucaaaauacugagaga

SEQ ID NO: 2523759 - RNA, 19 nt, Homo sapiens
  misc_RNA (1)...(19): siRNA sense strand
uguauuuaaaugugggaga

SEQ ID NO: 2523760 - RNA, 19 nt, Homo sapiens
  misc_RNA (1)...(19): siRNA sense strand
ugauugugaaggaguuaua

SEQ ID NO: 2523761 - RNA, 19 nt, Homo sapiens
  misc_RNA (1)...(19): siRNA sense strand
guuuagugaaccaaaggaa

SEQ ID NO: 2523762 - RNA, 19 nt, Homo sapiens
  misc_RNA (1)...(19): siRNA sense strand
ccugagggacaaagaugua

SEQ ID NO: 2523763 - RNA, 19 nt, Homo sapiens
  misc_RNA (1)...(19): siRNA sense strand
guuuaguuugugaggaaga

SEQ ID NO: 2523764 - RNA, 19 nt, Homo sapiens
  misc_RNA (1)...(19): siRNA sense strand
uugauaugucugaaagcaa

SEQ ID NO: 2523765 - RNA, 19 nt, Homo sapiens
  misc_RNA (1)...(19): siRNA sense strand
gugaaauggaugcuaggau

SEQ ID NO: 2523766 - RNA, 19 nt, Homo sapiens
  misc_RNA (1)...(19): siRNA sense strand
uggaaaucaaccaguaaaa

SEQ ID NO: 2523767 - RNA, 19 nt, Homo sapiens
  misc_RNA (1)...(19): siRNA sense strand
ggugauugugaaggaguua

SEQ ID NO: 2523768 - RNA, 19 nt, Homo sapiens
  misc_RNA (1)...(19): siRNA sense strand
agucuuugguguuagugaa

SEQ ID NO: 2523769 - RNA, 19 nt, Homo sapiens
  misc_RNA (1)...(19): siRNA sense strand
auacacaaacccagaagau

SEQ ID NO: 2523770 - RNA, 19 nt, Homo sapiens
  misc_RNA (1)...(19): siRNA sense strand
ucaacaugaaucugggaga

SEQ ID NO: 2523771 - RNA, 19 nt, Homo sapiens
  misc_RNA (1)...(19): siRNA sense strand
uuagugaaccaaaggaaca

SEQ ID NO: 2523772 - RNA, 19 nt, Homo sapiens
  misc_RNA (1)...(19): siRNA sense strand
ccaugagugcacugguauu

SEQ ID NO: 2523773 - RNA, 19 nt, Homo sapiens
  misc_RNA (1)...(19): siRNA sense strand
gcuuauggaacaagauauc

SEQ ID NO: 2523774 - RNA, 19 nt, Homo sapiens
  misc_RNA (1)...(19): siRNA sense strand
acugacaccaagaaagcaa

SEQ ID NO: 2523775 - RNA, 19 nt, Homo sapiens
  misc_RNA (1)...(19): siRNA sense strand
uagaagaugaacaggagca

SEQ ID NO: 2523776 - RNA, 19 nt, Homo sapiens
  misc_RNA (1)...(19): siRNA sense strand
ugaaauggaugcuaggaug

SEQ ID NO: 2523777 - RNA, 19 nt, Homo sapiens
  misc_RNA (1)...(19): siRNA sense strand
caagugaugauuuggacau

SEQ ID NO: 2523778 - RNA, 19 nt, Homo sapiens
  misc_RNA (1)...(19): siRNA sense strand
cuacaaagucaaaggaaga

SEQ ID NO: 2523779 - RNA, 19 nt, Homo sapiens
  misc_RNA (1)...(19): siRNA sense strand
aaacauaaaucgucgggaa

SEQ ID NO: 2523780 - RNA, 19 nt, Homo sapiens
  misc_RNA (1)...(19): siRNA sense strand
cagacauacuuuagugaau

SEQ ID NO: 2523781 - RNA, 19 nt, Homo sapiens
  misc_RNA (1)...(19): siRNA sense strand
caccauuguagaagagaaa

SEQ ID NO: 2523782 - RNA, 19 nt, Homo sapiens
  misc_RNA (1)...(19): siRNA sense strand
cuguagagcuucuggcuga

SEQ ID NO: 2523783 - RNA, 19 nt, Homo sapiens
  misc_RNA (1)...(19): siRNA sense strand
aggaagaugcccugaaaca

SEQ ID NO: 2523784 - RNA, 19 nt, Homo sapiens
  misc_RNA (1)...(19): siRNA sense strand
agaugaaacuccugccgaa

SEQ ID NO: 2523785 - RNA, 19 nt, Homo sapiens
  misc_RNA (1)...(19): siRNA sense strand
uguucaggauguagaaauu

SEQ ID NO: 2523786 - RNA, 19 nt, Homo sapiens
  misc_RNA (1)...(19): siRNA sense strand
cauaaaucgucgggaaaga

SEQ ID NO: 2523787 - RNA, 19 nt, Homo sapiens
  misc_RNA (1)...(19): siRNA sense strand
ugaagaggccacugcuaaa

SEQ ID NO: 2523788 - RNA, 19 nt, Homo sapiens
  misc_RNA (1)...(19): siRNA sense strand
aacauaaaucgucgggaaa

SEQ ID NO: 2523789 - RNA, 19 nt, Homo sapiens
  misc_RNA (1)...(19): siRNA sense strand
gaagaugagcuuagggaag

SEQ ID NO: 2523790 - RNA, 19 nt, Homo sapiens
  misc_RNA (1)...(19): siRNA sense strand
acaccauuguagaagagaa

SEQ ID NO: 2523791 - RNA, 19 nt, Homo sapiens
  misc_RNA (1)...(19): siRNA sense strand
cagaagaggcucaugcuga

SEQ ID NO: 2523792 - RNA, 19 nt, Homo sapiens
  misc_RNA (1)...(19): siRNA sense strand
augaagaaauugggcagaa

SEQ ID NO: 2523793 - RNA, 19 nt, Homo sapiens
  misc_RNA (1)...(19): siRNA sense strand
caaacagcaaugaagaaau

SEQ ID NO: 2523794 - RNA, 19 nt, Homo sapiens
  misc_RNA (1)...(19): siRNA sense strand
caaacuuggacaaagagaa

SEQ ID NO: 2523795 - RNA, 19 nt, Homo sapiens
  misc_RNA (1)...(19): siRNA sense strand
uugaauugccagagagugu

SEQ ID NO: 2523796 - RNA, 19 nt, Homo sapiens
  misc_RNA (1)...(19): siRNA sense strand
acaaacagcaaugaagaaa

SEQ ID NO: 2523797 - RNA, 19 nt, Homo sapiens
  misc_RNA (1)...(19): siRNA sense strand
uugaagaggccucagcuaa

SEQ ID NO: 2523798 - RNA, 19 nt, Homo sapiens
  misc_RNA (1)...(19): siRNA sense strand
cugaagaggcuccuagaga

SEQ ID NO: 2523799 - RNA, 19 nt, Homo sapiens
  misc_RNA (1)...(19): siRNA sense strand
ugaagagaccacugcagaa

SEQ ID NO: 2523800 - RNA, 19 nt, Homo sapiens
  misc_RNA (1)...(19): siRNA sense strand
ugaagagaccacugcagaa

SEQ ID NO: 2523801 - RNA, 19 nt, Homo sapiens
  misc_RNA (1)...(19): siRNA sense strand
gaaagcauggacaggaaau

SEQ ID NO: 2523802 - RNA, 19 nt, Homo sapiens
  misc_RNA (1)...(19): siRNA sense strand
caggaaaugacuaguaagu

SEQ ID NO: 2523803 - RNA, 19 nt, Homo sapiens
  misc_RNA (1)...(19): siRNA sense strand
cguacaggauacuggacca

SEQ ID NO: 2523804 - RNA, 19 nt, Homo sapiens
  misc_RNA (1)...(19): siRNA sense strand
acacauggccauaccaaaa

SEQ ID NO: 2523805 - RNA, 19 nt, Homo sapiens
  misc_RNA (1)...(19): siRNA sense strand
aagaugaggcucugguaga

SEQ ID NO: 2523806 - RNA, 19 nt, Homo sapiens
  misc_RNA (1)...(19): siRNA sense strand
cuucagcaaacuuggacaa

SEQ ID NO: 2523807 - RNA, 19 nt, Homo sapiens
  misc_RNA (1)...(19): siRNA sense strand
caggaauuccagcaguaaa

SEQ ID NO: 2523808 - RNA, 19 nt, Homo sapiens
  misc_RNA (1)...(19): siRNA sense strand
aggaauuccagcaguaaaa

SEQ ID NO: 2523809 - RNA, 19 nt, Homo sapiens
  misc_RNA (1)...(19): siRNA sense strand
gaagaaauugggcagaaaa

SEQ ID NO: 2523810 - RNA, 19 nt, Homo sapiens
  misc_RNA (1)...(19): siRNA sense strand
cauuuacucaggagacuaa

SEQ ID NO: 2523811 - RNA, 19 nt, Homo sapiens
  misc_RNA (1)...(19): siRNA sense strand
uguuagagaagcugcuauu

SEQ ID NO: 2523812 - RNA, 19 nt, Homo sapiens
  misc_RNA (1)...(19): siRNA sense strand
ccgugguaccugaagaaaa

SEQ ID NO: 2523813 - RNA, 19 nt, Homo sapiens
  misc_RNA (1)...(19): siRNA sense strand
agaagaugagcuuagggaa

SEQ ID NO: 2523814 - RNA, 19 nt, Homo sapiens
  misc_RNA (1)...(19): siRNA sense strand
caaagagaaagcauggaca

SEQ ID NO: 2523815 - RNA, 19 nt, Homo sapiens
  misc_RNA (1)...(19): siRNA sense strand
ugccaaagccuaugagucu

SEQ ID NO: 2523816 - RNA, 19 nt, Homo sapiens
  misc_RNA (1)...(19): siRNA sense strand
auguagaaauuccaccaaa

SEQ ID NO: 2523817 - RNA, 19 nt, Homo sapiens
  misc_RNA (1)...(19): siRNA sense strand
guguucaggauguagaaau

SEQ ID NO: 2523818 - RNA, 19 nt, Homo sapiens
  misc_RNA (1)...(19): siRNA sense strand
guuauuuccaggccagaua

SEQ ID NO: 2523819 - RNA, 19 nt, Homo sapiens
  misc_RNA (1)...(19): siRNA sense strand
uugaagaggccacugcuaa

SEQ ID NO: 2523820 - RNA, 19 nt, Homo sapiens
  misc_RNA (1)...(19): siRNA sense strand
ugaagagacccauguccaa

SEQ ID NO: 2523821 - RNA, 19 nt, Homo sapiens
  misc_RNA (1)...(19): siRNA sense strand
agacagacaccauuguaga

SEQ ID NO: 2523822 - RNA, 19 nt, Homo sapiens
  misc_RNA (1)...(19): siRNA sense strand
ggauacuggaccaugauga

SEQ ID NO: 2523823 - RNA, 19 nt, Homo sapiens
  misc_RNA (1)...(19): siRNA sense strand
ucuacaaagucaaaggaag

SEQ ID NO: 2523824 - RNA, 19 nt, Homo sapiens
  misc_RNA (1)...(19): siRNA sense strand
agaaagcauggacaggaaa

SEQ ID NO: 2523825 - RNA, 19 nt, Homo sapiens
  misc_RNA (1)...(19): siRNA sense strand
aacaaacagcaaugaagaa

SEQ ID NO: 2523826 - RNA, 19 nt, Homo sapiens
  misc_RNA (1)...(19): siRNA sense strand
cggagaauucuguuaaagu

SEQ ID NO: 2523827 - RNA, 19 nt, Homo sapiens
  misc_RNA (1)...(19): siRNA sense strand
guguauuauugcugaacaa

SEQ ID NO: 2523828 - RNA, 19 nt, Homo sapiens
  misc_RNA (1)...(19): siRNA sense strand
auggaaagccagugccaaa

SEQ ID NO: 2523829 - RNA, 19 nt, Homo sapiens
  misc_RNA (1)...(19): siRNA sense strand
cgugcaaaugaaagaguua

SEQ ID NO: 2523830 - RNA, 19 nt, Homo sapiens
  misc_RNA (1)...(19): siRNA sense strand
ccgccaauaccaagggaau

SEQ ID NO: 2523831 - RNA, 19 nt, Homo sapiens
  misc_RNA (1)...(19): siRNA sense strand
aagcaagucaagugaagaa

SEQ ID NO: 2523832 - RNA, 19 nt, Homo sapiens
  misc_RNA (1)...(19): siRNA sense strand
ccacggugucaaugauaaa

SEQ ID NO: 2523833 - RNA, 19 nt, Homo sapiens
  misc_RNA (1)...(19): siRNA sense strand
aagaaagagcagaugcaau

SEQ ID NO: 2523834 - RNA, 19 nt, Homo sapiens
  misc_RNA (1)...(19): siRNA sense strand
acagcgacuuggagagaca

SEQ ID NO: 2523835 - RNA, 19 nt, Homo sapiens
  misc_RNA (1)...(19): siRNA sense strand
ccuuaugggagauggcgaa

SEQ ID NO: 2523836 - RNA, 19 nt, Homo sapiens
  misc_RNA (1)...(19): siRNA sense strand
cagaaaauuggcauggaaa

SEQ ID NO: 2523837 - RNA, 19 nt, Homo sapiens
  misc_RNA (1)...(19): siRNA sense strand
ugucaaugauaaagucaca

SEQ ID NO: 2523838 - RNA, 19 nt, Homo sapiens
  misc_RNA (1)...(19): siRNA sense strand
gggccgugcaaaugaaaga

SEQ ID NO: 2523839 - RNA, 19 nt, Homo sapiens
  misc_RNA (1)...(19): siRNA sense strand
acgccaagcccgacgugaa

SEQ ID NO: 2523840 - RNA, 19 nt, Homo sapiens
  misc_RNA (1)...(19): siRNA sense strand
ccaugaagccuuagaagcu

SEQ ID NO: 2523841 - RNA, 19 nt, Homo sapiens
  misc_RNA (1)...(19): siRNA sense strand
agauacagaccaaugagaa

SEQ ID NO: 2523842 - RNA, 19 nt, Homo sapiens
  misc_RNA (1)...(19): siRNA sense strand
cuucaaaggucgggguauu

SEQ ID NO: 2523843 - RNA, 19 nt, Homo sapiens
  misc_RNA (1)...(19): siRNA sense strand
aguaauuggagcuggaguu

SEQ ID NO: 2523844 - RNA, 19 nt, Homo sapiens
  misc_RNA (1)...(19): siRNA sense strand
cugcauguggaauggcuua

SEQ ID NO: 2523845 - RNA, 19 nt, Homo sapiens
  misc_RNA (1)...(19): siRNA sense strand
aagaacaagccuacugcua

SEQ ID NO: 2523846 - RNA, 19 nt, Homo sapiens
  misc_RNA (1)...(19): siRNA sense strand
cuuacaaaguuggugacaa

SEQ ID NO: 2523847 - RNA, 19 nt, Homo sapiens
  misc_RNA (1)...(19): siRNA sense strand
ugaggaaacuucacagcga

SEQ ID NO: 2523848 - RNA, 19 nt, Homo sapiens
  misc_RNA (1)...(19): siRNA sense strand
acgugaaccgcuugggaca

SEQ ID NO: 2523849 - RNA, 19 nt, Homo sapiens
  misc_RNA (1)...(19): siRNA sense strand
gccaugauguggaggccuu

SEQ ID NO: 2523850 - RNA, 19 nt, Homo sapiens
  misc_RNA (1)...(19): siRNA sense strand
aaauauugaggaugcagaa

SEQ ID NO: 2523851 - RNA, 19 nt, Homo sapiens
  misc_RNA (1)...(19): siRNA sense strand
aaucaguaccagacacauu

SEQ ID NO: 2523852 - RNA, 19 nt, Homo sapiens
  misc_RNA (1)...(19): siRNA sense strand
guauaaacagacagaccca

SEQ ID NO: 2523853 - RNA, 19 nt, Homo sapiens
  misc_RNA (1)...(19): siRNA sense strand
acacauuauagcagccgua

SEQ ID NO: 2523854 - RNA, 19 nt, Homo sapiens
  misc_RNA (1)...(19): siRNA sense strand
acccagaacacccggacaa

SEQ ID NO: 2523855 - RNA, 19 nt, Homo sapiens
  misc_RNA (1)...(19): siRNA sense strand
gaaagaacacccugagcgu

SEQ ID NO: 2523856 - RNA, 19 nt, Homo sapiens
  misc_RNA (1)...(19): siRNA sense strand
gaggaucacuacagggaag

SEQ ID NO: 2523857 - RNA, 19 nt, Homo sapiens
  misc_RNA (1)...(19): siRNA sense strand
ugaaguauaaacagacaga

SEQ ID NO: 2523858 - RNA, 19 nt, Homo sapiens
  misc_RNA (1)...(19): siRNA sense strand
gccaaaagaaagagcagau

SEQ ID NO: 2523859 - RNA, 19 nt, Homo sapiens
  misc_RNA (1)...(19): siRNA sense strand
uuaucacaguggaggauca

SEQ ID NO: 2523860 - RNA, 19 nt, Homo sapiens
  misc_RNA (1)...(19): siRNA sense strand
gggaagguggcauuggaga

SEQ ID NO: 2523861 - RNA, 19 nt, Homo sapiens
  misc_RNA (1)...(19): siRNA sense strand
gcucugugugggaggcuuu

SEQ ID NO: 2523862 - RNA, 19 nt, Homo sapiens
  misc_RNA (1)...(19): siRNA sense strand
cccacuacaacuuggacaa

SEQ ID NO: 2523863 - RNA, 19 nt, Homo sapiens
  misc_RNA (1)...(19): siRNA sense strand
caucaucuccagugcaaaa

SEQ ID NO: 2523864 - RNA, 19 nt, Homo sapiens
  misc_RNA (1)...(19): siRNA sense strand
acuacagaggccugggaua

SEQ ID NO: 2523865 - RNA, 19 nt, Homo sapiens
  misc_RNA (1)...(19): siRNA sense strand
gggcuauggcuguggcugu

SEQ ID NO: 2523866 - RNA, 19 nt, Homo sapiens
  misc_RNA (1)...(19): siRNA sense strand
ccgugaaggauauggauuc

SEQ ID NO: 2523867 - RNA, 19 nt, Homo sapiens
  misc_RNA (1)...(19): siRNA sense strand
gcuggugguuggagccuga

SEQ ID NO: 2523868 - RNA, 19 nt, Homo sapiens
  misc_RNA (1)...(19): siRNA sense strand
acauggaaagggaggaaua

SEQ ID NO: 2523869 - RNA, 19 nt, Homo sapiens
  misc_RNA (1)...(19): siRNA sense strand
ccaaugaccagcagggcua

SEQ ID NO: 2523870 - RNA, 19 nt, Homo sapiens
  misc_RNA (1)...(19): siRNA sense strand
uggaagacuauguggagaa

SEQ ID NO: 2523871 - RNA, 19 nt, Homo sapiens
  misc_RNA (1)...(19): siRNA sense strand
uuacgaaacuacaaggcaa

SEQ ID NO: 2523872 - RNA, 19 nt, Homo sapiens
  misc_RNA (1)...(19): siRNA sense strand
aacuaaagguacugggaca

SEQ ID NO: 2523873 - RNA, 19 nt, Homo sapiens
  misc_RNA (1)...(19): siRNA sense strand
ccucauuggcccuggaaga

SEQ ID NO: 2523874 - RNA, 19 nt, Homo sapiens
  misc_RNA (1)...(19): siRNA sense strand
ccucaauugcagagacuuu

SEQ ID NO: 2523875 - RNA, 19 nt, Homo sapiens
  misc_RNA (1)...(19): siRNA sense strand
cuacagaagaugucagcau

SEQ ID NO: 2523876 - RNA, 19 nt, Homo sapiens
  misc_RNA (1)...(19): siRNA sense strand
acaaggugaaugaggaaau

SEQ ID NO: 2523877 - RNA, 19 nt, Homo sapiens
  misc_RNA (1)...(19): siRNA sense strand
caagauaacuaguuggaag

SEQ ID NO: 2523878 - RNA, 19 nt, Homo sapiens
  misc_RNA (1)...(19): siRNA sense strand
aguuuauacucaggagaaa

SEQ ID NO: 2523879 - RNA, 19 nt, Homo sapiens
  misc_RNA (1)...(19): siRNA sense strand
acguggagcuggagcgcuu

SEQ ID NO: 2523880 - RNA, 19 nt, Homo sapiens
  misc_RNA (1)...(19): siRNA sense strand
auacaaggugaaugaggaa

SEQ ID NO: 2523881 - RNA, 19 nt, Homo sapiens
  misc_RNA (1)...(19): siRNA sense strand
ccacauggaaagggaggaa

SEQ ID NO: 2523882 - RNA, 19 nt, Homo sapiens
  misc_RNA (1)...(19): siRNA sense strand
aggaagaauuuguucgguu

SEQ ID NO: 2523883 - RNA, 19 nt, Homo sapiens
  misc_RNA (1)...(19): siRNA sense strand
aggauuacaagaugggcua

SEQ ID NO: 2523884 - RNA, 19 nt, Homo sapiens
  misc_RNA (1)...(19): siRNA sense strand
cccugauggugaagaagaa

SEQ ID NO: 2523885 - RNA, 19 nt, Homo sapiens
  misc_RNA (1)...(19): siRNA sense strand
gcagagacuuugaaggaug

SEQ ID NO: 2523886 - RNA, 19 nt, Homo sapiens
  misc_RNA (1)...(19): siRNA sense strand
aagauaacuaguuggaaga

SEQ ID NO: 2523887 - RNA, 19 nt, Homo sapiens
  misc_RNA (1)...(19): siRNA sense strand
aggccaugguggagucuau

SEQ ID NO: 2523888 - RNA, 19 nt, Homo sapiens
  misc_RNA (1)...(19): siRNA sense strand
uggacgacaagguguauaa

SEQ ID NO: 2523889 - RNA, 19 nt, Homo sapiens
  misc_RNA (1)...(19): siRNA sense strand
ggucacauccagagggaag

SEQ ID NO: 2523890 - RNA, 19 nt, Homo sapiens
  misc_RNA (1)...(19): siRNA sense strand
uggaaagagucccucgcaa

SEQ ID NO: 2523891 - RNA, 19 nt, Homo sapiens
  misc_RNA (1)...(19): siRNA sense strand
caagagagccugaagugga

SEQ ID NO: 2523892 - RNA, 19 nt, Homo sapiens
  misc_RNA (1)...(19): siRNA sense strand
ggaaaagaagccaagaaga

SEQ ID NO: 2523893 - RNA, 19 nt, Homo sapiens
  misc_RNA (1)...(19): siRNA sense strand
gcauaugacaaacggcuga

SEQ ID NO: 2523894 - RNA, 19 nt, Homo sapiens
  misc_RNA (1)...(19): siRNA sense strand
cagaagauauccaaggaag

SEQ ID NO: 2523895 - RNA, 19 nt, Homo sapiens
  misc_RNA (1)...(19): siRNA sense strand
agggacagcaagauaacua

SEQ ID NO: 2523896 - RNA, 19 nt, Homo sapiens
  misc_RNA (1)...(19): siRNA sense strand
agacugaagaugaaggcca

SEQ ID NO: 2523897 - RNA, 19 nt, Homo sapiens
  misc_RNA (1)...(19): siRNA sense strand
ggaagaauuuguucgguuc

SEQ ID NO: 2523898 - RNA, 19 nt, Homo sapiens
  misc_RNA (1)...(19): siRNA sense strand
aaagaagccaagaagaaaa

SEQ ID NO: 2523899 - RNA, 19 nt, Homo sapiens
  misc_RNA (1)...(19): siRNA sense strand
aaguuuauacucaggagaa

SEQ ID NO: 2523900 - RNA, 19 nt, Homo sapiens
  misc_RNA (1)...(19): siRNA sense strand
cuuugaaggaugagccuga

SEQ ID NO: 2523901 - RNA, 19 nt, Homo sapiens
  misc_RNA (1)...(19): siRNA sense strand
aggugaaugaggaaaugaa

SEQ ID NO: 2523902 - RNA, 19 nt, Homo sapiens
  misc_RNA (1)...(19): siRNA sense strand
ugaaugaggaaaugaaacu

SEQ ID NO: 2523903 - RNA, 19 nt, Homo sapiens
  misc_RNA (1)...(19): siRNA sense strand
aagccgagucagaagauau

SEQ ID NO: 2523904 - RNA, 19 nt, Homo sapiens
  misc_RNA (1)...(19): siRNA sense strand
auggaauggcauaugacaa

SEQ ID NO: 2523905 - RNA, 19 nt, Homo sapiens
  misc_RNA (1)...(19): siRNA sense strand
gacugaagaugaaggccau

SEQ ID NO: 2523906 - RNA, 19 nt, Homo sapiens
  misc_RNA (1)...(19): siRNA sense strand
gggaucaucucaagccaga

SEQ ID NO: 2523907 - RNA, 19 nt, Homo sapiens
  misc_RNA (1)...(19): siRNA sense strand
agucaagaaagccgaguca

SEQ ID NO: 2523908 - RNA, 19 nt, Homo sapiens
  misc_RNA (1)...(19): siRNA sense strand
aguuaucucuggaggcuga

SEQ ID NO: 2523909 - RNA, 19 nt, Homo sapiens
  misc_RNA (1)...(19): siRNA sense strand
agaugaaggccauggugga

SEQ ID NO: 2523910 - RNA, 19 nt, Homo sapiens
  misc_RNA (1)...(19): siRNA sense strand
cgggagaagcugcaggagu

SEQ ID NO: 2523911 - RNA, 19 nt, Homo sapiens
  misc_RNA (1)...(19): siRNA sense strand
uacgaaacuacaaggcaaa

SEQ ID NO: 2523912 - RNA, 19 nt, Homo sapiens
  misc_RNA (1)...(19): siRNA sense strand
aauacaaggugaaugagga

SEQ ID NO: 2523913 - RNA, 19 nt, Homo sapiens
  misc_RNA (1)...(19): siRNA sense strand
gaaaugaaacuaaagguac

SEQ ID NO: 2523914 - RNA, 19 nt, Homo sapiens
  misc_RNA (1)...(19): siRNA sense strand
acauggacgacaaggugua

SEQ ID NO: 2523915 - RNA, 19 nt, Homo sapiens
  misc_RNA (1)...(19): siRNA sense strand
agccugaaguggagcuaca

SEQ ID NO: 2523916 - RNA, 19 nt, Homo sapiens
  misc_RNA (1)...(19): siRNA sense strand
aaaaggaggaggaagaauu

SEQ ID NO: 2523917 - RNA, 19 nt, Homo sapiens
  misc_RNA (1)...(19): siRNA sense strand
ccaccaaaauccacaccaa

SEQ ID NO: 2523918 - RNA, 19 nt, Homo sapiens
  misc_RNA (1)...(19): siRNA sense strand
agcucaugcucaaggaaga

SEQ ID NO: 2523919 - RNA, 19 nt, Homo sapiens
  misc_RNA (1)...(19): siRNA sense strand
ugagaagacaagagagccu

SEQ ID NO: 2523920 - RNA, 19 nt, Homo sapiens
  misc_RNA (1)...(19): siRNA sense strand
cugaaagggccacauggaa

SEQ ID NO: 2523921 - RNA, 19 nt, Homo sapiens
  misc_RNA (1)...(19): siRNA sense strand
agaagaacucuguggugca

SEQ ID NO: 2523922 - RNA, 19 nt, Homo sapiens
  misc_RNA (1)...(19): siRNA sense strand
gcugcaagugccuggugaa

SEQ ID NO: 2523923 - RNA, 19 nt, Homo sapiens
  misc_RNA (1)...(19): siRNA sense strand
gaucagcacagccgggaga

SEQ ID NO: 2523924 - RNA, 19 nt, Homo sapiens
  misc_RNA (1)...(19): siRNA sense strand
cagcuacuauggaggccua

SEQ ID NO: 2523925 - RNA, 19 nt, Homo sapiens
  misc_RNA (1)...(19): siRNA sense strand
gcaucauggcauugcaaau

SEQ ID NO: 2523926 - RNA, 19 nt, Homo sapiens
  misc_RNA (1)...(19): siRNA sense strand
gguucaaagaagacuggua

SEQ ID NO: 2523927 - RNA, 19 nt, Homo sapiens
  misc_RNA (1)...(19): siRNA sense strand
ccaaaggaauccaguggca

SEQ ID NO: 2523928 - RNA, 19 nt, Homo sapiens
  misc_RNA (1)...(19): siRNA sense strand
cucaaagggaacuuggaaa

SEQ ID NO: 2523929 - RNA, 19 nt, Homo sapiens
  misc_RNA (1)...(19): siRNA sense strand
ggauuauaauagcugccaa

SEQ ID NO: 2523930 - RNA, 19 nt, Homo sapiens
  misc_RNA (1)...(19): siRNA sense strand
gccaaaaguaugaugacua

SEQ ID NO: 2523931 - RNA, 19 nt, Homo sapiens
  misc_RNA (1)...(19): siRNA sense strand
uaaugguauuggugguaau

SEQ ID NO: 2523932 - RNA, 19 nt, Homo sapiens
  misc_RNA (1)...(19): siRNA sense strand
auugaaaaguggaaccuaa

SEQ ID NO: 2523933 - RNA, 19 nt, Homo sapiens
  misc_RNA (1)...(19): siRNA sense strand
ccauguuacaagaugaaga

SEQ ID NO: 2523934 - RNA, 19 nt, Homo sapiens
  misc_RNA (1)...(19): siRNA sense strand
cuggcaugguacuggauau

SEQ ID NO: 2523935 - RNA, 19 nt, Homo sapiens
  misc_RNA (1)...(19): siRNA sense strand
gagauggagauguuggaga

SEQ ID NO: 2523936 - RNA, 19 nt, Homo sapiens
  misc_RNA (1)...(19): siRNA sense strand
ccaaaauuaccaaaggaau

SEQ ID NO: 2523937 - RNA, 19 nt, Homo sapiens
  misc_RNA (1)...(19): siRNA sense strand
aauauugggaagauggauu

SEQ ID NO: 2523938 - RNA, 19 nt, Homo sapiens
  misc_RNA (1)...(19): siRNA sense strand
ggaaccuaauaauuggcaa

SEQ ID NO: 2523939 - RNA, 19 nt, Homo sapiens
  misc_RNA (1)...(19): siRNA sense strand
caacuguaucagacccaaa

SEQ ID NO: 2523940 - RNA, 19 nt, Homo sapiens
  misc_RNA (1)...(19): siRNA sense strand
uggcaugguacuggauaua

SEQ ID NO: 2523941 - RNA, 19 nt, Homo sapiens
  misc_RNA (1)...(19): siRNA sense strand
gugguaauuugguggccau

SEQ ID NO: 2523942 - RNA, 19 nt, Homo sapiens
  misc_RNA (1)...(19): siRNA sense strand
uagugauggugaugaagau

SEQ ID NO: 2523943 - RNA, 19 nt, Homo sapiens
  misc_RNA (1)...(19): siRNA sense strand
gccaguuauuaaugguauu

SEQ ID NO: 2523944 - RNA, 19 nt, Homo sapiens
  misc_RNA (1)...(19): siRNA sense strand
caauaaugggcacgcauca

SEQ ID NO: 2523945 - RNA, 19 nt, Homo sapiens
  misc_RNA (1)...(19): siRNA sense strand
caucucuucugcagggaau

SEQ ID NO: 2523946 - RNA, 19 nt, Homo sapiens
  misc_RNA (1)...(19): siRNA sense strand
caaaauuaccaaaggaauc

SEQ ID NO: 2523947 - RNA, 19 nt, Homo sapiens
  misc_RNA (1)...(19): siRNA sense strand
cugcaguaaauauugggaa

SEQ ID NO: 2523948 - RNA, 19 nt, Homo sapiens
  misc_RNA (1)...(19): siRNA sense strand
aggagaauugccugaugaa

SEQ ID NO: 2523949 - RNA, 19 nt, Homo sapiens
  misc_RNA (1)...(19): siRNA sense strand
cguuaaugcucggugucua

SEQ ID NO: 2523950 - RNA, 19 nt, Homo sapiens
  misc_RNA (1)...(19): siRNA sense strand
ccauggaguuggcggucga

SEQ ID NO: 2523951 - RNA, 19 nt, Homo sapiens
  misc_RNA (1)...(19): siRNA sense strand
uguccauggagcagaucaa

SEQ ID NO: 2523952 - RNA, 19 nt, Homo sapiens
  misc_RNA (1)...(19): siRNA sense strand
ggucaagaagggugaggac

SEQ ID NO: 2523953 - RNA, 19 nt, Homo sapiens
  misc_RNA (1)...(19): siRNA sense strand
cauguaagauggcaggaga

SEQ ID NO: 2523954 - RNA, 19 nt, Homo sapiens
  misc_RNA (1)...(19): siRNA sense strand
uuggcaggauugagagcua

SEQ ID NO: 2523955 - RNA, 19 nt, Homo sapiens
  misc_RNA (1)...(19): siRNA sense strand
uggcaggagacgacaaaca

SEQ ID NO: 2523956 - RNA, 19 nt, Homo sapiens
  misc_RNA (1)...(19): siRNA sense strand
cagcugugcgggaggacuu

SEQ ID NO: 2523957 - RNA, 19 nt, Homo sapiens
  misc_RNA (1)...(19): siRNA sense strand
cgggaggacuucaaggauc

SEQ ID NO: 2523958 - RNA, 19 nt, Homo sapiens
  misc_RNA (1)...(19): siRNA sense strand
ucauagaacuugcauguua

SEQ ID NO: 2523959 - RNA, 19 nt, Homo sapiens
  misc_RNA (1)...(19): siRNA sense strand
ucauaaagcaggacucuaa

SEQ ID NO: 2523960 - RNA, 19 nt, Homo sapiens
  misc_RNA (1)...(19): siRNA sense strand
uggcauuauuggagaccau

SEQ ID NO: 2523961 - RNA, 19 nt, Homo sapiens
  misc_RNA (1)...(19): siRNA sense strand
caaacggugggaagagaaa

SEQ ID NO: 2523962 - RNA, 19 nt, Homo sapiens
  misc_RNA (1)...(19): siRNA sense strand
ggaaggaugacaagagcca

SEQ ID NO: 2523963 - RNA, 19 nt, Homo sapiens
  misc_RNA (1)...(19): siRNA sense strand
acacaaacagccacauuua

SEQ ID NO: 2523964 - RNA, 19 nt, Homo sapiens
  misc_RNA (1)...(19): siRNA sense strand
gagaauauuugguggacug

SEQ ID NO: 2523965 - RNA, 19 nt, Homo sapiens
  misc_RNA (1)...(19): siRNA sense strand
gaucauagaacuugcaugu

SEQ ID NO: 2523966 - RNA, 19 nt, Homo sapiens
  misc_RNA (1)...(19): siRNA sense strand
gggaaauuguggugcuucu

SEQ ID NO: 2523967 - RNA, 19 nt, Homo sapiens
  misc_RNA (1)...(19): siRNA sense strand
uggagaaagaagugucauu

SEQ ID NO: 2523968 - RNA, 19 nt, Homo sapiens
  misc_RNA (1)...(19): siRNA sense strand
cuucugaacccauggucaa

SEQ ID NO: 2523969 - RNA, 19 nt, Homo sapiens
  misc_RNA (1)...(19): siRNA sense strand
acaaacagccacauuuaaa

SEQ ID NO: 2523970 - RNA, 19 nt, Homo sapiens
  misc_RNA (1)...(19): siRNA sense strand
ggucaauuaacgaggcagu

SEQ ID NO: 2523971 - RNA, 19 nt, Homo sapiens
  misc_RNA (1)...(19): siRNA sense strand
aaguaaugcauuugcugaa

SEQ ID NO: 2523972 - RNA, 19 nt, Homo sapiens
  misc_RNA (1)...(19): siRNA sense strand
cauaggaaauggaaggaug

SEQ ID NO: 2523973 - RNA, 19 nt, Homo sapiens
  misc_RNA (1)...(19): siRNA sense strand
ggugggaagagaaagaaga

SEQ ID NO: 2523974 - RNA, 19 nt, Homo sapiens
  misc_RNA (1)...(19): siRNA sense strand
ggucaaauugcucucuaua

SEQ ID NO: 2523975 - RNA, 19 nt, Homo sapiens
  misc_RNA (1)...(19): siRNA sense strand
caaugugccuacucauaua

SEQ ID NO: 2523976 - RNA, 19 nt, Homo sapiens
  misc_RNA (1)...(19): siRNA sense strand
auuuguuccuggagaaaga

SEQ ID NO: 2523977 - RNA, 19 nt, Homo sapiens
  misc_RNA (1)...(19): siRNA sense strand
guaagaaccuugaugcugu

SEQ ID NO: 2523978 - RNA, 19 nt, Homo sapiens
  misc_RNA (1)...(19): siRNA sense strand
gggaagagaaagaagagag

SEQ ID NO: 2523979 - RNA, 19 nt, Homo sapiens
  misc_RNA (1)...(19): siRNA sense strand
aagagaaagaagagaggcu

SEQ ID NO: 2523980 - RNA, 19 nt, Homo sapiens
  misc_RNA (1)...(19): siRNA sense strand
gcacguacuucauaaagca

SEQ ID NO: 2523981 - RNA, 19 nt, Homo sapiens
  misc_RNA (1)...(19): siRNA sense strand
ucuaaaagcuuuggaauca

SEQ ID NO: 2523982 - RNA, 19 nt, Homo sapiens
  misc_RNA (1)...(19): siRNA sense strand
aaggaugacaagagccauu

SEQ ID NO: 2523983 - RNA, 19 nt, Homo sapiens
  misc_RNA (1)...(19): siRNA sense strand
ucuaagagaagguaagaac

SEQ ID NO: 2523984 - RNA, 19 nt, Homo sapiens
  misc_RNA (1)...(19): siRNA sense strand
agagagaauauuuggugga

SEQ ID NO: 2523985 - RNA, 19 nt, Homo sapiens
  misc_RNA (1)...(19): siRNA sense strand
acaaacggugggaagagaa

SEQ ID NO: 2523986 - RNA, 19 nt, Homo sapiens
  misc_RNA (1)...(19): siRNA sense strand
aaucguagaggaagaguaa

SEQ ID NO: 2523987 - RNA, 19 nt, Homo sapiens
  misc_RNA (1)...(19): siRNA sense strand
agucugaaucguagaggaa

SEQ ID NO: 2523988 - RNA, 19 nt, Homo sapiens
  misc_RNA (1)...(19): siRNA sense strand
ucugaaucguagaggaaga

SEQ ID NO: 2523989 - RNA, 19 nt, Homo sapiens
  misc_RNA (1)...(19): siRNA sense strand
gcuuugucaccgugggaua

SEQ ID NO: 2523990 - RNA, 19 nt, Homo sapiens
  misc_RNA (1)...(19): siRNA sense strand
gaaagauacucgucaggca

SEQ ID NO: 2523991 - RNA, 19 nt, Homo sapiens
  misc_RNA (1)...(19): siRNA sense strand
aggaagggaagaagcagaa

SEQ ID NO: 2523992 - RNA, 19 nt, Homo sapiens
  misc_RNA (1)...(19): siRNA sense strand
gaaucguagaggaagagua

SEQ ID NO: 2523993 - RNA, 19 nt, Homo sapiens
  misc_RNA (1)...(19): siRNA sense strand
cagaacaacugcuagacga

SEQ ID NO: 2523994 - RNA, 19 nt, Homo sapiens
  misc_RNA (1)...(19): siRNA sense strand
cugaaggaacaaagagcca

SEQ ID NO: 2523995 - RNA, 19 nt, Homo sapiens
  misc_RNA (1)...(19): siRNA sense strand
cagaauuuuccaagacuaa

SEQ ID NO: 2523996 - RNA, 19 nt, Homo sapiens
  misc_RNA (1)...(19): siRNA sense strand
uggaaagagacguccuaau

SEQ ID NO: 2523997 - RNA, 19 nt, Homo sapiens
  misc_RNA (1)...(19): siRNA sense strand
aaugaagggcagaggaaac

SEQ ID NO: 2523998 - RNA, 19 nt, Homo sapiens
  misc_RNA (1)...(19): siRNA sense strand
uggccuugcagcuaggaaa

SEQ ID NO: 2523999 - RNA, 19 nt, Homo sapiens
  misc_RNA (1)...(19): siRNA sense strand
gaagaggccugaaggugca

SEQ ID NO: 2524000 - RNA, 19 nt, Homo sapiens
  misc_RNA (1)...(19): siRNA sense strand
aaaaugaagggcagaggaa

SEQ ID NO: 2524001 - RNA, 19 nt, Homo sapiens
  misc_RNA (1)...(19): siRNA sense strand
aaagauacucgucaggcaa

SEQ ID NO: 2524002 - RNA, 19 nt, Homo sapiens
  misc_RNA (1)...(19): siRNA sense strand
aaggaagggaagaagcaga

SEQ ID NO: 2524003 - RNA, 19 nt, Homo sapiens
  misc_RNA (1)...(19): siRNA sense strand
ucguagaggaagaguaaug

SEQ ID NO: 2524004 - RNA, 19 nt, Homo sapiens
  misc_RNA (1)...(19): siRNA sense strand
cccugcaguuugacauaaa

SEQ ID NO: 2524005 - RNA, 19 nt, Homo sapiens
  misc_RNA (1)...(19): siRNA sense strand
cucuaagugacaagaauau

SEQ ID NO: 2524006 - RNA, 19 nt, Homo sapiens
  misc_RNA (1)...(19): siRNA sense strand
aaaugaagggcagaggaaa

SEQ ID NO: 2524007 - RNA, 19 nt, Homo sapiens
  misc_RNA (1)...(19): siRNA sense strand
gggagcaaagugacgucaa

SEQ ID NO: 2524008 - RNA, 19 nt, Homo sapiens
  misc_RNA (1)...(19): siRNA sense strand
uggcuauggcugugguuau

SEQ ID NO: 2524009 - RNA, 19 nt, Homo sapiens
  misc_RNA (1)...(19): siRNA sense strand
uggcuauggaugugguuau

SEQ ID NO: 2524010 - RNA, 19 nt, Homo sapiens
  misc_RNA (1)...(19): siRNA sense strand
gagaaaggccccagggaaa

SEQ ID NO: 2524011 - RNA, 19 nt, Homo sapiens
  misc_RNA (1)...(19): siRNA sense strand
aaaugauaccacagggaua

SEQ ID NO: 2524012 - RNA, 19 nt, Homo sapiens
  misc_RNA (1)...(19): siRNA sense strand
gaaugagagcacaggagaa

SEQ ID NO: 2524013 - RNA, 19 nt, Homo sapiens
  misc_RNA (1)...(19): siRNA sense strand
gggcagaagcaucgaacga

SEQ ID NO: 2524014 - RNA, 19 nt, Homo sapiens
  misc_RNA (1)...(19): siRNA sense strand
gcgucuugcuaguggauga

SEQ ID NO: 2524015 - RNA, 19 nt, Homo sapiens
  misc_RNA (1)...(19): siRNA sense strand
gagaaaacaaguuggagaa

SEQ ID NO: 2524016 - RNA, 19 nt, Homo sapiens
  misc_RNA (1)...(19): siRNA sense strand
uggaagauucagaguggaa

SEQ ID NO: 2524017 - RNA, 19 nt, Homo sapiens
  misc_RNA (1)...(19): siRNA sense strand
aggcggaguuuguuagaau

SEQ ID NO: 2524018 - RNA, 19 nt, Homo sapiens
  misc_RNA (1)...(19): siRNA sense strand
cauggagaucaaagaaaua

SEQ ID NO: 2524019 - RNA, 19 nt, Homo sapiens
  misc_RNA (1)...(19): siRNA sense strand
agucagaaggagcgccaaa

SEQ ID NO: 2524020 - RNA, 19 nt, Homo sapiens
  misc_RNA (1)...(19): siRNA sense strand
guggaggccaacaggguua

SEQ ID NO: 2524021 - RNA, 19 nt, Homo sapiens
  misc_RNA (1)...(19): siRNA sense strand
ccggaagcgguuagaagaa

SEQ ID NO: 2524022 - RNA, 19 nt, Homo sapiens
  misc_RNA (1)...(19): siRNA sense strand
uugaagaauuccaguacau

SEQ ID NO: 2524023 - RNA, 19 nt, Homo sapiens
  misc_RNA (1)...(19): siRNA sense strand
augaugagauguucagcaa

SEQ ID NO: 2524024 - RNA, 19 nt, Homo sapiens
  misc_RNA (1)...(19): siRNA sense strand
acuuagagaacccagaaua

SEQ ID NO: 2524025 - RNA, 19 nt, Homo sapiens
  misc_RNA (1)...(19): siRNA sense strand
ccuccaggucggauauaua

SEQ ID NO: 2524026 - RNA, 19 nt, Homo sapiens
  misc_RNA (1)...(19): siRNA sense strand
gcgccaaaggccaaaucaa

SEQ ID NO: 2524027 - RNA, 19 nt, Homo sapiens
  misc_RNA (1)...(19): siRNA sense strand
gaagauucagaguggaaaa

SEQ ID NO: 2524028 - RNA, 19 nt, Homo sapiens
  misc_RNA (1)...(19): siRNA sense strand
cagauuugcauaagaacau

SEQ ID NO: 2524029 - RNA, 19 nt, Homo sapiens
  misc_RNA (1)...(19): siRNA sense strand
acugaaauccauugugaga

SEQ ID NO: 2524030 - RNA, 19 nt, Homo sapiens
  misc_RNA (1)...(19): siRNA sense strand
gguucucagagcagacaaa

SEQ ID NO: 2524031 - RNA, 19 nt, Homo sapiens
  misc_RNA (1)...(19): siRNA sense strand
acaagauuccacuuagaaa

SEQ ID NO: 2524032 - RNA, 19 nt, Homo sapiens
  misc_RNA (1)...(19): siRNA sense strand
gugccaugaaucuggacaa

SEQ ID NO: 2524033 - RNA, 19 nt, Homo sapiens
  misc_RNA (1)...(19): siRNA sense strand
gaacaugcuuaauagacga

SEQ ID NO: 2524034 - RNA, 19 nt, Homo sapiens
  misc_RNA (1)...(19): siRNA sense strand
cagagcagacaaaggaaaa

SEQ ID NO: 2524035 - RNA, 19 nt, Homo sapiens
  misc_RNA (1)...(19): siRNA sense strand
acaaacagcagguggaaag

SEQ ID NO: 2524036 - RNA, 19 nt, Homo sapiens
  misc_RNA (1)...(19): siRNA sense strand
agagaaaacaaguuggaga

SEQ ID NO: 2524037 - RNA, 19 nt, Homo sapiens
  misc_RNA (1)...(19): siRNA sense strand
aaaacaaguuggagaaaac

SEQ ID NO: 2524038 - RNA, 19 nt, Homo sapiens
  misc_RNA (1)...(19): siRNA sense strand
cgcauggagaucaaagaaa

SEQ ID NO: 2524039 - RNA, 19 nt, Homo sapiens
  misc_RNA (1)...(19): siRNA sense strand
ccaaagagaacaaacagca

SEQ ID NO: 2524040 - RNA, 19 nt, Homo sapiens
  misc_RNA (1)...(19): siRNA sense strand
agaacaaacagcaggugga

SEQ ID NO: 2524041 - RNA, 19 nt, Homo sapiens
  misc_RNA (1)...(19): siRNA sense strand
ucagagcagacaaaggaaa

SEQ ID NO: 2524042 - RNA, 19 nt, Homo sapiens
  misc_RNA (1)...(19): siRNA sense strand
ggaugaagguggacccaag

SEQ ID NO: 2524043 - RNA, 19 nt, Homo sapiens
  misc_RNA (1)...(19): siRNA sense strand
ccagauuugcauaagaaca

SEQ ID NO: 2524044 - RNA, 19 nt, Homo sapiens
  misc_RNA (1)...(19): siRNA sense strand
gugagauacaaucaacaaa

SEQ ID NO: 2524045 - RNA, 19 nt, Homo sapiens
  misc_RNA (1)...(19): siRNA sense strand
guaccaagggcaugagauc

SEQ ID NO: 2524046 - RNA, 19 nt, Homo sapiens
  misc_RNA (1)...(19): siRNA sense strand
cauauuccaaagagaacaa

SEQ ID NO: 2524047 - RNA, 19 nt, Homo sapiens
  misc_RNA (1)...(19): siRNA sense strand
aagcaggacccgcagggaa

SEQ ID NO: 2524048 - RNA, 19 nt, Homo sapiens
  misc_RNA (1)...(19): siRNA sense strand
gaucaaagaaauagcaagc

SEQ ID NO: 2524049 - RNA, 19 nt, Homo sapiens
  misc_RNA (1)...(19): siRNA sense strand
gcccagaaacgucggcgua

SEQ ID NO: 2524050 - RNA, 19 nt, Homo sapiens
  misc_RNA (1)...(19): siRNA sense strand
agucagcgcggaagaaaga

SEQ ID NO: 2524051 - RNA, 19 nt, Homo sapiens
  misc_RNA (1)...(19): siRNA sense strand
gcgguuagaagaaagccaa

SEQ ID NO: 2524052 - RNA, 19 nt, Homo sapiens
  misc_RNA (1)...(19): siRNA sense strand
cugaaauacaaaaggacuu

SEQ ID NO: 2524053 - RNA, 19 nt, Homo sapiens
  misc_RNA (1)...(19): siRNA sense strand
cuaaagggcuggacgggcu

SEQ ID NO: 2524054 - RNA, 19 nt, Homo sapiens
  misc_RNA (1)...(19): siRNA sense strand
gcagggaacuacugggccu

SEQ ID NO: 2524055 - RNA, 19 nt, Homo sapiens
  misc_RNA (1)...(19): siRNA sense strand
gaugaagacauuauagacu

SEQ ID NO: 2524056 - RNA, 19 nt, Homo sapiens
  misc_RNA (1)...(19): siRNA sense strand
gucagaacuacauuggaaa

SEQ ID NO: 2524057 - RNA, 19 nt, Homo sapiens
  misc_RNA (1)...(19): siRNA sense strand
uggacaaauuugagaaagg

SEQ ID NO: 2524058 - RNA, 19 nt, Homo sapiens
  misc_RNA (1)...(19): siRNA sense strand
uuuuaaaucuucuggguga

SEQ ID NO: 2524059 - RNA, 19 nt, Homo sapiens
  misc_RNA (1)...(19): siRNA sense strand
caggcuaagugcucugcaa

SEQ ID NO: 2524060 - RNA, 19 nt, Homo sapiens
  misc_RNA (1)...(19): siRNA sense strand
ccgaugaagacauuauaga

SEQ ID NO: 2524061 - RNA, 19 nt, Homo sapiens
  misc_RNA (1)...(19): siRNA sense strand
uugaagaacaagagggcuc

SEQ ID NO: 2524062 - RNA, 19 nt, Homo sapiens
  misc_RNA (1)...(19): siRNA sense strand
cugaagagagugacaaucu

SEQ ID NO: 2524063 - RNA, 19 nt, Homo sapiens
  misc_RNA (1)...(19): siRNA sense strand
cuacaguugcaucuauaaa

SEQ ID NO: 2524064 - RNA, 19 nt, Homo sapiens
  misc_RNA (1)...(19): siRNA sense strand
gccaaaggccaaaucaaaa

SEQ ID NO: 2524065 - RNA, 19 nt, Homo sapiens
  misc_RNA (1)...(19): siRNA sense strand
ucuggacaaauuugagaaa

SEQ ID NO: 2524066 - RNA, 19 nt, Homo sapiens
  misc_RNA (1)...(19): siRNA sense strand
acagcagguggaaaggaaa

SEQ ID NO: 2524067 - RNA, 19 nt, Homo sapiens
  misc_RNA (1)...(19): siRNA sense strand
uggcuauggccguggcuau

SEQ ID NO: 2524068 - RNA, 19 nt, Homo sapiens
  misc_RNA (1)...(19): siRNA sense strand
cuaugguggcuauggauau

SEQ ID NO: 2524069 - RNA, 19 nt, Homo sapiens
  misc_RNA (1)...(19): siRNA sense strand
uggcuguggcugugguuau

SEQ ID NO: 2524070 - RNA, 19 nt, Homo sapiens
  misc_RNA (1)...(19): siRNA sense strand
aggccugggcuguggcuau

SEQ ID NO: 2524071 - RNA, 19 nt, Homo sapiens
  misc_RNA (1)...(19): siRNA sense strand
gcuggagguuggagccuga

SEQ ID NO: 2524072 - RNA, 19 nt, Homo sapiens
  misc_RNA (1)...(19): siRNA sense strand
ccagacugaugaaggagga

SEQ ID NO: 2524073 - RNA, 19 nt, Homo sapiens
  misc_RNA (1)...(19): siRNA sense strand
cguccgagaaagugagaau

SEQ ID NO: 2524074 - RNA, 19 nt, Homo sapiens
  misc_RNA (1)...(19): siRNA sense strand
gauuauuacuuaugggacu

SEQ ID NO: 2524075 - RNA, 19 nt, Homo sapiens
  misc_RNA (1)...(19): siRNA sense strand
ucucaaugaaaccgggaaa

SEQ ID NO: 2524076 - RNA, 19 nt, Homo sapiens
  misc_RNA (1)...(19): siRNA sense strand
agggaagauaugaaaggaa

SEQ ID NO: 2524077 - RNA, 19 nt, Homo sapiens
  misc_RNA (1)...(19): siRNA sense strand
ggagaaguuuggaggcucu

SEQ ID NO: 2524078 - RNA, 19 nt, Homo sapiens
  misc_RNA (1)...(19): siRNA sense strand
gcccaugacuauagggaag

SEQ ID NO: 2524079 - RNA, 19 nt, Homo sapiens
  misc_RNA (1)...(19): siRNA sense strand
cuuuaguagaagagaggca

SEQ ID NO: 2524080 - RNA, 19 nt, Homo sapiens
  misc_RNA (1)...(19): siRNA sense strand
gaguguauuggaaggaaaa

SEQ ID NO: 2524081 - RNA, 19 nt, Homo sapiens
  misc_RNA (1)...(19): siRNA sense strand
gagacaggcaagaggugga

SEQ ID NO: 2524082 - RNA, 19 nt, Homo sapiens
  misc_RNA (1)...(19): siRNA sense strand
gggaaaauucugcuggaga

SEQ ID NO: 2524083 - RNA, 19 nt, Homo sapiens
  misc_RNA (1)...(19): siRNA sense strand
cccaaauccuuguagcaga

SEQ ID NO: 2524084 - RNA, 19 nt, Homo sapiens
  misc_RNA (1)...(19): siRNA sense strand
acaggcaagagguggaaau

SEQ ID NO: 2524085 - RNA, 19 nt, Homo sapiens
  misc_RNA (1)...(19): siRNA sense strand
aauagugcgcagaaguuaa

SEQ ID NO: 2524086 - RNA, 19 nt, Homo sapiens
  misc_RNA (1)...(19): siRNA sense strand
agaagagaggcaucggauu

SEQ ID NO: 2524087 - RNA, 19 nt, Homo sapiens
  misc_RNA (1)...(19): siRNA sense strand
acuauagggaagauaugaa

SEQ ID NO: 2524088 - RNA, 19 nt, Homo sapiens
  misc_RNA (1)...(19): siRNA sense strand
ucuggagcuuauugaacaa

SEQ ID NO: 2524089 - RNA, 19 nt, Homo sapiens
  misc_RNA (1)...(19): siRNA sense strand
ccuucgaguugcaggaaau

SEQ ID NO: 2524090 - RNA, 19 nt, Homo sapiens
  misc_RNA (1)...(19): siRNA sense strand
aggagggagcccaggagua

SEQ ID NO: 2524091 - RNA, 19 nt, Homo sapiens
  misc_RNA (1)...(19): siRNA sense strand
aggaaaucacguuuaagaa

SEQ ID NO: 2524092 - RNA, 19 nt, Homo sapiens
  misc_RNA (1)...(19): siRNA sense strand
gggcacugacagagaugau

SEQ ID NO: 2524093 - RNA, 19 nt, Homo sapiens
  misc_RNA (1)...(19): siRNA sense strand
cccagugcccugugagcaa

SEQ ID NO: 2524094 - RNA, 19 nt, Homo sapiens
  misc_RNA (1)...(19): siRNA sense strand
cuggaaaccuggaaggaga

SEQ ID NO: 2524095 - RNA, 19 nt, Homo sapiens
  misc_RNA (1)...(19): siRNA sense strand
gaucaggaaagcagggcau

SEQ ID NO: 2524096 - RNA, 19 nt, Homo sapiens
  misc_RNA (1)...(19): siRNA sense strand
cccucuaugcagugguaaa

SEQ ID NO: 2524097 - RNA, 19 nt, Homo sapiens
  misc_RNA (1)...(19): siRNA sense strand
uuucaaagcaaaggagcua

SEQ ID NO: 2524098 - RNA, 19 nt, Homo sapiens
  misc_RNA (1)...(19): siRNA sense strand
gggcauucuucuugagcac

SEQ ID NO: 2524099 - RNA, 19 nt, Homo sapiens
  misc_RNA (1)...(19): siRNA sense strand
augcagugguaaaggagca

SEQ ID NO: 2524100 - RNA, 19 nt, Homo sapiens
  misc_RNA (1)...(19): siRNA sense strand
ggagaaggaaccaaggacu

SEQ ID NO: 2524101 - RNA, 19 nt, Homo sapiens
  misc_RNA (1)...(19): siRNA sense strand
cuuccuggaugaaaagaaa

SEQ ID NO: 2524102 - RNA, 19 nt, Homo sapiens
  misc_RNA (1)...(19): siRNA sense strand
ggagaaaucuuccuggaug

SEQ ID NO: 2524103 - RNA, 19 nt, Homo sapiens
  misc_RNA (1)...(19): siRNA sense strand
aagaugauguuuaugggau

SEQ ID NO: 2524104 - RNA, 19 nt, Homo sapiens
  misc_RNA (1)...(19): siRNA sense strand
acggaggcuucucuggaaa

SEQ ID NO: 2524105 - RNA, 19 nt, Homo sapiens
  misc_RNA (1)...(19): siRNA sense strand
uggaaaccuggaaggagaa

SEQ ID NO: 2524106 - RNA, 19 nt, Homo sapiens
  misc_RNA (1)...(19): siRNA sense strand
aggacugaagugaaggauu

SEQ ID NO: 2524107 - RNA, 19 nt, Homo sapiens
  misc_RNA (1)...(19): siRNA sense strand
agcuagaagaggagaauaa

SEQ ID NO: 2524108 - RNA, 19 nt, Homo sapiens
  misc_RNA (1)...(19): siRNA sense strand
ugaugaaagcggaagcaaa

SEQ ID NO: 2524109 - RNA, 19 nt, Homo sapiens
  misc_RNA (1)...(19): siRNA sense strand
uggaacaccaagagauaaa

SEQ ID NO: 2524110 - RNA, 19 nt, Homo sapiens
  misc_RNA (1)...(19): siRNA sense strand
agguggaaguauuggaaaa

SEQ ID NO: 2524111 - RNA, 19 nt, Homo sapiens
  misc_RNA (1)...(19): siRNA sense strand
ccgugaagacuuaguaaau

SEQ ID NO: 2524112 - RNA, 19 nt, Homo sapiens
  misc_RNA (1)...(19): siRNA sense strand
agacaguagaagauagcaa

SEQ ID NO: 2524113 - RNA, 19 nt, Homo sapiens
  misc_RNA (1)...(19): siRNA sense strand
auagaaaccuuauugggua

SEQ ID NO: 2524114 - RNA, 19 nt, Homo sapiens
  misc_RNA (1)...(19): siRNA sense strand
ugaugaaacuauagagcac

SEQ ID NO: 2524115 - RNA, 19 nt, Homo sapiens
  misc_RNA (1)...(19): siRNA sense strand
agauguuucgugagcgaua

SEQ ID NO: 2524116 - RNA, 19 nt, Homo sapiens
  misc_RNA (1)...(19): siRNA sense strand
aagcagagauguuucguga

SEQ ID NO: 2524117 - RNA, 19 nt, Homo sapiens
  misc_RNA (1)...(19): siRNA sense strand
agagauguuucgugagcga

SEQ ID NO: 2524118 - RNA, 19 nt, Homo sapiens
  misc_RNA (1)...(19): siRNA sense strand
cagucagucuguugaugaa

SEQ ID NO: 2524119 - RNA, 19 nt, Homo sapiens
  misc_RNA (1)...(19): siRNA sense strand
acuacuaauccuugcagaa

SEQ ID NO: 2524120 - RNA, 19 nt, Homo sapiens
  misc_RNA (1)...(19): siRNA sense strand
gugaauuagagcuugaaga

SEQ ID NO: 2524121 - RNA, 19 nt, Homo sapiens
  misc_RNA (1)...(19): siRNA sense strand
gguuggaccagguggaagu

SEQ ID NO: 2524122 - RNA, 19 nt, Homo sapiens
  misc_RNA (1)...(19): siRNA sense strand
uaucagugaauuagagcuu

SEQ ID NO: 2524123 - RNA, 19 nt, Homo sapiens
  misc_RNA (1)...(19): siRNA sense strand
caucugcaccauauggaaa

SEQ ID NO: 2524124 - RNA, 19 nt, Homo sapiens
  misc_RNA (1)...(19): siRNA sense strand
aguaaagcucaguuccaua

SEQ ID NO: 2524125 - RNA, 19 nt, Homo sapiens
  misc_RNA (1)...(19): siRNA sense strand
uggaccagguggaaguauu

SEQ ID NO: 2524126 - RNA, 19 nt, Homo sapiens
  misc_RNA (1)...(19): siRNA sense strand
gacuaugcuuugagagugu

SEQ ID NO: 2524127 - RNA, 19 nt, Homo sapiens
  misc_RNA (1)...(19): siRNA sense strand
ucauaggagcauuugauau

SEQ ID NO: 2524128 - RNA, 19 nt, Homo sapiens
  misc_RNA (1)...(19): siRNA sense strand
gcucaguuccauagugguu

SEQ ID NO: 2524129 - RNA, 19 nt, Homo sapiens
  misc_RNA (1)...(19): siRNA sense strand
ccuuucacuacgacaaaua

SEQ ID NO: 2524130 - RNA, 19 nt, Homo sapiens
  misc_RNA (1)...(19): siRNA sense strand
uguauugggcauaugacua

SEQ ID NO: 2524131 - RNA, 19 nt, Homo sapiens
  misc_RNA (1)...(19): siRNA sense strand
cgacaaauaccgaaugccu

SEQ ID NO: 2524132 - RNA, 19 nt, Homo sapiens
  misc_RNA (1)...(19): siRNA sense strand
aauuaaugcaguugagaag

SEQ ID NO: 2524133 - RNA, 19 nt, Homo sapiens
  misc_RNA (1)...(19): siRNA sense strand
uggugaagcuauuaaguac

SEQ ID NO: 2524134 - RNA, 19 nt, Homo sapiens
  misc_RNA (1)...(19): siRNA sense strand
cuugaagauaaacuggaaa

SEQ ID NO: 2524135 - RNA, 19 nt, Homo sapiens
  misc_RNA (1)...(19): siRNA sense strand
auagcaaacuucaaggcuu

SEQ ID NO: 2524136 - RNA, 19 nt, Homo sapiens
  misc_RNA (1)...(19): siRNA sense strand
caaacaugauugaacgauc

SEQ ID NO: 2524137 - RNA, 19 nt, Homo sapiens
  misc_RNA (1)...(19): siRNA sense strand
guuuauacacagaggcaug

SEQ ID NO: 2524138 - RNA, 19 nt, Homo sapiens
  misc_RNA (1)...(19): siRNA sense strand
cuuuauucugugugguaau

SEQ ID NO: 2524139 - RNA, 19 nt, Homo sapiens
  misc_RNA (1)...(19): siRNA sense strand
ucacuaaugaauucagaca

SEQ ID NO: 2524140 - RNA, 19 nt, Homo sapiens
  misc_RNA (1)...(19): siRNA sense strand
cagacaaauaugauccuuu

SEQ ID NO: 2524141 - RNA, 19 nt, Homo sapiens
  misc_RNA (1)...(19): siRNA sense strand
ggggaaaagcaaagcaaaa

SEQ ID NO: 2524142 - RNA, 19 nt, Homo sapiens
  misc_RNA (1)...(19): siRNA sense strand
gagaaaagaaaggggaaaa

SEQ ID NO: 2524143 - RNA, 19 nt, Homo sapiens
  misc_RNA (1)...(19): siRNA sense strand
aagcagugaaaguggcaaa

SEQ ID NO: 2524144 - RNA, 19 nt, Homo sapiens
  misc_RNA (1)...(19): siRNA sense strand
gagagaaaagaaaggggaa

SEQ ID NO: 2524145 - RNA, 19 nt, Homo sapiens
  misc_RNA (1)...(19): siRNA sense strand
ggcugaaggcaaagcgaga

SEQ ID NO: 2524146 - RNA, 19 nt, Homo sapiens
  misc_RNA (1)...(19): siRNA sense strand
aagcaaaagcagugaaagu

SEQ ID NO: 2524147 - RNA, 19 nt, Homo sapiens
  misc_RNA (1)...(19): siRNA sense strand
aaaugcaaugugagguaaa

SEQ ID NO: 2524148 - RNA, 19 nt, Homo sapiens
  misc_RNA (1)...(19): siRNA sense strand
acaugaaaauggagacuga

SEQ ID NO: 2524149 - RNA, 19 nt, Homo sapiens
  misc_RNA (1)...(19): siRNA sense strand
agagaaaagaaaggggaaa

SEQ ID NO: 2524150 - RNA, 19 nt, Homo sapiens
  misc_RNA (1)...(19): siRNA sense strand
cggugauguuuuaaugaaa

SEQ ID NO: 2524151 - RNA, 19 nt, Homo sapiens
  misc_RNA (1)...(19): siRNA sense strand
aagaaagaugcgugcugaa

SEQ ID NO: 2524152 - RNA, 19 nt, Homo sapiens
  misc_RNA (1)...(19): siRNA sense strand
caacuguggugguacccaa

SEQ ID NO: 2524153 - RNA, 19 nt, Homo sapiens
  misc_RNA (1)...(19): siRNA sense strand
aaagaaaggggaaaagcaa

SEQ ID NO: 2524154 - RNA, 19 nt, Homo sapiens
  misc_RNA (1)...(19): siRNA sense strand
aggcaaagcgagagaaaag

SEQ ID NO: 2524155 - RNA, 19 nt, Homo sapiens
  misc_RNA (1)...(19): siRNA sense strand
cagcauggacaguacccaa

SEQ ID NO: 2524156 - RNA, 19 nt, Homo sapiens
  misc_RNA (1)...(19): siRNA sense strand
aguaaguggaaaagaaaga

SEQ ID NO: 2524157 - RNA, 19 nt, Homo sapiens
  misc_RNA (1)...(19): siRNA sense strand
cugaaggcaaagcgagaga

SEQ ID NO: 2524158 - RNA, 19 nt, Homo sapiens
  misc_RNA (1)...(19): siRNA sense strand
augaaaauggagacugaua

SEQ ID NO: 2524159 - RNA, 19 nt, Homo sapiens
  misc_RNA (1)...(19): siRNA sense strand
caaagcaaaagcagugaaa

SEQ ID NO: 2524160 - RNA, 19 nt, Homo sapiens
  misc_RNA (1)...(19): siRNA sense strand
aagaaaggggaaaagcaaa

SEQ ID NO: 2524161 - RNA, 19 nt, Homo sapiens
  misc_RNA (1)...(19): siRNA sense strand
uggacaggguagaggagaa

SEQ ID NO: 2524162 - RNA, 19 nt, Homo sapiens
  misc_RNA (1)...(19): siRNA sense strand
caacaugaguagugccguu

SEQ ID NO: 2524163 - RNA, 19 nt, Homo sapiens
  misc_RNA (1)...(19): siRNA sense strand
aggcagaaagguugggcau

SEQ ID NO: 2524164 - RNA, 19 nt, Homo sapiens
  misc_RNA (1)...(19): siRNA sense strand
ccaagaagcaggcggagga

SEQ ID NO: 2524165 - RNA, 19 nt, Homo sapiens
  misc_RNA (1)...(19): siRNA sense strand
caacauggaugcacagcca

SEQ ID NO: 2524166 - RNA, 19 nt, Homo sapiens
  misc_RNA (1)...(19): siRNA sense strand
gcccagauguaccgggaga

SEQ ID NO: 2524167 - RNA, 19 nt, Homo sapiens
  misc_RNA (1)...(19): siRNA sense strand
ccccaaaguacaaggacaa

SEQ ID NO: 2524168 - RNA, 19 nt, Homo sapiens
  misc_RNA (1)...(19): siRNA sense strand
ggacauggauggagcucac

SEQ ID NO: 2524169 - RNA, 19 nt, Homo sapiens
  misc_RNA (1)...(19): siRNA sense strand
uggaagggaagaagcgaga

SEQ ID NO: 2524170 - RNA, 19 nt, Homo sapiens
  misc_RNA (1)...(19): siRNA sense strand
cggacauugcccaguuuaa

SEQ ID NO: 2524171 - RNA, 19 nt, Homo sapiens
  misc_RNA (1)...(19): siRNA sense strand
agauguaccgggagaagau

SEQ ID NO: 2524172 - RNA, 19 nt, Homo sapiens
  misc_RNA (1)...(19): siRNA sense strand
cugagaugcaggugauuga

SEQ ID NO: 2524173 - RNA, 19 nt, Homo sapiens
  misc_RNA (1)...(19): siRNA sense strand
gccacaaaccggagggaag

SEQ ID NO: 2524174 - RNA, 19 nt, Homo sapiens
  misc_RNA (1)...(19): siRNA sense strand
uagugaggcgcgucagaaa

SEQ ID NO: 2524175 - RNA, 19 nt, Homo sapiens
  misc_RNA (1)...(19): siRNA sense strand
ccaucauuggcaagaagaa

SEQ ID NO: 2524176 - RNA, 19 nt, Homo sapiens
  misc_RNA (1)...(19): siRNA sense strand
uggccaauggugugaugaa

SEQ ID NO: 2524177 - RNA, 19 nt, Homo sapiens
  misc_RNA (1)...(19): siRNA sense strand
agggcugggugccaagaaa

SEQ ID NO: 2524178 - RNA, 19 nt, Homo sapiens
  misc_RNA (1)...(19): siRNA sense strand
agguggaugcggaguauga

SEQ ID NO: 2524179 - RNA, 19 nt, Homo sapiens
  misc_RNA (1)...(19): siRNA sense strand
agaaagggcugggugccaa

SEQ ID NO: 2524180 - RNA, 19 nt, Homo sapiens
  misc_RNA (1)...(19): siRNA sense strand
ucagugagauugagcggca

SEQ ID NO: 2524181 - RNA, 19 nt, Homo sapiens
  misc_RNA (1)...(19): siRNA sense strand
uugaagaagcuguggcaaa

SEQ ID NO: 2524182 - RNA, 19 nt, Homo sapiens
  misc_RNA (1)...(19): siRNA sense strand
ggaaaugaguguugagcag

SEQ ID NO: 2524183 - RNA, 19 nt, Homo sapiens
  misc_RNA (1)...(19): siRNA sense strand
cuaagguagcgcugguaua

SEQ ID NO: 2524184 - RNA, 19 nt, Homo sapiens
  misc_RNA (1)...(19): siRNA sense strand
aggucaagauguacugcua

SEQ ID NO: 2524185 - RNA, 19 nt, Homo sapiens
  misc_RNA (1)...(19): siRNA sense strand
aggcaaugauuuauaccau

SEQ ID NO: 2524186 - RNA, 19 nt, Homo sapiens
  misc_RNA (1)...(19): siRNA sense strand
cauuguuggcagugagcau

SEQ ID NO: 2524187 - RNA, 19 nt, Homo sapiens
  misc_RNA (1)...(19): siRNA sense strand
gaagacaaguugaccgugu

SEQ ID NO: 2524188 - RNA, 19 nt, Homo sapiens
  misc_RNA (1)...(19): siRNA sense strand
ccugagacuuugggcagaa

SEQ ID NO: 2524189 - RNA, 19 nt, Homo sapiens
  misc_RNA (1)...(19): siRNA sense strand
agaaccuauugaugaaaga

SEQ ID NO: 2524190 - RNA, 19 nt, Homo sapiens
  misc_RNA (1)...(19): siRNA sense strand
gauuuuggcaggugaauau

SEQ ID NO: 2524191 - RNA, 19 nt, Homo sapiens
  misc_RNA (1)...(19): siRNA sense strand
ugguauauggucaaaugaa

SEQ ID NO: 2524192 - RNA, 19 nt, Homo sapiens
  misc_RNA (1)...(19): siRNA sense strand
guugcaacuacuacagaaa

SEQ ID NO: 2524193 - RNA, 19 nt, Homo sapiens
  misc_RNA (1)...(19): siRNA sense strand
cggcucuggcuguggauau

SEQ ID NO: 2524194 - RNA, 19 nt, Homo sapiens
  misc_RNA (1)...(19): siRNA sense strand
uggaacuggcuguggcuau

SEQ ID NO: 2524195 - RNA, 19 nt, Homo sapiens
  misc_RNA (1)...(19): siRNA sense strand
ccaacaaacaauuaggaaa

SEQ ID NO: 2524196 - RNA, 19 nt, Homo sapiens
  misc_RNA (1)...(19): siRNA sense strand
caaaaugacuucuggggaa

SEQ ID NO: 2524197 - RNA, 19 nt, Homo sapiens
  misc_RNA (1)...(19): siRNA sense strand
uuacauuagcagaggagaa

SEQ ID NO: 2524198 - RNA, 19 nt, Homo sapiens
  misc_RNA (1)...(19): siRNA sense strand
gcaaaggaauuaaaggcuu

SEQ ID NO: 2524199 - RNA, 19 nt, Homo sapiens
  misc_RNA (1)...(19): siRNA sense strand
cagaaauaaugcagaucuu

SEQ ID NO: 2524200 - RNA, 19 nt, Homo sapiens
  misc_RNA (1)...(19): siRNA sense strand
uugaauauagucagggaua

SEQ ID NO: 2524201 - RNA, 19 nt, Homo sapiens
  misc_RNA (1)...(19): siRNA sense strand
agauauacuaggagcaaaa

SEQ ID NO: 2524202 - RNA, 19 nt, Homo sapiens
  misc_RNA (1)...(19): siRNA sense strand
ccuuaacaguauugacauu

SEQ ID NO: 2524203 - RNA, 19 nt, Homo sapiens
  misc_RNA (1)...(19): siRNA sense strand
uugagagagcuuugaaaua

SEQ ID NO: 2524204 - RNA, 19 nt, Homo sapiens
  misc_RNA (1)...(19): siRNA sense strand
acuagaugcuaauggguau

SEQ ID NO: 2524205 - RNA, 19 nt, Homo sapiens
  misc_RNA (1)...(19): siRNA sense strand
aagaaucaggugagguuaa

SEQ ID NO: 2524206 - RNA, 19 nt, Homo sapiens
  misc_RNA (1)...(19): siRNA sense strand
ccauaaaguuacaagccga

SEQ ID NO: 2524207 - RNA, 19 nt, Homo sapiens
  misc_RNA (1)...(19): siRNA sense strand
ugauuagaguccagguuau

SEQ ID NO: 2524208 - RNA, 19 nt, Homo sapiens
  misc_RNA (1)...(19): siRNA sense strand
gguauuucaauuugggaau

SEQ ID NO: 2524209 - RNA, 19 nt, Homo sapiens
  misc_RNA (1)...(19): siRNA sense strand
cuuaauaguaggugugguu

SEQ ID NO: 2524210 - RNA, 19 nt, Homo sapiens
  misc_RNA (1)...(19): siRNA sense strand
aggaauuugcuguguguau

SEQ ID NO: 2524211 - RNA, 19 nt, Homo sapiens
  misc_RNA (1)...(19): siRNA sense strand
aggaauaacaguuguagga

SEQ ID NO: 2524212 - RNA, 19 nt, Homo sapiens
  misc_RNA (1)...(19): siRNA sense strand
aaccaaagaagcugaagaa

SEQ ID NO: 2524213 - RNA, 19 nt, Homo sapiens
  misc_RNA (1)...(19): siRNA sense strand
aagcaaugugcaaggaaaa

SEQ ID NO: 2524214 - RNA, 19 nt, Homo sapiens
  misc_RNA (1)...(19): siRNA sense strand
aaguguggaaggaaagaaa

SEQ ID NO: 2524215 - RNA, 19 nt, Homo sapiens
  misc_RNA (1)...(19): siRNA sense strand
gaaucuuacaugauggcua

SEQ ID NO: 2524216 - RNA, 19 nt, Homo sapiens
  misc_RNA (1)...(19): siRNA sense strand
caacaaaagacaucaaaga

SEQ ID NO: 2524217 - RNA, 19 nt, Homo sapiens
  misc_RNA (1)...(19): siRNA sense strand
agaaauugggauugggagu

SEQ ID NO: 2524218 - RNA, 19 nt, Homo sapiens
  misc_RNA (1)...(19): siRNA sense strand
gaaccaaagaagcugaaga

SEQ ID NO: 2524219 - RNA, 19 nt, Homo sapiens
  misc_RNA (1)...(19): siRNA sense strand
uuucagcaauacuggauaa

SEQ ID NO: 2524220 - RNA, 19 nt, Homo sapiens
  misc_RNA (1)...(19): siRNA sense strand
cgucaagcaauaagcauga

SEQ ID NO: 2524221 - RNA, 19 nt, Homo sapiens
  misc_RNA (1)...(19): siRNA sense strand
ggguauuucaauuugggaa

SEQ ID NO: 2524222 - RNA, 19 nt, Homo sapiens
  misc_RNA (1)...(19): siRNA sense strand
gaaagauauacuaggagca

SEQ ID NO: 2524223 - RNA, 19 nt, Homo sapiens
  misc_RNA (1)...(19): siRNA sense strand
caauauucccaaccaguaa

SEQ ID NO: 2524224 - RNA, 19 nt, Homo sapiens
  misc_RNA (1)...(19): siRNA sense strand
gugaaugcuugguuguuau

SEQ ID NO: 2524225 - RNA, 19 nt, Homo sapiens
  misc_RNA (1)...(19): siRNA sense strand
ggauccaagcaaugugcaa

SEQ ID NO: 2524226 - RNA, 19 nt, Homo sapiens
  misc_RNA (1)...(19): siRNA sense strand
agaagagauugaacguauu

SEQ ID NO: 2524227 - RNA, 19 nt, Homo sapiens
  misc_RNA (1)...(19): siRNA sense strand
cuguuauaguaaugcaaga

SEQ ID NO: 2524228 - RNA, 19 nt, Homo sapiens
  misc_RNA (1)...(19): siRNA sense strand
gaagcagagauuuggauga

SEQ ID NO: 2524229 - RNA, 19 nt, Homo sapiens
  misc_RNA (1)...(19): siRNA sense strand
agucuaaauccaacaaaca

SEQ ID NO: 2524230 - RNA, 19 nt, Homo sapiens
  misc_RNA (1)...(19): siRNA sense strand
gcaugaggcccgacuucaa

SEQ ID NO: 2524231 - RNA, 19 nt, Homo sapiens
  misc_RNA (1)...(19): siRNA sense strand
aguuguuggaagagcagaa

SEQ ID NO: 2524232 - RNA, 19 nt, Homo sapiens
  misc_RNA (1)...(19): siRNA sense strand
aggugaauccagacaaaca

SEQ ID NO: 2524233 - RNA, 19 nt, Homo sapiens
  misc_RNA (1)...(19): siRNA sense strand
gcgcuuuguuuaauggcau

SEQ ID NO: 2524234 - RNA, 19 nt, Homo sapiens
  misc_RNA (1)...(19): siRNA sense strand
gacaacaagaguaguguga

SEQ ID NO: 2524235 - RNA, 19 nt, Homo sapiens
  misc_RNA (1)...(19): siRNA sense strand
aaauagaaccaaagaagcu

SEQ ID NO: 2524236 - RNA, 19 nt, Homo sapiens
  misc_RNA (1)...(19): siRNA sense strand
guuuauaucaaucuggcua

SEQ ID NO: 2524237 - RNA, 19 nt, Homo sapiens
  misc_RNA (1)...(19): siRNA sense strand
uaaccugauccgagcaaau

SEQ ID NO: 2524238 - RNA, 19 nt, Homo sapiens
  misc_RNA (1)...(19): siRNA sense strand
aauuagaggugaauccaga

SEQ ID NO: 2524239 - RNA, 19 nt, Homo sapiens
  misc_RNA (1)...(19): siRNA sense strand
ugcugugguuagugugaua

SEQ ID NO: 2524240 - RNA, 19 nt, Homo sapiens
  misc_RNA (1)...(19): siRNA sense strand
ggacaguuucuccguggaa

SEQ ID NO: 2524241 - RNA, 19 nt, Homo sapiens
  misc_RNA (1)...(19): siRNA sense strand
ucuuaaagcacuagagcug

SEQ ID NO: 2524242 - RNA, 19 nt, Homo sapiens
  misc_RNA (1)...(19): siRNA sense strand
agaaccaaaugaagcccua

SEQ ID NO: 2524243 - RNA, 19 nt, Homo sapiens
  misc_RNA (1)...(19): siRNA sense strand
gaauccagacaaacacaaa

SEQ ID NO: 2524244 - RNA, 19 nt, Homo sapiens
  misc_RNA (1)...(19): siRNA sense strand
agaacaaggaauaacaguu

SEQ ID NO: 2524245 - RNA, 19 nt, Homo sapiens
  misc_RNA (1)...(19): siRNA sense strand
uuaaagcaaaggaagcaua

SEQ ID NO: 2524246 - RNA, 19 nt, Homo sapiens
  misc_RNA (1)...(19): siRNA sense strand
cuagagcuggacagaaaua

SEQ ID NO: 2524247 - RNA, 19 nt, Homo sapiens
  misc_RNA (1)...(19): siRNA sense strand
gaucaaaaggaccagacaa

SEQ ID NO: 2524248 - RNA, 19 nt, Homo sapiens
  misc_RNA (1)...(19): siRNA sense strand
gggaagaacuguguggaca

SEQ ID NO: 2524249 - RNA, 19 nt, Homo sapiens
  misc_RNA (1)...(19): siRNA sense strand
gcgacugugaugagggauu

SEQ ID NO: 2524250 - RNA, 19 nt, Homo sapiens
  misc_RNA (1)...(19): siRNA sense strand
gguccagaauggugggugu

SEQ ID NO: 2524251 - RNA, 19 nt, Homo sapiens
  misc_RNA (1)...(19): siRNA sense strand
ccggcagccuuguggaaau

SEQ ID NO: 2524252 - RNA, 19 nt, Homo sapiens
  misc_RNA (1)...(19): siRNA sense strand
gcucacagcugaugggaag

SEQ ID NO: 2524253 - RNA, 19 nt, Homo sapiens
  misc_RNA (1)...(19): siRNA sense strand
gcuuccaggugcagaguga

SEQ ID NO: 2524254 - RNA, 19 nt, Homo sapiens
  misc_RNA (1)...(19): siRNA sense strand
gcgaguguaacgugggcua

SEQ ID NO: 2524255 - RNA, 19 nt, Homo sapiens
  misc_RNA (1)...(19): siRNA sense strand
gcuacgaaugcaagaucaa

SEQ ID NO: 2524256 - RNA, 19 nt, Homo sapiens
  misc_RNA (1)...(19): siRNA sense strand
gcuuugagugcgaguguuu

SEQ ID NO: 2524257 - RNA, 19 nt, Homo sapiens
  misc_RNA (1)...(19): siRNA sense strand
gggcaagggacaugcacca

SEQ ID NO: 2524258 - RNA, 19 nt, Homo sapiens
  misc_RNA (1)...(19): siRNA sense strand
gaguguggcagcagggaga

SEQ ID NO: 2524259 - RNA, 19 nt, Homo sapiens
  misc_RNA (1)...(19): siRNA sense strand
gcaagaacuguguggacca

SEQ ID NO: 2524260 - RNA, 19 nt, Homo sapiens
  misc_RNA (1)...(19): siRNA sense strand
cgucaacacugcugggucu

SEQ ID NO: 2524261 - RNA, 19 nt, Homo sapiens
  misc_RNA (1)...(19): siRNA sense strand
cccgagaagacgugaauga

SEQ ID NO: 2524262 - RNA, 19 nt, Homo sapiens
  misc_RNA (1)...(19): siRNA sense strand
cagcagugggcuuggcauu

SEQ ID NO: 2524263 - RNA, 19 nt, Homo sapiens
  misc_RNA (1)...(19): siRNA sense strand
cugcaaugguggcuacgaa

SEQ ID NO: 2524264 - RNA, 19 nt, Homo sapiens
  misc_RNA (1)...(19): siRNA sense strand
gugaaugaaugcaaggugu

SEQ ID NO: 2524265 - RNA, 19 nt, Homo sapiens
  misc_RNA (1)...(19): siRNA sense strand
ggcaugagcugacggccaa

SEQ ID NO: 2524266 - RNA, 19 nt, Homo sapiens
  misc_RNA (1)...(19): siRNA sense strand
cugugaggauauugacgaa

SEQ ID NO: 2524267 - RNA, 19 nt, Homo sapiens
  misc_RNA (1)...(19): siRNA sense strand
gauaugaggaagagugucu

SEQ ID NO: 2524268 - RNA, 19 nt, Homo sapiens
  misc_RNA (1)...(19): siRNA sense strand
gggcaagggcacugugucu

SEQ ID NO: 2524269 - RNA, 19 nt, Homo sapiens
  misc_RNA (1)...(19): siRNA sense strand
cagaagggcuacacaggca

SEQ ID NO: 2524270 - RNA, 19 nt, Homo sapiens
  misc_RNA (1)...(19): siRNA sense strand
gcaagaaccucaucgguac

SEQ ID NO: 2524271 - RNA, 19 nt, Homo sapiens
  misc_RNA (1)...(19): siRNA sense strand
cugcaaagaccuggacgaa

SEQ ID NO: 2524272 - RNA, 19 nt, Homo sapiens
  misc_RNA (1)...(19): siRNA sense strand
gugaaugugagaugggcuu

SEQ ID NO: 2524273 - RNA, 19 nt, Homo sapiens
  misc_RNA (1)...(19): siRNA sense strand
gcaucaacggcgugugcau

SEQ ID NO: 2524274 - RNA, 19 nt, Homo sapiens
  misc_RNA (1)...(19): siRNA sense strand
ggaagugcucggugcccaa

SEQ ID NO: 2524275 - RNA, 19 nt, Homo sapiens
  misc_RNA (1)...(19): siRNA sense strand
cggcgagugcauugaugua

SEQ ID NO: 2524276 - RNA, 19 nt, Homo sapiens
  misc_RNA (1)...(19): siRNA sense strand
gcacagacguggaugagug

SEQ ID NO: 2524277 - RNA, 19 nt, Homo sapiens
  misc_RNA (1)...(19): siRNA sense strand
gcagaaacacggugggcag

SEQ ID NO: 2524278 - RNA, 19 nt, Homo sapiens
  misc_RNA (1)...(19): siRNA sense strand
acgccagacaugaggacau

SEQ ID NO: 2524279 - RNA, 19 nt, Homo sapiens
  misc_RNA (1)...(19): siRNA sense strand
gcauuugggagcugugaga

SEQ ID NO: 2524280 - RNA, 19 nt, Homo sapiens
  misc_RNA (1)...(19): siRNA sense strand
ccgaggugcugcagaccau

SEQ ID NO: 2524281 - RNA, 19 nt, Homo sapiens
  misc_RNA (1)...(19): siRNA sense strand
ccgcaggcuucaacuacaa

SEQ ID NO: 2524282 - RNA, 19 nt, Homo sapiens
  misc_RNA (1)...(19): siRNA sense strand
ccugcuggcuugugaagau

SEQ ID NO: 2524283 - RNA, 19 nt, Homo sapiens
  misc_RNA (1)...(19): siRNA sense strand
aggccauggcugugaagau

SEQ ID NO: 2524284 - RNA, 19 nt, Homo sapiens
  misc_RNA (1)...(19): siRNA sense strand
ccgcugaguuccaggcacu

SEQ ID NO: 2524285 - RNA, 19 nt, Homo sapiens
  misc_RNA (1)...(19): siRNA sense strand
gggaugaaugugccgagaa

SEQ ID NO: 2524286 - RNA, 19 nt, Homo sapiens
  misc_RNA (1)...(19): siRNA sense strand
gggcaaucccugugagcug

SEQ ID NO: 2524287 - RNA, 19 nt, Homo sapiens
  misc_RNA (1)...(19): siRNA sense strand
cagacguggacgaguguga

SEQ ID NO: 2524288 - RNA, 19 nt, Homo sapiens
  misc_RNA (1)...(19): siRNA sense strand
gggccuuccaugugaacuu

SEQ ID NO: 2524289 - RNA, 19 nt, Homo sapiens
  misc_RNA (1)...(19): siRNA sense strand
uggacgagugugaagagaa

SEQ ID NO: 2524290 - RNA, 19 nt, Homo sapiens
  misc_RNA (1)...(19): siRNA sense strand
gagaguggcuucaugcuga

SEQ ID NO: 2524291 - RNA, 19 nt, Homo sapiens
  misc_RNA (1)...(19): siRNA sense strand
gcaacugcacagacaucaa

SEQ ID NO: 2524292 - RNA, 19 nt, Homo sapiens
  misc_RNA (1)...(19): siRNA sense strand
gcuacaacacccuggggaa

SEQ ID NO: 2524293 - RNA, 19 nt, Homo sapiens
  misc_RNA (1)...(19): siRNA sense strand
gcuaccugcuggaggagga

SEQ ID NO: 2524294 - RNA, 19 nt, Homo sapiens
  misc_RNA (1)...(19): siRNA sense strand
gggcccaguguguggauga

SEQ ID NO: 2524295 - RNA, 19 nt, Homo sapiens
  misc_RNA (1)...(19): siRNA sense strand
gcacagauaucgacgagug

SEQ ID NO: 2524296 - RNA, 19 nt, Homo sapiens
  misc_RNA (1)...(19): siRNA sense strand
gcgucaacauggugggcuc

SEQ ID NO: 2524297 - RNA, 19 nt, Homo sapiens
  misc_RNA (1)...(19): siRNA sense strand
cagcugggcuacaugguca

SEQ ID NO: 2524298 - RNA, 19 nt, Homo sapiens
  misc_RNA (1)...(19): siRNA sense strand
ccagauccuguguggaaau

SEQ ID NO: 2524299 - RNA, 19 nt, Homo sapiens
  misc_RNA (1)...(19): siRNA sense strand
cgagaagacgugaaugagu

SEQ ID NO: 2524300 - RNA, 19 nt, Homo sapiens
  misc_RNA (1)...(19): siRNA sense strand
gugaaugccaccaaggcuu

SEQ ID NO: 2524301 - RNA, 19 nt, Homo sapiens
  misc_RNA (1)...(19): siRNA sense strand
aguguguggaugagaauga

SEQ ID NO: 2524302 - RNA, 19 nt, Homo sapiens
  misc_RNA (1)...(19): siRNA sense strand
cagugugagcuguaugaau

SEQ ID NO: 2524303 - RNA, 19 nt, Homo sapiens
  misc_RNA (1)...(19): siRNA sense strand
cuauaacggcacaugucaa

SEQ ID NO: 2524304 - RNA, 19 nt, Homo sapiens
  misc_RNA (1)...(19): siRNA sense strand
ggagaaaagaagagaggaa

SEQ ID NO: 2524305 - RNA, 19 nt, Homo sapiens
  misc_RNA (1)...(19): siRNA sense strand
agacagagcccguggccaa

SEQ ID NO: 2524306 - RNA, 19 nt, Homo sapiens
  misc_RNA (1)...(19): siRNA sense strand
aggaauuacuggagagacu

SEQ ID NO: 2524307 - RNA, 19 nt, Homo sapiens
  misc_RNA (1)...(19): siRNA sense strand
agaaaagaagagaggaaaa

SEQ ID NO: 2524308 - RNA, 19 nt, Homo sapiens
  misc_RNA (1)...(19): siRNA sense strand
cgaaaugaauauagccuga

SEQ ID NO: 2524309 - RNA, 19 nt, Homo sapiens
  misc_RNA (1)...(19): siRNA sense strand
guaagaagguggagcguag

SEQ ID NO: 2524310 - RNA, 19 nt, Homo sapiens
  misc_RNA (1)...(19): siRNA sense strand
gugcgaaacacaaaggcaa

SEQ ID NO: 2524311 - RNA, 19 nt, Homo sapiens
  misc_RNA (1)...(19): siRNA sense strand
cacuaaagcgacagaggaa

SEQ ID NO: 2524312 - RNA, 19 nt, Homo sapiens
  misc_RNA (1)...(19): siRNA sense strand
cgacacaaauguaagcaga

SEQ ID NO: 2524313 - RNA, 19 nt, Homo sapiens
  misc_RNA (1)...(19): siRNA sense strand
gcaaauagucaguaugcca

SEQ ID NO: 2524314 - RNA, 19 nt, Homo sapiens
  misc_RNA (1)...(19): siRNA sense strand
gugaggaggaggaagaaaa

SEQ ID NO: 2524315 - RNA, 19 nt, Homo sapiens
  misc_RNA (1)...(19): siRNA sense strand
uuaaagaagagaaaggaca

SEQ ID NO: 2524316 - RNA, 19 nt, Homo sapiens
  misc_RNA (1)...(19): siRNA sense strand
gugagguagaugagaguga

SEQ ID NO: 2524317 - RNA, 19 nt, Homo sapiens
  misc_RNA (1)...(19): siRNA sense strand
uggaacaacaggaggcaga

SEQ ID NO: 2524318 - RNA, 19 nt, Homo sapiens
  misc_RNA (1)...(19): siRNA sense strand
ucgaagauggugagguaga

SEQ ID NO: 2524319 - RNA, 19 nt, Homo sapiens
  misc_RNA (1)...(19): siRNA sense strand
aagagaaaggacagugcua

SEQ ID NO: 2524320 - RNA, 19 nt, Homo sapiens
  misc_RNA (1)...(19): siRNA sense strand
ucgacaaagcccuggaaca

SEQ ID NO: 2524321 - RNA, 19 nt, Homo sapiens
  misc_RNA (1)...(19): siRNA sense strand
gagaaggaauuacuggaga

SEQ ID NO: 2524322 - RNA, 19 nt, Homo sapiens
  misc_RNA (1)...(19): siRNA sense strand
gguuauagaacgagcggcu

SEQ ID NO: 2524323 - RNA, 19 nt, Homo sapiens
  misc_RNA (1)...(19): siRNA sense strand
aaauagaauacgagcagga

SEQ ID NO: 2524324 - RNA, 19 nt, Homo sapiens
  misc_RNA (1)...(19): siRNA sense strand
cauucaugccuucgacaaa

SEQ ID NO: 2524325 - RNA, 19 nt, Homo sapiens
  misc_RNA (1)...(19): siRNA sense strand
augaugaugaugaggaaga

SEQ ID NO: 2524326 - RNA, 19 nt, Homo sapiens
  misc_RNA (1)...(19): siRNA sense strand
ccuuagugcgaaacacaaa

SEQ ID NO: 2524327 - RNA, 19 nt, Homo sapiens
  misc_RNA (1)...(19): siRNA sense strand
ggaaauagaauacgagcag

SEQ ID NO: 2524328 - RNA, 19 nt, Homo sapiens
  misc_RNA (1)...(19): siRNA sense strand
ggagcaaauagaugaaaau

SEQ ID NO: 2524329 - RNA, 19 nt, Homo sapiens
  misc_RNA (1)...(19): siRNA sense strand
ugcgaaacacaaaggcaaa

SEQ ID NO: 2524330 - RNA, 19 nt, Homo sapiens
  misc_RNA (1)...(19): siRNA sense strand
ccacuauuaaagaagagaa

SEQ ID NO: 2524331 - RNA, 19 nt, Homo sapiens
  misc_RNA (1)...(19): siRNA sense strand
aacaggaggcagagaguga

SEQ ID NO: 2524332 - RNA, 19 nt, Homo sapiens
  misc_RNA (1)...(19): siRNA sense strand
caagauacguauggcgaca

SEQ ID NO: 2524333 - RNA, 19 nt, Homo sapiens
  misc_RNA (1)...(19): siRNA sense strand
ugaagaucaggaugguaaa

SEQ ID NO: 2524334 - RNA, 19 nt, Homo sapiens
  misc_RNA (1)...(19): siRNA sense strand
gagcguagggagaaaagaa

SEQ ID NO: 2524335 - RNA, 19 nt, Homo sapiens
  misc_RNA (1)...(19): siRNA sense strand
uggagcaaauagaugaaaa

SEQ ID NO: 2524336 - RNA, 19 nt, Homo sapiens
  misc_RNA (1)...(19): siRNA sense strand
ugaggaagauguggggaaa

SEQ ID NO: 2524337 - RNA, 19 nt, Homo sapiens
  misc_RNA (1)...(19): siRNA sense strand
cuaaagcgacagaggaaac

SEQ ID NO: 2524338 - RNA, 19 nt, Homo sapiens
  misc_RNA (1)...(19): siRNA sense strand
gaauauagccugacuggac

SEQ ID NO: 2524339 - RNA, 19 nt, Homo sapiens
  misc_RNA (1)...(19): siRNA sense strand
ggaugauguuaucugggau

SEQ ID NO: 2524340 - RNA, 19 nt, Homo sapiens
  misc_RNA (1)...(19): siRNA sense strand
augaggaagauguggggaa

SEQ ID NO: 2524341 - RNA, 19 nt, Homo sapiens
  misc_RNA (1)...(19): siRNA sense strand
gcauuaaagaagaagguga

SEQ ID NO: 2524342 - RNA, 19 nt, Homo sapiens
  misc_RNA (1)...(19): siRNA sense strand
aggucauaacccagagaua

SEQ ID NO: 2524343 - RNA, 19 nt, Homo sapiens
  misc_RNA (1)...(19): siRNA sense strand
uagagauucuggagggaga

SEQ ID NO: 2524344 - RNA, 19 nt, Homo sapiens
  misc_RNA (1)...(19): siRNA sense strand
cuaugaaagaagacaucaa

SEQ ID NO: 2524345 - RNA, 19 nt, Homo sapiens
  misc_RNA (1)...(19): siRNA sense strand
acaucaaggcauuaaagaa

SEQ ID NO: 2524346 - RNA, 19 nt, Homo sapiens
  misc_RNA (1)...(19): siRNA sense strand
agaagaaguaacucgacua

SEQ ID NO: 2524347 - RNA, 19 nt, Homo sapiens
  misc_RNA (1)...(19): siRNA sense strand
gggagaaagggguaaagaa

SEQ ID NO: 2524348 - RNA, 19 nt, Homo sapiens
  misc_RNA (1)...(19): siRNA sense strand
agauggagguccuggaaac

SEQ ID NO: 2524349 - RNA, 19 nt, Homo sapiens
  misc_RNA (1)...(19): siRNA sense strand
gagaaagggguaaagaaau

SEQ ID NO: 2524350 - RNA, 19 nt, Homo sapiens
  misc_RNA (1)...(19): siRNA sense strand
ugcacaacgacuaaagaua

SEQ ID NO: 2524351 - RNA, 19 nt, Homo sapiens
  misc_RNA (1)...(19): siRNA sense strand
gguaaagaaaucacagaac

SEQ ID NO: 2524352 - RNA, 19 nt, Homo sapiens
  misc_RNA (1)...(19): siRNA sense strand
ccucuacagacauggaaau

SEQ ID NO: 2524353 - RNA, 19 nt, Homo sapiens
  misc_RNA (1)...(19): siRNA sense strand
ccagcaacucugaagaaca

SEQ ID NO: 2524354 - RNA, 19 nt, Homo sapiens
  misc_RNA (1)...(19): siRNA sense strand
augauaguuaugacggaaa

SEQ ID NO: 2524355 - RNA, 19 nt, Homo sapiens
  misc_RNA (1)...(19): siRNA sense strand
cuucacaccaaaaggguaa

SEQ ID NO: 2524356 - RNA, 19 nt, Homo sapiens
  misc_RNA (1)...(19): siRNA sense strand
aagaagaaggugacagaac

SEQ ID NO: 2524357 - RNA, 19 nt, Homo sapiens
  misc_RNA (1)...(19): siRNA sense strand
agaaagggguaaagaaauc

SEQ ID NO: 2524358 - RNA, 19 nt, Homo sapiens
  misc_RNA (1)...(19): siRNA sense strand
ucaacaauauuuacggcuu

SEQ ID NO: 2524359 - RNA, 19 nt, Homo sapiens
  misc_RNA (1)...(19): siRNA sense strand
aguacauggaucaagcuaa

SEQ ID NO: 2524360 - RNA, 19 nt, Homo sapiens
  misc_RNA (1)...(19): siRNA sense strand
gaugauaguuaugacggaa

SEQ ID NO: 2524361 - RNA, 19 nt, Homo sapiens
  misc_RNA (1)...(19): siRNA sense strand
ugauaguuaugacggaaaa

SEQ ID NO: 2524362 - RNA, 19 nt, Homo sapiens
  misc_RNA (1)...(19): siRNA sense strand
gaaagaagacaucaaggca

SEQ ID NO: 2524363 - RNA, 19 nt, Homo sapiens
  misc_RNA (1)...(19): siRNA sense strand
gcaccaagauucaacugga

SEQ ID NO: 2524364 - RNA, 19 nt, Homo sapiens
  misc_RNA (1)...(19): siRNA sense strand
aggaaaagacugacuugua

SEQ ID NO: 2524365 - RNA, 19 nt, Homo sapiens
  misc_RNA (1)...(19): siRNA sense strand
aaagaagacaucaaggcau

SEQ ID NO: 2524366 - RNA, 19 nt, Homo sapiens
  misc_RNA (1)...(19): siRNA sense strand
ucaaaucucuccaagguca

SEQ ID NO: 2524367 - RNA, 19 nt, Homo sapiens
  misc_RNA (1)...(19): siRNA sense strand
gaggaaaggugaaggagcu

SEQ ID NO: 2524368 - RNA, 19 nt, Homo sapiens
  misc_RNA (1)...(19): siRNA sense strand
aagaaugagcacugugaau

SEQ ID NO: 2524369 - RNA, 19 nt, Homo sapiens
  misc_RNA (1)...(19): siRNA sense strand
cgacagagugacagcacga

SEQ ID NO: 2524370 - RNA, 19 nt, Homo sapiens
  misc_RNA (1)...(19): siRNA sense strand
gcuucuacggcgagggcuu

SEQ ID NO: 2524371 - RNA, 19 nt, Homo sapiens
  misc_RNA (1)...(19): siRNA sense strand
gagaacugugcgagaacga

SEQ ID NO: 2524372 - RNA, 19 nt, Homo sapiens
  misc_RNA (1)...(19): siRNA sense strand
ugacaugcuucuacggcga

SEQ ID NO: 2524373 - RNA, 19 nt, Homo sapiens
  misc_RNA (1)...(19): siRNA sense strand
gugaaggugcuccgggaca

SEQ ID NO: 2524374 - RNA, 19 nt, Homo sapiens
  misc_RNA (1)...(19): siRNA sense strand
acaaguaccagcugcguga

SEQ ID NO: 2524375 - RNA, 19 nt, Homo sapiens
  misc_RNA (1)...(19): siRNA sense strand
acccauaagaugaacguca

SEQ ID NO: 2524376 - RNA, 19 nt, Homo sapiens
  misc_RNA (1)...(19): siRNA sense strand
gugagaaugacuucagcau

SEQ ID NO: 2524377 - RNA, 19 nt, Homo sapiens
  misc_RNA (1)...(19): siRNA sense strand
agagagaaauuaaaggaga

SEQ ID NO: 2524378 - RNA, 19 nt, Homo sapiens
  misc_RNA (1)...(19): siRNA sense strand
ggauaaucuccaaacagaa

SEQ ID NO: 2524379 - RNA, 19 nt, Homo sapiens
  misc_RNA (1)...(19): siRNA sense strand
uugcaauagcccugaauau

SEQ ID NO: 2524380 - RNA, 19 nt, Homo sapiens
  misc_RNA (1)...(19): siRNA sense strand
cgauauacaaauguggaaa

SEQ ID NO: 2524381 - RNA, 19 nt, Homo sapiens
  misc_RNA (1)...(19): siRNA sense strand
cauugaagacuuagaccuu

SEQ ID NO: 2524382 - RNA, 19 nt, Homo sapiens
  misc_RNA (1)...(19): siRNA sense strand
ucaagagauauucaggaaa

SEQ ID NO: 2524383 - RNA, 19 nt, Homo sapiens
  misc_RNA (1)...(19): siRNA sense strand
aagucguucuauagggcaa

SEQ ID NO: 2524384 - RNA, 19 nt, Homo sapiens
  misc_RNA (1)...(19): siRNA sense strand
agaaagaacuucacagcag

SEQ ID NO: 2524385 - RNA, 19 nt, Homo sapiens
  misc_RNA (1)...(19): siRNA sense strand
uuacaguauaccugaagaa

SEQ ID NO: 2524386 - RNA, 19 nt, Homo sapiens
  misc_RNA (1)...(19): siRNA sense strand
gaaagaacuucacagcaga

SEQ ID NO: 2524387 - RNA, 19 nt, Homo sapiens
  misc_RNA (1)...(19): siRNA sense strand
uggaauuaugaaagacaga

SEQ ID NO: 2524388 - RNA, 19 nt, Homo sapiens
  misc_RNA (1)...(19): siRNA sense strand
cuauagaaugugaagggca

SEQ ID NO: 2524389 - RNA, 19 nt, Homo sapiens
  misc_RNA (1)...(19): siRNA sense strand
ggcaaugagaugguggaua

SEQ ID NO: 2524390 - RNA, 19 nt, Homo sapiens
  misc_RNA (1)...(19): siRNA sense strand
uuuggugcuucaagagaua

SEQ ID NO: 2524391 - RNA, 19 nt, Homo sapiens
  misc_RNA (1)...(19): siRNA sense strand
acgauauacaaauguggaa

SEQ ID NO: 2524392 - RNA, 19 nt, Homo sapiens
  misc_RNA (1)...(19): siRNA sense strand
uuacaacagaugagcccaa

SEQ ID NO: 2524393 - RNA, 19 nt, Homo sapiens
  misc_RNA (1)...(19): siRNA sense strand
acaguauaccugaagaaaa

SEQ ID NO: 2524394 - RNA, 19 nt, Homo sapiens
  misc_RNA (1)...(19): siRNA sense strand
guuugacacugauggcaau

SEQ ID NO: 2524395 - RNA, 19 nt, Homo sapiens
  misc_RNA (1)...(19): siRNA sense strand
ccaucagugaagaagauuu

SEQ ID NO: 2524396 - RNA, 19 nt, Homo sapiens
  misc_RNA (1)...(19): siRNA sense strand
ggaauuaaaucaaaugcuc

SEQ ID NO: 2524397 - RNA, 19 nt, Homo sapiens
  misc_RNA (1)...(19): siRNA sense strand
uguuugacacugauggcaa

SEQ ID NO: 2524398 - RNA, 19 nt, Homo sapiens
  misc_RNA (1)...(19): siRNA sense strand
cuuugcaagucguucuaua

SEQ ID NO: 2524399 - RNA, 19 nt, Homo sapiens
  misc_RNA (1)...(19): siRNA sense strand
gaauuaugaaagacagacu

SEQ ID NO: 2524400 - RNA, 19 nt, Homo sapiens
  misc_RNA (1)...(19): siRNA sense strand
gacuaaaggucuuggagau

SEQ ID NO: 2524401 - RNA, 19 nt, Homo sapiens
  misc_RNA (1)...(19): siRNA sense strand
ccgaguuuguccagggcaa

SEQ ID NO: 2524402 - RNA, 19 nt, Homo sapiens
  misc_RNA (1)...(19): siRNA sense strand
cgacuaaaggucuuggaga

SEQ ID NO: 2524403 - RNA, 19 nt, Homo sapiens
  misc_RNA (1)...(19): siRNA sense strand
acgcccagguacaggacaa

SEQ ID NO: 2524404 - RNA, 19 nt, Homo sapiens
  misc_RNA (1)...(19): siRNA sense strand
ucguuauccuacuggacua

SEQ ID NO: 2524405 - RNA, 19 nt, Homo sapiens
  misc_RNA (1)...(19): siRNA sense strand
uggacaucagcgagaacaa

SEQ ID NO: 2524406 - RNA, 19 nt, Homo sapiens
  misc_RNA (1)...(19): siRNA sense strand
agcgagaacaagaucguua

SEQ ID NO: 2524407 - RNA, 19 nt, Homo sapiens
  misc_RNA (1)...(19): siRNA sense strand
ggcaaggaguucaaggacu

SEQ ID NO: 2524408 - RNA, 19 nt, Homo sapiens
  misc_RNA (1)...(19): siRNA sense strand
gcgacaaugaccucgucua

SEQ ID NO: 2524409 - RNA, 19 nt, Homo sapiens
  misc_RNA (1)...(19): siRNA sense strand
cugaugugcuacugcccaa

SEQ ID NO: 2524410 - RNA, 19 nt, Homo sapiens
  misc_RNA (1)...(19): siRNA sense strand
ccgcaagcgcuuuguggca

SEQ ID NO: 2524411 - RNA, 19 nt, Homo sapiens
  misc_RNA (1)...(19): siRNA sense strand
gcucaaugucucuggcaac

SEQ ID NO: 2524412 - RNA, 19 nt, Homo sapiens
  misc_RNA (1)...(19): siRNA sense strand
agggcaacacaaagcacaa

SEQ ID NO: 2524413 - RNA, 19 nt, Homo sapiens
  misc_RNA (1)...(19): siRNA sense strand
aggauaaagaagagaagaa

SEQ ID NO: 2524414 - RNA, 19 nt, Homo sapiens
  misc_RNA (1)...(19): siRNA sense strand
gggaugaggaagaggcaga

SEQ ID NO: 2524415 - RNA, 19 nt, Homo sapiens
  misc_RNA (1)...(19): siRNA sense strand
aguuaagugaggugaacaa

SEQ ID NO: 2524416 - RNA, 19 nt, Homo sapiens
  misc_RNA (1)...(19): siRNA sense strand
cggacgagguugaggugga

SEQ ID NO: 2524417 - RNA, 19 nt, Homo sapiens
  misc_RNA (1)...(19): siRNA sense strand
ccgacagcgaugaggaaau

SEQ ID NO: 2524418 - RNA, 19 nt, Homo sapiens
  misc_RNA (1)...(19): siRNA sense strand
ggacaaagcuuucaggcag

SEQ ID NO: 2524419 - RNA, 19 nt, Homo sapiens
  misc_RNA (1)...(19): siRNA sense strand
gggugcagggaaaggagaa

SEQ ID NO: 2524420 - RNA, 19 nt, Homo sapiens
  misc_RNA (1)...(19): siRNA sense strand
agaaguuaagugaggugaa

SEQ ID NO: 2524421 - RNA, 19 nt, Homo sapiens
  misc_RNA (1)...(19): siRNA sense strand
gggacaaagcuuucaggca

SEQ ID NO: 2524422 - RNA, 19 nt, Homo sapiens
  misc_RNA (1)...(19): siRNA sense strand
accucagggucaagagcaa

SEQ ID NO: 2524423 - RNA, 19 nt, Homo sapiens
  misc_RNA (1)...(19): siRNA sense strand
agcugaggacuaaggauaa

SEQ ID NO: 2524424 - RNA, 19 nt, Homo sapiens
  misc_RNA (1)...(19): siRNA sense strand
gucaagagcaacagggcca

SEQ ID NO: 2524425 - RNA, 19 nt, Homo sapiens
  misc_RNA (1)...(19): siRNA sense strand
acguagugucuguggacuu

SEQ ID NO: 2524426 - RNA, 19 nt, Homo sapiens
  misc_RNA (1)...(19): siRNA sense strand
ggugcagggaaaggagaaa

SEQ ID NO: 2524427 - RNA, 19 nt, Homo sapiens
  misc_RNA (1)...(19): siRNA sense strand
aggagaaacaccagacacu

SEQ ID NO: 2524428 - RNA, 19 nt, Homo sapiens
  misc_RNA (1)...(19): siRNA sense strand
augaaguggucuuggugga

SEQ ID NO: 2524429 - RNA, 19 nt, Homo sapiens
  misc_RNA (1)...(19): siRNA sense strand
cagcaacagugacagcgaa

SEQ ID NO: 2524430 - RNA, 19 nt, Homo sapiens
  misc_RNA (1)...(19): siRNA sense strand
guguaaugagugugggaaa

SEQ ID NO: 2524431 - RNA, 19 nt, Homo sapiens
  misc_RNA (1)...(19): siRNA sense strand
guguaaugagugugggaaa

SEQ ID NO: 2524432 - RNA, 19 nt, Homo sapiens
  misc_RNA (1)...(19): siRNA sense strand
aauucauacuggugagaaa

SEQ ID NO: 2524433 - RNA, 19 nt, Homo sapiens
  misc_RNA (1)...(19): siRNA sense strand
acgucauguuggagaauua

SEQ ID NO: 2524434 - RNA, 19 nt, Homo sapiens
  misc_RNA (1)...(19): siRNA sense strand
cggugaaguuggagagacu

SEQ ID NO: 2524435 - RNA, 19 nt, Homo sapiens
  misc_RNA (1)...(19): siRNA sense strand
ggaagaacaauaugggaga

SEQ ID NO: 2524436 - RNA, 19 nt, Homo sapiens
  misc_RNA (1)...(19): siRNA sense strand
guguaauaaguguggcaaa

SEQ ID NO: 2524437 - RNA, 19 nt, Homo sapiens
  misc_RNA (1)...(19): siRNA sense strand
guguaaugaguguggcaaa

SEQ ID NO: 2524438 - RNA, 19 nt, Homo sapiens
  misc_RNA (1)...(19): siRNA sense strand
guguaaugaguguggcaaa

SEQ ID NO: 2524439 - RNA, 19 nt, Homo sapiens
  misc_RNA (1)...(19): siRNA sense strand
guguaaugaguguggcaaa

SEQ ID NO: 2524440 - RNA, 19 nt, Homo sapiens
  misc_RNA (1)...(19): siRNA sense strand
agucaaaacucacggcuaa

SEQ ID NO: 2524441 - RNA, 19 nt, Homo sapiens
  misc_RNA (1)...(19): siRNA sense strand
gugugaugaaugugguaaa

SEQ ID NO: 2524442 - RNA, 19 nt, Homo sapiens
  misc_RNA (1)...(19): siRNA sense strand
cuaacaagucauaagagaa

SEQ ID NO: 2524443 - RNA, 19 nt, Homo sapiens
  misc_RNA (1)...(19): siRNA sense strand
ccuuauaaguguaaugagu

SEQ ID NO: 2524444 - RNA, 19 nt, Homo sapiens
  misc_RNA (1)...(19): siRNA sense strand
guguaaugagugcggcaaa

SEQ ID NO: 2524445 - RNA, 19 nt, Homo sapiens
  misc_RNA (1)...(19): siRNA sense strand
gggacgucauguuggagaa

SEQ ID NO: 2524446 - RNA, 19 nt, Homo sapiens
  misc_RNA (1)...(19): siRNA sense strand
ccaaaggggaagaacaaua

SEQ ID NO: 2524447 - RNA, 19 nt, Homo sapiens
  misc_RNA (1)...(19): siRNA sense strand
ggcaauucauacuggagaa

SEQ ID NO: 2524448 - RNA, 19 nt, Homo sapiens
  misc_RNA (1)...(19): siRNA sense strand
auagaagggcugcaggaaa

SEQ ID NO: 2524449 - RNA, 19 nt, Homo sapiens
  misc_RNA (1)...(19): siRNA sense strand
ggagaaaagccuuacaaau

SEQ ID NO: 2524450 - RNA, 19 nt, Homo sapiens
  misc_RNA (1)...(19): siRNA sense strand
gcucagaagacuuuguaca

SEQ ID NO: 2524451 - RNA, 19 nt, Homo sapiens
  misc_RNA (1)...(19): siRNA sense strand
cuugcaaaucauagaagaa

SEQ ID NO: 2524452 - RNA, 19 nt, Homo sapiens
  misc_RNA (1)...(19): siRNA sense strand
gugugaugaguguggcaaa

SEQ ID NO: 2524453 - RNA, 19 nt, Homo sapiens
  misc_RNA (1)...(19): siRNA sense strand
agcaaaucaucgaagaauu

SEQ ID NO: 2524454 - RNA, 19 nt, Homo sapiens
  misc_RNA (1)...(19): siRNA sense strand
ugguaaagccuucagucaa

SEQ ID NO: 2524455 - RNA, 19 nt, Homo sapiens
  misc_RNA (1)...(19): siRNA sense strand
cgaagaauucauaguggau

SEQ ID NO: 2524456 - RNA, 19 nt, Homo sapiens
  misc_RNA (1)...(19): siRNA sense strand
cuaacuacccauauggcaa

SEQ ID NO: 2524457 - RNA, 19 nt, Homo sapiens
  misc_RNA (1)...(19): siRNA sense strand
gaguaagcuuucagucaca

SEQ ID NO: 2524458 - RNA, 19 nt, Homo sapiens
  misc_RNA (1)...(19): siRNA sense strand
caccaaaggggaagaacaa

SEQ ID NO: 2524459 - RNA, 19 nt, Homo sapiens
  misc_RNA (1)...(19): siRNA sense strand
gugggaaagccuucaguau

SEQ ID NO: 2524460 - RNA, 19 nt, Homo sapiens
  misc_RNA (1)...(19): siRNA sense strand
aagaauucacacuggagaa

SEQ ID NO: 2524461 - RNA, 19 nt, Homo sapiens
  misc_RNA (1)...(19): siRNA sense strand
gcugcaggaaacaggcaua

SEQ ID NO: 2524462 - RNA, 19 nt, Homo sapiens
  misc_RNA (1)...(19): siRNA sense strand
cauucaaggauguggccau

SEQ ID NO: 2524463 - RNA, 19 nt, Homo sapiens
  misc_RNA (1)...(19): siRNA sense strand
ggcaaggucuucaggcaca

SEQ ID NO: 2524464 - RNA, 19 nt, Homo sapiens
  misc_RNA (1)...(19): siRNA sense strand
gcaauucauacuggagaaa

SEQ ID NO: 2524465 - RNA, 19 nt, Homo sapiens
  misc_RNA (1)...(19): siRNA sense strand
cgguaaggucuucacacaa

SEQ ID NO: 2524466 - RNA, 19 nt, Homo sapiens
  misc_RNA (1)...(19): siRNA sense strand
guagaagagcucaacguga

SEQ ID NO: 2524467 - RNA, 19 nt, Homo sapiens
  misc_RNA (1)...(19): siRNA sense strand
uggaguaagcuuucaguca

SEQ ID NO: 2524468 - RNA, 19 nt, Homo sapiens
  misc_RNA (1)...(19): siRNA sense strand
ugcaaaacaucgaagaauu

SEQ ID NO: 2524469 - RNA, 19 nt, Homo sapiens
  misc_RNA (1)...(19): siRNA sense strand
cguucuacacggugaaguu

SEQ ID NO: 2524470 - RNA, 19 nt, Homo sapiens
  misc_RNA (1)...(19): siRNA sense strand
agaagagcucaacgugaua

SEQ ID NO: 2524471 - RNA, 19 nt, Homo sapiens
  misc_RNA (1)...(19): siRNA sense strand
aauucauacuggagagaag

SEQ ID NO: 2524472 - RNA, 19 nt, Homo sapiens
  misc_RNA (1)...(19): siRNA sense strand
uugcaggucaucagagaau

SEQ ID NO: 2524473 - RNA, 19 nt, Homo sapiens
  misc_RNA (1)...(19): siRNA sense strand
gugguaaagccuucaguca

SEQ ID NO: 2524474 - RNA, 19 nt, Homo sapiens
  misc_RNA (1)...(19): siRNA sense strand
agacaauacauacuggaca

SEQ ID NO: 2524475 - RNA, 19 nt, Homo sapiens
  misc_RNA (1)...(19): siRNA sense strand
gggaagaacaauaugggag

SEQ ID NO: 2524476 - RNA, 19 nt, Homo sapiens
  misc_RNA (1)...(19): siRNA sense strand
ggagagacuugaaagcugu

SEQ ID NO: 2524477 - RNA, 19 nt, Homo sapiens
  misc_RNA (1)...(19): siRNA sense strand
ugcaagucaucgaagaauu

SEQ ID NO: 2524478 - RNA, 19 nt, Homo sapiens
  misc_RNA (1)...(19): siRNA sense strand
aagaauucauaguggauag

SEQ ID NO: 2524479 - RNA, 19 nt, Homo sapiens
  misc_RNA (1)...(19): siRNA sense strand
ucucaggaggaguggacau

SEQ ID NO: 2524480 - RNA, 19 nt, Homo sapiens
  misc_RNA (1)...(19): siRNA sense strand
uggaaaggucuucagucaa

SEQ ID NO: 2524481 - RNA, 19 nt, Homo sapiens
  misc_RNA (1)...(19): siRNA sense strand
ccauaaacaaacagaaaga

SEQ ID NO: 2524482 - RNA, 19 nt, Homo sapiens
  misc_RNA (1)...(19): siRNA sense strand
cuacaacaaauaugggaaa

SEQ ID NO: 2524483 - RNA, 19 nt, Homo sapiens
  misc_RNA (1)...(19): siRNA sense strand
gggaugugauguuggaaaa

SEQ ID NO: 2524484 - RNA, 19 nt, Homo sapiens
  misc_RNA (1)...(19): siRNA sense strand
ccucauuguccaucagaaa

SEQ ID NO: 2524485 - RNA, 19 nt, Homo sapiens
  misc_RNA (1)...(19): siRNA sense strand
ccucauucgccaucagaaa

SEQ ID NO: 2524486 - RNA, 19 nt, Homo sapiens
  misc_RNA (1)...(19): siRNA sense strand
cuccauaaacaaacagaaa

SEQ ID NO: 2524487 - RNA, 19 nt, Homo sapiens
  misc_RNA (1)...(19): siRNA sense strand
agguagaaaccacgggaau

SEQ ID NO: 2524488 - RNA, 19 nt, Homo sapiens
  misc_RNA (1)...(19): siRNA sense strand
accucaaacagaagagaaa

SEQ ID NO: 2524489 - RNA, 19 nt, Homo sapiens
  misc_RNA (1)...(19): siRNA sense strand
cuauggacacagagaauuu

SEQ ID NO: 2524490 - RNA, 19 nt, Homo sapiens
  misc_RNA (1)...(19): siRNA sense strand
gcaaguuggaacaaggaga

SEQ ID NO: 2524491 - RNA, 19 nt, Homo sapiens
  misc_RNA (1)...(19): siRNA sense strand
auaccaagcaugagaaaau

SEQ ID NO: 2524492 - RNA, 19 nt, Homo sapiens
  misc_RNA (1)...(19): siRNA sense strand
gugguaaacaggagcuuau

SEQ ID NO: 2524493 - RNA, 19 nt, Homo sapiens
  misc_RNA (1)...(19): siRNA sense strand
agggaugugauguuggaaa

SEQ ID NO: 2524494 - RNA, 19 nt, Homo sapiens
  misc_RNA (1)...(19): siRNA sense strand
ucauugaacaucagcgaau

SEQ ID NO: 2524495 - RNA, 19 nt, Homo sapiens
  misc_RNA (1)...(19): siRNA sense strand
aaacacauauagaggggaa

SEQ ID NO: 2524496 - RNA, 19 nt, Homo sapiens
  misc_RNA (1)...(19): siRNA sense strand
aggaagaagucauaccuca

SEQ ID NO: 2524497 - RNA, 19 nt, Homo sapiens
  misc_RNA (1)...(19): siRNA sense strand
aagaguucucagugguaaa

SEQ ID NO: 2524498 - RNA, 19 nt, Homo sapiens
  misc_RNA (1)...(19): siRNA sense strand
ccucauugaucaccagaga

SEQ ID NO: 2524499 - RNA, 19 nt, Homo sapiens
  misc_RNA (1)...(19): siRNA sense strand
gaauguaaacaguguggga

SEQ ID NO: 2524500 - RNA, 19 nt, Homo sapiens
  misc_RNA (1)...(19): siRNA sense strand
ccuacaacaaauaugggaa

SEQ ID NO: 2524501 - RNA, 19 nt, Homo sapiens
  misc_RNA (1)...(19): siRNA sense strand
caguacuggaugggagaaa

SEQ ID NO: 2524502 - RNA, 19 nt, Homo sapiens
  misc_RNA (1)...(19): siRNA sense strand
caauaccaagcaugagaaa

SEQ ID NO: 2524503 - RNA, 19 nt, Homo sapiens
  misc_RNA (1)...(19): siRNA sense strand
ccuuuaggaagaagucaua

SEQ ID NO: 2524504 - RNA, 19 nt, Homo sapiens
  misc_RNA (1)...(19): siRNA sense strand
ggaagaagucauaccucau

SEQ ID NO: 2524505 - RNA, 19 nt, Homo sapiens
  misc_RNA (1)...(19): siRNA sense strand
aggagaagagcuauggaca

SEQ ID NO: 2524506 - RNA, 19 nt, Homo sapiens
  misc_RNA (1)...(19): siRNA sense strand
agcuauggacacagagaau

SEQ ID NO: 2524507 - RNA, 19 nt, Homo sapiens
  misc_RNA (1)...(19): siRNA sense strand
accuagaagaagaugggaa

SEQ ID NO: 2524508 - RNA, 19 nt, Homo sapiens
  misc_RNA (1)...(19): siRNA sense strand
ccugaugaaaggaaugcua

SEQ ID NO: 2524509 - RNA, 19 nt, Homo sapiens
  misc_RNA (1)...(19): siRNA sense strand
uguccuuacugugggaaua

SEQ ID NO: 2524510 - RNA, 19 nt, Homo sapiens
  misc_RNA (1)...(19): siRNA sense strand
gggaaggcauuuauccaga

SEQ ID NO: 2524511 - RNA, 19 nt, Homo sapiens
  misc_RNA (1)...(19): siRNA sense strand
aagaauaccaagacaggca

SEQ ID NO: 2524512 - RNA, 19 nt, Homo sapiens
  misc_RNA (1)...(19): siRNA sense strand
ggagaagagcuauggacac

SEQ ID NO: 2524513 - RNA, 19 nt, Homo sapiens
  misc_RNA (1)...(19): siRNA sense strand
agaaaccguaucaguguaa

SEQ ID NO: 2524514 - RNA, 19 nt, Homo sapiens
  misc_RNA (1)...(19): siRNA sense strand
ucauauucaucaaccacaa

SEQ ID NO: 2524515 - RNA, 19 nt, Homo sapiens
  misc_RNA (1)...(19): siRNA sense strand
aaacauuuacucuaggcaa

SEQ ID NO: 2524516 - RNA, 19 nt, Homo sapiens
  misc_RNA (1)...(19): siRNA sense strand
ugaugaaaggaaugcuauu

SEQ ID NO: 2524517 - RNA, 19 nt, Homo sapiens
  misc_RNA (1)...(19): siRNA sense strand
guggaagugccuuuaggaa

SEQ ID NO: 2524518 - RNA, 19 nt, Homo sapiens
  misc_RNA (1)...(19): siRNA sense strand
guguaaugagugugggaag

SEQ ID NO: 2524519 - RNA, 19 nt, Homo sapiens
  misc_RNA (1)...(19): siRNA sense strand
cccuauauuugcaaugaau

SEQ ID NO: 2524520 - RNA, 19 nt, Homo sapiens
  misc_RNA (1)...(19): siRNA sense strand
agucaaaccucauugucca

SEQ ID NO: 2524521 - RNA, 19 nt, Homo sapiens
  misc_RNA (1)...(19): siRNA sense strand
agagaaguuuggugacagu

SEQ ID NO: 2524522 - RNA, 19 nt, Homo sapiens
  misc_RNA (1)...(19): siRNA sense strand
gaauaacuuuagaaggaag

SEQ ID NO: 2524523 - RNA, 19 nt, Homo sapiens
  misc_RNA (1)...(19): siRNA sense strand
aggaugugacuguggacuu

SEQ ID NO: 2524524 - RNA, 19 nt, Homo sapiens
  misc_RNA (1)...(19): siRNA sense strand
aacucacacaggagagaaa

SEQ ID NO: 2524525 - RNA, 19 nt, Homo sapiens
  misc_RNA (1)...(19): siRNA sense strand
ccucacuguucaucagaga

SEQ ID NO: 2524526 - RNA, 19 nt, Homo sapiens
  misc_RNA (1)...(19): siRNA sense strand
aacucacacaggagagaaa

SEQ ID NO: 2524527 - RNA, 19 nt, Homo sapiens
  misc_RNA (1)...(19): siRNA sense strand
cauucaaggaugugacugu

SEQ ID NO: 2524528 - RNA, 19 nt, Homo sapiens
  misc_RNA (1)...(19): siRNA sense strand
cugcagugaaucuccauaa

SEQ ID NO: 2524529 - RNA, 19 nt, Homo sapiens
  misc_RNA (1)...(19): siRNA sense strand
ugaccauaaugaaugugaa

SEQ ID NO: 2524530 - RNA, 19 nt, Homo sapiens
  misc_RNA (1)...(19): siRNA sense strand
aaggaaugcuauuuacaca

SEQ ID NO: 2524531 - RNA, 19 nt, Homo sapiens
  misc_RNA (1)...(19): siRNA sense strand
acacaggcgagaaaccaua

SEQ ID NO: 2524532 - RNA, 19 nt, Homo sapiens
  misc_RNA (1)...(19): siRNA sense strand
gagcuauggacacagagaa

SEQ ID NO: 2524533 - RNA, 19 nt, Homo sapiens
  misc_RNA (1)...(19): siRNA sense strand
agaaggaagucauaccuca

SEQ ID NO: 2524534 - RNA, 19 nt, Homo sapiens
  misc_RNA (1)...(19): siRNA sense strand
ccucacuagacaucacaaa

SEQ ID NO: 2524535 - RNA, 19 nt, Homo sapiens
  misc_RNA (1)...(19): siRNA sense strand
aaucaaaccucauucgcca

SEQ ID NO: 2524536 - RNA, 19 nt, Homo sapiens
  misc_RNA (1)...(19): siRNA sense strand
aggcaaaagcaguuauuaa

SEQ ID NO: 2524537 - RNA, 19 nt, Homo sapiens
  misc_RNA (1)...(19): siRNA sense strand
augagauuacagugggaaa

SEQ ID NO: 2524538 - RNA, 19 nt, Homo sapiens
  misc_RNA (1)...(19): siRNA sense strand
gaacauggccgcaagacga

SEQ ID NO: 2524539 - RNA, 19 nt, Homo sapiens
  misc_RNA (1)...(19): siRNA sense strand
gcagaagaucacagagaag

SEQ ID NO: 2524540 - RNA, 19 nt, Homo sapiens
  misc_RNA (1)...(19): siRNA sense strand
gggaauacuguaaacccaa

SEQ ID NO: 2524541 - RNA, 19 nt, Homo sapiens
  misc_RNA (1)...(19): siRNA sense strand
acuucaaccaagagugauu

SEQ ID NO: 2524542 - RNA, 19 nt, Homo sapiens
  misc_RNA (1)...(19): siRNA sense strand
gcaugagauuacaguggga

SEQ ID NO: 2524543 - RNA, 19 nt, Homo sapiens
  misc_RNA (1)...(19): siRNA sense strand
aauggaaguauuacagcaa

SEQ ID NO: 2524544 - RNA, 19 nt, Homo sapiens
  misc_RNA (1)...(19): siRNA sense strand
gaagaaacuuacugagagg

SEQ ID NO: 2524545 - RNA, 19 nt, Homo sapiens
  misc_RNA (1)...(19): siRNA sense strand
gggucaggacuucaagauu

SEQ ID NO: 2524546 - RNA, 19 nt, Homo sapiens
  misc_RNA (1)...(19): siRNA sense strand
agaagaucacagagaagca

SEQ ID NO: 2524547 - RNA, 19 nt, Homo sapiens
  misc_RNA (1)...(19): siRNA sense strand
ugauaucaaaagacggaaa

SEQ ID NO: 2524548 - RNA, 19 nt, Homo sapiens
  misc_RNA (1)...(19): siRNA sense strand
uuaagaagcucaagcggaa

SEQ ID NO: 2524549 - RNA, 19 nt, Homo sapiens
  misc_RNA (1)...(19): siRNA sense strand
uggaagaccgugugcguga

SEQ ID NO: 2524550 - RNA, 19 nt, Homo sapiens
  misc_RNA (1)...(19): siRNA sense strand
gccaagaagcgcaaggagu

SEQ ID NO: 2524551 - RNA, 19 nt, Homo sapiens
  misc_RNA (1)...(19): siRNA sense strand
cgucaauuucacacguaau

SEQ ID NO: 2524552 - RNA, 19 nt, Homo sapiens
  misc_RNA (1)...(19): siRNA sense strand
ccuucgaggcgcucaggaa

SEQ ID NO: 2524553 - RNA, 19 nt, Homo sapiens
  misc_RNA (1)...(19): siRNA sense strand
gcgcaaugccugacgccau

SEQ ID NO: 2524554 - RNA, 19 nt, Homo sapiens
  misc_RNA (1)...(19): siRNA sense strand
gucaaagggugauggagga

SEQ ID NO: 2524555 - RNA, 19 nt, Homo sapiens
  misc_RNA (1)...(19): siRNA sense strand
ugauggaggaggaggggaa

SEQ ID NO: 2524556 - RNA, 19 nt, Homo sapiens
  misc_RNA (1)...(19): siRNA sense strand
gaagaacagaaaagaggaa

SEQ ID NO: 2524557 - RNA, 19 nt, Homo sapiens
  misc_RNA (1)...(19): siRNA sense strand
gauaguaguuccucaggga

SEQ ID NO: 2524558 - RNA, 19 nt, Homo sapiens
  misc_RNA (1)...(19): siRNA sense strand
gcacagaugaccacgccau

SEQ ID NO: 2524559 - RNA, 19 nt, Homo sapiens
  misc_RNA (1)...(19): siRNA sense strand
ccgacuacgacuggugaaa

SEQ ID NO: 2524560 - RNA, 19 nt, Homo sapiens
  misc_RNA (1)...(19): siRNA sense strand
acgacuggugaaacagaaa

SEQ ID NO: 2524561 - RNA, 19 nt, Homo sapiens
  misc_RNA (1)...(19): siRNA sense strand
gugacuccuugguggaaaa

SEQ ID NO: 2524562 - RNA, 19 nt, Homo sapiens
  misc_RNA (1)...(19): siRNA sense strand
ucccauuacaucugaggaa

SEQ ID NO: 2524563 - RNA, 19 nt, Homo sapiens
  misc_RNA (1)...(19): siRNA sense strand
uggaagauguaaaggcaaa

SEQ ID NO: 2524564 - RNA, 19 nt, Homo sapiens
  misc_RNA (1)...(19): siRNA sense strand
cagcaaaggcccuggaaga

SEQ ID NO: 2524565 - RNA, 19 nt, Homo sapiens
  misc_RNA (1)...(19): siRNA sense strand
gcucauaagcagagacuga

SEQ ID NO: 2524566 - RNA, 19 nt, Homo sapiens
  misc_RNA (1)...(19): siRNA sense strand
agaauagagaacagagaaa

SEQ ID NO: 2524567 - RNA, 19 nt, Homo sapiens
  misc_RNA (1)...(19): siRNA sense strand
gaauaauaguagugagaac

SEQ ID NO: 2524568 - RNA, 19 nt, Homo sapiens
  misc_RNA (1)...(19): siRNA sense strand
gguaagaagcccuuggaau

SEQ ID NO: 2524569 - RNA, 19 nt, Homo sapiens
  misc_RNA (1)...(19): siRNA sense strand
acacaaaggaagaccacaa

SEQ ID NO: 2524570 - RNA, 19 nt, Homo sapiens
  misc_RNA (1)...(19): siRNA sense strand
ccuuggaauugaagacuaa

SEQ ID NO: 2524571 - RNA, 19 nt, Homo sapiens
  misc_RNA (1)...(19): siRNA sense strand
aagcagagacugaaagaau

SEQ ID NO: 2524572 - RNA, 19 nt, Homo sapiens
  misc_RNA (1)...(19): siRNA sense strand
gaauuaaagcaacgggaau

SEQ ID NO: 2524573 - RNA, 19 nt, Homo sapiens
  misc_RNA (1)...(19): siRNA sense strand
gagaaagacaaaagcaaaa

SEQ ID NO: 2524574 - RNA, 19 nt, Homo sapiens
  misc_RNA (1)...(19): siRNA sense strand
gagccaaauaagagugaau

SEQ ID NO: 2524575 - RNA, 19 nt, Homo sapiens
  misc_RNA (1)...(19): siRNA sense strand
agguuuaacugaagaccaa

SEQ ID NO: 2524576 - RNA, 19 nt, Homo sapiens
  misc_RNA (1)...(19): siRNA sense strand
augucuagcuugagaagua

SEQ ID NO: 2524577 - RNA, 19 nt, Homo sapiens
  misc_RNA (1)...(19): siRNA sense strand
acagcuaaaugaagugaaa

SEQ ID NO: 2524578 - RNA, 19 nt, Homo sapiens
  misc_RNA (1)...(19): siRNA sense strand
ugguaauagcagagguaau

SEQ ID NO: 2524579 - RNA, 19 nt, Homo sapiens
  misc_RNA (1)...(19): siRNA sense strand
accaaagauacaagagaua

SEQ ID NO: 2524580 - RNA, 19 nt, Homo sapiens
  misc_RNA (1)...(19): siRNA sense strand
ccacagaaagagaggaacu

SEQ ID NO: 2524581 - RNA, 19 nt, Homo sapiens
  misc_RNA (1)...(19): siRNA sense strand
ggagaaagacaaaagcaaa

SEQ ID NO: 2524582 - RNA, 19 nt, Homo sapiens
  misc_RNA (1)...(19): siRNA sense strand
ggauuagaaaugugucaua

SEQ ID NO: 2524583 - RNA, 19 nt, Homo sapiens
  misc_RNA (1)...(19): siRNA sense strand
acuccuaccagcagagaaa

SEQ ID NO: 2524584 - RNA, 19 nt, Homo sapiens
  misc_RNA (1)...(19): siRNA sense strand
gcacaaacggaaaugucua

SEQ ID NO: 2524585 - RNA, 19 nt, Homo sapiens
  misc_RNA (1)...(19): siRNA sense strand
cagaaaugaucaagacagu

SEQ ID NO: 2524586 - RNA, 19 nt, Homo sapiens
  misc_RNA (1)...(19): siRNA sense strand
cccaagaagaccaaauaaa

SEQ ID NO: 2524587 - RNA, 19 nt, Homo sapiens
  misc_RNA (1)...(19): siRNA sense strand
aaacagaaagaguuagcaa

SEQ ID NO: 2524588 - RNA, 19 nt, Homo sapiens
  misc_RNA (1)...(19): siRNA sense strand
gggcuaaaaucuacgagaa

SEQ ID NO: 2524589 - RNA, 19 nt, Homo sapiens
  misc_RNA (1)...(19): siRNA sense strand
acagaaagaguuagcaaaa

SEQ ID NO: 2524590 - RNA, 19 nt, Homo sapiens
  misc_RNA (1)...(19): siRNA sense strand
auaacaaagagcagccaaa

SEQ ID NO: 2524591 - RNA, 19 nt, Homo sapiens
  misc_RNA (1)...(19): siRNA sense strand
uagaaagaguacaagccaa

SEQ ID NO: 2524592 - RNA, 19 nt, Homo sapiens
  misc_RNA (1)...(19): siRNA sense strand
uaagaauggcagaaaggua

SEQ ID NO: 2524593 - RNA, 19 nt, Homo sapiens
  misc_RNA (1)...(19): siRNA sense strand
gccaaauaagagugaauau

SEQ ID NO: 2524594 - RNA, 19 nt, Homo sapiens
  misc_RNA (1)...(19): siRNA sense strand
ugaaaggcacaaacggaaa

SEQ ID NO: 2524595 - RNA, 19 nt, Homo sapiens
  misc_RNA (1)...(19): siRNA sense strand
ugaucaagacagugcaauu

SEQ ID NO: 2524596 - RNA, 19 nt, Homo sapiens
  misc_RNA (1)...(19): siRNA sense strand
uauugucacugcagagaaa

SEQ ID NO: 2524597 - RNA, 19 nt, Homo sapiens
  misc_RNA (1)...(19): siRNA sense strand
ugacaaagucgaagacgga

SEQ ID NO: 2524598 - RNA, 19 nt, Homo sapiens
  misc_RNA (1)...(19): siRNA sense strand
ucaccaagccaucuggaaa

SEQ ID NO: 2524599 - RNA, 19 nt, Homo sapiens
  misc_RNA (1)...(19): siRNA sense strand
gucaagaacaaucaaguaa

SEQ ID NO: 2524600 - RNA, 19 nt, Homo sapiens
  misc_RNA (1)...(19): siRNA sense strand
ccagaauagagaacagaga

SEQ ID NO: 2524601 - RNA, 19 nt, Homo sapiens
  misc_RNA (1)...(19): siRNA sense strand
aaagagaggaacugcaaau

SEQ ID NO: 2524602 - RNA, 19 nt, Homo sapiens
  misc_RNA (1)...(19): siRNA sense strand
aaguguaacuccgggaaua

SEQ ID NO: 2524603 - RNA, 19 nt, Homo sapiens
  misc_RNA (1)...(19): siRNA sense strand
aagaauggcagaaagguau

SEQ ID NO: 2524604 - RNA, 19 nt, Homo sapiens
  misc_RNA (1)...(19): siRNA sense strand
cggagaaagacaaaagcaa

SEQ ID NO: 2524605 - RNA, 19 nt, Homo sapiens
  misc_RNA (1)...(19): siRNA sense strand
agcuaaaugaagugaaaga

SEQ ID NO: 2524606 - RNA, 19 nt, Homo sapiens
  misc_RNA (1)...(19): siRNA sense strand
cagugagaacacagaagaa

SEQ ID NO: 2524607 - RNA, 19 nt, Homo sapiens
  misc_RNA (1)...(19): siRNA sense strand
cuacagugauucugagcca

SEQ ID NO: 2524608 - RNA, 19 nt, Homo sapiens
  misc_RNA (1)...(19): siRNA sense strand
agaaagagaggaacugcaa

SEQ ID NO: 2524609 - RNA, 19 nt, Homo sapiens
  misc_RNA (1)...(19): siRNA sense strand
gguauaauucaccuaguaa

SEQ ID NO: 2524610 - RNA, 19 nt, Homo sapiens
  misc_RNA (1)...(19): siRNA sense strand
ucauguagagggaaauaua

SEQ ID NO: 2524611 - RNA, 19 nt, Homo sapiens
  misc_RNA (1)...(19): siRNA sense strand
auauaagauccuacagcua

SEQ ID NO: 2524612 - RNA, 19 nt, Homo sapiens
  misc_RNA (1)...(19): siRNA sense strand
cggaaaugucuaaagcaca

SEQ ID NO: 2524613 - RNA, 19 nt, Homo sapiens
  misc_RNA (1)...(19): siRNA sense strand
ccaagaaaugucaagaaca

SEQ ID NO: 2524614 - RNA, 19 nt, Homo sapiens
  misc_RNA (1)...(19): siRNA sense strand
uauaaaucauguagaggga

SEQ ID NO: 2524615 - RNA, 19 nt, Homo sapiens
  misc_RNA (1)...(19): siRNA sense strand
acaaagucgaagacggauu

SEQ ID NO: 2524616 - RNA, 19 nt, Homo sapiens
  misc_RNA (1)...(19): siRNA sense strand
ccaccuaauugccagggaa

SEQ ID NO: 2524617 - RNA, 19 nt, Homo sapiens
  misc_RNA (1)...(19): siRNA sense strand
acauuugugaucugggaaa

SEQ ID NO: 2524618 - RNA, 19 nt, Homo sapiens
  misc_RNA (1)...(19): siRNA sense strand
gcagacacugauugugaua

SEQ ID NO: 2524619 - RNA, 19 nt, Homo sapiens
  misc_RNA (1)...(19): siRNA sense strand
cuacaagcccagcagcaua

SEQ ID NO: 2524620 - RNA, 19 nt, Homo sapiens
  misc_RNA (1)...(19): siRNA sense strand
gcuucuaagucauggaaag

SEQ ID NO: 2524621 - RNA, 19 nt, Homo sapiens
  misc_RNA (1)...(19): siRNA sense strand
cagaauagagaacagagaa

SEQ ID NO: 2524622 - RNA, 19 nt, Homo sapiens
  misc_RNA (1)...(19): siRNA sense strand
gucauagauucaaugguaa

SEQ ID NO: 2524623 - RNA, 19 nt, Homo sapiens
  misc_RNA (1)...(19): siRNA sense strand
agaauuaaagcaacgggaa

SEQ ID NO: 2524624 - RNA, 19 nt, Homo sapiens
  misc_RNA (1)...(19): siRNA sense strand
acaacaauuuucagggcua

SEQ ID NO: 2524625 - RNA, 19 nt, Homo sapiens
  misc_RNA (1)...(19): siRNA sense strand
ccauaauguggcaucuaaa

SEQ ID NO: 2524626 - RNA, 19 nt, Homo sapiens
  misc_RNA (1)...(19): siRNA sense strand
uaucaauauccgaaaccaa

SEQ ID NO: 2524627 - RNA, 19 nt, Homo sapiens
  misc_RNA (1)...(19): siRNA sense strand
gaugauagcuaauccggau

SEQ ID NO: 2524628 - RNA, 19 nt, Homo sapiens
  misc_RNA (1)...(19): siRNA sense strand
gcaaauugugggaaucauu

SEQ ID NO: 2524629 - RNA, 19 nt, Homo sapiens
  misc_RNA (1)...(19): siRNA sense strand
caaagauacaagagauacu

SEQ ID NO: 2524630 - RNA, 19 nt, Homo sapiens
  misc_RNA (1)...(19): siRNA sense strand
cugaaugccuggaugaguu

SEQ ID NO: 2524631 - RNA, 19 nt, Homo sapiens
  misc_RNA (1)...(19): siRNA sense strand
acaaaagaguacagugcau

SEQ ID NO: 2524632 - RNA, 19 nt, Homo sapiens
  misc_RNA (1)...(19): siRNA sense strand
aggcaguucuaaaugauau

SEQ ID NO: 2524633 - RNA, 19 nt, Homo sapiens
  misc_RNA (1)...(19): siRNA sense strand
ccaucgaagaggagaucua

SEQ ID NO: 2524634 - RNA, 19 nt, Homo sapiens
  misc_RNA (1)...(19): siRNA sense strand
uggaagaggaggaggagga

SEQ ID NO: 2524635 - RNA, 19 nt, Homo sapiens
  misc_RNA (1)...(19): siRNA sense strand
gggucucagcagaggacaa

SEQ ID NO: 2524636 - RNA, 19 nt, Homo sapiens
  misc_RNA (1)...(19): siRNA sense strand
ggacaagagucggagacca

SEQ ID NO: 2524637 - RNA, 19 nt, Homo sapiens
  misc_RNA (1)...(19): siRNA sense strand
agaaacuggacaaguacaa

SEQ ID NO: 2524638 - RNA, 19 nt, Homo sapiens
  misc_RNA (1)...(19): siRNA sense strand
gcaagaagcuggugaaccc

SEQ ID NO: 2524639 - RNA, 19 nt, Homo sapiens
  misc_RNA (1)...(19): siRNA sense strand
ugauggaagaggaggagga

SEQ ID NO: 2524640 - RNA, 19 nt, Homo sapiens
  misc_RNA (1)...(19): siRNA sense strand
aguacaaaggccagaaacu

SEQ ID NO: 2524641 - RNA, 19 nt, Homo sapiens
  misc_RNA (1)...(19): siRNA sense strand
ccgagaugcugcuggugga

SEQ ID NO: 2524642 - RNA, 19 nt, Homo sapiens
  misc_RNA (1)...(19): siRNA sense strand
cagccagacggaaggauca

SEQ ID NO: 2524643 - RNA, 19 nt, Homo sapiens
  misc_RNA (1)...(19): siRNA sense strand
ucaacaaguuccagccguu

SEQ ID NO: 2524644 - RNA, 19 nt, Homo sapiens
  misc_RNA (1)...(19): siRNA sense strand
cuuaagaucuccuuggcca

SEQ ID NO: 2524645 - RNA, 19 nt, Homo sapiens
  misc_RNA (1)...(19): siRNA sense strand
gcgcugaguucgacgggaa

SEQ ID NO: 2524646 - RNA, 19 nt, Homo sapiens
  misc_RNA (1)...(19): siRNA sense strand
ggaaggagcuggugcugga

SEQ ID NO: 2524647 - RNA, 19 nt, Homo sapiens
  misc_RNA (1)...(19): siRNA sense strand
agaacuaccgcaagcgaga

SEQ ID NO: 2524648 - RNA, 19 nt, Homo sapiens
  misc_RNA (1)...(19): siRNA sense strand
ccacagagaacauaccaga

SEQ ID NO: 2524649 - RNA, 19 nt, Homo sapiens
  misc_RNA (1)...(19): siRNA sense strand
gguccggaucucagacaau

SEQ ID NO: 2524650 - RNA, 19 nt, Homo sapiens
  misc_RNA (1)...(19): siRNA sense strand
acauggagaacuaccgcaa

SEQ ID NO: 2524651 - RNA, 19 nt, Homo sapiens
  misc_RNA (1)...(19): siRNA sense strand
uuucaaacgagauggggaa

SEQ ID NO: 2524652 - RNA, 19 nt, Homo sapiens
  misc_RNA (1)...(19): siRNA sense strand
ccaccuacuuccugcgcca

SEQ ID NO: 2524653 - RNA, 19 nt, Homo sapiens
  misc_RNA (1)...(19): siRNA sense strand
gcacuaaaguagaggcggu

SEQ ID NO: 2524654 - RNA, 19 nt, Homo sapiens
  misc_RNA (1)...(19): siRNA sense strand
uggaugaagcacugaggaa

SEQ ID NO: 2524655 - RNA, 19 nt, Homo sapiens
  misc_RNA (1)...(19): siRNA sense strand
cguuucgagaggaggauaa

SEQ ID NO: 2524656 - RNA, 19 nt, Homo sapiens
  misc_RNA (1)...(19): siRNA sense strand
cuuuacagugcuaggcaaa

SEQ ID NO: 2524657 - RNA, 19 nt, Homo sapiens
  misc_RNA (1)...(19): siRNA sense strand
gaaagggagaggaggagga

SEQ ID NO: 2524658 - RNA, 19 nt, Homo sapiens
  misc_RNA (1)...(19): siRNA sense strand
ggacugugaugaugccgaa

SEQ ID NO: 2524659 - RNA, 19 nt, Homo sapiens
  misc_RNA (1)...(19): siRNA sense strand
ucggaaagggagaggagga

SEQ ID NO: 2524660 - RNA, 19 nt, Homo sapiens
  misc_RNA (1)...(19): siRNA sense strand
cugcagaaggccauggaga

SEQ ID NO: 2524661 - RNA, 19 nt, Homo sapiens
  misc_RNA (1)...(19): siRNA sense strand
ugcagaaggccauggagaa

SEQ ID NO: 2524662 - RNA, 19 nt, Homo sapiens
  misc_RNA (1)...(19): siRNA sense strand
gcgugagagcccagacaca

SEQ ID NO: 2524663 - RNA, 19 nt, Homo sapiens
  misc_RNA (1)...(19): siRNA sense strand
ggcagaugguggagagcgu

SEQ ID NO: 2524664 - RNA, 19 nt, Homo sapiens
  misc_RNA (1)...(19): siRNA sense strand
agugcuaggcaaagcguuu

SEQ ID NO: 2524665 - RNA, 19 nt, Homo sapiens
  misc_RNA (1)...(19): siRNA sense strand
agucuagccaggagcguga

SEQ ID NO: 2524666 - RNA, 19 nt, Homo sapiens
  misc_RNA (1)...(19): siRNA sense strand
ggauuggaaaggagcacaa

SEQ ID NO: 2524667 - RNA, 19 nt, Homo sapiens
  misc_RNA (1)...(19): siRNA sense strand
gagaaucacuucaggguuc

SEQ ID NO: 2524668 - RNA, 19 nt, Homo sapiens
  misc_RNA (1)...(19): siRNA sense strand
aagccaagaaagacaagaa

SEQ ID NO: 2524669 - RNA, 19 nt, Homo sapiens
  misc_RNA (1)...(19): siRNA sense strand
ugagaauuaucaaugggaa

SEQ ID NO: 2524670 - RNA, 19 nt, Homo sapiens
  misc_RNA (1)...(19): siRNA sense strand
augcaggugacuagccaaa

SEQ ID NO: 2524671 - RNA, 19 nt, Homo sapiens
  misc_RNA (1)...(19): siRNA sense strand
gccaagaaagacaagaaca

SEQ ID NO: 2524672 - RNA, 19 nt, Homo sapiens
  misc_RNA (1)...(19): siRNA sense strand
uugaauugaaagaagccaa

SEQ ID NO: 2524673 - RNA, 19 nt, Homo sapiens
  misc_RNA (1)...(19): siRNA sense strand
cgaaugguugccagggaga

SEQ ID NO: 2524674 - RNA, 19 nt, Homo sapiens
  misc_RNA (1)...(19): siRNA sense strand
aauugaaagaagccaagaa

SEQ ID NO: 2524675 - RNA, 19 nt, Homo sapiens
  misc_RNA (1)...(19): siRNA sense strand
ggagaaaggugaucccuga

SEQ ID NO: 2524676 - RNA, 19 nt, Homo sapiens
  misc_RNA (1)...(19): siRNA sense strand
aggugaucccugagacaga

SEQ ID NO: 2524677 - RNA, 19 nt, Homo sapiens
  misc_RNA (1)...(19): siRNA sense strand
agacagagcaggcuggugu

SEQ ID NO: 2524678 - RNA, 19 nt, Homo sapiens
  misc_RNA (1)...(19): siRNA sense strand
ccaugacagugaucgaaaa

SEQ ID NO: 2524679 - RNA, 19 nt, Homo sapiens
  misc_RNA (1)...(19): siRNA sense strand
ggaaauagaagaaagggaa

SEQ ID NO: 2524680 - RNA, 19 nt, Homo sapiens
  misc_RNA (1)...(19): siRNA sense strand
gcaaagagccaaaggacga

SEQ ID NO: 2524681 - RNA, 19 nt, Homo sapiens
  misc_RNA (1)...(19): siRNA sense strand
gagcgagagaggaggaaaa

SEQ ID NO: 2524682 - RNA, 19 nt, Homo sapiens
  misc_RNA (1)...(19): siRNA sense strand
ggaacaagacagaccgaga

SEQ ID NO: 2524683 - RNA, 19 nt, Homo sapiens
  misc_RNA (1)...(19): siRNA sense strand
gaacaugguuggugcggga

SEQ ID NO: 2524684 - RNA, 19 nt, Homo sapiens
  misc_RNA (1)...(19): siRNA sense strand
agaugaagauuaugagcga

SEQ ID NO: 2524685 - RNA, 19 nt, Homo sapiens
  misc_RNA (1)...(19): siRNA sense strand
agaaaguagugaagcgcca

SEQ ID NO: 2524686 - RNA, 19 nt, Homo sapiens
  misc_RNA (1)...(19): siRNA sense strand
cuggaaagacaaaaggaaa

SEQ ID NO: 2524687 - RNA, 19 nt, Homo sapiens
  misc_RNA (1)...(19): siRNA sense strand
cgagagaggaggaaaagaa

SEQ ID NO: 2524688 - RNA, 19 nt, Homo sapiens
  misc_RNA (1)...(19): siRNA sense strand
ugguagagaaagacaaaga

SEQ ID NO: 2524689 - RNA, 19 nt, Homo sapiens
  misc_RNA (1)...(19): siRNA sense strand
uggaaagacaaaaggaaau

SEQ ID NO: 2524690 - RNA, 19 nt, Homo sapiens
  misc_RNA (1)...(19): siRNA sense strand
aggaaauagaagaaaggga

SEQ ID NO: 2524691 - RNA, 19 nt, Homo sapiens
  misc_RNA (1)...(19): siRNA sense strand
augaagauuaugagcgaga

SEQ ID NO: 2524692 - RNA, 19 nt, Homo sapiens
  misc_RNA (1)...(19): siRNA sense strand
aaguugaaaccaaggaaga

SEQ ID NO: 2524693 - RNA, 19 nt, Homo sapiens
  misc_RNA (1)...(19): siRNA sense strand
acucaggcaaagagccaaa

SEQ ID NO: 2524694 - RNA, 19 nt, Homo sapiens
  misc_RNA (1)...(19): siRNA sense strand
gccaaagagaggaacgaca

SEQ ID NO: 2524695 - RNA, 19 nt, Homo sapiens
  misc_RNA (1)...(19): siRNA sense strand
guuucuacaauuuggacaa

SEQ ID NO: 2524696 - RNA, 19 nt, Homo sapiens
  misc_RNA (1)...(19): siRNA sense strand
cugccuugucaguggagaa

SEQ ID NO: 2524697 - RNA, 19 nt, Homo sapiens
  misc_RNA (1)...(19): siRNA sense strand
gugcgggagagguggauga

SEQ ID NO: 2524698 - RNA, 19 nt, Homo sapiens
  misc_RNA (1)...(19): siRNA sense strand
gcauccaagaagucagauu

SEQ ID NO: 2524699 - RNA, 19 nt, Homo sapiens
  misc_RNA (1)...(19): siRNA sense strand
ucugguagagaaagacaaa

SEQ ID NO: 2524700 - RNA, 19 nt, Homo sapiens
  misc_RNA (1)...(19): siRNA sense strand
gggucuuggauuuggcaga

SEQ ID NO: 2524701 - RNA, 19 nt, Homo sapiens
  misc_RNA (1)...(19): siRNA sense strand
aagagaggaacgacagaga

SEQ ID NO: 2524702 - RNA, 19 nt, Homo sapiens
  misc_RNA (1)...(19): siRNA sense strand
gagagguggaugaagacuu

SEQ ID NO: 2524703 - RNA, 19 nt, Homo sapiens
  misc_RNA (1)...(19): siRNA sense strand
aguuggaaaaugugugaua

SEQ ID NO: 2524704 - RNA, 19 nt, Homo sapiens
  misc_RNA (1)...(19): siRNA sense strand
gcgcacaagaucaugcaga

SEQ ID NO: 2524705 - RNA, 19 nt, Homo sapiens
  misc_RNA (1)...(19): siRNA sense strand
ccacagagaaagaugcauc

SEQ ID NO: 2524706 - RNA, 19 nt, Homo sapiens
  misc_RNA (1)...(19): siRNA sense strand
caguguacgaggaacaaga

SEQ ID NO: 2524707 - RNA, 19 nt, Homo sapiens
  misc_RNA (1)...(19): siRNA sense strand
agaauuugagagaguugaa

SEQ ID NO: 2524708 - RNA, 19 nt, Homo sapiens
  misc_RNA (1)...(19): siRNA sense strand
gacaaaaggaaauagaaga

SEQ ID NO: 2524709 - RNA, 19 nt, Homo sapiens
  misc_RNA (1)...(19): siRNA sense strand
aguugaaaccaaggaagaa

SEQ ID NO: 2524710 - RNA, 19 nt, Homo sapiens
  misc_RNA (1)...(19): siRNA sense strand
cgggagcuggaaagacaaa

SEQ ID NO: 2524711 - RNA, 19 nt, Homo sapiens
  misc_RNA (1)...(19): siRNA sense strand
gcuggaaagacaaaaggaa

SEQ ID NO: 2524712 - RNA, 19 nt, Homo sapiens
  misc_RNA (1)...(19): siRNA sense strand
agauucugaugaagaugaa

SEQ ID NO: 2524713 - RNA, 19 nt, Homo sapiens
  misc_RNA (1)...(19): siRNA sense strand
guugaaaccaaggaagaau

SEQ ID NO: 2524714 - RNA, 19 nt, Homo sapiens
  misc_RNA (1)...(19): siRNA sense strand
gacuugaaugggagguauu

SEQ ID NO: 2524715 - RNA, 19 nt, Homo sapiens
  misc_RNA (1)...(19): siRNA sense strand
aggcaaagccagagagcca

SEQ ID NO: 2524716 - RNA, 19 nt, Homo sapiens
  misc_RNA (1)...(19): siRNA sense strand
agagagaggaugagggaga

SEQ ID NO: 2524717 - RNA, 19 nt, Homo sapiens
  misc_RNA (1)...(19): siRNA sense strand
gguccgaaggugagggcaa

SEQ ID NO: 2524718 - RNA, 19 nt, Homo sapiens
  misc_RNA (1)...(19): siRNA sense strand
agggaaagagagaggauga

SEQ ID NO: 2524719 - RNA, 19 nt, Homo sapiens
  misc_RNA (1)...(19): siRNA sense strand
agucagacgaggaagaaaa

SEQ ID NO: 2524720 - RNA, 19 nt, Homo sapiens
  misc_RNA (1)...(19): siRNA sense strand
aagaugaaguagagccuga

SEQ ID NO: 2524721 - RNA, 19 nt, Homo sapiens
  misc_RNA (1)...(19): siRNA sense strand
aggaaagucagacgaggaa

SEQ ID NO: 2524722 - RNA, 19 nt, Homo sapiens
  misc_RNA (1)...(19): siRNA sense strand
agccagacguggaggggaa

SEQ ID NO: 2524723 - RNA, 19 nt, Homo sapiens
  misc_RNA (1)...(19): siRNA sense strand
cgagggaaagagagaggau

SEQ ID NO: 2524724 - RNA, 19 nt, Homo sapiens
  misc_RNA (1)...(19): siRNA sense strand
agccacaaggcgagggcaa

SEQ ID NO: 2524725 - RNA, 19 nt, Homo sapiens
  misc_RNA (1)...(19): siRNA sense strand
agccugaugaugaaggaaa

SEQ ID NO: 2524726 - RNA, 19 nt, Homo sapiens
  misc_RNA (1)...(19): siRNA sense strand
cucaagaggagcuaaggaa

SEQ ID NO: 2524727 - RNA, 19 nt, Homo sapiens
  misc_RNA (1)...(19): siRNA sense strand
agccagaagaugaaguaga

SEQ ID NO: 2524728 - RNA, 19 nt, Homo sapiens
  misc_RNA (1)...(19): siRNA sense strand
ggagaugugucaagggcuc

SEQ ID NO: 2524729 - RNA, 19 nt, Homo sapiens
  misc_RNA (1)...(19): siRNA sense strand
augaaggaaaccuggaaaa

SEQ ID NO: 2524730 - RNA, 19 nt, Homo sapiens
  misc_RNA (1)...(19): siRNA sense strand
ggacuuacaggaaaggcau

SEQ ID NO: 2524731 - RNA, 19 nt, Homo sapiens
  misc_RNA (1)...(19): siRNA sense strand
aaggaaagucagacgagga

SEQ ID NO: 2524732 - RNA, 19 nt, Homo sapiens
  misc_RNA (1)...(19): siRNA sense strand
ccaaggacucucaggagga

SEQ ID NO: 2524733 - RNA, 19 nt, Homo sapiens
  misc_RNA (1)...(19): siRNA sense strand
ugaugaugaaggaaaguca

SEQ ID NO: 2524734 - RNA, 19 nt, Homo sapiens
  misc_RNA (1)...(19): siRNA sense strand
gaagacagaaugcgaggga

SEQ ID NO: 2524735 - RNA, 19 nt, Homo sapiens
  misc_RNA (1)...(19): siRNA sense strand
agaagaaguacguggacca

SEQ ID NO: 2524736 - RNA, 19 nt, Homo sapiens
  misc_RNA (1)...(19): siRNA sense strand
cggcagaagcagaaggccu

SEQ ID NO: 2524737 - RNA, 19 nt, Homo sapiens
  misc_RNA (1)...(19): siRNA sense strand
aggaagaggagaagggcag

SEQ ID NO: 2524738 - RNA, 19 nt, Homo sapiens
  misc_RNA (1)...(19): siRNA sense strand
ccaacuuccuggaugggau

SEQ ID NO: 2524739 - RNA, 19 nt, Homo sapiens
  misc_RNA (1)...(19): siRNA sense strand
aguacguggaccagaguga

SEQ ID NO: 2524740 - RNA, 19 nt, Homo sapiens
  misc_RNA (1)...(19): siRNA sense strand
gaggaagaggagaagggca

SEQ ID NO: 2524741 - RNA, 19 nt, Homo sapiens
  misc_RNA (1)...(19): siRNA sense strand
ccaagaagaaguacgugga

SEQ ID NO: 2524742 - RNA, 19 nt, Homo sapiens
  misc_RNA (1)...(19): siRNA sense strand
agagaaugacaucaggaaa

SEQ ID NO: 2524743 - RNA, 19 nt, Homo sapiens
  misc_RNA (1)...(19): siRNA sense strand
caacugacacuaaagggaa

SEQ ID NO: 2524744 - RNA, 19 nt, Homo sapiens
  misc_RNA (1)...(19): siRNA sense strand
aacugacacuaaagggaaa

SEQ ID NO: 2524745 - RNA, 19 nt, Homo sapiens
  misc_RNA (1)...(19): siRNA sense strand
agaucaacgagaagaagau

SEQ ID NO: 2524746 - RNA, 19 nt, Homo sapiens
  misc_RNA (1)...(19): siRNA sense strand
aaaguugagaugaaagcaa

SEQ ID NO: 2524747 - RNA, 19 nt, Homo sapiens
  misc_RNA (1)...(19): siRNA sense strand
aagugauacagcuggaaau

SEQ ID NO: 2524748 - RNA, 19 nt, Homo sapiens
  misc_RNA (1)...(19): siRNA sense strand
ccaaauaguuucacccauc

SEQ ID NO: 2524749 - RNA, 19 nt, Homo sapiens
  misc_RNA (1)...(19): siRNA sense strand
acuaaagggaaauguagau

SEQ ID NO: 2524750 - RNA, 19 nt, Homo sapiens
  misc_RNA (1)...(19): siRNA sense strand
agguagaaaccaacccaau

SEQ ID NO: 2524751 - RNA, 19 nt, Homo sapiens
  misc_RNA (1)...(19): siRNA sense strand
ccaucacgagagagccaua

SEQ ID NO: 2524752 - RNA, 19 nt, Homo sapiens
  misc_RNA (1)...(19): siRNA sense strand
auguagauuccgugcuauu

SEQ ID NO: 2524753 - RNA, 19 nt, Homo sapiens
  misc_RNA (1)...(19): siRNA sense strand
gcaaagaaauaaagaggca

SEQ ID NO: 2524754 - RNA, 19 nt, Homo sapiens
  misc_RNA (1)...(19): siRNA sense strand
ucguagaagaagaaagaaa

SEQ ID NO: 2524755 - RNA, 19 nt, Homo sapiens
  misc_RNA (1)...(19): siRNA sense strand
caauaauagaagagcagaa

SEQ ID NO: 2524756 - RNA, 19 nt, Homo sapiens
  misc_RNA (1)...(19): siRNA sense strand
aggaagaaaggcaaagaaa

SEQ ID NO: 2524757 - RNA, 19 nt, Homo sapiens
  misc_RNA (1)...(19): siRNA sense strand
ucucaagaacagaaggaaa

SEQ ID NO: 2524758 - RNA, 19 nt, Homo sapiens
  misc_RNA (1)...(19): siRNA sense strand
gugaaaaggcuguggaaga

SEQ ID NO: 2524759 - RNA, 19 nt, Homo sapiens
  misc_RNA (1)...(19): siRNA sense strand
acucaaaguaucugaagaa

SEQ ID NO: 2524760 - RNA, 19 nt, Homo sapiens
  misc_RNA (1)...(19): siRNA sense strand
cucaagaacagaaggaaau

SEQ ID NO: 2524761 - RNA, 19 nt, Homo sapiens
  misc_RNA (1)...(19): siRNA sense strand
gggaauuauggaagacaga

SEQ ID NO: 2524762 - RNA, 19 nt, Homo sapiens
  misc_RNA (1)...(19): siRNA sense strand
cguagaagaagaaagaaaa

SEQ ID NO: 2524763 - RNA, 19 nt, Homo sapiens
  misc_RNA (1)...(19): siRNA sense strand
cagcaauaauagaagagca

SEQ ID NO: 2524764 - RNA, 19 nt, Homo sapiens
  misc_RNA (1)...(19): siRNA sense strand
agucguagaagaagaaaga

SEQ ID NO: 2524765 - RNA, 19 nt, Homo sapiens
  misc_RNA (1)...(19): siRNA sense strand
gagucaaacuauuccaaaa

SEQ ID NO: 2524766 - RNA, 19 nt, Homo sapiens
  misc_RNA (1)...(19): siRNA sense strand
ucaaaguaucugaagaaga

SEQ ID NO: 2524767 - RNA, 19 nt, Homo sapiens
  misc_RNA (1)...(19): siRNA sense strand
aauuggaagacaugaggaa

SEQ ID NO: 2524768 - RNA, 19 nt, Homo sapiens
  misc_RNA (1)...(19): siRNA sense strand
aacaagaauuggaagacau

SEQ ID NO: 2524769 - RNA, 19 nt, Homo sapiens
  misc_RNA (1)...(19): siRNA sense strand
uguggaagaggcagugaaa

SEQ ID NO: 2524770 - RNA, 19 nt, Homo sapiens
  misc_RNA (1)...(19): siRNA sense strand
aagaaagggaauuauggaa

SEQ ID NO: 2524771 - RNA, 19 nt, Homo sapiens
  misc_RNA (1)...(19): siRNA sense strand
agugugaggaguugcuaaa

SEQ ID NO: 2524772 - RNA, 19 nt, Homo sapiens
  misc_RNA (1)...(19): siRNA sense strand
uggaaguggugaaacccaa

SEQ ID NO: 2524773 - RNA, 19 nt, Homo sapiens
  misc_RNA (1)...(19): siRNA sense strand
cagcauuauuguggaugaa

SEQ ID NO: 2524774 - RNA, 19 nt, Homo sapiens
  misc_RNA (1)...(19): siRNA sense strand
caguuaagcaacaaguaga

SEQ ID NO: 2524775 - RNA, 19 nt, Homo sapiens
  misc_RNA (1)...(19): siRNA sense strand
caauugagaaacaggcaca

SEQ ID NO: 2524776 - RNA, 19 nt, Homo sapiens
  misc_RNA (1)...(19): siRNA sense strand
gaauuaaacaggaugugga

SEQ ID NO: 2524777 - RNA, 19 nt, Homo sapiens
  misc_RNA (1)...(19): siRNA sense strand
aauuaaacaggauguggaa

SEQ ID NO: 2524778 - RNA, 19 nt, Homo sapiens
  misc_RNA (1)...(19): siRNA sense strand
aguuaagcaacaaguagaa

SEQ ID NO: 2524779 - RNA, 19 nt, Homo sapiens
  misc_RNA (1)...(19): siRNA sense strand
auagaagagcagaaacgaa

SEQ ID NO: 2524780 - RNA, 19 nt, Homo sapiens
  misc_RNA (1)...(19): siRNA sense strand
gugaaaagaacaagagaug

SEQ ID NO: 2524781 - RNA, 19 nt, Homo sapiens
  misc_RNA (1)...(19): siRNA sense strand
agcaacaaguagaagcuau

SEQ ID NO: 2524782 - RNA, 19 nt, Homo sapiens
  misc_RNA (1)...(19): siRNA sense strand
cuguuaaggcagcaauaau

SEQ ID NO: 2524783 - RNA, 19 nt, Homo sapiens
  misc_RNA (1)...(19): siRNA sense strand
cauuaguauccgcugcaaa

SEQ ID NO: 2524784 - RNA, 19 nt, Homo sapiens
  misc_RNA (1)...(19): siRNA sense strand
accaguugacauugaauaa

SEQ ID NO: 2524785 - RNA, 19 nt, Homo sapiens
  misc_RNA (1)...(19): siRNA sense strand
agauuguacuggaccguga

SEQ ID NO: 2524786 - RNA, 19 nt, Homo sapiens
  misc_RNA (1)...(19): siRNA sense strand
ugaggauccuggagccaau

SEQ ID NO: 2524787 - RNA, 19 nt, Homo sapiens
  misc_RNA (1)...(19): siRNA sense strand
uacaaagaacuucaggaaa

SEQ ID NO: 2524788 - RNA, 19 nt, Homo sapiens
  misc_RNA (1)...(19): siRNA sense strand
agacagaacaugcaaaaga

SEQ ID NO: 2524789 - RNA, 19 nt, Homo sapiens
  misc_RNA (1)...(19): siRNA sense strand
cuacggaaccaguugacau

SEQ ID NO: 2524790 - RNA, 19 nt, Homo sapiens
  misc_RNA (1)...(19): siRNA sense strand
acacacacucaucuggaua

SEQ ID NO: 2524791 - RNA, 19 nt, Homo sapiens
  misc_RNA (1)...(19): siRNA sense strand
uaaaagucguagaagaaga

SEQ ID NO: 2524792 - RNA, 19 nt, Homo sapiens
  misc_RNA (1)...(19): siRNA sense strand
gcagaaacgaagugaaaag

SEQ ID NO: 2524793 - RNA, 19 nt, Homo sapiens
  misc_RNA (1)...(19): siRNA sense strand
ugaugguggaaguggugaa

SEQ ID NO: 2524794 - RNA, 19 nt, Homo sapiens
  misc_RNA (1)...(19): siRNA sense strand
gaauuauggaagacagaac

SEQ ID NO: 2524795 - RNA, 19 nt, Homo sapiens
  misc_RNA (1)...(19): siRNA sense strand
aggcagcaauaauagaaga

SEQ ID NO: 2524796 - RNA, 19 nt, Homo sapiens
  misc_RNA (1)...(19): siRNA sense strand
uggugaaacccaaacaaca

SEQ ID NO: 2524797 - RNA, 19 nt, Homo sapiens
  misc_RNA (1)...(19): siRNA sense strand
cauugauggaaaagcauaa

SEQ ID NO: 2524798 - RNA, 19 nt, Homo sapiens
  misc_RNA (1)...(19): siRNA sense strand
ucaggaaacuguuaaggca

SEQ ID NO: 2524799 - RNA, 19 nt, Homo sapiens
  misc_RNA (1)...(19): siRNA sense strand
ccucagcauuauuguggau

SEQ ID NO: 2524800 - RNA, 19 nt, Homo sapiens
  misc_RNA (1)...(19): siRNA sense strand
acagaaggaaauauuggaa

SEQ ID NO: 2524801 - RNA, 19 nt, Homo sapiens
  misc_RNA (1)...(19): siRNA sense strand
uggaagaggcagugaaaag

SEQ ID NO: 2524802 - RNA, 19 nt, Homo sapiens
  misc_RNA (1)...(19): siRNA sense strand
gagcauggcuuccgggcau

SEQ ID NO: 2524803 - RNA, 19 nt, Homo sapiens
  misc_RNA (1)...(19): siRNA sense strand
uggagacaucauagagaaa

SEQ ID NO: 2524804 - RNA, 19 nt, Homo sapiens
  misc_RNA (1)...(19): siRNA sense strand
caauuagcaucguggccua

SEQ ID NO: 2524805 - RNA, 19 nt, Homo sapiens
  misc_RNA (1)...(19): siRNA sense strand
accaagugcaggugggcua

SEQ ID NO: 2524806 - RNA, 19 nt, Homo sapiens
  misc_RNA (1)...(19): siRNA sense strand
ugguauggcugcaggguac

SEQ ID NO: 2524807 - RNA, 19 nt, Homo sapiens
  misc_RNA (1)...(19): siRNA sense strand
gugaaggcguccuacggaa

SEQ ID NO: 2524808 - RNA, 19 nt, Homo sapiens
  misc_RNA (1)...(19): siRNA sense strand
gcaugucgcugcugggcuu

SEQ ID NO: 2524809 - RNA, 19 nt, Homo sapiens
  misc_RNA (1)...(19): siRNA sense strand
gaccaacagcagagagcca

SEQ ID NO: 2524810 - RNA, 19 nt, Homo sapiens
  misc_RNA (1)...(19): siRNA sense strand
gggcaucucuucaagcaga

SEQ ID NO: 2524811 - RNA, 19 nt, Homo sapiens
  misc_RNA (1)...(19): siRNA sense strand
auggaaagguguucgucau

SEQ ID NO: 2524812 - RNA, 19 nt, Homo sapiens
  misc_RNA (1)...(19): siRNA sense strand
ggccaguggaggugcugua

SEQ ID NO: 2524813 - RNA, 19 nt, Homo sapiens
  misc_RNA (1)...(19): siRNA sense strand
gcaucguggccuauaaaca

SEQ ID NO: 2524814 - RNA, 19 nt, Homo sapiens
  misc_RNA (1)...(19): siRNA sense strand
gcuucaucgaggacaauua

SEQ ID NO: 2524815 - RNA, 19 nt, Homo sapiens
  misc_RNA (1)...(19): siRNA sense strand
guugcaggauggaggguga

SEQ ID NO: 2524816 - RNA, 19 nt, Homo sapiens
  misc_RNA (1)...(19): siRNA sense strand
ggucacaggugcuggugga

SEQ ID NO: 2524817 - RNA, 19 nt, Homo sapiens
  misc_RNA (1)...(19): siRNA sense strand
ccgggaaagccuucagcua

SEQ ID NO: 2524818 - RNA, 19 nt, Homo sapiens
  misc_RNA (1)...(19): siRNA sense strand
cgccaggaguggacguuca

SEQ ID NO: 2524819 - RNA, 19 nt, Homo sapiens
  misc_RNA (1)...(19): siRNA sense strand
acggagagagggcagcaaa

SEQ ID NO: 2524820 - RNA, 19 nt, Homo sapiens
  misc_RNA (1)...(19): siRNA sense strand
acugaauucuggagguaaa

SEQ ID NO: 2524821 - RNA, 19 nt, Homo sapiens
  misc_RNA (1)...(19): siRNA sense strand
cagcaaaggaaacggaaaa

SEQ ID NO: 2524822 - RNA, 19 nt, Homo sapiens
  misc_RNA (1)...(19): siRNA sense strand
gagguaaacaaaagagaaa

SEQ ID NO: 2524823 - RNA, 19 nt, Homo sapiens
  misc_RNA (1)...(19): siRNA sense strand
aagaaaauguggaggcaau

SEQ ID NO: 2524824 - RNA, 19 nt, Homo sapiens
  misc_RNA (1)...(19): siRNA sense strand
gcagcaaaggaaacggaaa

SEQ ID NO: 2524825 - RNA, 19 nt, Homo sapiens
  misc_RNA (1)...(19): siRNA sense strand
auuaaugaccagagagaca

SEQ ID NO: 2524826 - RNA, 19 nt, Homo sapiens
  misc_RNA (1)...(19): siRNA sense strand
aggaugaaacagaaagaau

SEQ ID NO: 2524827 - RNA, 19 nt, Homo sapiens
  misc_RNA (1)...(19): siRNA sense strand
aagcaagcauggagguaca

SEQ ID NO: 2524828 - RNA, 19 nt, Homo sapiens
  misc_RNA (1)...(19): siRNA sense strand
gcucuuuagcuuuggagaa

SEQ ID NO: 2524829 - RNA, 19 nt, Homo sapiens
  misc_RNA (1)...(19): siRNA sense strand
auucagaugcucaggaaau

SEQ ID NO: 2524830 - RNA, 19 nt, Homo sapiens
  misc_RNA (1)...(19): siRNA sense strand
cccaagauguagaugaaaa

SEQ ID NO: 2524831 - RNA, 19 nt, Homo sapiens
  misc_RNA (1)...(19): siRNA sense strand
ucagagagcuggaagagca

SEQ ID NO: 2524832 - RNA, 19 nt, Homo sapiens
  misc_RNA (1)...(19): siRNA sense strand
aagagaaagcagcagaauu

SEQ ID NO: 2524833 - RNA, 19 nt, Homo sapiens
  misc_RNA (1)...(19): siRNA sense strand
caaaaucacaagaggaaga

SEQ ID NO: 2524834 - RNA, 19 nt, Homo sapiens
  misc_RNA (1)...(19): siRNA sense strand
gugaaaagugaaauagcaa

SEQ ID NO: 2524835 - RNA, 19 nt, Homo sapiens
  misc_RNA (1)...(19): siRNA sense strand
gugugagagaagaagagaa

SEQ ID NO: 2524836 - RNA, 19 nt, Homo sapiens
  misc_RNA (1)...(19): siRNA sense strand
agacauagcaaugagggaa

SEQ ID NO: 2524837 - RNA, 19 nt, Homo sapiens
  misc_RNA (1)...(19): siRNA sense strand
aagcuaacugugugagaga

SEQ ID NO: 2524838 - RNA, 19 nt, Homo sapiens
  misc_RNA (1)...(19): siRNA sense strand
agaagagaaagcagcagaa

SEQ ID NO: 2524839 - RNA, 19 nt, Homo sapiens
  misc_RNA (1)...(19): siRNA sense strand
uuauuaaugaccagagaga

SEQ ID NO: 2524840 - RNA, 19 nt, Homo sapiens
  misc_RNA (1)...(19): siRNA sense strand
ugagaggaugaaacagaaa

SEQ ID NO: 2524841 - RNA, 19 nt, Homo sapiens
  misc_RNA (1)...(19): siRNA sense strand
ucagaagacaguuuggaau

SEQ ID NO: 2524842 - RNA, 19 nt, Homo sapiens
  misc_RNA (1)...(19): siRNA sense strand
aauuaaaguccaagcucuu

SEQ ID NO: 2524843 - RNA, 19 nt, Homo sapiens
  misc_RNA (1)...(19): siRNA sense strand
uuggagaugcugaggauga

SEQ ID NO: 2524844 - RNA, 19 nt, Homo sapiens
  misc_RNA (1)...(19): siRNA sense strand
gagaaaaugaccagagauc

SEQ ID NO: 2524845 - RNA, 19 nt, Homo sapiens
  misc_RNA (1)...(19): siRNA sense strand
gcagagcugaagaaagcaa

SEQ ID NO: 2524846 - RNA, 19 nt, Homo sapiens
  misc_RNA (1)...(19): siRNA sense strand
uagaagguuccgacacaaa

SEQ ID NO: 2524847 - RNA, 19 nt, Homo sapiens
  misc_RNA (1)...(19): siRNA sense strand
ccucaaauuuauugccaac

SEQ ID NO: 2524848 - RNA, 19 nt, Homo sapiens
  misc_RNA (1)...(19): siRNA sense strand
gcauggagguacaagcagu

SEQ ID NO: 2524849 - RNA, 19 nt, Homo sapiens
  misc_RNA (1)...(19): siRNA sense strand
uaacugugugagagaagaa

SEQ ID NO: 2524850 - RNA, 19 nt, Homo sapiens
  misc_RNA (1)...(19): siRNA sense strand
caauuaaaguccaagcucu

SEQ ID NO: 2524851 - RNA, 19 nt, Homo sapiens
  misc_RNA (1)...(19): siRNA sense strand
gaggcaauugagaggauga

SEQ ID NO: 2524852 - RNA, 19 nt, Homo sapiens
  misc_RNA (1)...(19): siRNA sense strand
aagcaguagcacaaccaaa

SEQ ID NO: 2524853 - RNA, 19 nt, Homo sapiens
  misc_RNA (1)...(19): siRNA sense strand
gaguaugcuuugucaacca

SEQ ID NO: 2524854 - RNA, 19 nt, Homo sapiens
  misc_RNA (1)...(19): siRNA sense strand
cuguagacgcucugaaaau

SEQ ID NO: 2524855 - RNA, 19 nt, Homo sapiens
  misc_RNA (1)...(19): siRNA sense strand
gagagcuggaagagcagaa

SEQ ID NO: 2524856 - RNA, 19 nt, Homo sapiens
  misc_RNA (1)...(19): siRNA sense strand
ccaagauguagaugaaaau

SEQ ID NO: 2524857 - RNA, 19 nt, Homo sapiens
  misc_RNA (1)...(19): siRNA sense strand
caggaaauacugauagacu

SEQ ID NO: 2524858 - RNA, 19 nt, Homo sapiens
  misc_RNA (1)...(19): siRNA sense strand
agaggaugaaacagaaaga

SEQ ID NO: 2524859 - RNA, 19 nt, Homo sapiens
  misc_RNA (1)...(19): siRNA sense strand
caaguaacaaggaaggcau

SEQ ID NO: 2524860 - RNA, 19 nt, Homo sapiens
  misc_RNA (1)...(19): siRNA sense strand
uaaaaggagugguagguca

SEQ ID NO: 2524861 - RNA, 19 nt, Homo sapiens
  misc_RNA (1)...(19): siRNA sense strand
augaugaaauggacguuga

SEQ ID NO: 2524862 - RNA, 19 nt, Homo sapiens
  misc_RNA (1)...(19): siRNA sense strand
gcacuuuauuucaaggaac

SEQ ID NO: 2524863 - RNA, 19 nt, Homo sapiens
  misc_RNA (1)...(19): siRNA sense strand
cggcaaaaguuucgugaug

SEQ ID NO: 2524864 - RNA, 19 nt, Homo sapiens
  misc_RNA (1)...(19): siRNA sense strand
acagaaagaauggcggcaa

SEQ ID NO: 2524865 - RNA, 19 nt, Homo sapiens
  misc_RNA (1)...(19): siRNA sense strand
caccaacaggaaaggcuaa

SEQ ID NO: 2524866 - RNA, 19 nt, Homo sapiens
  misc_RNA (1)...(19): siRNA sense strand
cuagauuaauagaagguuc

SEQ ID NO: 2524867 - RNA, 19 nt, Homo sapiens
  misc_RNA (1)...(19): siRNA sense strand
cagaauuccuccucaggga

SEQ ID NO: 2524868 - RNA, 19 nt, Homo sapiens
  misc_RNA (1)...(19): siRNA sense strand
uucccaagauguagaugaa

SEQ ID NO: 2524869 - RNA, 19 nt, Homo sapiens
  misc_RNA (1)...(19): siRNA sense strand
uggaggcaauugagaggau

SEQ ID NO: 2524870 - RNA, 19 nt, Homo sapiens
  misc_RNA (1)...(19): siRNA sense strand
augcaugaaagcagagaau

SEQ ID NO: 2524871 - RNA, 19 nt, Homo sapiens
  misc_RNA (1)...(19): siRNA sense strand
augaagagacgaagaaacu

SEQ ID NO: 2524872 - RNA, 19 nt, Homo sapiens
  misc_RNA (1)...(19): siRNA sense strand
ccaugaagagacgaagaaa

SEQ ID NO: 2524873 - RNA, 19 nt, Homo sapiens
  misc_RNA (1)...(19): siRNA sense strand
acgaagaaacugaggcccu

SEQ ID NO: 2524874 - RNA, 19 nt, Homo sapiens
  misc_RNA (1)...(19): siRNA sense strand
gagaaggagacgaugcagu

SEQ ID NO: 2524875 - RNA, 19 nt, Homo sapiens
  misc_RNA (1)...(19): siRNA sense strand
ucgccaacuaucuggagaa

SEQ ID NO: 2524876 - RNA, 19 nt, Homo sapiens
  misc_RNA (1)...(19): siRNA sense strand
caugaagagacgaagaaac

SEQ ID NO: 2524877 - RNA, 19 nt, Homo sapiens
  misc_RNA (1)...(19): siRNA sense strand
agucagagaaugaaagcaa

SEQ ID NO: 2524878 - RNA, 19 nt, Homo sapiens
  misc_RNA (1)...(19): siRNA sense strand
uccagaaacccuugggaaa

SEQ ID NO: 2524879 - RNA, 19 nt, Homo sapiens
  misc_RNA (1)...(19): siRNA sense strand
ggagaacaguccuggccua

SEQ ID NO: 2524880 - RNA, 19 nt, Homo sapiens
  misc_RNA (1)...(19): siRNA sense strand
cugcaaaacuggagucaga

SEQ ID NO: 2524881 - RNA, 19 nt, Homo sapiens
  misc_RNA (1)...(19): siRNA sense strand
gccaaguggaacagggcaa

SEQ ID NO: 2524882 - RNA, 19 nt, Homo sapiens
  misc_RNA (1)...(19): siRNA sense strand
ucaagguguagcaggaaua

SEQ ID NO: 2524883 - RNA, 19 nt, Homo sapiens
  misc_RNA (1)...(19): siRNA sense strand
ugaccagaacacauggaaa

SEQ ID NO: 2524884 - RNA, 19 nt, Homo sapiens
  misc_RNA (1)...(19): siRNA sense strand
ggacaaggucgggaggaga

SEQ ID NO: 2524885 - RNA, 19 nt, Homo sapiens
  misc_RNA (1)...(19): siRNA sense strand
uggcaguaagaaagaguuu

SEQ ID NO: 2524886 - RNA, 19 nt, Homo sapiens
  misc_RNA (1)...(19): siRNA sense strand
acuuaggaggcaaugaaua

SEQ ID NO: 2524887 - RNA, 19 nt, Homo sapiens
  misc_RNA (1)...(19): siRNA sense strand
acacaucgaguuugggcua

SEQ ID NO: 2524888 - RNA, 19 nt, Homo sapiens
  misc_RNA (1)...(19): siRNA sense strand
cuguaaacugucagaacuu

SEQ ID NO: 2524889 - RNA, 19 nt, Homo sapiens
  misc_RNA (1)...(19): siRNA sense strand
cggcguuugcaguugauua

SEQ ID NO: 2524890 - RNA, 19 nt, Homo sapiens
  misc_RNA (1)...(19): siRNA sense strand
acgauaugaagaagcacaa

SEQ ID NO: 2524891 - RNA, 19 nt, Homo sapiens
  misc_RNA (1)...(19): siRNA sense strand
agcaggaauaagagggaga

SEQ ID NO: 2524892 - RNA, 19 nt, Homo sapiens
  misc_RNA (1)...(19): siRNA sense strand
aggaauaagagggagaaca

SEQ ID NO: 2524893 - RNA, 19 nt, Homo sapiens
  misc_RNA (1)...(19): siRNA sense strand
acaucauggccaaguggaa

SEQ ID NO: 2524894 - RNA, 19 nt, Homo sapiens
  misc_RNA (1)...(19): siRNA sense strand
aauaagagggagaacacau

SEQ ID NO: 2524895 - RNA, 19 nt, Homo sapiens
  misc_RNA (1)...(19): siRNA sense strand
agguguagcaggaauaaga

SEQ ID NO: 2524896 - RNA, 19 nt, Homo sapiens
  misc_RNA (1)...(19): siRNA sense strand
uugucuaugugauggaauu

SEQ ID NO: 2524897 - RNA, 19 nt, Homo sapiens
  misc_RNA (1)...(19): siRNA sense strand
agagggacgauaugaagaa

SEQ ID NO: 2524898 - RNA, 19 nt, Homo sapiens
  misc_RNA (1)...(19): siRNA sense strand
gcuacauauaugaccagaa

SEQ ID NO: 2524899 - RNA, 19 nt, Homo sapiens
  misc_RNA (1)...(19): siRNA sense strand
guguggauggcuacauaua

SEQ ID NO: 2524900 - RNA, 19 nt, Homo sapiens
  misc_RNA (1)...(19): siRNA sense strand
gauaugaagaagcacaaaa

SEQ ID NO: 2524901 - RNA, 19 nt, Homo sapiens
  misc_RNA (1)...(19): siRNA sense strand
uaguugacaucauggccaa

SEQ ID NO: 2524902 - RNA, 19 nt, Homo sapiens
  misc_RNA (1)...(19): siRNA sense strand
auuuauguuuggaguccua

SEQ ID NO: 2524903 - RNA, 19 nt, Homo sapiens
  misc_RNA (1)...(19): siRNA sense strand
ugauggaauucauuggcau

SEQ ID NO: 2524904 - RNA, 19 nt, Homo sapiens
  misc_RNA (1)...(19): siRNA sense strand
agacaaagauaaacgggaa

SEQ ID NO: 2524905 - RNA, 19 nt, Homo sapiens
  misc_RNA (1)...(19): siRNA sense strand
caaaugaagcagagaccca

SEQ ID NO: 2524906 - RNA, 19 nt, Homo sapiens
  misc_RNA (1)...(19): siRNA sense strand
ugaagaaacuaccgaggga

SEQ ID NO: 2524907 - RNA, 19 nt, Homo sapiens
  misc_RNA (1)...(19): siRNA sense strand
ugacauagcaaaagaagau

SEQ ID NO: 2524908 - RNA, 19 nt, Homo sapiens
  misc_RNA (1)...(19): siRNA sense strand
aauauaugcuagaaagcga

SEQ ID NO: 2524909 - RNA, 19 nt, Homo sapiens
  misc_RNA (1)...(19): siRNA sense strand
ugaacuacugaaagaagaa

SEQ ID NO: 2524910 - RNA, 19 nt, Homo sapiens
  misc_RNA (1)...(19): siRNA sense strand
agauaaacgggaagauacu

SEQ ID NO: 2524911 - RNA, 19 nt, Homo sapiens
  misc_RNA (1)...(19): siRNA sense strand
ccaacagaaagcaguaaaa

SEQ ID NO: 2524912 - RNA, 19 nt, Homo sapiens
  misc_RNA (1)...(19): siRNA sense strand
cugaagaugguuugcccaa

SEQ ID NO: 2524913 - RNA, 19 nt, Homo sapiens
  misc_RNA (1)...(19): siRNA sense strand
cacuacuauuccagacaua

SEQ ID NO: 2524914 - RNA, 19 nt, Homo sapiens
  misc_RNA (1)...(19): siRNA sense strand
ugcccuugaagaagagaaa

SEQ ID NO: 2524915 - RNA, 19 nt, Homo sapiens
  misc_RNA (1)...(19): siRNA sense strand
cgggaagauacucugcuaa

SEQ ID NO: 2524916 - RNA, 19 nt, Homo sapiens
  misc_RNA (1)...(19): siRNA sense strand
ccuccaacagaaagcagua

SEQ ID NO: 2524917 - RNA, 19 nt, Homo sapiens
  misc_RNA (1)...(19): siRNA sense strand
cuaagaucacugagccauu

SEQ ID NO: 2524918 - RNA, 19 nt, Homo sapiens
  misc_RNA (1)...(19): siRNA sense strand
cagugaaaauugggaauau

SEQ ID NO: 2524919 - RNA, 19 nt, Homo sapiens
  misc_RNA (1)...(19): siRNA sense strand
gcugguugcugaagcguca

SEQ ID NO: 2524920 - RNA, 19 nt, Homo sapiens
  misc_RNA (1)...(19): siRNA sense strand
gagcaguccaacagggagu

SEQ ID NO: 2524921 - RNA, 19 nt, Homo sapiens
  misc_RNA (1)...(19): siRNA sense strand
gggcagaggaguacgcuca

SEQ ID NO: 2524922 - RNA, 19 nt, Homo sapiens
  misc_RNA (1)...(19): siRNA sense strand
gggccaaggacaagccuga

SEQ ID NO: 2524923 - RNA, 19 nt, Homo sapiens
  misc_RNA (1)...(19): siRNA sense strand
ccaagauggugucggcuga

SEQ ID NO: 2524924 - RNA, 19 nt, Homo sapiens
  misc_RNA (1)...(19): siRNA sense strand
ucaagaaggagcugcgaca

SEQ ID NO: 2524925 - RNA, 19 nt, Homo sapiens
  misc_RNA (1)...(19): siRNA sense strand
ccucaggggccaaggacaa

SEQ ID NO: 2524926 - RNA, 19 nt, Homo sapiens
  misc_RNA (1)...(19): siRNA sense strand
aagaaggagcugcgacaau

SEQ ID NO: 2524927 - RNA, 19 nt, Homo sapiens
  misc_RNA (1)...(19): siRNA sense strand
uugaaauggccgaccagua

SEQ ID NO: 2524928 - RNA, 19 nt, Homo sapiens
  misc_RNA (1)...(19): siRNA sense strand
ggccgagugauguggacaa

SEQ ID NO: 2524929 - RNA, 19 nt, Homo sapiens
  misc_RNA (1)...(19): siRNA sense strand
ccaagaacauggaggucag

SEQ ID NO: 2524930 - RNA, 19 nt, Homo sapiens
  misc_RNA (1)...(19): siRNA sense strand
gagaagauggacuugguca

SEQ ID NO: 2524931 - RNA, 19 nt, Homo sapiens
  misc_RNA (1)...(19): siRNA sense strand
gagaagaaccaguggcagc

SEQ ID NO: 2524932 - RNA, 19 nt, Homo sapiens
  misc_RNA (1)...(19): siRNA sense strand
aggacaagccugagcugca

SEQ ID NO: 2524933 - RNA, 19 nt, Homo sapiens
  misc_RNA (1)...(19): siRNA sense strand
gcucugagacccuccgcaa

SEQ ID NO: 2524934 - RNA, 19 nt, Homo sapiens
  misc_RNA (1)...(19): siRNA sense strand
ucuuagagauucugcggca

SEQ ID NO: 2524935 - RNA, 19 nt, Homo sapiens
  misc_RNA (1)...(19): siRNA sense strand
guguaaggacguagcccaa

SEQ ID NO: 2524936 - RNA, 19 nt, Homo sapiens
  misc_RNA (1)...(19): siRNA sense strand
gggcugggacagaggagau

SEQ ID NO: 2524937 - RNA, 19 nt, Homo sapiens
  misc_RNA (1)...(19): siRNA sense strand
gagaagagucggaagaggu

SEQ ID NO: 2524938 - RNA, 19 nt, Homo sapiens
  misc_RNA (1)...(19): siRNA sense strand
agaaaggccaaguggacca

SEQ ID NO: 2524939 - RNA, 19 nt, Homo sapiens
  misc_RNA (1)...(19): siRNA sense strand
ggcaauuacagcagagcca

SEQ ID NO: 2524940 - RNA, 19 nt, Homo sapiens
  misc_RNA (1)...(19): siRNA sense strand
gagcggacccagcaguuua

SEQ ID NO: 2524941 - RNA, 19 nt, Homo sapiens
  misc_RNA (1)...(19): siRNA sense strand
aggaaguguugcugacagu

SEQ ID NO: 2524942 - RNA, 19 nt, Homo sapiens
  misc_RNA (1)...(19): siRNA sense strand
cccuggauaaagagaacaa

SEQ ID NO: 2524943 - RNA, 19 nt, Homo sapiens
  misc_RNA (1)...(19): siRNA sense strand
gccuauaauccuaagaacu

SEQ ID NO: 2524944 - RNA, 19 nt, Homo sapiens
  misc_RNA (1)...(19): siRNA sense strand
gguccacacgggagagaaa

SEQ ID NO: 2524945 - RNA, 19 nt, Homo sapiens
  misc_RNA (1)...(19): siRNA sense strand
gugugaggcgugugggaaa

SEQ ID NO: 2524946 - RNA, 19 nt, Homo sapiens
  misc_RNA (1)...(19): siRNA sense strand
agaagaagcaggagaaaau

SEQ ID NO: 2524947 - RNA, 19 nt, Homo sapiens
  misc_RNA (1)...(19): siRNA sense strand
augugaagagugugggaaa

SEQ ID NO: 2524948 - RNA, 19 nt, Homo sapiens
  misc_RNA (1)...(19): siRNA sense strand
agguaaugaauauggcaaa

SEQ ID NO: 2524949 - RNA, 19 nt, Homo sapiens
  misc_RNA (1)...(19): siRNA sense strand
aacucauacuggagagaaa

SEQ ID NO: 2524950 - RNA, 19 nt, Homo sapiens
  misc_RNA (1)...(19): siRNA sense strand
ccaaagaagcagcaagcau

SEQ ID NO: 2524951 - RNA, 19 nt, Homo sapiens
  misc_RNA (1)...(19): siRNA sense strand
agaaauuacccuuaggaga

SEQ ID NO: 2524952 - RNA, 19 nt, Homo sapiens
  misc_RNA (1)...(19): siRNA sense strand
ccauauaaaugugaggaau

SEQ ID NO: 2524953 - RNA, 19 nt, Homo sapiens
  misc_RNA (1)...(19): siRNA sense strand
gaucaaaucuucaugcaca

SEQ ID NO: 2524954 - RNA, 19 nt, Homo sapiens
  misc_RNA (1)...(19): siRNA sense strand
ccucaaagcuucaaaccca

SEQ ID NO: 2524955 - RNA, 19 nt, Homo sapiens
  misc_RNA (1)...(19): siRNA sense strand
aaaugugagcagugugaua

SEQ ID NO: 2524956 - RNA, 19 nt, Homo sapiens
  misc_RNA (1)...(19): siRNA sense strand
cagaguagagguaagcaaa

SEQ ID NO: 2524957 - RNA, 19 nt, Homo sapiens
  misc_RNA (1)...(19): siRNA sense strand
acagguugcaagugaauua

SEQ ID NO: 2524958 - RNA, 19 nt, Homo sapiens
  misc_RNA (1)...(19): siRNA sense strand
augugaagagugugguaaa

SEQ ID NO: 2524959 - RNA, 19 nt, Homo sapiens
  misc_RNA (1)...(19): siRNA sense strand
aagcuuuggaugauggaaa

SEQ ID NO: 2524960 - RNA, 19 nt, Homo sapiens
  misc_RNA (1)...(19): siRNA sense strand
ccuaaaggagauagcucua

SEQ ID NO: 2524961 - RNA, 19 nt, Homo sapiens
  misc_RNA (1)...(19): siRNA sense strand
aguucacacgggagagaaa

SEQ ID NO: 2524962 - RNA, 19 nt, Homo sapiens
  misc_RNA (1)...(19): siRNA sense strand
agaggaagcuguaccgaga

SEQ ID NO: 2524963 - RNA, 19 nt, Homo sapiens
  misc_RNA (1)...(19): siRNA sense strand
auacaaaugcgaagagugu

SEQ ID NO: 2524964 - RNA, 19 nt, Homo sapiens
  misc_RNA (1)...(19): siRNA sense strand
ccugcaaagguaaugaaua

SEQ ID NO: 2524965 - RNA, 19 nt, Homo sapiens
  misc_RNA (1)...(19): siRNA sense strand
gguaaugaauauggcaaaa

SEQ ID NO: 2524966 - RNA, 19 nt, Homo sapiens
  misc_RNA (1)...(19): siRNA sense strand
augcgaggaaugugguaaa

SEQ ID NO: 2524967 - RNA, 19 nt, Homo sapiens
  misc_RNA (1)...(19): siRNA sense strand
cccagaagaagcaggagaa

SEQ ID NO: 2524968 - RNA, 19 nt, Homo sapiens
  misc_RNA (1)...(19): siRNA sense strand
ccagaagaagcaggagaaa

SEQ ID NO: 2524969 - RNA, 19 nt, Homo sapiens
  misc_RNA (1)...(19): siRNA sense strand
cagauucagaguagaggua

SEQ ID NO: 2524970 - RNA, 19 nt, Homo sapiens
  misc_RNA (1)...(19): siRNA sense strand
aguaauucacacuggagaa

SEQ ID NO: 2524971 - RNA, 19 nt, Homo sapiens
  misc_RNA (1)...(19): siRNA sense strand
acagaaacccaaagaagca

SEQ ID NO: 2524972 - RNA, 19 nt, Homo sapiens
  misc_RNA (1)...(19): siRNA sense strand
ggcuucaguuggagaucaa

SEQ ID NO: 2524973 - RNA, 19 nt, Homo sapiens
  misc_RNA (1)...(19): siRNA sense strand
aaauguaaggaguguggua

SEQ ID NO: 2524974 - RNA, 19 nt, Homo sapiens
  misc_RNA (1)...(19): siRNA sense strand
auacaggagagaagucuua

SEQ ID NO: 2524975 - RNA, 19 nt, Homo sapiens
  misc_RNA (1)...(19): siRNA sense strand
gcccuauaaaugugaggaa

SEQ ID NO: 2524976 - RNA, 19 nt, Homo sapiens
  misc_RNA (1)...(19): siRNA sense strand
cccuauaaauguaaggagu

SEQ ID NO: 2524977 - RNA, 19 nt, Homo sapiens
  misc_RNA (1)...(19): siRNA sense strand
augucaugguggagaacuu

SEQ ID NO: 2524978 - RNA, 19 nt, Homo sapiens
  misc_RNA (1)...(19): siRNA sense strand
gaauguucacacaggagaa

SEQ ID NO: 2524979 - RNA, 19 nt, Homo sapiens
  misc_RNA (1)...(19): siRNA sense strand
ccuauaaaugcgaggaaug

SEQ ID NO: 2524980 - RNA, 19 nt, Homo sapiens
  misc_RNA (1)...(19): siRNA sense strand
ccuauaaaugugaggaaug

SEQ ID NO: 2524981 - RNA, 19 nt, Homo sapiens
  misc_RNA (1)...(19): siRNA sense strand
cagaagaagcaggagaaaa

SEQ ID NO: 2524982 - RNA, 19 nt, Homo sapiens
  misc_RNA (1)...(19): siRNA sense strand
uggaugauggaaacagaaa

SEQ ID NO: 2524983 - RNA, 19 nt, Homo sapiens
  misc_RNA (1)...(19): siRNA sense strand
ucagaguagagguaagcaa

SEQ ID NO: 2524984 - RNA, 19 nt, Homo sapiens
  misc_RNA (1)...(19): siRNA sense strand
aauucacccaggagagaaa

SEQ ID NO: 2524985 - RNA, 19 nt, Homo sapiens
  misc_RNA (1)...(19): siRNA sense strand
acucaauagaugucaugaa

SEQ ID NO: 2524986 - RNA, 19 nt, Homo sapiens
  misc_RNA (1)...(19): siRNA sense strand
cguaauacagaucugcaua

SEQ ID NO: 2524987 - RNA, 19 nt, Homo sapiens
  misc_RNA (1)...(19): siRNA sense strand
cauauaaaugugaggaaug

SEQ ID NO: 2524988 - RNA, 19 nt, Homo sapiens
  misc_RNA (1)...(19): siRNA sense strand
ggccauagauuuucgggua

SEQ ID NO: 2524989 - RNA, 19 nt, Homo sapiens
  misc_RNA (1)...(19): siRNA sense strand
ggggaaaagccauacaaau

SEQ ID NO: 2524990 - RNA, 19 nt, Homo sapiens
  misc_RNA (1)...(19): siRNA sense strand
guuuauauaccaucagaga

SEQ ID NO: 2524991 - RNA, 19 nt, Homo sapiens
  misc_RNA (1)...(19): siRNA sense strand
aauuggaagcagaagaaaa

SEQ ID NO: 2524992 - RNA, 19 nt, Homo sapiens
  misc_RNA (1)...(19): siRNA sense strand
agaaaguccauacugguaa

SEQ ID NO: 2524993 - RNA, 19 nt, Homo sapiens
  misc_RNA (1)...(19): siRNA sense strand
cuucaaaucuucaagucca

SEQ ID NO: 2524994 - RNA, 19 nt, Homo sapiens
  misc_RNA (1)...(19): siRNA sense strand
gauucagaguagagguaag

SEQ ID NO: 2524995 - RNA, 19 nt, Homo sapiens
  misc_RNA (1)...(19): siRNA sense strand
uaaugaacccuaaaggaga

SEQ ID NO: 2524996 - RNA, 19 nt, Homo sapiens
  misc_RNA (1)...(19): siRNA sense strand
agucacagauucagaguag

SEQ ID NO: 2524997 - RNA, 19 nt, Homo sapiens
  misc_RNA (1)...(19): siRNA sense strand
aaacugacacagaaccaaa

SEQ ID NO: 2524998 - RNA, 19 nt, Homo sapiens
  misc_RNA (1)...(19): siRNA sense strand
gggagagaaacccuauaaa

SEQ ID NO: 2524999 - RNA, 19 nt, Homo sapiens
  misc_RNA (1)...(19): siRNA sense strand
gugauaagagcuucaguca

SEQ ID NO: 2525000 - RNA, 19 nt, Homo sapiens
  misc_RNA (1)...(19): siRNA sense strand
gagcagaagcgucgggaga

SEQ ID NO: 2525001 - RNA, 19 nt, Homo sapiens
  misc_RNA (1)...(19): siRNA sense strand
uagagaagaaggagcgcaa

SEQ ID NO: 2525002 - RNA, 19 nt, Homo sapiens
  misc_RNA (1)...(19): siRNA sense strand
gggagagggagcagcacau

SEQ ID NO: 2525003 - RNA, 19 nt, Homo sapiens
  misc_RNA (1)...(19): siRNA sense strand
ucgcagagugcauggccaa

SEQ ID NO: 2525004 - RNA, 19 nt, Homo sapiens
  misc_RNA (1)...(19): siRNA sense strand
cagcgggagaacugggaga

SEQ ID NO: 2525005 - RNA, 19 nt, Homo sapiens
  misc_RNA (1)...(19): siRNA sense strand
gcuccaggaccuagagaag

SEQ ID NO: 2525006 - RNA, 19 nt, Homo sapiens
  misc_RNA (1)...(19): siRNA sense strand
cgaagaacgcgaaugguac

SEQ ID NO: 2525007 - RNA, 19 nt, Homo sapiens
  misc_RNA (1)...(19): siRNA sense strand
gguggaacaaucagggaaa

SEQ ID NO: 2525008 - RNA, 19 nt, Homo sapiens
  misc_RNA (1)...(19): siRNA sense strand
uggaauaacaagaugguga

SEQ ID NO: 2525009 - RNA, 19 nt, Homo sapiens
  misc_RNA (1)...(19): siRNA sense strand
caugaagagaagaaagcua

SEQ ID NO: 2525010 - RNA, 19 nt, Homo sapiens
  misc_RNA (1)...(19): siRNA sense strand
aggaaaaggcagacaaaga

SEQ ID NO: 2525011 - RNA, 19 nt, Homo sapiens
  misc_RNA (1)...(19): siRNA sense strand
aggaaaaggcagacaaaga

SEQ ID NO: 2525012 - RNA, 19 nt, Homo sapiens
  misc_RNA (1)...(19): siRNA sense strand
augaagagaagaaagcuaa

SEQ ID NO: 2525013 - RNA, 19 nt, Homo sapiens
  misc_RNA (1)...(19): siRNA sense strand
gaagaaacccggugcagca

SEQ ID NO: 2525014 - RNA, 19 nt, Homo sapiens
  misc_RNA (1)...(19): siRNA sense strand
ggugagaugugguacccaa

SEQ ID NO: 2525015 - RNA, 19 nt, Homo sapiens
  misc_RNA (1)...(19): siRNA sense strand
gcuccgugguagugauuga

SEQ ID NO: 2525016 - RNA, 19 nt, Homo sapiens
  misc_RNA (1)...(19): siRNA sense strand
caacagugaugauucggaa

SEQ ID NO: 2525017 - RNA, 19 nt, Homo sapiens
  misc_RNA (1)...(19): siRNA sense strand
caacagugaugauucggaa

SEQ ID NO: 2525018 - RNA, 19 nt, Homo sapiens
  misc_RNA (1)...(19): siRNA sense strand
caacagugaugauucggaa

SEQ ID NO: 2525019 - RNA, 19 nt, Homo sapiens
  misc_RNA (1)...(19): siRNA sense strand
cggaggaggacgaggauug

SEQ ID NO: 2525020 - RNA, 19 nt, Homo sapiens
  misc_RNA (1)...(19): siRNA sense strand
aaguauuaugccaggaaau

SEQ ID NO: 2525021 - RNA, 19 nt, Homo sapiens
  misc_RNA (1)...(19): siRNA sense strand
cggauguucccgaagacaa

SEQ ID NO: 2525022 - RNA, 19 nt, Homo sapiens
  misc_RNA (1)...(19): siRNA sense strand
augaagaagagcugguuga

SEQ ID NO: 2525023 - RNA, 19 nt, Homo sapiens
  misc_RNA (1)...(19): siRNA sense strand
ugcaagagccggaggagga

SEQ ID NO: 2525024 - RNA, 19 nt, Homo sapiens
  misc_RNA (1)...(19): siRNA sense strand
aggaggacgaggauuguua

SEQ ID NO: 2525025 - RNA, 19 nt, Homo sapiens
  misc_RNA (1)...(19): siRNA sense strand
cagcagugaugauucggaa

SEQ ID NO: 2525026 - RNA, 19 nt, Homo sapiens
  misc_RNA (1)...(19): siRNA sense strand
cagcagugaugauucggaa

SEQ ID NO: 2525027 - RNA, 19 nt, Homo sapiens
  misc_RNA (1)...(19): siRNA sense strand
cagcagugaugauucggaa

SEQ ID NO: 2525028 - RNA, 19 nt, Homo sapiens
  misc_RNA (1)...(19): siRNA sense strand
cagcagugaugauucggaa

SEQ ID NO: 2525029 - RNA, 19 nt, Homo sapiens
  misc_RNA (1)...(19): siRNA sense strand
cagcagugaugauucggaa

SEQ ID NO: 2525030 - RNA, 19 nt, Homo sapiens
  misc_RNA (1)...(19): siRNA sense strand
cagcagugaugauucggaa

SEQ ID NO: 2525031 - RNA, 19 nt, Homo sapiens
  misc_RNA (1)...(19): siRNA sense strand
cagcagugaugauucggaa

SEQ ID NO: 2525032 - RNA, 19 nt, Homo sapiens
  misc_RNA (1)...(19): siRNA sense strand
cggaagcuccugacgacaa

SEQ ID NO: 2525033 - RNA, 19 nt, Homo sapiens
  misc_RNA (1)...(19): siRNA sense strand
cggaagcucccgacgacaa

SEQ ID NO: 2525034 - RNA, 19 nt, Homo sapiens
  misc_RNA (1)...(19): siRNA sense strand
cggaagcucccgacgacaa

SEQ ID NO: 2525035 - RNA, 19 nt, Homo sapiens
  misc_RNA (1)...(19): siRNA sense strand
cggaagcucccgacgacaa

SEQ ID NO: 2525036 - RNA, 19 nt, Homo sapiens
  misc_RNA (1)...(19): siRNA sense strand
cgguaaugauuuggaaguu

SEQ ID NO: 2525037 - RNA, 19 nt, Homo sapiens
  misc_RNA (1)...(19): siRNA sense strand
cgaggaaaaggcagacaaa

SEQ ID NO: 2525038 - RNA, 19 nt, Homo sapiens
  misc_RNA (1)...(19): siRNA sense strand
ggauguucccgaugacaau

SEQ ID NO: 2525039 - RNA, 19 nt, Homo sapiens
  misc_RNA (1)...(19): siRNA sense strand
augcaaagucccuggaugu

SEQ ID NO: 2525040 - RNA, 19 nt, Homo sapiens
  misc_RNA (1)...(19): siRNA sense strand
guguaaugaaggccaaauu

SEQ ID NO: 2525041 - RNA, 19 nt, Homo sapiens
  misc_RNA (1)...(19): siRNA sense strand
cggauguucccgacgacaa

SEQ ID NO: 2525042 - RNA, 19 nt, Homo sapiens
  misc_RNA (1)...(19): siRNA sense strand
cggauguucccgacgacaa

SEQ ID NO: 2525043 - RNA, 19 nt, Homo sapiens
  misc_RNA (1)...(19): siRNA sense strand
cggauguucccgaugacaa

SEQ ID NO: 2525044 - RNA, 19 nt, Homo sapiens
  misc_RNA (1)...(19): siRNA sense strand
cagcaaaccaccaagugau

SEQ ID NO: 2525045 - RNA, 19 nt, Homo sapiens
  misc_RNA (1)...(19): siRNA sense strand
cgaugacaauagugaugau

SEQ ID NO: 2525046 - RNA, 19 nt, Homo sapiens
  misc_RNA (1)...(19): siRNA sense strand
cagaagcucccgacgacaa

SEQ ID NO: 2525047 - RNA, 19 nt, Homo sapiens
  misc_RNA (1)...(19): siRNA sense strand
gaggaagaggaaggcgaaa

SEQ ID NO: 2525048 - RNA, 19 nt, Homo sapiens
  misc_RNA (1)...(19): siRNA sense strand
augacaaugacgaugacaa

SEQ ID NO: 2525049 - RNA, 19 nt, Homo sapiens
  misc_RNA (1)...(19): siRNA sense strand
caaggaaaaggcagacaaa

SEQ ID NO: 2525050 - RNA, 19 nt, Homo sapiens
  misc_RNA (1)...(19): siRNA sense strand
gcauaggcuggaauaacaa

SEQ ID NO: 2525051 - RNA, 19 nt, Homo sapiens
  misc_RNA (1)...(19): siRNA sense strand
acacccaugaagagaagaa

SEQ ID NO: 2525052 - RNA, 19 nt, Homo sapiens
  misc_RNA (1)...(19): siRNA sense strand
aggcagacaaagaccaaaa

SEQ ID NO: 2525053 - RNA, 19 nt, Homo sapiens
  misc_RNA (1)...(19): siRNA sense strand
aggcagacaaagaccaaaa

SEQ ID NO: 2525054 - RNA, 19 nt, Homo sapiens
  misc_RNA (1)...(19): siRNA sense strand
ccaccaaggaaaaggcaga

SEQ ID NO: 2525055 - RNA, 19 nt, Homo sapiens
  misc_RNA (1)...(19): siRNA sense strand
cugaggaagaggaaggcga

SEQ ID NO: 2525056 - RNA, 19 nt, Homo sapiens
  misc_RNA (1)...(19): siRNA sense strand
gaauaacaagauggugaaa

SEQ ID NO: 2525057 - RNA, 19 nt, Homo sapiens
  misc_RNA (1)...(19): siRNA sense strand
ccgcuucaucugugccaaa

SEQ ID NO: 2525058 - RNA, 19 nt, Homo sapiens
  misc_RNA (1)...(19): siRNA sense strand
ugaggaagaggaaggcgaa

SEQ ID NO: 2525059 - RNA, 19 nt, Homo sapiens
  misc_RNA (1)...(19): siRNA sense strand
caacagugaugauucggau

SEQ ID NO: 2525060 - RNA, 19 nt, Homo sapiens
  misc_RNA (1)...(19): siRNA sense strand
cgacgacagcagugaugau

SEQ ID NO: 2525061 - RNA, 19 nt, Homo sapiens
  misc_RNA (1)...(19): siRNA sense strand
cgacgacagcagugaugau

SEQ ID NO: 2525062 - RNA, 19 nt, Homo sapiens
  misc_RNA (1)...(19): siRNA sense strand
cgacgacagcagugaugau

SEQ ID NO: 2525063 - RNA, 19 nt, Homo sapiens
  misc_RNA (1)...(19): siRNA sense strand
cgacgacagcagugaugau

SEQ ID NO: 2525064 - RNA, 19 nt, Homo sapiens
  misc_RNA (1)...(19): siRNA sense strand
cgacgacagcagugaugau

SEQ ID NO: 2525065 - RNA, 19 nt, Homo sapiens
  misc_RNA (1)...(19): siRNA sense strand
cgacgacagcagugaugau

SEQ ID NO: 2525066 - RNA, 19 nt, Homo sapiens
  misc_RNA (1)...(19): siRNA sense strand
cgacgacagcagugaugau

SEQ ID NO: 2525067 - RNA, 19 nt, Homo sapiens
  misc_RNA (1)...(19): siRNA sense strand
cgacgacagcagugaugau

SEQ ID NO: 2525068 - RNA, 19 nt, Homo sapiens
  misc_RNA (1)...(19): siRNA sense strand
ugccauuaacucagaaaga

SEQ ID NO: 2525069 - RNA, 19 nt, Homo sapiens
  misc_RNA (1)...(19): siRNA sense strand
cagaaagaugggacccgua

SEQ ID NO: 2525070 - RNA, 19 nt, Homo sapiens
  misc_RNA (1)...(19): siRNA sense strand
augacgaugacaacgguaa

SEQ ID NO: 2525071 - RNA, 19 nt, Homo sapiens
  misc_RNA (1)...(19): siRNA sense strand
aggaagaggaaggcgaaaa

SEQ ID NO: 2525072 - RNA, 19 nt, Homo sapiens
  misc_RNA (1)...(19): siRNA sense strand
agguggagaagcugagaaa

SEQ ID NO: 2525073 - RNA, 19 nt, Homo sapiens
  misc_RNA (1)...(19): siRNA sense strand
gaggaaaaggcaaggacau

SEQ ID NO: 2525074 - RNA, 19 nt, Homo sapiens
  misc_RNA (1)...(19): siRNA sense strand
cagagcaggaugaggcuga

SEQ ID NO: 2525075 - RNA, 19 nt, Homo sapiens
  misc_RNA (1)...(19): siRNA sense strand
cugagaaaggagagcggca

SEQ ID NO: 2525076 - RNA, 19 nt, Homo sapiens
  misc_RNA (1)...(19): siRNA sense strand
gcaagcaggaggugaccga

SEQ ID NO: 2525077 - RNA, 19 nt, Homo sapiens
  misc_RNA (1)...(19): siRNA sense strand
ccuacuacaaggcaggcaa

SEQ ID NO: 2525078 - RNA, 19 nt, Homo sapiens
  misc_RNA (1)...(19): siRNA sense strand
aggaugacguggagggugu

SEQ ID NO: 2525079 - RNA, 19 nt, Homo sapiens
  misc_RNA (1)...(19): siRNA sense strand
caaaggugguaaagagcca

SEQ ID NO: 2525080 - RNA, 19 nt, Homo sapiens
  misc_RNA (1)...(19): siRNA sense strand
gcgccuacacugugggcau

SEQ ID NO: 2525081 - RNA, 19 nt, Homo sapiens
  misc_RNA (1)...(19): siRNA sense strand
augagauggagcuggcaaa

SEQ ID NO: 2525082 - RNA, 19 nt, Homo sapiens
  misc_RNA (1)...(19): siRNA sense strand
acguggagggugugugcaa

SEQ ID NO: 2525083 - RNA, 19 nt, Homo sapiens
  misc_RNA (1)...(19): siRNA sense strand
auguggagguggugggugu

SEQ ID NO: 2525084 - RNA, 19 nt, Homo sapiens
  misc_RNA (1)...(19): siRNA sense strand
ggaccuuggugguggcuuc

SEQ ID NO: 2525085 - RNA, 19 nt, Homo sapiens
  misc_RNA (1)...(19): siRNA sense strand
cuggcagggaggaggaaaa

SEQ ID NO: 2525086 - RNA, 19 nt, Homo sapiens
  misc_RNA (1)...(19): siRNA sense strand
ugaugguggaggagggcuu

SEQ ID NO: 2525087 - RNA, 19 nt, Homo sapiens
  misc_RNA (1)...(19): siRNA sense strand
gaucaaauaugcugccaag

SEQ ID NO: 2525088 - RNA, 19 nt, Homo sapiens
  misc_RNA (1)...(19): siRNA sense strand
cgaagaagcaccaugugga

SEQ ID NO: 2525089 - RNA, 19 nt, Homo sapiens
  misc_RNA (1)...(19): siRNA sense strand
agguggugggugugaguuu

SEQ ID NO: 2525090 - RNA, 19 nt, Homo sapiens
  misc_RNA (1)...(19): siRNA sense strand
gcugcugagcuuugacaau

SEQ ID NO: 2525091 - RNA, 19 nt, Homo sapiens
  misc_RNA (1)...(19): siRNA sense strand
cugccugagccuaaaguuu

SEQ ID NO: 2525092 - RNA, 19 nt, Homo sapiens
  misc_RNA (1)...(19): siRNA sense strand
ucacauuggcaguggcugu

SEQ ID NO: 2525093 - RNA, 19 nt, Homo sapiens
  misc_RNA (1)...(19): siRNA sense strand
aagugagauuugaagagau

SEQ ID NO: 2525094 - RNA, 19 nt, Homo sapiens
  misc_RNA (1)...(19): siRNA sense strand
cugacuuuguggagagauu

SEQ ID NO: 2525095 - RNA, 19 nt, Homo sapiens
  misc_RNA (1)...(19): siRNA sense strand
ggcaaggguuccuacgcaa

SEQ ID NO: 2525096 - RNA, 19 nt, Homo sapiens
  misc_RNA (1)...(19): siRNA sense strand
ucaagaucaucgaccgcaa

SEQ ID NO: 2525097 - RNA, 19 nt, Homo sapiens
  misc_RNA (1)...(19): siRNA sense strand
ccgagaacgagaacaggau

SEQ ID NO: 2525098 - RNA, 19 nt, Homo sapiens
  misc_RNA (1)...(19): siRNA sense strand
agaacaggauggaggacag

SEQ ID NO: 2525099 - RNA, 19 nt, Homo sapiens
  misc_RNA (1)...(19): siRNA sense strand
aagcugaggaugaggguga

SEQ ID NO: 2525100 - RNA, 19 nt, Homo sapiens
  misc_RNA (1)...(19): siRNA sense strand
gaucaaugcuguggaugaa

SEQ ID NO: 2525101 - RNA, 19 nt, Homo sapiens
  misc_RNA (1)...(19): siRNA sense strand
agaucaaugcuguggauga

SEQ ID NO: 2525102 - RNA, 19 nt, Homo sapiens
  misc_RNA (1)...(19): siRNA sense strand
agccaaggaggcaggauaa

SEQ ID NO: 2525103 - RNA, 19 nt, Homo sapiens
  misc_RNA (1)...(19): siRNA sense strand
cgauacaggcacagaccau

SEQ ID NO: 2525104 - RNA, 19 nt, Homo sapiens
  misc_RNA (1)...(19): siRNA sense strand
ggaaaugcauggaagcugu

SEQ ID NO: 2525105 - RNA, 19 nt, Homo sapiens
  misc_RNA (1)...(19): siRNA sense strand
cagaauagcuggugacagg

SEQ ID NO: 2525106 - RNA, 19 nt, Homo sapiens
  misc_RNA (1)...(19): siRNA sense strand
ccagaaggaaccagagcca

SEQ ID NO: 2525107 - RNA, 19 nt, Homo sapiens
  misc_RNA (1)...(19): siRNA sense strand
cggugauagaugugauuga

SEQ ID NO: 2525108 - RNA, 19 nt, Homo sapiens
  misc_RNA (1)...(19): siRNA sense strand
ugucugaagaagaggaguu

SEQ ID NO: 2525109 - RNA, 19 nt, Homo sapiens
  misc_RNA (1)...(19): siRNA sense strand
gcauggaagcuguggugca

SEQ ID NO: 2525110 - RNA, 19 nt, Homo sapiens
  misc_RNA (1)...(19): siRNA sense strand
aggaagcgauacaggcaca

SEQ ID NO: 2525111 - RNA, 19 nt, Homo sapiens
  misc_RNA (1)...(19): siRNA sense strand
cugagaagccagacugcau

SEQ ID NO: 2525112 - RNA, 19 nt, Homo sapiens
  misc_RNA (1)...(19): siRNA sense strand
gguacuggaagcugaggau

SEQ ID NO: 2525113 - RNA, 19 nt, Homo sapiens
  misc_RNA (1)...(19): siRNA sense strand
gcgaauauguggccaggcu

SEQ ID NO: 2525114 - RNA, 19 nt, Homo sapiens
  misc_RNA (1)...(19): siRNA sense strand
aggccuucuccuugagcaa

SEQ ID NO: 2525115 - RNA, 19 nt, Homo sapiens
  misc_RNA (1)...(19): siRNA sense strand
ccagcaggaaggagauuca

SEQ ID NO: 2525116 - RNA, 19 nt, Homo sapiens
  misc_RNA (1)...(19): siRNA sense strand
caacaguaccugcagcaca

SEQ ID NO: 2525117 - RNA, 19 nt, Homo sapiens
  misc_RNA (1)...(19): siRNA sense strand
aagcuguggugcaagaaaa

SEQ ID NO: 2525118 - RNA, 19 nt, Homo sapiens
  misc_RNA (1)...(19): siRNA sense strand
ggucauucaaagaaaccuu

SEQ ID NO: 2525119 - RNA, 19 nt, Homo sapiens
  misc_RNA (1)...(19): siRNA sense strand
cugcaaaggagacuggguu

SEQ ID NO: 2525120 - RNA, 19 nt, Homo sapiens
  misc_RNA (1)...(19): siRNA sense strand
cuuucaaguuggugcaaaa

SEQ ID NO: 2525121 - RNA, 19 nt, Homo sapiens
  misc_RNA (1)...(19): siRNA sense strand
cagugguggaagacagaaa

SEQ ID NO: 2525122 - RNA, 19 nt, Homo sapiens
  misc_RNA (1)...(19): siRNA sense strand
ggaugaaguuggacagcag

SEQ ID NO: 2525123 - RNA, 19 nt, Homo sapiens
  misc_RNA (1)...(19): siRNA sense strand
gggcaucugcagaagguga

SEQ ID NO: 2525124 - RNA, 19 nt, Homo sapiens
  misc_RNA (1)...(19): siRNA sense strand
ccucagugguuuaacagga

SEQ ID NO: 2525125 - RNA, 19 nt, Homo sapiens
  misc_RNA (1)...(19): siRNA sense strand
aggugaagccucagugguu

SEQ ID NO: 2525126 - RNA, 19 nt, Homo sapiens
  misc_RNA (1)...(19): siRNA sense strand
gcaccgugggcuauggcua

SEQ ID NO: 2525127 - RNA, 19 nt, Homo sapiens
  misc_RNA (1)...(19): siRNA sense strand
ugggagacacaguuggauu

SEQ ID NO: 2525128 - RNA, 19 nt, Homo sapiens
  misc_RNA (1)...(19): siRNA sense strand
gcagugaaacaguggugga

SEQ ID NO: 2525129 - RNA, 19 nt, Homo sapiens
  misc_RNA (1)...(19): siRNA sense strand
uguucagcaccgugggcua

SEQ ID NO: 2525130 - RNA, 19 nt, Homo sapiens
  misc_RNA (1)...(19): siRNA sense strand
gugcacaacuggaagcuca

SEQ ID NO: 2525131 - RNA, 19 nt, Homo sapiens
  misc_RNA (1)...(19): siRNA sense strand
cuggaagagauuaagagua

SEQ ID NO: 2525132 - RNA, 19 nt, Homo sapiens
  misc_RNA (1)...(19): siRNA sense strand
acgaauuggccauggcuga

SEQ ID NO: 2525133 - RNA, 19 nt, Homo sapiens
  misc_RNA (1)...(19): siRNA sense strand
cuuucggcuucgagggaau

SEQ ID NO: 2525134 - RNA, 19 nt, Homo sapiens
  misc_RNA (1)...(19): siRNA sense strand
ucacgcaagucuagagcca

SEQ ID NO: 2525135 - RNA, 19 nt, Homo sapiens
  misc_RNA (1)...(19): siRNA sense strand
caaagauaaagcagggcca

SEQ ID NO: 2525136 - RNA, 19 nt, Homo sapiens
  misc_RNA (1)...(19): siRNA sense strand
cuucaaacucacugaucuu

SEQ ID NO: 2525137 - RNA, 19 nt, Homo sapiens
  misc_RNA (1)...(19): siRNA sense strand
agacaaagacuggggaaga

SEQ ID NO: 2525138 - RNA, 19 nt, Homo sapiens
  misc_RNA (1)...(19): siRNA sense strand
agccaaaacuguagaccuu

SEQ ID NO: 2525139 - RNA, 19 nt, Homo sapiens
  misc_RNA (1)...(19): siRNA sense strand
cuggaggauuugugccuuu

SEQ ID NO: 2525140 - RNA, 19 nt, Homo sapiens
  misc_RNA (1)...(19): siRNA sense strand
aaguggaguugcaggagga

SEQ ID NO: 2525141 - RNA, 19 nt, Homo sapiens
  misc_RNA (1)...(19): siRNA sense strand
uugacaaccugauugggaa

SEQ ID NO: 2525142 - RNA, 19 nt, Homo sapiens
  misc_RNA (1)...(19): siRNA sense strand
gccuaagcacccuggauuu

SEQ ID NO: 2525143 - RNA, 19 nt, Homo sapiens
  misc_RNA (1)...(19): siRNA sense strand
gaauaagcucagugggaaa

SEQ ID NO: 2525144 - RNA, 19 nt, Homo sapiens
  misc_RNA (1)...(19): siRNA sense strand
ccuacaagacugugguuaa

SEQ ID NO: 2525145 - RNA, 19 nt, Homo sapiens
  misc_RNA (1)...(19): siRNA sense strand
aagcauaaguucugagcau

SEQ ID NO: 2525146 - RNA, 19 nt, Homo sapiens
  misc_RNA (1)...(19): siRNA sense strand
cuuaaauagugguggagau

SEQ ID NO: 2525147 - RNA, 19 nt, Homo sapiens
  misc_RNA (1)...(19): siRNA sense strand
gagaauaagcucaguggga

SEQ ID NO: 2525148 - RNA, 19 nt, Homo sapiens
  misc_RNA (1)...(19): siRNA sense strand
gggaacagauuuugggaga

SEQ ID NO: 2525149 - RNA, 19 nt, Homo sapiens
  misc_RNA (1)...(19): siRNA sense strand
agaggaagccaguggaaca

SEQ ID NO: 2525150 - RNA, 19 nt, Homo sapiens
  misc_RNA (1)...(19): siRNA sense strand
aggugaacuugaugcuaaa

SEQ ID NO: 2525151 - RNA, 19 nt, Homo sapiens
  misc_RNA (1)...(19): siRNA sense strand
cuucagacuucacuggaaa

SEQ ID NO: 2525152 - RNA, 19 nt, Homo sapiens
  misc_RNA (1)...(19): siRNA sense strand
caguauuuguggaagucua

SEQ ID NO: 2525153 - RNA, 19 nt, Homo sapiens
  misc_RNA (1)...(19): siRNA sense strand
gaugcuaaaugauggaaaa

SEQ ID NO: 2525154 - RNA, 19 nt, Homo sapiens
  misc_RNA (1)...(19): siRNA sense strand
cagaagaacacauggaucu

SEQ ID NO: 2525155 - RNA, 19 nt, Homo sapiens
  misc_RNA (1)...(19): siRNA sense strand
gaaacuacuucaagggucu

SEQ ID NO: 2525156 - RNA, 19 nt, Homo sapiens
  misc_RNA (1)...(19): siRNA sense strand
cuggagaggagaaggcaau

SEQ ID NO: 2525157 - RNA, 19 nt, Homo sapiens
  misc_RNA (1)...(19): siRNA sense strand
ucuaaagaugcuucaguaa

SEQ ID NO: 2525158 - RNA, 19 nt, Homo sapiens
  misc_RNA (1)...(19): siRNA sense strand
gguuaaugcugcuucugaa

SEQ ID NO: 2525159 - RNA, 19 nt, Homo sapiens
  misc_RNA (1)...(19): siRNA sense strand
ucaggaaggcaguggccaa

SEQ ID NO: 2525160 - RNA, 19 nt, Homo sapiens
  misc_RNA (1)...(19): siRNA sense strand
uaacauugaacuugugcaa

SEQ ID NO: 2525161 - RNA, 19 nt, Homo sapiens
  misc_RNA (1)...(19): siRNA sense strand
ugggaacguuauuuggaaa

SEQ ID NO: 2525162 - RNA, 19 nt, Homo sapiens
  misc_RNA (1)...(19): siRNA sense strand
cgauagggacucagaaaau

SEQ ID NO: 2525163 - RNA, 19 nt, Homo sapiens
  misc_RNA (1)...(19): siRNA sense strand
aggcaguggccaaguauuu

SEQ ID NO: 2525164 - RNA, 19 nt, Homo sapiens
  misc_RNA (1)...(19): siRNA sense strand
cuuuaaagaacugcagaaa

SEQ ID NO: 2525165 - RNA, 19 nt, Homo sapiens
  misc_RNA (1)...(19): siRNA sense strand
ggacauugcucuucagccu

SEQ ID NO: 2525166 - RNA, 19 nt, Homo sapiens
  misc_RNA (1)...(19): siRNA sense strand
uuaugaacuuccuggagaa

SEQ ID NO: 2525167 - RNA, 19 nt, Homo sapiens
  misc_RNA (1)...(19): siRNA sense strand
gguaaaaugggaacagauu

SEQ ID NO: 2525168 - RNA, 19 nt, Homo sapiens
  misc_RNA (1)...(19): siRNA sense strand
ccuugguggugaagcguuu

SEQ ID NO: 2525169 - RNA, 19 nt, Homo sapiens
  misc_RNA (1)...(19): siRNA sense strand
cuacaauggcagcaaugaa

SEQ ID NO: 2525170 - RNA, 19 nt, Homo sapiens
  misc_RNA (1)...(19): siRNA sense strand
uggcagaaacagagugugu

SEQ ID NO: 2525171 - RNA, 19 nt, Homo sapiens
  misc_RNA (1)...(19): siRNA sense strand
gaaaagacagucagaucaa

SEQ ID NO: 2525172 - RNA, 19 nt, Homo sapiens
  misc_RNA (1)...(19): siRNA sense strand
uuacaguauuuguggaagu

SEQ ID NO: 2525173 - RNA, 19 nt, Homo sapiens
  misc_RNA (1)...(19): siRNA sense strand
aggcaaauguguagaugcu

SEQ ID NO: 2525174 - RNA, 19 nt, Homo sapiens
  misc_RNA (1)...(19): siRNA sense strand
ugauacauuuacaguggaa

SEQ ID NO: 2525175 - RNA, 19 nt, Homo sapiens
  misc_RNA (1)...(19): siRNA sense strand
gcauaaguucugagcaugu

SEQ ID NO: 2525176 - RNA, 19 nt, Homo sapiens
  misc_RNA (1)...(19): siRNA sense strand
agaucaaacgucauggcaa

SEQ ID NO: 2525177 - RNA, 19 nt, Homo sapiens
  misc_RNA (1)...(19): siRNA sense strand
agaauaagcucagugggaa

SEQ ID NO: 2525178 - RNA, 19 nt, Homo sapiens
  misc_RNA (1)...(19): siRNA sense strand
aucagggacuacagggaua

SEQ ID NO: 2525179 - RNA, 19 nt, Homo sapiens
  misc_RNA (1)...(19): siRNA sense strand
cagaagcuggagaggagaa

SEQ ID NO: 2525180 - RNA, 19 nt, Homo sapiens
  misc_RNA (1)...(19): siRNA sense strand
ccaacauugcuuagaagau

SEQ ID NO: 2525181 - RNA, 19 nt, Homo sapiens
  misc_RNA (1)...(19): siRNA sense strand
cugcaguggaaauuugaaa

SEQ ID NO: 2525182 - RNA, 19 nt, Homo sapiens
  misc_RNA (1)...(19): siRNA sense strand
auacauuuacaguggaaca

SEQ ID NO: 2525183 - RNA, 19 nt, Homo sapiens
  misc_RNA (1)...(19): siRNA sense strand
ggagaggagaaggcaauaa

SEQ ID NO: 2525184 - RNA, 19 nt, Homo sapiens
  misc_RNA (1)...(19): siRNA sense strand
agacuuugugacugugaaa

SEQ ID NO: 2525185 - RNA, 19 nt, Homo sapiens
  misc_RNA (1)...(19): siRNA sense strand
cuucuuaaauaguggugga

SEQ ID NO: 2525186 - RNA, 19 nt, Homo sapiens
  misc_RNA (1)...(19): siRNA sense strand
guaccugggcuucuggaaa

SEQ ID NO: 2525187 - RNA, 19 nt, Homo sapiens
  misc_RNA (1)...(19): siRNA sense strand
gaggucagacacaggcaaa

SEQ ID NO: 2525188 - RNA, 19 nt, Homo sapiens
  misc_RNA (1)...(19): siRNA sense strand
cgaauugaauccucagcau

SEQ ID NO: 2525189 - RNA, 19 nt, Homo sapiens
  misc_RNA (1)...(19): siRNA sense strand
uucaggaauuggugcauaa

SEQ ID NO: 2525190 - RNA, 19 nt, Homo sapiens
  misc_RNA (1)...(19): siRNA sense strand
cuacaagacugugguuaau

SEQ ID NO: 2525191 - RNA, 19 nt, Homo sapiens
  misc_RNA (1)...(19): siRNA sense strand
gcuggagaggagaaggcaa

SEQ ID NO: 2525192 - RNA, 19 nt, Homo sapiens
  misc_RNA (1)...(19): siRNA sense strand
gagcaugucaaugaagaaa

SEQ ID NO: 2525193 - RNA, 19 nt, Homo sapiens
  misc_RNA (1)...(19): siRNA sense strand
acagguugcugaagagcuu

SEQ ID NO: 2525194 - RNA, 19 nt, Homo sapiens
  misc_RNA (1)...(19): siRNA sense strand
ggaaauuauucucagcagu

SEQ ID NO: 2525195 - RNA, 19 nt, Homo sapiens
  misc_RNA (1)...(19): siRNA sense strand
aguggaacauaaugaccua

SEQ ID NO: 2525196 - RNA, 19 nt, Homo sapiens
  misc_RNA (1)...(19): siRNA sense strand
ucauaaguguauaguacca

SEQ ID NO: 2525197 - RNA, 19 nt, Homo sapiens
  misc_RNA (1)...(19): siRNA sense strand
ugacaucacacaagaagau

SEQ ID NO: 2525198 - RNA, 19 nt, Homo sapiens
  misc_RNA (1)...(19): siRNA sense strand
gcuguuacacugugacuuu

SEQ ID NO: 2525199 - RNA, 19 nt, Homo sapiens
  misc_RNA (1)...(19): siRNA sense strand
cuuucaaggaauucgggaa

SEQ ID NO: 2525200 - RNA, 19 nt, Homo sapiens
  misc_RNA (1)...(19): siRNA sense strand
agacuuacccucuuggauu

SEQ ID NO: 2525201 - RNA, 19 nt, Homo sapiens
  misc_RNA (1)...(19): siRNA sense strand
acacauggaucugaggcua

SEQ ID NO: 2525202 - RNA, 19 nt, Homo sapiens
  misc_RNA (1)...(19): siRNA sense strand
cacauggaucugaggcuaa

SEQ ID NO: 2525203 - RNA, 19 nt, Homo sapiens
  misc_RNA (1)...(19): siRNA sense strand
aguugaagucagagauacu

SEQ ID NO: 2525204 - RNA, 19 nt, Homo sapiens
  misc_RNA (1)...(19): siRNA sense strand
ugaaagauggagagauuuu

SEQ ID NO: 2525205 - RNA, 19 nt, Homo sapiens
  misc_RNA (1)...(19): siRNA sense strand
gucaaaauguggaggaacu

SEQ ID NO: 2525206 - RNA, 19 nt, Homo sapiens
  misc_RNA (1)...(19): siRNA sense strand
uuaaauagugguggagauu

SEQ ID NO: 2525207 - RNA, 19 nt, Homo sapiens
  misc_RNA (1)...(19): siRNA sense strand
agaaagggaagaagggcuu

SEQ ID NO: 2525208 - RNA, 19 nt, Homo sapiens
  misc_RNA (1)...(19): siRNA sense strand
cauaauggcucccaggaca

SEQ ID NO: 2525209 - RNA, 19 nt, Homo sapiens
  misc_RNA (1)...(19): siRNA sense strand
aggucaaguuccugggcca

SEQ ID NO: 2525210 - RNA, 19 nt, Homo sapiens
  misc_RNA (1)...(19): siRNA sense strand
uuacaggauuacaugguca

SEQ ID NO: 2525211 - RNA, 19 nt, Homo sapiens
  misc_RNA (1)...(19): siRNA sense strand
gaagauauucugaagcuca

SEQ ID NO: 2525212 - RNA, 19 nt, Homo sapiens
  misc_RNA (1)...(19): siRNA sense strand
ugguaaaugacaacuggaa

SEQ ID NO: 2525213 - RNA, 19 nt, Homo sapiens
  misc_RNA (1)...(19): siRNA sense strand
acaugaaauaucugcguca

SEQ ID NO: 2525214 - RNA, 19 nt, Homo sapiens
  misc_RNA (1)...(19): siRNA sense strand
gaaaguagagcauucgaga

SEQ ID NO: 2525215 - RNA, 19 nt, Homo sapiens
  misc_RNA (1)...(19): siRNA sense strand
acauggauucauacacaaa

SEQ ID NO: 2525216 - RNA, 19 nt, Homo sapiens
  misc_RNA (1)...(19): siRNA sense strand
ucaagaaaguuuaggugag

SEQ ID NO: 2525217 - RNA, 19 nt, Homo sapiens
  misc_RNA (1)...(19): siRNA sense strand
ucucuguguuggaagaaaa

SEQ ID NO: 2525218 - RNA, 19 nt, Homo sapiens
  misc_RNA (1)...(19): siRNA sense strand
acauggaggugcuggugga

SEQ ID NO: 2525219 - RNA, 19 nt, Homo sapiens
  misc_RNA (1)...(19): siRNA sense strand
aaguuuaggugaggggaua

SEQ ID NO: 2525220 - RNA, 19 nt, Homo sapiens
  misc_RNA (1)...(19): siRNA sense strand
cgucagaagaauauuccau

SEQ ID NO: 2525221 - RNA, 19 nt, Homo sapiens
  misc_RNA (1)...(19): siRNA sense strand
acuccaaauccaaggucuu

SEQ ID NO: 2525222 - RNA, 19 nt, Homo sapiens
  misc_RNA (1)...(19): siRNA sense strand
cgguagagccgcuggucuu

SEQ ID NO: 2525223 - RNA, 19 nt, Homo sapiens
  misc_RNA (1)...(19): siRNA sense strand
acuccaaacuaaucggcua

SEQ ID NO: 2525224 - RNA, 19 nt, Homo sapiens
  misc_RNA (1)...(19): siRNA sense strand
cugauugggaugcuggaaa

SEQ ID NO: 2525225 - RNA, 19 nt, Homo sapiens
  misc_RNA (1)...(19): siRNA sense strand
ucucauguucacaggauau

SEQ ID NO: 2525226 - RNA, 19 nt, Homo sapiens
  misc_RNA (1)...(19): siRNA sense strand
caagcuggugagagagaca

SEQ ID NO: 2525227 - RNA, 19 nt, Homo sapiens
  misc_RNA (1)...(19): siRNA sense strand
cagagaaggccgagaggga

SEQ ID NO: 2525228 - RNA, 19 nt, Homo sapiens
  misc_RNA (1)...(19): siRNA sense strand
ccaaaggcaaauauggcua

SEQ ID NO: 2525229 - RNA, 19 nt, Homo sapiens
  misc_RNA (1)...(19): siRNA sense strand
gagaaggccgagagggagu

SEQ ID NO: 2525230 - RNA, 19 nt, Homo sapiens
  misc_RNA (1)...(19): siRNA sense strand
gcaucaaagcaaaguucca

SEQ ID NO: 2525231 - RNA, 19 nt, Homo sapiens
  misc_RNA (1)...(19): siRNA sense strand
guuuggagcggcugggaca

SEQ ID NO: 2525232 - RNA, 19 nt, Homo sapiens
  misc_RNA (1)...(19): siRNA sense strand
aagcaaaguuccaggccuc

SEQ ID NO: 2525233 - RNA, 19 nt, Homo sapiens
  misc_RNA (1)...(19): siRNA sense strand
caucaggacuuccggagca

SEQ ID NO: 2525234 - RNA, 19 nt, Homo sapiens
  misc_RNA (1)...(19): siRNA sense strand
ccccaagggcagagaugaa

SEQ ID NO: 2525235 - RNA, 19 nt, Homo sapiens
  misc_RNA (1)...(19): siRNA sense strand
cugcagccauggagagcca

SEQ ID NO: 2525236 - RNA, 19 nt, Homo sapiens
  misc_RNA (1)...(19): siRNA sense strand
cccuggagacggaggugua

SEQ ID NO: 2525237 - RNA, 19 nt, Homo sapiens
  misc_RNA (1)...(19): siRNA sense strand
cugcgcagccugaguucaa

SEQ ID NO: 2525238 - RNA, 19 nt, Homo sapiens
  misc_RNA (1)...(19): siRNA sense strand
ccgagagggaguuccggaa

SEQ ID NO: 2525239 - RNA, 19 nt, Homo sapiens
  misc_RNA (1)...(19): siRNA sense strand
cgguguuuguaaagagcua

SEQ ID NO: 2525240 - RNA, 19 nt, Homo sapiens
  misc_RNA (1)...(19): siRNA sense strand
aaucgaagcauuuggcgaa

SEQ ID NO: 2525241 - RNA, 19 nt, Homo sapiens
  misc_RNA (1)...(19): siRNA sense strand
ccucaauuugggaguauga

SEQ ID NO: 2525242 - RNA, 19 nt, Homo sapiens
  misc_RNA (1)...(19): siRNA sense strand
aggaagaagaugaggagga

SEQ ID NO: 2525243 - RNA, 19 nt, Homo sapiens
  misc_RNA (1)...(19): siRNA sense strand
augaggaggaggaggaaga

SEQ ID NO: 2525244 - RNA, 19 nt, Homo sapiens
  misc_RNA (1)...(19): siRNA sense strand
aagaagaugaggaggagga

SEQ ID NO: 2525245 - RNA, 19 nt, Homo sapiens
  misc_RNA (1)...(19): siRNA sense strand
aggaggaggaagaggagga

SEQ ID NO: 2525246 - RNA, 19 nt, Homo sapiens
  misc_RNA (1)...(19): siRNA sense strand
aggaggaagaggaggagga

SEQ ID NO: 2525247 - RNA, 19 nt, Homo sapiens
  misc_RNA (1)...(19): siRNA sense strand
gcuuggaagaagaugauga

SEQ ID NO: 2525248 - RNA, 19 nt, Homo sapiens
  misc_RNA (1)...(19): siRNA sense strand
aagaugaggaggaggagga

SEQ ID NO: 2525249 - RNA, 19 nt, Homo sapiens
  misc_RNA (1)...(19): siRNA sense strand
gauccuggcuacaagguga

SEQ ID NO: 2525250 - RNA, 19 nt, Homo sapiens
  misc_RNA (1)...(19): siRNA sense strand
aagaggaggaggagggaac

SEQ ID NO: 2525251 - RNA, 19 nt, Homo sapiens
  misc_RNA (1)...(19): siRNA sense strand
acuccgaagaggaagaaga

SEQ ID NO: 2525252 - RNA, 19 nt, Homo sapiens
  misc_RNA (1)...(19): siRNA sense strand
cugaauaugauccuggcua

SEQ ID NO: 2525253 - RNA, 19 nt, Homo sapiens
  misc_RNA (1)...(19): siRNA sense strand
cuuggaagaagaugaugaa

SEQ ID NO: 2525254 - RNA, 19 nt, Homo sapiens
  misc_RNA (1)...(19): siRNA sense strand
gggaggaagaggaggaacc

SEQ ID NO: 2525255 - RNA, 19 nt, Homo sapiens
  misc_RNA (1)...(19): siRNA sense strand
aggaggaggaggaagagga

SEQ ID NO: 2525256 - RNA, 19 nt, Homo sapiens
  misc_RNA (1)...(19): siRNA sense strand
acgccagcuuggaagaaga

SEQ ID NO: 2525257 - RNA, 19 nt, Homo sapiens
  misc_RNA (1)...(19): siRNA sense strand
aggaggaggaggaagagga

SEQ ID NO: 2525258 - RNA, 19 nt, Homo sapiens
  misc_RNA (1)...(19): siRNA sense strand
gcagaaagcacgaaggcua

SEQ ID NO: 2525259 - RNA, 19 nt, Homo sapiens
  misc_RNA (1)...(19): siRNA sense strand
uuccauaucuugaggguca

SEQ ID NO: 2525260 - RNA, 19 nt, Homo sapiens
  misc_RNA (1)...(19): siRNA sense strand
uggaaauugcacugaugaa

SEQ ID NO: 2525261 - RNA, 19 nt, Homo sapiens
  misc_RNA (1)...(19): siRNA sense strand
uuaucuuccucgugggauu

SEQ ID NO: 2525262 - RNA, 19 nt, Homo sapiens
  misc_RNA (1)...(19): siRNA sense strand
cgugggauuuccaggcaau

SEQ ID NO: 2525263 - RNA, 19 nt, Homo sapiens
  misc_RNA (1)...(19): siRNA sense strand
aagcgggaaccuugagcaa

SEQ ID NO: 2525264 - RNA, 19 nt, Homo sapiens
  misc_RNA (1)...(19): siRNA sense strand
caguuguuccauugagaau

SEQ ID NO: 2525265 - RNA, 19 nt, Homo sapiens
  misc_RNA (1)...(19): siRNA sense strand
augcaaaguaagcgggaac

SEQ ID NO: 2525266 - RNA, 19 nt, Homo sapiens
  misc_RNA (1)...(19): siRNA sense strand
cacuagacuauuuagcaaa

SEQ ID NO: 2525267 - RNA, 19 nt, Homo sapiens
  misc_RNA (1)...(19): siRNA sense strand
ccauugagaaucagaucca

SEQ ID NO: 2525268 - RNA, 19 nt, Homo sapiens
  misc_RNA (1)...(19): siRNA sense strand
uugcagucccguuggaaau

SEQ ID NO: 2525269 - RNA, 19 nt, Homo sapiens
  misc_RNA (1)...(19): siRNA sense strand
gugcugcuccugagggaau

SEQ ID NO: 2525270 - RNA, 19 nt, Homo sapiens
  misc_RNA (1)...(19): siRNA sense strand
acagagaaacugagggcag

SEQ ID NO: 2525271 - RNA, 19 nt, Homo sapiens
  misc_RNA (1)...(19): siRNA sense strand
gcauaaacguccugggcuu

SEQ ID NO: 2525272 - RNA, 19 nt, Homo sapiens
  misc_RNA (1)...(19): siRNA sense strand
cugcaauuuccaagaacaa

SEQ ID NO: 2525273 - RNA, 19 nt, Homo sapiens
  misc_RNA (1)...(19): siRNA sense strand
aguugaagacugggaaaua

SEQ ID NO: 2525274 - RNA, 19 nt, Homo sapiens
  misc_RNA (1)...(19): siRNA sense strand
ccaagaaggagcuggagca

SEQ ID NO: 2525275 - RNA, 19 nt, Homo sapiens
  misc_RNA (1)...(19): siRNA sense strand
aaaauaaccagguggacaa

SEQ ID NO: 2525276 - RNA, 19 nt, Homo sapiens
  misc_RNA (1)...(19): siRNA sense strand
acgaagacucagacaccaa

SEQ ID NO: 2525277 - RNA, 19 nt, Homo sapiens
  misc_RNA (1)...(19): siRNA sense strand
ccgcugugcugaagaaaau

SEQ ID NO: 2525278 - RNA, 19 nt, Homo sapiens
  misc_RNA (1)...(19): siRNA sense strand
gggagaaaagggacaaauu

SEQ ID NO: 2525279 - RNA, 19 nt, Homo sapiens
  misc_RNA (1)...(19): siRNA sense strand
cugaagaauaacugggugu

SEQ ID NO: 2525280 - RNA, 19 nt, Homo sapiens
  misc_RNA (1)...(19): siRNA sense strand
ugggaagaucauagaaguu

SEQ ID NO: 2525281 - RNA, 19 nt, Homo sapiens
  misc_RNA (1)...(19): siRNA sense strand
ggucaacguccuuggugau

SEQ ID NO: 2525282 - RNA, 19 nt, Homo sapiens
  misc_RNA (1)...(19): siRNA sense strand
gcauguauucagauggcau

SEQ ID NO: 2525283 - RNA, 19 nt, Homo sapiens
  misc_RNA (1)...(19): siRNA sense strand
guuauaugccacuagguau

SEQ ID NO: 2525284 - RNA, 19 nt, Homo sapiens
  misc_RNA (1)...(19): siRNA sense strand
uuauaugccacuagguauu

SEQ ID NO: 2525285 - RNA, 19 nt, Homo sapiens
  misc_RNA (1)...(19): siRNA sense strand
gggaaaccggcgaggaaag

SEQ ID NO: 2525286 - RNA, 19 nt, Homo sapiens
  misc_RNA (1)...(19): siRNA sense strand
gcaauuuccaagaacaaaa

SEQ ID NO: 2525287 - RNA, 19 nt, Homo sapiens
  misc_RNA (1)...(19): siRNA sense strand
ucauagaaguugaagacug

SEQ ID NO: 2525288 - RNA, 19 nt, Homo sapiens
  misc_RNA (1)...(19): siRNA sense strand
gggacaaauucugguggau

SEQ ID NO: 2525289 - RNA, 19 nt, Homo sapiens
  misc_RNA (1)...(19): siRNA sense strand
cagagaugaacaugacaga

SEQ ID NO: 2525290 - RNA, 19 nt, Homo sapiens
  misc_RNA (1)...(19): siRNA sense strand
gauuacagguguugcugca

SEQ ID NO: 2525291 - RNA, 19 nt, Homo sapiens
  misc_RNA (1)...(19): siRNA sense strand
guguauuauuucuguacca

SEQ ID NO: 2525292 - RNA, 19 nt, Homo sapiens
  misc_RNA (1)...(19): siRNA sense strand
gggugaaauugcgaggaca

SEQ ID NO: 2525293 - RNA, 19 nt, Homo sapiens
  misc_RNA (1)...(19): siRNA sense strand
cagguggacaagaggauca

SEQ ID NO: 2525294 - RNA, 19 nt, Homo sapiens
  misc_RNA (1)...(19): siRNA sense strand
uggacuugucauuggaaaa

SEQ ID NO: 2525295 - RNA, 19 nt, Homo sapiens
  misc_RNA (1)...(19): siRNA sense strand
gagugaugcaaccaugaaa

SEQ ID NO: 2525296 - RNA, 19 nt, Homo sapiens
  misc_RNA (1)...(19): siRNA sense strand
gaaaauaaccagguggaca

SEQ ID NO: 2525297 - RNA, 19 nt, Homo sapiens
  misc_RNA (1)...(19): siRNA sense strand
ccaaacaacuauuccgcaa

SEQ ID NO: 2525298 - RNA, 19 nt, Homo sapiens
  misc_RNA (1)...(19): siRNA sense strand
uguauagagaagagacuaa

SEQ ID NO: 2525299 - RNA, 19 nt, Homo sapiens
  misc_RNA (1)...(19): siRNA sense strand
ugaaaugacuuauggacga

SEQ ID NO: 2525300 - RNA, 19 nt, Homo sapiens
  misc_RNA (1)...(19): siRNA sense strand
uaaaagaggcauugagaau

SEQ ID NO: 2525301 - RNA, 19 nt, Homo sapiens
  misc_RNA (1)...(19): siRNA sense strand
gguuggagaauaaggaaga

SEQ ID NO: 2525302 - RNA, 19 nt, Homo sapiens
  misc_RNA (1)...(19): siRNA sense strand
ugaaaauagugaagagcau

SEQ ID NO: 2525303 - RNA, 19 nt, Homo sapiens
  misc_RNA (1)...(19): siRNA sense strand
gaucagaaccaaaguggga

SEQ ID NO: 2525304 - RNA, 19 nt, Homo sapiens
  misc_RNA (1)...(19): siRNA sense strand
acuaauugaggaacagaaa

SEQ ID NO: 2525305 - RNA, 19 nt, Homo sapiens
  misc_RNA (1)...(19): siRNA sense strand
ggcaaauauuagagguacu

SEQ ID NO: 2525306 - RNA, 19 nt, Homo sapiens
  misc_RNA (1)...(19): siRNA sense strand
agagacuaauugaggaaca

SEQ ID NO: 2525307 - RNA, 19 nt, Homo sapiens
  misc_RNA (1)...(19): siRNA sense strand
gcaaggugcugcuggacga

SEQ ID NO: 2525308 - RNA, 19 nt, Homo sapiens
  misc_RNA (1)...(19): siRNA sense strand
acggcaaauauuagaggua

SEQ ID NO: 2525309 - RNA, 19 nt, Homo sapiens
  misc_RNA (1)...(19): siRNA sense strand
cuaagaagauucagggccu

SEQ ID NO: 2525310 - RNA, 19 nt, Homo sapiens
  misc_RNA (1)...(19): siRNA sense strand
uggagaauaaggaagaaau

SEQ ID NO: 2525311 - RNA, 19 nt, Homo sapiens
  misc_RNA (1)...(19): siRNA sense strand
uaauugaggaacagaaaca

SEQ ID NO: 2525312 - RNA, 19 nt, Homo sapiens
  misc_RNA (1)...(19): siRNA sense strand
cuuacagauugcaggccua

SEQ ID NO: 2525313 - RNA, 19 nt, Homo sapiens
  misc_RNA (1)...(19): siRNA sense strand
gcugcuggaccuugagaau

SEQ ID NO: 2525314 - RNA, 19 nt, Homo sapiens
  misc_RNA (1)...(19): siRNA sense strand
cuacaaggcaaaaccaaaa

SEQ ID NO: 2525315 - RNA, 19 nt, Homo sapiens
  misc_RNA (1)...(19): siRNA sense strand
cuaauugugagcugguuaa

SEQ ID NO: 2525316 - RNA, 19 nt, Homo sapiens
  misc_RNA (1)...(19): siRNA sense strand
gcugaaaggcagaaagguc

SEQ ID NO: 2525317 - RNA, 19 nt, Homo sapiens
  misc_RNA (1)...(19): siRNA sense strand
aggaacagaaacagauuca

SEQ ID NO: 2525318 - RNA, 19 nt, Homo sapiens
  misc_RNA (1)...(19): siRNA sense strand
uggcagauuguuagaagau

SEQ ID NO: 2525319 - RNA, 19 nt, Homo sapiens
  misc_RNA (1)...(19): siRNA sense strand
aagaaguacugcaacccua

SEQ ID NO: 2525320 - RNA, 19 nt, Homo sapiens
  misc_RNA (1)...(19): siRNA sense strand
caauaauucagcaggaucu

SEQ ID NO: 2525321 - RNA, 19 nt, Homo sapiens
  misc_RNA (1)...(19): siRNA sense strand
gguaacauggaucgugaau

SEQ ID NO: 2525322 - RNA, 19 nt, Homo sapiens
  misc_RNA (1)...(19): siRNA sense strand
ucgagugcaaagaggaauu

SEQ ID NO: 2525323 - RNA, 19 nt, Homo sapiens
  misc_RNA (1)...(19): siRNA sense strand
ucuaauugugagcugguua

SEQ ID NO: 2525324 - RNA, 19 nt, Homo sapiens
  misc_RNA (1)...(19): siRNA sense strand
cugaaaggcagaaaggucu

SEQ ID NO: 2525325 - RNA, 19 nt, Homo sapiens
  misc_RNA (1)...(19): siRNA sense strand
gaaagacauagguuggaga

SEQ ID NO: 2525326 - RNA, 19 nt, Homo sapiens
  misc_RNA (1)...(19): siRNA sense strand
cugcagucccacacggaau

SEQ ID NO: 2525327 - RNA, 19 nt, Homo sapiens
  misc_RNA (1)...(19): siRNA sense strand
gagcauucagcgaaguaca

SEQ ID NO: 2525328 - RNA, 19 nt, Homo sapiens
  misc_RNA (1)...(19): siRNA sense strand
aaguacagcaacuccaaua

SEQ ID NO: 2525329 - RNA, 19 nt, Homo sapiens
  misc_RNA (1)...(19): siRNA sense strand
caaagugggagguggugga

SEQ ID NO: 2525330 - RNA, 19 nt, Homo sapiens
  misc_RNA (1)...(19): siRNA sense strand
cuaaagaaguacugcaacc

SEQ ID NO: 2525331 - RNA, 19 nt, Homo sapiens
  misc_RNA (1)...(19): siRNA sense strand
ccgaaguguggguggaaua

SEQ ID NO: 2525332 - RNA, 19 nt, Homo sapiens
  misc_RNA (1)...(19): siRNA sense strand
caaagaaagugaaccggaa

SEQ ID NO: 2525333 - RNA, 19 nt, Homo sapiens
  misc_RNA (1)...(19): siRNA sense strand
agucaaagacaaagaaagu

SEQ ID NO: 2525334 - RNA, 19 nt, Homo sapiens
  misc_RNA (1)...(19): siRNA sense strand
gguguaagaaacuaggaaa

SEQ ID NO: 2525335 - RNA, 19 nt, Homo sapiens
  misc_RNA (1)...(19): siRNA sense strand
cuacauuaauugugccgaa

SEQ ID NO: 2525336 - RNA, 19 nt, Homo sapiens
  misc_RNA (1)...(19): siRNA sense strand
cagaaggaaacgugauaga

SEQ ID NO: 2525337 - RNA, 19 nt, Homo sapiens
  misc_RNA (1)...(19): siRNA sense strand
uggcaauggagacaagaaa

SEQ ID NO: 2525338 - RNA, 19 nt, Homo sapiens
  misc_RNA (1)...(19): siRNA sense strand
caucaagaagcaaagcaaa

SEQ ID NO: 2525339 - RNA, 19 nt, Homo sapiens
  misc_RNA (1)...(19): siRNA sense strand
ccgacauacuugauacauu

SEQ ID NO: 2525340 - RNA, 19 nt, Homo sapiens
  misc_RNA (1)...(19): siRNA sense strand
gagaaauccuugcccggua

SEQ ID NO: 2525341 - RNA, 19 nt, Homo sapiens
  misc_RNA (1)...(19): siRNA sense strand
uggcaugauuaaagagugu

SEQ ID NO: 2525342 - RNA, 19 nt, Homo sapiens
  misc_RNA (1)...(19): siRNA sense strand
aaagaaagugaaccggaaa

SEQ ID NO: 2525343 - RNA, 19 nt, Homo sapiens
  misc_RNA (1)...(19): siRNA sense strand
guuucuuguucgagagcuu

SEQ ID NO: 2525344 - RNA, 19 nt, Homo sapiens
  misc_RNA (1)...(19): siRNA sense strand
acaucaagaagcaaagcaa

SEQ ID NO: 2525345 - RNA, 19 nt, Homo sapiens
  misc_RNA (1)...(19): siRNA sense strand
ccucagaccagaaagugaa

SEQ ID NO: 2525346 - RNA, 19 nt, Homo sapiens
  misc_RNA (1)...(19): siRNA sense strand
guguaagaaacuaggaaac

SEQ ID NO: 2525347 - RNA, 19 nt, Homo sapiens
  misc_RNA (1)...(19): siRNA sense strand
ccaugagccaggagacgua

SEQ ID NO: 2525348 - RNA, 19 nt, Homo sapiens
  misc_RNA (1)...(19): siRNA sense strand
acuccaaguuccuggcaga

SEQ ID NO: 2525349 - RNA, 19 nt, Homo sapiens
  misc_RNA (1)...(19): siRNA sense strand
gcauagaggagcucaacca

SEQ ID NO: 2525350 - RNA, 19 nt, Homo sapiens
  misc_RNA (1)...(19): siRNA sense strand
auggaaagguguaagaaac

SEQ ID NO: 2525351 - RNA, 19 nt, Homo sapiens
  misc_RNA (1)...(19): siRNA sense strand
uauuaauaguuccggauca

SEQ ID NO: 2525352 - RNA, 19 nt, Homo sapiens
  misc_RNA (1)...(19): siRNA sense strand
uugaacaacagcugaguuu

SEQ ID NO: 2525353 - RNA, 19 nt, Homo sapiens
  misc_RNA (1)...(19): siRNA sense strand
caacaaacggggagaaauc

SEQ ID NO: 2525354 - RNA, 19 nt, Homo sapiens
  misc_RNA (1)...(19): siRNA sense strand
gcaugauuaaagaguguga

SEQ ID NO: 2525355 - RNA, 19 nt, Homo sapiens
  misc_RNA (1)...(19): siRNA sense strand
gucacagagucaaagacaa

SEQ ID NO: 2525356 - RNA, 19 nt, Homo sapiens
  misc_RNA (1)...(19): siRNA sense strand
guggauagccgcagcgucu

SEQ ID NO: 2525357 - RNA, 19 nt, Homo sapiens
  misc_RNA (1)...(19): siRNA sense strand
cauccugaaauguaacaaa

SEQ ID NO: 2525358 - RNA, 19 nt, Homo sapiens
  misc_RNA (1)...(19): siRNA sense strand
uggaaagguguaagaaacu

SEQ ID NO: 2525359 - RNA, 19 nt, Homo sapiens
  misc_RNA (1)...(19): siRNA sense strand
cgaaacgagaggugaauac

SEQ ID NO: 2525360 - RNA, 19 nt, Homo sapiens
  misc_RNA (1)...(19): siRNA sense strand
gugugaaccgguuggcaau

SEQ ID NO: 2525361 - RNA, 19 nt, Homo sapiens
  misc_RNA (1)...(19): siRNA sense strand
ccaaguuccuggcagaaaa

SEQ ID NO: 2525362 - RNA, 19 nt, Homo sapiens
  misc_RNA (1)...(19): siRNA sense strand
agaaagugaaggcucuaaa

SEQ ID NO: 2525363 - RNA, 19 nt, Homo sapiens
  misc_RNA (1)...(19): siRNA sense strand
agugugaaccgguuggcaa

SEQ ID NO: 2525364 - RNA, 19 nt, Homo sapiens
  misc_RNA (1)...(19): siRNA sense strand
ccuuuaccacauagacaaa

SEQ ID NO: 2525365 - RNA, 19 nt, Homo sapiens
  misc_RNA (1)...(19): siRNA sense strand
augcaaaugacacggccaa

SEQ ID NO: 2525366 - RNA, 19 nt, Homo sapiens
  misc_RNA (1)...(19): siRNA sense strand
gccaaggaaacaugccuaa

SEQ ID NO: 2525367 - RNA, 19 nt, Homo sapiens
  misc_RNA (1)...(19): siRNA sense strand
ucucaacgaagcuuggaaa

SEQ ID NO: 2525368 - RNA, 19 nt, Homo sapiens
  misc_RNA (1)...(19): siRNA sense strand
aggacaacagcgaugagaa

SEQ ID NO: 2525369 - RNA, 19 nt, Homo sapiens
  misc_RNA (1)...(19): siRNA sense strand
caagaagcaaagcaaacaa

SEQ ID NO: 2525370 - RNA, 19 nt, Homo sapiens
  misc_RNA (1)...(19): siRNA sense strand
uggcaaugucagagaaggu

SEQ ID NO: 2525371 - RNA, 19 nt, Homo sapiens
  misc_RNA (1)...(19): siRNA sense strand
ccagagaaugcaaaugaca

SEQ ID NO: 2525372 - RNA, 19 nt, Homo sapiens
  misc_RNA (1)...(19): siRNA sense strand
uguaagaaacuaggaaaca

SEQ ID NO: 2525373 - RNA, 19 nt, Homo sapiens
  misc_RNA (1)...(19): siRNA sense strand
ggugaaaacgcuagaauac

SEQ ID NO: 2525374 - RNA, 19 nt, Homo sapiens
  misc_RNA (1)...(19): siRNA sense strand
cgguugacaugcaugauca

SEQ ID NO: 2525375 - RNA, 19 nt, Homo sapiens
  misc_RNA (1)...(19): siRNA sense strand
cgcuagaauacaucaagaa

SEQ ID NO: 2525376 - RNA, 19 nt, Homo sapiens
  misc_RNA (1)...(19): siRNA sense strand
cugaccgagaugauggaaa

SEQ ID NO: 2525377 - RNA, 19 nt, Homo sapiens
  misc_RNA (1)...(19): siRNA sense strand
acaacagcgaugagaaaau

SEQ ID NO: 2525378 - RNA, 19 nt, Homo sapiens
  misc_RNA (1)...(19): siRNA sense strand
ggcuggaggagcuggauga

SEQ ID NO: 2525379 - RNA, 19 nt, Homo sapiens
  misc_RNA (1)...(19): siRNA sense strand
gaagcaaagcaaacaacca

SEQ ID NO: 2525380 - RNA, 19 nt, Homo sapiens
  misc_RNA (1)...(19): siRNA sense strand
augagaggcuggaggcuga

SEQ ID NO: 2525381 - RNA, 19 nt, Homo sapiens
  misc_RNA (1)...(19): siRNA sense strand
gagaguaccagcaacgcua

SEQ ID NO: 2525382 - RNA, 19 nt, Homo sapiens
  misc_RNA (1)...(19): siRNA sense strand
acuggaagcgggugaugaa

SEQ ID NO: 2525383 - RNA, 19 nt, Homo sapiens
  misc_RNA (1)...(19): siRNA sense strand
uggcuauggcuguggguau

SEQ ID NO: 2525384 - RNA, 19 nt, Homo sapiens
  misc_RNA (1)...(19): siRNA sense strand
uggcuauggcuguggauau

SEQ ID NO: 2525385 - RNA, 19 nt, Homo sapiens
  misc_RNA (1)...(19): siRNA sense strand
cggcuguggcuguggcuau

SEQ ID NO: 2525386 - RNA, 19 nt, Homo sapiens
  misc_RNA (1)...(19): siRNA sense strand
uggguauggcuguggguuu

SEQ ID NO: 2525387 - RNA, 19 nt, Homo sapiens
  misc_RNA (1)...(19): siRNA sense strand
cagaaguaccugaugaaaa

SEQ ID NO: 2525388 - RNA, 19 nt, Homo sapiens
  misc_RNA (1)...(19): siRNA sense strand
ccacaaauagauauggaca

SEQ ID NO: 2525389 - RNA, 19 nt, Homo sapiens
  misc_RNA (1)...(19): siRNA sense strand
auguuguucuugagguaaa

SEQ ID NO: 2525390 - RNA, 19 nt, Homo sapiens
  misc_RNA (1)...(19): siRNA sense strand
gggauuauucagaccacaa

SEQ ID NO: 2525391 - RNA, 19 nt, Homo sapiens
  misc_RNA (1)...(19): siRNA sense strand
agucaauguaacugcaaau

SEQ ID NO: 2525392 - RNA, 19 nt, Homo sapiens
  misc_RNA (1)...(19): siRNA sense strand
auagaagugaaguggacua

SEQ ID NO: 2525393 - RNA, 19 nt, Homo sapiens
  misc_RNA (1)...(19): siRNA sense strand
ucauagcacaacugagcaa

SEQ ID NO: 2525394 - RNA, 19 nt, Homo sapiens
  misc_RNA (1)...(19): siRNA sense strand
cacagaaggugaagagccu

SEQ ID NO: 2525395 - RNA, 19 nt, Homo sapiens
  misc_RNA (1)...(19): siRNA sense strand
ucauucaacaggaaggauu

SEQ ID NO: 2525396 - RNA, 19 nt, Homo sapiens
  misc_RNA (1)...(19): siRNA sense strand
aagaaggucaggaggaaaa

SEQ ID NO: 2525397 - RNA, 19 nt, Homo sapiens
  misc_RNA (1)...(19): siRNA sense strand
ccagaaauauccugaccca

SEQ ID NO: 2525398 - RNA, 19 nt, Homo sapiens
  misc_RNA (1)...(19): siRNA sense strand
agaaauauccugacccaca

SEQ ID NO: 2525399 - RNA, 19 nt, Homo sapiens
  misc_RNA (1)...(19): siRNA sense strand
gguaacuaggcuacaggaa

SEQ ID NO: 2525400 - RNA, 19 nt, Homo sapiens
  misc_RNA (1)...(19): siRNA sense strand
cagcauuuauggugccuga

SEQ ID NO: 2525401 - RNA, 19 nt, Homo sapiens
  misc_RNA (1)...(19): siRNA sense strand
ggagggaagccaagaccca

SEQ ID NO: 2525402 - RNA, 19 nt, Homo sapiens
  misc_RNA (1)...(19): siRNA sense strand
ccgaugaggagaagcgucu

SEQ ID NO: 2525403 - RNA, 19 nt, Homo sapiens
  misc_RNA (1)...(19): siRNA sense strand
ccugauuccugcaugguca

SEQ ID NO: 2525404 - RNA, 19 nt, Homo sapiens
  misc_RNA (1)...(19): siRNA sense strand
acggagugacuuccagaaa

SEQ ID NO: 2525405 - RNA, 19 nt, Homo sapiens
  misc_RNA (1)...(19): siRNA sense strand
cagcccaaggagagugaua

SEQ ID NO: 2525406 - RNA, 19 nt, Homo sapiens
  misc_RNA (1)...(19): siRNA sense strand
cugugaagcaugaggaugu

SEQ ID NO: 2525407 - RNA, 19 nt, Homo sapiens
  misc_RNA (1)...(19): siRNA sense strand
aagaaaagguggaugaacu

SEQ ID NO: 2525408 - RNA, 19 nt, Homo sapiens
  misc_RNA (1)...(19): siRNA sense strand
aagaagaaaagguggauga

SEQ ID NO: 2525409 - RNA, 19 nt, Homo sapiens
  misc_RNA (1)...(19): siRNA sense strand
ucccaagucccuagaggaa

SEQ ID NO: 2525410 - RNA, 19 nt, Homo sapiens
  misc_RNA (1)...(19): siRNA sense strand
aagaaaccauccagcccaa

SEQ ID NO: 2525411 - RNA, 19 nt, Homo sapiens
  misc_RNA (1)...(19): siRNA sense strand
aagaaaccauccagcccaa

SEQ ID NO: 2525412 - RNA, 19 nt, Homo sapiens
  misc_RNA (1)...(19): siRNA sense strand
aagaaaccauccagcccaa

SEQ ID NO: 2525413 - RNA, 19 nt, Homo sapiens
  misc_RNA (1)...(19): siRNA sense strand
aagaaaccauccagcccaa

SEQ ID NO: 2525414 - RNA, 19 nt, Homo sapiens
  misc_RNA (1)...(19): siRNA sense strand
gaagaagaaacaauggagu

SEQ ID NO: 2525415 - RNA, 19 nt, Homo sapiens
  misc_RNA (1)...(19): siRNA sense strand
ccccaaggccccagaagaa

SEQ ID NO: 2525416 - RNA, 19 nt, Homo sapiens
  misc_RNA (1)...(19): siRNA sense strand
ccccaaggccccagaagaa

SEQ ID NO: 2525417 - RNA, 19 nt, Homo sapiens
  misc_RNA (1)...(19): siRNA sense strand
gaggagguggugagagagu

SEQ ID NO: 2525418 - RNA, 19 nt, Homo sapiens
  misc_RNA (1)...(19): siRNA sense strand
ccgaauucacaaaggguaa

SEQ ID NO: 2525419 - RNA, 19 nt, Homo sapiens
  misc_RNA (1)...(19): siRNA sense strand
ggccaagaucggugagauu

SEQ ID NO: 2525420 - RNA, 19 nt, Homo sapiens
  misc_RNA (1)...(19): siRNA sense strand
aauuagagucuuuggagaa

SEQ ID NO: 2525421 - RNA, 19 nt, Homo sapiens
  misc_RNA (1)...(19): siRNA sense strand
gugaaauauaugaacgcaa

SEQ ID NO: 2525422 - RNA, 19 nt, Homo sapiens
  misc_RNA (1)...(19): siRNA sense strand
augaagaagcagaaaguga

SEQ ID NO: 2525423 - RNA, 19 nt, Homo sapiens
  misc_RNA (1)...(19): siRNA sense strand
aagaagaucagaaggaaaa

SEQ ID NO: 2525424 - RNA, 19 nt, Homo sapiens
  misc_RNA (1)...(19): siRNA sense strand
aagcaaugugguuaggaaa

SEQ ID NO: 2525425 - RNA, 19 nt, Homo sapiens
  misc_RNA (1)...(19): siRNA sense strand
ucaaagugccagagaaaau

SEQ ID NO: 2525426 - RNA, 19 nt, Homo sapiens
  misc_RNA (1)...(19): siRNA sense strand
gaguugaagaagaucagaa

SEQ ID NO: 2525427 - RNA, 19 nt, Homo sapiens
  misc_RNA (1)...(19): siRNA sense strand
aaauuagagucuuuggaga

SEQ ID NO: 2525428 - RNA, 19 nt, Homo sapiens
  misc_RNA (1)...(19): siRNA sense strand
ccagaaauucauugcagau

SEQ ID NO: 2525429 - RNA, 19 nt, Homo sapiens
  misc_RNA (1)...(19): siRNA sense strand
uggaagaaaaugagacaga

SEQ ID NO: 2525430 - RNA, 19 nt, Homo sapiens
  misc_RNA (1)...(19): siRNA sense strand
uugaagaagaucagaagga

SEQ ID NO: 2525431 - RNA, 19 nt, Homo sapiens
  misc_RNA (1)...(19): siRNA sense strand
agacagaagcagugaccgu

SEQ ID NO: 2525432 - RNA, 19 nt, Homo sapiens
  misc_RNA (1)...(19): siRNA sense strand
gagaaagcuguaaacgcua

SEQ ID NO: 2525433 - RNA, 19 nt, Homo sapiens
  misc_RNA (1)...(19): siRNA sense strand
ugaugaagaagcagaaagu

SEQ ID NO: 2525434 - RNA, 19 nt, Homo sapiens
  misc_RNA (1)...(19): siRNA sense strand
agcagaaagugaagaccau

SEQ ID NO: 2525435 - RNA, 19 nt, Homo sapiens
  misc_RNA (1)...(19): siRNA sense strand
acgagagucuugaugaaaa

SEQ ID NO: 2525436 - RNA, 19 nt, Homo sapiens
  misc_RNA (1)...(19): siRNA sense strand
cgagagucuugaugaaaau

SEQ ID NO: 2525437 - RNA, 19 nt, Homo sapiens
  misc_RNA (1)...(19): siRNA sense strand
gcaucagcaccgugaacuu

SEQ ID NO: 2525438 - RNA, 19 nt, Homo sapiens
  misc_RNA (1)...(19): siRNA sense strand
auuagagucuuuggagaaa

SEQ ID NO: 2525439 - RNA, 19 nt, Homo sapiens
  misc_RNA (1)...(19): siRNA sense strand
caugaauaugaucgaagaa

SEQ ID NO: 2525440 - RNA, 19 nt, Homo sapiens
  misc_RNA (1)...(19): siRNA sense strand
uuaauaaaccuggggaaaa

SEQ ID NO: 2525441 - RNA, 19 nt, Homo sapiens
  misc_RNA (1)...(19): siRNA sense strand
ccgugaacuugucugagaa

SEQ ID NO: 2525442 - RNA, 19 nt, Homo sapiens
  misc_RNA (1)...(19): siRNA sense strand
ccgacuacuuggaaugcuu

SEQ ID NO: 2525443 - RNA, 19 nt, Homo sapiens
  misc_RNA (1)...(19): siRNA sense strand
acaugaugaagaagcagaa

SEQ ID NO: 2525444 - RNA, 19 nt, Homo sapiens
  misc_RNA (1)...(19): siRNA sense strand
ccaaggaagccgaaacgca

SEQ ID NO: 2525445 - RNA, 19 nt, Homo sapiens
  misc_RNA (1)...(19): siRNA sense strand
gauaccaaacagaacacaa

SEQ ID NO: 2525446 - RNA, 19 nt, Homo sapiens
  misc_RNA (1)...(19): siRNA sense strand
gguaaauaauucaacaggu

SEQ ID NO: 2525447 - RNA, 19 nt, Homo sapiens
  misc_RNA (1)...(19): siRNA sense strand
aagcagaaagugaagacca

SEQ ID NO: 2525448 - RNA, 19 nt, Homo sapiens
  misc_RNA (1)...(19): siRNA sense strand
cacaagaaacucaacgaga

SEQ ID NO: 2525449 - RNA, 19 nt, Homo sapiens
  misc_RNA (1)...(19): siRNA sense strand
acgaaguugcuggaagaaa

SEQ ID NO: 2525450 - RNA, 19 nt, Homo sapiens
  misc_RNA (1)...(19): siRNA sense strand
acuucucgucagagugaaa

SEQ ID NO: 2525451 - RNA, 19 nt, Homo sapiens
  misc_RNA (1)...(19): siRNA sense strand
gaucagaaggaaaagccaa

SEQ ID NO: 2525452 - RNA, 19 nt, Homo sapiens
  misc_RNA (1)...(19): siRNA sense strand
gaaauugaguauguggaga

SEQ ID NO: 2525453 - RNA, 19 nt, Homo sapiens
  misc_RNA (1)...(19): siRNA sense strand
ucagagugaaauccagaaa

SEQ ID NO: 2525454 - RNA, 19 nt, Homo sapiens
  misc_RNA (1)...(19): siRNA sense strand
aauccugggcugcgaaauu

SEQ ID NO: 2525455 - RNA, 19 nt, Homo sapiens
  misc_RNA (1)...(19): siRNA sense strand
gcagauucggccaggacga

SEQ ID NO: 2525456 - RNA, 19 nt, Homo sapiens
  misc_RNA (1)...(19): siRNA sense strand
ggaaaaggccauuggggaa

SEQ ID NO: 2525457 - RNA, 19 nt, Homo sapiens
  misc_RNA (1)...(19): siRNA sense strand
aggaagaggaagaagaaaa

SEQ ID NO: 2525458 - RNA, 19 nt, Homo sapiens
  misc_RNA (1)...(19): siRNA sense strand
aggaggaagacgaggaaga

SEQ ID NO: 2525459 - RNA, 19 nt, Homo sapiens
  misc_RNA (1)...(19): siRNA sense strand
aggaagaagaggaggagga

SEQ ID NO: 2525460 - RNA, 19 nt, Homo sapiens
  misc_RNA (1)...(19): siRNA sense strand
aggaggaggaagaggaaga

SEQ ID NO: 2525461 - RNA, 19 nt, Homo sapiens
  misc_RNA (1)...(19): siRNA sense strand
cugcaagagcccugaguau

SEQ ID NO: 2525462 - RNA, 19 nt, Homo sapiens
  misc_RNA (1)...(19): siRNA sense strand
aggaagacgaggaagaaga

SEQ ID NO: 2525463 - RNA, 19 nt, Homo sapiens
  misc_RNA (1)...(19): siRNA sense strand
gcuuugaaguguuugguga

SEQ ID NO: 2525464 - RNA, 19 nt, Homo sapiens
  misc_RNA (1)...(19): siRNA sense strand
aggaggaagaggaagaaga

SEQ ID NO: 2525465 - RNA, 19 nt, Homo sapiens
  misc_RNA (1)...(19): siRNA sense strand
ccuucaaaccagacaucaa

SEQ ID NO: 2525466 - RNA, 19 nt, Homo sapiens
  misc_RNA (1)...(19): siRNA sense strand
aggaggaggaggaggacga

SEQ ID NO: 2525467 - RNA, 19 nt, Homo sapiens
  misc_RNA (1)...(19): siRNA sense strand
aggaagacaugcaggcgau

SEQ ID NO: 2525468 - RNA, 19 nt, Homo sapiens
  misc_RNA (1)...(19): siRNA sense strand
aggaggaggacgaugaaga

SEQ ID NO: 2525469 - RNA, 19 nt, Homo sapiens
  misc_RNA (1)...(19): siRNA sense strand
cugaagaugacgugggucu

SEQ ID NO: 2525470 - RNA, 19 nt, Homo sapiens
  misc_RNA (1)...(19): siRNA sense strand
gaggaguggggcaggaaaa

SEQ ID NO: 2525471 - RNA, 19 nt, Homo sapiens
  misc_RNA (1)...(19): siRNA sense strand
agaaauaggagaggcgaga

SEQ ID NO: 2525472 - RNA, 19 nt, Homo sapiens
  misc_RNA (1)...(19): siRNA sense strand
acgaggaagaagaggagga

SEQ ID NO: 2525473 - RNA, 19 nt, Homo sapiens
  misc_RNA (1)...(19): siRNA sense strand
aggaggaggaggacgauga

SEQ ID NO: 2525474 - RNA, 19 nt, Homo sapiens
  misc_RNA (1)...(19): siRNA sense strand
gguaaggaucgcagcuuca

SEQ ID NO: 2525475 - RNA, 19 nt, Homo sapiens
  misc_RNA (1)...(19): siRNA sense strand
aggaggacgaugaagaaga

SEQ ID NO: 2525476 - RNA, 19 nt, Homo sapiens
  misc_RNA (1)...(19): siRNA sense strand
aggacaaggagccggguga

SEQ ID NO: 2525477 - RNA, 19 nt, Homo sapiens
  misc_RNA (1)...(19): siRNA sense strand
ccacagaggaggaucccuu

SEQ ID NO: 2525478 - RNA, 19 nt, Homo sapiens
  misc_RNA (1)...(19): siRNA sense strand
ccucagaucuaaaagucaa

SEQ ID NO: 2525479 - RNA, 19 nt, Homo sapiens
  misc_RNA (1)...(19): siRNA sense strand
gggaaaaggccauugggga

SEQ ID NO: 2525480 - RNA, 19 nt, Homo sapiens
  misc_RNA (1)...(19): siRNA sense strand
cgguggaggagguaaggau

SEQ ID NO: 2525481 - RNA, 19 nt, Homo sapiens
  misc_RNA (1)...(19): siRNA sense strand
agaggaggaggaagaggaa

SEQ ID NO: 2525482 - RNA, 19 nt, Homo sapiens
  misc_RNA (1)...(19): siRNA sense strand
gcauagucuaggcaaagaa

SEQ ID NO: 2525483 - RNA, 19 nt, Homo sapiens
  misc_RNA (1)...(19): siRNA sense strand
aggaagaaggggaggagga

SEQ ID NO: 2525484 - RNA, 19 nt, Homo sapiens
  misc_RNA (1)...(19): siRNA sense strand
auaggagaggcgagaagua

SEQ ID NO: 2525485 - RNA, 19 nt, Homo sapiens
  misc_RNA (1)...(19): siRNA sense strand
gaggaagaggaagaagaaa

SEQ ID NO: 2525486 - RNA, 19 nt, Homo sapiens
  misc_RNA (1)...(19): siRNA sense strand
gcugacaagaaauaggaga

SEQ ID NO: 2525487 - RNA, 19 nt, Homo sapiens
  misc_RNA (1)...(19): siRNA sense strand
cggacagcacccaagacaa

SEQ ID NO: 2525488 - RNA, 19 nt, Homo sapiens
  misc_RNA (1)...(19): siRNA sense strand
gcaagaagagcuuugagca

SEQ ID NO: 2525489 - RNA, 19 nt, Homo sapiens
  misc_RNA (1)...(19): siRNA sense strand
gggaaaagcaaguaugaag

SEQ ID NO: 2525490 - RNA, 19 nt, Homo sapiens
  misc_RNA (1)...(19): siRNA sense strand
aagaagagcuuugagcaga

SEQ ID NO: 2525491 - RNA, 19 nt, Homo sapiens
  misc_RNA (1)...(19): siRNA sense strand
ggaucaaccuucugcagau

SEQ ID NO: 2525492 - RNA, 19 nt, Homo sapiens
  misc_RNA (1)...(19): siRNA sense strand
gugucagaucccuggguua

SEQ ID NO: 2525493 - RNA, 19 nt, Homo sapiens
  misc_RNA (1)...(19): siRNA sense strand
ggcuauggaucgaggagcu

SEQ ID NO: 2525494 - RNA, 19 nt, Homo sapiens
  misc_RNA (1)...(19): siRNA sense strand
cagaccagccuauggauca

SEQ ID NO: 2525495 - RNA, 19 nt, Homo sapiens
  misc_RNA (1)...(19): siRNA sense strand
gaucaaaagaugagagaag

SEQ ID NO: 2525496 - RNA, 19 nt, Homo sapiens
  misc_RNA (1)...(19): siRNA sense strand
cgcaugagggaaagaggaa

SEQ ID NO: 2525497 - RNA, 19 nt, Homo sapiens
  misc_RNA (1)...(19): siRNA sense strand
gcggaaagccaucagcaga

SEQ ID NO: 2525498 - RNA, 19 nt, Homo sapiens
  misc_RNA (1)...(19): siRNA sense strand
gcaugagggaaagaggaaa

SEQ ID NO: 2525499 - RNA, 19 nt, Homo sapiens
  misc_RNA (1)...(19): siRNA sense strand
ccugauugcaaaauggaaa

SEQ ID NO: 2525500 - RNA, 19 nt, Homo sapiens
  misc_RNA (1)...(19): siRNA sense strand
uuaaagaaggcuaugcaga

SEQ ID NO: 2525501 - RNA, 19 nt, Homo sapiens
  misc_RNA (1)...(19): siRNA sense strand
agcaaggauaugagaacuu

SEQ ID NO: 2525502 - RNA, 19 nt, Homo sapiens
  misc_RNA (1)...(19): siRNA sense strand
agguggagguugagagauu

SEQ ID NO: 2525503 - RNA, 19 nt, Homo sapiens
  misc_RNA (1)...(19): siRNA sense strand
gcacuaaacuccaugguca

SEQ ID NO: 2525504 - RNA, 19 nt, Homo sapiens
  misc_RNA (1)...(19): siRNA sense strand
cagcaaaggaagagaugga

SEQ ID NO: 2525505 - RNA, 19 nt, Homo sapiens
  misc_RNA (1)...(19): siRNA sense strand
aggaaacgcaggagagaga

SEQ ID NO: 2525506 - RNA, 19 nt, Homo sapiens
  misc_RNA (1)...(19): siRNA sense strand
gugaagaagaggacaguca

SEQ ID NO: 2525507 - RNA, 19 nt, Homo sapiens
  misc_RNA (1)...(19): siRNA sense strand
agccaaagcauguggaaaa

SEQ ID NO: 2525508 - RNA, 19 nt, Homo sapiens
  misc_RNA (1)...(19): siRNA sense strand
ccacagaggccauggggaa

SEQ ID NO: 2525509 - RNA, 19 nt, Homo sapiens
  misc_RNA (1)...(19): siRNA sense strand
acaagaagcgucugggaau

SEQ ID NO: 2525510 - RNA, 19 nt, Homo sapiens
  misc_RNA (1)...(19): siRNA sense strand
gcaccuacaaagagaccaa

SEQ ID NO: 2525511 - RNA, 19 nt, Homo sapiens
  misc_RNA (1)...(19): siRNA sense strand
ggacaaaguugcuggcccu

SEQ ID NO: 2525512 - RNA, 19 nt, Homo sapiens
  misc_RNA (1)...(19): siRNA sense strand
ccgaggaauggaagguuua

SEQ ID NO: 2525513 - RNA, 19 nt, Homo sapiens
  misc_RNA (1)...(19): siRNA sense strand
ggacauuucuguugaccca

SEQ ID NO: 2525514 - RNA, 19 nt, Homo sapiens
  misc_RNA (1)...(19): siRNA sense strand
uggauucagaagaggauua

SEQ ID NO: 2525515 - RNA, 19 nt, Homo sapiens
  misc_RNA (1)...(19): siRNA sense strand
gucaaggaguaaaguacaa

SEQ ID NO: 2525516 - RNA, 19 nt, Homo sapiens
  misc_RNA (1)...(19): siRNA sense strand
gauccugagcagagaccua

SEQ ID NO: 2525517 - RNA, 19 nt, Homo sapiens
  misc_RNA (1)...(19): siRNA sense strand
gaacuguacacuuggguga

SEQ ID NO: 2525518 - RNA, 19 nt, Homo sapiens
  misc_RNA (1)...(19): siRNA sense strand
ggaaauggauccaaagccu

SEQ ID NO: 2525519 - RNA, 19 nt, Homo sapiens
  misc_RNA (1)...(19): siRNA sense strand
ugaagaucgugcaaggaau

SEQ ID NO: 2525520 - RNA, 19 nt, Homo sapiens
  misc_RNA (1)...(19): siRNA sense strand
cuucgaaaggagcuggaaa

SEQ ID NO: 2525521 - RNA, 19 nt, Homo sapiens
  misc_RNA (1)...(19): siRNA sense strand
acucacugguuguguggaa

SEQ ID NO: 2525522 - RNA, 19 nt, Homo sapiens
  misc_RNA (1)...(19): siRNA sense strand
augaagagcugcaaggacu

SEQ ID NO: 2525523 - RNA, 19 nt, Homo sapiens
  misc_RNA (1)...(19): siRNA sense strand
acacaaaccccaaguagaa

SEQ ID NO: 2525524 - RNA, 19 nt, Homo sapiens
  misc_RNA (1)...(19): siRNA sense strand
acaaucacuucauggacaa

SEQ ID NO: 2525525 - RNA, 19 nt, Homo sapiens
  misc_RNA (1)...(19): siRNA sense strand
gaaauuagaaggagggcag

SEQ ID NO: 2525526 - RNA, 19 nt, Homo sapiens
  misc_RNA (1)...(19): siRNA sense strand
acuuggagauuauggccua

SEQ ID NO: 2525527 - RNA, 19 nt, Homo sapiens
  misc_RNA (1)...(19): siRNA sense strand
guauugaauucuaagacca

SEQ ID NO: 2525528 - RNA, 19 nt, Homo sapiens
  misc_RNA (1)...(19): siRNA sense strand
agaaagauacccugcccua

SEQ ID NO: 2525529 - RNA, 19 nt, Homo sapiens
  misc_RNA (1)...(19): siRNA sense strand
uauuuggggugguggaaaa

SEQ ID NO: 2525530 - RNA, 19 nt, Homo sapiens
  misc_RNA (1)...(19): siRNA sense strand
gaggaacaauggaagcaga

SEQ ID NO: 2525531 - RNA, 19 nt, Homo sapiens
  misc_RNA (1)...(19): siRNA sense strand
cagaaguugaacaagaaau

SEQ ID NO: 2525532 - RNA, 19 nt, Homo sapiens
  misc_RNA (1)...(19): siRNA sense strand
cagccaaagcauguggaaa

SEQ ID NO: 2525533 - RNA, 19 nt, Homo sapiens
  misc_RNA (1)...(19): siRNA sense strand
ccaaggcaaaccugauaaa

SEQ ID NO: 2525534 - RNA, 19 nt, Homo sapiens
  misc_RNA (1)...(19): siRNA sense strand
gccaguacucuuuggaauu

SEQ ID NO: 2525535 - RNA, 19 nt, Homo sapiens
  misc_RNA (1)...(19): siRNA sense strand
acccauugcuguaguaaca

SEQ ID NO: 2525536 - RNA, 19 nt, Homo sapiens
  misc_RNA (1)...(19): siRNA sense strand
gcucuaugccuucggauca

SEQ ID NO: 2525537 - RNA, 19 nt, Homo sapiens
  misc_RNA (1)...(19): siRNA sense strand
ggauuauuauacaccacaa

SEQ ID NO: 2525538 - RNA, 19 nt, Homo sapiens
  misc_RNA (1)...(19): siRNA sense strand
aaucagugcaugucgggaa

SEQ ID NO: 2525539 - RNA, 19 nt, Homo sapiens
  misc_RNA (1)...(19): siRNA sense strand
gcagaaguugaacaagaaa

SEQ ID NO: 2525540 - RNA, 19 nt, Homo sapiens
  misc_RNA (1)...(19): siRNA sense strand
cuggaauccuucauagaga

SEQ ID NO: 2525541 - RNA, 19 nt, Homo sapiens
  misc_RNA (1)...(19): siRNA sense strand
uuaucaaccaugaagcaua

SEQ ID NO: 2525542 - RNA, 19 nt, Homo sapiens
  misc_RNA (1)...(19): siRNA sense strand
gagaccuacugcagaugaa

SEQ ID NO: 2525543 - RNA, 19 nt, Homo sapiens
  misc_RNA (1)...(19): siRNA sense strand
gaacaugcaaggaggcacu

SEQ ID NO: 2525544 - RNA, 19 nt, Homo sapiens
  misc_RNA (1)...(19): siRNA sense strand
uuccaauagcaguggcuua

SEQ ID NO: 2525545 - RNA, 19 nt, Homo sapiens
  misc_RNA (1)...(19): siRNA sense strand
aaaggaacucagacagcaa

SEQ ID NO: 2525546 - RNA, 19 nt, Homo sapiens
  misc_RNA (1)...(19): siRNA sense strand
agccaguacucuuuggaau

SEQ ID NO: 2525547 - RNA, 19 nt, Homo sapiens
  misc_RNA (1)...(19): siRNA sense strand
uguuaaagugucuggcuga

SEQ ID NO: 2525548 - RNA, 19 nt, Homo sapiens
  misc_RNA (1)...(19): siRNA sense strand
cagaagcuacagcaagaaa

SEQ ID NO: 2525549 - RNA, 19 nt, Homo sapiens
  misc_RNA (1)...(19): siRNA sense strand
aggaagagaugguggugug

SEQ ID NO: 2525550 - RNA, 19 nt, Homo sapiens
  misc_RNA (1)...(19): siRNA sense strand
aggagagagauggaggaaa

SEQ ID NO: 2525551 - RNA, 19 nt, Homo sapiens
  misc_RNA (1)...(19): siRNA sense strand
ucacaguggagaaggaacu

SEQ ID NO: 2525552 - RNA, 19 nt, Homo sapiens
  misc_RNA (1)...(19): siRNA sense strand
ccuccuaucgacagccaaa

SEQ ID NO: 2525553 - RNA, 19 nt, Homo sapiens
  misc_RNA (1)...(19): siRNA sense strand
cugaagugcuagaacccau

SEQ ID NO: 2525554 - RNA, 19 nt, Homo sapiens
  misc_RNA (1)...(19): siRNA sense strand
gggaauuaucaaccaugaa

SEQ ID NO: 2525555 - RNA, 19 nt, Homo sapiens
  misc_RNA (1)...(19): siRNA sense strand
gugcaaggaauucgggcca

SEQ ID NO: 2525556 - RNA, 19 nt, Homo sapiens
  misc_RNA (1)...(19): siRNA sense strand
cuuaaugcaccuacaaaga

SEQ ID NO: 2525557 - RNA, 19 nt, Homo sapiens
  misc_RNA (1)...(19): siRNA sense strand
gaggacagucagcaggaau

SEQ ID NO: 2525558 - RNA, 19 nt, Homo sapiens
  misc_RNA (1)...(19): siRNA sense strand
cugaacaacagaagcuaca

SEQ ID NO: 2525559 - RNA, 19 nt, Homo sapiens
  misc_RNA (1)...(19): siRNA sense strand
cggcugaauccugcaguaa

SEQ ID NO: 2525560 - RNA, 19 nt, Homo sapiens
  misc_RNA (1)...(19): siRNA sense strand
agaaacuggauguuaucaa

SEQ ID NO: 2525561 - RNA, 19 nt, Homo sapiens
  misc_RNA (1)...(19): siRNA sense strand
acaacagaagcuacagcaa

SEQ ID NO: 2525562 - RNA, 19 nt, Homo sapiens
  misc_RNA (1)...(19): siRNA sense strand
cugagacgcuugugggaac

SEQ ID NO: 2525563 - RNA, 19 nt, Homo sapiens
  misc_RNA (1)...(19): siRNA sense strand
gcguugggaacuacaagaa

SEQ ID NO: 2525564 - RNA, 19 nt, Homo sapiens
  misc_RNA (1)...(19): siRNA sense strand
aguacaauuucaagucuga

SEQ ID NO: 2525565 - RNA, 19 nt, Homo sapiens
  misc_RNA (1)...(19): siRNA sense strand
ggaacuacaagaagcgucu

SEQ ID NO: 2525566 - RNA, 19 nt, Homo sapiens
  misc_RNA (1)...(19): siRNA sense strand
uguggaaggaagucgauuu

SEQ ID NO: 2525567 - RNA, 19 nt, Homo sapiens
  misc_RNA (1)...(19): siRNA sense strand
caauaagcugggucugaau

SEQ ID NO: 2525568 - RNA, 19 nt, Homo sapiens
  misc_RNA (1)...(19): siRNA sense strand
cugaacaggaauuggaagu

SEQ ID NO: 2525569 - RNA, 19 nt, Homo sapiens
  misc_RNA (1)...(19): siRNA sense strand
gcaucgacuuccagccuga

SEQ ID NO: 2525570 - RNA, 19 nt, Homo sapiens
  misc_RNA (1)...(19): siRNA sense strand
acuuccagccugagaucua

SEQ ID NO: 2525571 - RNA, 19 nt, Homo sapiens
  misc_RNA (1)...(19): siRNA sense strand
ucaccaaggacgugggcaa

SEQ ID NO: 2525572 - RNA, 19 nt, Homo sapiens
  misc_RNA (1)...(19): siRNA sense strand
cagcaauccugacggcgau

SEQ ID NO: 2525573 - RNA, 19 nt, Homo sapiens
  misc_RNA (1)...(19): siRNA sense strand
gcagcaauccugacggcga

SEQ ID NO: 2525574 - RNA, 19 nt, Homo sapiens
  misc_RNA (1)...(19): siRNA sense strand
ggacaaaggaccagggauc

SEQ ID NO: 2525575 - RNA, 19 nt, Homo sapiens
  misc_RNA (1)...(19): siRNA sense strand
ccgagaaaucccuggagaa

SEQ ID NO: 2525576 - RNA, 19 nt, Homo sapiens
  misc_RNA (1)...(19): siRNA sense strand
gaccagggaucaagggcaa

SEQ ID NO: 2525577 - RNA, 19 nt, Homo sapiens
  misc_RNA (1)...(19): siRNA sense strand
cggcugagaaggagaccaa

SEQ ID NO: 2525578 - RNA, 19 nt, Homo sapiens
  misc_RNA (1)...(19): siRNA sense strand
ccgagagggcaaaggagaa

SEQ ID NO: 2525579 - RNA, 19 nt, Homo sapiens
  misc_RNA (1)...(19): siRNA sense strand
cagcugaagcaguggguca

SEQ ID NO: 2525580 - RNA, 19 nt, Homo sapiens
  misc_RNA (1)...(19): siRNA sense strand
gagcagaaccugucgcuga

SEQ ID NO: 2525581 - RNA, 19 nt, Homo sapiens
  misc_RNA (1)...(19): siRNA sense strand
gcgcccaggcugagaucaa

SEQ ID NO: 2525582 - RNA, 19 nt, Homo sapiens
  misc_RNA (1)...(19): siRNA sense strand
ucagagaucaggagcggaa

SEQ ID NO: 2525583 - RNA, 19 nt, Homo sapiens
  misc_RNA (1)...(19): siRNA sense strand
gcauggacagggaggucaa

SEQ ID NO: 2525584 - RNA, 19 nt, Homo sapiens
  misc_RNA (1)...(19): siRNA sense strand
uggacaaggaggaggagga

SEQ ID NO: 2525585 - RNA, 19 nt, Homo sapiens
  misc_RNA (1)...(19): siRNA sense strand
cggagaagacccuggagga

SEQ ID NO: 2525586 - RNA, 19 nt, Homo sapiens
  misc_RNA (1)...(19): siRNA sense strand
gaagaagagaggcaggaca

SEQ ID NO: 2525587 - RNA, 19 nt, Homo sapiens
  misc_RNA (1)...(19): siRNA sense strand
agagaucaggagcggaaua

SEQ ID NO: 2525588 - RNA, 19 nt, Homo sapiens
  misc_RNA (1)...(19): siRNA sense strand
ggagagagauccagcggcu

SEQ ID NO: 2525589 - RNA, 19 nt, Homo sapiens
  misc_RNA (1)...(19): siRNA sense strand
gaauaaggcucucuccgaa

SEQ ID NO: 2525590 - RNA, 19 nt, Homo sapiens
  misc_RNA (1)...(19): siRNA sense strand
agaaggagaccaaagccaa

SEQ ID NO: 2525591 - RNA, 19 nt, Homo sapiens
  misc_RNA (1)...(19): siRNA sense strand
gagcacacacugauggaca

SEQ ID NO: 2525592 - RNA, 19 nt, Homo sapiens
  misc_RNA (1)...(19): siRNA sense strand
ggcuugaagaacaggaaaa

SEQ ID NO: 2525593 - RNA, 19 nt, Homo sapiens
  misc_RNA (1)...(19): siRNA sense strand
agggcgaucagcaggauaa

SEQ ID NO: 2525594 - RNA, 19 nt, Homo sapiens
  misc_RNA (1)...(19): siRNA sense strand
ccgaacggcagcagcagaa

SEQ ID NO: 2525595 - RNA, 19 nt, Homo sapiens
  misc_RNA (1)...(19): siRNA sense strand
gagaaggagaccaaagcca

SEQ ID NO: 2525596 - RNA, 19 nt, Homo sapiens
  misc_RNA (1)...(19): siRNA sense strand
agaacaugaccaaugacaa

SEQ ID NO: 2525597 - RNA, 19 nt, Homo sapiens
  misc_RNA (1)...(19): siRNA sense strand
uauacaagcugucgcccaa

SEQ ID NO: 2525598 - RNA, 19 nt, Homo sapiens
  misc_RNA (1)...(19): siRNA sense strand
acaaagaagcccuggaggu

SEQ ID NO: 2525599 - RNA, 19 nt, Homo sapiens
  misc_RNA (1)...(19): siRNA sense strand
acaaaggaccagggaucaa

SEQ ID NO: 2525600 - RNA, 19 nt, Homo sapiens
  misc_RNA (1)...(19): siRNA sense strand
agagaaacaggcaagaaaa

SEQ ID NO: 2525601 - RNA, 19 nt, Homo sapiens
  misc_RNA (1)...(19): siRNA sense strand
aggacaagcaggaggaccu

SEQ ID NO: 2525602 - RNA, 19 nt, Homo sapiens
  misc_RNA (1)...(19): siRNA sense strand
uugaagaacaggaaaagaa

SEQ ID NO: 2525603 - RNA, 19 nt, Homo sapiens
  misc_RNA (1)...(19): siRNA sense strand
ucuccaagaacaugaccaa

SEQ ID NO: 2525604 - RNA, 19 nt, Homo sapiens
  misc_RNA (1)...(19): siRNA sense strand
gagagcuggaggagcagaa

SEQ ID NO: 2525605 - RNA, 19 nt, Homo sapiens
  misc_RNA (1)...(19): siRNA sense strand
cuauagucuccaagaacau

SEQ ID NO: 2525606 - RNA, 19 nt, Homo sapiens
  misc_RNA (1)...(19): siRNA sense strand
ugaagaacaggaaaagaaa

SEQ ID NO: 2525607 - RNA, 19 nt, Homo sapiens
  misc_RNA (1)...(19): siRNA sense strand
acauuaagcagaagcggca

SEQ ID NO: 2525608 - RNA, 19 nt, Homo sapiens
  misc_RNA (1)...(19): siRNA sense strand
uccgagagcuggaggagca

SEQ ID NO: 2525609 - RNA, 19 nt, Homo sapiens
  misc_RNA (1)...(19): siRNA sense strand
aggaggaggagcugcuauu

SEQ ID NO: 2525610 - RNA, 19 nt, Homo sapiens
  misc_RNA (1)...(19): siRNA sense strand
ccaugagagcggcugagaa

SEQ ID NO: 2525611 - RNA, 19 nt, Homo sapiens
  misc_RNA (1)...(19): siRNA sense strand
aucaagaagaagagaggca

SEQ ID NO: 2525612 - RNA, 19 nt, Homo sapiens
  misc_RNA (1)...(19): siRNA sense strand
auuaagcagaagcggcaaa

SEQ ID NO: 2525613 - RNA, 19 nt, Homo sapiens
  misc_RNA (1)...(19): siRNA sense strand
cggcagcagcagaagacga

SEQ ID NO: 2525614 - RNA, 19 nt, Homo sapiens
  misc_RNA (1)...(19): siRNA sense strand
gggucaggguacaaagaag

SEQ ID NO: 2525615 - RNA, 19 nt, Homo sapiens
  misc_RNA (1)...(19): siRNA sense strand
ugucaagcggagagagauc

SEQ ID NO: 2525616 - RNA, 19 nt, Homo sapiens
  misc_RNA (1)...(19): siRNA sense strand
gccgagagggcaaaggaga

SEQ ID NO: 2525617 - RNA, 19 nt, Homo sapiens
  misc_RNA (1)...(19): siRNA sense strand
cggccgaggagaaggaaga

SEQ ID NO: 2525618 - RNA, 19 nt, Homo sapiens
  misc_RNA (1)...(19): siRNA sense strand
gugaacugcuacagcguga

SEQ ID NO: 2525619 - RNA, 19 nt, Homo sapiens
  misc_RNA (1)...(19): siRNA sense strand
ccaaacuggauguggggaa

SEQ ID NO: 2525620 - RNA, 19 nt, Homo sapiens
  misc_RNA (1)...(19): siRNA sense strand
ugaucaaccccuacagaaa

SEQ ID NO: 2525621 - RNA, 19 nt, Homo sapiens
  misc_RNA (1)...(19): siRNA sense strand
ccguggacuucgggaacua

SEQ ID NO: 2525622 - RNA, 19 nt, Homo sapiens
  misc_RNA (1)...(19): siRNA sense strand
ggaacaucacgcugcucaa

SEQ ID NO: 2525623 - RNA, 19 nt, Homo sapiens
  misc_RNA (1)...(19): siRNA sense strand
uguccaaucuagaucccaa

SEQ ID NO: 2525624 - RNA, 19 nt, Homo sapiens
  misc_RNA (1)...(19): siRNA sense strand
gcaauaagcaacagcgcau

SEQ ID NO: 2525625 - RNA, 19 nt, Homo sapiens
  misc_RNA (1)...(19): siRNA sense strand
gugaauucaacgagggaca

SEQ ID NO: 2525626 - RNA, 19 nt, Homo sapiens
  misc_RNA (1)...(19): siRNA sense strand
acuugaacuuuguggauga

SEQ ID NO: 2525627 - RNA, 19 nt, Homo sapiens
  misc_RNA (1)...(19): siRNA sense strand
gcgacaaacaagauugaga

SEQ ID NO: 2525628 - RNA, 19 nt, Homo sapiens
  misc_RNA (1)...(19): siRNA sense strand
ggaaaccagagaugggcaa

SEQ ID NO: 2525629 - RNA, 19 nt, Homo sapiens
  misc_RNA (1)...(19): siRNA sense strand
cugccaaauugcaaagaca

SEQ ID NO: 2525630 - RNA, 19 nt, Homo sapiens
  misc_RNA (1)...(19): siRNA sense strand
gaaagaaaguuauuaccga

SEQ ID NO: 2525631 - RNA, 19 nt, Homo sapiens
  misc_RNA (1)...(19): siRNA sense strand
ucaaagagucccuggaacu

SEQ ID NO: 2525632 - RNA, 19 nt, Homo sapiens
  misc_RNA (1)...(19): siRNA sense strand
ugaaaaucccugagcaauu

SEQ ID NO: 2525633 - RNA, 19 nt, Homo sapiens
  misc_RNA (1)...(19): siRNA sense strand
cuucagaaacagaccucaa

SEQ ID NO: 2525634 - RNA, 19 nt, Homo sapiens
  misc_RNA (1)...(19): siRNA sense strand
ugaagaaacucuacugcca

SEQ ID NO: 2525635 - RNA, 19 nt, Homo sapiens
  misc_RNA (1)...(19): siRNA sense strand
augaagauagcaucagaaa

SEQ ID NO: 2525636 - RNA, 19 nt, Homo sapiens
  misc_RNA (1)...(19): siRNA sense strand
aaaugaacagcaugaacaa

SEQ ID NO: 2525637 - RNA, 19 nt, Homo sapiens
  misc_RNA (1)...(19): siRNA sense strand
gagcauuacuccauggaug

SEQ ID NO: 2525638 - RNA, 19 nt, Homo sapiens
  misc_RNA (1)...(19): siRNA sense strand
gcugguaccuuaugagcca

SEQ ID NO: 2525639 - RNA, 19 nt, Homo sapiens
  misc_RNA (1)...(19): siRNA sense strand
cguacaggcaacagcaaca

SEQ ID NO: 2525640 - RNA, 19 nt, Homo sapiens
  misc_RNA (1)...(19): siRNA sense strand
ucugaaaaucccugagcaa

SEQ ID NO: 2525641 - RNA, 19 nt, Homo sapiens
  misc_RNA (1)...(19): siRNA sense strand
aucagaagauggugcgaca

SEQ ID NO: 2525642 - RNA, 19 nt, Homo sapiens
  misc_RNA (1)...(19): siRNA sense strand
gcgccaugccugucuacaa

SEQ ID NO: 2525643 - RNA, 19 nt, Homo sapiens
  misc_RNA (1)...(19): siRNA sense strand
ggaagggcauccuggacca

SEQ ID NO: 2525644 - RNA, 19 nt, Homo sapiens
  misc_RNA (1)...(19): siRNA sense strand
caucacaggaagacagagu

SEQ ID NO: 2525645 - RNA, 19 nt, Homo sapiens
  misc_RNA (1)...(19): siRNA sense strand
gcacacaauugaaacguac

SEQ ID NO: 2525646 - RNA, 19 nt, Homo sapiens
  misc_RNA (1)...(19): siRNA sense strand
caguuguguuggagggaug

SEQ ID NO: 2525647 - RNA, 19 nt, Homo sapiens
  misc_RNA (1)...(19): siRNA sense strand
guucaucaugucuggacua

SEQ ID NO: 2525648 - RNA, 19 nt, Homo sapiens
  misc_RNA (1)...(19): siRNA sense strand
ugaucuggcaagucugaaa

SEQ ID NO: 2525649 - RNA, 19 nt, Homo sapiens
  misc_RNA (1)...(19): siRNA sense strand
agcacuuacuucagaaaca

SEQ ID NO: 2525650 - RNA, 19 nt, Homo sapiens
  misc_RNA (1)...(19): siRNA sense strand
gaagaaacucuacugccaa

SEQ ID NO: 2525651 - RNA, 19 nt, Homo sapiens
  misc_RNA (1)...(19): siRNA sense strand
aaucauuguuacucuggaa

SEQ ID NO: 2525652 - RNA, 19 nt, Homo sapiens
  misc_RNA (1)...(19): siRNA sense strand
ggccgugagacuuaugaaa

SEQ ID NO: 2525653 - RNA, 19 nt, Homo sapiens
  misc_RNA (1)...(19): siRNA sense strand
uuauugaugcugugcgauu

SEQ ID NO: 2525654 - RNA, 19 nt, Homo sapiens
  misc_RNA (1)...(19): siRNA sense strand
gaugacaaguacugggcaa

SEQ ID NO: 2525655 - RNA, 19 nt, Homo sapiens
  misc_RNA (1)...(19): siRNA sense strand
gggccuaccuuaugggaca

SEQ ID NO: 2525656 - RNA, 19 nt, Homo sapiens
  misc_RNA (1)...(19): siRNA sense strand
aggaagaacugaagccaca

SEQ ID NO: 2525657 - RNA, 19 nt, Homo sapiens
  misc_RNA (1)...(19): siRNA sense strand
ugaggaaggagcugggcaa

SEQ ID NO: 2525658 - RNA, 19 nt, Homo sapiens
  misc_RNA (1)...(19): siRNA sense strand
aggaaaagaagcuggauga

SEQ ID NO: 2525659 - RNA, 19 nt, Homo sapiens
  misc_RNA (1)...(19): siRNA sense strand
agcuggaugaugagaguaa

SEQ ID NO: 2525660 - RNA, 19 nt, Homo sapiens
  misc_RNA (1)...(19): siRNA sense strand
acgcaaguucucugaggaa

SEQ ID NO: 2525661 - RNA, 19 nt, Homo sapiens
  misc_RNA (1)...(19): siRNA sense strand
ugggcaaggcgcagaaaga

SEQ ID NO: 2525662 - RNA, 19 nt, Homo sapiens
  misc_RNA (1)...(19): siRNA sense strand
aggaaggagcugggcaaau

SEQ ID NO: 2525663 - RNA, 19 nt, Homo sapiens
  misc_RNA (1)...(19): siRNA sense strand
ccucaugacuauugcacca

SEQ ID NO: 2525664 - RNA, 19 nt, Homo sapiens
  misc_RNA (1)...(19): siRNA sense strand
gcucaguucgagauggaca

SEQ ID NO: 2525665 - RNA, 19 nt, Homo sapiens
  misc_RNA (1)...(19): siRNA sense strand
uuaaagaacuucagaggca

SEQ ID NO: 2525666 - RNA, 19 nt, Homo sapiens
  misc_RNA (1)...(19): siRNA sense strand
aggaagaggaguagaccuu

SEQ ID NO: 2525667 - RNA, 19 nt, Homo sapiens
  misc_RNA (1)...(19): siRNA sense strand
ugccagaggaagaggagua

SEQ ID NO: 2525668 - RNA, 19 nt, Homo sapiens
  misc_RNA (1)...(19): siRNA sense strand
auucauggcaauagcuaaa

SEQ ID NO: 2525669 - RNA, 19 nt, Homo sapiens
  misc_RNA (1)...(19): siRNA sense strand
uguaauagcuuuaucggga

SEQ ID NO: 2525670 - RNA, 19 nt, Homo sapiens
  misc_RNA (1)...(19): siRNA sense strand
ccacaaaauccaggagcaa

SEQ ID NO: 2525671 - RNA, 19 nt, Homo sapiens
  misc_RNA (1)...(19): siRNA sense strand
guaauagcuuuaucgggaa

SEQ ID NO: 2525672 - RNA, 19 nt, Homo sapiens
  misc_RNA (1)...(19): siRNA sense strand
acaaaauccaggagcaaau

SEQ ID NO: 2525673 - RNA, 19 nt, Homo sapiens
  misc_RNA (1)...(19): siRNA sense strand
aguccuaugcagaugacaa

SEQ ID NO: 2525674 - RNA, 19 nt, Homo sapiens
  misc_RNA (1)...(19): siRNA sense strand
aacuaguacuucugggaga

SEQ ID NO: 2525675 - RNA, 19 nt, Homo sapiens
  misc_RNA (1)...(19): siRNA sense strand
aaggagaagcagaggauca

SEQ ID NO: 2525676 - RNA, 19 nt, Homo sapiens
  misc_RNA (1)...(19): siRNA sense strand
guuuagaucucaugaggga

SEQ ID NO: 2525677 - RNA, 19 nt, Homo sapiens
  misc_RNA (1)...(19): siRNA sense strand
ccaaggacauugaggacgu

SEQ ID NO: 2525678 - RNA, 19 nt, Homo sapiens
  misc_RNA (1)...(19): siRNA sense strand
gcuaugauuacgaugggua

SEQ ID NO: 2525679 - RNA, 19 nt, Homo sapiens
  misc_RNA (1)...(19): siRNA sense strand
uagcagaagccguagcaga

SEQ ID NO: 2525680 - RNA, 19 nt, Homo sapiens
  misc_RNA (1)...(19): siRNA sense strand
ccauccaggcggucugaaa

SEQ ID NO: 2525681 - RNA, 19 nt, Homo sapiens
  misc_RNA (1)...(19): siRNA sense strand
ucguggaguuuguacggaa

SEQ ID NO: 2525682 - RNA, 19 nt, Homo sapiens
  misc_RNA (1)...(19): siRNA sense strand
gguuaaaguugaugggccc

SEQ ID NO: 2525683 - RNA, 19 nt, Homo sapiens
  misc_RNA (1)...(19): siRNA sense strand
agucguagcagaagccgua

SEQ ID NO: 2525684 - RNA, 19 nt, Homo sapiens
  misc_RNA (1)...(19): siRNA sense strand
gaaccaaggacauugagga

SEQ ID NO: 2525685 - RNA, 19 nt, Homo sapiens
  misc_RNA (1)...(19): siRNA sense strand
gguauauugugaugggcca

SEQ ID NO: 2525686 - RNA, 19 nt, Homo sapiens
  misc_RNA (1)...(19): siRNA sense strand
cgacagacaaugccggcaa

SEQ ID NO: 2525687 - RNA, 19 nt, Homo sapiens
  misc_RNA (1)...(19): siRNA sense strand
ugguaaagagggagagaag

SEQ ID NO: 2525688 - RNA, 19 nt, Homo sapiens
  misc_RNA (1)...(19): siRNA sense strand
gagagaaggaaccaggcuu

SEQ ID NO: 2525689 - RNA, 19 nt, Homo sapiens
  misc_RNA (1)...(19): siRNA sense strand
gcuucagaucccuggguua

SEQ ID NO: 2525690 - RNA, 19 nt, Homo sapiens
  misc_RNA (1)...(19): siRNA sense strand
ucuucuugcuacagaccaa

SEQ ID NO: 2525691 - RNA, 19 nt, Homo sapiens
  misc_RNA (1)...(19): siRNA sense strand
ggcuauggaucgaggagcu

SEQ ID NO: 2525692 - RNA, 19 nt, Homo sapiens
  misc_RNA (1)...(19): siRNA sense strand
cuucgaagguggagggaac

SEQ ID NO: 2525693 - RNA, 19 nt, Homo sapiens
  misc_RNA (1)...(19): siRNA sense strand
gauaauuauucaugccgua

SEQ ID NO: 2525694 - RNA, 19 nt, Homo sapiens
  misc_RNA (1)...(19): siRNA sense strand
ccguaauucaagaguauau

SEQ ID NO: 2525695 - RNA, 19 nt, Homo sapiens
  misc_RNA (1)...(19): siRNA sense strand
cuugaaucaucuaggacuu

SEQ ID NO: 2525696 - RNA, 19 nt, Homo sapiens
  misc_RNA (1)...(19): siRNA sense strand
gauaaaauuaacaggcgaa

SEQ ID NO: 2525697 - RNA, 19 nt, Homo sapiens
  misc_RNA (1)...(19): siRNA sense strand
gcugugaagaagaaaccaa

SEQ ID NO: 2525698 - RNA, 19 nt, Homo sapiens
  misc_RNA (1)...(19): siRNA sense strand
ggauaaaauuaacaggcga

SEQ ID NO: 2525699 - RNA, 19 nt, Homo sapiens
  misc_RNA (1)...(19): siRNA sense strand
ccucccagcaacagaagaa

SEQ ID NO: 2525700 - RNA, 19 nt, Homo sapiens
  misc_RNA (1)...(19): siRNA sense strand
aacaguaacuaaaggcaga

SEQ ID NO: 2525701 - RNA, 19 nt, Homo sapiens
  misc_RNA (1)...(19): siRNA sense strand
uggccuugcaagagcagaa

SEQ ID NO: 2525702 - RNA, 19 nt, Homo sapiens
  misc_RNA (1)...(19): siRNA sense strand
aggcaccagcugugaagaa

SEQ ID NO: 2525703 - RNA, 19 nt, Homo sapiens
  misc_RNA (1)...(19): siRNA sense strand
gaaaaguaucagaaaggau

SEQ ID NO: 2525704 - RNA, 19 nt, Homo sapiens
  misc_RNA (1)...(19): siRNA sense strand
cccagcaacagaagaacaa

SEQ ID NO: 2525705 - RNA, 19 nt, Homo sapiens
  misc_RNA (1)...(19): siRNA sense strand
ucuacaugcuaguggcgau

SEQ ID NO: 2525706 - RNA, 19 nt, Homo sapiens
  misc_RNA (1)...(19): siRNA sense strand
gagcaaaagaagaaggaca

SEQ ID NO: 2525707 - RNA, 19 nt, Homo sapiens
  misc_RNA (1)...(19): siRNA sense strand
uggaagaagaagaacagaa

SEQ ID NO: 2525708 - RNA, 19 nt, Homo sapiens
  misc_RNA (1)...(19): siRNA sense strand
caaugaaaggaaagcggaa

SEQ ID NO: 2525709 - RNA, 19 nt, Homo sapiens
  misc_RNA (1)...(19): siRNA sense strand
ccucagagcaaaagaagaa

SEQ ID NO: 2525710 - RNA, 19 nt, Homo sapiens
  misc_RNA (1)...(19): siRNA sense strand
agagcagggaugaggacaa

SEQ ID NO: 2525711 - RNA, 19 nt, Homo sapiens
  misc_RNA (1)...(19): siRNA sense strand
acgaagaaaggcuggaaga

SEQ ID NO: 2525712 - RNA, 19 nt, Homo sapiens
  misc_RNA (1)...(19): siRNA sense strand
augaagaggaagaaguaga

SEQ ID NO: 2525713 - RNA, 19 nt, Homo sapiens
  misc_RNA (1)...(19): siRNA sense strand
aagaagaaggacaaagaca

SEQ ID NO: 2525714 - RNA, 19 nt, Homo sapiens
  misc_RNA (1)...(19): siRNA sense strand
aagaggaagaaguagacaa

SEQ ID NO: 2525715 - RNA, 19 nt, Homo sapiens
  misc_RNA (1)...(19): siRNA sense strand
augaaaggaaagcggaaga

SEQ ID NO: 2525716 - RNA, 19 nt, Homo sapiens
  misc_RNA (1)...(19): siRNA sense strand
cggaagacgcugaaugcca

SEQ ID NO: 2525717 - RNA, 19 nt, Homo sapiens
  misc_RNA (1)...(19): siRNA sense strand
agcaaaagaagaaggacaa

SEQ ID NO: 2525718 - RNA, 19 nt, Homo sapiens
  misc_RNA (1)...(19): siRNA sense strand
gcauauaggcgggagcaga

SEQ ID NO: 2525719 - RNA, 19 nt, Homo sapiens
  misc_RNA (1)...(19): siRNA sense strand
acucggaagagcaagacaa

SEQ ID NO: 2525720 - RNA, 19 nt, Homo sapiens
  misc_RNA (1)...(19): siRNA sense strand
aacagaaugaagaggaaga

SEQ ID NO: 2525721 - RNA, 19 nt, Homo sapiens
  misc_RNA (1)...(19): siRNA sense strand
ggcuggaagaagaagaaca

SEQ ID NO: 2525722 - RNA, 19 nt, Homo sapiens
  misc_RNA (1)...(19): siRNA sense strand
aaacagacucggaagagca

SEQ ID NO: 2525723 - RNA, 19 nt, Homo sapiens
  misc_RNA (1)...(19): siRNA sense strand
guucguuaucccauugaaa

SEQ ID NO: 2525724 - RNA, 19 nt, Homo sapiens
  misc_RNA (1)...(19): siRNA sense strand
gcagaaugacaguuggcaa

SEQ ID NO: 2525725 - RNA, 19 nt, Homo sapiens
  misc_RNA (1)...(19): siRNA sense strand
gggcaguggcagaaugaca

SEQ ID NO: 2525726 - RNA, 19 nt, Homo sapiens
  misc_RNA (1)...(19): siRNA sense strand
cggcugcacaacugacaaa

SEQ ID NO: 2525727 - RNA, 19 nt, Homo sapiens
  misc_RNA (1)...(19): siRNA sense strand
augagugcuuugaggcuau

SEQ ID NO: 2525728 - RNA, 19 nt, Homo sapiens
  misc_RNA (1)...(19): siRNA sense strand
cuuccagggcaguggcaga

SEQ ID NO: 2525729 - RNA, 19 nt, Homo sapiens
  misc_RNA (1)...(19): siRNA sense strand
gguuauacaucauugggua

SEQ ID NO: 2525730 - RNA, 19 nt, Homo sapiens
  misc_RNA (1)...(19): siRNA sense strand
agauauaggccaaaaguga

SEQ ID NO: 2525731 - RNA, 19 nt, Homo sapiens
  misc_RNA (1)...(19): siRNA sense strand
agaucaagaacucaguaaa

SEQ ID NO: 2525732 - RNA, 19 nt, Homo sapiens
  misc_RNA (1)...(19): siRNA sense strand
ggcuuagaggacuggguua

SEQ ID NO: 2525733 - RNA, 19 nt, Homo sapiens
  misc_RNA (1)...(19): siRNA sense strand
gcuuagaggacuggguuau

SEQ ID NO: 2525734 - RNA, 19 nt, Homo sapiens
  misc_RNA (1)...(19): siRNA sense strand
uggacuggugcgaggagaa

SEQ ID NO: 2525735 - RNA, 19 nt, Homo sapiens
  misc_RNA (1)...(19): siRNA sense strand
caauauuccaucaggucau

SEQ ID NO: 2525736 - RNA, 19 nt, Homo sapiens
  misc_RNA (1)...(19): siRNA sense strand
uaccugagauauaggccaa

SEQ ID NO: 2525737 - RNA, 19 nt, Homo sapiens
  misc_RNA (1)...(19): siRNA sense strand
aagaucaagaacucaguaa

SEQ ID NO: 2525738 - RNA, 19 nt, Homo sapiens
  misc_RNA (1)...(19): siRNA sense strand
ccaaguacuuccagggaga

SEQ ID NO: 2525739 - RNA, 19 nt, Homo sapiens
  misc_RNA (1)...(19): siRNA sense strand
ugaggaagauugagcgacu

SEQ ID NO: 2525740 - RNA, 19 nt, Homo sapiens
  misc_RNA (1)...(19): siRNA sense strand
acaucaugaaagagaucaa

SEQ ID NO: 2525741 - RNA, 19 nt, Homo sapiens
  misc_RNA (1)...(19): siRNA sense strand
aagaaugccaugagggcga

SEQ ID NO: 2525742 - RNA, 19 nt, Homo sapiens
  misc_RNA (1)...(19): siRNA sense strand
ggacaaggaucccgaggac

SEQ ID NO: 2525743 - RNA, 19 nt, Homo sapiens
  misc_RNA (1)...(19): siRNA sense strand
acaaggaucccgaggacca

SEQ ID NO: 2525744 - RNA, 19 nt, Homo sapiens
  misc_RNA (1)...(19): siRNA sense strand
uggccuugggugaggaaga

SEQ ID NO: 2525745 - RNA, 19 nt, Homo sapiens
  misc_RNA (1)...(19): siRNA sense strand
augccuacgacauggcuaa

SEQ ID NO: 2525746 - RNA, 19 nt, Homo sapiens
  misc_RNA (1)...(19): siRNA sense strand
ucaugguggccuuggguga

SEQ ID NO: 2525747 - RNA, 19 nt, Homo sapiens
  misc_RNA (1)...(19): siRNA sense strand
ucacagagggagaggacau

SEQ ID NO: 2525748 - RNA, 19 nt, Homo sapiens
  misc_RNA (1)...(19): siRNA sense strand
uggagaaccuggaugacca

SEQ ID NO: 2525749 - RNA, 19 nt, Homo sapiens
  misc_RNA (1)...(19): siRNA sense strand
gcaggugagugucagggua

SEQ ID NO: 2525750 - RNA, 19 nt, Homo sapiens
  misc_RNA (1)...(19): siRNA sense strand
acacaaagauacugagcca

SEQ ID NO: 2525751 - RNA, 19 nt, Homo sapiens
  misc_RNA (1)...(19): siRNA sense strand
aggagaagacagaagcaaa

SEQ ID NO: 2525752 - RNA, 19 nt, Homo sapiens
  misc_RNA (1)...(19): siRNA sense strand
ucaucuaaugggugugaaa

SEQ ID NO: 2525753 - RNA, 19 nt, Homo sapiens
  misc_RNA (1)...(19): siRNA sense strand
guucauucaaggagaguca

SEQ ID NO: 2525754 - RNA, 19 nt, Homo sapiens
  misc_RNA (1)...(19): siRNA sense strand
cugaaagaggcauuauaaa

SEQ ID NO: 2525755 - RNA, 19 nt, Homo sapiens
  misc_RNA (1)...(19): siRNA sense strand
ccugaaauuacaacugaaa

SEQ ID NO: 2525756 - RNA, 19 nt, Homo sapiens
  misc_RNA (1)...(19): siRNA sense strand
cagaagcaaacuagcaaau

SEQ ID NO: 2525757 - RNA, 19 nt, Homo sapiens
  misc_RNA (1)...(19): siRNA sense strand
ccagaaaaccccagcucua

SEQ ID NO: 2525758 - RNA, 19 nt, Homo sapiens
  misc_RNA (1)...(19): siRNA sense strand
uguuguuguugcaggagaa

SEQ ID NO: 2525759 - RNA, 19 nt, Homo sapiens
  misc_RNA (1)...(19): siRNA sense strand
auucaaggagagucaauua

SEQ ID NO: 2525760 - RNA, 19 nt, Homo sapiens
  misc_RNA (1)...(19): siRNA sense strand
ggaaggaaaaucaagcaaa

SEQ ID NO: 2525761 - RNA, 19 nt, Homo sapiens
  misc_RNA (1)...(19): siRNA sense strand
uggaauaaugggaacugua

SEQ ID NO: 2525762 - RNA, 19 nt, Homo sapiens
  misc_RNA (1)...(19): siRNA sense strand
aggaaacugaauugaaaca

SEQ ID NO: 2525763 - RNA, 19 nt, Homo sapiens
  misc_RNA (1)...(19): siRNA sense strand
agucaucggcuguggcuuu

SEQ ID NO: 2525764 - RNA, 19 nt, Homo sapiens
  misc_RNA (1)...(19): siRNA sense strand
agaccucgcuggugguaca

SEQ ID NO: 2525765 - RNA, 19 nt, Homo sapiens
  misc_RNA (1)...(19): siRNA sense strand
gaacucaucuaaugggugu

SEQ ID NO: 2525766 - RNA, 19 nt, Homo sapiens
  misc_RNA (1)...(19): siRNA sense strand
aggugaaguuggaggaaga

SEQ ID NO: 2525767 - RNA, 19 nt, Homo sapiens
  misc_RNA (1)...(19): siRNA sense strand
gcaaguuggaugucgggaa

SEQ ID NO: 2525768 - RNA, 19 nt, Homo sapiens
  misc_RNA (1)...(19): siRNA sense strand
aguacauggaggagaauga

SEQ ID NO: 2525769 - RNA, 19 nt, Homo sapiens
  misc_RNA (1)...(19): siRNA sense strand
ccaagaaguacauggagga

SEQ ID NO: 2525770 - RNA, 19 nt, Homo sapiens
  misc_RNA (1)...(19): siRNA sense strand
uaugaugaugugacggaaa

SEQ ID NO: 2525771 - RNA, 19 nt, Homo sapiens
  misc_RNA (1)...(19): siRNA sense strand
ugcagaagcuaaaggacga

SEQ ID NO: 2525772 - RNA, 19 nt, Homo sapiens
  misc_RNA (1)...(19): siRNA sense strand
aggagaaugaccagcucaa

SEQ ID NO: 2525773 - RNA, 19 nt, Homo sapiens
  misc_RNA (1)...(19): siRNA sense strand
uguuaguguccuauggcaa

SEQ ID NO: 2525774 - RNA, 19 nt, Homo sapiens
  misc_RNA (1)...(19): siRNA sense strand
ucgggaaugcugaggugaa

SEQ ID NO: 2525775 - RNA, 19 nt, Homo sapiens
  misc_RNA (1)...(19): siRNA sense strand
uggaguuguuaguguccua

SEQ ID NO: 2525776 - RNA, 19 nt, Homo sapiens
  misc_RNA (1)...(19): siRNA sense strand
ggaagcagucugagggccu

SEQ ID NO: 2525777 - RNA, 19 nt, Homo sapiens
  misc_RNA (1)...(19): siRNA sense strand
ccaaggaguacgaccgcuu

SEQ ID NO: 2525778 - RNA, 19 nt, Homo sapiens
  misc_RNA (1)...(19): siRNA sense strand
augaugaugugacggaaaa

SEQ ID NO: 2525779 - RNA, 19 nt, Homo sapiens
  misc_RNA (1)...(19): siRNA sense strand
ucccagaguuauagaucca

SEQ ID NO: 2525780 - RNA, 19 nt, Homo sapiens
  misc_RNA (1)...(19): siRNA sense strand
gggagaauauugaugacca

SEQ ID NO: 2525781 - RNA, 19 nt, Homo sapiens
  misc_RNA (1)...(19): siRNA sense strand
gguggagaaucgugggcga

SEQ ID NO: 2525782 - RNA, 19 nt, Homo sapiens
  misc_RNA (1)...(19): siRNA sense strand
ggaccguggcauuguggaa

SEQ ID NO: 2525783 - RNA, 19 nt, Homo sapiens
  misc_RNA (1)...(19): siRNA sense strand
ggacaacuuacaagggcuu

SEQ ID NO: 2525784 - RNA, 19 nt, Homo sapiens
  misc_RNA (1)...(19): siRNA sense strand
ugaggaucuugguggagaa

SEQ ID NO: 2525785 - RNA, 19 nt, Homo sapiens
  misc_RNA (1)...(19): siRNA sense strand
acaaggaugggcugagcaa

SEQ ID NO: 2525786 - RNA, 19 nt, Homo sapiens
  misc_RNA (1)...(19): siRNA sense strand
ucaagaaggcacuggagga

SEQ ID NO: 2525787 - RNA, 19 nt, Homo sapiens
  misc_RNA (1)...(19): siRNA sense strand
gagaucgggcuguggguga

SEQ ID NO: 2525788 - RNA, 19 nt, Homo sapiens
  misc_RNA (1)...(19): siRNA sense strand
ugagccagaaagaggcaaa

SEQ ID NO: 2525789 - RNA, 19 nt, Homo sapiens
  misc_RNA (1)...(19): siRNA sense strand
ggaacuucaugcuggagga

SEQ ID NO: 2525790 - RNA, 19 nt, Homo sapiens
  misc_RNA (1)...(19): siRNA sense strand
uggauaugaagaagagcuu

SEQ ID NO: 2525791 - RNA, 19 nt, Homo sapiens
  misc_RNA (1)...(19): siRNA sense strand
ccucacaauaucuuggauu

SEQ ID NO: 2525792 - RNA, 19 nt, Homo sapiens
  misc_RNA (1)...(19): siRNA sense strand
cugaaaagcccaucaacau

SEQ ID NO: 2525793 - RNA, 19 nt, Homo sapiens
  misc_RNA (1)...(19): siRNA sense strand
acuucaugcuggaggauuc

SEQ ID NO: 2525794 - RNA, 19 nt, Homo sapiens
  misc_RNA (1)...(19): siRNA sense strand
aggacaaauagcaaggaaa

SEQ ID NO: 2525795 - RNA, 19 nt, Homo sapiens
  misc_RNA (1)...(19): siRNA sense strand
acaucacgguggaggacau

SEQ ID NO: 2525796 - RNA, 19 nt, Homo sapiens
  misc_RNA (1)...(19): siRNA sense strand
auucaauccuucagaucau

SEQ ID NO: 2525797 - RNA, 19 nt, Homo sapiens
  misc_RNA (1)...(19): siRNA sense strand
ccuccaggacaaauagcaa

SEQ ID NO: 2525798 - RNA, 19 nt, Homo sapiens
  misc_RNA (1)...(19): siRNA sense strand
ugguguaccuugaaagacu

SEQ ID NO: 2525799 - RNA, 19 nt, Homo sapiens
  misc_RNA (1)...(19): siRNA sense strand
ggacccagauggaaggaug

SEQ ID NO: 2525800 - RNA, 19 nt, Homo sapiens
  misc_RNA (1)...(19): siRNA sense strand
ugaaagacaucacggugga

SEQ ID NO: 2525801 - RNA, 19 nt, Homo sapiens
  misc_RNA (1)...(19): siRNA sense strand
aaggaugcucuuagauauu

SEQ ID NO: 2525802 - RNA, 19 nt, Homo sapiens
  misc_RNA (1)...(19): siRNA sense strand
aggacaaauagcaaggaaa

SEQ ID NO: 2525803 - RNA, 19 nt, Homo sapiens
  misc_RNA (1)...(19): siRNA sense strand
acaucacgguggaggacau

SEQ ID NO: 2525804 - RNA, 19 nt, Homo sapiens
  misc_RNA (1)...(19): siRNA sense strand
auucaauccuucagaucau

SEQ ID NO: 2525805 - RNA, 19 nt, Homo sapiens
  misc_RNA (1)...(19): siRNA sense strand
ccuccaggacaaauagcaa

SEQ ID NO: 2525806 - RNA, 19 nt, Homo sapiens
  misc_RNA (1)...(19): siRNA sense strand
ugguguaccuugaaagacu

SEQ ID NO: 2525807 - RNA, 19 nt, Homo sapiens
  misc_RNA (1)...(19): siRNA sense strand
ggacccagauggaaggaug

SEQ ID NO: 2525808 - RNA, 19 nt, Homo sapiens
  misc_RNA (1)...(19): siRNA sense strand
ugaaagacaucacggugga

SEQ ID NO: 2525809 - RNA, 19 nt, Homo sapiens
  misc_RNA (1)...(19): siRNA sense strand
aaggaugcucuuagauauu

SEQ ID NO: 2525810 - RNA, 19 nt, Homo sapiens
  misc_RNA (1)...(19): siRNA sense strand
ucuucaaugucuuuggcua

SEQ ID NO: 2525811 - RNA, 19 nt, Homo sapiens
  misc_RNA (1)...(19): siRNA sense strand
cagcaaagcaggucagcuc

SEQ ID NO: 2525812 - RNA, 19 nt, Homo sapiens
  misc_RNA (1)...(19): siRNA sense strand
augugaagaugcugcugaa

SEQ ID NO: 2525813 - RNA, 19 nt, Homo sapiens
  misc_RNA (1)...(19): siRNA sense strand
aggagaaggugcugaggag

SEQ ID NO: 2525814 - RNA, 19 nt, Homo sapiens
  misc_RNA (1)...(19): siRNA sense strand
gcaaggauguggacggccu

SEQ ID NO: 2525815 - RNA, 19 nt, Homo sapiens
  misc_RNA (1)...(19): siRNA sense strand
ccgacagugaugugaagau

SEQ ID NO: 2525816 - RNA, 19 nt, Homo sapiens
  misc_RNA (1)...(19): siRNA sense strand
cgacaagagcuggcggaga

SEQ ID NO: 2525817 - RNA, 19 nt, Homo sapiens
  misc_RNA (1)...(19): siRNA sense strand
ccgaaauggaugaacgauu

SEQ ID NO: 2525818 - RNA, 19 nt, Homo sapiens
  misc_RNA (1)...(19): siRNA sense strand
caggacaaucagagacaaa

SEQ ID NO: 2525819 - RNA, 19 nt, Homo sapiens
  misc_RNA (1)...(19): siRNA sense strand
gaacagaagaugcuggaga

SEQ ID NO: 2525820 - RNA, 19 nt, Homo sapiens
  misc_RNA (1)...(19): siRNA sense strand
gggaggaguuagaguggca

SEQ ID NO: 2525821 - RNA, 19 nt, Homo sapiens
  misc_RNA (1)...(19): siRNA sense strand
agugaaaccaggcaggaaa

SEQ ID NO: 2525822 - RNA, 19 nt, Homo sapiens
  misc_RNA (1)...(19): siRNA sense strand
cagacuaugagaagaggaa

SEQ ID NO: 2525823 - RNA, 19 nt, Homo sapiens
  misc_RNA (1)...(19): siRNA sense strand
agcaaauggaucagaacaa

SEQ ID NO: 2525824 - RNA, 19 nt, Homo sapiens
  misc_RNA (1)...(19): siRNA sense strand
cggcagaucaggagccaga

SEQ ID NO: 2525825 - RNA, 19 nt, Homo sapiens
  misc_RNA (1)...(19): siRNA sense strand
ugacggaguuagaagccaa

SEQ ID NO: 2525826 - RNA, 19 nt, Homo sapiens
  misc_RNA (1)...(19): siRNA sense strand
cagcagagcagcagccaga

SEQ ID NO: 2525827 - RNA, 19 nt, Homo sapiens
  misc_RNA (1)...(19): siRNA sense strand
aagagaagcagcagcgaga

SEQ ID NO: 2525828 - RNA, 19 nt, Homo sapiens
  misc_RNA (1)...(19): siRNA sense strand
cgggaaauccugacggagu

SEQ ID NO: 2525829 - RNA, 19 nt, Homo sapiens
  misc_RNA (1)...(19): siRNA sense strand
agcuggaguuaaagaggaa

SEQ ID NO: 2525830 - RNA, 19 nt, Homo sapiens
  misc_RNA (1)...(19): siRNA sense strand
ucucaagggaggaguuaga

SEQ ID NO: 2525831 - RNA, 19 nt, Homo sapiens
  misc_RNA (1)...(19): siRNA sense strand
agaggaaggaacagaagau

SEQ ID NO: 2525832 - RNA, 19 nt, Homo sapiens
  misc_RNA (1)...(19): siRNA sense strand
agaucaggagccagauuaa

SEQ ID NO: 2525833 - RNA, 19 nt, Homo sapiens
  misc_RNA (1)...(19): siRNA sense strand
augagaagaggaaggaaca

SEQ ID NO: 2525834 - RNA, 19 nt, Homo sapiens
  misc_RNA (1)...(19): siRNA sense strand
acagaagaugcuggagaaa

SEQ ID NO: 2525835 - RNA, 19 nt, Homo sapiens
  misc_RNA (1)...(19): siRNA sense strand
caaucagagacaaaagaaa

SEQ ID NO: 2525836 - RNA, 19 nt, Homo sapiens
  misc_RNA (1)...(19): siRNA sense strand
guuaaagacaacaagcuga

SEQ ID NO: 2525837 - RNA, 19 nt, Homo sapiens
  misc_RNA (1)...(19): siRNA sense strand
caggaaaauuacuggcuga

SEQ ID NO: 2525838 - RNA, 19 nt, Homo sapiens
  misc_RNA (1)...(19): siRNA sense strand
uggaggagcugucggcuga

SEQ ID NO: 2525839 - RNA, 19 nt, Homo sapiens
  misc_RNA (1)...(19): siRNA sense strand
cagcaaauggaucagaaca

SEQ ID NO: 2525840 - RNA, 19 nt, Homo sapiens
  misc_RNA (1)...(19): siRNA sense strand
gagcaagauggaaucgaga

SEQ ID NO: 2525841 - RNA, 19 nt, Homo sapiens
  misc_RNA (1)...(19): siRNA sense strand
caggagagcgcgaugcaga

SEQ ID NO: 2525842 - RNA, 19 nt, Homo sapiens
  misc_RNA (1)...(19): siRNA sense strand
aggcacuccaggugaagaa

SEQ ID NO: 2525843 - RNA, 19 nt, Homo sapiens
  misc_RNA (1)...(19): siRNA sense strand
gcggaaacccagugaggag

SEQ ID NO: 2525844 - RNA, 19 nt, Homo sapiens
  misc_RNA (1)...(19): siRNA sense strand
gcaagauggaaucgagaac

SEQ ID NO: 2525845 - RNA, 19 nt, Homo sapiens
  misc_RNA (1)...(19): siRNA sense strand
aguuauugcagcugacaca

SEQ ID NO: 2525846 - RNA, 19 nt, Homo sapiens
  misc_RNA (1)...(19): siRNA sense strand
ucucaauguuaaagacaac

SEQ ID NO: 2525847 - RNA, 19 nt, Homo sapiens
  misc_RNA (1)...(19): siRNA sense strand
ccuacgaaucucagaggca

SEQ ID NO: 2525848 - RNA, 19 nt, Homo sapiens
  misc_RNA (1)...(19): siRNA sense strand
cagugaggaggcucggaaa

SEQ ID NO: 2525849 - RNA, 19 nt, Homo sapiens
  misc_RNA (1)...(19): siRNA sense strand
cagccaggauccagccaga

SEQ ID NO: 2525850 - RNA, 19 nt, Homo sapiens
  misc_RNA (1)...(19): siRNA sense strand
ccucaacaucaguggaaac

SEQ ID NO: 2525851 - RNA, 19 nt, Homo sapiens
  misc_RNA (1)...(19): siRNA sense strand
uaccagauguguuuggcaa

SEQ ID NO: 2525852 - RNA, 19 nt, Homo sapiens
  misc_RNA (1)...(19): siRNA sense strand
agaacaaagccaucagcca

SEQ ID NO: 2525853 - RNA, 19 nt, Homo sapiens
  misc_RNA (1)...(19): siRNA sense strand
ugaagaaagaccugaugca

SEQ ID NO: 2525854 - RNA, 19 nt, Homo sapiens
  misc_RNA (1)...(19): siRNA sense strand
cuuaaacguggaaaggaau

SEQ ID NO: 2525855 - RNA, 19 nt, Homo sapiens
  misc_RNA (1)...(19): siRNA sense strand
aggaggagacugagagccu

SEQ ID NO: 2525856 - RNA, 19 nt, Homo sapiens
  misc_RNA (1)...(19): siRNA sense strand
aguuagaagccaaaaguga

SEQ ID NO: 2525857 - RNA, 19 nt, Homo sapiens
  misc_RNA (1)...(19): siRNA sense strand
gugaaaccaggcaggaaaa

SEQ ID NO: 2525858 - RNA, 19 nt, Homo sapiens
  misc_RNA (1)...(19): siRNA sense strand
cagcugaagcagacggaac

SEQ ID NO: 2525859 - RNA, 19 nt, Homo sapiens
  misc_RNA (1)...(19): siRNA sense strand
gcagaaagauuguugggaa

SEQ ID NO: 2525860 - RNA, 19 nt, Homo sapiens
  misc_RNA (1)...(19): siRNA sense strand
caagagacacaaagaagaa

SEQ ID NO: 2525861 - RNA, 19 nt, Homo sapiens
  misc_RNA (1)...(19): siRNA sense strand
cagaaagauuguugggaac

SEQ ID NO: 2525862 - RNA, 19 nt, Homo sapiens
  misc_RNA (1)...(19): siRNA sense strand
ggaaagcauccaugagaga

SEQ ID NO: 2525863 - RNA, 19 nt, Homo sapiens
  misc_RNA (1)...(19): siRNA sense strand
uguccaugguggucggaaa

SEQ ID NO: 2525864 - RNA, 19 nt, Homo sapiens
  misc_RNA (1)...(19): siRNA sense strand
gagcaaguguacaggagga

SEQ ID NO: 2525865 - RNA, 19 nt, Homo sapiens
  misc_RNA (1)...(19): siRNA sense strand
cgaccagagucaauggaga

SEQ ID NO: 2525866 - RNA, 19 nt, Homo sapiens
  misc_RNA (1)...(19): siRNA sense strand
gcaagagacacaaagaaga

SEQ ID NO: 2525867 - RNA, 19 nt, Homo sapiens
  misc_RNA (1)...(19): siRNA sense strand
aagaaaagcaagagacaca

SEQ ID NO: 2525868 - RNA, 19 nt, Homo sapiens
  misc_RNA (1)...(19): siRNA sense strand
ucaagaaagccguagccaa

SEQ ID NO: 2525869 - RNA, 19 nt, Homo sapiens
  misc_RNA (1)...(19): siRNA sense strand
ggcuggaggagaagaguau

SEQ ID NO: 2525870 - RNA, 19 nt, Homo sapiens
  misc_RNA (1)...(19): siRNA sense strand
caagaaagccguagccaac

SEQ ID NO: 2525871 - RNA, 19 nt, Homo sapiens
  misc_RNA (1)...(19): siRNA sense strand
cagugaacagggugugcaa

SEQ ID NO: 2525872 - RNA, 19 nt, Homo sapiens
  misc_RNA (1)...(19): siRNA sense strand
gcggcaucaucgagugaga

SEQ ID NO: 2525873 - RNA, 19 nt, Homo sapiens
  misc_RNA (1)...(19): siRNA sense strand
caggaaccaaugugggaau

SEQ ID NO: 2525874 - RNA, 19 nt, Homo sapiens
  misc_RNA (1)...(19): siRNA sense strand
cuguucagcaggaaguaaa

SEQ ID NO: 2525875 - RNA, 19 nt, Homo sapiens
  misc_RNA (1)...(19): siRNA sense strand
aaacaguccccuagguuaa

SEQ ID NO: 2525876 - RNA, 19 nt, Homo sapiens
  misc_RNA (1)...(19): siRNA sense strand
aagaaugccuggacuguca

SEQ ID NO: 2525877 - RNA, 19 nt, Homo sapiens
  misc_RNA (1)...(19): siRNA sense strand
agguuaaagagcaagugua

SEQ ID NO: 2525878 - RNA, 19 nt, Homo sapiens
  misc_RNA (1)...(19): siRNA sense strand
gaggaaagcauccaugaga

SEQ ID NO: 2525879 - RNA, 19 nt, Homo sapiens
  misc_RNA (1)...(19): siRNA sense strand
gcccaagagaggaaagcga

SEQ ID NO: 2525880 - RNA, 19 nt, Homo sapiens
  misc_RNA (1)...(19): siRNA sense strand
aagcaagagacacaaagaa

SEQ ID NO: 2525881 - RNA, 19 nt, Homo sapiens
  misc_RNA (1)...(19): siRNA sense strand
aaaagaaaagcaagagaca

SEQ ID NO: 2525882 - RNA, 19 nt, Homo sapiens
  misc_RNA (1)...(19): siRNA sense strand
gugaacagggugugcaagu

SEQ ID NO: 2525883 - RNA, 19 nt, Homo sapiens
  misc_RNA (1)...(19): siRNA sense strand
gugaugagauggaugccca

SEQ ID NO: 2525884 - RNA, 19 nt, Homo sapiens
  misc_RNA (1)...(19): siRNA sense strand
agguggacauugcggguau

SEQ ID NO: 2525885 - RNA, 19 nt, Homo sapiens
  misc_RNA (1)...(19): siRNA sense strand
uggaggagaaucugcacaa

SEQ ID NO: 2525886 - RNA, 19 nt, Homo sapiens
  misc_RNA (1)...(19): siRNA sense strand
cagagguggacuaugggaa

SEQ ID NO: 2525887 - RNA, 19 nt, Homo sapiens
  misc_RNA (1)...(19): siRNA sense strand
aggaggaggcacugcgcau

SEQ ID NO: 2525888 - RNA, 19 nt, Homo sapiens
  misc_RNA (1)...(19): siRNA sense strand
acccgaauauugugggcau

SEQ ID NO: 2525889 - RNA, 19 nt, Homo sapiens
  misc_RNA (1)...(19): siRNA sense strand
gaaaugaaaucgagcccaa

SEQ ID NO: 2525890 - RNA, 19 nt, Homo sapiens
  misc_RNA (1)...(19): siRNA sense strand
ccuacaagguggaagccaa

SEQ ID NO: 2525891 - RNA, 19 nt, Homo sapiens
  misc_RNA (1)...(19): siRNA sense strand
aauucgacgccaagggaaa

SEQ ID NO: 2525892 - RNA, 19 nt, Homo sapiens
  misc_RNA (1)...(19): siRNA sense strand
guguccugcuggagggaga

SEQ ID NO: 2525893 - RNA, 19 nt, Homo sapiens
  misc_RNA (1)...(19): siRNA sense strand
cggcacagcaucuuggaca

SEQ ID NO: 2525894 - RNA, 19 nt, Homo sapiens
  misc_RNA (1)...(19): siRNA sense strand
gccguaaauucgacgccaa

SEQ ID NO: 2525895 - RNA, 19 nt, Homo sapiens
  misc_RNA (1)...(19): siRNA sense strand
ggaacaaggcggugcagag

SEQ ID NO: 2525896 - RNA, 19 nt, Homo sapiens
  misc_RNA (1)...(19): siRNA sense strand
acgccaagggaaaugaaau

SEQ ID NO: 2525897 - RNA, 19 nt, Homo sapiens
  misc_RNA (1)...(19): siRNA sense strand
aggcuggaacagugaccaa

SEQ ID NO: 2525898 - RNA, 19 nt, Homo sapiens
  misc_RNA (1)...(19): siRNA sense strand
cagacaacaucauggccca

SEQ ID NO: 2525899 - RNA, 19 nt, Homo sapiens
  misc_RNA (1)...(19): siRNA sense strand
cagagauggaggugaugga

SEQ ID NO: 2525900 - RNA, 19 nt, Homo sapiens
  misc_RNA (1)...(19): siRNA sense strand
gcugcuacucgcugggaaa

SEQ ID NO: 2525901 - RNA, 19 nt, Homo sapiens
  misc_RNA (1)...(19): siRNA sense strand
ccugaaauauggaggcugu

SEQ ID NO: 2525902 - RNA, 19 nt, Homo sapiens
  misc_RNA (1)...(19): siRNA sense strand
ggaaauggauccaguggcu

SEQ ID NO: 2525903 - RNA, 19 nt, Homo sapiens
  misc_RNA (1)...(19): siRNA sense strand
ggaucuaggugcugcuacu

SEQ ID NO: 2525904 - RNA, 19 nt, Homo sapiens
  misc_RNA (1)...(19): siRNA sense strand
cagaagaccugcugggagc

SEQ ID NO: 2525905 - RNA, 19 nt, Homo sapiens
  misc_RNA (1)...(19): siRNA sense strand
gagacaaacaugaagggaa

SEQ ID NO: 2525906 - RNA, 19 nt, Homo sapiens
  misc_RNA (1)...(19): siRNA sense strand
agacaaacaugaagggaag

SEQ ID NO: 2525907 - RNA, 19 nt, Homo sapiens
  misc_RNA (1)...(19): siRNA sense strand
ugguaguguagaagugaaa

SEQ ID NO: 2525908 - RNA, 19 nt, Homo sapiens
  misc_RNA (1)...(19): siRNA sense strand
auggagaauuucaggccaa

SEQ ID NO: 2525909 - RNA, 19 nt, Homo sapiens
  misc_RNA (1)...(19): siRNA sense strand
agggaagaacaucaagaaa

SEQ ID NO: 2525910 - RNA, 19 nt, Homo sapiens
  misc_RNA (1)...(19): siRNA sense strand
uugaauaccaggauggaga

SEQ ID NO: 2525911 - RNA, 19 nt, Homo sapiens
  misc_RNA (1)...(19): siRNA sense strand
cugagagggaauuguacaa

SEQ ID NO: 2525912 - RNA, 19 nt, Homo sapiens
  misc_RNA (1)...(19): siRNA sense strand
ccucaaacaaacuccacaa

SEQ ID NO: 2525913 - RNA, 19 nt, Homo sapiens
  misc_RNA (1)...(19): siRNA sense strand
cuggagucauagacaggaa

SEQ ID NO: 2525914 - RNA, 19 nt, Homo sapiens
  misc_RNA (1)...(19): siRNA sense strand
gauccuucugagagggaau

SEQ ID NO: 2525915 - RNA, 19 nt, Homo sapiens
  misc_RNA (1)...(19): siRNA sense strand
agaauuuccagguggccua

SEQ ID NO: 2525916 - RNA, 19 nt, Homo sapiens
  misc_RNA (1)...(19): siRNA sense strand
ggaaacagccacuggacac

SEQ ID NO: 2525917 - RNA, 19 nt, Homo sapiens
  misc_RNA (1)...(19): siRNA sense strand
ugacaacgguggacccaga

SEQ ID NO: 2525918 - RNA, 19 nt, Homo sapiens
  misc_RNA (1)...(19): siRNA sense strand
caugaagggaagaacauca

SEQ ID NO: 2525919 - RNA, 19 nt, Homo sapiens
  misc_RNA (1)...(19): siRNA sense strand
ccugagaguuggugacccu

SEQ ID NO: 2525920 - RNA, 19 nt, Homo sapiens
  misc_RNA (1)...(19): siRNA sense strand
ccaggauggagaagaaaau

SEQ ID NO: 2525921 - RNA, 19 nt, Homo sapiens
  misc_RNA (1)...(19): siRNA sense strand
gcgcaaaguaccauggcau

SEQ ID NO: 2525922 - RNA, 19 nt, Homo sapiens
  misc_RNA (1)...(19): siRNA sense strand
ccauaccagccgaaggaaa

SEQ ID NO: 2525923 - RNA, 19 nt, Homo sapiens
  misc_RNA (1)...(19): siRNA sense strand
gguuggaggguuugagcau

SEQ ID NO: 2525924 - RNA, 19 nt, Homo sapiens
  misc_RNA (1)...(19): siRNA sense strand
agggugagcccaaggucua

SEQ ID NO: 2525925 - RNA, 19 nt, Homo sapiens
  misc_RNA (1)...(19): siRNA sense strand
uguacgacgcccuggaauu

SEQ ID NO: 2525926 - RNA, 19 nt, Homo sapiens
  misc_RNA (1)...(19): siRNA sense strand
cugcaguucucuugcuaca

SEQ ID NO: 2525927 - RNA, 19 nt, Homo sapiens
  misc_RNA (1)...(19): siRNA sense strand
ggccagguacggagauaca

SEQ ID NO: 2525928 - RNA, 19 nt, Homo sapiens
  misc_RNA (1)...(19): siRNA sense strand
gggaugagaagcucgggaa

SEQ ID NO: 2525929 - RNA, 19 nt, Homo sapiens
  misc_RNA (1)...(19): siRNA sense strand
ccagugagggagauggaga

SEQ ID NO: 2525930 - RNA, 19 nt, Homo sapiens
  misc_RNA (1)...(19): siRNA sense strand
uggaaaagguuguggcaau

SEQ ID NO: 2525931 - RNA, 19 nt, Homo sapiens
  misc_RNA (1)...(19): siRNA sense strand
ccgauuacugcgagaacaa

SEQ ID NO: 2525932 - RNA, 19 nt, Homo sapiens
  misc_RNA (1)...(19): siRNA sense strand
ugauauuggacauggagua

SEQ ID NO: 2525933 - RNA, 19 nt, Homo sapiens
  misc_RNA (1)...(19): siRNA sense strand
ggacauggaguaaagguga

SEQ ID NO: 2525934 - RNA, 19 nt, Homo sapiens
  misc_RNA (1)...(19): siRNA sense strand
auacaaaagacaaggaaga

SEQ ID NO: 2525935 - RNA, 19 nt, Homo sapiens
  misc_RNA (1)...(19): siRNA sense strand
ccaaguagucggagcagca

SEQ ID NO: 2525936 - RNA, 19 nt, Homo sapiens
  misc_RNA (1)...(19): siRNA sense strand
ggccagaguccaagaaaau

SEQ ID NO: 2525937 - RNA, 19 nt, Homo sapiens
  misc_RNA (1)...(19): siRNA sense strand
acauacagucagcagauaa

SEQ ID NO: 2525938 - RNA, 19 nt, Homo sapiens
  misc_RNA (1)...(19): siRNA sense strand
aguuaugaauggagugacu

SEQ ID NO: 2525939 - RNA, 19 nt, Homo sapiens
  misc_RNA (1)...(19): siRNA sense strand
aguugcaagaagagaaauu

SEQ ID NO: 2525940 - RNA, 19 nt, Homo sapiens
  misc_RNA (1)...(19): siRNA sense strand
uagaagaaaccaaagccua

SEQ ID NO: 2525941 - RNA, 19 nt, Homo sapiens
  misc_RNA (1)...(19): siRNA sense strand
gggcccucuucgacagaua

SEQ ID NO: 2525942 - RNA, 19 nt, Homo sapiens
  misc_RNA (1)...(19): siRNA sense strand
ucuagaugauauuggacau

SEQ ID NO: 2525943 - RNA, 19 nt, Homo sapiens
  misc_RNA (1)...(19): siRNA sense strand
cugauaaacaccuuggaca

SEQ ID NO: 2525944 - RNA, 19 nt, Homo sapiens
  misc_RNA (1)...(19): siRNA sense strand
cagaagauuacgaagagga

SEQ ID NO: 2525945 - RNA, 19 nt, Homo sapiens
  misc_RNA (1)...(19): siRNA sense strand
acacaaaucuggaacgggu

SEQ ID NO: 2525946 - RNA, 19 nt, Homo sapiens
  misc_RNA (1)...(19): siRNA sense strand
agauaagcagagagcccua

SEQ ID NO: 2525947 - RNA, 19 nt, Homo sapiens
  misc_RNA (1)...(19): siRNA sense strand
cggagcagcagucgagaga

SEQ ID NO: 2525948 - RNA, 19 nt, Homo sapiens
  misc_RNA (1)...(19): siRNA sense strand
uggccagaguccaagaaaa

SEQ ID NO: 2525949 - RNA, 19 nt, Homo sapiens
  misc_RNA (1)...(19): siRNA sense strand
aagauuacgaagaggagga

SEQ ID NO: 2525950 - RNA, 19 nt, Homo sapiens
  misc_RNA (1)...(19): siRNA sense strand
agucgagagaacaguggaa

SEQ ID NO: 2525951 - RNA, 19 nt, Homo sapiens
  misc_RNA (1)...(19): siRNA sense strand
gaauggagugacugggcuu

SEQ ID NO: 2525952 - RNA, 19 nt, Homo sapiens
  misc_RNA (1)...(19): siRNA sense strand
gauuauugcuccagccaac

SEQ ID NO: 2525953 - RNA, 19 nt, Homo sapiens
  misc_RNA (1)...(19): siRNA sense strand
gcagauaagcagagagccc

SEQ ID NO: 2525954 - RNA, 19 nt, Homo sapiens
  misc_RNA (1)...(19): siRNA sense strand
cuccagaagauuacgaaga

SEQ ID NO: 2525955 - RNA, 19 nt, Homo sapiens
  misc_RNA (1)...(19): siRNA sense strand
guaugagggaguuaugaau

SEQ ID NO: 2525956 - RNA, 19 nt, Homo sapiens
  misc_RNA (1)...(19): siRNA sense strand
ucagaugaauggaggaccu

SEQ ID NO: 2525957 - RNA, 19 nt, Homo sapiens
  misc_RNA (1)...(19): siRNA sense strand
cagcuacgaaggauggaau

SEQ ID NO: 2525958 - RNA, 19 nt, Homo sapiens
  misc_RNA (1)...(19): siRNA sense strand
agaagaagcuggaggacca

SEQ ID NO: 2525959 - RNA, 19 nt, Homo sapiens
  misc_RNA (1)...(19): siRNA sense strand
gcaacaagaaggagccuga

SEQ ID NO: 2525960 - RNA, 19 nt, Homo sapiens
  misc_RNA (1)...(19): siRNA sense strand
ggaagaagaagcuggagga

SEQ ID NO: 2525961 - RNA, 19 nt, Homo sapiens
  misc_RNA (1)...(19): siRNA sense strand
ccugaaagacuaugaccca

SEQ ID NO: 2525962 - RNA, 19 nt, Homo sapiens
  misc_RNA (1)...(19): siRNA sense strand
agaagacggugaagcgcua

SEQ ID NO: 2525963 - RNA, 19 nt, Homo sapiens
  misc_RNA (1)...(19): siRNA sense strand
ugaagagaguggaagacca

SEQ ID NO: 2525964 - RNA, 19 nt, Homo sapiens
  misc_RNA (1)...(19): siRNA sense strand
ggcugaagagaguggaaga

SEQ ID NO: 2525965 - RNA, 19 nt, Homo sapiens
  misc_RNA (1)...(19): siRNA sense strand
agguaaagauaugccagaa

SEQ ID NO: 2525966 - RNA, 19 nt, Homo sapiens
  misc_RNA (1)...(19): siRNA sense strand
ggaugaugaugaagaggag

SEQ ID NO: 2525967 - RNA, 19 nt, Homo sapiens
  misc_RNA (1)...(19): siRNA sense strand
gggacauggcugaccacuu

SEQ ID NO: 2525968 - RNA, 19 nt, Homo sapiens
  misc_RNA (1)...(19): siRNA sense strand
gcaccaagaacuauggcua

SEQ ID NO: 2525969 - RNA, 19 nt, Homo sapiens
  misc_RNA (1)...(19): siRNA sense strand
aagaagaaauaguggucca

SEQ ID NO: 2525970 - RNA, 19 nt, Homo sapiens
  misc_RNA (1)...(19): siRNA sense strand
cagaggagaugguggcgca

SEQ ID NO: 2525971 - RNA, 19 nt, Homo sapiens
  misc_RNA (1)...(19): siRNA sense strand
cccaaaggguccuggagca

SEQ ID NO: 2525972 - RNA, 19 nt, Homo sapiens
  misc_RNA (1)...(19): siRNA sense strand
ugguccagaucaaggaaga

SEQ ID NO: 2525973 - RNA, 19 nt, Homo sapiens
  misc_RNA (1)...(19): siRNA sense strand
agaaggugaaugaagguga

SEQ ID NO: 2525974 - RNA, 19 nt, Homo sapiens
  misc_RNA (1)...(19): siRNA sense strand
uguccuugucugaggccaa

SEQ ID NO: 2525975 - RNA, 19 nt, Homo sapiens
  misc_RNA (1)...(19): siRNA sense strand
ccaaaggguccuggagcau

SEQ ID NO: 2525976 - RNA, 19 nt, Homo sapiens
  misc_RNA (1)...(19): siRNA sense strand
uugacaaggcuguggccau

SEQ ID NO: 2525977 - RNA, 19 nt, Homo sapiens
  misc_RNA (1)...(19): siRNA sense strand
agcuaaagaauaagaccuu

SEQ ID NO: 2525978 - RNA, 19 nt, Homo sapiens
  misc_RNA (1)...(19): siRNA sense strand
gcaucuuccugcacggcaa

SEQ ID NO: 2525979 - RNA, 19 nt, Homo sapiens
  misc_RNA (1)...(19): siRNA sense strand
accucuaccugcaggacaa

SEQ ID NO: 2525980 - RNA, 19 nt, Homo sapiens
  misc_RNA (1)...(19): siRNA sense strand
gagcccaaggugacgacaa

SEQ ID NO: 2525981 - RNA, 19 nt, Homo sapiens
  misc_RNA (1)...(19): siRNA sense strand
ccaaugaccugcagggcug

SEQ ID NO: 2525982 - RNA, 19 nt, Homo sapiens
  misc_RNA (1)...(19): siRNA sense strand
agacagggauccagggcag

SEQ ID NO: 2525983 - RNA, 19 nt, Homo sapiens
  misc_RNA (1)...(19): siRNA sense strand
cccuuaaacuggaggagcu

SEQ ID NO: 2525984 - RNA, 19 nt, Homo sapiens
  misc_RNA (1)...(19): siRNA sense strand
ccacagaggaagagcagga

SEQ ID NO: 2525985 - RNA, 19 nt, Homo sapiens
  misc_RNA (1)...(19): siRNA sense strand
cccaagaagaagaagaaau

SEQ ID NO: 2525986 - RNA, 19 nt, Homo sapiens
  misc_RNA (1)...(19): siRNA sense strand
gaacggaacagaugaggca

SEQ ID NO: 2525987 - RNA, 19 nt, Homo sapiens
  misc_RNA (1)...(19): siRNA sense strand
cagaggaagagcaggagca

SEQ ID NO: 2525988 - RNA, 19 nt, Homo sapiens
  misc_RNA (1)...(19): siRNA sense strand
cgcuaaagucccuggagaa

SEQ ID NO: 2525989 - RNA, 19 nt, Homo sapiens
  misc_RNA (1)...(19): siRNA sense strand
cggccuuaccuuugcgaua

SEQ ID NO: 2525990 - RNA, 19 nt, Homo sapiens
  misc_RNA (1)...(19): siRNA sense strand
gcgcuaaagucccuggaga

SEQ ID NO: 2525991 - RNA, 19 nt, Homo sapiens
  misc_RNA (1)...(19): siRNA sense strand
ccaaaaugaucaaggagga

SEQ ID NO: 2525992 - RNA, 19 nt, Homo sapiens
  misc_RNA (1)...(19): siRNA sense strand
aaaugaucaaggaggaaaa

SEQ ID NO: 2525993 - RNA, 19 nt, Homo sapiens
  misc_RNA (1)...(19): siRNA sense strand
cugucgugcuggcgcuaaa

SEQ ID NO: 2525994 - RNA, 19 nt, Homo sapiens
  misc_RNA (1)...(19): siRNA sense strand
gcuuaaugaggaugccuau

SEQ ID NO: 2525995 - RNA, 19 nt, Homo sapiens
  misc_RNA (1)...(19): siRNA sense strand
ugauggaaaggguagagaa

SEQ ID NO: 2525996 - RNA, 19 nt, Homo sapiens
  misc_RNA (1)...(19): siRNA sense strand
cugaaacgcaucacagaca

SEQ ID NO: 2525997 - RNA, 19 nt, Homo sapiens
  misc_RNA (1)...(19): siRNA sense strand
ccauaagccuccagccucu

SEQ ID NO: 2525998 - RNA, 19 nt, Homo sapiens
  misc_RNA (1)...(19): siRNA sense strand
gggaaagaggccacccuga

SEQ ID NO: 2525999 - RNA, 19 nt, Homo sapiens
  misc_RNA (1)...(19): siRNA sense strand
cagcuaagguuuugggcua

SEQ ID NO: 2526000 - RNA, 19 nt, Homo sapiens
  misc_RNA (1)...(19): siRNA sense strand
ggauagagaaauacggcca

SEQ ID NO: 2526001 - RNA, 19 nt, Homo sapiens
  misc_RNA (1)...(19): siRNA sense strand
ccucaagacuucaaggcca

SEQ ID NO: 2526002 - RNA, 19 nt, Homo sapiens
  misc_RNA (1)...(19): siRNA sense strand
uagaugacguggugggcuu

SEQ ID NO: 2526003 - RNA, 19 nt, Homo sapiens
  misc_RNA (1)...(19): siRNA sense strand
ggacauaagcagggccuca

SEQ ID NO: 2526004 - RNA, 19 nt, Homo sapiens
  misc_RNA (1)...(19): siRNA sense strand
gggccaagagagggaauau

SEQ ID NO: 2526005 - RNA, 19 nt, Homo sapiens
  misc_RNA (1)...(19): siRNA sense strand
gaggaggcuaccugggcua

SEQ ID NO: 2526006 - RNA, 19 nt, Homo sapiens
  misc_RNA (1)...(19): siRNA sense strand
ccucuaggguaaaaggcua

SEQ ID NO: 2526007 - RNA, 19 nt, Homo sapiens
  misc_RNA (1)...(19): siRNA sense strand
acacauaaauccgggagca

SEQ ID NO: 2526008 - RNA, 19 nt, Homo sapiens
  misc_RNA (1)...(19): siRNA sense strand
ggccaauccucgaggcuuc

SEQ ID NO: 2526009 - RNA, 19 nt, Homo sapiens
  misc_RNA (1)...(19): siRNA sense strand
cugggcacggauagagaaa

SEQ ID NO: 2526010 - RNA, 19 nt, Homo sapiens
  misc_RNA (1)...(19): siRNA sense strand
aagagguacuucaggucau

SEQ ID NO: 2526011 - RNA, 19 nt, Homo sapiens
  misc_RNA (1)...(19): siRNA sense strand
ccucaucagccuuccgcaa

SEQ ID NO: 2526012 - RNA, 19 nt, Homo sapiens
  misc_RNA (1)...(19): siRNA sense strand
ggucaugguggcugaguac

SEQ ID NO: 2526013 - RNA, 19 nt, Homo sapiens
  misc_RNA (1)...(19): siRNA sense strand
cccaagaccaagaggaaug

SEQ ID NO: 2526014 - RNA, 19 nt, Homo sapiens
  misc_RNA (1)...(19): siRNA sense strand
gagucaaagaagagcaaga

SEQ ID NO: 2526015 - RNA, 19 nt, Homo sapiens
  misc_RNA (1)...(19): siRNA sense strand
agaaauucacugaggccua

SEQ ID NO: 2526016 - RNA, 19 nt, Homo sapiens
  misc_RNA (1)...(19): siRNA sense strand
ugcugaagccagacagaaa

SEQ ID NO: 2526017 - RNA, 19 nt, Homo sapiens
  misc_RNA (1)...(19): siRNA sense strand
cugcagaagccaaggccuu

SEQ ID NO: 2526018 - RNA, 19 nt, Homo sapiens
  misc_RNA (1)...(19): siRNA sense strand
gggacagggcucaaggaca

SEQ ID NO: 2526019 - RNA, 19 nt, Homo sapiens
  misc_RNA (1)...(19): siRNA sense strand
cgaaacagguaucucguga

SEQ ID NO: 2526020 - RNA, 19 nt, Homo sapiens
  misc_RNA (1)...(19): siRNA sense strand
aagacugggacuuguuaaa

SEQ ID NO: 2526021 - RNA, 19 nt, Homo sapiens
  misc_RNA (1)...(19): siRNA sense strand
agccaggagucaaagaaga

SEQ ID NO: 2526022 - RNA, 19 nt, Homo sapiens
  misc_RNA (1)...(19): siRNA sense strand
cggaaagagaagacugauc

SEQ ID NO: 2526023 - RNA, 19 nt, Homo sapiens
  misc_RNA (1)...(19): siRNA sense strand
cuuagauaucucugggaca

SEQ ID NO: 2526024 - RNA, 19 nt, Homo sapiens
  misc_RNA (1)...(19): siRNA sense strand
aggagucaaagaagagcaa

SEQ ID NO: 2526025 - RNA, 19 nt, Homo sapiens
  misc_RNA (1)...(19): siRNA sense strand
uugaggagucagagacaga

SEQ ID NO: 2526026 - RNA, 19 nt, Homo sapiens
  misc_RNA (1)...(19): siRNA sense strand
cuggauggugucaggagua

SEQ ID NO: 2526027 - RNA, 19 nt, Homo sapiens
  misc_RNA (1)...(19): siRNA sense strand
acagaaauucacugagcca

SEQ ID NO: 2526028 - RNA, 19 nt, Homo sapiens
  misc_RNA (1)...(19): siRNA sense strand
gcaugaacagggaagacga

SEQ ID NO: 2526029 - RNA, 19 nt, Homo sapiens
  misc_RNA (1)...(19): siRNA sense strand
ucaaaaccgucaagcacaa

SEQ ID NO: 2526030 - RNA, 19 nt, Homo sapiens
  misc_RNA (1)...(19): siRNA sense strand
ccacauaaauuuagugcca

SEQ ID NO: 2526031 - RNA, 19 nt, Homo sapiens
  misc_RNA (1)...(19): siRNA sense strand
ccggauaaagagauggaaa

SEQ ID NO: 2526032 - RNA, 19 nt, Homo sapiens
  misc_RNA (1)...(19): siRNA sense strand
cggauaaagagauggaaaa

SEQ ID NO: 2526033 - RNA, 19 nt, Homo sapiens
  misc_RNA (1)...(19): siRNA sense strand
gggaaagacugauggucca

SEQ ID NO: 2526034 - RNA, 19 nt, Homo sapiens
  misc_RNA (1)...(19): siRNA sense strand
cagugauagcugagggcau

SEQ ID NO: 2526035 - RNA, 19 nt, Homo sapiens
  misc_RNA (1)...(19): siRNA sense strand
aguugaagguucuggaagu

SEQ ID NO: 2526036 - RNA, 19 nt, Homo sapiens
  misc_RNA (1)...(19): siRNA sense strand
ccaauaagcugaagacggu

SEQ ID NO: 2526037 - RNA, 19 nt, Homo sapiens
  misc_RNA (1)...(19): siRNA sense strand
cagcagggcagaacgggaa

SEQ ID NO: 2526038 - RNA, 19 nt, Homo sapiens
  misc_RNA (1)...(19): siRNA sense strand
ggaaaacagcugagaggca

SEQ ID NO: 2526039 - RNA, 19 nt, Homo sapiens
  misc_RNA (1)...(19): siRNA sense strand
uguaaaaccaagagacaga

SEQ ID NO: 2526040 - RNA, 19 nt, Homo sapiens
  misc_RNA (1)...(19): siRNA sense strand
guguauucuuguaucgcaa

SEQ ID NO: 2526041 - RNA, 19 nt, Homo sapiens
  misc_RNA (1)...(19): siRNA sense strand
aaauuuagugccaggaaaa

SEQ ID NO: 2526042 - RNA, 19 nt, Homo sapiens
  misc_RNA (1)...(19): siRNA sense strand
acacaguuuccgauggauu

SEQ ID NO: 2526043 - RNA, 19 nt, Homo sapiens
  misc_RNA (1)...(19): siRNA sense strand
cuuguaucgcaaugaauaa

SEQ ID NO: 2526044 - RNA, 19 nt, Homo sapiens
  misc_RNA (1)...(19): siRNA sense strand
uguccaaggugccugggaa

SEQ ID NO: 2526045 - RNA, 19 nt, Homo sapiens
  misc_RNA (1)...(19): siRNA sense strand
cgucauaacaacaucacca

SEQ ID NO: 2526046 - RNA, 19 nt, Homo sapiens
  misc_RNA (1)...(19): siRNA sense strand
cuguauuccaagaguugaa

SEQ ID NO: 2526047 - RNA, 19 nt, Homo sapiens
  misc_RNA (1)...(19): siRNA sense strand
ugccaaugcaccacauaaa

SEQ ID NO: 2526048 - RNA, 19 nt, Homo sapiens
  misc_RNA (1)...(19): siRNA sense strand
ugugacagcaagacaggua

SEQ ID NO: 2526049 - RNA, 19 nt, Homo sapiens
  misc_RNA (1)...(19): siRNA sense strand
cagcaagacagguaaugca

SEQ ID NO: 2526050 - RNA, 19 nt, Homo sapiens
  misc_RNA (1)...(19): siRNA sense strand
ggugaaggcauuugugaua

SEQ ID NO: 2526051 - RNA, 19 nt, Homo sapiens
  misc_RNA (1)...(19): siRNA sense strand
gcuacuggugucugagaaa

SEQ ID NO: 2526052 - RNA, 19 nt, Homo sapiens
  misc_RNA (1)...(19): siRNA sense strand
ucaaagaugaagaugggua

SEQ ID NO: 2526053 - RNA, 19 nt, Homo sapiens
  misc_RNA (1)...(19): siRNA sense strand
ggagaaggcuggcaagcga

SEQ ID NO: 2526054 - RNA, 19 nt, Homo sapiens
  misc_RNA (1)...(19): siRNA sense strand
cgagacaaggaguggaaga

SEQ ID NO: 2526055 - RNA, 19 nt, Homo sapiens
  misc_RNA (1)...(19): siRNA sense strand
ugucuaaggccaaggcuau

SEQ ID NO: 2526056 - RNA, 19 nt, Homo sapiens
  misc_RNA (1)...(19): siRNA sense strand
gauggaugcugguuggaca

SEQ ID NO: 2526057 - RNA, 19 nt, Homo sapiens
  misc_RNA (1)...(19): siRNA sense strand
gaguggaagauguccggaa

SEQ ID NO: 2526058 - RNA, 19 nt, Homo sapiens
  misc_RNA (1)...(19): siRNA sense strand
gggaaggaauuaaugugga

SEQ ID NO: 2526059 - RNA, 19 nt, Homo sapiens
  misc_RNA (1)...(19): siRNA sense strand
aaaccaggauacaugggaa

SEQ ID NO: 2526060 - RNA, 19 nt, Homo sapiens
  misc_RNA (1)...(19): siRNA sense strand
gggugaaugggaaggggaa

SEQ ID NO: 2526061 - RNA, 19 nt, Homo sapiens
  misc_RNA (1)...(19): siRNA sense strand
ccgacaagacagcagccaa

SEQ ID NO: 2526062 - RNA, 19 nt, Homo sapiens
  misc_RNA (1)...(19): siRNA sense strand
uguacagguuauagaugau

SEQ ID NO: 2526063 - RNA, 19 nt, Homo sapiens
  misc_RNA (1)...(19): siRNA sense strand
cgacaagacagcagccaac

SEQ ID NO: 2526064 - RNA, 19 nt, Homo sapiens
  misc_RNA (1)...(19): siRNA sense strand
uugcagaugucuaaggcca

SEQ ID NO: 2526065 - RNA, 19 nt, Homo sapiens
  misc_RNA (1)...(19): siRNA sense strand
gaauuaagcuacugguguc

SEQ ID NO: 2526066 - RNA, 19 nt, Homo sapiens
  misc_RNA (1)...(19): siRNA sense strand
gaaacuacuaaaugaggca

SEQ ID NO: 2526067 - RNA, 19 nt, Homo sapiens
  misc_RNA (1)...(19): siRNA sense strand
ccugagugguggcugguga

SEQ ID NO: 2526068 - RNA, 19 nt, Homo sapiens
  misc_RNA (1)...(19): siRNA sense strand
cagaaggagacauuggcau

SEQ ID NO: 2526069 - RNA, 19 nt, Homo sapiens
  misc_RNA (1)...(19): siRNA sense strand
ggagagguggugaaggcau

SEQ ID NO: 2526070 - RNA, 19 nt, Homo sapiens
  misc_RNA (1)...(19): siRNA sense strand
cagacagaaacgggauuaa

SEQ ID NO: 2526071 - RNA, 19 nt, Homo sapiens
  misc_RNA (1)...(19): siRNA sense strand
gcaugguuuccaagacaau

SEQ ID NO: 2526072 - RNA, 19 nt, Homo sapiens
  misc_RNA (1)...(19): siRNA sense strand
gugcauacgaggagaacau

SEQ ID NO: 2526073 - RNA, 19 nt, Homo sapiens
  misc_RNA (1)...(19): siRNA sense strand
uggauaaagacuuggaaga

SEQ ID NO: 2526074 - RNA, 19 nt, Homo sapiens
  misc_RNA (1)...(19): siRNA sense strand
aguaaauaucaguggauca

SEQ ID NO: 2526075 - RNA, 19 nt, Homo sapiens
  misc_RNA (1)...(19): siRNA sense strand
gcaaagaccuggagagucc

SEQ ID NO: 2526076 - RNA, 19 nt, Homo sapiens
  misc_RNA (1)...(19): siRNA sense strand
gggaggugaaggugggaga

SEQ ID NO: 2526077 - RNA, 19 nt, Homo sapiens
  misc_RNA (1)...(19): siRNA sense strand
ccagcaaguuccacgggua

SEQ ID NO: 2526078 - RNA, 19 nt, Homo sapiens
  misc_RNA (1)...(19): siRNA sense strand
aguaugagagagaguacaa

SEQ ID NO: 2526079 - RNA, 19 nt, Homo sapiens
  misc_RNA (1)...(19): siRNA sense strand
gugaaaaugaagaagaaga

SEQ ID NO: 2526080 - RNA, 19 nt, Homo sapiens
  misc_RNA (1)...(19): siRNA sense strand
uggcgaggacauugagauu

SEQ ID NO: 2526081 - RNA, 19 nt, Homo sapiens
  misc_RNA (1)...(19): siRNA sense strand
cugcagagggccauggaga

SEQ ID NO: 2526082 - RNA, 19 nt, Homo sapiens
  misc_RNA (1)...(19): siRNA sense strand
ccgacacacuggagaucau

SEQ ID NO: 2526083 - RNA, 19 nt, Homo sapiens
  misc_RNA (1)...(19): siRNA sense strand
gcaaaaggguugaaagccu

SEQ ID NO: 2526084 - RNA, 19 nt, Homo sapiens
  misc_RNA (1)...(19): siRNA sense strand
uuucagacaccgagagcuu

SEQ ID NO: 2526085 - RNA, 19 nt, Homo sapiens
  misc_RNA (1)...(19): siRNA sense strand
cagcaguaugagagagagu

SEQ ID NO: 2526086 - RNA, 19 nt, Homo sapiens
  misc_RNA (1)...(19): siRNA sense strand
cugcaggacacaccagaaa

SEQ ID NO: 2526087 - RNA, 19 nt, Homo sapiens
  misc_RNA (1)...(19): siRNA sense strand
agaucacagagcuggauaa

SEQ ID NO: 2526088 - RNA, 19 nt, Homo sapiens
  misc_RNA (1)...(19): siRNA sense strand
gcuacauuggcguggauuu

SEQ ID NO: 2526089 - RNA, 19 nt, Homo sapiens
  misc_RNA (1)...(19): siRNA sense strand
ggugaaggugggagaguac

SEQ ID NO: 2526090 - RNA, 19 nt, Homo sapiens
  misc_RNA (1)...(19): siRNA sense strand
ccagaauauggcagcaaaa

SEQ ID NO: 2526091 - RNA, 19 nt, Homo sapiens
  misc_RNA (1)...(19): siRNA sense strand
ugaaggugggagaguacaa

SEQ ID NO: 2526092 - RNA, 19 nt, Homo sapiens
  misc_RNA (1)...(19): siRNA sense strand
cggaaucagaagcucauaa

SEQ ID NO: 2526093 - RNA, 19 nt, Homo sapiens
  misc_RNA (1)...(19): siRNA sense strand
agaagaucaucaaggacca

SEQ ID NO: 2526094 - RNA, 19 nt, Homo sapiens
  misc_RNA (1)...(19): siRNA sense strand
aggaaaggccauuuuaaaa

SEQ ID NO: 2526095 - RNA, 19 nt, Homo sapiens
  misc_RNA (1)...(19): siRNA sense strand
gcaucugggucaucgccaa

SEQ ID NO: 2526096 - RNA, 19 nt, Homo sapiens
  misc_RNA (1)...(19): siRNA sense strand
aggugaaggugggagagua

SEQ ID NO: 2526097 - RNA, 19 nt, Homo sapiens
  misc_RNA (1)...(19): siRNA sense strand
ggauucucaccgugggcua

SEQ ID NO: 2526098 - RNA, 19 nt, Homo sapiens
  misc_RNA (1)...(19): siRNA sense strand
ucaucaaggaccagaaacu

SEQ ID NO: 2526099 - RNA, 19 nt, Homo sapiens
  misc_RNA (1)...(19): siRNA sense strand
ugcgaaggacaguggagaa

SEQ ID NO: 2526100 - RNA, 19 nt, Homo sapiens
  misc_RNA (1)...(19): siRNA sense strand
acucagaaucagaagaaag

SEQ ID NO: 2526101 - RNA, 19 nt, Homo sapiens
  misc_RNA (1)...(19): siRNA sense strand
gaaucagaagaaagaagau

SEQ ID NO: 2526102 - RNA, 19 nt, Homo sapiens
  misc_RNA (1)...(19): siRNA sense strand
ggaaugaccugacuggagu

SEQ ID NO: 2526103 - RNA, 19 nt, Homo sapiens
  misc_RNA (1)...(19): siRNA sense strand
guaguaaauaucaguggau

SEQ ID NO: 2526104 - RNA, 19 nt, Homo sapiens
  misc_RNA (1)...(19): siRNA sense strand
augagagagaguacaacaa

SEQ ID NO: 2526105 - RNA, 19 nt, Homo sapiens
  misc_RNA (1)...(19): siRNA sense strand
augccaugaacgagaccaa

SEQ ID NO: 2526106 - RNA, 19 nt, Homo sapiens
  misc_RNA (1)...(19): siRNA sense strand
ccaaaagacaagaccauca

SEQ ID NO: 2526107 - RNA, 19 nt, Homo sapiens
  misc_RNA (1)...(19): siRNA sense strand
cucagaaucagaagaaaga

SEQ ID NO: 2526108 - RNA, 19 nt, Homo sapiens
  misc_RNA (1)...(19): siRNA sense strand
ccaucgagcagauccgcaa

SEQ ID NO: 2526109 - RNA, 19 nt, Homo sapiens
  misc_RNA (1)...(19): siRNA sense strand
gagcagauccgcaacgagu

SEQ ID NO: 2526110 - RNA, 19 nt, Homo sapiens
  misc_RNA (1)...(19): siRNA sense strand
ccaugaagcuggaggcugu

SEQ ID NO: 2526111 - RNA, 19 nt, Homo sapiens
  misc_RNA (1)...(19): siRNA sense strand
cggugaugacugugaaaga

SEQ ID NO: 2526112 - RNA, 19 nt, Homo sapiens
  misc_RNA (1)...(19): siRNA sense strand
ggcugaaggugaagggcga

SEQ ID NO: 2526113 - RNA, 19 nt, Homo sapiens
  misc_RNA (1)...(19): siRNA sense strand
cugauguggugguggagau

SEQ ID NO: 2526114 - RNA, 19 nt, Homo sapiens
  misc_RNA (1)...(19): siRNA sense strand
uggagauggccgaggcaga

SEQ ID NO: 2526115 - RNA, 19 nt, Homo sapiens
  misc_RNA (1)...(19): siRNA sense strand
cacuacaggacgaggaaga

SEQ ID NO: 2526116 - RNA, 19 nt, Homo sapiens
  misc_RNA (1)...(19): siRNA sense strand
ggaccucacuacaggacga

SEQ ID NO: 2526117 - RNA, 19 nt, Homo sapiens
  misc_RNA (1)...(19): siRNA sense strand
ggugagugaaguugagcca

SEQ ID NO: 2526118 - RNA, 19 nt, Homo sapiens
  misc_RNA (1)...(19): siRNA sense strand
cccagaacgccaugaccaa

SEQ ID NO: 2526119 - RNA, 19 nt, Homo sapiens
  misc_RNA (1)...(19): siRNA sense strand
aggacgaggaagaguggga

SEQ ID NO: 2526120 - RNA, 19 nt, Homo sapiens
  misc_RNA (1)...(19): siRNA sense strand
cagaauaucuccaagacga

SEQ ID NO: 2526121 - RNA, 19 nt, Homo sapiens
  misc_RNA (1)...(19): siRNA sense strand
gcccagaacuugaaggacu

SEQ ID NO: 2526122 - RNA, 19 nt, Homo sapiens
  misc_RNA (1)...(19): siRNA sense strand
ucaagagugugguggccaa

SEQ ID NO: 2526123 - RNA, 19 nt, Homo sapiens
  misc_RNA (1)...(19): siRNA sense strand
uuggagaagcacugagcaa

SEQ ID NO: 2526124 - RNA, 19 nt, Homo sapiens
  misc_RNA (1)...(19): siRNA sense strand
gagcuuuagccgagaguac

SEQ ID NO: 2526125 - RNA, 19 nt, Homo sapiens
  misc_RNA (1)...(19): siRNA sense strand
gagcugacagagagggcca

SEQ ID NO: 2526126 - RNA, 19 nt, Homo sapiens
  misc_RNA (1)...(19): siRNA sense strand
gccaaggacuucagccuca

SEQ ID NO: 2526127 - RNA, 19 nt, Homo sapiens
  misc_RNA (1)...(19): siRNA sense strand
aggaacagcggcagaaaau

SEQ ID NO: 2526128 - RNA, 19 nt, Homo sapiens
  misc_RNA (1)...(19): siRNA sense strand
caaccuggacagagggaca

SEQ ID NO: 2526129 - RNA, 19 nt, Homo sapiens
  misc_RNA (1)...(19): siRNA sense strand
gcuacugggugguggccau

SEQ ID NO: 2526130 - RNA, 19 nt, Homo sapiens
  misc_RNA (1)...(19): siRNA sense strand
ccacauucuucugggccaa

SEQ ID NO: 2526131 - RNA, 19 nt, Homo sapiens
  misc_RNA (1)...(19): siRNA sense strand
caguaagcuauuugagaaa

SEQ ID NO: 2526132 - RNA, 19 nt, Homo sapiens
  misc_RNA (1)...(19): siRNA sense strand
ccugaagaccagagaguau

SEQ ID NO: 2526133 - RNA, 19 nt, Homo sapiens
  misc_RNA (1)...(19): siRNA sense strand
cauuauugcgacugggaaa

SEQ ID NO: 2526134 - RNA, 19 nt, Homo sapiens
  misc_RNA (1)...(19): siRNA sense strand
ccacaggcuuucugggcaa

SEQ ID NO: 2526135 - RNA, 19 nt, Homo sapiens
  misc_RNA (1)...(19): siRNA sense strand
gagaaaugguggugcagca

SEQ ID NO: 2526136 - RNA, 19 nt, Homo sapiens
  misc_RNA (1)...(19): siRNA sense strand
gcaaagaggacaugcagga

SEQ ID NO: 2526137 - RNA, 19 nt, Homo sapiens
  misc_RNA (1)...(19): siRNA sense strand
gcacaaaaugggaguccaa

SEQ ID NO: 2526138 - RNA, 19 nt, Homo sapiens
  misc_RNA (1)...(19): siRNA sense strand
cguaauuccaguugauaca

SEQ ID NO: 2526139 - RNA, 19 nt, Homo sapiens
  misc_RNA (1)...(19): siRNA sense strand
ugagaagaucagagcuauu

SEQ ID NO: 2526140 - RNA, 19 nt, Homo sapiens
  misc_RNA (1)...(19): siRNA sense strand
ugccaaagcuggaagccuu

SEQ ID NO: 2526141 - RNA, 19 nt, Homo sapiens
  misc_RNA (1)...(19): siRNA sense strand
guucacagaccuaagucaa

SEQ ID NO: 2526142 - RNA, 19 nt, Homo sapiens
  misc_RNA (1)...(19): siRNA sense strand
ugggagaaaugguggugca

SEQ ID NO: 2526143 - RNA, 19 nt, Homo sapiens
  misc_RNA (1)...(19): siRNA sense strand
gguuagacgaugcuauuau

SEQ ID NO: 2526144 - RNA, 19 nt, Homo sapiens
  misc_RNA (1)...(19): siRNA sense strand
agguuggguugauaauaua

SEQ ID NO: 2526145 - RNA, 19 nt, Homo sapiens
  misc_RNA (1)...(19): siRNA sense strand
aaaugguggugcagcaaga

SEQ ID NO: 2526146 - RNA, 19 nt, Homo sapiens
  misc_RNA (1)...(19): siRNA sense strand
uccagauccuagacaguaa

SEQ ID NO: 2526147 - RNA, 19 nt, Homo sapiens
  misc_RNA (1)...(19): siRNA sense strand
guaagcuauuugagaaagu

SEQ ID NO: 2526148 - RNA, 19 nt, Homo sapiens
  misc_RNA (1)...(19): siRNA sense strand
cuccaauggcuguggcaga

SEQ ID NO: 2526149 - RNA, 19 nt, Homo sapiens
  misc_RNA (1)...(19): siRNA sense strand
ccaucagcaaagaggacau

SEQ ID NO: 2526150 - RNA, 19 nt, Homo sapiens
  misc_RNA (1)...(19): siRNA sense strand
agaccuuucaggaggccaa

SEQ ID NO: 2526151 - RNA, 19 nt, Homo sapiens
  misc_RNA (1)...(19): siRNA sense strand
ugguuggaauacauugaaa

SEQ ID NO: 2526152 - RNA, 19 nt, Homo sapiens
  misc_RNA (1)...(19): siRNA sense strand
gguuggaauacauugaaaa

SEQ ID NO: 2526153 - RNA, 19 nt, Homo sapiens
  misc_RNA (1)...(19): siRNA sense strand
ugcuauuauugacgagauu

SEQ ID NO: 2526154 - RNA, 19 nt, Homo sapiens
  misc_RNA (1)...(19): siRNA sense strand
aauuguaaccugaagcaca

SEQ ID NO: 2526155 - RNA, 19 nt, Homo sapiens
  misc_RNA (1)...(19): siRNA sense strand
aggaagcccaggaugacaa

SEQ ID NO: 2526156 - RNA, 19 nt, Homo sapiens
  misc_RNA (1)...(19): siRNA sense strand
gcgucaacgaggacaccua

SEQ ID NO: 2526157 - RNA, 19 nt, Homo sapiens
  misc_RNA (1)...(19): siRNA sense strand
ccaacgacuucuuccgaca

SEQ ID NO: 2526158 - RNA, 19 nt, Homo sapiens
  misc_RNA (1)...(19): siRNA sense strand
gcaucgcacagguggucua

SEQ ID NO: 2526159 - RNA, 19 nt, Homo sapiens
  misc_RNA (1)...(19): siRNA sense strand
uggucuacuuccugggcau

SEQ ID NO: 2526160 - RNA, 19 nt, Homo sapiens
  misc_RNA (1)...(19): siRNA sense strand
agucaaaggaagauggaca

SEQ ID NO: 2526161 - RNA, 19 nt, Homo sapiens
  misc_RNA (1)...(19): siRNA sense strand
gcacaguauguaagggaga

SEQ ID NO: 2526162 - RNA, 19 nt, Homo sapiens
  misc_RNA (1)...(19): siRNA sense strand
caucagagguccuggagca

SEQ ID NO: 2526163 - RNA, 19 nt, Homo sapiens
  misc_RNA (1)...(19): siRNA sense strand
ggauugaauuguuggagca

SEQ ID NO: 2526164 - RNA, 19 nt, Homo sapiens
  misc_RNA (1)...(19): siRNA sense strand
aggagauuguaaaggaauu

SEQ ID NO: 2526165 - RNA, 19 nt, Homo sapiens
  misc_RNA (1)...(19): siRNA sense strand
gcuaugaagaacagcucaa

SEQ ID NO: 2526166 - RNA, 19 nt, Homo sapiens
  misc_RNA (1)...(19): siRNA sense strand
ugcuaaagucaaaggaaga

SEQ ID NO: 2526167 - RNA, 19 nt, Homo sapiens
  misc_RNA (1)...(19): siRNA sense strand
auucgaaacuucagggcca

SEQ ID NO: 2526168 - RNA, 19 nt, Homo sapiens
  misc_RNA (1)...(19): siRNA sense strand
ccugcaagcuccaugguga

SEQ ID NO: 2526169 - RNA, 19 nt, Homo sapiens
  misc_RNA (1)...(19): siRNA sense strand
gaacuuggagagaugggaa

SEQ ID NO: 2526170 - RNA, 19 nt, Homo sapiens
  misc_RNA (1)...(19): siRNA sense strand
cugcuaaagucaaaggaag

SEQ ID NO: 2526171 - RNA, 19 nt, Homo sapiens
  misc_RNA (1)...(19): siRNA sense strand
gaagaacagcucaagguga

SEQ ID NO: 2526172 - RNA, 19 nt, Homo sapiens
  misc_RNA (1)...(19): siRNA sense strand
cugcaagcuccauggugaa

SEQ ID NO: 2526173 - RNA, 19 nt, Homo sapiens
  misc_RNA (1)...(19): siRNA sense strand
gggcacaguauguaaggga

SEQ ID NO: 2526174 - RNA, 19 nt, Homo sapiens
  misc_RNA (1)...(19): siRNA sense strand
agaaauuaagucaggagga

SEQ ID NO: 2526175 - RNA, 19 nt, Homo sapiens
  misc_RNA (1)...(19): siRNA sense strand
aggaagauggacagucaau

SEQ ID NO: 2526176 - RNA, 19 nt, Homo sapiens
  misc_RNA (1)...(19): siRNA sense strand
ggacugcauuacaagguga

SEQ ID NO: 2526177 - RNA, 19 nt, Homo sapiens
  misc_RNA (1)...(19): siRNA sense strand
ucaucaaugguuaccgaaa

SEQ ID NO: 2526178 - RNA, 19 nt, Homo sapiens
  misc_RNA (1)...(19): siRNA sense strand
caauuguugcuguggugaa

SEQ ID NO: 2526179 - RNA, 19 nt, Homo sapiens
  misc_RNA (1)...(19): siRNA sense strand
cagaagaaaccaagccauc

SEQ ID NO: 2526180 - RNA, 19 nt, Homo sapiens
  misc_RNA (1)...(19): siRNA sense strand
gguugagcuaugaagaaca

SEQ ID NO: 2526181 - RNA, 19 nt, Homo sapiens
  misc_RNA (1)...(19): siRNA sense strand
cugggaacuuggagagaug

SEQ ID NO: 2526182 - RNA, 19 nt, Homo sapiens
  misc_RNA (1)...(19): siRNA sense strand
ccuuaagagaagaguccca

SEQ ID NO: 2526183 - RNA, 19 nt, Homo sapiens
  misc_RNA (1)...(19): siRNA sense strand
uggugaauccacuaggaau

SEQ ID NO: 2526184 - RNA, 19 nt, Homo sapiens
  misc_RNA (1)...(19): siRNA sense strand
gcugcuaaagucaaaggaa

SEQ ID NO: 2526185 - RNA, 19 nt, Homo sapiens
  misc_RNA (1)...(19): siRNA sense strand
gaaagaagauuaaagcuga

SEQ ID NO: 2526186 - RNA, 19 nt, Homo sapiens
  misc_RNA (1)...(19): siRNA sense strand
agauuaaagcugagccaga

SEQ ID NO: 2526187 - RNA, 19 nt, Homo sapiens
  misc_RNA (1)...(19): siRNA sense strand
uuaaagauaucauggccaa

SEQ ID NO: 2526188 - RNA, 19 nt, Homo sapiens
  misc_RNA (1)...(19): siRNA sense strand
gcacaaaagaaugguguaa

SEQ ID NO: 2526189 - RNA, 19 nt, Homo sapiens
  misc_RNA (1)...(19): siRNA sense strand
ggagaaagccugugccaac

SEQ ID NO: 2526190 - RNA, 19 nt, Homo sapiens
  misc_RNA (1)...(19): siRNA sense strand
aggaagaagggaagggcca

SEQ ID NO: 2526191 - RNA, 19 nt, Homo sapiens
  misc_RNA (1)...(19): siRNA sense strand
ccaaaguggcagacaagau

SEQ ID NO: 2526192 - RNA, 19 nt, Homo sapiens
  misc_RNA (1)...(19): siRNA sense strand
uugcuaaagccuuggaaaa

SEQ ID NO: 2526193 - RNA, 19 nt, Homo sapiens
  misc_RNA (1)...(19): siRNA sense strand
ggaaagaagauuaaagcug

SEQ ID NO: 2526194 - RNA, 19 nt, Homo sapiens
  misc_RNA (1)...(19): siRNA sense strand
ccucuggaaagaagauuaa

SEQ ID NO: 2526195 - RNA, 19 nt, Homo sapiens
  misc_RNA (1)...(19): siRNA sense strand
ggccaaagcacaaaagaau

SEQ ID NO: 2526196 - RNA, 19 nt, Homo sapiens
  misc_RNA (1)...(19): siRNA sense strand
augaagaagaaccagauua

SEQ ID NO: 2526197 - RNA, 19 nt, Homo sapiens
  misc_RNA (1)...(19): siRNA sense strand
uuacaaacaaccagaggau

SEQ ID NO: 2526198 - RNA, 19 nt, Homo sapiens
  misc_RNA (1)...(19): siRNA sense strand
cagucauccugcuggagaa

SEQ ID NO: 2526199 - RNA, 19 nt, Homo sapiens
  misc_RNA (1)...(19): siRNA sense strand
cauggaugaaauugugaaa

SEQ ID NO: 2526200 - RNA, 19 nt, Homo sapiens
  misc_RNA (1)...(19): siRNA sense strand
gaugauuauugguggugga

SEQ ID NO: 2526201 - RNA, 19 nt, Homo sapiens
  misc_RNA (1)...(19): siRNA sense strand
ggaagaagggaagggccaa

SEQ ID NO: 2526202 - RNA, 19 nt, Homo sapiens
  misc_RNA (1)...(19): siRNA sense strand
guuagagggaagcgaguca

SEQ ID NO: 2526203 - RNA, 19 nt, Homo sapiens
  misc_RNA (1)...(19): siRNA sense strand
ggacuguguaggcgcagaa

SEQ ID NO: 2526204 - RNA, 19 nt, Homo sapiens
  misc_RNA (1)...(19): siRNA sense strand
auguggaggaagaagggaa

SEQ ID NO: 2526205 - RNA, 19 nt, Homo sapiens
  misc_RNA (1)...(19): siRNA sense strand
gaagauuaaagcugagcca

SEQ ID NO: 2526206 - RNA, 19 nt, Homo sapiens
  misc_RNA (1)...(19): siRNA sense strand
ucaaguacugccuggacaa

SEQ ID NO: 2526207 - RNA, 19 nt, Homo sapiens
  misc_RNA (1)...(19): siRNA sense strand
gcaacaagaaucaugcuca

SEQ ID NO: 2526208 - RNA, 19 nt, Homo sapiens
  misc_RNA (1)...(19): siRNA sense strand
acaaagucaaugagaugau

SEQ ID NO: 2526209 - RNA, 19 nt, Homo sapiens
  misc_RNA (1)...(19): siRNA sense strand
ggacaauggagccaaggca

SEQ ID NO: 2526210 - RNA, 19 nt, Homo sapiens
  misc_RNA (1)...(19): siRNA sense strand
aaggcuaauuguuuggaau

SEQ ID NO: 2526211 - RNA, 19 nt, Homo sapiens
  misc_RNA (1)...(19): siRNA sense strand
ggaaugggccguuaggagu

SEQ ID NO: 2526212 - RNA, 19 nt, Homo sapiens
  misc_RNA (1)...(19): siRNA sense strand
gaugaaauugugaaagcca

SEQ ID NO: 2526213 - RNA, 19 nt, Homo sapiens
  misc_RNA (1)...(19): siRNA sense strand
ucaugagaguagacuucaa

SEQ ID NO: 2526214 - RNA, 19 nt, Homo sapiens
  misc_RNA (1)...(19): siRNA sense strand
ugaugaagaaggaacuaga

SEQ ID NO: 2526215 - RNA, 19 nt, Homo sapiens
  misc_RNA (1)...(19): siRNA sense strand
cagauaaaauagaagccuu

SEQ ID NO: 2526216 - RNA, 19 nt, Homo sapiens
  misc_RNA (1)...(19): siRNA sense strand
cugaaguacuuuagccaca

SEQ ID NO: 2526217 - RNA, 19 nt, Homo sapiens
  misc_RNA (1)...(19): siRNA sense strand
cggaugaagagacacggaa

SEQ ID NO: 2526218 - RNA, 19 nt, Homo sapiens
  misc_RNA (1)...(19): siRNA sense strand
gggugaagguggugggcua

SEQ ID NO: 2526219 - RNA, 19 nt, Homo sapiens
  misc_RNA (1)...(19): siRNA sense strand
agaaggacgacgagcgcaa

SEQ ID NO: 2526220 - RNA, 19 nt, Homo sapiens
  misc_RNA (1)...(19): siRNA sense strand
gcgugaaauacgaaggcau

SEQ ID NO: 2526221 - RNA, 19 nt, Homo sapiens
  misc_RNA (1)...(19): siRNA sense strand
agaucggaagcgugaaaua

SEQ ID NO: 2526222 - RNA, 19 nt, Homo sapiens
  misc_RNA (1)...(19): siRNA sense strand
ggcaaggaguggacgacca

SEQ ID NO: 2526223 - RNA, 19 nt, Homo sapiens
  misc_RNA (1)...(19): siRNA sense strand
ccggagaccaagaucggaa

SEQ ID NO: 2526224 - RNA, 19 nt, Homo sapiens
  misc_RNA (1)...(19): siRNA sense strand
agaaaggcuucaaggccga

SEQ ID NO: 2526225 - RNA, 19 nt, Homo sapiens
  misc_RNA (1)...(19): siRNA sense strand
agaccuggacacagaguca

SEQ ID NO: 2526226 - RNA, 19 nt, Homo sapiens
  misc_RNA (1)...(19): siRNA sense strand
gaggaaaacaccugguuca

SEQ ID NO: 2526227 - RNA, 19 nt, Homo sapiens
  misc_RNA (1)...(19): siRNA sense strand
acgaaggcaucgaguucau

SEQ ID NO: 2526228 - RNA, 19 nt, Homo sapiens
  misc_RNA (1)...(19): siRNA sense strand
ccguggaaugggacaaaga

SEQ ID NO: 2526229 - RNA, 19 nt, Homo sapiens
  misc_RNA (1)...(19): siRNA sense strand
agucaagggcccaagagga

SEQ ID NO: 2526230 - RNA, 19 nt, Homo sapiens
  misc_RNA (1)...(19): siRNA sense strand
ggggagaggcauggagcua

SEQ ID NO: 2526231 - RNA, 19 nt, Homo sapiens
  misc_RNA (1)...(19): siRNA sense strand
uggaaugagucuaugcacu

SEQ ID NO: 2526232 - RNA, 19 nt, Homo sapiens
  misc_RNA (1)...(19): siRNA sense strand
agauauugccugugggaau

SEQ ID NO: 2526233 - RNA, 19 nt, Homo sapiens
  misc_RNA (1)...(19): siRNA sense strand
augcagaaauggagcaaca

SEQ ID NO: 2526234 - RNA, 19 nt, Homo sapiens
  misc_RNA (1)...(19): siRNA sense strand
ugguuauacuggagagcuu

SEQ ID NO: 2526235 - RNA, 19 nt, Homo sapiens
  misc_RNA (1)...(19): siRNA sense strand
gagcaaacugugagaucca

SEQ ID NO: 2526236 - RNA, 19 nt, Homo sapiens
  misc_RNA (1)...(19): siRNA sense strand
aagcaagaugggagcaauu

SEQ ID NO: 2526237 - RNA, 19 nt, Homo sapiens
  misc_RNA (1)...(19): siRNA sense strand
cguuaauggcuaugagugu

SEQ ID NO: 2526238 - RNA, 19 nt, Homo sapiens
  misc_RNA (1)...(19): siRNA sense strand
ucuacugugaggaggaaua

SEQ ID NO: 2526239 - RNA, 19 nt, Homo sapiens
  misc_RNA (1)...(19): siRNA sense strand
cuguauugaugcaaaugaa

SEQ ID NO: 2526240 - RNA, 19 nt, Homo sapiens
  misc_RNA (1)...(19): siRNA sense strand
cauaaaugaaugugacagu

SEQ ID NO: 2526241 - RNA, 19 nt, Homo sapiens
  misc_RNA (1)...(19): siRNA sense strand
ggcagaauacaaaggaaca

SEQ ID NO: 2526242 - RNA, 19 nt, Homo sapiens
  misc_RNA (1)...(19): siRNA sense strand
guagaaaugaaaugggauc

SEQ ID NO: 2526243 - RNA, 19 nt, Homo sapiens
  misc_RNA (1)...(19): siRNA sense strand
agaaaugaaaugggaucaa

SEQ ID NO: 2526244 - RNA, 19 nt, Homo sapiens
  misc_RNA (1)...(19): siRNA sense strand
cagccuaugaggaguucua

SEQ ID NO: 2526245 - RNA, 19 nt, Homo sapiens
  misc_RNA (1)...(19): siRNA sense strand
cggcaugccagguuuggaa

SEQ ID NO: 2526246 - RNA, 19 nt, Homo sapiens
  misc_RNA (1)...(19): siRNA sense strand
guguucaggaaaaggaaaa

SEQ ID NO: 2526247 - RNA, 19 nt, Homo sapiens
  misc_RNA (1)...(19): siRNA sense strand
gaauauaaugagugccucu

SEQ ID NO: 2526248 - RNA, 19 nt, Homo sapiens
  misc_RNA (1)...(19): siRNA sense strand
gggagcaaacugugagauc

SEQ ID NO: 2526249 - RNA, 19 nt, Homo sapiens
  misc_RNA (1)...(19): siRNA sense strand
gcauugaauaccaggguuc

SEQ ID NO: 2526250 - RNA, 19 nt, Homo sapiens
  misc_RNA (1)...(19): siRNA sense strand
gcaagaugccacugccuca

SEQ ID NO: 2526251 - RNA, 19 nt, Homo sapiens
  misc_RNA (1)...(19): siRNA sense strand
cugaauggcacgugcaucu

SEQ ID NO: 2526252 - RNA, 19 nt, Homo sapiens
  misc_RNA (1)...(19): siRNA sense strand
aggugaagagugcgacauu

SEQ ID NO: 2526253 - RNA, 19 nt, Homo sapiens
  misc_RNA (1)...(19): siRNA sense strand
cuuggaguguucaggaaaa

SEQ ID NO: 2526254 - RNA, 19 nt, Homo sapiens
  misc_RNA (1)...(19): siRNA sense strand
cagauaaaguagugggcau

SEQ ID NO: 2526255 - RNA, 19 nt, Homo sapiens
  misc_RNA (1)...(19): siRNA sense strand
acaaaggagaugagggcua

SEQ ID NO: 2526256 - RNA, 19 nt, Homo sapiens
  misc_RNA (1)...(19): siRNA sense strand
ugguagacuuugaaggaga

SEQ ID NO: 2526257 - RNA, 19 nt, Homo sapiens
  misc_RNA (1)...(19): siRNA sense strand
cguucguauuucagauaaa

SEQ ID NO: 2526258 - RNA, 19 nt, Homo sapiens
  misc_RNA (1)...(19): siRNA sense strand
ggagagugauggagcagga

SEQ ID NO: 2526259 - RNA, 19 nt, Homo sapiens
  misc_RNA (1)...(19): siRNA sense strand
aggacauggagauggacaa

SEQ ID NO: 2526260 - RNA, 19 nt, Homo sapiens
  misc_RNA (1)...(19): siRNA sense strand
ccucaagcuccuaaaccaa

SEQ ID NO: 2526261 - RNA, 19 nt, Homo sapiens
  misc_RNA (1)...(19): siRNA sense strand
gggcaacuugaaagggaga

SEQ ID NO: 2526262 - RNA, 19 nt, Homo sapiens
  misc_RNA (1)...(19): siRNA sense strand
agauaaaguagugggcauu

SEQ ID NO: 2526263 - RNA, 19 nt, Homo sapiens
  misc_RNA (1)...(19): siRNA sense strand
ggacagcggcuauggagga

SEQ ID NO: 2526264 - RNA, 19 nt, Homo sapiens
  misc_RNA (1)...(19): siRNA sense strand
gggcgaaugagaacagcau

SEQ ID NO: 2526265 - RNA, 19 nt, Homo sapiens
  misc_RNA (1)...(19): siRNA sense strand
cagcagugggcgaaugaga

SEQ ID NO: 2526266 - RNA, 19 nt, Homo sapiens
  misc_RNA (1)...(19): siRNA sense strand
gaggagaggcugaggagag

SEQ ID NO: 2526267 - RNA, 19 nt, Homo sapiens
  misc_RNA (1)...(19): siRNA sense strand
gcuauggaggagaggcuga

SEQ ID NO: 2526268 - RNA, 19 nt, Homo sapiens
  misc_RNA (1)...(19): siRNA sense strand
gcguagacacagaggacag

SEQ ID NO: 2526269 - RNA, 19 nt, Homo sapiens
  misc_RNA (1)...(19): siRNA sense strand
caacagaaauauagcccag

SEQ ID NO: 2526270 - RNA, 19 nt, Homo sapiens
  misc_RNA (1)...(19): siRNA sense strand
cggaagauacgcacagcca

SEQ ID NO: 2526271 - RNA, 19 nt, Homo sapiens
  misc_RNA (1)...(19): siRNA sense strand
gcuggagagugauggagca

SEQ ID NO: 2526272 - RNA, 19 nt, Homo sapiens
  misc_RNA (1)...(19): siRNA sense strand
ccgccuacacaaaggagau

SEQ ID NO: 2526273 - RNA, 19 nt, Homo sapiens
  misc_RNA (1)...(19): siRNA sense strand
aagaaagagguguccaaaa

SEQ ID NO: 2526274 - RNA, 19 nt, Homo sapiens
  misc_RNA (1)...(19): siRNA sense strand
gagugauggagcaggagga

SEQ ID NO: 2526275 - RNA, 19 nt, Homo sapiens
  misc_RNA (1)...(19): siRNA sense strand
ccccaaagaaggaaccaaa

SEQ ID NO: 2526276 - RNA, 19 nt, Homo sapiens
  misc_RNA (1)...(19): siRNA sense strand
aggagagaugcuauggcaa

SEQ ID NO: 2526277 - RNA, 19 nt, Homo sapiens
  misc_RNA (1)...(19): siRNA sense strand
gagugacagcguagacaca

SEQ ID NO: 2526278 - RNA, 19 nt, Homo sapiens
  misc_RNA (1)...(19): siRNA sense strand
cggcuauggaggagaggcu

SEQ ID NO: 2526279 - RNA, 19 nt, Homo sapiens
  misc_RNA (1)...(19): siRNA sense strand
aaaagaaagagguguccaa

SEQ ID NO: 2526280 - RNA, 19 nt, Homo sapiens
  misc_RNA (1)...(19): siRNA sense strand
acauagaggaggugagcca

SEQ ID NO: 2526281 - RNA, 19 nt, Homo sapiens
  misc_RNA (1)...(19): siRNA sense strand
ccgagaagcagcugcgaga

SEQ ID NO: 2526282 - RNA, 19 nt, Homo sapiens
  misc_RNA (1)...(19): siRNA sense strand
aggcggaucuggagcgaca

SEQ ID NO: 2526283 - RNA, 19 nt, Homo sapiens
  misc_RNA (1)...(19): siRNA sense strand
agaaggaggucgacgagga

SEQ ID NO: 2526284 - RNA, 19 nt, Homo sapiens
  misc_RNA (1)...(19): siRNA sense strand
cgaaggagcaggugcacca

SEQ ID NO: 2526285 - RNA, 19 nt, Homo sapiens
  misc_RNA (1)...(19): siRNA sense strand
aguaaaauugagugggauu

SEQ ID NO: 2526286 - RNA, 19 nt, Homo sapiens
  misc_RNA (1)...(19): siRNA sense strand
ggauuaugagugugagcca

SEQ ID NO: 2526287 - RNA, 19 nt, Homo sapiens
  misc_RNA (1)...(19): siRNA sense strand
cuggaagagcucaaggaga

SEQ ID NO: 2526288 - RNA, 19 nt, Homo sapiens
  misc_RNA (1)...(19): siRNA sense strand
ccaggaaauucaucagcga

SEQ ID NO: 2526289 - RNA, 19 nt, Homo sapiens
  misc_RNA (1)...(19): siRNA sense strand
uggagaaggaaguggccca

SEQ ID NO: 2526290 - RNA, 19 nt, Homo sapiens
  misc_RNA (1)...(19): siRNA sense strand
aggagaaggaggucgacga

SEQ ID NO: 2526291 - RNA, 19 nt, Homo sapiens
  misc_RNA (1)...(19): siRNA sense strand
cagggauggucaaaggcau

SEQ ID NO: 2526292 - RNA, 19 nt, Homo sapiens
  misc_RNA (1)...(19): siRNA sense strand
guugagaacaccaggcaga

SEQ ID NO: 2526293 - RNA, 19 nt, Homo sapiens
  misc_RNA (1)...(19): siRNA sense strand
cgaugaugaccguaaugaa

SEQ ID NO: 2526294 - RNA, 19 nt, Homo sapiens
  misc_RNA (1)...(19): siRNA sense strand
guggaugaguugagaacac

SEQ ID NO: 2526295 - RNA, 19 nt, Homo sapiens
  misc_RNA (1)...(19): siRNA sense strand
ggaccagccaccaggaaaa

SEQ ID NO: 2526296 - RNA, 19 nt, Homo sapiens
  misc_RNA (1)...(19): siRNA sense strand
auagcaagacggaggccaa

SEQ ID NO: 2526297 - RNA, 19 nt, Homo sapiens
  misc_RNA (1)...(19): siRNA sense strand
agcugaagccugugugcua

SEQ ID NO: 2526298 - RNA, 19 nt, Homo sapiens
  misc_RNA (1)...(19): siRNA sense strand
ucuacaagcugguggcucu

SEQ ID NO: 2526299 - RNA, 19 nt, Homo sapiens
  misc_RNA (1)...(19): siRNA sense strand
gcgaauagcaagacggagg

SEQ ID NO: 2526300 - RNA, 19 nt, Homo sapiens
  misc_RNA (1)...(19): siRNA sense strand
cccugagcguagagaacau

SEQ ID NO: 2526301 - RNA, 19 nt, Homo sapiens
  misc_RNA (1)...(19): siRNA sense strand
cggauagacaagagugaga

SEQ ID NO: 2526302 - RNA, 19 nt, Homo sapiens
  misc_RNA (1)...(19): siRNA sense strand
gagugagaauggugaggca

SEQ ID NO: 2526303 - RNA, 19 nt, Homo sapiens
  misc_RNA (1)...(19): siRNA sense strand
gaggcauaucagagaaaga

SEQ ID NO: 2526304 - RNA, 19 nt, Homo sapiens
  misc_RNA (1)...(19): siRNA sense strand
gugaggcauaucagagaaa

SEQ ID NO: 2526305 - RNA, 19 nt, Homo sapiens
  misc_RNA (1)...(19): siRNA sense strand
ggauuuggggcuauagaaa

SEQ ID NO: 2526306 - RNA, 19 nt, Homo sapiens
  misc_RNA (1)...(19): siRNA sense strand
agaagaagucugauccuga

SEQ ID NO: 2526307 - RNA, 19 nt, Homo sapiens
  misc_RNA (1)...(19): siRNA sense strand
uuugagagugccaggaauu

SEQ ID NO: 2526308 - RNA, 19 nt, Homo sapiens
  misc_RNA (1)...(19): siRNA sense strand
gguaaugggaaacuggcau

SEQ ID NO: 2526309 - RNA, 19 nt, Homo sapiens
  misc_RNA (1)...(19): siRNA sense strand
gcucuguguuccaggccuu

SEQ ID NO: 2526310 - RNA, 19 nt, Homo sapiens
  misc_RNA (1)...(19): siRNA sense strand
ugggauuuguagugaugau

SEQ ID NO: 2526311 - RNA, 19 nt, Homo sapiens
  misc_RNA (1)...(19): siRNA sense strand
gaaaggaaccaauaggcaa

SEQ ID NO: 2526312 - RNA, 19 nt, Homo sapiens
  misc_RNA (1)...(19): siRNA sense strand
gauuacugacagaggccua

SEQ ID NO: 2526313 - RNA, 19 nt, Homo sapiens
  misc_RNA (1)...(19): siRNA sense strand
aaagagaacuaaaggcuuc

SEQ ID NO: 2526314 - RNA, 19 nt, Homo sapiens
  misc_RNA (1)...(19): siRNA sense strand
acaaccaagaacaaugaaa

SEQ ID NO: 2526315 - RNA, 19 nt, Homo sapiens
  misc_RNA (1)...(19): siRNA sense strand
ggcaagacaacgaggcagu

SEQ ID NO: 2526316 - RNA, 19 nt, Homo sapiens
  misc_RNA (1)...(19): siRNA sense strand
aggaggaaccagugugacu

SEQ ID NO: 2526317 - RNA, 19 nt, Homo sapiens
  misc_RNA (1)...(19): siRNA sense strand
guauaaaaugggaggaaca

SEQ ID NO: 2526318 - RNA, 19 nt, Homo sapiens
  misc_RNA (1)...(19): siRNA sense strand
ccaacaaagaagaagcaga

SEQ ID NO: 2526319 - RNA, 19 nt, Homo sapiens
  misc_RNA (1)...(19): siRNA sense strand
acaaagaagaagcagaaaa

SEQ ID NO: 2526320 - RNA, 19 nt, Homo sapiens
  misc_RNA (1)...(19): siRNA sense strand
gagaauaugauguuggagu

SEQ ID NO: 2526321 - RNA, 19 nt, Homo sapiens
  misc_RNA (1)...(19): siRNA sense strand
auacagugcuucacggaga

SEQ ID NO: 2526322 - RNA, 19 nt, Homo sapiens
  misc_RNA (1)...(19): siRNA sense strand
caaaggaauuggaagcagu

SEQ ID NO: 2526323 - RNA, 19 nt, Homo sapiens
  misc_RNA (1)...(19): siRNA sense strand
caguaauauaccacaaaca

SEQ ID NO: 2526324 - RNA, 19 nt, Homo sapiens
  misc_RNA (1)...(19): siRNA sense strand
uggaguaacaauuaugcaa

SEQ ID NO: 2526325 - RNA, 19 nt, Homo sapiens
  misc_RNA (1)...(19): siRNA sense strand
cugcaaaggaauuggaagc

SEQ ID NO: 2526326 - RNA, 19 nt, Homo sapiens
  misc_RNA (1)...(19): siRNA sense strand
uaguuaaaccagagagcaa

SEQ ID NO: 2526327 - RNA, 19 nt, Homo sapiens
  misc_RNA (1)...(19): siRNA sense strand
ugagaaaggaagagaggau

SEQ ID NO: 2526328 - RNA, 19 nt, Homo sapiens
  misc_RNA (1)...(19): siRNA sense strand
ugguuuacaucuuggagaa

SEQ ID NO: 2526329 - RNA, 19 nt, Homo sapiens
  misc_RNA (1)...(19): siRNA sense strand
cagcaagagaagggauuua

SEQ ID NO: 2526330 - RNA, 19 nt, Homo sapiens
  misc_RNA (1)...(19): siRNA sense strand
cugaaaagcuauaaugaca

SEQ ID NO: 2526331 - RNA, 19 nt, Homo sapiens
  misc_RNA (1)...(19): siRNA sense strand
cagcgaacuguuuaggaaa

SEQ ID NO: 2526332 - RNA, 19 nt, Homo sapiens
  misc_RNA (1)...(19): siRNA sense strand
ugagaaaaucccugcgaaa

SEQ ID NO: 2526333 - RNA, 19 nt, Homo sapiens
  misc_RNA (1)...(19): siRNA sense strand
augaguaccgcgagagcaa

SEQ ID NO: 2526334 - RNA, 19 nt, Homo sapiens
  misc_RNA (1)...(19): siRNA sense strand
ugaaauugagccugaaaca

SEQ ID NO: 2526335 - RNA, 19 nt, Homo sapiens
  misc_RNA (1)...(19): siRNA sense strand
gagagcaaugacaaagaaa

SEQ ID NO: 2526336 - RNA, 19 nt, Homo sapiens
  misc_RNA (1)...(19): siRNA sense strand
agaaacagaagcugcguau

SEQ ID NO: 2526337 - RNA, 19 nt, Homo sapiens
  misc_RNA (1)...(19): siRNA sense strand
caccagaggaguucagcaa

SEQ ID NO: 2526338 - RNA, 19 nt, Homo sapiens
  misc_RNA (1)...(19): siRNA sense strand
ggugaaauugagccugaaa

SEQ ID NO: 2526339 - RNA, 19 nt, Homo sapiens
  misc_RNA (1)...(19): siRNA sense strand
ugacaaagaaacagaagcu

SEQ ID NO: 2526340 - RNA, 19 nt, Homo sapiens
  misc_RNA (1)...(19): siRNA sense strand
ggaucugguggucgugaaa

SEQ ID NO: 2526341 - RNA, 19 nt, Homo sapiens
  misc_RNA (1)...(19): siRNA sense strand
ggaagguaguuaaaccaga

SEQ ID NO: 2526342 - RNA, 19 nt, Homo sapiens
  misc_RNA (1)...(19): siRNA sense strand
ucuugaaucuccacggaau

SEQ ID NO: 2526343 - RNA, 19 nt, Homo sapiens
  misc_RNA (1)...(19): siRNA sense strand
aagagaagggauuuaagaa

SEQ ID NO: 2526344 - RNA, 19 nt, Homo sapiens
  misc_RNA (1)...(19): siRNA sense strand
ggccuaaagauuaugccaa

SEQ ID NO: 2526345 - RNA, 19 nt, Homo sapiens
  misc_RNA (1)...(19): siRNA sense strand
aggcuugaagagaggaaca

SEQ ID NO: 2526346 - RNA, 19 nt, Homo sapiens
  misc_RNA (1)...(19): siRNA sense strand
aaggaagagaggaugguga

SEQ ID NO: 2526347 - RNA, 19 nt, Homo sapiens
  misc_RNA (1)...(19): siRNA sense strand
aggaagagaggauggugau

SEQ ID NO: 2526348 - RNA, 19 nt, Homo sapiens
  misc_RNA (1)...(19): siRNA sense strand
agaaaaucccugcgaaaga

SEQ ID NO: 2526349 - RNA, 19 nt, Homo sapiens
  misc_RNA (1)...(19): siRNA sense strand
gagcuuuaucggagaaauc

SEQ ID NO: 2526350 - RNA, 19 nt, Homo sapiens
  misc_RNA (1)...(19): siRNA sense strand
gguuuacaucuuggagaaa

SEQ ID NO: 2526351 - RNA, 19 nt, Homo sapiens
  misc_RNA (1)...(19): siRNA sense strand
gagcaugauugaaagccca

SEQ ID NO: 2526352 - RNA, 19 nt, Homo sapiens
  misc_RNA (1)...(19): siRNA sense strand
uggaaggaggacugcaauu

SEQ ID NO: 2526353 - RNA, 19 nt, Homo sapiens
  misc_RNA (1)...(19): siRNA sense strand
gggaucugguggucgugaa

SEQ ID NO: 2526354 - RNA, 19 nt, Homo sapiens
  misc_RNA (1)...(19): siRNA sense strand
cuggugaaauugagccuga

SEQ ID NO: 2526355 - RNA, 19 nt, Homo sapiens
  misc_RNA (1)...(19): siRNA sense strand
acauugcugacgugaguua

SEQ ID NO: 2526356 - RNA, 19 nt, Homo sapiens
  misc_RNA (1)...(19): siRNA sense strand
gcgucuacuugguucaaaa

SEQ ID NO: 2526357 - RNA, 19 nt, Homo sapiens
  misc_RNA (1)...(19): siRNA sense strand
accagagagcaaugacaaa

SEQ ID NO: 2526358 - RNA, 19 nt, Homo sapiens
  misc_RNA (1)...(19): siRNA sense strand
cgacucagaagauggacau

SEQ ID NO: 2526359 - RNA, 19 nt, Homo sapiens
  misc_RNA (1)...(19): siRNA sense strand
cugcauuucacaagacaca

SEQ ID NO: 2526360 - RNA, 19 nt, Homo sapiens
  misc_RNA (1)...(19): siRNA sense strand
cagaagauggacauggcau

SEQ ID NO: 2526361 - RNA, 19 nt, Homo sapiens
  misc_RNA (1)...(19): siRNA sense strand
acuggaaggaggacugcaa

SEQ ID NO: 2526362 - RNA, 19 nt, Homo sapiens
  misc_RNA (1)...(19): siRNA sense strand
agccugaaacagaaggaau

SEQ ID NO: 2526363 - RNA, 19 nt, Homo sapiens
  misc_RNA (1)...(19): siRNA sense strand
cagagagcaaugacaaaga

SEQ ID NO: 2526364 - RNA, 19 nt, Homo sapiens
  misc_RNA (1)...(19): siRNA sense strand
agcgaacuguuuaggaaau

SEQ ID NO: 2526365 - RNA, 19 nt, Homo sapiens
  misc_RNA (1)...(19): siRNA sense strand
ccaccgagugccuagaauu

SEQ ID NO: 2526366 - RNA, 19 nt, Homo sapiens
  misc_RNA (1)...(19): siRNA sense strand
auugaaagcccaacugaga

SEQ ID NO: 2526367 - RNA, 19 nt, Homo sapiens
  misc_RNA (1)...(19): siRNA sense strand
aagagaggauggugaugca

SEQ ID NO: 2526368 - RNA, 19 nt, Homo sapiens
  misc_RNA (1)...(19): siRNA sense strand
cggagaaaucccugcaaag

SEQ ID NO: 2526369 - RNA, 19 nt, Homo sapiens
  misc_RNA (1)...(19): siRNA sense strand
caaacuuagcuacgagcau

SEQ ID NO: 2526370 - RNA, 19 nt, Homo sapiens
  misc_RNA (1)...(19): siRNA sense strand
gccuaaaccuacagccaga

SEQ ID NO: 2526371 - RNA, 19 nt, Homo sapiens
  misc_RNA (1)...(19): siRNA sense strand
ggccaaagcugcagguggu

SEQ ID NO: 2526372 - RNA, 19 nt, Homo sapiens
  misc_RNA (1)...(19): siRNA sense strand
ggaagacaguggagagcag

SEQ ID NO: 2526373 - RNA, 19 nt, Homo sapiens
  misc_RNA (1)...(19): siRNA sense strand
gcuacaagucccugcgguu

SEQ ID NO: 2526374 - RNA, 19 nt, Homo sapiens
  misc_RNA (1)...(19): siRNA sense strand
gggccuaaaccuacagcca

SEQ ID NO: 2526375 - RNA, 19 nt, Homo sapiens
  misc_RNA (1)...(19): siRNA sense strand
cugucgaacuucuggaugu

SEQ ID NO: 2526376 - RNA, 19 nt, Homo sapiens
  misc_RNA (1)...(19): siRNA sense strand
aggggaagauauuggugaa

SEQ ID NO: 2526377 - RNA, 19 nt, Homo sapiens
  misc_RNA (1)...(19): siRNA sense strand
cuguauauugccaggaaga

SEQ ID NO: 2526378 - RNA, 19 nt, Homo sapiens
  misc_RNA (1)...(19): siRNA sense strand
cuuuaaugaaggcuguaua

SEQ ID NO: 2526379 - RNA, 19 nt, Homo sapiens
  misc_RNA (1)...(19): siRNA sense strand
agacuaaacaggacgccuu

SEQ ID NO: 2526380 - RNA, 19 nt, Homo sapiens
  misc_RNA (1)...(19): siRNA sense strand
guauauugccaggaagaga

SEQ ID NO: 2526381 - RNA, 19 nt, Homo sapiens
  misc_RNA (1)...(19): siRNA sense strand
aggugagggaggugaagua

SEQ ID NO: 2526382 - RNA, 19 nt, Homo sapiens
  misc_RNA (1)...(19): siRNA sense strand
gggcacagcugaagacccu

SEQ ID NO: 2526383 - RNA, 19 nt, Homo sapiens
  misc_RNA (1)...(19): siRNA sense strand
ccuauaagacgcuggccau

SEQ ID NO: 2526384 - RNA, 19 nt, Homo sapiens
  misc_RNA (1)...(19): siRNA sense strand
agaugaagacagugacagu

SEQ ID NO: 2526385 - RNA, 19 nt, Homo sapiens
  misc_RNA (1)...(19): siRNA sense strand
cagccacacuggaggagga

SEQ ID NO: 2526386 - RNA, 19 nt, Homo sapiens
  misc_RNA (1)...(19): siRNA sense strand
acagaaaagcugaacguga

SEQ ID NO: 2526387 - RNA, 19 nt, Homo sapiens
  misc_RNA (1)...(19): siRNA sense strand
ccagaugaagacagugaca

SEQ ID NO: 2526388 - RNA, 19 nt, Homo sapiens
  misc_RNA (1)...(19): siRNA sense strand
ugaaggugagggaggugaa

SEQ ID NO: 2526389 - RNA, 19 nt, Homo sapiens
  misc_RNA (1)...(19): siRNA sense strand
cggaacaugaugccagaga

SEQ ID NO: 2526390 - RNA, 19 nt, Homo sapiens
  misc_RNA (1)...(19): siRNA sense strand
cugagaacaucaagcccuu

SEQ ID NO: 2526391 - RNA, 19 nt, Homo sapiens
  misc_RNA (1)...(19): siRNA sense strand
gguugaggaaagaggcaaa

SEQ ID NO: 2526392 - RNA, 19 nt, Homo sapiens
  misc_RNA (1)...(19): siRNA sense strand
aggaagaagaggaccgcaa

SEQ ID NO: 2526393 - RNA, 19 nt, Homo sapiens
  misc_RNA (1)...(19): siRNA sense strand
cugagaagcaucugggcau

SEQ ID NO: 2526394 - RNA, 19 nt, Homo sapiens
  misc_RNA (1)...(19): siRNA sense strand
agaugaugcagguggauga

SEQ ID NO: 2526395 - RNA, 19 nt, Homo sapiens
  misc_RNA (1)...(19): siRNA sense strand
cuggauaguuugcggcuga

SEQ ID NO: 2526396 - RNA, 19 nt, Homo sapiens
  misc_RNA (1)...(19): siRNA sense strand
ccaaagaccuuccagcaga

SEQ ID NO: 2526397 - RNA, 19 nt, Homo sapiens
  misc_RNA (1)...(19): siRNA sense strand
cagcgaggagaguggguau

SEQ ID NO: 2526398 - RNA, 19 nt, Homo sapiens
  misc_RNA (1)...(19): siRNA sense strand
aggugaagacggagaugau

SEQ ID NO: 2526399 - RNA, 19 nt, Homo sapiens
  misc_RNA (1)...(19): siRNA sense strand
aggcggaggaccuggauga

SEQ ID NO: 2526400 - RNA, 19 nt, Homo sapiens
  misc_RNA (1)...(19): siRNA sense strand
cggagaugaugcaggugga

SEQ ID NO: 2526401 - RNA, 19 nt, Homo sapiens
  misc_RNA (1)...(19): siRNA sense strand
gggccgaggaagaagagga

SEQ ID NO: 2526402 - RNA, 19 nt, Homo sapiens
  misc_RNA (1)...(19): siRNA sense strand
gcagggaacucuucagcca

SEQ ID NO: 2526403 - RNA, 19 nt, Homo sapiens
  misc_RNA (1)...(19): siRNA sense strand
cagcaagauguuugagauc

SEQ ID NO: 2526404 - RNA, 19 nt, Homo sapiens
  misc_RNA (1)...(19): siRNA sense strand
uggcugaggugaagacgga

SEQ ID NO: 2526405 - RNA, 19 nt, Homo sapiens
  misc_RNA (1)...(19): siRNA sense strand
ggagagcagugcagcgugu

SEQ ID NO: 2526406 - RNA, 19 nt, Homo sapiens
  misc_RNA (1)...(19): siRNA sense strand
gcugaggugaagacggaga

SEQ ID NO: 2526407 - RNA, 19 nt, Homo sapiens
  misc_RNA (1)...(19): siRNA sense strand
auaacgaggcuguggagca

SEQ ID NO: 2526408 - RNA, 19 nt, Homo sapiens
  misc_RNA (1)...(19): siRNA sense strand
ugaucaagcaccugagaac

SEQ ID NO: 2526409 - RNA, 19 nt, Homo sapiens
  misc_RNA (1)...(19): siRNA sense strand
aagccaaggcggaggaccu

SEQ ID NO: 2526410 - RNA, 19 nt, Homo sapiens
  misc_RNA (1)...(19): siRNA sense strand
ggagcuacacuaugggcga

SEQ ID NO: 2526411 - RNA, 19 nt, Homo sapiens
  misc_RNA (1)...(19): siRNA sense strand
ccauauaagugcagggagu

SEQ ID NO: 2526412 - RNA, 19 nt, Homo sapiens
  misc_RNA (1)...(19): siRNA sense strand
gugucaagaaugugggaaa

SEQ ID NO: 2526413 - RNA, 19 nt, Homo sapiens
  misc_RNA (1)...(19): siRNA sense strand
gugcagggagugugggaaa

SEQ ID NO: 2526414 - RNA, 19 nt, Homo sapiens
  misc_RNA (1)...(19): siRNA sense strand
caguaaagaaggaagaaga

SEQ ID NO: 2526415 - RNA, 19 nt, Homo sapiens
  misc_RNA (1)...(19): siRNA sense strand
cuggagaauuauaggaaca

SEQ ID NO: 2526416 - RNA, 19 nt, Homo sapiens
  misc_RNA (1)...(19): siRNA sense strand
caacagaagagcaggcaga

SEQ ID NO: 2526417 - RNA, 19 nt, Homo sapiens
  misc_RNA (1)...(19): siRNA sense strand
cagaaggaucaaugugaaa

SEQ ID NO: 2526418 - RNA, 19 nt, Homo sapiens
  misc_RNA (1)...(19): siRNA sense strand
agaaggaagaagaggauga

SEQ ID NO: 2526419 - RNA, 19 nt, Homo sapiens
  misc_RNA (1)...(19): siRNA sense strand
auguaaucuaugugggaaa

SEQ ID NO: 2526420 - RNA, 19 nt, Homo sapiens
  misc_RNA (1)...(19): siRNA sense strand
uuaagaaagaagagaccaa

SEQ ID NO: 2526421 - RNA, 19 nt, Homo sapiens
  misc_RNA (1)...(19): siRNA sense strand
acuucacacucaagagaaa

SEQ ID NO: 2526422 - RNA, 19 nt, Homo sapiens
  misc_RNA (1)...(19): siRNA sense strand
uaaacauggcuguggcaaa

SEQ ID NO: 2526423 - RNA, 19 nt, Homo sapiens
  misc_RNA (1)...(19): siRNA sense strand
agacaguaaagaaggaaga

SEQ ID NO: 2526424 - RNA, 19 nt, Homo sapiens
  misc_RNA (1)...(19): siRNA sense strand
aggaaaagacucugaagua

SEQ ID NO: 2526425 - RNA, 19 nt, Homo sapiens
  misc_RNA (1)...(19): siRNA sense strand
agaccaaaguggggagaaa

SEQ ID NO: 2526426 - RNA, 19 nt, Homo sapiens
  misc_RNA (1)...(19): siRNA sense strand
auguagggugugugggaaa

SEQ ID NO: 2526427 - RNA, 19 nt, Homo sapiens
  misc_RNA (1)...(19): siRNA sense strand
ugagauuacagaagcuaaa

SEQ ID NO: 2526428 - RNA, 19 nt, Homo sapiens
  misc_RNA (1)...(19): siRNA sense strand
gggaaagaguucauuggga

SEQ ID NO: 2526429 - RNA, 19 nt, Homo sapiens
  misc_RNA (1)...(19): siRNA sense strand
gaaagaguucauugggaga

SEQ ID NO: 2526430 - RNA, 19 nt, Homo sapiens
  misc_RNA (1)...(19): siRNA sense strand
caguaugauugccaugaaa

SEQ ID NO: 2526431 - RNA, 19 nt, Homo sapiens
  misc_RNA (1)...(19): siRNA sense strand
gggaauugggcucagagaa

SEQ ID NO: 2526432 - RNA, 19 nt, Homo sapiens
  misc_RNA (1)...(19): siRNA sense strand
accuuuagauggagaucaa

SEQ ID NO: 2526433 - RNA, 19 nt, Homo sapiens
  misc_RNA (1)...(19): siRNA sense strand
gugucagcagugugggaaa

SEQ ID NO: 2526434 - RNA, 19 nt, Homo sapiens
  misc_RNA (1)...(19): siRNA sense strand
uggaagaagcagaaaccuu

SEQ ID NO: 2526435 - RNA, 19 nt, Homo sapiens
  misc_RNA (1)...(19): siRNA sense strand
ggacugaaagggaacaaaa

SEQ ID NO: 2526436 - RNA, 19 nt, Homo sapiens
  misc_RNA (1)...(19): siRNA sense strand
uuugagaguuucuggaaga

SEQ ID NO: 2526437 - RNA, 19 nt, Homo sapiens
  misc_RNA (1)...(19): siRNA sense strand
augcgauuuaugugagaaa

SEQ ID NO: 2526438 - RNA, 19 nt, Homo sapiens
  misc_RNA (1)...(19): siRNA sense strand
cacuaugacuacaagaaau

SEQ ID NO: 2526439 - RNA, 19 nt, Homo sapiens
  misc_RNA (1)...(19): siRNA sense strand
aggaaaaccuuuagaugga

SEQ ID NO: 2526440 - RNA, 19 nt, Homo sapiens
  misc_RNA (1)...(19): siRNA sense strand
ggauucacacccaggagaa

SEQ ID NO: 2526441 - RNA, 19 nt, Homo sapiens
  misc_RNA (1)...(19): siRNA sense strand
uguaccaaauguaggaaaa

SEQ ID NO: 2526442 - RNA, 19 nt, Homo sapiens
  misc_RNA (1)...(19): siRNA sense strand
acuacaagaaauaugggaa

SEQ ID NO: 2526443 - RNA, 19 nt, Homo sapiens
  misc_RNA (1)...(19): siRNA sense strand
ugaaguaucaggaaguaau

SEQ ID NO: 2526444 - RNA, 19 nt, Homo sapiens
  misc_RNA (1)...(19): siRNA sense strand
ggacuuugccuauagguca

SEQ ID NO: 2526445 - RNA, 19 nt, Homo sapiens
  misc_RNA (1)...(19): siRNA sense strand
ggguuugggugcagcuuca

SEQ ID NO: 2526446 - RNA, 19 nt, Homo sapiens
  misc_RNA (1)...(19): siRNA sense strand
gggaauacacaguggagag

SEQ ID NO: 2526447 - RNA, 19 nt, Homo sapiens
  misc_RNA (1)...(19): siRNA sense strand
aaagaaggaagaagaggau

SEQ ID NO: 2526448 - RNA, 19 nt, Homo sapiens
  misc_RNA (1)...(19): siRNA sense strand
gcgcuauaaauguaaucua

SEQ ID NO: 2526449 - RNA, 19 nt, Homo sapiens
  misc_RNA (1)...(19): siRNA sense strand
ggaaagaguucauugggag

SEQ ID NO: 2526450 - RNA, 19 nt, Homo sapiens
  misc_RNA (1)...(19): siRNA sense strand
gguugcaugaggaggaaaa

SEQ ID NO: 2526451 - RNA, 19 nt, Homo sapiens
  misc_RNA (1)...(19): siRNA sense strand
aggaagaagaggaugaaag

SEQ ID NO: 2526452 - RNA, 19 nt, Homo sapiens
  misc_RNA (1)...(19): siRNA sense strand
ucauuagccacaagagauu

SEQ ID NO: 2526453 - RNA, 19 nt, Homo sapiens
  misc_RNA (1)...(19): siRNA sense strand
ccauacaaguaagaguuaa

SEQ ID NO: 2526454 - RNA, 19 nt, Homo sapiens
  misc_RNA (1)...(19): siRNA sense strand
guggcaaacacuucagaau

SEQ ID NO: 2526455 - RNA, 19 nt, Homo sapiens
  misc_RNA (1)...(19): siRNA sense strand
ucguugaccaccagagaau

SEQ ID NO: 2526456 - RNA, 19 nt, Homo sapiens
  misc_RNA (1)...(19): siRNA sense strand
ccuuaccaguguagcgauu

SEQ ID NO: 2526457 - RNA, 19 nt, Homo sapiens
  misc_RNA (1)...(19): siRNA sense strand
ugucaagaaugugggaaaa

SEQ ID NO: 2526458 - RNA, 19 nt, Homo sapiens
  misc_RNA (1)...(19): siRNA sense strand
uaaagaaggaagaagagga

SEQ ID NO: 2526459 - RNA, 19 nt, Homo sapiens
  misc_RNA (1)...(19): siRNA sense strand
gaucaaacuuuacucguca

SEQ ID NO: 2526460 - RNA, 19 nt, Homo sapiens
  misc_RNA (1)...(19): siRNA sense strand
caaguguuucugagggaau

SEQ ID NO: 2526461 - RNA, 19 nt, Homo sapiens
  misc_RNA (1)...(19): siRNA sense strand
gggaaggggcucagacaca

SEQ ID NO: 2526462 - RNA, 19 nt, Homo sapiens
  misc_RNA (1)...(19): siRNA sense strand
ucauuuaagugcagugacu

SEQ ID NO: 2526463 - RNA, 19 nt, Homo sapiens
  misc_RNA (1)...(19): siRNA sense strand
guuccaaucucuaccgaca

SEQ ID NO: 2526464 - RNA, 19 nt, Homo sapiens
  misc_RNA (1)...(19): siRNA sense strand
aagaaagaagagaccaauu

SEQ ID NO: 2526465 - RNA, 19 nt, Homo sapiens
  misc_RNA (1)...(19): siRNA sense strand
gaguucauugggagacaua

SEQ ID NO: 2526466 - RNA, 19 nt, Homo sapiens
  misc_RNA (1)...(19): siRNA sense strand
aauuauaggaacauggcuu

SEQ ID NO: 2526467 - RNA, 19 nt, Homo sapiens
  misc_RNA (1)...(19): siRNA sense strand
guucacaccacuaugacua

SEQ ID NO: 2526468 - RNA, 19 nt, Homo sapiens
  misc_RNA (1)...(19): siRNA sense strand
cuacaagaaauaugggaag

SEQ ID NO: 2526469 - RNA, 19 nt, Homo sapiens
  misc_RNA (1)...(19): siRNA sense strand
uggaggagcugcaaaggga

SEQ ID NO: 2526470 - RNA, 19 nt, Homo sapiens
  misc_RNA (1)...(19): siRNA sense strand
augucaguggugugggaaa

SEQ ID NO: 2526471 - RNA, 19 nt, Homo sapiens
  misc_RNA (1)...(19): siRNA sense strand
gacaaguguuucugaggga

SEQ ID NO: 2526472 - RNA, 19 nt, Homo sapiens
  misc_RNA (1)...(19): siRNA sense strand
uggcgaaggcuguggcuga

SEQ ID NO: 2526473 - RNA, 19 nt, Homo sapiens
  misc_RNA (1)...(19): siRNA sense strand
cagagaauccagaggguac

SEQ ID NO: 2526474 - RNA, 19 nt, Homo sapiens
  misc_RNA (1)...(19): siRNA sense strand
aggcuguggcugagaacuu

SEQ ID NO: 2526475 - RNA, 19 nt, Homo sapiens
  misc_RNA (1)...(19): siRNA sense strand
ugguggugcuggaggaguu

SEQ ID NO: 2526476 - RNA, 19 nt, Homo sapiens
  misc_RNA (1)...(19): siRNA sense strand
ccugagagcuaugaggaca

SEQ ID NO: 2526477 - RNA, 19 nt, Homo sapiens
  misc_RNA (1)...(19): siRNA sense strand
ccacaugauccucgccaga

SEQ ID NO: 2526478 - RNA, 19 nt, Homo sapiens
  misc_RNA (1)...(19): siRNA sense strand
gcaagcaguugacgggcca

SEQ ID NO: 2526479 - RNA, 19 nt, Homo sapiens
  misc_RNA (1)...(19): siRNA sense strand
gcagagaauccagagggua

SEQ ID NO: 2526480 - RNA, 19 nt, Homo sapiens
  misc_RNA (1)...(19): siRNA sense strand
cgaagacacuugagcgaga

SEQ ID NO: 2526481 - RNA, 19 nt, Homo sapiens
  misc_RNA (1)...(19): siRNA sense strand
uguuauaaguguaccgaau

SEQ ID NO: 2526482 - RNA, 19 nt, Homo sapiens
  misc_RNA (1)...(19): siRNA sense strand
aaauaagagaggacaacaa

SEQ ID NO: 2526483 - RNA, 19 nt, Homo sapiens
  misc_RNA (1)...(19): siRNA sense strand
aggaacaaaugacgagaau

SEQ ID NO: 2526484 - RNA, 19 nt, Homo sapiens
  misc_RNA (1)...(19): siRNA sense strand
gcuaauuaucagaguacau

SEQ ID NO: 2526485 - RNA, 19 nt, Homo sapiens
  misc_RNA (1)...(19): siRNA sense strand
gguuauuccacaagugcaa

SEQ ID NO: 2526486 - RNA, 19 nt, Homo sapiens
  misc_RNA (1)...(19): siRNA sense strand
agagcuacuuuuagagaaa

SEQ ID NO: 2526487 - RNA, 19 nt, Homo sapiens
  misc_RNA (1)...(19): siRNA sense strand
cuaaaauaagagaggacaa

SEQ ID NO: 2526488 - RNA, 19 nt, Homo sapiens
  misc_RNA (1)...(19): siRNA sense strand
ggggauacaucgaguucaa

SEQ ID NO: 2526489 - RNA, 19 nt, Homo sapiens
  misc_RNA (1)...(19): siRNA sense strand
ccaacugauuacuaagaau

SEQ ID NO: 2526490 - RNA, 19 nt, Homo sapiens
  misc_RNA (1)...(19): siRNA sense strand
caauuggagcacagcuaaa

SEQ ID NO: 2526491 - RNA, 19 nt, Homo sapiens
  misc_RNA (1)...(19): siRNA sense strand
ugaacauguugaagaagau

SEQ ID NO: 2526492 - RNA, 19 nt, Homo sapiens
  misc_RNA (1)...(19): siRNA sense strand
cacuguaucauuugggaaa

SEQ ID NO: 2526493 - RNA, 19 nt, Homo sapiens
  misc_RNA (1)...(19): siRNA sense strand
ggcuauaaggccucugaaa

SEQ ID NO: 2526494 - RNA, 19 nt, Homo sapiens
  misc_RNA (1)...(19): siRNA sense strand
augaacauguugaagaaga

SEQ ID NO: 2526495 - RNA, 19 nt, Homo sapiens
  misc_RNA (1)...(19): siRNA sense strand
caugaagaucuuagcuaau

SEQ ID NO: 2526496 - RNA, 19 nt, Homo sapiens
  misc_RNA (1)...(19): siRNA sense strand
cuacuuuguuugaaggcau

SEQ ID NO: 2526497 - RNA, 19 nt, Homo sapiens
  misc_RNA (1)...(19): siRNA sense strand
cuagcauaccucaguguaa

SEQ ID NO: 2526498 - RNA, 19 nt, Homo sapiens
  misc_RNA (1)...(19): siRNA sense strand
acgaaaauguagucaucua

SEQ ID NO: 2526499 - RNA, 19 nt, Homo sapiens
  misc_RNA (1)...(19): siRNA sense strand
cgagaaugaacauguugaa

SEQ ID NO: 2526500 - RNA, 19 nt, Homo sapiens
  misc_RNA (1)...(19): siRNA sense strand
gaggacaacaagcgaucaa

SEQ ID NO: 2526501 - RNA, 19 nt, Homo sapiens
  misc_RNA (1)...(19): siRNA sense strand
gcaucuaccuccuacgaga

SEQ ID NO: 2526502 - RNA, 19 nt, Homo sapiens
  misc_RNA (1)...(19): siRNA sense strand
guguauugacaacugguua

SEQ ID NO: 2526503 - RNA, 19 nt, Homo sapiens
  misc_RNA (1)...(19): siRNA sense strand
caauugaggggaaguguua

SEQ ID NO: 2526504 - RNA, 19 nt, Homo sapiens
  misc_RNA (1)...(19): siRNA sense strand
ggaaauuacacgaaaaugu

SEQ ID NO: 2526505 - RNA, 19 nt, Homo sapiens
  misc_RNA (1)...(19): siRNA sense strand
aggaauguuuugauagcua

SEQ ID NO: 2526506 - RNA, 19 nt, Homo sapiens
  misc_RNA (1)...(19): siRNA sense strand
cuaucaaagcagaaagaac

SEQ ID NO: 2526507 - RNA, 19 nt, Homo sapiens
  misc_RNA (1)...(19): siRNA sense strand
ccaaaagaugccuaugaaa

SEQ ID NO: 2526508 - RNA, 19 nt, Homo sapiens
  misc_RNA (1)...(19): siRNA sense strand
acagaaggaaauugauuca

SEQ ID NO: 2526509 - RNA, 19 nt, Homo sapiens
  misc_RNA (1)...(19): siRNA sense strand
ggcauuucaucuuggucaa

SEQ ID NO: 2526510 - RNA, 19 nt, Homo sapiens
  misc_RNA (1)...(19): siRNA sense strand
cagguuuggcuguggcaau

SEQ ID NO: 2526511 - RNA, 19 nt, Homo sapiens
  misc_RNA (1)...(19): siRNA sense strand
agguuuggcuguggcaaua

SEQ ID NO: 2526512 - RNA, 19 nt, Homo sapiens
  misc_RNA (1)...(19): siRNA sense strand
cucacaaguuucacaggaa

SEQ ID NO: 2526513 - RNA, 19 nt, Homo sapiens
  misc_RNA (1)...(19): siRNA sense strand
caggaaagaguuugcacca

SEQ ID NO: 2526514 - RNA, 19 nt, Homo sapiens
  misc_RNA (1)...(19): siRNA sense strand
ggggaaauuacacgaaaau

SEQ ID NO: 2526515 - RNA, 19 nt, Homo sapiens
  misc_RNA (1)...(19): siRNA sense strand
caggaacaaaugacgagaa

SEQ ID NO: 2526516 - RNA, 19 nt, Homo sapiens
  misc_RNA (1)...(19): siRNA sense strand
ggcgaagacacuugagcga

SEQ ID NO: 2526517 - RNA, 19 nt, Homo sapiens
  misc_RNA (1)...(19): siRNA sense strand
ucugaaaggcgaagacacu

SEQ ID NO: 2526518 - RNA, 19 nt, Homo sapiens
  misc_RNA (1)...(19): siRNA sense strand
cccuauugguggacaaguu

SEQ ID NO: 2526519 - RNA, 19 nt, Homo sapiens
  misc_RNA (1)...(19): siRNA sense strand
agugaauggacaagcacau

SEQ ID NO: 2526520 - RNA, 19 nt, Homo sapiens
  misc_RNA (1)...(19): siRNA sense strand
auguugaagaagaugggua

SEQ ID NO: 2526521 - RNA, 19 nt, Homo sapiens
  misc_RNA (1)...(19): siRNA sense strand
gucaauuggagcacagcua

SEQ ID NO: 2526522 - RNA, 19 nt, Homo sapiens
  misc_RNA (1)...(19): siRNA sense strand
aggaggagccggaauacau

SEQ ID NO: 2526523 - RNA, 19 nt, Homo sapiens
  misc_RNA (1)...(19): siRNA sense strand
guuuguaacuguuccacau

SEQ ID NO: 2526524 - RNA, 19 nt, Homo sapiens
  misc_RNA (1)...(19): siRNA sense strand
ggccaaguuuacacaccaa

SEQ ID NO: 2526525 - RNA, 19 nt, Homo sapiens
  misc_RNA (1)...(19): siRNA sense strand
ccacuguaucauuugggaa

SEQ ID NO: 2526526 - RNA, 19 nt, Homo sapiens
  misc_RNA (1)...(19): siRNA sense strand
cuuuacuuccagaggauuu

SEQ ID NO: 2526527 - RNA, 19 nt, Homo sapiens
  misc_RNA (1)...(19): siRNA sense strand
aggaagaggcucagaggaa

SEQ ID NO: 2526528 - RNA, 19 nt, Homo sapiens
  misc_RNA (1)...(19): siRNA sense strand
aauuauaccaagugaggaa

SEQ ID NO: 2526529 - RNA, 19 nt, Homo sapiens
  misc_RNA (1)...(19): siRNA sense strand
gcccaagguaggagaagua

SEQ ID NO: 2526530 - RNA, 19 nt, Homo sapiens
  misc_RNA (1)...(19): siRNA sense strand
gaucacugaagaugggaaa

SEQ ID NO: 2526531 - RNA, 19 nt, Homo sapiens
  misc_RNA (1)...(19): siRNA sense strand
aaugaagacaagagaagua

SEQ ID NO: 2526532 - RNA, 19 nt, Homo sapiens
  misc_RNA (1)...(19): siRNA sense strand
guaaagaaauagagccuuc

SEQ ID NO: 2526533 - RNA, 19 nt, Homo sapiens
  misc_RNA (1)...(19): siRNA sense strand
ggauuaaggcauugcagga

SEQ ID NO: 2526534 - RNA, 19 nt, Homo sapiens
  misc_RNA (1)...(19): siRNA sense strand
acucuuagacacauggaaa

SEQ ID NO: 2526535 - RNA, 19 nt, Homo sapiens
  misc_RNA (1)...(19): siRNA sense strand
cuaacauaguucaagagaa

SEQ ID NO: 2526536 - RNA, 19 nt, Homo sapiens
  misc_RNA (1)...(19): siRNA sense strand
gaugugaagagcuggcaaa

SEQ ID NO: 2526537 - RNA, 19 nt, Homo sapiens
  misc_RNA (1)...(19): siRNA sense strand
ucagaaaggauuaaggcau

SEQ ID NO: 2526538 - RNA, 19 nt, Homo sapiens
  misc_RNA (1)...(19): siRNA sense strand
agaaauuagacaacaguga

SEQ ID NO: 2526539 - RNA, 19 nt, Homo sapiens
  misc_RNA (1)...(19): siRNA sense strand
caaacaaauacaagaagca

SEQ ID NO: 2526540 - RNA, 19 nt, Homo sapiens
  misc_RNA (1)...(19): siRNA sense strand
agaucuuauuagacggaau

SEQ ID NO: 2526541 - RNA, 19 nt, Homo sapiens
  misc_RNA (1)...(19): siRNA sense strand
caccagacacagaggaaca

SEQ ID NO: 2526542 - RNA, 19 nt, Homo sapiens
  misc_RNA (1)...(19): siRNA sense strand
caauuaaagugguuggaug

SEQ ID NO: 2526543 - RNA, 19 nt, Homo sapiens
  misc_RNA (1)...(19): siRNA sense strand
cgaguaaugaucaaaggaa

SEQ ID NO: 2526544 - RNA, 19 nt, Homo sapiens
  misc_RNA (1)...(19): siRNA sense strand
ggagcagagaacaaacaaa

SEQ ID NO: 2526545 - RNA, 19 nt, Homo sapiens
  misc_RNA (1)...(19): siRNA sense strand
ucagcaagaaauagaaaga

SEQ ID NO: 2526546 - RNA, 19 nt, Homo sapiens
  misc_RNA (1)...(19): siRNA sense strand
ggaaacaccaagaagagga

SEQ ID NO: 2526547 - RNA, 19 nt, Homo sapiens
  misc_RNA (1)...(19): siRNA sense strand
agcaagaaauagaaagacu

SEQ ID NO: 2526548 - RNA, 19 nt, Homo sapiens
  misc_RNA (1)...(19): siRNA sense strand
ugguaaagaaauagagccu

SEQ ID NO: 2526549 - RNA, 19 nt, Homo sapiens
  misc_RNA (1)...(19): siRNA sense strand
aagcaagcacauggagaaa

SEQ ID NO: 2526550 - RNA, 19 nt, Homo sapiens
  misc_RNA (1)...(19): siRNA sense strand
ggaaggaugugaagagcug

SEQ ID NO: 2526551 - RNA, 19 nt, Homo sapiens
  misc_RNA (1)...(19): siRNA sense strand
agaggaaacaccaagaaga

SEQ ID NO: 2526552 - RNA, 19 nt, Homo sapiens
  misc_RNA (1)...(19): siRNA sense strand
aaucgauguugaugugcaa

SEQ ID NO: 2526553 - RNA, 19 nt, Homo sapiens
  misc_RNA (1)...(19): siRNA sense strand
cauggagaaacuagaagua

SEQ ID NO: 2526554 - RNA, 19 nt, Homo sapiens
  misc_RNA (1)...(19): siRNA sense strand
caucagcaagaaauagaaa

SEQ ID NO: 2526555 - RNA, 19 nt, Homo sapiens
  misc_RNA (1)...(19): siRNA sense strand
aaaucagagagcaggaaaa

SEQ ID NO: 2526556 - RNA, 19 nt, Homo sapiens
  misc_RNA (1)...(19): siRNA sense strand
acaccaagaagaggauaaa

SEQ ID NO: 2526557 - RNA, 19 nt, Homo sapiens
  misc_RNA (1)...(19): siRNA sense strand
gguuggaugguaaagaaau

SEQ ID NO: 2526558 - RNA, 19 nt, Homo sapiens
  misc_RNA (1)...(19): siRNA sense strand
cugucuuaaacgagccaaa

SEQ ID NO: 2526559 - RNA, 19 nt, Homo sapiens
  misc_RNA (1)...(19): siRNA sense strand
aacaccaagaagaggauaa

SEQ ID NO: 2526560 - RNA, 19 nt, Homo sapiens
  misc_RNA (1)...(19): siRNA sense strand
ccaagguaggagaaguaau

SEQ ID NO: 2526561 - RNA, 19 nt, Homo sapiens
  misc_RNA (1)...(19): siRNA sense strand
aaucacagguggucagcga

SEQ ID NO: 2526562 - RNA, 19 nt, Homo sapiens
  misc_RNA (1)...(19): siRNA sense strand
gggcuggaucacagaagau

SEQ ID NO: 2526563 - RNA, 19 nt, Homo sapiens
  misc_RNA (1)...(19): siRNA sense strand
ccuacaggcaccagacaca

SEQ ID NO: 2526564 - RNA, 19 nt, Homo sapiens
  misc_RNA (1)...(19): siRNA sense strand
ccucuuuaaucgauguuga

SEQ ID NO: 2526565 - RNA, 19 nt, Homo sapiens
  misc_RNA (1)...(19): siRNA sense strand
aguaaugaucaaaggaaag

SEQ ID NO: 2526566 - RNA, 19 nt, Homo sapiens
  misc_RNA (1)...(19): siRNA sense strand
ugguuggaugguaaagaaa

SEQ ID NO: 2526567 - RNA, 19 nt, Homo sapiens
  misc_RNA (1)...(19): siRNA sense strand
gaagaggcucagaggaaac

SEQ ID NO: 2526568 - RNA, 19 nt, Homo sapiens
  misc_RNA (1)...(19): siRNA sense strand
ugaucaaaggaaagccauu

SEQ ID NO: 2526569 - RNA, 19 nt, Homo sapiens
  misc_RNA (1)...(19): siRNA sense strand
cugcagaagugaaacccga

SEQ ID NO: 2526570 - RNA, 19 nt, Homo sapiens
  misc_RNA (1)...(19): siRNA sense strand
uuggaaacucuuagacaca

SEQ ID NO: 2526571 - RNA, 19 nt, Homo sapiens
  misc_RNA (1)...(19): siRNA sense strand
gugaaaccacccaggacuu

SEQ ID NO: 2526572 - RNA, 19 nt, Homo sapiens
  misc_RNA (1)...(19): siRNA sense strand
gugaagagcuggcaaaacu

SEQ ID NO: 2526573 - RNA, 19 nt, Homo sapiens
  misc_RNA (1)...(19): siRNA sense strand
ggcaccagacacagaggaa

SEQ ID NO: 2526574 - RNA, 19 nt, Homo sapiens
  misc_RNA (1)...(19): siRNA sense strand
uggaauaagcccuguuugu

SEQ ID NO: 2526575 - RNA, 19 nt, Homo sapiens
  misc_RNA (1)...(19): siRNA sense strand
gauuggaaacucuuagaca

SEQ ID NO: 2526576 - RNA, 19 nt, Homo sapiens
  misc_RNA (1)...(19): siRNA sense strand
aauuagaguugguggaaau

SEQ ID NO: 2526577 - RNA, 19 nt, Homo sapiens
  misc_RNA (1)...(19): siRNA sense strand
ugaccaaaugugugaaaua

SEQ ID NO: 2526578 - RNA, 19 nt, Homo sapiens
  misc_RNA (1)...(19): siRNA sense strand
cuagaagaauggagcacaa

SEQ ID NO: 2526579 - RNA, 19 nt, Homo sapiens
  misc_RNA (1)...(19): siRNA sense strand
gggaagugugaaagugaua

SEQ ID NO: 2526580 - RNA, 19 nt, Homo sapiens
  misc_RNA (1)...(19): siRNA sense strand
gugcaaagcuuaaaggagu

SEQ ID NO: 2526581 - RNA, 19 nt, Homo sapiens
  misc_RNA (1)...(19): siRNA sense strand
ccaaggagucaaaggacaa

SEQ ID NO: 2526582 - RNA, 19 nt, Homo sapiens
  misc_RNA (1)...(19): siRNA sense strand
uggaagagaaccagagaca

SEQ ID NO: 2526583 - RNA, 19 nt, Homo sapiens
  misc_RNA (1)...(19): siRNA sense strand
agucaaaggacaaucuaaa

SEQ ID NO: 2526584 - RNA, 19 nt, Homo sapiens
  misc_RNA (1)...(19): siRNA sense strand
gggaaauugcaaagaagau

SEQ ID NO: 2526585 - RNA, 19 nt, Homo sapiens
  misc_RNA (1)...(19): siRNA sense strand
cugaagacuuuaaagagaa

SEQ ID NO: 2526586 - RNA, 19 nt, Homo sapiens
  misc_RNA (1)...(19): siRNA sense strand
uagaaaggauuguaggaga

SEQ ID NO: 2526587 - RNA, 19 nt, Homo sapiens
  misc_RNA (1)...(19): siRNA sense strand
acuugaaucuccaggaaau

SEQ ID NO: 2526588 - RNA, 19 nt, Homo sapiens
  misc_RNA (1)...(19): siRNA sense strand
cauaaacaaaggugaagaa

SEQ ID NO: 2526589 - RNA, 19 nt, Homo sapiens
  misc_RNA (1)...(19): siRNA sense strand
ggauuguaggagaagauaa

SEQ ID NO: 2526590 - RNA, 19 nt, Homo sapiens
  misc_RNA (1)...(19): siRNA sense strand
ggggugugguugagaauua

SEQ ID NO: 2526591 - RNA, 19 nt, Homo sapiens
  misc_RNA (1)...(19): siRNA sense strand
aagcagauuaugagcuaua

SEQ ID NO: 2526592 - RNA, 19 nt, Homo sapiens
  misc_RNA (1)...(19): siRNA sense strand
agacaagggaaauugcaaa

SEQ ID NO: 2526593 - RNA, 19 nt, Homo sapiens
  misc_RNA (1)...(19): siRNA sense strand
cagaaagaagagaagauuu

SEQ ID NO: 2526594 - RNA, 19 nt, Homo sapiens
  misc_RNA (1)...(19): siRNA sense strand
cuaagagagcuuuggauuu

SEQ ID NO: 2526595 - RNA, 19 nt, Homo sapiens
  misc_RNA (1)...(19): siRNA sense strand
ccaaaguagaggagaguuc

SEQ ID NO: 2526596 - RNA, 19 nt, Homo sapiens
  misc_RNA (1)...(19): siRNA sense strand
ucuaaaggaugaagccaau

SEQ ID NO: 2526597 - RNA, 19 nt, Homo sapiens
  misc_RNA (1)...(19): siRNA sense strand
cugaagaggacuuggggaa

SEQ ID NO: 2526598 - RNA, 19 nt, Homo sapiens
  misc_RNA (1)...(19): siRNA sense strand
cccaugaaucugauagaaa

SEQ ID NO: 2526599 - RNA, 19 nt, Homo sapiens
  misc_RNA (1)...(19): siRNA sense strand
ugaaauuucuccagagcca

SEQ ID NO: 2526600 - RNA, 19 nt, Homo sapiens
  misc_RNA (1)...(19): siRNA sense strand
agguagcccuucaaagaaa

SEQ ID NO: 2526601 - RNA, 19 nt, Homo sapiens
  misc_RNA (1)...(19): siRNA sense strand
gcuucugaauauagagcau

SEQ ID NO: 2526602 - RNA, 19 nt, Homo sapiens
  misc_RNA (1)...(19): siRNA sense strand
guuuugagcuaguggagaa

SEQ ID NO: 2526603 - RNA, 19 nt, Homo sapiens
  misc_RNA (1)...(19): siRNA sense strand
caauuagaguugguggaaa

SEQ ID NO: 2526604 - RNA, 19 nt, Homo sapiens
  misc_RNA (1)...(19): siRNA sense strand
uggacuucuuggaggacaa

SEQ ID NO: 2526605 - RNA, 19 nt, Homo sapiens
  misc_RNA (1)...(19): siRNA sense strand
agucauuggaagagaacca

SEQ ID NO: 2526606 - RNA, 19 nt, Homo sapiens
  misc_RNA (1)...(19): siRNA sense strand
gcauaguggcauuacaauu

SEQ ID NO: 2526607 - RNA, 19 nt, Homo sapiens
  misc_RNA (1)...(19): siRNA sense strand
caaggaauccagugaccaa

SEQ ID NO: 2526608 - RNA, 19 nt, Homo sapiens
  misc_RNA (1)...(19): siRNA sense strand
cugaauaaucucggcaaua

SEQ ID NO: 2526609 - RNA, 19 nt, Homo sapiens
  misc_RNA (1)...(19): siRNA sense strand
aaggaaacuaagagagcuu

SEQ ID NO: 2526610 - RNA, 19 nt, Homo sapiens
  misc_RNA (1)...(19): siRNA sense strand
gguuuuaaaucuggaguaa

SEQ ID NO: 2526611 - RNA, 19 nt, Homo sapiens
  misc_RNA (1)...(19): siRNA sense strand
aggaaaugggaaaagaaaa

SEQ ID NO: 2526612 - RNA, 19 nt, Homo sapiens
  misc_RNA (1)...(19): siRNA sense strand
agaaaagcuacaagugaua

SEQ ID NO: 2526613 - RNA, 19 nt, Homo sapiens
  misc_RNA (1)...(19): siRNA sense strand
gaauggagcacaaagccaa

SEQ ID NO: 2526614 - RNA, 19 nt, Homo sapiens
  misc_RNA (1)...(19): siRNA sense strand
ugaugauucugaagucaaa

SEQ ID NO: 2526615 - RNA, 19 nt, Homo sapiens
  misc_RNA (1)...(19): siRNA sense strand
uaaacaaaggugaagaaca

SEQ ID NO: 2526616 - RNA, 19 nt, Homo sapiens
  misc_RNA (1)...(19): siRNA sense strand
aacugugagaagagagaaa

SEQ ID NO: 2526617 - RNA, 19 nt, Homo sapiens
  misc_RNA (1)...(19): siRNA sense strand
ccaaaaggaaaugggaaaa

SEQ ID NO: 2526618 - RNA, 19 nt, Homo sapiens
  misc_RNA (1)...(19): siRNA sense strand
acuaagagagcuuuggauu

SEQ ID NO: 2526619 - RNA, 19 nt, Homo sapiens
  misc_RNA (1)...(19): siRNA sense strand
gcuuggaaugugaaaguuu

SEQ ID NO: 2526620 - RNA, 19 nt, Homo sapiens
  misc_RNA (1)...(19): siRNA sense strand
guagaggagaguucugaaa

SEQ ID NO: 2526621 - RNA, 19 nt, Homo sapiens
  misc_RNA (1)...(19): siRNA sense strand
ugcaaagcuuaaaggagua

SEQ ID NO: 2526622 - RNA, 19 nt, Homo sapiens
  misc_RNA (1)...(19): siRNA sense strand
cucuaaaggaugaagccaa

SEQ ID NO: 2526623 - RNA, 19 nt, Homo sapiens
  misc_RNA (1)...(19): siRNA sense strand
aacuaaugguuguggacuu

SEQ ID NO: 2526624 - RNA, 19 nt, Homo sapiens
  misc_RNA (1)...(19): siRNA sense strand
uacaauuaguagugggcau

SEQ ID NO: 2526625 - RNA, 19 nt, Homo sapiens
  misc_RNA (1)...(19): siRNA sense strand
uuaguggauuugagaacaa

SEQ ID NO: 2526626 - RNA, 19 nt, Homo sapiens
  misc_RNA (1)...(19): siRNA sense strand
gugaaauagguaagccaga

SEQ ID NO: 2526627 - RNA, 19 nt, Homo sapiens
  misc_RNA (1)...(19): siRNA sense strand
cauuugugggacugaauaa

SEQ ID NO: 2526628 - RNA, 19 nt, Homo sapiens
  misc_RNA (1)...(19): siRNA sense strand
acccauaaacaaaggugaa

SEQ ID NO: 2526629 - RNA, 19 nt, Homo sapiens
  misc_RNA (1)...(19): siRNA sense strand
aguacaagaagaugagcuu

SEQ ID NO: 2526630 - RNA, 19 nt, Homo sapiens
  misc_RNA (1)...(19): siRNA sense strand
ucauuauacugaagcugaa

SEQ ID NO: 2526631 - RNA, 19 nt, Homo sapiens
  misc_RNA (1)...(19): siRNA sense strand
aauucugagacuagugaua

SEQ ID NO: 2526632 - RNA, 19 nt, Homo sapiens
  misc_RNA (1)...(19): siRNA sense strand
ucugauagaaacaaggaau

SEQ ID NO: 2526633 - RNA, 19 nt, Homo sapiens
  misc_RNA (1)...(19): siRNA sense strand
auaucaaguuggugaagaa

SEQ ID NO: 2526634 - RNA, 19 nt, Homo sapiens
  misc_RNA (1)...(19): siRNA sense strand
cauuuggauuaguuggaaa

SEQ ID NO: 2526635 - RNA, 19 nt, Homo sapiens
  misc_RNA (1)...(19): siRNA sense strand
gggauauaccaguggccuu

SEQ ID NO: 2526636 - RNA, 19 nt, Homo sapiens
  misc_RNA (1)...(19): siRNA sense strand
caguauuuaaucugagcaa

SEQ ID NO: 2526637 - RNA, 19 nt, Homo sapiens
  misc_RNA (1)...(19): siRNA sense strand
cugaaagaccgcagccgua

SEQ ID NO: 2526638 - RNA, 19 nt, Homo sapiens
  misc_RNA (1)...(19): siRNA sense strand
ucuaugaagaacugaaaga

SEQ ID NO: 2526639 - RNA, 19 nt, Homo sapiens
  misc_RNA (1)...(19): siRNA sense strand
ugacaguaccaguaguuau

SEQ ID NO: 2526640 - RNA, 19 nt, Homo sapiens
  misc_RNA (1)...(19): siRNA sense strand
gaaugaugaauguguccaa

SEQ ID NO: 2526641 - RNA, 19 nt, Homo sapiens
  misc_RNA (1)...(19): siRNA sense strand
caguggaauccuugggcuu

SEQ ID NO: 2526642 - RNA, 19 nt, Homo sapiens
  misc_RNA (1)...(19): siRNA sense strand
caucuaugaagaacugaaa

SEQ ID NO: 2526643 - RNA, 19 nt, Homo sapiens
  misc_RNA (1)...(19): siRNA sense strand
augcagaacauuggagcua

SEQ ID NO: 2526644 - RNA, 19 nt, Homo sapiens
  misc_RNA (1)...(19): siRNA sense strand
caauugggauauaaggcau

SEQ ID NO: 2526645 - RNA, 19 nt, Homo sapiens
  misc_RNA (1)...(19): siRNA sense strand
cgaauuuggggaagaagaa

SEQ ID NO: 2526646 - RNA, 19 nt, Homo sapiens
  misc_RNA (1)...(19): siRNA sense strand
ccaacagcgacuucaacua

SEQ ID NO: 2526647 - RNA, 19 nt, Homo sapiens
  misc_RNA (1)...(19): siRNA sense strand
guauuuaaucugagcaaug

SEQ ID NO: 2526648 - RNA, 19 nt, Homo sapiens
  misc_RNA (1)...(19): siRNA sense strand
uuucuuaugccauggcuaa

SEQ ID NO: 2526649 - RNA, 19 nt, Homo sapiens
  misc_RNA (1)...(19): siRNA sense strand
gcaagaaauuucagguucc

SEQ ID NO: 2526650 - RNA, 19 nt, Homo sapiens
  misc_RNA (1)...(19): siRNA sense strand
cuuuggugauccaggcauu

SEQ ID NO: 2526651 - RNA, 19 nt, Homo sapiens
  misc_RNA (1)...(19): siRNA sense strand
aagaagagcacgagaguca

SEQ ID NO: 2526652 - RNA, 19 nt, Homo sapiens
  misc_RNA (1)...(19): siRNA sense strand
ggauauuaguagcaaggaa

SEQ ID NO: 2526653 - RNA, 19 nt, Homo sapiens
  misc_RNA (1)...(19): siRNA sense strand
aggaagacaaacaaggaaa

SEQ ID NO: 2526654 - RNA, 19 nt, Homo sapiens
  misc_RNA (1)...(19): siRNA sense strand
ggacguuucaugagagaau

SEQ ID NO: 2526655 - RNA, 19 nt, Homo sapiens
  misc_RNA (1)...(19): siRNA sense strand
cccagaaacaggagaacaa

SEQ ID NO: 2526656 - RNA, 19 nt, Homo sapiens
  misc_RNA (1)...(19): siRNA sense strand
ggaaaguugagaugagaga

SEQ ID NO: 2526657 - RNA, 19 nt, Homo sapiens
  misc_RNA (1)...(19): siRNA sense strand
aggaaguaauaaaguggaa

SEQ ID NO: 2526658 - RNA, 19 nt, Homo sapiens
  misc_RNA (1)...(19): siRNA sense strand
agacauuauccgaguguuu

SEQ ID NO: 2526659 - RNA, 19 nt, Homo sapiens
  misc_RNA (1)...(19): siRNA sense strand
gaaauaagcucaauggaac

SEQ ID NO: 2526660 - RNA, 19 nt, Homo sapiens
  misc_RNA (1)...(19): siRNA sense strand
gcagcaaauuaucgggaga

SEQ ID NO: 2526661 - RNA, 19 nt, Homo sapiens
  misc_RNA (1)...(19): siRNA sense strand
guguagaggaagacaaaca

SEQ ID NO: 2526662 - RNA, 19 nt, Homo sapiens
  misc_RNA (1)...(19): siRNA sense strand
gcucagaaucuaugacaca

SEQ ID NO: 2526663 - RNA, 19 nt, Homo sapiens
  misc_RNA (1)...(19): siRNA sense strand
caugauacggauauggaaa

SEQ ID NO: 2526664 - RNA, 19 nt, Homo sapiens
  misc_RNA (1)...(19): siRNA sense strand
ggugauuguuguuuggaau

SEQ ID NO: 2526665 - RNA, 19 nt, Homo sapiens
  misc_RNA (1)...(19): siRNA sense strand
acuaaaugcaggagaacga

SEQ ID NO: 2526666 - RNA, 19 nt, Homo sapiens
  misc_RNA (1)...(19): siRNA sense strand
gauuaucagcauagaaaga

SEQ ID NO: 2526667 - RNA, 19 nt, Homo sapiens
  misc_RNA (1)...(19): siRNA sense strand
cuuuaagcccugaggaaaa

SEQ ID NO: 2526668 - RNA, 19 nt, Homo sapiens
  misc_RNA (1)...(19): siRNA sense strand
cagaaaagugagaaggcaa

SEQ ID NO: 2526669 - RNA, 19 nt, Homo sapiens
  misc_RNA (1)...(19): siRNA sense strand
ggucaaaagaugaucacua

SEQ ID NO: 2526670 - RNA, 19 nt, Homo sapiens
  misc_RNA (1)...(19): siRNA sense strand
gcuuugaagaauugcuuaa

SEQ ID NO: 2526671 - RNA, 19 nt, Homo sapiens
  misc_RNA (1)...(19): siRNA sense strand
gagugaagcaaaaguaaaa

SEQ ID NO: 2526672 - RNA, 19 nt, Homo sapiens
  misc_RNA (1)...(19): siRNA sense strand
cgaagaugcagcuaguaaa

SEQ ID NO: 2526673 - RNA, 19 nt, Homo sapiens
  misc_RNA (1)...(19): siRNA sense strand
uaacugaagaaauggcaaa

SEQ ID NO: 2526674 - RNA, 19 nt, Homo sapiens
  misc_RNA (1)...(19): siRNA sense strand
agaaagaaacugaaagaac

SEQ ID NO: 2526675 - RNA, 19 nt, Homo sapiens
  misc_RNA (1)...(19): siRNA sense strand
gaagaaauggcaaaggaga

SEQ ID NO: 2526676 - RNA, 19 nt, Homo sapiens
  misc_RNA (1)...(19): siRNA sense strand
augaagauguugaugguga

SEQ ID NO: 2526677 - RNA, 19 nt, Homo sapiens
  misc_RNA (1)...(19): siRNA sense strand
acgaagaugcagcuaguaa

SEQ ID NO: 2526678 - RNA, 19 nt, Homo sapiens
  misc_RNA (1)...(19): siRNA sense strand
aagaaauggcaaaggagau

SEQ ID NO: 2526679 - RNA, 19 nt, Homo sapiens
  misc_RNA (1)...(19): siRNA sense strand
guuuaagggaauuccaaua

SEQ ID NO: 2526680 - RNA, 19 nt, Homo sapiens
  misc_RNA (1)...(19): siRNA sense strand
acaaacaaggaaagccaaa

SEQ ID NO: 2526681 - RNA, 19 nt, Homo sapiens
  misc_RNA (1)...(19): siRNA sense strand
ucuuaagcguggaugaaau

SEQ ID NO: 2526682 - RNA, 19 nt, Homo sapiens
  misc_RNA (1)...(19): siRNA sense strand
ccaucaacacuguacguaa

SEQ ID NO: 2526683 - RNA, 19 nt, Homo sapiens
  misc_RNA (1)...(19): siRNA sense strand
ucauguggcuagugaaaca

SEQ ID NO: 2526684 - RNA, 19 nt, Homo sapiens
  misc_RNA (1)...(19): siRNA sense strand
guacguaacuguaagagga

SEQ ID NO: 2526685 - RNA, 19 nt, Homo sapiens
  misc_RNA (1)...(19): siRNA sense strand
cuggauuagaagagucaaa

SEQ ID NO: 2526686 - RNA, 19 nt, Homo sapiens
  misc_RNA (1)...(19): siRNA sense strand
cgacacuauuagaagcaau

SEQ ID NO: 2526687 - RNA, 19 nt, Homo sapiens
  misc_RNA (1)...(19): siRNA sense strand
agacaaacaaggaaagcca

SEQ ID NO: 2526688 - RNA, 19 nt, Homo sapiens
  misc_RNA (1)...(19): siRNA sense strand
gcaaaugagggaagagaag

SEQ ID NO: 2526689 - RNA, 19 nt, Homo sapiens
  misc_RNA (1)...(19): siRNA sense strand
cagcugagagugaagcaaa

SEQ ID NO: 2526690 - RNA, 19 nt, Homo sapiens
  misc_RNA (1)...(19): siRNA sense strand
aagagaagagacugauuua

SEQ ID NO: 2526691 - RNA, 19 nt, Homo sapiens
  misc_RNA (1)...(19): siRNA sense strand
gcaugcaagaugauacaaa

SEQ ID NO: 2526692 - RNA, 19 nt, Homo sapiens
  misc_RNA (1)...(19): siRNA sense strand
ggucaaaauguccaagaaa

SEQ ID NO: 2526693 - RNA, 19 nt, Homo sapiens
  misc_RNA (1)...(19): siRNA sense strand
aaucauguggcuagugaaa

SEQ ID NO: 2526694 - RNA, 19 nt, Homo sapiens
  misc_RNA (1)...(19): siRNA sense strand
gaacaagcaagcaggcaga

SEQ ID NO: 2526695 - RNA, 19 nt, Homo sapiens
  misc_RNA (1)...(19): siRNA sense strand
acuaacaaccugaagaaga

SEQ ID NO: 2526696 - RNA, 19 nt, Homo sapiens
  misc_RNA (1)...(19): siRNA sense strand
aagcaguugcagauaauaa

SEQ ID NO: 2526697 - RNA, 19 nt, Homo sapiens
  misc_RNA (1)...(19): siRNA sense strand
agaaaagugagaaggcaaa

SEQ ID NO: 2526698 - RNA, 19 nt, Homo sapiens
  misc_RNA (1)...(19): siRNA sense strand
uggaagugaggaugguaua

SEQ ID NO: 2526699 - RNA, 19 nt, Homo sapiens
  misc_RNA (1)...(19): siRNA sense strand
acacuaacaaccugaagaa

SEQ ID NO: 2526700 - RNA, 19 nt, Homo sapiens
  misc_RNA (1)...(19): siRNA sense strand
ggcaaaugagggaagagaa

SEQ ID NO: 2526701 - RNA, 19 nt, Homo sapiens
  misc_RNA (1)...(19): siRNA sense strand
gauacacggaugaggaaga

SEQ ID NO: 2526702 - RNA, 19 nt, Homo sapiens
  misc_RNA (1)...(19): siRNA sense strand
cugauuuagaagaggauga

SEQ ID NO: 2526703 - RNA, 19 nt, Homo sapiens
  misc_RNA (1)...(19): siRNA sense strand
gcaaaggagauuaagagga

SEQ ID NO: 2526704 - RNA, 19 nt, Homo sapiens
  misc_RNA (1)...(19): siRNA sense strand
ugaggaugguauaguguau

SEQ ID NO: 2526705 - RNA, 19 nt, Homo sapiens
  misc_RNA (1)...(19): siRNA sense strand
augcuaguguagaggaaga

SEQ ID NO: 2526706 - RNA, 19 nt, Homo sapiens
  misc_RNA (1)...(19): siRNA sense strand
agggaagagaagagacuga

SEQ ID NO: 2526707 - RNA, 19 nt, Homo sapiens
  misc_RNA (1)...(19): siRNA sense strand
uggucaauaugucaagaaa

SEQ ID NO: 2526708 - RNA, 19 nt, Homo sapiens
  misc_RNA (1)...(19): siRNA sense strand
aaaccaagaauguggcuuu

SEQ ID NO: 2526709 - RNA, 19 nt, Homo sapiens
  misc_RNA (1)...(19): siRNA sense strand
uagaagagucaaaggaagu

SEQ ID NO: 2526710 - RNA, 19 nt, Homo sapiens
  misc_RNA (1)...(19): siRNA sense strand
ggaaguaauaaaguggaaa

SEQ ID NO: 2526711 - RNA, 19 nt, Homo sapiens
  misc_RNA (1)...(19): siRNA sense strand
ucuaaugcgugaaaagaaa

SEQ ID NO: 2526712 - RNA, 19 nt, Homo sapiens
  misc_RNA (1)...(19): siRNA sense strand
uggaauacaccaaagucaa

SEQ ID NO: 2526713 - RNA, 19 nt, Homo sapiens
  misc_RNA (1)...(19): siRNA sense strand
ccuuuaagcccugaggaaa

SEQ ID NO: 2526714 - RNA, 19 nt, Homo sapiens
  misc_RNA (1)...(19): siRNA sense strand
aagaauugcuuaagaccca

SEQ ID NO: 2526715 - RNA, 19 nt, Homo sapiens
  misc_RNA (1)...(19): siRNA sense strand
cagaaaagucacucuaaua

SEQ ID NO: 2526716 - RNA, 19 nt, Homo sapiens
  misc_RNA (1)...(19): siRNA sense strand
cagaguaucucaagggacu

SEQ ID NO: 2526717 - RNA, 19 nt, Homo sapiens
  misc_RNA (1)...(19): siRNA sense strand
cagaauaacucaaaggugg

SEQ ID NO: 2526718 - RNA, 19 nt, Homo sapiens
  misc_RNA (1)...(19): siRNA sense strand
aagaggagccccagaguau

SEQ ID NO: 2526719 - RNA, 19 nt, Homo sapiens
  misc_RNA (1)...(19): siRNA sense strand
cugaggagccagagggcaa

SEQ ID NO: 2526720 - RNA, 19 nt, Homo sapiens
  misc_RNA (1)...(19): siRNA sense strand
agacaaagcugggaggcaa

SEQ ID NO: 2526721 - RNA, 19 nt, Homo sapiens
  misc_RNA (1)...(19): siRNA sense strand
ccuaaagaacccaaggcua

SEQ ID NO: 2526722 - RNA, 19 nt, Homo sapiens
  misc_RNA (1)...(19): siRNA sense strand
caagaaaagaagagaugaa

SEQ ID NO: 2526723 - RNA, 19 nt, Homo sapiens
  misc_RNA (1)...(19): siRNA sense strand
aggcagggcaggauggcaa

SEQ ID NO: 2526724 - RNA, 19 nt, Homo sapiens
  misc_RNA (1)...(19): siRNA sense strand
ggaugaggaccgugggagu

SEQ ID NO: 2526725 - RNA, 19 nt, Homo sapiens
  misc_RNA (1)...(19): siRNA sense strand
ggggaaaccacaggagaaa

SEQ ID NO: 2526726 - RNA, 19 nt, Homo sapiens
  misc_RNA (1)...(19): siRNA sense strand
cagcaggauggguagggaa

SEQ ID NO: 2526727 - RNA, 19 nt, Homo sapiens
  misc_RNA (1)...(19): siRNA sense strand
cuuaacuaccggaagacaa

SEQ ID NO: 2526728 - RNA, 19 nt, Homo sapiens
  misc_RNA (1)...(19): siRNA sense strand
cuaaagaacccaaggcuag

SEQ ID NO: 2526729 - RNA, 19 nt, Homo sapiens
  misc_RNA (1)...(19): siRNA sense strand
gcucacaugccaauggaga

SEQ ID NO: 2526730 - RNA, 19 nt, Homo sapiens
  misc_RNA (1)...(19): siRNA sense strand
aggaagaagcugcggaccu

SEQ ID NO: 2526731 - RNA, 19 nt, Homo sapiens
  misc_RNA (1)...(19): siRNA sense strand
acagagaaauagcagacga

SEQ ID NO: 2526732 - RNA, 19 nt, Homo sapiens
  misc_RNA (1)...(19): siRNA sense strand
ccacugagcuggaagagag

SEQ ID NO: 2526733 - RNA, 19 nt, Homo sapiens
  misc_RNA (1)...(19): siRNA sense strand
cagacaggguuccagguga

SEQ ID NO: 2526734 - RNA, 19 nt, Homo sapiens
  misc_RNA (1)...(19): siRNA sense strand
aagagaagauguacggcaa

SEQ ID NO: 2526735 - RNA, 19 nt, Homo sapiens
  misc_RNA (1)...(19): siRNA sense strand
gggaacacggacugggcaa

SEQ ID NO: 2526736 - RNA, 19 nt, Homo sapiens
  misc_RNA (1)...(19): siRNA sense strand
agaucaaagagaagaugua

SEQ ID NO: 2526737 - RNA, 19 nt, Homo sapiens
  misc_RNA (1)...(19): siRNA sense strand
cuuugaggaaguugggaua

SEQ ID NO: 2526738 - RNA, 19 nt, Homo sapiens
  misc_RNA (1)...(19): siRNA sense strand
cagaaguacuguaaggagu

SEQ ID NO: 2526739 - RNA, 19 nt, Homo sapiens
  misc_RNA (1)...(19): siRNA sense strand
aagaggaagaggauggcua

SEQ ID NO: 2526740 - RNA, 19 nt, Homo sapiens
  misc_RNA (1)...(19): siRNA sense strand
gaugaagauuacaacguca

SEQ ID NO: 2526741 - RNA, 19 nt, Homo sapiens
  misc_RNA (1)...(19): siRNA sense strand
aggcaagaucaaagagaag

SEQ ID NO: 2526742 - RNA, 19 nt, Homo sapiens
  misc_RNA (1)...(19): siRNA sense strand
acggcaagcagaagaucua

SEQ ID NO: 2526743 - RNA, 19 nt, Homo sapiens
  misc_RNA (1)...(19): siRNA sense strand
aggaguggaggaagaggaa

SEQ ID NO: 2526744 - RNA, 19 nt, Homo sapiens
  misc_RNA (1)...(19): siRNA sense strand
cgcaacaaggcaagaucaa

SEQ ID NO: 2526745 - RNA, 19 nt, Homo sapiens
  misc_RNA (1)...(19): siRNA sense strand
cagaagagaaagagcaggu

SEQ ID NO: 2526746 - RNA, 19 nt, Homo sapiens
  misc_RNA (1)...(19): siRNA sense strand
aaggauaccccaagagcaa

SEQ ID NO: 2526747 - RNA, 19 nt, Homo sapiens
  misc_RNA (1)...(19): siRNA sense strand
agauguacggcaagcagaa

SEQ ID NO: 2526748 - RNA, 19 nt, Homo sapiens
  misc_RNA (1)...(19): siRNA sense strand
ugugacuccagaagagaaa

SEQ ID NO: 2526749 - RNA, 19 nt, Homo sapiens
  misc_RNA (1)...(19): siRNA sense strand
agagagaggcagaaguacu

SEQ ID NO: 2526750 - RNA, 19 nt, Homo sapiens
  misc_RNA (1)...(19): siRNA sense strand
caggaguuaaagaaggaau

SEQ ID NO: 2526751 - RNA, 19 nt, Homo sapiens
  misc_RNA (1)...(19): siRNA sense strand
acauuaaagcagcuaccaa

SEQ ID NO: 2526752 - RNA, 19 nt, Homo sapiens
  misc_RNA (1)...(19): siRNA sense strand
cuggcuacagagagagauu

SEQ ID NO: 2526753 - RNA, 19 nt, Homo sapiens
  misc_RNA (1)...(19): siRNA sense strand
aggaagaggaagaggaugg

SEQ ID NO: 2526754 - RNA, 19 nt, Homo sapiens
  misc_RNA (1)...(19): siRNA sense strand
gaggauggcuacagagcug

SEQ ID NO: 2526755 - RNA, 19 nt, Homo sapiens
  misc_RNA (1)...(19): siRNA sense strand
aagagaagauguacggcaa

SEQ ID NO: 2526756 - RNA, 19 nt, Homo sapiens
  misc_RNA (1)...(19): siRNA sense strand
gggaacacggacugggcaa

SEQ ID NO: 2526757 - RNA, 19 nt, Homo sapiens
  misc_RNA (1)...(19): siRNA sense strand
agaucaaagagaagaugua

SEQ ID NO: 2526758 - RNA, 19 nt, Homo sapiens
  misc_RNA (1)...(19): siRNA sense strand
cuuugaggaaguugggaua

SEQ ID NO: 2526759 - RNA, 19 nt, Homo sapiens
  misc_RNA (1)...(19): siRNA sense strand
cagaaguacuguaaggagu

SEQ ID NO: 2526760 - RNA, 19 nt, Homo sapiens
  misc_RNA (1)...(19): siRNA sense strand
aagaggaagaggauggcua

SEQ ID NO: 2526761 - RNA, 19 nt, Homo sapiens
  misc_RNA (1)...(19): siRNA sense strand
gaugaagauuacaacguca

SEQ ID NO: 2526762 - RNA, 19 nt, Homo sapiens
  misc_RNA (1)...(19): siRNA sense strand
aggcaagaucaaagagaag

SEQ ID NO: 2526763 - RNA, 19 nt, Homo sapiens
  misc_RNA (1)...(19): siRNA sense strand
acggcaagcagaagaucua

SEQ ID NO: 2526764 - RNA, 19 nt, Homo sapiens
  misc_RNA (1)...(19): siRNA sense strand
aggaguggaggaagaggaa

SEQ ID NO: 2526765 - RNA, 19 nt, Homo sapiens
  misc_RNA (1)...(19): siRNA sense strand
cgcaacaaggcaagaucaa

SEQ ID NO: 2526766 - RNA, 19 nt, Homo sapiens
  misc_RNA (1)...(19): siRNA sense strand
cagaagagaaagagcaggu

SEQ ID NO: 2526767 - RNA, 19 nt, Homo sapiens
  misc_RNA (1)...(19): siRNA sense strand
aaggauaccccaagagcaa

SEQ ID NO: 2526768 - RNA, 19 nt, Homo sapiens
  misc_RNA (1)...(19): siRNA sense strand
agauguacggcaagcagaa

SEQ ID NO: 2526769 - RNA, 19 nt, Homo sapiens
  misc_RNA (1)...(19): siRNA sense strand
ugugacuccagaagagaaa

SEQ ID NO: 2526770 - RNA, 19 nt, Homo sapiens
  misc_RNA (1)...(19): siRNA sense strand
agagagaggcagaaguacu

SEQ ID NO: 2526771 - RNA, 19 nt, Homo sapiens
  misc_RNA (1)...(19): siRNA sense strand
caggaguuaaagaaggaau

SEQ ID NO: 2526772 - RNA, 19 nt, Homo sapiens
  misc_RNA (1)...(19): siRNA sense strand
acauuaaagcagcuaccaa

SEQ ID NO: 2526773 - RNA, 19 nt, Homo sapiens
  misc_RNA (1)...(19): siRNA sense strand
cuggcuacagagagagauu

SEQ ID NO: 2526774 - RNA, 19 nt, Homo sapiens
  misc_RNA (1)...(19): siRNA sense strand
aggaagaggaagaggaugg

SEQ ID NO: 2526775 - RNA, 19 nt, Homo sapiens
  misc_RNA (1)...(19): siRNA sense strand
gaggauggcuacagagcug

SEQ ID NO: 2526776 - RNA, 19 nt, Homo sapiens
  misc_RNA (1)...(19): siRNA sense strand
ccugaaauuaagagaacua

SEQ ID NO: 2526777 - RNA, 19 nt, Homo sapiens
  misc_RNA (1)...(19): siRNA sense strand
ucgaagaucuguugggaga

SEQ ID NO: 2526778 - RNA, 19 nt, Homo sapiens
  misc_RNA (1)...(19): siRNA sense strand
ccuuauuguuacuggaaau

SEQ ID NO: 2526779 - RNA, 19 nt, Homo sapiens
  misc_RNA (1)...(19): siRNA sense strand
aaauacaggaagugguaaa

SEQ ID NO: 2526780 - RNA, 19 nt, Homo sapiens
  misc_RNA (1)...(19): siRNA sense strand
ccaccuaaugagagacuua

SEQ ID NO: 2526781 - RNA, 19 nt, Homo sapiens
  misc_RNA (1)...(19): siRNA sense strand
ugauauaccuggaaggcuu

SEQ ID NO: 2526782 - RNA, 19 nt, Homo sapiens
  misc_RNA (1)...(19): siRNA sense strand
acgaaaggaaacaggcuaa

SEQ ID NO: 2526783 - RNA, 19 nt, Homo sapiens
  misc_RNA (1)...(19): siRNA sense strand
cgccgauagagaagagaaa

SEQ ID NO: 2526784 - RNA, 19 nt, Homo sapiens
  misc_RNA (1)...(19): siRNA sense strand
uuucaaagagcgaggcauu

SEQ ID NO: 2526785 - RNA, 19 nt, Homo sapiens
  misc_RNA (1)...(19): siRNA sense strand
agagaguagcugaagaaau

SEQ ID NO: 2526786 - RNA, 19 nt, Homo sapiens
  misc_RNA (1)...(19): siRNA sense strand
ugaaacauauucugggaga

SEQ ID NO: 2526787 - RNA, 19 nt, Homo sapiens
  misc_RNA (1)...(19): siRNA sense strand
uguuaauauugccguguua

SEQ ID NO: 2526788 - RNA, 19 nt, Homo sapiens
  misc_RNA (1)...(19): siRNA sense strand
agauggacaaauaaggaaa

SEQ ID NO: 2526789 - RNA, 19 nt, Homo sapiens
  misc_RNA (1)...(19): siRNA sense strand
cuuaaagugccuugccaua

SEQ ID NO: 2526790 - RNA, 19 nt, Homo sapiens
  misc_RNA (1)...(19): siRNA sense strand
gguccacgagacagagaaa

SEQ ID NO: 2526791 - RNA, 19 nt, Homo sapiens
  misc_RNA (1)...(19): siRNA sense strand
agaagaugcaagaaggaga

SEQ ID NO: 2526792 - RNA, 19 nt, Homo sapiens
  misc_RNA (1)...(19): siRNA sense strand
uguuauggaucaaugacaa

SEQ ID NO: 2526793 - RNA, 19 nt, Homo sapiens
  misc_RNA (1)...(19): siRNA sense strand
uuauccagucagagagaaa

SEQ ID NO: 2526794 - RNA, 19 nt, Homo sapiens
  misc_RNA (1)...(19): siRNA sense strand
cauuagaccuguugaucca

SEQ ID NO: 2526795 - RNA, 19 nt, Homo sapiens
  misc_RNA (1)...(19): siRNA sense strand
agcucaacuucgagaacua

SEQ ID NO: 2526796 - RNA, 19 nt, Homo sapiens
  misc_RNA (1)...(19): siRNA sense strand
caggaagcuuaaacagcaa

SEQ ID NO: 2526797 - RNA, 19 nt, Homo sapiens
  misc_RNA (1)...(19): siRNA sense strand
caauguugucuguggaaaa

SEQ ID NO: 2526798 - RNA, 19 nt, Homo sapiens
  misc_RNA (1)...(19): siRNA sense strand
cuuaaacagcaaagugauu

SEQ ID NO: 2526799 - RNA, 19 nt, Homo sapiens
  misc_RNA (1)...(19): siRNA sense strand
guggaagucaccauggaua

SEQ ID NO: 2526800 - RNA, 19 nt, Homo sapiens
  misc_RNA (1)...(19): siRNA sense strand
ccaugugaucccugaaauu

SEQ ID NO: 2526801 - RNA, 19 nt, Homo sapiens
  misc_RNA (1)...(19): siRNA sense strand
ugaaugaaauggcuggaga

SEQ ID NO: 2526802 - RNA, 19 nt, Homo sapiens
  misc_RNA (1)...(19): siRNA sense strand
gauugcaguucuaaggaga

SEQ ID NO: 2526803 - RNA, 19 nt, Homo sapiens
  misc_RNA (1)...(19): siRNA sense strand
aggaagcagaacagagaca

SEQ ID NO: 2526804 - RNA, 19 nt, Homo sapiens
  misc_RNA (1)...(19): siRNA sense strand
ccagauuaggguuggacau

SEQ ID NO: 2526805 - RNA, 19 nt, Homo sapiens
  misc_RNA (1)...(19): siRNA sense strand
acaugaaguacuacgaaga

SEQ ID NO: 2526806 - RNA, 19 nt, Homo sapiens
  misc_RNA (1)...(19): siRNA sense strand
aguucuaaggagacagcaa

SEQ ID NO: 2526807 - RNA, 19 nt, Homo sapiens
  misc_RNA (1)...(19): siRNA sense strand
auauaugacugauggaugu

SEQ ID NO: 2526808 - RNA, 19 nt, Homo sapiens
  misc_RNA (1)...(19): siRNA sense strand
agaagcuauuucaggagaa

SEQ ID NO: 2526809 - RNA, 19 nt, Homo sapiens
  misc_RNA (1)...(19): siRNA sense strand
ccaaagucuacgcaagaau

SEQ ID NO: 2526810 - RNA, 19 nt, Homo sapiens
  misc_RNA (1)...(19): siRNA sense strand
gcacaugauuugagcagug

SEQ ID NO: 2526811 - RNA, 19 nt, Homo sapiens
  misc_RNA (1)...(19): siRNA sense strand
acgugaagugagagaagau

SEQ ID NO: 2526812 - RNA, 19 nt, Homo sapiens
  misc_RNA (1)...(19): siRNA sense strand
uggaagucaccauggauau

SEQ ID NO: 2526813 - RNA, 19 nt, Homo sapiens
  misc_RNA (1)...(19): siRNA sense strand
cugcaacgucuuugacaau

SEQ ID NO: 2526814 - RNA, 19 nt, Homo sapiens
  misc_RNA (1)...(19): siRNA sense strand
ccagcuucauggugccaaa

SEQ ID NO: 2526815 - RNA, 19 nt, Homo sapiens
  misc_RNA (1)...(19): siRNA sense strand
aggauggaauaucgaaaga

SEQ ID NO: 2526816 - RNA, 19 nt, Homo sapiens
  misc_RNA (1)...(19): siRNA sense strand
guuaugaauggguaagaga

SEQ ID NO: 2526817 - RNA, 19 nt, Homo sapiens
  misc_RNA (1)...(19): siRNA sense strand
gagauggacaaauaaggaa

SEQ ID NO: 2526818 - RNA, 19 nt, Homo sapiens
  misc_RNA (1)...(19): siRNA sense strand
gcaaagaagaaaugaugac

SEQ ID NO: 2526819 - RNA, 19 nt, Homo sapiens
  misc_RNA (1)...(19): siRNA sense strand
cagcaaagugauuucccaa

SEQ ID NO: 2526820 - RNA, 19 nt, Homo sapiens
  misc_RNA (1)...(19): siRNA sense strand
gcaagaauuguaugcccaa

SEQ ID NO: 2526821 - RNA, 19 nt, Homo sapiens
  misc_RNA (1)...(19): siRNA sense strand
agugagagaagaugcaaga

SEQ ID NO: 2526822 - RNA, 19 nt, Homo sapiens
  misc_RNA (1)...(19): siRNA sense strand
agugacacacgaaaggaaa

SEQ ID NO: 2526823 - RNA, 19 nt, Homo sapiens
  misc_RNA (1)...(19): siRNA sense strand
ucuauaugaagcaggguuu

SEQ ID NO: 2526824 - RNA, 19 nt, Homo sapiens
  misc_RNA (1)...(19): siRNA sense strand
caacuauggaauuagccaa

SEQ ID NO: 2526825 - RNA, 19 nt, Homo sapiens
  misc_RNA (1)...(19): siRNA sense strand
auucaagcugugagggaca

SEQ ID NO: 2526826 - RNA, 19 nt, Homo sapiens
  misc_RNA (1)...(19): siRNA sense strand
acacgaugucauaagguuu

SEQ ID NO: 2526827 - RNA, 19 nt, Homo sapiens
  misc_RNA (1)...(19): siRNA sense strand
gagagaaagcagcagagga

SEQ ID NO: 2526828 - RNA, 19 nt, Homo sapiens
  misc_RNA (1)...(19): siRNA sense strand
agagaaagcagcagaggac

SEQ ID NO: 2526829 - RNA, 19 nt, Homo sapiens
  misc_RNA (1)...(19): siRNA sense strand
ugguaugauugguguaacu

SEQ ID NO: 2526830 - RNA, 19 nt, Homo sapiens
  misc_RNA (1)...(19): siRNA sense strand
aggagacagcaaucaaaua

SEQ ID NO: 2526831 - RNA, 19 nt, Homo sapiens
  misc_RNA (1)...(19): siRNA sense strand
ggcccgacgugaagugaga

SEQ ID NO: 2526832 - RNA, 19 nt, Homo sapiens
  misc_RNA (1)...(19): siRNA sense strand
cagcuaaaggauggaauau

SEQ ID NO: 2526833 - RNA, 19 nt, Homo sapiens
  misc_RNA (1)...(19): siRNA sense strand
aaaggauggaauaucgaaa

SEQ ID NO: 2526834 - RNA, 19 nt, Homo sapiens
  misc_RNA (1)...(19): siRNA sense strand
cagugacacacgaaaggaa

SEQ ID NO: 2526835 - RNA, 19 nt, Homo sapiens
  misc_RNA (1)...(19): siRNA sense strand
ucgagaauuggcagcuaaa

SEQ ID NO: 2526836 - RNA, 19 nt, Homo sapiens
  misc_RNA (1)...(19): siRNA sense strand
ggauuuaaugacuuugcaa

SEQ ID NO: 2526837 - RNA, 19 nt, Homo sapiens
  misc_RNA (1)...(19): siRNA sense strand
ccaccaaagucuacgcaag

SEQ ID NO: 2526838 - RNA, 19 nt, Homo sapiens
  misc_RNA (1)...(19): siRNA sense strand
gugaaugagaagaagaaaa

SEQ ID NO: 2526839 - RNA, 19 nt, Homo sapiens
  misc_RNA (1)...(19): siRNA sense strand
caaccaaaucagagaaaau

SEQ ID NO: 2526840 - RNA, 19 nt, Homo sapiens
  misc_RNA (1)...(19): siRNA sense strand
acggaaggccauuggaaau

SEQ ID NO: 2526841 - RNA, 19 nt, Homo sapiens
  misc_RNA (1)...(19): siRNA sense strand
ugguauuggaggaggauca

SEQ ID NO: 2526842 - RNA, 19 nt, Homo sapiens
  misc_RNA (1)...(19): siRNA sense strand
cugugaaugagaagaagaa

SEQ ID NO: 2526843 - RNA, 19 nt, Homo sapiens
  misc_RNA (1)...(19): siRNA sense strand
agaaaaucaaugugggaau

SEQ ID NO: 2526844 - RNA, 19 nt, Homo sapiens
  misc_RNA (1)...(19): siRNA sense strand
gggaagaacuccagcucac

SEQ ID NO: 2526845 - RNA, 19 nt, Homo sapiens
  misc_RNA (1)...(19): siRNA sense strand
uaucaauaucccaguggaa

SEQ ID NO: 2526846 - RNA, 19 nt, Homo sapiens
  misc_RNA (1)...(19): siRNA sense strand
ucccaagacuccagagcau

SEQ ID NO: 2526847 - RNA, 19 nt, Homo sapiens
  misc_RNA (1)...(19): siRNA sense strand
aagggaaauugaagcuaau

SEQ ID NO: 2526848 - RNA, 19 nt, Homo sapiens
  misc_RNA (1)...(19): siRNA sense strand
gggcaauuauagaaaacau

SEQ ID NO: 2526849 - RNA, 19 nt, Homo sapiens
  misc_RNA (1)...(19): siRNA sense strand
uggaucagcacgagcggaa

SEQ ID NO: 2526850 - RNA, 19 nt, Homo sapiens
  misc_RNA (1)...(19): siRNA sense strand
ccuucaagcuaaacaacca

SEQ ID NO: 2526851 - RNA, 19 nt, Homo sapiens
  misc_RNA (1)...(19): siRNA sense strand
ggaaccacaucgcagggua

SEQ ID NO: 2526852 - RNA, 19 nt, Homo sapiens
  misc_RNA (1)...(19): siRNA sense strand
gugugguauuggaggagga

SEQ ID NO: 2526853 - RNA, 19 nt, Homo sapiens
  misc_RNA (1)...(19): siRNA sense strand
augaaagaguaccacggaa

SEQ ID NO: 2526854 - RNA, 19 nt, Homo sapiens
  misc_RNA (1)...(19): siRNA sense strand
ggagaugaguccuugguuc

SEQ ID NO: 2526855 - RNA, 19 nt, Homo sapiens
  misc_RNA (1)...(19): siRNA sense strand
gacuacagacauuggaaca

SEQ ID NO: 2526856 - RNA, 19 nt, Homo sapiens
  misc_RNA (1)...(19): siRNA sense strand
ccgagacauugaagaggca

SEQ ID NO: 2526857 - RNA, 19 nt, Homo sapiens
  misc_RNA (1)...(19): siRNA sense strand
ugggaauuggggagauaaa

SEQ ID NO: 2526858 - RNA, 19 nt, Homo sapiens
  misc_RNA (1)...(19): siRNA sense strand
agcuuuaauuggacagaaa

SEQ ID NO: 2526859 - RNA, 19 nt, Homo sapiens
  misc_RNA (1)...(19): siRNA sense strand
uggccuuaguccugggaau

SEQ ID NO: 2526860 - RNA, 19 nt, Homo sapiens
  misc_RNA (1)...(19): siRNA sense strand
cauucgaacuguaggccuu

SEQ ID NO: 2526861 - RNA, 19 nt, Homo sapiens
  misc_RNA (1)...(19): siRNA sense strand
ggacagaaauuugcagcca

SEQ ID NO: 2526862 - RNA, 19 nt, Homo sapiens
  misc_RNA (1)...(19): siRNA sense strand
ugcacaugauggagggaca

SEQ ID NO: 2526863 - RNA, 19 nt, Homo sapiens
  misc_RNA (1)...(19): siRNA sense strand
uggcaacuguggauggaca

SEQ ID NO: 2526864 - RNA, 19 nt, Homo sapiens
  misc_RNA (1)...(19): siRNA sense strand
uggaggaguuucagccaga

SEQ ID NO: 2526865 - RNA, 19 nt, Homo sapiens
  misc_RNA (1)...(19): siRNA sense strand
ugauggagggacaaagcaa

SEQ ID NO: 2526866 - RNA, 19 nt, Homo sapiens
  misc_RNA (1)...(19): siRNA sense strand
gacagaaauuugcagccaa

SEQ ID NO: 2526867 - RNA, 19 nt, Homo sapiens
  misc_RNA (1)...(19): siRNA sense strand
cauugcaggaaguggauga

SEQ ID NO: 2526868 - RNA, 19 nt, Homo sapiens
  misc_RNA (1)...(19): siRNA sense strand
ggaaugaucuggaagaagc

SEQ ID NO: 2526869 - RNA, 19 nt, Homo sapiens
  misc_RNA (1)...(19): siRNA sense strand
acucagauuuaaagguucu

SEQ ID NO: 2526870 - RNA, 19 nt, Homo sapiens
  misc_RNA (1)...(19): siRNA sense strand
ccaccucauuuuagaguau

SEQ ID NO: 2526871 - RNA, 19 nt, Homo sapiens
  misc_RNA (1)...(19): siRNA sense strand
gcuccauacacauaagcaa

SEQ ID NO: 2526872 - RNA, 19 nt, Homo sapiens
  misc_RNA (1)...(19): siRNA sense strand
aggugggacuggugggcuu

SEQ ID NO: 2526873 - RNA, 19 nt, Homo sapiens
  misc_RNA (1)...(19): siRNA sense strand
ggugaauugccuuuagaca

SEQ ID NO: 2526874 - RNA, 19 nt, Homo sapiens
  misc_RNA (1)...(19): siRNA sense strand
cuggaagcuucucggaaca

SEQ ID NO: 2526875 - RNA, 19 nt, Homo sapiens
  misc_RNA (1)...(19): siRNA sense strand
ucaagaaucugcauggcga

SEQ ID NO: 2526876 - RNA, 19 nt, Homo sapiens
  misc_RNA (1)...(19): siRNA sense strand
gagcaaaaccccagcguug

SEQ ID NO: 2526877 - RNA, 19 nt, Homo sapiens
  misc_RNA (1)...(19): siRNA sense strand
ugaaauugcuaguggccaa

SEQ ID NO: 2526878 - RNA, 19 nt, Homo sapiens
  misc_RNA (1)...(19): siRNA sense strand
gggagaaaguggugagccu

SEQ ID NO: 2526879 - RNA, 19 nt, Homo sapiens
  misc_RNA (1)...(19): siRNA sense strand
cgugaagaucaucgagaca

SEQ ID NO: 2526880 - RNA, 19 nt, Homo sapiens
  misc_RNA (1)...(19): siRNA sense strand
cugcaacaccuuuggagga

SEQ ID NO: 2526881 - RNA, 19 nt, Homo sapiens
  misc_RNA (1)...(19): siRNA sense strand
aagaaacagcagugggaaa

SEQ ID NO: 2526882 - RNA, 19 nt, Homo sapiens
  misc_RNA (1)...(19): siRNA sense strand
auguaugacagaaggguaa

SEQ ID NO: 2526883 - RNA, 19 nt, Homo sapiens
  misc_RNA (1)...(19): siRNA sense strand
cccaaauacuagaaggaga

SEQ ID NO: 2526884 - RNA, 19 nt, Homo sapiens
  misc_RNA (1)...(19): siRNA sense strand
aaauaaugcacaagcacaa

SEQ ID NO: 2526885 - RNA, 19 nt, Homo sapiens
  misc_RNA (1)...(19): siRNA sense strand
agggcaagaugaagaaaca

SEQ ID NO: 2526886 - RNA, 19 nt, Homo sapiens
  misc_RNA (1)...(19): siRNA sense strand
aguuuauggaagagagaga

SEQ ID NO: 2526887 - RNA, 19 nt, Homo sapiens
  misc_RNA (1)...(19): siRNA sense strand
aagaaacagcaaugaggaa

SEQ ID NO: 2526888 - RNA, 19 nt, Homo sapiens
  misc_RNA (1)...(19): siRNA sense strand
aaguaauggaagaagaaga

SEQ ID NO: 2526889 - RNA, 19 nt, Homo sapiens
  misc_RNA (1)...(19): siRNA sense strand
gaauauagcauggugggaa

SEQ ID NO: 2526890 - RNA, 19 nt, Homo sapiens
  misc_RNA (1)...(19): siRNA sense strand
gaaaggaaguuuauggaag

SEQ ID NO: 2526891 - RNA, 19 nt, Homo sapiens
  misc_RNA (1)...(19): siRNA sense strand
guaagaaacagcaguggga

SEQ ID NO: 2526892 - RNA, 19 nt, Homo sapiens
  misc_RNA (1)...(19): siRNA sense strand
gaaauaaugcacaagcaca

SEQ ID NO: 2526893 - RNA, 19 nt, Homo sapiens
  misc_RNA (1)...(19): siRNA sense strand
aaaagaacggcguaagaaa

SEQ ID NO: 2526894 - RNA, 19 nt, Homo sapiens
  misc_RNA (1)...(19): siRNA sense strand
ccuacaaagaacaacauau

SEQ ID NO: 2526895 - RNA, 19 nt, Homo sapiens
  misc_RNA (1)...(19): siRNA sense strand
guugauauggaaugccaaa

SEQ ID NO: 2526896 - RNA, 19 nt, Homo sapiens
  misc_RNA (1)...(19): siRNA sense strand
agugggaaauaaugcacaa

SEQ ID NO: 2526897 - RNA, 19 nt, Homo sapiens
  misc_RNA (1)...(19): siRNA sense strand
aaguuaaaccaguguuaga

SEQ ID NO: 2526898 - RNA, 19 nt, Homo sapiens
  misc_RNA (1)...(19): siRNA sense strand
agaaacagcagugggaaau

SEQ ID NO: 2526899 - RNA, 19 nt, Homo sapiens
  misc_RNA (1)...(19): siRNA sense strand
acucuuuauuccugccaaa

SEQ ID NO: 2526900 - RNA, 19 nt, Homo sapiens
  misc_RNA (1)...(19): siRNA sense strand
ccucugaauuccuggagca

SEQ ID NO: 2526901 - RNA, 19 nt, Homo sapiens
  misc_RNA (1)...(19): siRNA sense strand
gcaaagauguggccaccca

SEQ ID NO: 2526902 - RNA, 19 nt, Homo sapiens
  misc_RNA (1)...(19): siRNA sense strand
caagaugaagaaacagcaa

SEQ ID NO: 2526903 - RNA, 19 nt, Homo sapiens
  misc_RNA (1)...(19): siRNA sense strand
ggacagaccaccaacacca

SEQ ID NO: 2526904 - RNA, 19 nt, Homo sapiens
  misc_RNA (1)...(19): siRNA sense strand
cagaauuauaccuugaaga

SEQ ID NO: 2526905 - RNA, 19 nt, Homo sapiens
  misc_RNA (1)...(19): siRNA sense strand
gaagaagaagagcuggcua

SEQ ID NO: 2526906 - RNA, 19 nt, Homo sapiens
  misc_RNA (1)...(19): siRNA sense strand
uguggaaggcagaaagcau

SEQ ID NO: 2526907 - RNA, 19 nt, Homo sapiens
  misc_RNA (1)...(19): siRNA sense strand
ggccagucagcgugaguau

SEQ ID NO: 2526908 - RNA, 19 nt, Homo sapiens
  misc_RNA (1)...(19): siRNA sense strand
ccucagggauaguggcuac

SEQ ID NO: 2526909 - RNA, 19 nt, Homo sapiens
  misc_RNA (1)...(19): siRNA sense strand
uagaaguuuugguggggaa

SEQ ID NO: 2526910 - RNA, 19 nt, Homo sapiens
  misc_RNA (1)...(19): siRNA sense strand
ccaaauacuagaaggagag

SEQ ID NO: 2526911 - RNA, 19 nt, Homo sapiens
  misc_RNA (1)...(19): siRNA sense strand
aggauuucuuccauggcua

SEQ ID NO: 2526912 - RNA, 19 nt, Homo sapiens
  misc_RNA (1)...(19): siRNA sense strand
ccuuaggggaggaagaauu

SEQ ID NO: 2526913 - RNA, 19 nt, Homo sapiens
  misc_RNA (1)...(19): siRNA sense strand
aaccuaugcauuauggaaa

SEQ ID NO: 2526914 - RNA, 19 nt, Homo sapiens
  misc_RNA (1)...(19): siRNA sense strand
ucccauugaaagagauauu

SEQ ID NO: 2526915 - RNA, 19 nt, Homo sapiens
  misc_RNA (1)...(19): siRNA sense strand
uagcauggugggaagaaca

SEQ ID NO: 2526916 - RNA, 19 nt, Homo sapiens
  misc_RNA (1)...(19): siRNA sense strand
gauggaggcuaccuacaaa

SEQ ID NO: 2526917 - RNA, 19 nt, Homo sapiens
  misc_RNA (1)...(19): siRNA sense strand
aagaacggcguaagaaaca

SEQ ID NO: 2526918 - RNA, 19 nt, Homo sapiens
  misc_RNA (1)...(19): siRNA sense strand
ggugggaagaacagugcuu

SEQ ID NO: 2526919 - RNA, 19 nt, Homo sapiens
  misc_RNA (1)...(19): siRNA sense strand
acgacagcccggacgcaaa

SEQ ID NO: 2526920 - RNA, 19 nt, Homo sapiens
  misc_RNA (1)...(19): siRNA sense strand
gauaagaauuacaaggcca

SEQ ID NO: 2526921 - RNA, 19 nt, Homo sapiens
  misc_RNA (1)...(19): siRNA sense strand
gauuugaggugcugggcau

SEQ ID NO: 2526922 - RNA, 19 nt, Homo sapiens
  misc_RNA (1)...(19): siRNA sense strand
cuacuauagaggagcucaa

SEQ ID NO: 2526923 - RNA, 19 nt, Homo sapiens
  misc_RNA (1)...(19): siRNA sense strand
caguaugcgcugauggaga

SEQ ID NO: 2526924 - RNA, 19 nt, Homo sapiens
  misc_RNA (1)...(19): siRNA sense strand
aguuugcagcuuugggaua

SEQ ID NO: 2526925 - RNA, 19 nt, Homo sapiens
  misc_RNA (1)...(19): siRNA sense strand
acuucgagauggaacgauu

SEQ ID NO: 2526926 - RNA, 19 nt, Homo sapiens
  misc_RNA (1)...(19): siRNA sense strand
cauuaauagguucugcaaa

SEQ ID NO: 2526927 - RNA, 19 nt, Homo sapiens
  misc_RNA (1)...(19): siRNA sense strand
cccaggagaugaaggcuga

SEQ ID NO: 2526928 - RNA, 19 nt, Homo sapiens
  misc_RNA (1)...(19): siRNA sense strand
ucaacagugaugacagcaa

SEQ ID NO: 2526929 - RNA, 19 nt, Homo sapiens
  misc_RNA (1)...(19): siRNA sense strand
gaaagaagacacaggguca

SEQ ID NO: 2526930 - RNA, 19 nt, Homo sapiens
  misc_RNA (1)...(19): siRNA sense strand
gacaggugauggagggaga

SEQ ID NO: 2526931 - RNA, 19 nt, Homo sapiens
  misc_RNA (1)...(19): siRNA sense strand
cuucagugagggagaguga

SEQ ID NO: 2526932 - RNA, 19 nt, Homo sapiens
  misc_RNA (1)...(19): siRNA sense strand
cguccaaagucuugaggag

SEQ ID NO: 2526933 - RNA, 19 nt, Homo sapiens
  misc_RNA (1)...(19): siRNA sense strand
agucaaagacccagcguuc

SEQ ID NO: 2526934 - RNA, 19 nt, Homo sapiens
  misc_RNA (1)...(19): siRNA sense strand
agauaaaugugcacagggu

SEQ ID NO: 2526935 - RNA, 19 nt, Homo sapiens
  misc_RNA (1)...(19): siRNA sense strand
acaaaggggcuguagguuu

SEQ ID NO: 2526936 - RNA, 19 nt, Homo sapiens
  misc_RNA (1)...(19): siRNA sense strand
cagauguggacuaugaaga

SEQ ID NO: 2526937 - RNA, 19 nt, Homo sapiens
  misc_RNA (1)...(19): siRNA sense strand
uccaaagucuugaggagca

SEQ ID NO: 2526938 - RNA, 19 nt, Homo sapiens
  misc_RNA (1)...(19): siRNA sense strand
cuaagaaaucacugccuca

SEQ ID NO: 2526939 - RNA, 19 nt, Homo sapiens
  misc_RNA (1)...(19): siRNA sense strand
cugcaguuuccauggucaa

SEQ ID NO: 2526940 - RNA, 19 nt, Homo sapiens
  misc_RNA (1)...(19): siRNA sense strand
cggccgagugugugcgaaa

SEQ ID NO: 2526941 - RNA, 19 nt, Homo sapiens
  misc_RNA (1)...(19): siRNA sense strand
ccaagaaggcgcuggaccu

SEQ ID NO: 2526942 - RNA, 19 nt, Homo sapiens
  misc_RNA (1)...(19): siRNA sense strand
ccgugguggaugcggacaa

SEQ ID NO: 2526943 - RNA, 19 nt, Homo sapiens
  misc_RNA (1)...(19): siRNA sense strand
agaagaaagucucaggcaa

SEQ ID NO: 2526944 - RNA, 19 nt, Homo sapiens
  misc_RNA (1)...(19): siRNA sense strand
uggcaauaaaugggaguaa

SEQ ID NO: 2526945 - RNA, 19 nt, Homo sapiens
  misc_RNA (1)...(19): siRNA sense strand
uggaggaugaagaggaauu

SEQ ID NO: 2526946 - RNA, 19 nt, Homo sapiens
  misc_RNA (1)...(19): siRNA sense strand
gauauaaauuacaggaccu

SEQ ID NO: 2526947 - RNA, 19 nt, Homo sapiens
  misc_RNA (1)...(19): siRNA sense strand
agggacauguagugaucaa

SEQ ID NO: 2526948 - RNA, 19 nt, Homo sapiens
  misc_RNA (1)...(19): siRNA sense strand
gaagaaagucucaggcaag

SEQ ID NO: 2526949 - RNA, 19 nt, Homo sapiens
  misc_RNA (1)...(19): siRNA sense strand
ugaucaagaauaugaccaa

SEQ ID NO: 2526950 - RNA, 19 nt, Homo sapiens
  misc_RNA (1)...(19): siRNA sense strand
caaauaggaccaauggaga

SEQ ID NO: 2526951 - RNA, 19 nt, Homo sapiens
  misc_RNA (1)...(19): siRNA sense strand
gucauugaguucaggaaaa

SEQ ID NO: 2526952 - RNA, 19 nt, Homo sapiens
  misc_RNA (1)...(19): siRNA sense strand
ugucauugaguucaggaaa

SEQ ID NO: 2526953 - RNA, 19 nt, Homo sapiens
  misc_RNA (1)...(19): siRNA sense strand
aaauaggaccaauggagau

SEQ ID NO: 2526954 - RNA, 19 nt, Homo sapiens
  misc_RNA (1)...(19): siRNA sense strand
augaagaggaauuugauca

SEQ ID NO: 2526955 - RNA, 19 nt, Homo sapiens
  misc_RNA (1)...(19): siRNA sense strand
gauaaugggucgcagugca

SEQ ID NO: 2526956 - RNA, 19 nt, Homo sapiens
  misc_RNA (1)...(19): siRNA sense strand
agauaagcuccgaagaagu

SEQ ID NO: 2526957 - RNA, 19 nt, Homo sapiens
  misc_RNA (1)...(19): siRNA sense strand
acauaguuccaguguguca

SEQ ID NO: 2526958 - RNA, 19 nt, Homo sapiens
  misc_RNA (1)...(19): siRNA sense strand
gcugcaacucugaggucaa

SEQ ID NO: 2526959 - RNA, 19 nt, Homo sapiens
  misc_RNA (1)...(19): siRNA sense strand
ggggagagcaucaagguga

SEQ ID NO: 2526960 - RNA, 19 nt, Homo sapiens
  misc_RNA (1)...(19): siRNA sense strand
aagcaugccaggagcacuu

SEQ ID NO: 2526961 - RNA, 19 nt, Homo sapiens
  misc_RNA (1)...(19): siRNA sense strand
gagaagcauuuccaggaca

SEQ ID NO: 2526962 - RNA, 19 nt, Homo sapiens
  misc_RNA (1)...(19): siRNA sense strand
gaauaagaacagugggaaa

SEQ ID NO: 2526963 - RNA, 19 nt, Homo sapiens
  misc_RNA (1)...(19): siRNA sense strand
gcagaucuauggagagaaa

SEQ ID NO: 2526964 - RNA, 19 nt, Homo sapiens
  misc_RNA (1)...(19): siRNA sense strand
cgacagaggaggaggagau

SEQ ID NO: 2526965 - RNA, 19 nt, Homo sapiens
  misc_RNA (1)...(19): siRNA sense strand
gcgauaaguuugagaggga

SEQ ID NO: 2526966 - RNA, 19 nt, Homo sapiens
  misc_RNA (1)...(19): siRNA sense strand
uggaagaagaggaggaaga

SEQ ID NO: 2526967 - RNA, 19 nt, Homo sapiens
  misc_RNA (1)...(19): siRNA sense strand
agaagaaggagaaggacaa

SEQ ID NO: 2526968 - RNA, 19 nt, Homo sapiens
  misc_RNA (1)...(19): siRNA sense strand
aggccaagcugcagaggaa

SEQ ID NO: 2526969 - RNA, 19 nt, Homo sapiens
  misc_RNA (1)...(19): siRNA sense strand
ggaagaagaaggagaagga

SEQ ID NO: 2526970 - RNA, 19 nt, Homo sapiens
  misc_RNA (1)...(19): siRNA sense strand
aguuagaagaugugggaga

SEQ ID NO: 2526971 - RNA, 19 nt, Homo sapiens
  misc_RNA (1)...(19): siRNA sense strand
gaucagacacgauggcaaa

SEQ ID NO: 2526972 - RNA, 19 nt, Homo sapiens
  misc_RNA (1)...(19): siRNA sense strand
acagagugcuggugagaga

SEQ ID NO: 2526973 - RNA, 19 nt, Homo sapiens
  misc_RNA (1)...(19): siRNA sense strand
gcaacuggcuggaugagaa

SEQ ID NO: 2526974 - RNA, 19 nt, Homo sapiens
  misc_RNA (1)...(19): siRNA sense strand
gggaauaagaacaguggga

SEQ ID NO: 2526975 - RNA, 19 nt, Homo sapiens
  misc_RNA (1)...(19): siRNA sense strand
cugcagaggaagaagaaga

SEQ ID NO: 2526976 - RNA, 19 nt, Homo sapiens
  misc_RNA (1)...(19): siRNA sense strand
aaugagauagugagggaaa

SEQ ID NO: 2526977 - RNA, 19 nt, Homo sapiens
  misc_RNA (1)...(19): siRNA sense strand
cucuacaacugcaggaaua

SEQ ID NO: 2526978 - RNA, 19 nt, Homo sapiens
  misc_RNA (1)...(19): siRNA sense strand
ggugguuggacaaggauaa

SEQ ID NO: 2526979 - RNA, 19 nt, Homo sapiens
  misc_RNA (1)...(19): siRNA sense strand
acaacaaccucaaagacua

SEQ ID NO: 2526980 - RNA, 19 nt, Homo sapiens
  misc_RNA (1)...(19): siRNA sense strand
aggaggagauggaagaaga

SEQ ID NO: 2526981 - RNA, 19 nt, Homo sapiens
  misc_RNA (1)...(19): siRNA sense strand
ugaacaaagacaaguacaa

SEQ ID NO: 2526982 - RNA, 19 nt, Homo sapiens
  misc_RNA (1)...(19): siRNA sense strand
ggaucagacacgauggcaa

SEQ ID NO: 2526983 - RNA, 19 nt, Homo sapiens
  misc_RNA (1)...(19): siRNA sense strand
gagagaaaggcaagacaga

SEQ ID NO: 2526984 - RNA, 19 nt, Homo sapiens
  misc_RNA (1)...(19): siRNA sense strand
gguuugagcgggagcagaa

SEQ ID NO: 2526985 - RNA, 19 nt, Homo sapiens
  misc_RNA (1)...(19): siRNA sense strand
acaaugagauagugaggga

SEQ ID NO: 2526986 - RNA, 19 nt, Homo sapiens
  misc_RNA (1)...(19): siRNA sense strand
ccaaugaggacgacaauga

SEQ ID NO: 2526987 - RNA, 19 nt, Homo sapiens
  misc_RNA (1)...(19): siRNA sense strand
aagaagaaggagaaggaca

SEQ ID NO: 2526988 - RNA, 19 nt, Homo sapiens
  misc_RNA (1)...(19): siRNA sense strand
gcggauggguugauugaga

SEQ ID NO: 2526989 - RNA, 19 nt, Homo sapiens
  misc_RNA (1)...(19): siRNA sense strand
uggacaaggauaaggauga

SEQ ID NO: 2526990 - RNA, 19 nt, Homo sapiens
  misc_RNA (1)...(19): siRNA sense strand
gagucuacaugcagaucua

SEQ ID NO: 2526991 - RNA, 19 nt, Homo sapiens
  misc_RNA (1)...(19): siRNA sense strand
cagaggaagaagaagaaga

SEQ ID NO: 2526992 - RNA, 19 nt, Homo sapiens
  misc_RNA (1)...(19): siRNA sense strand
ccaucuacggcgaggagua

SEQ ID NO: 2526993 - RNA, 19 nt, Homo sapiens
  misc_RNA (1)...(19): siRNA sense strand
cugagaaauacaugaaaga

SEQ ID NO: 2526994 - RNA, 19 nt, Homo sapiens
  misc_RNA (1)...(19): siRNA sense strand
ccagcgaggugguggagau

SEQ ID NO: 2526995 - RNA, 19 nt, Homo sapiens
  misc_RNA (1)...(19): siRNA sense strand
acaucuucacugagaaaua

SEQ ID NO: 2526996 - RNA, 19 nt, Homo sapiens
  misc_RNA (1)...(19): siRNA sense strand
gaagaaggaggaugggaga

SEQ ID NO: 2526997 - RNA, 19 nt, Homo sapiens
  misc_RNA (1)...(19): siRNA sense strand
gggcaaugcugacgaguuc

SEQ ID NO: 2526998 - RNA, 19 nt, Homo sapiens
  misc_RNA (1)...(19): siRNA sense strand
ccacuaugagguugagauu

SEQ ID NO: 2526999 - RNA, 19 nt, Homo sapiens
  misc_RNA (1)...(19): siRNA sense strand
ccgcuucaucguagaguua

SEQ ID NO: 2527000 - RNA, 19 nt, Homo sapiens
  misc_RNA (1)...(19): siRNA sense strand
cugaaguccuccaagacaa

SEQ ID NO: 2527001 - RNA, 19 nt, Homo sapiens
  misc_RNA (1)...(19): siRNA sense strand
agaagaaagcggauggguu

SEQ ID NO: 2527002 - RNA, 19 nt, Homo sapiens
  misc_RNA (1)...(19): siRNA sense strand
cagacaaguccaacaaauu

SEQ ID NO: 2527003 - RNA, 19 nt, Homo sapiens
  misc_RNA (1)...(19): siRNA sense strand
aggaagaagaagaagagga

SEQ ID NO: 2527004 - RNA, 19 nt, Homo sapiens
  misc_RNA (1)...(19): siRNA sense strand
aggaggaggagauggaaga

SEQ ID NO: 2527005 - RNA, 19 nt, Homo sapiens
  misc_RNA (1)...(19): siRNA sense strand
aggaggaagaggaggaguu

SEQ ID NO: 2527006 - RNA, 19 nt, Homo sapiens
  misc_RNA (1)...(19): siRNA sense strand
gauaaguuugagagggaca

SEQ ID NO: 2527007 - RNA, 19 nt, Homo sapiens
  misc_RNA (1)...(19): siRNA sense strand
ugaugaacacucugaacaa

SEQ ID NO: 2527008 - RNA, 19 nt, Homo sapiens
  misc_RNA (1)...(19): siRNA sense strand
ggauaaggaugaugggcag

SEQ ID NO: 2527009 - RNA, 19 nt, Homo sapiens
  misc_RNA (1)...(19): siRNA sense strand
gggauaaaucugacaccau

SEQ ID NO: 2527010 - RNA, 19 nt, Homo sapiens
  misc_RNA (1)...(19): siRNA sense strand
agaaauugguccacuauga

SEQ ID NO: 2527011 - RNA, 19 nt, Homo sapiens
  misc_RNA (1)...(19): siRNA sense strand
gaggaagggcagcgacgaa

SEQ ID NO: 2527012 - RNA, 19 nt, Homo sapiens
  misc_RNA (1)...(19): siRNA sense strand
gcacugaugcuaacggcua

SEQ ID NO: 2527013 - RNA, 19 nt, Homo sapiens
  misc_RNA (1)...(19): siRNA sense strand
ugacaucuucacugagaaa

SEQ ID NO: 2527014 - RNA, 19 nt, Homo sapiens
  misc_RNA (1)...(19): siRNA sense strand
aggaagaagcggcugaaaa

SEQ ID NO: 2527015 - RNA, 19 nt, Homo sapiens
  misc_RNA (1)...(19): siRNA sense strand
cggaaugugaggcggguga

SEQ ID NO: 2527016 - RNA, 19 nt, Homo sapiens
  misc_RNA (1)...(19): siRNA sense strand
ccauaaagacugggguuaa

SEQ ID NO: 2527017 - RNA, 19 nt, Homo sapiens
  misc_RNA (1)...(19): siRNA sense strand
ccaacaaguucgagagagg

SEQ ID NO: 2527018 - RNA, 19 nt, Homo sapiens
  misc_RNA (1)...(19): siRNA sense strand
aggagaugcagcuggacaa

SEQ ID NO: 2527019 - RNA, 19 nt, Homo sapiens
  misc_RNA (1)...(19): siRNA sense strand
gcgcgacacugaagaacuu

SEQ ID NO: 2527020 - RNA, 19 nt, Homo sapiens
  misc_RNA (1)...(19): siRNA sense strand
gagaaaggcaagacagaag

SEQ ID NO: 2527021 - RNA, 19 nt, Homo sapiens
  misc_RNA (1)...(19): siRNA sense strand
cagacugguacguggagaa

SEQ ID NO: 2527022 - RNA, 19 nt, Homo sapiens
  misc_RNA (1)...(19): siRNA sense strand
gagucuacaucaagcucua

SEQ ID NO: 2527023 - RNA, 19 nt, Homo sapiens
  misc_RNA (1)...(19): siRNA sense strand
aagaagaggaggaagagga

SEQ ID NO: 2527024 - RNA, 19 nt, Homo sapiens
  misc_RNA (1)...(19): siRNA sense strand
ggauaaagacggugcagag

SEQ ID NO: 2527025 - RNA, 19 nt, Homo sapiens
  misc_RNA (1)...(19): siRNA sense strand
aagaagaagaggaagggca

SEQ ID NO: 2527026 - RNA, 19 nt, Homo sapiens
  misc_RNA (1)...(19): siRNA sense strand
gaagaaagcggauggguug

SEQ ID NO: 2527027 - RNA, 19 nt, Homo sapiens
  misc_RNA (1)...(19): siRNA sense strand
ggacaaccgaccuaaagaa

SEQ ID NO: 2527028 - RNA, 19 nt, Homo sapiens
  misc_RNA (1)...(19): siRNA sense strand
ggauugagcucccggaucu

SEQ ID NO: 2527029 - RNA, 19 nt, Homo sapiens
  misc_RNA (1)...(19): siRNA sense strand
gccuggagguggagcugua

SEQ ID NO: 2527030 - RNA, 19 nt, Homo sapiens
  misc_RNA (1)...(19): siRNA sense strand
agauggaagaagaggagga

SEQ ID NO: 2527031 - RNA, 19 nt, Homo sapiens
  misc_RNA (1)...(19): siRNA sense strand
ucguagaguuagaagaugu

SEQ ID NO: 2527032 - RNA, 19 nt, Homo sapiens
  misc_RNA (1)...(19): siRNA sense strand
gcuauuacguauauuguca

SEQ ID NO: 2527033 - RNA, 19 nt, Homo sapiens
  misc_RNA (1)...(19): siRNA sense strand
ggaugcaggaggugauuga

SEQ ID NO: 2527034 - RNA, 19 nt, Homo sapiens
  misc_RNA (1)...(19): siRNA sense strand
ccggcauaaucgagaaguu

SEQ ID NO: 2527035 - RNA, 19 nt, Homo sapiens
  misc_RNA (1)...(19): siRNA sense strand
ggcauaaucgagaaguuua

SEQ ID NO: 2527036 - RNA, 19 nt, Homo sapiens
  misc_RNA (1)...(19): siRNA sense strand
ucgaguauggcaugauaaa

SEQ ID NO: 2527037 - RNA, 19 nt, Homo sapiens
  misc_RNA (1)...(19): siRNA sense strand
ugucaauggaccuuguuaa

SEQ ID NO: 2527038 - RNA, 19 nt, Homo sapiens
  misc_RNA (1)...(19): siRNA sense strand
gucaauggaccuuguuaaa

SEQ ID NO: 2527039 - RNA, 19 nt, Homo sapiens
  misc_RNA (1)...(19): siRNA sense strand
uguuaaagcacaaauguca

SEQ ID NO: 2527040 - RNA, 19 nt, Homo sapiens
  misc_RNA (1)...(19): siRNA sense strand
ggacaaggauaaggaugau

SEQ ID NO: 2527041 - RNA, 19 nt, Homo sapiens
  misc_RNA (1)...(19): siRNA sense strand
cagaggaggaggagaugga

SEQ ID NO: 2527042 - RNA, 19 nt, Homo sapiens
  misc_RNA (1)...(19): siRNA sense strand
ugggagaaaucauugaaaa

SEQ ID NO: 2527043 - RNA, 19 nt, Homo sapiens
  misc_RNA (1)...(19): siRNA sense strand
gcugguuccuggacagaau

SEQ ID NO: 2527044 - RNA, 19 nt, Homo sapiens
  misc_RNA (1)...(19): siRNA sense strand
uggcaguggaggaagauga

SEQ ID NO: 2527045 - RNA, 19 nt, Homo sapiens
  misc_RNA (1)...(19): siRNA sense strand
agacugggguuaagaagaa

SEQ ID NO: 2527046 - RNA, 19 nt, Homo sapiens
  misc_RNA (1)...(19): siRNA sense strand
gugcagaucuucacaggga

SEQ ID NO: 2527047 - RNA, 19 nt, Homo sapiens
  misc_RNA (1)...(19): siRNA sense strand
gggaacggcugcucuacaa

SEQ ID NO: 2527048 - RNA, 19 nt, Homo sapiens
  misc_RNA (1)...(19): siRNA sense strand
aagaggaggaagaggagga

SEQ ID NO: 2527049 - RNA, 19 nt, Homo sapiens
  misc_RNA (1)...(19): siRNA sense strand
ggacagagugcuggugaga

SEQ ID NO: 2527050 - RNA, 19 nt, Homo sapiens
  misc_RNA (1)...(19): siRNA sense strand
uagaugaggaugaggcaga

SEQ ID NO: 2527051 - RNA, 19 nt, Homo sapiens
  misc_RNA (1)...(19): siRNA sense strand
aggaugaggcagagccaga

SEQ ID NO: 2527052 - RNA, 19 nt, Homo sapiens
  misc_RNA (1)...(19): siRNA sense strand
caggaguggcugagcaguu

SEQ ID NO: 2527053 - RNA, 19 nt, Homo sapiens
  misc_RNA (1)...(19): siRNA sense strand
ggucuucgguggauggcga

SEQ ID NO: 2527054 - RNA, 19 nt, Homo sapiens
  misc_RNA (1)...(19): siRNA sense strand
gcaguuugccaucgcggaa

SEQ ID NO: 2527055 - RNA, 19 nt, Homo sapiens
  misc_RNA (1)...(19): siRNA sense strand
cgucaaaguugcaacggau

SEQ ID NO: 2527056 - RNA, 19 nt, Homo sapiens
  misc_RNA (1)...(19): siRNA sense strand
gguucaucagcuugggcaa

SEQ ID NO: 2527057 - RNA, 19 nt, Homo sapiens
  misc_RNA (1)...(19): siRNA sense strand
cgacauagcguuugccuac

SEQ ID NO: 2527058 - RNA, 19 nt, Homo sapiens
  misc_RNA (1)...(19): siRNA sense strand
ggaucaagcaguggguaca

SEQ ID NO: 2527059 - RNA, 19 nt, Homo sapiens
  misc_RNA (1)...(19): siRNA sense strand
gggcaaaaggacugucuga

SEQ ID NO: 2527060 - RNA, 19 nt, Homo sapiens
  misc_RNA (1)...(19): siRNA sense strand
gcaaagaaaauuaggcaga

SEQ ID NO: 2527061 - RNA, 19 nt, Homo sapiens
  misc_RNA (1)...(19): siRNA sense strand
ggcaguucacauagagaaa

SEQ ID NO: 2527062 - RNA, 19 nt, Homo sapiens
  misc_RNA (1)...(19): siRNA sense strand
agaacuaauccauggaaca

SEQ ID NO: 2527063 - RNA, 19 nt, Homo sapiens
  misc_RNA (1)...(19): siRNA sense strand
aggaacaucaacagagauu

SEQ ID NO: 2527064 - RNA, 19 nt, Homo sapiens
  misc_RNA (1)...(19): siRNA sense strand
uuguaaagcuggagugccu

SEQ ID NO: 2527065 - RNA, 19 nt, Homo sapiens
  misc_RNA (1)...(19): siRNA sense strand
ccuaagaagugucuggucu

SEQ ID NO: 2527066 - RNA, 19 nt, Homo sapiens
  misc_RNA (1)...(19): siRNA sense strand
ccaaugaacuuaaagcgga

SEQ ID NO: 2527067 - RNA, 19 nt, Homo sapiens
  misc_RNA (1)...(19): siRNA sense strand
cuaucagaaacauggacaa

SEQ ID NO: 2527068 - RNA, 19 nt, Homo sapiens
  misc_RNA (1)...(19): siRNA sense strand
aguuaaaagaggaagaguu

SEQ ID NO: 2527069 - RNA, 19 nt, Homo sapiens
  misc_RNA (1)...(19): siRNA sense strand
gcagaaaauugaauccaga

SEQ ID NO: 2527070 - RNA, 19 nt, Homo sapiens
  misc_RNA (1)...(19): siRNA sense strand
ugaaaccaacagugggaga

SEQ ID NO: 2527071 - RNA, 19 nt, Homo sapiens
  misc_RNA (1)...(19): siRNA sense strand
ugugaagcaagcuggacaa

SEQ ID NO: 2527072 - RNA, 19 nt, Homo sapiens
  misc_RNA (1)...(19): siRNA sense strand
uuggagaaguuccuggcaa

SEQ ID NO: 2527073 - RNA, 19 nt, Homo sapiens
  misc_RNA (1)...(19): siRNA sense strand
agcuggagugccugaaaua

SEQ ID NO: 2527074 - RNA, 19 nt, Homo sapiens
  misc_RNA (1)...(19): siRNA sense strand
ggacaagagaggaugggau

SEQ ID NO: 2527075 - RNA, 19 nt, Homo sapiens
  misc_RNA (1)...(19): siRNA sense strand
gggaaagccuucagccaga

SEQ ID NO: 2527076 - RNA, 19 nt, Homo sapiens
  misc_RNA (1)...(19): siRNA sense strand
ccuuauaagugcagcgacu

SEQ ID NO: 2527077 - RNA, 19 nt, Homo sapiens
  misc_RNA (1)...(19): siRNA sense strand
aagugaagguggaggagga

SEQ ID NO: 2527078 - RNA, 19 nt, Homo sapiens
  misc_RNA (1)...(19): siRNA sense strand
gguggaugcuuaugggaca

SEQ ID NO: 2527079 - RNA, 19 nt, Homo sapiens
  misc_RNA (1)...(19): siRNA sense strand
cugcagcgagugugggaaa

SEQ ID NO: 2527080 - RNA, 19 nt, Homo sapiens
  misc_RNA (1)...(19): siRNA sense strand
ucccaagagcggagaggaa

SEQ ID NO: 2527081 - RNA, 19 nt, Homo sapiens
  misc_RNA (1)...(19): siRNA sense strand
gugugacgcgugugggaaa

SEQ ID NO: 2527082 - RNA, 19 nt, Homo sapiens
  misc_RNA (1)...(19): siRNA sense strand
ugaagguggaggaggaaga

SEQ ID NO: 2527083 - RNA, 19 nt, Homo sapiens
  misc_RNA (1)...(19): siRNA sense strand
gcacagagcuccucccuca

SEQ ID NO: 2527084 - RNA, 19 nt, Homo sapiens
  misc_RNA (1)...(19): siRNA sense strand
ccauaugccugcagcgagu

SEQ ID NO: 2527085 - RNA, 19 nt, Homo sapiens
  misc_RNA (1)...(19): siRNA sense strand
gggaaagccuucagccgga

SEQ ID NO: 2527086 - RNA, 19 nt, Homo sapiens
  misc_RNA (1)...(19): siRNA sense strand
guguaaggaaugugggaag

SEQ ID NO: 2527087 - RNA, 19 nt, Homo sapiens
  misc_RNA (1)...(19): siRNA sense strand
gugcuggacaagagaggau

SEQ ID NO: 2527088 - RNA, 19 nt, Homo sapiens
  misc_RNA (1)...(19): siRNA sense strand
caagaaaacuucagggccu

SEQ ID NO: 2527089 - RNA, 19 nt, Homo sapiens
  misc_RNA (1)...(19): siRNA sense strand
gguaaaaccuucagccgca

SEQ ID NO: 2527090 - RNA, 19 nt, Homo sapiens
  misc_RNA (1)...(19): siRNA sense strand
aguucuagugcguggccaa

SEQ ID NO: 2527091 - RNA, 19 nt, Homo sapiens
  misc_RNA (1)...(19): siRNA sense strand
ccccaugaguguaaggaau

SEQ ID NO: 2527092 - RNA, 19 nt, Homo sapiens
  misc_RNA (1)...(19): siRNA sense strand
ugucgcgaguguaggaaga

SEQ ID NO: 2527093 - RNA, 19 nt, Homo sapiens
  misc_RNA (1)...(19): siRNA sense strand
ugucaaggcaugugaaccu

SEQ ID NO: 2527094 - RNA, 19 nt, Homo sapiens
  misc_RNA (1)...(19): siRNA sense strand
cgugggaagaggacagcuu

SEQ ID NO: 2527095 - RNA, 19 nt, Homo sapiens
  misc_RNA (1)...(19): siRNA sense strand
ucaucgaggucuugggcaa

SEQ ID NO: 2527096 - RNA, 19 nt, Homo sapiens
  misc_RNA (1)...(19): siRNA sense strand
acgccgaccucaagagcau

SEQ ID NO: 2527097 - RNA, 19 nt, Homo sapiens
  misc_RNA (1)...(19): siRNA sense strand
ccagauugagacagugaau

SEQ ID NO: 2527098 - RNA, 19 nt, Homo sapiens
  misc_RNA (1)...(19): siRNA sense strand
gcaugguggagcugaucaa

SEQ ID NO: 2527099 - RNA, 19 nt, Homo sapiens
  misc_RNA (1)...(19): siRNA sense strand
agaaugacgccuaccgcaa

SEQ ID NO: 2527100 - RNA, 19 nt, Homo sapiens
  misc_RNA (1)...(19): siRNA sense strand
aguacgaccaggugcgcua

SEQ ID NO: 2527101 - RNA, 19 nt, Homo sapiens
  misc_RNA (1)...(19): siRNA sense strand
gggaggaaggagagcaucu

SEQ ID NO: 2527102 - RNA, 19 nt, Homo sapiens
  misc_RNA (1)...(19): siRNA sense strand
aggagaaggcaccagguau

SEQ ID NO: 2527103 - RNA, 19 nt, Homo sapiens
  misc_RNA (1)...(19): siRNA sense strand
gcagcugggaggaaggaga

SEQ ID NO: 2527104 - RNA, 19 nt, Homo sapiens
  misc_RNA (1)...(19): siRNA sense strand
cugaagaggcccacgucau

SEQ ID NO: 2527105 - RNA, 19 nt, Homo sapiens
  misc_RNA (1)...(19): siRNA sense strand
cuggagaauggcugaguga

SEQ ID NO: 2527106 - RNA, 19 nt, Homo sapiens
  misc_RNA (1)...(19): siRNA sense strand
gcaacaacgaguacgacca

SEQ ID NO: 2527107 - RNA, 19 nt, Homo sapiens
  misc_RNA (1)...(19): siRNA sense strand
caguguggccagucggcua

SEQ ID NO: 2527108 - RNA, 19 nt, Homo sapiens
  misc_RNA (1)...(19): siRNA sense strand
gagacugacugcuacgaca

SEQ ID NO: 2527109 - RNA, 19 nt, Homo sapiens
  misc_RNA (1)...(19): siRNA sense strand
ccagguaugcaaagagcca

SEQ ID NO: 2527110 - RNA, 19 nt, Homo sapiens
  misc_RNA (1)...(19): siRNA sense strand
uggccauccugcagcgaga

SEQ ID NO: 2527111 - RNA, 19 nt, Homo sapiens
  misc_RNA (1)...(19): siRNA sense strand
ggagaauggcugagugagc

SEQ ID NO: 2527112 - RNA, 19 nt, Homo sapiens
  misc_RNA (1)...(19): siRNA sense strand
acgacaucaucgaggucuu

SEQ ID NO: 2527113 - RNA, 19 nt, Homo sapiens
  misc_RNA (1)...(19): siRNA sense strand
agguagaagggauguuaaa

SEQ ID NO: 2527114 - RNA, 19 nt, Homo sapiens
  misc_RNA (1)...(19): siRNA sense strand
gaaacuaucuggagagggu

SEQ ID NO: 2527115 - RNA, 19 nt, Homo sapiens
  misc_RNA (1)...(19): siRNA sense strand
cuaugaaacuaucuggaga

SEQ ID NO: 2527116 - RNA, 19 nt, Homo sapiens
  misc_RNA (1)...(19): siRNA sense strand
gaaagaugaccauaggaca

SEQ ID NO: 2527117 - RNA, 19 nt, Homo sapiens
  misc_RNA (1)...(19): siRNA sense strand
auagugagagggaggacaa

SEQ ID NO: 2527118 - RNA, 19 nt, Homo sapiens
  misc_RNA (1)...(19): siRNA sense strand
ccugcaucuccuauggaaa

SEQ ID NO: 2527119 - RNA, 19 nt, Homo sapiens
  misc_RNA (1)...(19): siRNA sense strand
aggaauggguugagaaacu

SEQ ID NO: 2527120 - RNA, 19 nt, Homo sapiens
  misc_RNA (1)...(19): siRNA sense strand
auuuaagccagaagagaaa

SEQ ID NO: 2527121 - RNA, 19 nt, Homo sapiens
  misc_RNA (1)...(19): siRNA sense strand
gagaaguaucugaugguau

SEQ ID NO: 2527122 - RNA, 19 nt, Homo sapiens
  misc_RNA (1)...(19): siRNA sense strand
ugugugaaccagaggacua

SEQ ID NO: 2527123 - RNA, 19 nt, Homo sapiens
  misc_RNA (1)...(19): siRNA sense strand
ucguaauauuccagaagau

SEQ ID NO: 2527124 - RNA, 19 nt, Homo sapiens
  misc_RNA (1)...(19): siRNA sense strand
ccaagaacgggcagguuau

SEQ ID NO: 2527125 - RNA, 19 nt, Homo sapiens
  misc_RNA (1)...(19): siRNA sense strand
cuuacaaaccagaugaaaa

SEQ ID NO: 2527126 - RNA, 19 nt, Homo sapiens
  misc_RNA (1)...(19): siRNA sense strand
gcaaauugacauuggugga

SEQ ID NO: 2527127 - RNA, 19 nt, Homo sapiens
  misc_RNA (1)...(19): siRNA sense strand
agucuaacucugugugcua

SEQ ID NO: 2527128 - RNA, 19 nt, Homo sapiens
  misc_RNA (1)...(19): siRNA sense strand
uuguggaauuugcaagaaa

SEQ ID NO: 2527129 - RNA, 19 nt, Homo sapiens
  misc_RNA (1)...(19): siRNA sense strand
gcagaaaucuccaaugcca

SEQ ID NO: 2527130 - RNA, 19 nt, Homo sapiens
  misc_RNA (1)...(19): siRNA sense strand
gaucaauaugugacuggaa

SEQ ID NO: 2527131 - RNA, 19 nt, Homo sapiens
  misc_RNA (1)...(19): siRNA sense strand
ccgagauaacguagacaga

SEQ ID NO: 2527132 - RNA, 19 nt, Homo sapiens
  misc_RNA (1)...(19): siRNA sense strand
cgguucugcugcugacaaa

SEQ ID NO: 2527133 - RNA, 19 nt, Homo sapiens
  misc_RNA (1)...(19): siRNA sense strand
ucaggaaacaguacagcaa

SEQ ID NO: 2527134 - RNA, 19 nt, Homo sapiens
  misc_RNA (1)...(19): siRNA sense strand
ucagugaagaugaggccaa

SEQ ID NO: 2527135 - RNA, 19 nt, Homo sapiens
  misc_RNA (1)...(19): siRNA sense strand
gagaagaaggaauggguug

SEQ ID NO: 2527136 - RNA, 19 nt, Homo sapiens
  misc_RNA (1)...(19): siRNA sense strand
ggcauaugcaagagcaaga

SEQ ID NO: 2527137 - RNA, 19 nt, Homo sapiens
  misc_RNA (1)...(19): siRNA sense strand
gaggcagagaagaaggaau

SEQ ID NO: 2527138 - RNA, 19 nt, Homo sapiens
  misc_RNA (1)...(19): siRNA sense strand
ugcagagcuccgagaguaa

SEQ ID NO: 2527139 - RNA, 19 nt, Homo sapiens
  misc_RNA (1)...(19): siRNA sense strand
aggcacuguuugaggaagu

SEQ ID NO: 2527140 - RNA, 19 nt, Homo sapiens
  misc_RNA (1)...(19): siRNA sense strand
agacagagcuaaaaggagu

SEQ ID NO: 2527141 - RNA, 19 nt, Homo sapiens
  misc_RNA (1)...(19): siRNA sense strand
gagugaagagagcagaaau

SEQ ID NO: 2527142 - RNA, 19 nt, Homo sapiens
  misc_RNA (1)...(19): siRNA sense strand
aggcagagaagaaggaaug

SEQ ID NO: 2527143 - RNA, 19 nt, Homo sapiens
  misc_RNA (1)...(19): siRNA sense strand
cacaauaugaugaagcaau

SEQ ID NO: 2527144 - RNA, 19 nt, Homo sapiens
  misc_RNA (1)...(19): siRNA sense strand
gcggcauaugcaagagcaa

SEQ ID NO: 2527145 - RNA, 19 nt, Homo sapiens
  misc_RNA (1)...(19): siRNA sense strand
cuggaauccuagcucguaa

SEQ ID NO: 2527146 - RNA, 19 nt, Homo sapiens
  misc_RNA (1)...(19): siRNA sense strand
gcuuagacaccauccacaa

SEQ ID NO: 2527147 - RNA, 19 nt, Homo sapiens
  misc_RNA (1)...(19): siRNA sense strand
agaaggaauggguugagaa

SEQ ID NO: 2527148 - RNA, 19 nt, Homo sapiens
  misc_RNA (1)...(19): siRNA sense strand
ggguugagaaacugacuga

SEQ ID NO: 2527149 - RNA, 19 nt, Homo sapiens
  misc_RNA (1)...(19): siRNA sense strand
aauugacauugguggagua

SEQ ID NO: 2527150 - RNA, 19 nt, Homo sapiens
  misc_RNA (1)...(19): siRNA sense strand
gauaugaagaagaagccuu

SEQ ID NO: 2527151 - RNA, 19 nt, Homo sapiens
  misc_RNA (1)...(19): siRNA sense strand
gugcuuucgaugaaguuua

SEQ ID NO: 2527152 - RNA, 19 nt, Homo sapiens
  misc_RNA (1)...(19): siRNA sense strand
ccacggagaugcagagcuc

SEQ ID NO: 2527153 - RNA, 19 nt, Homo sapiens
  misc_RNA (1)...(19): siRNA sense strand
gcacaauaugaugaagcaa

SEQ ID NO: 2527154 - RNA, 19 nt, Homo sapiens
  misc_RNA (1)...(19): siRNA sense strand
guccgauguuugugaugua

SEQ ID NO: 2527155 - RNA, 19 nt, Homo sapiens
  misc_RNA (1)...(19): siRNA sense strand
uuuauaaacuugugcgaug

SEQ ID NO: 2527156 - RNA, 19 nt, Homo sapiens
  misc_RNA (1)...(19): siRNA sense strand
gguuaucggcauuggagca

SEQ ID NO: 2527157 - RNA, 19 nt, Homo sapiens
  misc_RNA (1)...(19): siRNA sense strand
aggagugaagagagcagaa

SEQ ID NO: 2527158 - RNA, 19 nt, Homo sapiens
  misc_RNA (1)...(19): siRNA sense strand
aggugcugcuguuggaauu

SEQ ID NO: 2527159 - RNA, 19 nt, Homo sapiens
  misc_RNA (1)...(19): siRNA sense strand
uauaauugccccaggauau

SEQ ID NO: 2527160 - RNA, 19 nt, Homo sapiens
  misc_RNA (1)...(19): siRNA sense strand
aggaggcuguggagcaaau

SEQ ID NO: 2527161 - RNA, 19 nt, Homo sapiens
  misc_RNA (1)...(19): siRNA sense strand
aggaaacaguacagcaaag

SEQ ID NO: 2527162 - RNA, 19 nt, Homo sapiens
  misc_RNA (1)...(19): siRNA sense strand
aauaaagauuugccagagu

SEQ ID NO: 2527163 - RNA, 19 nt, Homo sapiens
  misc_RNA (1)...(19): siRNA sense strand
ccaccauugcugucaagua

SEQ ID NO: 2527164 - RNA, 19 nt, Homo sapiens
  misc_RNA (1)...(19): siRNA sense strand
gauaacguagacagagcua

SEQ ID NO: 2527165 - RNA, 19 nt, Homo sapiens
  misc_RNA (1)...(19): siRNA sense strand
caggaaacaguacagcaaa

SEQ ID NO: 2527166 - RNA, 19 nt, Homo sapiens
  misc_RNA (1)...(19): siRNA sense strand
aaacaggagugaagagagc

SEQ ID NO: 2527167 - RNA, 19 nt, Homo sapiens
  misc_RNA (1)...(19): siRNA sense strand
gagauaacguagacagagc

SEQ ID NO: 2527168 - RNA, 19 nt, Homo sapiens
  misc_RNA (1)...(19): siRNA sense strand
gaagagaaauaaugguguc

SEQ ID NO: 2527169 - RNA, 19 nt, Homo sapiens
  misc_RNA (1)...(19): siRNA sense strand
caucacagccagagggcau

SEQ ID NO: 2527170 - RNA, 19 nt, Homo sapiens
  misc_RNA (1)...(19): siRNA sense strand
gcaaacaaccacuuggaga

SEQ ID NO: 2527171 - RNA, 19 nt, Homo sapiens
  misc_RNA (1)...(19): siRNA sense strand
cuggacauguggagagaca

SEQ ID NO: 2527172 - RNA, 19 nt, Homo sapiens
  misc_RNA (1)...(19): siRNA sense strand
cagccauccuccugggcau

SEQ ID NO: 2527173 - RNA, 19 nt, Homo sapiens
  misc_RNA (1)...(19): siRNA sense strand
gccaggaguuugaaagcca

SEQ ID NO: 2527174 - RNA, 19 nt, Homo sapiens
  misc_RNA (1)...(19): siRNA sense strand
gcguaaggauccuggggca

SEQ ID NO: 2527175 - RNA, 19 nt, Homo sapiens
  misc_RNA (1)...(19): siRNA sense strand
gggcaagagcacagccauc

SEQ ID NO: 2527176 - RNA, 19 nt, Homo sapiens
  misc_RNA (1)...(19): siRNA sense strand
gggucuucgucaugcucua

SEQ ID NO: 2527177 - RNA, 19 nt, Homo sapiens
  misc_RNA (1)...(19): siRNA sense strand
gaagacaaaucaauggugu

SEQ ID NO: 2527178 - RNA, 19 nt, Homo sapiens
  misc_RNA (1)...(19): siRNA sense strand
ccacaggggcagaagugua

SEQ ID NO: 2527179 - RNA, 19 nt, Homo sapiens
  misc_RNA (1)...(19): siRNA sense strand
guauuaugauguugcccau

SEQ ID NO: 2527180 - RNA, 19 nt, Homo sapiens
  misc_RNA (1)...(19): siRNA sense strand
acaaccacuuggagagcca

SEQ ID NO: 2527181 - RNA, 19 nt, Homo sapiens
  misc_RNA (1)...(19): siRNA sense strand
gggaacugugguagggaua

SEQ ID NO: 2527182 - RNA, 19 nt, Homo sapiens
  misc_RNA (1)...(19): siRNA sense strand
ggaaagagcaucugggaag

SEQ ID NO: 2527183 - RNA, 19 nt, Homo sapiens
  misc_RNA (1)...(19): siRNA sense strand
uggaaaagguucaagaaau

SEQ ID NO: 2527184 - RNA, 19 nt, Homo sapiens
  misc_RNA (1)...(19): siRNA sense strand
ucgccaaggaagaggaauu

SEQ ID NO: 2527185 - RNA, 19 nt, Homo sapiens
  misc_RNA (1)...(19): siRNA sense strand
auggcagauuggagggaaa

SEQ ID NO: 2527186 - RNA, 19 nt, Homo sapiens
  misc_RNA (1)...(19): siRNA sense strand
acugaaagacggagcaaaa

SEQ ID NO: 2527187 - RNA, 19 nt, Homo sapiens
  misc_RNA (1)...(19): siRNA sense strand
gugagaguguauuuggaaa

SEQ ID NO: 2527188 - RNA, 19 nt, Homo sapiens
  misc_RNA (1)...(19): siRNA sense strand
ugugguagggauagaaaua

SEQ ID NO: 2527189 - RNA, 19 nt, Homo sapiens
  misc_RNA (1)...(19): siRNA sense strand
agaaaauggugaugugauu

SEQ ID NO: 2527190 - RNA, 19 nt, Homo sapiens
  misc_RNA (1)...(19): siRNA sense strand
cagagaaaauccaaacaaa

SEQ ID NO: 2527191 - RNA, 19 nt, Homo sapiens
  misc_RNA (1)...(19): siRNA sense strand
gcaaggaaacaguugaaaa

SEQ ID NO: 2527192 - RNA, 19 nt, Homo sapiens
  misc_RNA (1)...(19): siRNA sense strand
ggagauaacucuggaggca

SEQ ID NO: 2527193 - RNA, 19 nt, Homo sapiens
  misc_RNA (1)...(19): siRNA sense strand
ucgugaauguguagaauca

SEQ ID NO: 2527194 - RNA, 19 nt, Homo sapiens
  misc_RNA (1)...(19): siRNA sense strand
gcaucugggaagacugaaa

SEQ ID NO: 2527195 - RNA, 19 nt, Homo sapiens
  misc_RNA (1)...(19): siRNA sense strand
acuaagaggaauacugcaa

SEQ ID NO: 2527196 - RNA, 19 nt, Homo sapiens
  misc_RNA (1)...(19): siRNA sense strand
uggugaggcagaugaauua

SEQ ID NO: 2527197 - RNA, 19 nt, Homo sapiens
  misc_RNA (1)...(19): siRNA sense strand
caucgaaauuguuggccuu

SEQ ID NO: 2527198 - RNA, 19 nt, Homo sapiens
  misc_RNA (1)...(19): siRNA sense strand
aauuaaggcuucagcacau

SEQ ID NO: 2527199 - RNA, 19 nt, Homo sapiens
  misc_RNA (1)...(19): siRNA sense strand
agccaaaccagaucagaaa

SEQ ID NO: 2527200 - RNA, 19 nt, Homo sapiens
  misc_RNA (1)...(19): siRNA sense strand
gcugaaaauuguaauggaa

SEQ ID NO: 2527201 - RNA, 19 nt, Homo sapiens
  misc_RNA (1)...(19): siRNA sense strand
cagccaaaccagaucagaa

SEQ ID NO: 2527202 - RNA, 19 nt, Homo sapiens
  misc_RNA (1)...(19): siRNA sense strand
ugggaggguuuguguaaau

SEQ ID NO: 2527203 - RNA, 19 nt, Homo sapiens
  misc_RNA (1)...(19): siRNA sense strand
gugugugauuccagaaaca

SEQ ID NO: 2527204 - RNA, 19 nt, Homo sapiens
  misc_RNA (1)...(19): siRNA sense strand
aagaacaaccaauggauga

SEQ ID NO: 2527205 - RNA, 19 nt, Homo sapiens
  misc_RNA (1)...(19): siRNA sense strand
cuucagaauaagccacaaa

SEQ ID NO: 2527206 - RNA, 19 nt, Homo sapiens
  misc_RNA (1)...(19): siRNA sense strand
gaaaccagucuguggcaau

SEQ ID NO: 2527207 - RNA, 19 nt, Homo sapiens
  misc_RNA (1)...(19): siRNA sense strand
gcacguugugagaguguau

SEQ ID NO: 2527208 - RNA, 19 nt, Homo sapiens
  misc_RNA (1)...(19): siRNA sense strand
gcauauacuagcagaucca

SEQ ID NO: 2527209 - RNA, 19 nt, Homo sapiens
  misc_RNA (1)...(19): siRNA sense strand
ggaauugagccucuggaau

SEQ ID NO: 2527210 - RNA, 19 nt, Homo sapiens
  misc_RNA (1)...(19): siRNA sense strand
ugugauauugggaggguuu

SEQ ID NO: 2527211 - RNA, 19 nt, Homo sapiens
  misc_RNA (1)...(19): siRNA sense strand
uaucauaugacgacccaaa

SEQ ID NO: 2527212 - RNA, 19 nt, Homo sapiens
  misc_RNA (1)...(19): siRNA sense strand
cgagauucuguaugcauaa

SEQ ID NO: 2527213 - RNA, 19 nt, Homo sapiens
  misc_RNA (1)...(19): siRNA sense strand
auguguagaaucaaggaua

SEQ ID NO: 2527214 - RNA, 19 nt, Homo sapiens
  misc_RNA (1)...(19): siRNA sense strand
cgaugcacguugugagagu

SEQ ID NO: 2527215 - RNA, 19 nt, Homo sapiens
  misc_RNA (1)...(19): siRNA sense strand
acgagauucuguaugcaua

SEQ ID NO: 2527216 - RNA, 19 nt, Homo sapiens
  misc_RNA (1)...(19): siRNA sense strand
uguaaaucgugaaugugua

SEQ ID NO: 2527217 - RNA, 19 nt, Homo sapiens
  misc_RNA (1)...(19): siRNA sense strand
ggaagguagcacacagaca

SEQ ID NO: 2527218 - RNA, 19 nt, Homo sapiens
  misc_RNA (1)...(19): siRNA sense strand
caaucaaggaucuaugaau

SEQ ID NO: 2527219 - RNA, 19 nt, Homo sapiens
  misc_RNA (1)...(19): siRNA sense strand
aguuauggucagaugaaaa

SEQ ID NO: 2527220 - RNA, 19 nt, Homo sapiens
  misc_RNA (1)...(19): siRNA sense strand
gucaaaugucuucagaaua

SEQ ID NO: 2527221 - RNA, 19 nt, Homo sapiens
  misc_RNA (1)...(19): siRNA sense strand
uggaaagagcaucugggaa

SEQ ID NO: 2527222 - RNA, 19 nt, Homo sapiens
  misc_RNA (1)...(19): siRNA sense strand
cguugaauguaggccgaaa

SEQ ID NO: 2527223 - RNA, 19 nt, Homo sapiens
  misc_RNA (1)...(19): siRNA sense strand
ugagaguguauuuggaaaa

SEQ ID NO: 2527224 - RNA, 19 nt, Homo sapiens
  misc_RNA (1)...(19): siRNA sense strand
ucacaggacaguacccaaa

SEQ ID NO: 2527225 - RNA, 19 nt, Homo sapiens
  misc_RNA (1)...(19): siRNA sense strand
gcaccuuaaacaaagauau

SEQ ID NO: 2527226 - RNA, 19 nt, Homo sapiens
  misc_RNA (1)...(19): siRNA sense strand
gauuggagggaaaugaaau

SEQ ID NO: 2527227 - RNA, 19 nt, Homo sapiens
  misc_RNA (1)...(19): siRNA sense strand
ucguaauuccagagaaaau

SEQ ID NO: 2527228 - RNA, 19 nt, Homo sapiens
  misc_RNA (1)...(19): siRNA sense strand
uggcaaggaaacaguugaa

SEQ ID NO: 2527229 - RNA, 19 nt, Homo sapiens
  misc_RNA (1)...(19): siRNA sense strand
cuacaguuggugaggcaga

SEQ ID NO: 2527230 - RNA, 19 nt, Homo sapiens
  misc_RNA (1)...(19): siRNA sense strand
cagacauaugccagccaaa

SEQ ID NO: 2527231 - RNA, 19 nt, Homo sapiens
  misc_RNA (1)...(19): siRNA sense strand
cugccaaauacguuccaaa

SEQ ID NO: 2527232 - RNA, 19 nt, Homo sapiens
  misc_RNA (1)...(19): siRNA sense strand
gaguuauggucagaugaaa

SEQ ID NO: 2527233 - RNA, 19 nt, Homo sapiens
  misc_RNA (1)...(19): siRNA sense strand
gaauccagaaguugugcaa

SEQ ID NO: 2527234 - RNA, 19 nt, Homo sapiens
  misc_RNA (1)...(19): siRNA sense strand
gugaagacuuuuagcaguu

SEQ ID NO: 2527235 - RNA, 19 nt, Homo sapiens
  misc_RNA (1)...(19): siRNA sense strand
ucgaacuuguguacugaaa

SEQ ID NO: 2527236 - RNA, 19 nt, Homo sapiens
  misc_RNA (1)...(19): siRNA sense strand
acccaaacacaaagcagua

SEQ ID NO: 2527237 - RNA, 19 nt, Homo sapiens
  misc_RNA (1)...(19): siRNA sense strand
cagaagccugaaagaacaa

SEQ ID NO: 2527238 - RNA, 19 nt, Homo sapiens
  misc_RNA (1)...(19): siRNA sense strand
uguguggccuggugggcaa

SEQ ID NO: 2527239 - RNA, 19 nt, Homo sapiens
  misc_RNA (1)...(19): siRNA sense strand
cggaauuaccaaagaaaca

SEQ ID NO: 2527240 - RNA, 19 nt, Homo sapiens
  misc_RNA (1)...(19): siRNA sense strand
cugacaaauuagaggaagu

SEQ ID NO: 2527241 - RNA, 19 nt, Homo sapiens
  misc_RNA (1)...(19): siRNA sense strand
uugaaguggaugaugauaa

SEQ ID NO: 2527242 - RNA, 19 nt, Homo sapiens
  misc_RNA (1)...(19): siRNA sense strand
cucagaaacaggagaugaa

SEQ ID NO: 2527243 - RNA, 19 nt, Homo sapiens
  misc_RNA (1)...(19): siRNA sense strand
cugucauacuccaauguaa

SEQ ID NO: 2527244 - RNA, 19 nt, Homo sapiens
  misc_RNA (1)...(19): siRNA sense strand
gguccugugaguugagaau

SEQ ID NO: 2527245 - RNA, 19 nt, Homo sapiens
  misc_RNA (1)...(19): siRNA sense strand
aguuauuugaaguggauga

SEQ ID NO: 2527246 - RNA, 19 nt, Homo sapiens
  misc_RNA (1)...(19): siRNA sense strand
ccugaauccauaaagguau

SEQ ID NO: 2527247 - RNA, 19 nt, Homo sapiens
  misc_RNA (1)...(19): siRNA sense strand
ccagauuaccagaucguca

SEQ ID NO: 2527248 - RNA, 19 nt, Homo sapiens
  misc_RNA (1)...(19): siRNA sense strand
aguaaugacaagauggagu

SEQ ID NO: 2527249 - RNA, 19 nt, Homo sapiens
  misc_RNA (1)...(19): siRNA sense strand
ugucauacuccaauguaau

SEQ ID NO: 2527250 - RNA, 19 nt, Homo sapiens
  misc_RNA (1)...(19): siRNA sense strand
ccaaagaaacacaagaccu

SEQ ID NO: 2527251 - RNA, 19 nt, Homo sapiens
  misc_RNA (1)...(19): siRNA sense strand
aauacagacaccaaggcaa

SEQ ID NO: 2527252 - RNA, 19 nt, Homo sapiens
  misc_RNA (1)...(19): siRNA sense strand
ccucaaguaaugacaagau

SEQ ID NO: 2527253 - RNA, 19 nt, Homo sapiens
  misc_RNA (1)...(19): siRNA sense strand
uguaaucagcugggagcaa

SEQ ID NO: 2527254 - RNA, 19 nt, Homo sapiens
  misc_RNA (1)...(19): siRNA sense strand
aaguggaugaugauaacaa

SEQ ID NO: 2527255 - RNA, 19 nt, Homo sapiens
  misc_RNA (1)...(19): siRNA sense strand
gcaaggaaaucgugcgcuu

SEQ ID NO: 2527256 - RNA, 19 nt, Homo sapiens
  misc_RNA (1)...(19): siRNA sense strand
ccacauaaucgcagaccca

SEQ ID NO: 2527257 - RNA, 19 nt, Homo sapiens
  misc_RNA (1)...(19): siRNA sense strand
cuguacacacggugacaaa

SEQ ID NO: 2527258 - RNA, 19 nt, Homo sapiens
  misc_RNA (1)...(19): siRNA sense strand
gggauaacgacauggagga

SEQ ID NO: 2527259 - RNA, 19 nt, Homo sapiens
  misc_RNA (1)...(19): siRNA sense strand
gugcacuacggcaaggaaa

SEQ ID NO: 2527260 - RNA, 19 nt, Homo sapiens
  misc_RNA (1)...(19): siRNA sense strand
gcaucagaguggaggcaug

SEQ ID NO: 2527261 - RNA, 19 nt, Homo sapiens
  misc_RNA (1)...(19): siRNA sense strand
acacacggugacaaagaaa

SEQ ID NO: 2527262 - RNA, 19 nt, Homo sapiens
  misc_RNA (1)...(19): siRNA sense strand
acagaggccuccugggcuu

SEQ ID NO: 2527263 - RNA, 19 nt, Homo sapiens
  misc_RNA (1)...(19): siRNA sense strand
gccagaagaaagcggacuu

SEQ ID NO: 2527264 - RNA, 19 nt, Homo sapiens
  misc_RNA (1)...(19): siRNA sense strand
ggcaauaauaacaaguaca

SEQ ID NO: 2527265 - RNA, 19 nt, Homo sapiens
  misc_RNA (1)...(19): siRNA sense strand
guggcgauuccgaggguga

SEQ ID NO: 2527266 - RNA, 19 nt, Homo sapiens
  misc_RNA (1)...(19): siRNA sense strand
cuacaaaaguugaaggaca

SEQ ID NO: 2527267 - RNA, 19 nt, Homo sapiens
  misc_RNA (1)...(19): siRNA sense strand
ggguaauagucaaacaaaa

SEQ ID NO: 2527268 - RNA, 19 nt, Homo sapiens
  misc_RNA (1)...(19): siRNA sense strand
gugaaaacagugaagaaaa

SEQ ID NO: 2527269 - RNA, 19 nt, Homo sapiens
  misc_RNA (1)...(19): siRNA sense strand
caaucagauggaagaaaua

SEQ ID NO: 2527270 - RNA, 19 nt, Homo sapiens
  misc_RNA (1)...(19): siRNA sense strand
gucuggaaauugagaacaa

SEQ ID NO: 2527271 - RNA, 19 nt, Homo sapiens
  misc_RNA (1)...(19): siRNA sense strand
agaaguuggugcuggaaaa

SEQ ID NO: 2527272 - RNA, 19 nt, Homo sapiens
  misc_RNA (1)...(19): siRNA sense strand
gauuugaagaacugaagaa

SEQ ID NO: 2527273 - RNA, 19 nt, Homo sapiens
  misc_RNA (1)...(19): siRNA sense strand
ccuacaaauaaucgaacaa

SEQ ID NO: 2527274 - RNA, 19 nt, Homo sapiens
  misc_RNA (1)...(19): siRNA sense strand
uggaagaaaccuauggaca

SEQ ID NO: 2527275 - RNA, 19 nt, Homo sapiens
  misc_RNA (1)...(19): siRNA sense strand
gggaaaacugagacaacaa

SEQ ID NO: 2527276 - RNA, 19 nt, Homo sapiens
  misc_RNA (1)...(19): siRNA sense strand
uacaaaaguugaaggacaa

SEQ ID NO: 2527277 - RNA, 19 nt, Homo sapiens
  misc_RNA (1)...(19): siRNA sense strand
ucaccugagcuaaaggaaa

SEQ ID NO: 2527278 - RNA, 19 nt, Homo sapiens
  misc_RNA (1)...(19): siRNA sense strand
cgccuuaaacagaggucua

SEQ ID NO: 2527279 - RNA, 19 nt, Homo sapiens
  misc_RNA (1)...(19): siRNA sense strand
aguugaaggacaaagagaa

SEQ ID NO: 2527280 - RNA, 19 nt, Homo sapiens
  misc_RNA (1)...(19): siRNA sense strand
gagaaguuggugcuggaaa

SEQ ID NO: 2527281 - RNA, 19 nt, Homo sapiens
  misc_RNA (1)...(19): siRNA sense strand
gaagaugaaaugaucggaa

SEQ ID NO: 2527282 - RNA, 19 nt, Homo sapiens
  misc_RNA (1)...(19): siRNA sense strand
ccaguaacaaaucggcaaa

SEQ ID NO: 2527283 - RNA, 19 nt, Homo sapiens
  misc_RNA (1)...(19): siRNA sense strand
uguuagaugcugaauacaa

SEQ ID NO: 2527284 - RNA, 19 nt, Homo sapiens
  misc_RNA (1)...(19): siRNA sense strand
ccaucgaguaagacaaaga

SEQ ID NO: 2527285 - RNA, 19 nt, Homo sapiens
  misc_RNA (1)...(19): siRNA sense strand
ccacuuuggaagaaaccua

SEQ ID NO: 2527286 - RNA, 19 nt, Homo sapiens
  misc_RNA (1)...(19): siRNA sense strand
aacaaagaaagcugugaaa

SEQ ID NO: 2527287 - RNA, 19 nt, Homo sapiens
  misc_RNA (1)...(19): siRNA sense strand
cuuaaaagugaggggaaaa

SEQ ID NO: 2527288 - RNA, 19 nt, Homo sapiens
  misc_RNA (1)...(19): siRNA sense strand
aauaguaaggcuuguacaa

SEQ ID NO: 2527289 - RNA, 19 nt, Homo sapiens
  misc_RNA (1)...(19): siRNA sense strand
caaauauguuggagagagc

SEQ ID NO: 2527290 - RNA, 19 nt, Homo sapiens
  misc_RNA (1)...(19): siRNA sense strand
caaagaaagcugugaaaac

SEQ ID NO: 2527291 - RNA, 19 nt, Homo sapiens
  misc_RNA (1)...(19): siRNA sense strand
cuuacuaccagaagaugaa

SEQ ID NO: 2527292 - RNA, 19 nt, Homo sapiens
  misc_RNA (1)...(19): siRNA sense strand
agaugaaaugaucggaaaa

SEQ ID NO: 2527293 - RNA, 19 nt, Homo sapiens
  misc_RNA (1)...(19): siRNA sense strand
aggucaaucagauggaaga

SEQ ID NO: 2527294 - RNA, 19 nt, Homo sapiens
  misc_RNA (1)...(19): siRNA sense strand
ggucuaaauccuccgugaa

SEQ ID NO: 2527295 - RNA, 19 nt, Homo sapiens
  misc_RNA (1)...(19): siRNA sense strand
aagagaaguuggugcugga

SEQ ID NO: 2527296 - RNA, 19 nt, Homo sapiens
  misc_RNA (1)...(19): siRNA sense strand
ucagaauggagaagaacca

SEQ ID NO: 2527297 - RNA, 19 nt, Homo sapiens
  misc_RNA (1)...(19): siRNA sense strand
uggagagagcuguaaauga

SEQ ID NO: 2527298 - RNA, 19 nt, Homo sapiens
  misc_RNA (1)...(19): siRNA sense strand
aggcaaauauguuggagag

SEQ ID NO: 2527299 - RNA, 19 nt, Homo sapiens
  misc_RNA (1)...(19): siRNA sense strand
uggaucaaguacagaaagu

SEQ ID NO: 2527300 - RNA, 19 nt, Homo sapiens
  misc_RNA (1)...(19): siRNA sense strand
caaguggguaauagucaaa

SEQ ID NO: 2527301 - RNA, 19 nt, Homo sapiens
  misc_RNA (1)...(19): siRNA sense strand
ucgaccagaagcagugaaa

SEQ ID NO: 2527302 - RNA, 19 nt, Homo sapiens
  misc_RNA (1)...(19): siRNA sense strand
caggcaaauauguuggaga

SEQ ID NO: 2527303 - RNA, 19 nt, Homo sapiens
  misc_RNA (1)...(19): siRNA sense strand
uguuaucagaagagaaguu

SEQ ID NO: 2527304 - RNA, 19 nt, Homo sapiens
  misc_RNA (1)...(19): siRNA sense strand
aggacaaagagaaaacuaa

SEQ ID NO: 2527305 - RNA, 19 nt, Homo sapiens
  misc_RNA (1)...(19): siRNA sense strand
uccuaaaucaagagaaguu

SEQ ID NO: 2527306 - RNA, 19 nt, Homo sapiens
  misc_RNA (1)...(19): siRNA sense strand
caaagaacuuacuaccaga

SEQ ID NO: 2527307 - RNA, 19 nt, Homo sapiens
  misc_RNA (1)...(19): siRNA sense strand
ucagguggacaaaggacaa

SEQ ID NO: 2527308 - RNA, 19 nt, Homo sapiens
  misc_RNA (1)...(19): siRNA sense strand
ggucaaucagauggaagaa

SEQ ID NO: 2527309 - RNA, 19 nt, Homo sapiens
  misc_RNA (1)...(19): siRNA sense strand
cugaauacaaacagaugca

SEQ ID NO: 2527310 - RNA, 19 nt, Homo sapiens
  misc_RNA (1)...(19): siRNA sense strand
aguuguuaucagaagagaa

SEQ ID NO: 2527311 - RNA, 19 nt, Homo sapiens
  misc_RNA (1)...(19): siRNA sense strand
uguacuugcuggaggcuga

SEQ ID NO: 2527312 - RNA, 19 nt, Homo sapiens
  misc_RNA (1)...(19): siRNA sense strand
acaucguguugcugggcua

SEQ ID NO: 2527313 - RNA, 19 nt, Homo sapiens
  misc_RNA (1)...(19): siRNA sense strand
agugcaaacaggaugagua

SEQ ID NO: 2527314 - RNA, 19 nt, Homo sapiens
  misc_RNA (1)...(19): siRNA sense strand
ccaucaaaguacucgaacu

SEQ ID NO: 2527315 - RNA, 19 nt, Homo sapiens
  misc_RNA (1)...(19): siRNA sense strand
gcuaccuggcacagaagaa

SEQ ID NO: 2527316 - RNA, 19 nt, Homo sapiens
  misc_RNA (1)...(19): siRNA sense strand
ggcucaaaauccaggaaca

SEQ ID NO: 2527317 - RNA, 19 nt, Homo sapiens
  misc_RNA (1)...(19): siRNA sense strand
acgaacagucccugcauga

SEQ ID NO: 2527318 - RNA, 19 nt, Homo sapiens
  misc_RNA (1)...(19): siRNA sense strand
gcaacuuacuagauggaga

SEQ ID NO: 2527319 - RNA, 19 nt, Homo sapiens
  misc_RNA (1)...(19): siRNA sense strand
gaacagaaacagaaggcca

SEQ ID NO: 2527320 - RNA, 19 nt, Homo sapiens
  misc_RNA (1)...(19): siRNA sense strand
gggcugaguaugaggacuu

SEQ ID NO: 2527321 - RNA, 19 nt, Homo sapiens
  misc_RNA (1)...(19): siRNA sense strand
agaaaugagcugaccgaau

SEQ ID NO: 2527322 - RNA, 19 nt, Homo sapiens
  misc_RNA (1)...(19): siRNA sense strand
uagauggagaagaaagaaa

SEQ ID NO: 2527323 - RNA, 19 nt, Homo sapiens
  misc_RNA (1)...(19): siRNA sense strand
aggacuuggcugagcagaa

SEQ ID NO: 2527324 - RNA, 19 nt, Homo sapiens
  misc_RNA (1)...(19): siRNA sense strand
acuagauggagaagaaaga

SEQ ID NO: 2527325 - RNA, 19 nt, Homo sapiens
  misc_RNA (1)...(19): siRNA sense strand
caauagcgguggaggguug

SEQ ID NO: 2527326 - RNA, 19 nt, Homo sapiens
  misc_RNA (1)...(19): siRNA sense strand
gcuccuuggcugagacuga

SEQ ID NO: 2527327 - RNA, 19 nt, Homo sapiens
  misc_RNA (1)...(19): siRNA sense strand
aggaggaaauggaagucuu

SEQ ID NO: 2527328 - RNA, 19 nt, Homo sapiens
  misc_RNA (1)...(19): siRNA sense strand
aguaugaggacuuggcuga

SEQ ID NO: 2527329 - RNA, 19 nt, Homo sapiens
  misc_RNA (1)...(19): siRNA sense strand
gggcaucucuucuggagga

SEQ ID NO: 2527330 - RNA, 19 nt, Homo sapiens
  misc_RNA (1)...(19): siRNA sense strand
acagauucgaacagaaaca

SEQ ID NO: 2527331 - RNA, 19 nt, Homo sapiens
  misc_RNA (1)...(19): siRNA sense strand
gccugugaauucuggaaau

SEQ ID NO: 2527332 - RNA, 19 nt, Homo sapiens
  misc_RNA (1)...(19): siRNA sense strand
cuggagauacagugugaga

SEQ ID NO: 2527333 - RNA, 19 nt, Homo sapiens
  misc_RNA (1)...(19): siRNA sense strand
agauggagaagaaagaaaa

SEQ ID NO: 2527334 - RNA, 19 nt, Homo sapiens
  misc_RNA (1)...(19): siRNA sense strand
ccagaaaugagcugaccga

SEQ ID NO: 2527335 - RNA, 19 nt, Homo sapiens
  misc_RNA (1)...(19): siRNA sense strand
cugaaggaaauuacugcaa

SEQ ID NO: 2527336 - RNA, 19 nt, Homo sapiens
  misc_RNA (1)...(19): siRNA sense strand
ggaaugaaaaggugaccau

SEQ ID NO: 2527337 - RNA, 19 nt, Homo sapiens
  misc_RNA (1)...(19): siRNA sense strand
cagucauagaagaucuuaa

SEQ ID NO: 2527338 - RNA, 19 nt, Homo sapiens
  misc_RNA (1)...(19): siRNA sense strand
ugguugaggaacuggauca

SEQ ID NO: 2527339 - RNA, 19 nt, Homo sapiens
  misc_RNA (1)...(19): siRNA sense strand
cagccacagcagccagaaa

SEQ ID NO: 2527340 - RNA, 19 nt, Homo sapiens
  misc_RNA (1)...(19): siRNA sense strand
uggaggaacaacugcaaca

SEQ ID NO: 2527341 - RNA, 19 nt, Homo sapiens
  misc_RNA (1)...(19): siRNA sense strand
aggaaauuacugcaaucaa

SEQ ID NO: 2527342 - RNA, 19 nt, Homo sapiens
  misc_RNA (1)...(19): siRNA sense strand
acucaacagaagaaacuau

SEQ ID NO: 2527343 - RNA, 19 nt, Homo sapiens
  misc_RNA (1)...(19): siRNA sense strand
ggaaguauuugaugggaca

SEQ ID NO: 2527344 - RNA, 19 nt, Homo sapiens
  misc_RNA (1)...(19): siRNA sense strand
gggauuauaaugaggguga

SEQ ID NO: 2527345 - RNA, 19 nt, Homo sapiens
  misc_RNA (1)...(19): siRNA sense strand
ggagcauagccaagagaga

SEQ ID NO: 2527346 - RNA, 19 nt, Homo sapiens
  misc_RNA (1)...(19): siRNA sense strand
cuucagagcaccuggacau

SEQ ID NO: 2527347 - RNA, 19 nt, Homo sapiens
  misc_RNA (1)...(19): siRNA sense strand
gggacaguaaucagagaau

SEQ ID NO: 2527348 - RNA, 19 nt, Homo sapiens
  misc_RNA (1)...(19): siRNA sense strand
ucucguaggaacagaagaa

SEQ ID NO: 2527349 - RNA, 19 nt, Homo sapiens
  misc_RNA (1)...(19): siRNA sense strand
ucgauaaauggcauggaua

SEQ ID NO: 2527350 - RNA, 19 nt, Homo sapiens
  misc_RNA (1)...(19): siRNA sense strand
guauuugaugggacaguaa

SEQ ID NO: 2527351 - RNA, 19 nt, Homo sapiens
  misc_RNA (1)...(19): siRNA sense strand
auacuaaagagcagaacuu

SEQ ID NO: 2527352 - RNA, 19 nt, Homo sapiens
  misc_RNA (1)...(19): siRNA sense strand
caucaguggcgguggggaa

SEQ ID NO: 2527353 - RNA, 19 nt, Homo sapiens
  misc_RNA (1)...(19): siRNA sense strand
cugaggaguuccagaucau

SEQ ID NO: 2527354 - RNA, 19 nt, Homo sapiens
  misc_RNA (1)...(19): siRNA sense strand
ccagcggaacagacagaaa

SEQ ID NO: 2527355 - RNA, 19 nt, Homo sapiens
  misc_RNA (1)...(19): siRNA sense strand
cauaaguccaggaaaucaa

SEQ ID NO: 2527356 - RNA, 19 nt, Homo sapiens
  misc_RNA (1)...(19): siRNA sense strand
agaacuuccuacaggguca

SEQ ID NO: 2527357 - RNA, 19 nt, Homo sapiens
  misc_RNA (1)...(19): siRNA sense strand
gguucaaggcagacaucau

SEQ ID NO: 2527358 - RNA, 19 nt, Homo sapiens
  misc_RNA (1)...(19): siRNA sense strand
gaguaugggaauuggaucu

SEQ ID NO: 2527359 - RNA, 19 nt, Homo sapiens
  misc_RNA (1)...(19): siRNA sense strand
caugaguauuggaguggau

SEQ ID NO: 2527360 - RNA, 19 nt, Homo sapiens
  misc_RNA (1)...(19): siRNA sense strand
aaaaugaaccccaggacua

SEQ ID NO: 2527361 - RNA, 19 nt, Homo sapiens
  misc_RNA (1)...(19): siRNA sense strand
gcaucgacuucaugaggga

SEQ ID NO: 2527362 - RNA, 19 nt, Homo sapiens
  misc_RNA (1)...(19): siRNA sense strand
cuucaugagggacggcaaa

SEQ ID NO: 2527363 - RNA, 19 nt, Homo sapiens
  misc_RNA (1)...(19): siRNA sense strand
gggaguugccuguggaaag

SEQ ID NO: 2527364 - RNA, 19 nt, Homo sapiens
  misc_RNA (1)...(19): siRNA sense strand
gauuauaagaacagagagc

SEQ ID NO: 2527365 - RNA, 19 nt, Homo sapiens
  misc_RNA (1)...(19): siRNA sense strand
caaacaggacaguugaaaa

SEQ ID NO: 2527366 - RNA, 19 nt, Homo sapiens
  misc_RNA (1)...(19): siRNA sense strand
ucagagaauuggaagguuc

SEQ ID NO: 2527367 - RNA, 19 nt, Homo sapiens
  misc_RNA (1)...(19): siRNA sense strand
ggauuauaaugagggugaa

SEQ ID NO: 2527368 - RNA, 19 nt, Homo sapiens
  misc_RNA (1)...(19): siRNA sense strand
gggaaguauuugaugggac

SEQ ID NO: 2527369 - RNA, 19 nt, Homo sapiens
  misc_RNA (1)...(19): siRNA sense strand
aaagauugcuuacugggaa

SEQ ID NO: 2527370 - RNA, 19 nt, Homo sapiens
  misc_RNA (1)...(19): siRNA sense strand
cggccucaauguuggcaau

SEQ ID NO: 2527371 - RNA, 19 nt, Homo sapiens
  misc_RNA (1)...(19): siRNA sense strand
aggagaaggacaccaguuu

SEQ ID NO: 2527372 - RNA, 19 nt, Homo sapiens
  misc_RNA (1)...(19): siRNA sense strand
uguuuaugacugcuggaaa

SEQ ID NO: 2527373 - RNA, 19 nt, Homo sapiens
  misc_RNA (1)...(19): siRNA sense strand
gacaauucgaguaugggaa

SEQ ID NO: 2527374 - RNA, 19 nt, Homo sapiens
  misc_RNA (1)...(19): siRNA sense strand
ggugaggguauggcagaua

SEQ ID NO: 2527375 - RNA, 19 nt, Homo sapiens
  misc_RNA (1)...(19): siRNA sense strand
uggaggaggcccugaagga

SEQ ID NO: 2527376 - RNA, 19 nt, Homo sapiens
  misc_RNA (1)...(19): siRNA sense strand
cugucacacuggaggagaa

SEQ ID NO: 2527377 - RNA, 19 nt, Homo sapiens
  misc_RNA (1)...(19): siRNA sense strand
cugaggaacuacugggcca

SEQ ID NO: 2527378 - RNA, 19 nt, Homo sapiens
  misc_RNA (1)...(19): siRNA sense strand
ccaugcaaggugauguaaa

SEQ ID NO: 2527379 - RNA, 19 nt, Homo sapiens
  misc_RNA (1)...(19): siRNA sense strand
ucgagggugcggaggacaa

SEQ ID NO: 2527380 - RNA, 19 nt, Homo sapiens
  misc_RNA (1)...(19): siRNA sense strand
gcagcauggccuuggcaga

SEQ ID NO: 2527381 - RNA, 19 nt, Homo sapiens
  misc_RNA (1)...(19): siRNA sense strand
ugagagugcuguaggugca

SEQ ID NO: 2527382 - RNA, 19 nt, Homo sapiens
  misc_RNA (1)...(19): siRNA sense strand
cagcugagggccuggacau

SEQ ID NO: 2527383 - RNA, 19 nt, Homo sapiens
  misc_RNA (1)...(19): siRNA sense strand
ccaccauccaggaguugaa

SEQ ID NO: 2527384 - RNA, 19 nt, Homo sapiens
  misc_RNA (1)...(19): siRNA sense strand
caguacagcugcagggcuc

SEQ ID NO: 2527385 - RNA, 19 nt, Homo sapiens
  misc_RNA (1)...(19): siRNA sense strand
gggagaugguggaggaccu

SEQ ID NO: 2527386 - RNA, 19 nt, Homo sapiens
  misc_RNA (1)...(19): siRNA sense strand
agaagacacaagaaagcaa

SEQ ID NO: 2527387 - RNA, 19 nt, Homo sapiens
  misc_RNA (1)...(19): siRNA sense strand
acugggaauuaucaggaaa

SEQ ID NO: 2527388 - RNA, 19 nt, Homo sapiens
  misc_RNA (1)...(19): siRNA sense strand
gaagcuuagcccaggaaaa

SEQ ID NO: 2527389 - RNA, 19 nt, Homo sapiens
  misc_RNA (1)...(19): siRNA sense strand
ggaaggaggaggagacccu

SEQ ID NO: 2527390 - RNA, 19 nt, Homo sapiens
  misc_RNA (1)...(19): siRNA sense strand
uggaaaccaaagagcaauu

SEQ ID NO: 2527391 - RNA, 19 nt, Homo sapiens
  misc_RNA (1)...(19): siRNA sense strand
uggaggaccuggaagcaca

SEQ ID NO: 2527392 - RNA, 19 nt, Homo sapiens
  misc_RNA (1)...(19): siRNA sense strand
caucaagguagcagaggau

SEQ ID NO: 2527393 - RNA, 19 nt, Homo sapiens
  misc_RNA (1)...(19): siRNA sense strand
uagcagaggauguggccau

SEQ ID NO: 2527394 - RNA, 19 nt, Homo sapiens
  misc_RNA (1)...(19): siRNA sense strand
ccaucaagguagcagagga

SEQ ID NO: 2527395 - RNA, 19 nt, Homo sapiens
  misc_RNA (1)...(19): siRNA sense strand
uaucaauggaggugaccga

SEQ ID NO: 2527396 - RNA, 19 nt, Homo sapiens
  misc_RNA (1)...(19): siRNA sense strand
caucaagguagcagaggau

SEQ ID NO: 2527397 - RNA, 19 nt, Homo sapiens
  misc_RNA (1)...(19): siRNA sense strand
uagcagaggauguggccau

SEQ ID NO: 2527398 - RNA, 19 nt, Homo sapiens
  misc_RNA (1)...(19): siRNA sense strand
ccaucaagguagcagagga

SEQ ID NO: 2527399 - RNA, 19 nt, Homo sapiens
  misc_RNA (1)...(19): siRNA sense strand
uaucaauggaggugaccga

SEQ ID NO: 2527400 - RNA, 19 nt, Homo sapiens
  misc_RNA (1)...(19): siRNA sense strand
acauuaaagaggucagaau

SEQ ID NO: 2527401 - RNA, 19 nt, Homo sapiens
  misc_RNA (1)...(19): siRNA sense strand
acagaagcaccuagggaau

SEQ ID NO: 2527402 - RNA, 19 nt, Homo sapiens
  misc_RNA (1)...(19): siRNA sense strand
auuaaagaggucagaauca

SEQ ID NO: 2527403 - RNA, 19 nt, Homo sapiens
  misc_RNA (1)...(19): siRNA sense strand
gaacagaagcaccuaggga

SEQ ID NO: 2527404 - RNA, 19 nt, Homo sapiens
  misc_RNA (1)...(19): siRNA sense strand
cccaguacuuugagaggca

SEQ ID NO: 2527405 - RNA, 19 nt, Homo sapiens
  misc_RNA (1)...(19): siRNA sense strand
cagcagcagugguguggga

SEQ ID NO: 2527406 - RNA, 19 nt, Homo sapiens
  misc_RNA (1)...(19): siRNA sense strand
ccaacaaugacuuugacau

SEQ ID NO: 2527407 - RNA, 19 nt, Homo sapiens
  misc_RNA (1)...(19): siRNA sense strand
ccguagacauguaucucau

SEQ ID NO: 2527408 - RNA, 19 nt, Homo sapiens
  misc_RNA (1)...(19): siRNA sense strand
gcacagagaaccagagcca

SEQ ID NO: 2527409 - RNA, 19 nt, Homo sapiens
  misc_RNA (1)...(19): siRNA sense strand
augaagaucuccagggaca

SEQ ID NO: 2527410 - RNA, 19 nt, Homo sapiens
  misc_RNA (1)...(19): siRNA sense strand
ggucagagacgcaggguac

SEQ ID NO: 2527411 - RNA, 19 nt, Homo sapiens
  misc_RNA (1)...(19): siRNA sense strand
acagagaaccagagccaca

SEQ ID NO: 2527412 - RNA, 19 nt, Homo sapiens
  misc_RNA (1)...(19): siRNA sense strand
ccuucauccuggucagaga

SEQ ID NO: 2527413 - RNA, 19 nt, Homo sapiens
  misc_RNA (1)...(19): siRNA sense strand
gauucgaagaugauggcga

SEQ ID NO: 2527414 - RNA, 19 nt, Homo sapiens
  misc_RNA (1)...(19): siRNA sense strand
ggagaauguucgagcccua

SEQ ID NO: 2527415 - RNA, 19 nt, Homo sapiens
  misc_RNA (1)...(19): siRNA sense strand
cggaaugagcuuaccgaga

SEQ ID NO: 2527416 - RNA, 19 nt, Homo sapiens
  misc_RNA (1)...(19): siRNA sense strand
gcguggaggcggacaucaa

SEQ ID NO: 2527417 - RNA, 19 nt, Homo sapiens
  misc_RNA (1)...(19): siRNA sense strand
agaagaaucaugaggagga

SEQ ID NO: 2527418 - RNA, 19 nt, Homo sapiens
  misc_RNA (1)...(19): siRNA sense strand
agaaucaugaggaggaaau

SEQ ID NO: 2527419 - RNA, 19 nt, Homo sapiens
  misc_RNA (1)...(19): siRNA sense strand
aagaaugaacagagggugu

SEQ ID NO: 2527420 - RNA, 19 nt, Homo sapiens
  misc_RNA (1)...(19): siRNA sense strand
acuuggagcagaagaucaa

SEQ ID NO: 2527421 - RNA, 19 nt, Homo sapiens
  misc_RNA (1)...(19): siRNA sense strand
uggcacagauccaggcuca

SEQ ID NO: 2527422 - RNA, 19 nt, Homo sapiens
  misc_RNA (1)...(19): siRNA sense strand
ugauaaugcaagacuaaca

SEQ ID NO: 2527423 - RNA, 19 nt, Homo sapiens
  misc_RNA (1)...(19): siRNA sense strand
gggccagaagcucgaguau

SEQ ID NO: 2527424 - RNA, 19 nt, Homo sapiens
  misc_RNA (1)...(19): siRNA sense strand
ggacaucaaugguuugcga

SEQ ID NO: 2527425 - RNA, 19 nt, Homo sapiens
  misc_RNA (1)...(19): siRNA sense strand
aagucaacaacaagaauga

SEQ ID NO: 2527426 - RNA, 19 nt, Homo sapiens
  misc_RNA (1)...(19): siRNA sense strand
guucuaaaucaaaaggcua

SEQ ID NO: 2527427 - RNA, 19 nt, Homo sapiens
  misc_RNA (1)...(19): siRNA sense strand
caagaagaaucaugaggag

SEQ ID NO: 2527428 - RNA, 19 nt, Homo sapiens
  misc_RNA (1)...(19): siRNA sense strand
cuaggaaggcggaggccau

SEQ ID NO: 2527429 - RNA, 19 nt, Homo sapiens
  misc_RNA (1)...(19): siRNA sense strand
aggcggaggccauagggaa

SEQ ID NO: 2527430 - RNA, 19 nt, Homo sapiens
  misc_RNA (1)...(19): siRNA sense strand
agcugaaagugcagggcga

SEQ ID NO: 2527431 - RNA, 19 nt, Homo sapiens
  misc_RNA (1)...(19): siRNA sense strand
ggguagaagacuccagaac

SEQ ID NO: 2527432 - RNA, 19 nt, Homo sapiens
  misc_RNA (1)...(19): siRNA sense strand
gagcacuccugcaggggua

SEQ ID NO: 2527433 - RNA, 19 nt, Homo sapiens
  misc_RNA (1)...(19): siRNA sense strand
ggaagaagcucaugggaac

SEQ ID NO: 2527434 - RNA, 19 nt, Homo sapiens
  misc_RNA (1)...(19): siRNA sense strand
cggaagaagcucaugggaa

SEQ ID NO: 2527435 - RNA, 19 nt, Homo sapiens
  misc_RNA (1)...(19): siRNA sense strand
gcucauuacaagugacaca

SEQ ID NO: 2527436 - RNA, 19 nt, Homo sapiens
  misc_RNA (1)...(19): siRNA sense strand
uaucaguggaagaggguga

SEQ ID NO: 2527437 - RNA, 19 nt, Homo sapiens
  misc_RNA (1)...(19): siRNA sense strand
ccuaugagguugagcugga

SEQ ID NO: 2527438 - RNA, 19 nt, Homo sapiens
  misc_RNA (1)...(19): siRNA sense strand
agagaguccuguuggccaa

SEQ ID NO: 2527439 - RNA, 19 nt, Homo sapiens
  misc_RNA (1)...(19): siRNA sense strand
ccagaaacuaaaggauaaa

SEQ ID NO: 2527440 - RNA, 19 nt, Homo sapiens
  misc_RNA (1)...(19): siRNA sense strand
agguugagcuggagaugca

SEQ ID NO: 2527441 - RNA, 19 nt, Homo sapiens
  misc_RNA (1)...(19): siRNA sense strand
aggagaacuggaucagaaa

SEQ ID NO: 2527442 - RNA, 19 nt, Homo sapiens
  misc_RNA (1)...(19): siRNA sense strand
cgggagacgaagagguguu

SEQ ID NO: 2527443 - RNA, 19 nt, Homo sapiens
  misc_RNA (1)...(19): siRNA sense strand
gaugcaagcuucuggccuu

SEQ ID NO: 2527444 - RNA, 19 nt, Homo sapiens
  misc_RNA (1)...(19): siRNA sense strand
aagcacagugggaagacaa

SEQ ID NO: 2527445 - RNA, 19 nt, Homo sapiens
  misc_RNA (1)...(19): siRNA sense strand
cgcccaucuuggaggauuu

SEQ ID NO: 2527446 - RNA, 19 nt, Homo sapiens
  misc_RNA (1)...(19): siRNA sense strand
ggaagaagcugaccgugga

SEQ ID NO: 2527447 - RNA, 19 nt, Homo sapiens
  misc_RNA (1)...(19): siRNA sense strand
ggaucugugaccugagaga

SEQ ID NO: 2527448 - RNA, 19 nt, Homo sapiens
  misc_RNA (1)...(19): siRNA sense strand
cggcacaacuagacaaccu

SEQ ID NO: 2527449 - RNA, 19 nt, Homo sapiens
  misc_RNA (1)...(19): siRNA sense strand
ggaagagggugaggggcua

SEQ ID NO: 2527450 - RNA, 19 nt, Homo sapiens
  misc_RNA (1)...(19): siRNA sense strand
ccagcagguccuuaagcaa

SEQ ID NO: 2527451 - RNA, 19 nt, Homo sapiens
  misc_RNA (1)...(19): siRNA sense strand
uggccaaggaagaagcuga

SEQ ID NO: 2527452 - RNA, 19 nt, Homo sapiens
  misc_RNA (1)...(19): siRNA sense strand
agacauaauuaaagacugg

SEQ ID NO: 2527453 - RNA, 19 nt, Homo sapiens
  misc_RNA (1)...(19): siRNA sense strand
gagcagaaguguuccguga

SEQ ID NO: 2527454 - RNA, 19 nt, Homo sapiens
  misc_RNA (1)...(19): siRNA sense strand
gagugaaauggaugagaau

SEQ ID NO: 2527455 - RNA, 19 nt, Homo sapiens
  misc_RNA (1)...(19): siRNA sense strand
gcagaaagggcaugccuca

SEQ ID NO: 2527456 - RNA, 19 nt, Homo sapiens
  misc_RNA (1)...(19): siRNA sense strand
auugaggagaagauggaaa

SEQ ID NO: 2527457 - RNA, 19 nt, Homo sapiens
  misc_RNA (1)...(19): siRNA sense strand
aagaucaagaagaggaaga

SEQ ID NO: 2527458 - RNA, 19 nt, Homo sapiens
  misc_RNA (1)...(19): siRNA sense strand
aggauuugguggugggucu

SEQ ID NO: 2527459 - RNA, 19 nt, Homo sapiens
  misc_RNA (1)...(19): siRNA sense strand
ugaagaucaagaagaggaa

SEQ ID NO: 2527460 - RNA, 19 nt, Homo sapiens
  misc_RNA (1)...(19): siRNA sense strand
aaauaaagaagaaggaggu

SEQ ID NO: 2527461 - RNA, 19 nt, Homo sapiens
  misc_RNA (1)...(19): siRNA sense strand
ccggaaaaugguagaugaa

SEQ ID NO: 2527462 - RNA, 19 nt, Homo sapiens
  misc_RNA (1)...(19): siRNA sense strand
aggaguaugaggaguauca

SEQ ID NO: 2527463 - RNA, 19 nt, Homo sapiens
  misc_RNA (1)...(19): siRNA sense strand
uaaagaagaaggaggugca

SEQ ID NO: 2527464 - RNA, 19 nt, Homo sapiens
  misc_RNA (1)...(19): siRNA sense strand
accugaagaucuccggaaa

SEQ ID NO: 2527465 - RNA, 19 nt, Homo sapiens
  misc_RNA (1)...(19): siRNA sense strand
augauaaguaaccagguaa

SEQ ID NO: 2527466 - RNA, 19 nt, Homo sapiens
  misc_RNA (1)...(19): siRNA sense strand
aucaagaagaggaagaaga

SEQ ID NO: 2527467 - RNA, 19 nt, Homo sapiens
  misc_RNA (1)...(19): siRNA sense strand
ccugaagaucuccggaaaa

SEQ ID NO: 2527468 - RNA, 19 nt, Homo sapiens
  misc_RNA (1)...(19): siRNA sense strand
agggaugacuagagaggag

SEQ ID NO: 2527469 - RNA, 19 nt, Homo sapiens
  misc_RNA (1)...(19): siRNA sense strand
ugguagaugaagaucaaga

SEQ ID NO: 2527470 - RNA, 19 nt, Homo sapiens
  misc_RNA (1)...(19): siRNA sense strand
ccaaagagugaaauggaug

SEQ ID NO: 2527471 - RNA, 19 nt, Homo sapiens
  misc_RNA (1)...(19): siRNA sense strand
cuagagaggaguaugagga

SEQ ID NO: 2527472 - RNA, 19 nt, Homo sapiens
  misc_RNA (1)...(19): siRNA sense strand
aguaugaggaguaucaaaa

SEQ ID NO: 2527473 - RNA, 19 nt, Homo sapiens
  misc_RNA (1)...(19): siRNA sense strand
agauaaacaacauggagaa

SEQ ID NO: 2527474 - RNA, 19 nt, Homo sapiens
  misc_RNA (1)...(19): siRNA sense strand
guuagaaauuaaagggaag

SEQ ID NO: 2527475 - RNA, 19 nt, Homo sapiens
  misc_RNA (1)...(19): siRNA sense strand
ucaguaacacagugguaaa

SEQ ID NO: 2527476 - RNA, 19 nt, Homo sapiens
  misc_RNA (1)...(19): siRNA sense strand
gggaaagcuaaguacacaa

SEQ ID NO: 2527477 - RNA, 19 nt, Homo sapiens
  misc_RNA (1)...(19): siRNA sense strand
agaaguugaaucagagcua

SEQ ID NO: 2527478 - RNA, 19 nt, Homo sapiens
  misc_RNA (1)...(19): siRNA sense strand
ugaaaauaucccagaacaa

SEQ ID NO: 2527479 - RNA, 19 nt, Homo sapiens
  misc_RNA (1)...(19): siRNA sense strand
acucaaagaaugaagcaca

SEQ ID NO: 2527480 - RNA, 19 nt, Homo sapiens
  misc_RNA (1)...(19): siRNA sense strand
caugauagaaagaaagcuu

SEQ ID NO: 2527481 - RNA, 19 nt, Homo sapiens
  misc_RNA (1)...(19): siRNA sense strand
guccauacuuaguguaaaa

SEQ ID NO: 2527482 - RNA, 19 nt, Homo sapiens
  misc_RNA (1)...(19): siRNA sense strand
agaaaguguuggaugagga

SEQ ID NO: 2527483 - RNA, 19 nt, Homo sapiens
  misc_RNA (1)...(19): siRNA sense strand
gcuuuagaucauaguagaa

SEQ ID NO: 2527484 - RNA, 19 nt, Homo sapiens
  misc_RNA (1)...(19): siRNA sense strand
aggaagaaucauuguuuga

SEQ ID NO: 2527485 - RNA, 19 nt, Homo sapiens
  misc_RNA (1)...(19): siRNA sense strand
caaaaugaauccagagacu

SEQ ID NO: 2527486 - RNA, 19 nt, Homo sapiens
  misc_RNA (1)...(19): siRNA sense strand
augcaaaccacucggaaaa

SEQ ID NO: 2527487 - RNA, 19 nt, Homo sapiens
  misc_RNA (1)...(19): siRNA sense strand
aagauaaacaacauggaga

SEQ ID NO: 2527488 - RNA, 19 nt, Homo sapiens
  misc_RNA (1)...(19): siRNA sense strand
gugagaaauugcugguacu

SEQ ID NO: 2527489 - RNA, 19 nt, Homo sapiens
  misc_RNA (1)...(19): siRNA sense strand
ccugugaaucagaaaggua

SEQ ID NO: 2527490 - RNA, 19 nt, Homo sapiens
  misc_RNA (1)...(19): siRNA sense strand
cagaaagguacacugcaaa

SEQ ID NO: 2527491 - RNA, 19 nt, Homo sapiens
  misc_RNA (1)...(19): siRNA sense strand
aguaaugagcuuucaguca

SEQ ID NO: 2527492 - RNA, 19 nt, Homo sapiens
  misc_RNA (1)...(19): siRNA sense strand
gaagaagaguguuugccuu

SEQ ID NO: 2527493 - RNA, 19 nt, Homo sapiens
  misc_RNA (1)...(19): siRNA sense strand
aagaaagcuugguagcaga

SEQ ID NO: 2527494 - RNA, 19 nt, Homo sapiens
  misc_RNA (1)...(19): siRNA sense strand
cagcauauccugagaucgu

SEQ ID NO: 2527495 - RNA, 19 nt, Homo sapiens
  misc_RNA (1)...(19): siRNA sense strand
cuacauuaccacaggaauc

SEQ ID NO: 2527496 - RNA, 19 nt, Homo sapiens
  misc_RNA (1)...(19): siRNA sense strand
uaguaauucuccagcuauu

SEQ ID NO: 2527497 - RNA, 19 nt, Homo sapiens
  misc_RNA (1)...(19): siRNA sense strand
gauaaacaacauggagaau

SEQ ID NO: 2527498 - RNA, 19 nt, Homo sapiens
  misc_RNA (1)...(19): siRNA sense strand
ucucuaagaccuuuggcua

SEQ ID NO: 2527499 - RNA, 19 nt, Homo sapiens
  misc_RNA (1)...(19): siRNA sense strand
acauaaagaaaguguugga

SEQ ID NO: 2527500 - RNA, 19 nt, Homo sapiens
  misc_RNA (1)...(19): siRNA sense strand
uggcuauacagcaaauuaa

SEQ ID NO: 2527501 - RNA, 19 nt, Homo sapiens
  misc_RNA (1)...(19): siRNA sense strand
guguuugccuugacagaca

SEQ ID NO: 2527502 - RNA, 19 nt, Homo sapiens
  misc_RNA (1)...(19): siRNA sense strand
ugucaguaacacaguggua

SEQ ID NO: 2527503 - RNA, 19 nt, Homo sapiens
  misc_RNA (1)...(19): siRNA sense strand
caggaauucccuugcaaaa

SEQ ID NO: 2527504 - RNA, 19 nt, Homo sapiens
  misc_RNA (1)...(19): siRNA sense strand
uaugcaaaccacucggaaa

SEQ ID NO: 2527505 - RNA, 19 nt, Homo sapiens
  misc_RNA (1)...(19): siRNA sense strand
cugcaauguuagaccacca

SEQ ID NO: 2527506 - RNA, 19 nt, Homo sapiens
  misc_RNA (1)...(19): siRNA sense strand
guagaaaaguugauaugca

SEQ ID NO: 2527507 - RNA, 19 nt, Homo sapiens
  misc_RNA (1)...(19): siRNA sense strand
cugagaucguugcuguuua

SEQ ID NO: 2527508 - RNA, 19 nt, Homo sapiens
  misc_RNA (1)...(19): siRNA sense strand
gcacaguucucaaaagcau

SEQ ID NO: 2527509 - RNA, 19 nt, Homo sapiens
  misc_RNA (1)...(19): siRNA sense strand
guuugaaugcacaagaaca

SEQ ID NO: 2527510 - RNA, 19 nt, Homo sapiens
  misc_RNA (1)...(19): siRNA sense strand
ggcuauacagcaaauuaaa

SEQ ID NO: 2527511 - RNA, 19 nt, Homo sapiens
  misc_RNA (1)...(19): siRNA sense strand
acaacuguccugugaauca

SEQ ID NO: 2527512 - RNA, 19 nt, Homo sapiens
  misc_RNA (1)...(19): siRNA sense strand
aggauaaucuacaaccaga

SEQ ID NO: 2527513 - RNA, 19 nt, Homo sapiens
  misc_RNA (1)...(19): siRNA sense strand
agcagaauuccaaguuaaa

SEQ ID NO: 2527514 - RNA, 19 nt, Homo sapiens
  misc_RNA (1)...(19): siRNA sense strand
aaucagagcuaucagccau

SEQ ID NO: 2527515 - RNA, 19 nt, Homo sapiens
  misc_RNA (1)...(19): siRNA sense strand
ccaggaauucccuugcaaa

SEQ ID NO: 2527516 - RNA, 19 nt, Homo sapiens
  misc_RNA (1)...(19): siRNA sense strand
uuuaguaauucuccagcua

SEQ ID NO: 2527517 - RNA, 19 nt, Homo sapiens
  misc_RNA (1)...(19): siRNA sense strand
gguacacugcaaacauaaa

SEQ ID NO: 2527518 - RNA, 19 nt, Homo sapiens
  misc_RNA (1)...(19): siRNA sense strand
uuacaucagugguuggaga

SEQ ID NO: 2527519 - RNA, 19 nt, Homo sapiens
  misc_RNA (1)...(19): siRNA sense strand
agaccagaccuaacagaca

SEQ ID NO: 2527520 - RNA, 19 nt, Homo sapiens
  misc_RNA (1)...(19): siRNA sense strand
aggauuuggauuuggagau

SEQ ID NO: 2527521 - RNA, 19 nt, Homo sapiens
  misc_RNA (1)...(19): siRNA sense strand
uaaagcaggugauggccaa

SEQ ID NO: 2527522 - RNA, 19 nt, Homo sapiens
  misc_RNA (1)...(19): siRNA sense strand
gaacagaugaugugggcug

SEQ ID NO: 2527523 - RNA, 19 nt, Homo sapiens
  misc_RNA (1)...(19): siRNA sense strand
acauaaacaacguaggaaa

SEQ ID NO: 2527524 - RNA, 19 nt, Homo sapiens
  misc_RNA (1)...(19): siRNA sense strand
auguaagcauugugggaaa

SEQ ID NO: 2527525 - RNA, 19 nt, Homo sapiens
  misc_RNA (1)...(19): siRNA sense strand
guguaagcaaugugggaaa

SEQ ID NO: 2527526 - RNA, 19 nt, Homo sapiens
  misc_RNA (1)...(19): siRNA sense strand
auguaaggaaugugggaaa

SEQ ID NO: 2527527 - RNA, 19 nt, Homo sapiens
  misc_RNA (1)...(19): siRNA sense strand
auguaaggaaugugggaaa

SEQ ID NO: 2527528 - RNA, 19 nt, Homo sapiens
  misc_RNA (1)...(19): siRNA sense strand
auguaagauaugugggaaa

SEQ ID NO: 2527529 - RNA, 19 nt, Homo sapiens
  misc_RNA (1)...(19): siRNA sense strand
aagucacacuggagagaaa

SEQ ID NO: 2527530 - RNA, 19 nt, Homo sapiens
  misc_RNA (1)...(19): siRNA sense strand
auguaaggagugugggaaa

SEQ ID NO: 2527531 - RNA, 19 nt, Homo sapiens
  misc_RNA (1)...(19): siRNA sense strand
augcaagcaaugugggaaa

SEQ ID NO: 2527532 - RNA, 19 nt, Homo sapiens
  misc_RNA (1)...(19): siRNA sense strand
ggagaaaucuucaugggau

SEQ ID NO: 2527533 - RNA, 19 nt, Homo sapiens
  misc_RNA (1)...(19): siRNA sense strand
gccucacacuagagagaaa

SEQ ID NO: 2527534 - RNA, 19 nt, Homo sapiens
  misc_RNA (1)...(19): siRNA sense strand
auguaagcaaugugggaaa

SEQ ID NO: 2527535 - RNA, 19 nt, Homo sapiens
  misc_RNA (1)...(19): siRNA sense strand
gauuguaaggaaugugaaa

SEQ ID NO: 2527536 - RNA, 19 nt, Homo sapiens
  misc_RNA (1)...(19): siRNA sense strand
ccuuauaagcuuucgaaga

SEQ ID NO: 2527537 - RNA, 19 nt, Homo sapiens
  misc_RNA (1)...(19): siRNA sense strand
ccauaugaauguaaggagu

SEQ ID NO: 2527538 - RNA, 19 nt, Homo sapiens
  misc_RNA (1)...(19): siRNA sense strand
auguaaguuuugugggaaa

SEQ ID NO: 2527539 - RNA, 19 nt, Homo sapiens
  misc_RNA (1)...(19): siRNA sense strand
ucgaauacauggaaggacu

SEQ ID NO: 2527540 - RNA, 19 nt, Homo sapiens
  misc_RNA (1)...(19): siRNA sense strand
ucgcagacaugaaaggaca

SEQ ID NO: 2527541 - RNA, 19 nt, Homo sapiens
  misc_RNA (1)...(19): siRNA sense strand
aacucacacuggagagaaa

SEQ ID NO: 2527542 - RNA, 19 nt, Homo sapiens
  misc_RNA (1)...(19): siRNA sense strand
guaggaaagccuugagcca

SEQ ID NO: 2527543 - RNA, 19 nt, Homo sapiens
  misc_RNA (1)...(19): siRNA sense strand
acuauaugggaaagcauua

SEQ ID NO: 2527544 - RNA, 19 nt, Homo sapiens
  misc_RNA (1)...(19): siRNA sense strand
uguaaggagugugggaaau

SEQ ID NO: 2527545 - RNA, 19 nt, Homo sapiens
  misc_RNA (1)...(19): siRNA sense strand
agugguacauguggagaaa

SEQ ID NO: 2527546 - RNA, 19 nt, Homo sapiens
  misc_RNA (1)...(19): siRNA sense strand
acacuggagagaaacgaua

SEQ ID NO: 2527547 - RNA, 19 nt, Homo sapiens
  misc_RNA (1)...(19): siRNA sense strand
agacaugaaaggacacaca

SEQ ID NO: 2527548 - RNA, 19 nt, Homo sapiens
  misc_RNA (1)...(19): siRNA sense strand
gaauguaagcaauguggga

SEQ ID NO: 2527549 - RNA, 19 nt, Homo sapiens
  misc_RNA (1)...(19): siRNA sense strand
ugguacauguggagaaauc

SEQ ID NO: 2527550 - RNA, 19 nt, Homo sapiens
  misc_RNA (1)...(19): siRNA sense strand
agguagucaguguggagaa

SEQ ID NO: 2527551 - RNA, 19 nt, Homo sapiens
  misc_RNA (1)...(19): siRNA sense strand
gaauguaaggaguguggga

SEQ ID NO: 2527552 - RNA, 19 nt, Homo sapiens
  misc_RNA (1)...(19): siRNA sense strand
acacaggagagaagccgua

SEQ ID NO: 2527553 - RNA, 19 nt, Homo sapiens
  misc_RNA (1)...(19): siRNA sense strand
gccucauaaauguaagaua

SEQ ID NO: 2527554 - RNA, 19 nt, Homo sapiens
  misc_RNA (1)...(19): siRNA sense strand
agacaugcugaacaagaaa

SEQ ID NO: 2527555 - RNA, 19 nt, Homo sapiens
  misc_RNA (1)...(19): siRNA sense strand
gaagauauaugguaacgca

SEQ ID NO: 2527556 - RNA, 19 nt, Homo sapiens
  misc_RNA (1)...(19): siRNA sense strand
ggguguaagcaauguggga

SEQ ID NO: 2527557 - RNA, 19 nt, Homo sapiens
  misc_RNA (1)...(19): siRNA sense strand
aagcaaugugggaaagcau

SEQ ID NO: 2527558 - RNA, 19 nt, Homo sapiens
  misc_RNA (1)...(19): siRNA sense strand
aagugguacauguggagaa

SEQ ID NO: 2527559 - RNA, 19 nt, Homo sapiens
  misc_RNA (1)...(19): siRNA sense strand
uggagauggaccuuauaaa

SEQ ID NO: 2527560 - RNA, 19 nt, Homo sapiens
  misc_RNA (1)...(19): siRNA sense strand
cccuaugaauguaagcaau

SEQ ID NO: 2527561 - RNA, 19 nt, Homo sapiens
  misc_RNA (1)...(19): siRNA sense strand
cauaaacaacguaggaaag

SEQ ID NO: 2527562 - RNA, 19 nt, Homo sapiens
  misc_RNA (1)...(19): siRNA sense strand
uguucgaauccaugaaaga

SEQ ID NO: 2527563 - RNA, 19 nt, Homo sapiens
  misc_RNA (1)...(19): siRNA sense strand
gguaacgcacaguggagau

SEQ ID NO: 2527564 - RNA, 19 nt, Homo sapiens
  misc_RNA (1)...(19): siRNA sense strand
gcacaguggagauggaccu

SEQ ID NO: 2527565 - RNA, 19 nt, Homo sapiens
  misc_RNA (1)...(19): siRNA sense strand
cccuaugaauguaaacuau

SEQ ID NO: 2527566 - RNA, 19 nt, Homo sapiens
  misc_RNA (1)...(19): siRNA sense strand
ggggagaagccauaugaau

SEQ ID NO: 2527567 - RNA, 19 nt, Homo sapiens
  misc_RNA (1)...(19): siRNA sense strand
gcaugaaagaagucacacu

SEQ ID NO: 2527568 - RNA, 19 nt, Homo sapiens
  misc_RNA (1)...(19): siRNA sense strand
cccgauggguguaagcaau

SEQ ID NO: 2527569 - RNA, 19 nt, Homo sapiens
  misc_RNA (1)...(19): siRNA sense strand
gggagaaaagggugacaaa

SEQ ID NO: 2527570 - RNA, 19 nt, Homo sapiens
  misc_RNA (1)...(19): siRNA sense strand
ugauuuguuaggagggaaa

SEQ ID NO: 2527571 - RNA, 19 nt, Homo sapiens
  misc_RNA (1)...(19): siRNA sense strand
gcauuuauauucaugggaa

SEQ ID NO: 2527572 - RNA, 19 nt, Homo sapiens
  misc_RNA (1)...(19): siRNA sense strand
acugaaagugacagagaca

SEQ ID NO: 2527573 - RNA, 19 nt, Homo sapiens
  misc_RNA (1)...(19): siRNA sense strand
uggaagcagaagagccaaa

SEQ ID NO: 2527574 - RNA, 19 nt, Homo sapiens
  misc_RNA (1)...(19): siRNA sense strand
acaaaggagauguguccaa

SEQ ID NO: 2527575 - RNA, 19 nt, Homo sapiens
  misc_RNA (1)...(19): siRNA sense strand
cauuggaaacccagugcaa

SEQ ID NO: 2527576 - RNA, 19 nt, Homo sapiens
  misc_RNA (1)...(19): siRNA sense strand
cuucauugcccgaggaauc

SEQ ID NO: 2527577 - RNA, 19 nt, Homo sapiens
  misc_RNA (1)...(19): siRNA sense strand
gggacuuggauaagagagu

SEQ ID NO: 2527578 - RNA, 19 nt, Homo sapiens
  misc_RNA (1)...(19): siRNA sense strand
accaaagauaugaggguca

SEQ ID NO: 2527579 - RNA, 19 nt, Homo sapiens
  misc_RNA (1)...(19): siRNA sense strand
gcaacagcaccaagggcau

SEQ ID NO: 2527580 - RNA, 19 nt, Homo sapiens
  misc_RNA (1)...(19): siRNA sense strand
caccagggcagaagggaga

SEQ ID NO: 2527581 - RNA, 19 nt, Homo sapiens
  misc_RNA (1)...(19): siRNA sense strand
ccuggaagcagaagagcca

SEQ ID NO: 2527582 - RNA, 19 nt, Homo sapiens
  misc_RNA (1)...(19): siRNA sense strand
ggacauucucaguggugca

SEQ ID NO: 2527583 - RNA, 19 nt, Homo sapiens
  misc_RNA (1)...(19): siRNA sense strand
gaacugggccugcagggaa

SEQ ID NO: 2527584 - RNA, 19 nt, Homo sapiens
  misc_RNA (1)...(19): siRNA sense strand
acaacggauuggauggaca

SEQ ID NO: 2527585 - RNA, 19 nt, Homo sapiens
  misc_RNA (1)...(19): siRNA sense strand
ccuuguauuuugaucgaaa

SEQ ID NO: 2527586 - RNA, 19 nt, Homo sapiens
  misc_RNA (1)...(19): siRNA sense strand
cagaagagccaaaggcccu

SEQ ID NO: 2527587 - RNA, 19 nt, Homo sapiens
  misc_RNA (1)...(19): siRNA sense strand
caacuggaugagaggacau

SEQ ID NO: 2527588 - RNA, 19 nt, Homo sapiens
  misc_RNA (1)...(19): siRNA sense strand
gggagaaaagggagaccau

SEQ ID NO: 2527589 - RNA, 19 nt, Homo sapiens
  misc_RNA (1)...(19): siRNA sense strand
gguuaaggaauucaaggau

SEQ ID NO: 2527590 - RNA, 19 nt, Homo sapiens
  misc_RNA (1)...(19): siRNA sense strand
guuaaggaauucaaggauc

SEQ ID NO: 2527591 - RNA, 19 nt, Homo sapiens
  misc_RNA (1)...(19): siRNA sense strand
acaugagagaucagcauuu

SEQ ID NO: 2527592 - RNA, 19 nt, Homo sapiens
  misc_RNA (1)...(19): siRNA sense strand
aacugggccugcagggaaa

SEQ ID NO: 2527593 - RNA, 19 nt, Homo sapiens
  misc_RNA (1)...(19): siRNA sense strand
augauaccuugguuggaaa

SEQ ID NO: 2527594 - RNA, 19 nt, Homo sapiens
  misc_RNA (1)...(19): siRNA sense strand
gcaggaaauccaggggaaa

SEQ ID NO: 2527595 - RNA, 19 nt, Homo sapiens
  misc_RNA (1)...(19): siRNA sense strand
uggauaagagagucugcua

SEQ ID NO: 2527596 - RNA, 19 nt, Homo sapiens
  misc_RNA (1)...(19): siRNA sense strand
ucgacagacucaaggcaaa

SEQ ID NO: 2527597 - RNA, 19 nt, Homo sapiens
  misc_RNA (1)...(19): siRNA sense strand
gcaauaauaucaagggaac

SEQ ID NO: 2527598 - RNA, 19 nt, Homo sapiens
  misc_RNA (1)...(19): siRNA sense strand
cagaauaagggcuuggaau

SEQ ID NO: 2527599 - RNA, 19 nt, Homo sapiens
  misc_RNA (1)...(19): siRNA sense strand
uggaaagguugucaggaau

SEQ ID NO: 2527600 - RNA, 19 nt, Homo sapiens
  misc_RNA (1)...(19): siRNA sense strand
acuugaaggaugugugaau

SEQ ID NO: 2527601 - RNA, 19 nt, Homo sapiens
  misc_RNA (1)...(19): siRNA sense strand
aggucaauauucagaucaa

SEQ ID NO: 2527602 - RNA, 19 nt, Homo sapiens
  misc_RNA (1)...(19): siRNA sense strand
gcaaaggaaacaggagcaa

SEQ ID NO: 2527603 - RNA, 19 nt, Homo sapiens
  misc_RNA (1)...(19): siRNA sense strand
guauaguccaagaagauau

SEQ ID NO: 2527604 - RNA, 19 nt, Homo sapiens
  misc_RNA (1)...(19): siRNA sense strand
auaaagugcaaucgaggaa

SEQ ID NO: 2527605 - RNA, 19 nt, Homo sapiens
  misc_RNA (1)...(19): siRNA sense strand
aguacaaacagaagaaagu

SEQ ID NO: 2527606 - RNA, 19 nt, Homo sapiens
  misc_RNA (1)...(19): siRNA sense strand
ccaagauuugucugauaaa

SEQ ID NO: 2527607 - RNA, 19 nt, Homo sapiens
  misc_RNA (1)...(19): siRNA sense strand
uuguauaguccaagaagau

SEQ ID NO: 2527608 - RNA, 19 nt, Homo sapiens
  misc_RNA (1)...(19): siRNA sense strand
auggaaaugucuggguaua

SEQ ID NO: 2527609 - RNA, 19 nt, Homo sapiens
  misc_RNA (1)...(19): siRNA sense strand
acuacaaacaugggagcaa

SEQ ID NO: 2527610 - RNA, 19 nt, Homo sapiens
  misc_RNA (1)...(19): siRNA sense strand
caauggaaaugucugggua

SEQ ID NO: 2527611 - RNA, 19 nt, Homo sapiens
  misc_RNA (1)...(19): siRNA sense strand
agaugggacaacacaaaua

SEQ ID NO: 2527612 - RNA, 19 nt, Homo sapiens
  misc_RNA (1)...(19): siRNA sense strand
uaccaaacccugaggagau

SEQ ID NO: 2527613 - RNA, 19 nt, Homo sapiens
  misc_RNA (1)...(19): siRNA sense strand
cguaaguggagaugaccuu

SEQ ID NO: 2527614 - RNA, 19 nt, Homo sapiens
  misc_RNA (1)...(19): siRNA sense strand
ugcaauaauaucaagggaa

SEQ ID NO: 2527615 - RNA, 19 nt, Homo sapiens
  misc_RNA (1)...(19): siRNA sense strand
agcuggaguuuaaggaaga

SEQ ID NO: 2527616 - RNA, 19 nt, Homo sapiens
  misc_RNA (1)...(19): siRNA sense strand
cauacaaagaagagagcuc

SEQ ID NO: 2527617 - RNA, 19 nt, Homo sapiens
  misc_RNA (1)...(19): siRNA sense strand
augaagaggaggagacauc

SEQ ID NO: 2527618 - RNA, 19 nt, Homo sapiens
  misc_RNA (1)...(19): siRNA sense strand
ggcaacagaauaagggcuu

SEQ ID NO: 2527619 - RNA, 19 nt, Homo sapiens
  misc_RNA (1)...(19): siRNA sense strand
gcaaugggccaacaggcaa

SEQ ID NO: 2527620 - RNA, 19 nt, Homo sapiens
  misc_RNA (1)...(19): siRNA sense strand
uugaaggaugugugaauuu

SEQ ID NO: 2527621 - RNA, 19 nt, Homo sapiens
  misc_RNA (1)...(19): siRNA sense strand
caguucugguauaaagcaa

SEQ ID NO: 2527622 - RNA, 19 nt, Homo sapiens
  misc_RNA (1)...(19): siRNA sense strand
auaucuaugaggagcaaau

SEQ ID NO: 2527623 - RNA, 19 nt, Homo sapiens
  misc_RNA (1)...(19): siRNA sense strand
uaucaagggaacagacuca

SEQ ID NO: 2527624 - RNA, 19 nt, Homo sapiens
  misc_RNA (1)...(19): siRNA sense strand
ucggauagcauguggaaag

SEQ ID NO: 2527625 - RNA, 19 nt, Homo sapiens
  misc_RNA (1)...(19): siRNA sense strand
ggaugaagaggaggagaca

SEQ ID NO: 2527626 - RNA, 19 nt, Homo sapiens
  misc_RNA (1)...(19): siRNA sense strand
caguaucaguacaaacaga

SEQ ID NO: 2527627 - RNA, 19 nt, Homo sapiens
  misc_RNA (1)...(19): siRNA sense strand
cuaucaucccaauggaaau

SEQ ID NO: 2527628 - RNA, 19 nt, Homo sapiens
  misc_RNA (1)...(19): siRNA sense strand
gcaauuugucuccaggaau

SEQ ID NO: 2527629 - RNA, 19 nt, Homo sapiens
  misc_RNA (1)...(19): siRNA sense strand
agaaacaguaacaugucua

SEQ ID NO: 2527630 - RNA, 19 nt, Homo sapiens
  misc_RNA (1)...(19): siRNA sense strand
caauaucuugggaggucaa

SEQ ID NO: 2527631 - RNA, 19 nt, Homo sapiens
  misc_RNA (1)...(19): siRNA sense strand
cagcgaucuaagagcauuu

SEQ ID NO: 2527632 - RNA, 19 nt, Homo sapiens
  misc_RNA (1)...(19): siRNA sense strand
caauaauaucaagggaaca

SEQ ID NO: 2527633 - RNA, 19 nt, Homo sapiens
  misc_RNA (1)...(19): siRNA sense strand
caacaagguaaaugguuuu

SEQ ID NO: 2527634 - RNA, 19 nt, Homo sapiens
  misc_RNA (1)...(19): siRNA sense strand
aagagaaagcugaaccuga

SEQ ID NO: 2527635 - RNA, 19 nt, Homo sapiens
  misc_RNA (1)...(19): siRNA sense strand
ggccaacaggcaagaauca

SEQ ID NO: 2527636 - RNA, 19 nt, Homo sapiens
  misc_RNA (1)...(19): siRNA sense strand
ucaaggaugaagaggagga

SEQ ID NO: 2527637 - RNA, 19 nt, Homo sapiens
  misc_RNA (1)...(19): siRNA sense strand
gacucaaggcaaaagaaaa

SEQ ID NO: 2527638 - RNA, 19 nt, Homo sapiens
  misc_RNA (1)...(19): siRNA sense strand
gaugauucaaagcgcuuaa

SEQ ID NO: 2527639 - RNA, 19 nt, Homo sapiens
  misc_RNA (1)...(19): siRNA sense strand
gagcuggaguuuaaggaag

SEQ ID NO: 2527640 - RNA, 19 nt, Homo sapiens
  misc_RNA (1)...(19): siRNA sense strand
ggcauuaacuucaaggaug

SEQ ID NO: 2527641 - RNA, 19 nt, Homo sapiens
  misc_RNA (1)...(19): siRNA sense strand
aggaauuccaguaucagua

SEQ ID NO: 2527642 - RNA, 19 nt, Homo sapiens
  misc_RNA (1)...(19): siRNA sense strand
gcaagaaauccaaagagca

SEQ ID NO: 2527643 - RNA, 19 nt, Homo sapiens
  misc_RNA (1)...(19): siRNA sense strand
agaaauccaaagagcaaaa

SEQ ID NO: 2527644 - RNA, 19 nt, Homo sapiens
  misc_RNA (1)...(19): siRNA sense strand
gccaagaacuacauccuca

SEQ ID NO: 2527645 - RNA, 19 nt, Homo sapiens
  misc_RNA (1)...(19): siRNA sense strand
ugauagauggagauggaaa

SEQ ID NO: 2527646 - RNA, 19 nt, Homo sapiens
  misc_RNA (1)...(19): siRNA sense strand
ugguaaagacagugguuga

SEQ ID NO: 2527647 - RNA, 19 nt, Homo sapiens
  misc_RNA (1)...(19): siRNA sense strand
gcuagaucaacgugguaaa

SEQ ID NO: 2527648 - RNA, 19 nt, Homo sapiens
  misc_RNA (1)...(19): siRNA sense strand
acguagaggccgacaucaa

SEQ ID NO: 2527649 - RNA, 19 nt, Homo sapiens
  misc_RNA (1)...(19): siRNA sense strand
gcuccaaaucaaagggcuu

SEQ ID NO: 2527650 - RNA, 19 nt, Homo sapiens
  misc_RNA (1)...(19): siRNA sense strand
gagcucuggaggaggcaaa

SEQ ID NO: 2527651 - RNA, 19 nt, Homo sapiens
  misc_RNA (1)...(19): siRNA sense strand
gcagauugauaaugccaga

SEQ ID NO: 2527652 - RNA, 19 nt, Homo sapiens
  misc_RNA (1)...(19): siRNA sense strand
ucaccuaacaauugaggau

SEQ ID NO: 2527653 - RNA, 19 nt, Homo sapiens
  misc_RNA (1)...(19): siRNA sense strand
cuaaaaugaccaacggcaa

SEQ ID NO: 2527654 - RNA, 19 nt, Homo sapiens
  misc_RNA (1)...(19): siRNA sense strand
ugguggugcccuuggaaau

SEQ ID NO: 2527655 - RNA, 19 nt, Homo sapiens
  misc_RNA (1)...(19): siRNA sense strand
ggcuaaaguaugaaaauga

SEQ ID NO: 2527656 - RNA, 19 nt, Homo sapiens
  misc_RNA (1)...(19): siRNA sense strand
agacagugguugaagagcu

SEQ ID NO: 2527657 - RNA, 19 nt, Homo sapiens
  misc_RNA (1)...(19): siRNA sense strand
ccauguugguggugcccuu

SEQ ID NO: 2527658 - RNA, 19 nt, Homo sapiens
  misc_RNA (1)...(19): siRNA sense strand
acaacaugcgagcggagua

SEQ ID NO: 2527659 - RNA, 19 nt, Homo sapiens
  misc_RNA (1)...(19): siRNA sense strand
aggccugguucaaugagaa

SEQ ID NO: 2527660 - RNA, 19 nt, Homo sapiens
  misc_RNA (1)...(19): siRNA sense strand
aauucaugcuccaaaucaa

SEQ ID NO: 2527661 - RNA, 19 nt, Homo sapiens
  misc_RNA (1)...(19): siRNA sense strand
accacgaagaggagaugaa

SEQ ID NO: 2527662 - RNA, 19 nt, Homo sapiens
  misc_RNA (1)...(19): siRNA sense strand
gcaaagaucucuccaguaa

SEQ ID NO: 2527663 - RNA, 19 nt, Homo sapiens
  misc_RNA (1)...(19): siRNA sense strand
agguuaagaacuuggaauu

SEQ ID NO: 2527664 - RNA, 19 nt, Homo sapiens
  misc_RNA (1)...(19): siRNA sense strand
aaaagaaaacccagaacaa

SEQ ID NO: 2527665 - RNA, 19 nt, Homo sapiens
  misc_RNA (1)...(19): siRNA sense strand
gaacuuggaauuugggcuu

SEQ ID NO: 2527666 - RNA, 19 nt, Homo sapiens
  misc_RNA (1)...(19): siRNA sense strand
acguucaagaggugcaaua

SEQ ID NO: 2527667 - RNA, 19 nt, Homo sapiens
  misc_RNA (1)...(19): siRNA sense strand
uaguaaucacuguggaaca

SEQ ID NO: 2527668 - RNA, 19 nt, Homo sapiens
  misc_RNA (1)...(19): siRNA sense strand
acagcaaaugccagaagaa

SEQ ID NO: 2527669 - RNA, 19 nt, Homo sapiens
  misc_RNA (1)...(19): siRNA sense strand
uggcauaaacccgggacua

SEQ ID NO: 2527670 - RNA, 19 nt, Homo sapiens
  misc_RNA (1)...(19): siRNA sense strand
cacgaauagcaguguuuaa

SEQ ID NO: 2527671 - RNA, 19 nt, Homo sapiens
  misc_RNA (1)...(19): siRNA sense strand
gagaucaguugaaaggcau

SEQ ID NO: 2527672 - RNA, 19 nt, Homo sapiens
  misc_RNA (1)...(19): siRNA sense strand
aguugugaaugaacagcaa

SEQ ID NO: 2527673 - RNA, 19 nt, Homo sapiens
  misc_RNA (1)...(19): siRNA sense strand
agaauuucgugaaggagga

SEQ ID NO: 2527674 - RNA, 19 nt, Homo sapiens
  misc_RNA (1)...(19): siRNA sense strand
acuuaagagaucaguugaa

SEQ ID NO: 2527675 - RNA, 19 nt, Homo sapiens
  misc_RNA (1)...(19): siRNA sense strand
cuaauauggcaguugugaa

SEQ ID NO: 2527676 - RNA, 19 nt, Homo sapiens
  misc_RNA (1)...(19): siRNA sense strand
ucgugaaggaggacguauu

SEQ ID NO: 2527677 - RNA, 19 nt, Homo sapiens
  misc_RNA (1)...(19): siRNA sense strand
cguggaguuaagaggagaa

SEQ ID NO: 2527678 - RNA, 19 nt, Homo sapiens
  misc_RNA (1)...(19): siRNA sense strand
cagaaauaucagccacgaa

SEQ ID NO: 2527679 - RNA, 19 nt, Homo sapiens
  misc_RNA (1)...(19): siRNA sense strand
uggcaguugugaaugaaca

SEQ ID NO: 2527680 - RNA, 19 nt, Homo sapiens
  misc_RNA (1)...(19): siRNA sense strand
cagaacaacagaaccaaaa

SEQ ID NO: 2527681 - RNA, 19 nt, Homo sapiens
  misc_RNA (1)...(19): siRNA sense strand
agagaucaguugaaaggca

SEQ ID NO: 2527682 - RNA, 19 nt, Homo sapiens
  misc_RNA (1)...(19): siRNA sense strand
cagcuauucccuucagcaa

SEQ ID NO: 2527683 - RNA, 19 nt, Homo sapiens
  misc_RNA (1)...(19): siRNA sense strand
cagugaaccuuguggcuuc

SEQ ID NO: 2527684 - RNA, 19 nt, Homo sapiens
  misc_RNA (1)...(19): siRNA sense strand
aagaaaacccagaacaaca

SEQ ID NO: 2527685 - RNA, 19 nt, Homo sapiens
  misc_RNA (1)...(19): siRNA sense strand
ccaguaaagaauuucguga

SEQ ID NO: 2527686 - RNA, 19 nt, Homo sapiens
  misc_RNA (1)...(19): siRNA sense strand
ugguggugcuuacggagaa

SEQ ID NO: 2527687 - RNA, 19 nt, Homo sapiens
  misc_RNA (1)...(19): siRNA sense strand
ccaacaugguggaaaggac

SEQ ID NO: 2527688 - RNA, 19 nt, Homo sapiens
  misc_RNA (1)...(19): siRNA sense strand
uccucgagcccaagacaaa

SEQ ID NO: 2527689 - RNA, 19 nt, Homo sapiens
  misc_RNA (1)...(19): siRNA sense strand
aagaggaugcaaagaagau

SEQ ID NO: 2527690 - RNA, 19 nt, Homo sapiens
  misc_RNA (1)...(19): siRNA sense strand
gguggugcuuacggagaaa

SEQ ID NO: 2527691 - RNA, 19 nt, Homo sapiens
  misc_RNA (1)...(19): siRNA sense strand
cuacgaaauuugagggcuu

SEQ ID NO: 2527692 - RNA, 19 nt, Homo sapiens
  misc_RNA (1)...(19): siRNA sense strand
aagaaauaucccuggaaua

SEQ ID NO: 2527693 - RNA, 19 nt, Homo sapiens
  misc_RNA (1)...(19): siRNA sense strand
ccaaacaagcugugggaca

SEQ ID NO: 2527694 - RNA, 19 nt, Homo sapiens
  misc_RNA (1)...(19): siRNA sense strand
cgguauaagguuugcaaca

SEQ ID NO: 2527695 - RNA, 19 nt, Homo sapiens
  misc_RNA (1)...(19): siRNA sense strand
cccaaaagcagaaaagaaa

SEQ ID NO: 2527696 - RNA, 19 nt, Homo sapiens
  misc_RNA (1)...(19): siRNA sense strand
uugaauagcaacagauuga

SEQ ID NO: 2527697 - RNA, 19 nt, Homo sapiens
  misc_RNA (1)...(19): siRNA sense strand
gguucuaauacaagcagua

SEQ ID NO: 2527698 - RNA, 19 nt, Homo sapiens
  misc_RNA (1)...(19): siRNA sense strand
ccaaacauugacagaagaa

SEQ ID NO: 2527699 - RNA, 19 nt, Homo sapiens
  misc_RNA (1)...(19): siRNA sense strand
gcuguugagaagaugguua

SEQ ID NO: 2527700 - RNA, 19 nt, Homo sapiens
  misc_RNA (1)...(19): siRNA sense strand
cuggagggacaaagggcaa

SEQ ID NO: 2527701 - RNA, 19 nt, Homo sapiens
  misc_RNA (1)...(19): siRNA sense strand
ugugaauuguugugguuga

SEQ ID NO: 2527702 - RNA, 19 nt, Homo sapiens
  misc_RNA (1)...(19): siRNA sense strand
cugacucuauccaggaaua

SEQ ID NO: 2527703 - RNA, 19 nt, Homo sapiens
  misc_RNA (1)...(19): siRNA sense strand
ucucauuacucgucauaca

SEQ ID NO: 2527704 - RNA, 19 nt, Homo sapiens
  misc_RNA (1)...(19): siRNA sense strand
acacugaggugcaaagcca

SEQ ID NO: 2527705 - RNA, 19 nt, Homo sapiens
  misc_RNA (1)...(19): siRNA sense strand
gcaacaagaucucuggugu

SEQ ID NO: 2527706 - RNA, 19 nt, Homo sapiens
  misc_RNA (1)...(19): siRNA sense strand
gguguaugauaacggaaca

SEQ ID NO: 2527707 - RNA, 19 nt, Homo sapiens
  misc_RNA (1)...(19): siRNA sense strand
aagcaguaguaauggugau

SEQ ID NO: 2527708 - RNA, 19 nt, Homo sapiens
  misc_RNA (1)...(19): siRNA sense strand
uugagaagaugguuagcuu

SEQ ID NO: 2527709 - RNA, 19 nt, Homo sapiens
  misc_RNA (1)...(19): siRNA sense strand
uuacuacggaacaggauua

SEQ ID NO: 2527710 - RNA, 19 nt, Homo sapiens
  misc_RNA (1)...(19): siRNA sense strand
cuauccaggaauacaauaa

SEQ ID NO: 2527711 - RNA, 19 nt, Homo sapiens
  misc_RNA (1)...(19): siRNA sense strand
gcauagcagugaaagcuca

SEQ ID NO: 2527712 - RNA, 19 nt, Homo sapiens
  misc_RNA (1)...(19): siRNA sense strand
guucaguggucuuuccaau

SEQ ID NO: 2527713 - RNA, 19 nt, Homo sapiens
  misc_RNA (1)...(19): siRNA sense strand
ucacaaauguugaauccca

SEQ ID NO: 2527714 - RNA, 19 nt, Homo sapiens
  misc_RNA (1)...(19): siRNA sense strand
aaggaaagauuuugccaau

SEQ ID NO: 2527715 - RNA, 19 nt, Homo sapiens
  misc_RNA (1)...(19): siRNA sense strand
ggauuucuccugaagggaa

SEQ ID NO: 2527716 - RNA, 19 nt, Homo sapiens
  misc_RNA (1)...(19): siRNA sense strand
gauuaugugcguugccauu

SEQ ID NO: 2527717 - RNA, 19 nt, Homo sapiens
  misc_RNA (1)...(19): siRNA sense strand
aaacauugacagaagaacu

SEQ ID NO: 2527718 - RNA, 19 nt, Homo sapiens
  misc_RNA (1)...(19): siRNA sense strand
auaaaauugugguggcaga

SEQ ID NO: 2527719 - RNA, 19 nt, Homo sapiens
  misc_RNA (1)...(19): siRNA sense strand
gaaaagaaagacuggcaca

SEQ ID NO: 2527720 - RNA, 19 nt, Homo sapiens
  misc_RNA (1)...(19): siRNA sense strand
uguaaagcuaccagugaca

SEQ ID NO: 2527721 - RNA, 19 nt, Homo sapiens
  misc_RNA (1)...(19): siRNA sense strand
caaaagcagaaaagaaaga

SEQ ID NO: 2527722 - RNA, 19 nt, Homo sapiens
  misc_RNA (1)...(19): siRNA sense strand
uguuucaaauccaguacaa

SEQ ID NO: 2527723 - RNA, 19 nt, Homo sapiens
  misc_RNA (1)...(19): siRNA sense strand
cacaaauaguggaucuuca

SEQ ID NO: 2527724 - RNA, 19 nt, Homo sapiens
  misc_RNA (1)...(19): siRNA sense strand
ccuuguuuacagaaugaua

SEQ ID NO: 2527725 - RNA, 19 nt, Homo sapiens
  misc_RNA (1)...(19): siRNA sense strand
auguaugacuugugugucu

SEQ ID NO: 2527726 - RNA, 19 nt, Homo sapiens
  misc_RNA (1)...(19): siRNA sense strand
ggaacaggauuaugugcgu

SEQ ID NO: 2527727 - RNA, 19 nt, Homo sapiens
  misc_RNA (1)...(19): siRNA sense strand
acaauaaugggcaacacaa

SEQ ID NO: 2527728 - RNA, 19 nt, Homo sapiens
  misc_RNA (1)...(19): siRNA sense strand
ugugggacacgaagagaau

SEQ ID NO: 2527729 - RNA, 19 nt, Homo sapiens
  misc_RNA (1)...(19): siRNA sense strand
ucccaaaagcagaaaagaa

SEQ ID NO: 2527730 - RNA, 19 nt, Homo sapiens
  misc_RNA (1)...(19): siRNA sense strand
aaguacagaaccacagaau

SEQ ID NO: 2527731 - RNA, 19 nt, Homo sapiens
  misc_RNA (1)...(19): siRNA sense strand
aagucagguucuaauacaa

SEQ ID NO: 2527732 - RNA, 19 nt, Homo sapiens
  misc_RNA (1)...(19): siRNA sense strand
gcagaagcuacaucaucaa

SEQ ID NO: 2527733 - RNA, 19 nt, Homo sapiens
  misc_RNA (1)...(19): siRNA sense strand
ggguaaaggcaaugagagu

SEQ ID NO: 2527734 - RNA, 19 nt, Homo sapiens
  misc_RNA (1)...(19): siRNA sense strand
ccagaagagcuaucggaaa

SEQ ID NO: 2527735 - RNA, 19 nt, Homo sapiens
  misc_RNA (1)...(19): siRNA sense strand
cagaagaggcuguggcuca

SEQ ID NO: 2527736 - RNA, 19 nt, Homo sapiens
  misc_RNA (1)...(19): siRNA sense strand
uggaagauuuagaaagaga

SEQ ID NO: 2527737 - RNA, 19 nt, Homo sapiens
  misc_RNA (1)...(19): siRNA sense strand
gagcaguggcugagagguu

SEQ ID NO: 2527738 - RNA, 19 nt, Homo sapiens
  misc_RNA (1)...(19): siRNA sense strand
cccaagaaagagagggcaa

SEQ ID NO: 2527739 - RNA, 19 nt, Homo sapiens
  misc_RNA (1)...(19): siRNA sense strand
agaauuggguacaggaaca

SEQ ID NO: 2527740 - RNA, 19 nt, Homo sapiens
  misc_RNA (1)...(19): siRNA sense strand
agaugaacccaaaggagaa

SEQ ID NO: 2527741 - RNA, 19 nt, Homo sapiens
  misc_RNA (1)...(19): siRNA sense strand
agacgaggccacagaggaa

SEQ ID NO: 2527742 - RNA, 19 nt, Homo sapiens
  misc_RNA (1)...(19): siRNA sense strand
ucaggaagacagugggcaa

SEQ ID NO: 2527743 - RNA, 19 nt, Homo sapiens
  misc_RNA (1)...(19): siRNA sense strand
aggaagugcgcuuggagaa

SEQ ID NO: 2527744 - RNA, 19 nt, Homo sapiens
  misc_RNA (1)...(19): siRNA sense strand
aauccacacaggagagaaa

SEQ ID NO: 2527745 - RNA, 19 nt, Homo sapiens
  misc_RNA (1)...(19): siRNA sense strand
cagaugaacccaaaggaga

SEQ ID NO: 2527746 - RNA, 19 nt, Homo sapiens
  misc_RNA (1)...(19): siRNA sense strand
agaaacugccauaggaaca

SEQ ID NO: 2527747 - RNA, 19 nt, Homo sapiens
  misc_RNA (1)...(19): siRNA sense strand
aguccuaagucaacagaga

SEQ ID NO: 2527748 - RNA, 19 nt, Homo sapiens
  misc_RNA (1)...(19): siRNA sense strand
gauacacacaggagagaga

SEQ ID NO: 2527749 - RNA, 19 nt, Homo sapiens
  misc_RNA (1)...(19): siRNA sense strand
gcaugaggagggagcagaa

SEQ ID NO: 2527750 - RNA, 19 nt, Homo sapiens
  misc_RNA (1)...(19): siRNA sense strand
uugcaagaucugaaaggaa

SEQ ID NO: 2527751 - RNA, 19 nt, Homo sapiens
  misc_RNA (1)...(19): siRNA sense strand
cugagagguuaugggaaua

SEQ ID NO: 2527752 - RNA, 19 nt, Homo sapiens
  misc_RNA (1)...(19): siRNA sense strand
cggagaagagcuuaaguga

SEQ ID NO: 2527753 - RNA, 19 nt, Homo sapiens
  misc_RNA (1)...(19): siRNA sense strand
gggaaaagcuucagucgga

SEQ ID NO: 2527754 - RNA, 19 nt, Homo sapiens
  misc_RNA (1)...(19): siRNA sense strand
gaagaagcuggguggaaca

SEQ ID NO: 2527755 - RNA, 19 nt, Homo sapiens
  misc_RNA (1)...(19): siRNA sense strand
aggaagauucugaugauga

SEQ ID NO: 2527756 - RNA, 19 nt, Homo sapiens
  misc_RNA (1)...(19): siRNA sense strand
ugaugaugaugaagaggau

SEQ ID NO: 2527757 - RNA, 19 nt, Homo sapiens
  misc_RNA (1)...(19): siRNA sense strand
ucaucaggguaaaggcaau

SEQ ID NO: 2527758 - RNA, 19 nt, Homo sapiens
  misc_RNA (1)...(19): siRNA sense strand
gguuaugggaauauggcuu

SEQ ID NO: 2527759 - RNA, 19 nt, Homo sapiens
  misc_RNA (1)...(19): siRNA sense strand
cuaucaaugugaagagugu

SEQ ID NO: 2527760 - RNA, 19 nt, Homo sapiens
  misc_RNA (1)...(19): siRNA sense strand
gugguaagugcuucaguaa

SEQ ID NO: 2527761 - RNA, 19 nt, Homo sapiens
  misc_RNA (1)...(19): siRNA sense strand
guacaacugcauaggacau

SEQ ID NO: 2527762 - RNA, 19 nt, Homo sapiens
  misc_RNA (1)...(19): siRNA sense strand
acccaaaggagaagcucaa

SEQ ID NO: 2527763 - RNA, 19 nt, Homo sapiens
  misc_RNA (1)...(19): siRNA sense strand
uccaagaaagauagaagaa

SEQ ID NO: 2527764 - RNA, 19 nt, Homo sapiens
  misc_RNA (1)...(19): siRNA sense strand
gggauauuucugaggaagu

SEQ ID NO: 2527765 - RNA, 19 nt, Homo sapiens
  misc_RNA (1)...(19): siRNA sense strand
gguaucuucaucaggguaa

SEQ ID NO: 2527766 - RNA, 19 nt, Homo sapiens
  misc_RNA (1)...(19): siRNA sense strand
cugcugggcucuaaggaga

SEQ ID NO: 2527767 - RNA, 19 nt, Homo sapiens
  misc_RNA (1)...(19): siRNA sense strand
gcaagaucugaaaggaaaa

SEQ ID NO: 2527768 - RNA, 19 nt, Homo sapiens
  misc_RNA (1)...(19): siRNA sense strand
augugcugauugugggaaa

SEQ ID NO: 2527769 - RNA, 19 nt, Homo sapiens
  misc_RNA (1)...(19): siRNA sense strand
caagaaagauagaagaagc

SEQ ID NO: 2527770 - RNA, 19 nt, Homo sapiens
  misc_RNA (1)...(19): siRNA sense strand
gcaaagaccucaggggaga

SEQ ID NO: 2527771 - RNA, 19 nt, Homo sapiens
  misc_RNA (1)...(19): siRNA sense strand
gcucuaaggagaaagaacu

SEQ ID NO: 2527772 - RNA, 19 nt, Homo sapiens
  misc_RNA (1)...(19): siRNA sense strand
ccacauaggagacagacga

SEQ ID NO: 2527773 - RNA, 19 nt, Homo sapiens
  misc_RNA (1)...(19): siRNA sense strand
uuaccauccaagaaagaua

SEQ ID NO: 2527774 - RNA, 19 nt, Homo sapiens
  misc_RNA (1)...(19): siRNA sense strand
acgggauauuucugaggaa

SEQ ID NO: 2527775 - RNA, 19 nt, Homo sapiens
  misc_RNA (1)...(19): siRNA sense strand
cagugacucucguggaaga

SEQ ID NO: 2527776 - RNA, 19 nt, Homo sapiens
  misc_RNA (1)...(19): siRNA sense strand
ugucauaacccgugcucca

SEQ ID NO: 2527777 - RNA, 19 nt, Homo sapiens
  misc_RNA (1)...(19): siRNA sense strand
ggauuugagaaugaagaua

SEQ ID NO: 2527778 - RNA, 19 nt, Homo sapiens
  misc_RNA (1)...(19): siRNA sense strand
aagugaaguccuaagucaa

SEQ ID NO: 2527779 - RNA, 19 nt, Homo sapiens
  misc_RNA (1)...(19): siRNA sense strand
agaaauccaugcacgggaa

SEQ ID NO: 2527780 - RNA, 19 nt, Homo sapiens
  misc_RNA (1)...(19): siRNA sense strand
augugaagaguguggaaaa

SEQ ID NO: 2527781 - RNA, 19 nt, Homo sapiens
  misc_RNA (1)...(19): siRNA sense strand
ccagaauuggguacaggaa

SEQ ID NO: 2527782 - RNA, 19 nt, Homo sapiens
  misc_RNA (1)...(19): siRNA sense strand
uagaagaagcuggguggaa

SEQ ID NO: 2527783 - RNA, 19 nt, Homo sapiens
  misc_RNA (1)...(19): siRNA sense strand
gauaauucaaaacgggaua

SEQ ID NO: 2527784 - RNA, 19 nt, Homo sapiens
  misc_RNA (1)...(19): siRNA sense strand
ugacuguagaucaggaaga

SEQ ID NO: 2527785 - RNA, 19 nt, Homo sapiens
  misc_RNA (1)...(19): siRNA sense strand
caggaagacagugggcaaa

SEQ ID NO: 2527786 - RNA, 19 nt, Homo sapiens
  misc_RNA (1)...(19): siRNA sense strand
gcggauugccauuuccuaa

SEQ ID NO: 2527787 - RNA, 19 nt, Homo sapiens
  misc_RNA (1)...(19): siRNA sense strand
aggggagaaaagaggaaaa

SEQ ID NO: 2527788 - RNA, 19 nt, Homo sapiens
  misc_RNA (1)...(19): siRNA sense strand
gaaaagaggaaaacugaca

SEQ ID NO: 2527789 - RNA, 19 nt, Homo sapiens
  misc_RNA (1)...(19): siRNA sense strand
auguggugagugugggaaa

SEQ ID NO: 2527790 - RNA, 19 nt, Homo sapiens
  misc_RNA (1)...(19): siRNA sense strand
gaccacaggagcagaugaa

SEQ ID NO: 2527791 - RNA, 19 nt, Homo sapiens
  misc_RNA (1)...(19): siRNA sense strand
ugcugaagaugaagaauua

SEQ ID NO: 2527792 - RNA, 19 nt, Homo sapiens
  misc_RNA (1)...(19): siRNA sense strand
gggacaucuucauggaaaa

SEQ ID NO: 2527793 - RNA, 19 nt, Homo sapiens
  misc_RNA (1)...(19): siRNA sense strand
aaaucaaccuggauggcau

SEQ ID NO: 2527794 - RNA, 19 nt, Homo sapiens
  misc_RNA (1)...(19): siRNA sense strand
augcugaagaugaagaauu

SEQ ID NO: 2527795 - RNA, 19 nt, Homo sapiens
  misc_RNA (1)...(19): siRNA sense strand
ccacaugccuggauccaca

SEQ ID NO: 2527796 - RNA, 19 nt, Homo sapiens
  misc_RNA (1)...(19): siRNA sense strand
uggacacugcugaaaguaa

SEQ ID NO: 2527797 - RNA, 19 nt, Homo sapiens
  misc_RNA (1)...(19): siRNA sense strand
ggguccgagugcuggaaga

SEQ ID NO: 2527798 - RNA, 19 nt, Homo sapiens
  misc_RNA (1)...(19): siRNA sense strand
agaaacagcaggaaggaug

SEQ ID NO: 2527799 - RNA, 19 nt, Homo sapiens
  misc_RNA (1)...(19): siRNA sense strand
cccaaguaccuaagagagu

SEQ ID NO: 2527800 - RNA, 19 nt, Homo sapiens
  misc_RNA (1)...(19): siRNA sense strand
uuuaguagagacaggguuu

SEQ ID NO: 2527801 - RNA, 19 nt, Homo sapiens
  misc_RNA (1)...(19): siRNA sense strand
auucuaaacaccugggaga

SEQ ID NO: 2527802 - RNA, 19 nt, Homo sapiens
  misc_RNA (1)...(19): siRNA sense strand
ggaaagagacggaguccac

SEQ ID NO: 2527803 - RNA, 19 nt, Homo sapiens
  misc_RNA (1)...(19): siRNA sense strand
ucacuuagcuggagaggug

SEQ ID NO: 2527804 - RNA, 19 nt, Homo sapiens
  misc_RNA (1)...(19): siRNA sense strand
ucucaugguugcuagguca

SEQ ID NO: 2527805 - RNA, 19 nt, Homo sapiens
  misc_RNA (1)...(19): siRNA sense strand
cuggagaggugcuggcugu

SEQ ID NO: 2527806 - RNA, 19 nt, Homo sapiens
  misc_RNA (1)...(19): siRNA sense strand
cauccuugagauuggagaa

SEQ ID NO: 2527807 - RNA, 19 nt, Homo sapiens
  misc_RNA (1)...(19): siRNA sense strand
ccuuauaggaggagaugau

SEQ ID NO: 2527808 - RNA, 19 nt, Homo sapiens
  misc_RNA (1)...(19): siRNA sense strand
guguagaggcugaugucaa

SEQ ID NO: 2527809 - RNA, 19 nt, Homo sapiens
  misc_RNA (1)...(19): siRNA sense strand
agccauagugguuaagaaa

SEQ ID NO: 2527810 - RNA, 19 nt, Homo sapiens
  misc_RNA (1)...(19): siRNA sense strand
ggcugaugucaauggguua

SEQ ID NO: 2527811 - RNA, 19 nt, Homo sapiens
  misc_RNA (1)...(19): siRNA sense strand
uggaaaugugggaagucaa

SEQ ID NO: 2527812 - RNA, 19 nt, Homo sapiens
  misc_RNA (1)...(19): siRNA sense strand
ugucaauggguuacgaaga

SEQ ID NO: 2527813 - RNA, 19 nt, Homo sapiens
  misc_RNA (1)...(19): siRNA sense strand
agaaccauaaagaggaaau

SEQ ID NO: 2527814 - RNA, 19 nt, Homo sapiens
  misc_RNA (1)...(19): siRNA sense strand
agggcugguaugagaaauu

SEQ ID NO: 2527815 - RNA, 19 nt, Homo sapiens
  misc_RNA (1)...(19): siRNA sense strand
aggccugguucaacgagaa

SEQ ID NO: 2527816 - RNA, 19 nt, Homo sapiens
  misc_RNA (1)...(19): siRNA sense strand
agaccaacgcagcaaaaua

SEQ ID NO: 2527817 - RNA, 19 nt, Homo sapiens
  misc_RNA (1)...(19): siRNA sense strand
gagcagaagaucaagggcu

SEQ ID NO: 2527818 - RNA, 19 nt, Homo sapiens
  misc_RNA (1)...(19): siRNA sense strand
ggaagaggaugauggccuu

SEQ ID NO: 2527819 - RNA, 19 nt, Homo sapiens
  misc_RNA (1)...(19): siRNA sense strand
agucagagaaggaagagga

SEQ ID NO: 2527820 - RNA, 19 nt, Homo sapiens
  misc_RNA (1)...(19): siRNA sense strand
cagaggcauuccagggaca

SEQ ID NO: 2527821 - RNA, 19 nt, Homo sapiens
  misc_RNA (1)...(19): siRNA sense strand
gccaagaagccaacagcga

SEQ ID NO: 2527822 - RNA, 19 nt, Homo sapiens
  misc_RNA (1)...(19): siRNA sense strand
ucuaugaaauguuugguca

SEQ ID NO: 2527823 - RNA, 19 nt, Homo sapiens
  misc_RNA (1)...(19): siRNA sense strand
aggaagaggaugauggccu

SEQ ID NO: 2527824 - RNA, 19 nt, Homo sapiens
  misc_RNA (1)...(19): siRNA sense strand
caacuaagaggccaggaga

SEQ ID NO: 2527825 - RNA, 19 nt, Homo sapiens
  misc_RNA (1)...(19): siRNA sense strand
caggacugucaaaggauau

SEQ ID NO: 2527826 - RNA, 19 nt, Homo sapiens
  misc_RNA (1)...(19): siRNA sense strand
ggaacuggauggagggagu

SEQ ID NO: 2527827 - RNA, 19 nt, Homo sapiens
  misc_RNA (1)...(19): siRNA sense strand
cggaagaggaaucgcgagu

SEQ ID NO: 2527828 - RNA, 19 nt, Homo sapiens
  misc_RNA (1)...(19): siRNA sense strand
ggagggaguguuaaggaga

SEQ ID NO: 2527829 - RNA, 19 nt, Homo sapiens
  misc_RNA (1)...(19): siRNA sense strand
cgacauagauccaguccug

SEQ ID NO: 2527830 - RNA, 19 nt, Homo sapiens
  misc_RNA (1)...(19): siRNA sense strand
aaaacaaaccauagagacu

SEQ ID NO: 2527831 - RNA, 19 nt, Homo sapiens
  misc_RNA (1)...(19): siRNA sense strand
ugucaauaaccauguggau

SEQ ID NO: 2527832 - RNA, 19 nt, Homo sapiens
  misc_RNA (1)...(19): siRNA sense strand
ggucaaagcacuagacgca

SEQ ID NO: 2527833 - RNA, 19 nt, Homo sapiens
  misc_RNA (1)...(19): siRNA sense strand
ugucacagcuagaggcaca

SEQ ID NO: 2527834 - RNA, 19 nt, Homo sapiens
  misc_RNA (1)...(19): siRNA sense strand
aaucagaagauaaagggaa

SEQ ID NO: 2527835 - RNA, 19 nt, Homo sapiens
  misc_RNA (1)...(19): siRNA sense strand
ccaagaaggucaaagcacu

SEQ ID NO: 2527836 - RNA, 19 nt, Homo sapiens
  misc_RNA (1)...(19): siRNA sense strand
cgguacuguuguugaauca

SEQ ID NO: 2527837 - RNA, 19 nt, Homo sapiens
  misc_RNA (1)...(19): siRNA sense strand
auuucuagccgaaggcaua

SEQ ID NO: 2527838 - RNA, 19 nt, Homo sapiens
  misc_RNA (1)...(19): siRNA sense strand
gggaaaccacugaagccaa

SEQ ID NO: 2527839 - RNA, 19 nt, Homo sapiens
  misc_RNA (1)...(19): siRNA sense strand
aggacagcgcaaaggcuaa

SEQ ID NO: 2527840 - RNA, 19 nt, Homo sapiens
  misc_RNA (1)...(19): siRNA sense strand
cagcacauuucuagccgaa

SEQ ID NO: 2527841 - RNA, 19 nt, Homo sapiens
  misc_RNA (1)...(19): siRNA sense strand
aaacaugccaagaagguca

SEQ ID NO: 2527842 - RNA, 19 nt, Homo sapiens
  misc_RNA (1)...(19): siRNA sense strand
caguaaggggucaggacua

SEQ ID NO: 2527843 - RNA, 19 nt, Homo sapiens
  misc_RNA (1)...(19): siRNA sense strand
gaguauucuagcagcaaaa

SEQ ID NO: 2527844 - RNA, 19 nt, Homo sapiens
  misc_RNA (1)...(19): siRNA sense strand
cuugcauuccagaaagaua

SEQ ID NO: 2527845 - RNA, 19 nt, Homo sapiens
  misc_RNA (1)...(19): siRNA sense strand
ggaucuaaacacaagacca

SEQ ID NO: 2527846 - RNA, 19 nt, Homo sapiens
  misc_RNA (1)...(19): siRNA sense strand
gcuuuaacucagauagcca

SEQ ID NO: 2527847 - RNA, 19 nt, Homo sapiens
  misc_RNA (1)...(19): siRNA sense strand
uguuguugaaucagaagaa

SEQ ID NO: 2527848 - RNA, 19 nt, Homo sapiens
  misc_RNA (1)...(19): siRNA sense strand
cugugauguucauguuaau

SEQ ID NO: 2527849 - RNA, 19 nt, Homo sapiens
  misc_RNA (1)...(19): siRNA sense strand
agcacuagacgcaacgaaa

SEQ ID NO: 2527850 - RNA, 19 nt, Homo sapiens
  misc_RNA (1)...(19): siRNA sense strand
cugaaaacacgaaaaguaa

SEQ ID NO: 2527851 - RNA, 19 nt, Homo sapiens
  misc_RNA (1)...(19): siRNA sense strand
ugcugaacaugcugagaaa

SEQ ID NO: 2527852 - RNA, 19 nt, Homo sapiens
  misc_RNA (1)...(19): siRNA sense strand
gaauguuacuguugggacu

SEQ ID NO: 2527853 - RNA, 19 nt, Homo sapiens
  misc_RNA (1)...(19): siRNA sense strand
aaagcaugccagacagaaa

SEQ ID NO: 2527854 - RNA, 19 nt, Homo sapiens
  misc_RNA (1)...(19): siRNA sense strand
gggcauucauauaaagaac

SEQ ID NO: 2527855 - RNA, 19 nt, Homo sapiens
  misc_RNA (1)...(19): siRNA sense strand
cugaagaggagcuugaaaa

SEQ ID NO: 2527856 - RNA, 19 nt, Homo sapiens
  misc_RNA (1)...(19): siRNA sense strand
uaugaugauaagcggaaua

SEQ ID NO: 2527857 - RNA, 19 nt, Homo sapiens
  misc_RNA (1)...(19): siRNA sense strand
aggcagaauaccaccuuua

SEQ ID NO: 2527858 - RNA, 19 nt, Homo sapiens
  misc_RNA (1)...(19): siRNA sense strand
cuauggaaacuuugguuau

SEQ ID NO: 2527859 - RNA, 19 nt, Homo sapiens
  misc_RNA (1)...(19): siRNA sense strand
agcugaaacuacugcaaau

SEQ ID NO: 2527860 - RNA, 19 nt, Homo sapiens
  misc_RNA (1)...(19): siRNA sense strand
cugagaaaggccugacuau

SEQ ID NO: 2527861 - RNA, 19 nt, Homo sapiens
  misc_RNA (1)...(19): siRNA sense strand
guuuaugaaucuugcacca

SEQ ID NO: 2527862 - RNA, 19 nt, Homo sapiens
  misc_RNA (1)...(19): siRNA sense strand
ccuauggaaacuuugguua

SEQ ID NO: 2527863 - RNA, 19 nt, Homo sapiens
  misc_RNA (1)...(19): siRNA sense strand
aggugaacgucaaucagaa

SEQ ID NO: 2527864 - RNA, 19 nt, Homo sapiens
  misc_RNA (1)...(19): siRNA sense strand
caggcuuaguucauauaaa

SEQ ID NO: 2527865 - RNA, 19 nt, Homo sapiens
  misc_RNA (1)...(19): siRNA sense strand
uagugaagaacuggaaaua

SEQ ID NO: 2527866 - RNA, 19 nt, Homo sapiens
  misc_RNA (1)...(19): siRNA sense strand
aguucgaugaagugaagua

SEQ ID NO: 2527867 - RNA, 19 nt, Homo sapiens
  misc_RNA (1)...(19): siRNA sense strand
acaagcaacgagaaagcua

SEQ ID NO: 2527868 - RNA, 19 nt, Homo sapiens
  misc_RNA (1)...(19): siRNA sense strand
ucugaaaacacgaaaagua

SEQ ID NO: 2527869 - RNA, 19 nt, Homo sapiens
  misc_RNA (1)...(19): siRNA sense strand
uguaaaugaggaagcugaa

SEQ ID NO: 2527870 - RNA, 19 nt, Homo sapiens
  misc_RNA (1)...(19): siRNA sense strand
cggcccugccuaagaacaa

SEQ ID NO: 2527871 - RNA, 19 nt, Homo sapiens
  misc_RNA (1)...(19): siRNA sense strand
aguuauuacaccacagaca

SEQ ID NO: 2527872 - RNA, 19 nt, Homo sapiens
  misc_RNA (1)...(19): siRNA sense strand
caagagacaaauaggccuu

SEQ ID NO: 2527873 - RNA, 19 nt, Homo sapiens
  misc_RNA (1)...(19): siRNA sense strand
auagugaagaacuggaaau

SEQ ID NO: 2527874 - RNA, 19 nt, Homo sapiens
  misc_RNA (1)...(19): siRNA sense strand
ccugaagaggagcuugaaa

SEQ ID NO: 2527875 - RNA, 19 nt, Homo sapiens
  misc_RNA (1)...(19): siRNA sense strand
gguuaacaagcaacgagaa

SEQ ID NO: 2527876 - RNA, 19 nt, Homo sapiens
  misc_RNA (1)...(19): siRNA sense strand
gagaaagcuacaguggaaa

SEQ ID NO: 2527877 - RNA, 19 nt, Homo sapiens
  misc_RNA (1)...(19): siRNA sense strand
agagucugauagugaagaa

SEQ ID NO: 2527878 - RNA, 19 nt, Homo sapiens
  misc_RNA (1)...(19): siRNA sense strand
acaaauaggccuuucagca

SEQ ID NO: 2527879 - RNA, 19 nt, Homo sapiens
  misc_RNA (1)...(19): siRNA sense strand
cuauaaacaaagcugugaa

SEQ ID NO: 2527880 - RNA, 19 nt, Homo sapiens
  misc_RNA (1)...(19): siRNA sense strand
caauaaaagcaggcagaau

SEQ ID NO: 2527881 - RNA, 19 nt, Homo sapiens
  misc_RNA (1)...(19): siRNA sense strand
ccaaucggaccaagauaau

SEQ ID NO: 2527882 - RNA, 19 nt, Homo sapiens
  misc_RNA (1)...(19): siRNA sense strand
gcaggcuggagguggaauu

SEQ ID NO: 2527883 - RNA, 19 nt, Homo sapiens
  misc_RNA (1)...(19): siRNA sense strand
agugaagaacuggaaauaa

SEQ ID NO: 2527884 - RNA, 19 nt, Homo sapiens
  misc_RNA (1)...(19): siRNA sense strand
auaccaacuuugaaccaau

SEQ ID NO: 2527885 - RNA, 19 nt, Homo sapiens
  misc_RNA (1)...(19): siRNA sense strand
acaagaaccaggagggcac

SEQ ID NO: 2527886 - RNA, 19 nt, Homo sapiens
  misc_RNA (1)...(19): siRNA sense strand
cauggauagauaaagcuaa

SEQ ID NO: 2527887 - RNA, 19 nt, Homo sapiens
  misc_RNA (1)...(19): siRNA sense strand
gcaagguccuguagggaga

SEQ ID NO: 2527888 - RNA, 19 nt, Homo sapiens
  misc_RNA (1)...(19): siRNA sense strand
gcgaaggagcccauggcaa

SEQ ID NO: 2527889 - RNA, 19 nt, Homo sapiens
  misc_RNA (1)...(19): siRNA sense strand
cccuuguccucgugggcaa

SEQ ID NO: 2527890 - RNA, 19 nt, Homo sapiens
  misc_RNA (1)...(19): siRNA sense strand
cgaaggagcccauggcaag

SEQ ID NO: 2527891 - RNA, 19 nt, Homo sapiens
  misc_RNA (1)...(19): siRNA sense strand
gagaagacccggcaccaga

SEQ ID NO: 2527892 - RNA, 19 nt, Homo sapiens
  misc_RNA (1)...(19): siRNA sense strand
ggucaaagaucuuguggca

SEQ ID NO: 2527893 - RNA, 19 nt, Homo sapiens
  misc_RNA (1)...(19): siRNA sense strand
acaacuuaguagagaagau

SEQ ID NO: 2527894 - RNA, 19 nt, Homo sapiens
  misc_RNA (1)...(19): siRNA sense strand
agcaaguuguggaggaaau

SEQ ID NO: 2527895 - RNA, 19 nt, Homo sapiens
  misc_RNA (1)...(19): siRNA sense strand
agccaaagcccuaugggaa

SEQ ID NO: 2527896 - RNA, 19 nt, Homo sapiens
  misc_RNA (1)...(19): siRNA sense strand
ggugcuggccaaagugaaa

SEQ ID NO: 2527897 - RNA, 19 nt, Homo sapiens
  misc_RNA (1)...(19): siRNA sense strand
ccaaaauugccguggauga

SEQ ID NO: 2527898 - RNA, 19 nt, Homo sapiens
  misc_RNA (1)...(19): siRNA sense strand
cugcaaagaacaggaagaa

SEQ ID NO: 2527899 - RNA, 19 nt, Homo sapiens
  misc_RNA (1)...(19): siRNA sense strand
ucaagaaagcauuggcuca

SEQ ID NO: 2527900 - RNA, 19 nt, Homo sapiens
  misc_RNA (1)...(19): siRNA sense strand
ucaaagaucuuguggcauc

SEQ ID NO: 2527901 - RNA, 19 nt, Homo sapiens
  misc_RNA (1)...(19): siRNA sense strand
agagaaccaacgaggacua

SEQ ID NO: 2527902 - RNA, 19 nt, Homo sapiens
  misc_RNA (1)...(19): siRNA sense strand
ugaagcaaguuguggagga

SEQ ID NO: 2527903 - RNA, 19 nt, Homo sapiens
  misc_RNA (1)...(19): siRNA sense strand
gacaagaggaagcugggaa

SEQ ID NO: 2527904 - RNA, 19 nt, Homo sapiens
  misc_RNA (1)...(19): siRNA sense strand
ucacaggagcaguuggaca

SEQ ID NO: 2527905 - RNA, 19 nt, Homo sapiens
  misc_RNA (1)...(19): siRNA sense strand
ccuguaacccagagaacca

SEQ ID NO: 2527906 - RNA, 19 nt, Homo sapiens
  misc_RNA (1)...(19): siRNA sense strand
cagacugccaagugggaca

SEQ ID NO: 2527907 - RNA, 19 nt, Homo sapiens
  misc_RNA (1)...(19): siRNA sense strand
cgacgcaauugguggugga

SEQ ID NO: 2527908 - RNA, 19 nt, Homo sapiens
  misc_RNA (1)...(19): siRNA sense strand
cugccaaucaagaugagua

SEQ ID NO: 2527909 - RNA, 19 nt, Homo sapiens
  misc_RNA (1)...(19): siRNA sense strand
aagcauuggcucaggucuu

SEQ ID NO: 2527910 - RNA, 19 nt, Homo sapiens
  misc_RNA (1)...(19): siRNA sense strand
guggagauccuacgggaca

SEQ ID NO: 2527911 - RNA, 19 nt, Homo sapiens
  misc_RNA (1)...(19): siRNA sense strand
ggaaguucggagacaucua

SEQ ID NO: 2527912 - RNA, 19 nt, Homo sapiens
  misc_RNA (1)...(19): siRNA sense strand
gaaaauggucaaagaucuu

SEQ ID NO: 2527913 - RNA, 19 nt, Homo sapiens
  misc_RNA (1)...(19): siRNA sense strand
cagugacaccacagccaaa

SEQ ID NO: 2527914 - RNA, 19 nt, Homo sapiens
  misc_RNA (1)...(19): siRNA sense strand
uagacaaagaccuguguga

SEQ ID NO: 2527915 - RNA, 19 nt, Homo sapiens
  misc_RNA (1)...(19): siRNA sense strand
ugugugaagcagaagaaaa

SEQ ID NO: 2527916 - RNA, 19 nt, Homo sapiens
  misc_RNA (1)...(19): siRNA sense strand
ugauggaaguucggagaca

SEQ ID NO: 2527917 - RNA, 19 nt, Homo sapiens
  misc_RNA (1)...(19): siRNA sense strand
ggagagucacaccgggaca

SEQ ID NO: 2527918 - RNA, 19 nt, Homo sapiens
  misc_RNA (1)...(19): siRNA sense strand
aguucgagcccgacgcaau

SEQ ID NO: 2527919 - RNA, 19 nt, Homo sapiens
  misc_RNA (1)...(19): siRNA sense strand
ccguugauauugaacacau

SEQ ID NO: 2527920 - RNA, 19 nt, Homo sapiens
  misc_RNA (1)...(19): siRNA sense strand
ggucagaaguggugggaac

SEQ ID NO: 2527921 - RNA, 19 nt, Homo sapiens
  misc_RNA (1)...(19): siRNA sense strand
ggaauuaacuucaugguga

SEQ ID NO: 2527922 - RNA, 19 nt, Homo sapiens
  misc_RNA (1)...(19): siRNA sense strand
uggcaaacggaaagagaau

SEQ ID NO: 2527923 - RNA, 19 nt, Homo sapiens
  misc_RNA (1)...(19): siRNA sense strand
acagauuggcaaacggaaa

SEQ ID NO: 2527924 - RNA, 19 nt, Homo sapiens
  misc_RNA (1)...(19): siRNA sense strand
aaggagaagaacuuggaaa

SEQ ID NO: 2527925 - RNA, 19 nt, Homo sapiens
  misc_RNA (1)...(19): siRNA sense strand
cugcaguaguagugccuuu

SEQ ID NO: 2527926 - RNA, 19 nt, Homo sapiens
  misc_RNA (1)...(19): siRNA sense strand
ugucauacccacauggaga

SEQ ID NO: 2527927 - RNA, 19 nt, Homo sapiens
  misc_RNA (1)...(19): siRNA sense strand
gaaccaggugagaaggaga

SEQ ID NO: 2527928 - RNA, 19 nt, Homo sapiens
  misc_RNA (1)...(19): siRNA sense strand
aggagaagaacuuggaaac

SEQ ID NO: 2527929 - RNA, 19 nt, Homo sapiens
  misc_RNA (1)...(19): siRNA sense strand
acggaaagagaaugaagau

SEQ ID NO: 2527930 - RNA, 19 nt, Homo sapiens
  misc_RNA (1)...(19): siRNA sense strand
caguagcccuauugcgaga

SEQ ID NO: 2527931 - RNA, 19 nt, Homo sapiens
  misc_RNA (1)...(19): siRNA sense strand
ugacaagaaguauuggaga

SEQ ID NO: 2527932 - RNA, 19 nt, Homo sapiens
  misc_RNA (1)...(19): siRNA sense strand
ggaaagagaaugaagaucg

SEQ ID NO: 2527933 - RNA, 19 nt, Homo sapiens
  misc_RNA (1)...(19): siRNA sense strand
ucacguaaauggcaggcuu

SEQ ID NO: 2527934 - RNA, 19 nt, Homo sapiens
  misc_RNA (1)...(19): siRNA sense strand
caguggugucauagcagaa

SEQ ID NO: 2527935 - RNA, 19 nt, Homo sapiens
  misc_RNA (1)...(19): siRNA sense strand
cuaagaaaauugagggaaa

SEQ ID NO: 2527936 - RNA, 19 nt, Homo sapiens
  misc_RNA (1)...(19): siRNA sense strand
guguaaacugguagagaaa

SEQ ID NO: 2527937 - RNA, 19 nt, Homo sapiens
  misc_RNA (1)...(19): siRNA sense strand
acuuguugguugagaguaa

SEQ ID NO: 2527938 - RNA, 19 nt, Homo sapiens
  misc_RNA (1)...(19): siRNA sense strand
uggcauacuuauucagaaa

SEQ ID NO: 2527939 - RNA, 19 nt, Homo sapiens
  misc_RNA (1)...(19): siRNA sense strand
gcaucauggcggagagauu

SEQ ID NO: 2527940 - RNA, 19 nt, Homo sapiens
  misc_RNA (1)...(19): siRNA sense strand
acucagaaguacaggccaa

SEQ ID NO: 2527941 - RNA, 19 nt, Homo sapiens
  misc_RNA (1)...(19): siRNA sense strand
ccuuauggaccgugauuua

SEQ ID NO: 2527942 - RNA, 19 nt, Homo sapiens
  misc_RNA (1)...(19): siRNA sense strand
uuguaagaguauuggcaaa

SEQ ID NO: 2527943 - RNA, 19 nt, Homo sapiens
  misc_RNA (1)...(19): siRNA sense strand
acaaagaggccaagaagau

SEQ ID NO: 2527944 - RNA, 19 nt, Homo sapiens
  misc_RNA (1)...(19): siRNA sense strand
ccuuaggaauucuaggaaa

SEQ ID NO: 2527945 - RNA, 19 nt, Homo sapiens
  misc_RNA (1)...(19): siRNA sense strand
gugaaauggugaugcucua

SEQ ID NO: 2527946 - RNA, 19 nt, Homo sapiens
  misc_RNA (1)...(19): siRNA sense strand
acuaaagcuugaagagaga

SEQ ID NO: 2527947 - RNA, 19 nt, Homo sapiens
  misc_RNA (1)...(19): siRNA sense strand
gaaauuacaaagaggccaa

SEQ ID NO: 2527948 - RNA, 19 nt, Homo sapiens
  misc_RNA (1)...(19): siRNA sense strand
cauugagacuccagggauu

SEQ ID NO: 2527949 - RNA, 19 nt, Homo sapiens
  misc_RNA (1)...(19): siRNA sense strand
acauagaaguaguucagaa

SEQ ID NO: 2527950 - RNA, 19 nt, Homo sapiens
  misc_RNA (1)...(19): siRNA sense strand
cgacggaagcuguuggcua

SEQ ID NO: 2527951 - RNA, 19 nt, Homo sapiens
  misc_RNA (1)...(19): siRNA sense strand
cuggagaagaugaauguaa

SEQ ID NO: 2527952 - RNA, 19 nt, Homo sapiens
  misc_RNA (1)...(19): siRNA sense strand
ggugaaauugaaacaguaa

SEQ ID NO: 2527953 - RNA, 19 nt, Homo sapiens
  misc_RNA (1)...(19): siRNA sense strand
gaucuaauucagaaagcaa

SEQ ID NO: 2527954 - RNA, 19 nt, Homo sapiens
  misc_RNA (1)...(19): siRNA sense strand
cagaagagaauaugcaaaa

SEQ ID NO: 2527955 - RNA, 19 nt, Homo sapiens
  misc_RNA (1)...(19): siRNA sense strand
gagccaagaacaaggugaa

SEQ ID NO: 2527956 - RNA, 19 nt, Homo sapiens
  misc_RNA (1)...(19): siRNA sense strand
gagaagugaagcagcaaau

SEQ ID NO: 2527957 - RNA, 19 nt, Homo sapiens
  misc_RNA (1)...(19): siRNA sense strand
aggccaaggaggagcauuu

SEQ ID NO: 2527958 - RNA, 19 nt, Homo sapiens
  misc_RNA (1)...(19): siRNA sense strand
aggaggagcauuugagaca

SEQ ID NO: 2527959 - RNA, 19 nt, Homo sapiens
  misc_RNA (1)...(19): siRNA sense strand
gaaaauaucuacagaggca

SEQ ID NO: 2527960 - RNA, 19 nt, Homo sapiens
  misc_RNA (1)...(19): siRNA sense strand
cugaaggagaugaaagaga

SEQ ID NO: 2527961 - RNA, 19 nt, Homo sapiens
  misc_RNA (1)...(19): siRNA sense strand
uguguaaacugguagagaa

SEQ ID NO: 2527962 - RNA, 19 nt, Homo sapiens
  misc_RNA (1)...(19): siRNA sense strand
cuacagaggcauucguaau

SEQ ID NO: 2527963 - RNA, 19 nt, Homo sapiens
  misc_RNA (1)...(19): siRNA sense strand
cuauaagagauguccuaaa

SEQ ID NO: 2527964 - RNA, 19 nt, Homo sapiens
  misc_RNA (1)...(19): siRNA sense strand
cugugaaggaggaagguuu

SEQ ID NO: 2527965 - RNA, 19 nt, Homo sapiens
  misc_RNA (1)...(19): siRNA sense strand
gaggagcauuugagacaau

SEQ ID NO: 2527966 - RNA, 19 nt, Homo sapiens
  misc_RNA (1)...(19): siRNA sense strand
cggcaaguauguaggccuu

SEQ ID NO: 2527967 - RNA, 19 nt, Homo sapiens
  misc_RNA (1)...(19): siRNA sense strand
uagaaguaguucagaagau

SEQ ID NO: 2527968 - RNA, 19 nt, Homo sapiens
  misc_RNA (1)...(19): siRNA sense strand
augaaaaggaagaagcaua

SEQ ID NO: 2527969 - RNA, 19 nt, Homo sapiens
  misc_RNA (1)...(19): siRNA sense strand
ugaagagagaacagaauuu

SEQ ID NO: 2527970 - RNA, 19 nt, Homo sapiens
  misc_RNA (1)...(19): siRNA sense strand
aagaagaauuugaccgcuu

SEQ ID NO: 2527971 - RNA, 19 nt, Homo sapiens
  misc_RNA (1)...(19): siRNA sense strand
ugaaagaggcugugacaac

SEQ ID NO: 2527972 - RNA, 19 nt, Homo sapiens
  misc_RNA (1)...(19): siRNA sense strand
gcaaagagcugaugcaguc

SEQ ID NO: 2527973 - RNA, 19 nt, Homo sapiens
  misc_RNA (1)...(19): siRNA sense strand
gaaaaguaauagaggagca

SEQ ID NO: 2527974 - RNA, 19 nt, Homo sapiens
  misc_RNA (1)...(19): siRNA sense strand
aaccaaaucgagugacaua

SEQ ID NO: 2527975 - RNA, 19 nt, Homo sapiens
  misc_RNA (1)...(19): siRNA sense strand
ugaauacgccuguggagaa

SEQ ID NO: 2527976 - RNA, 19 nt, Homo sapiens
  misc_RNA (1)...(19): siRNA sense strand
uguaagaaguuaaaggaag

SEQ ID NO: 2527977 - RNA, 19 nt, Homo sapiens
  misc_RNA (1)...(19): siRNA sense strand
acacagaagcuauuugaau

SEQ ID NO: 2527978 - RNA, 19 nt, Homo sapiens
  misc_RNA (1)...(19): siRNA sense strand
gcugaugcagucuggaaua

SEQ ID NO: 2527979 - RNA, 19 nt, Homo sapiens
  misc_RNA (1)...(19): siRNA sense strand
gugacauaccagagauuga

SEQ ID NO: 2527980 - RNA, 19 nt, Homo sapiens
  misc_RNA (1)...(19): siRNA sense strand
ccuugaacuugaaagaaga

SEQ ID NO: 2527981 - RNA, 19 nt, Homo sapiens
  misc_RNA (1)...(19): siRNA sense strand
caauggacuuugugagcca

SEQ ID NO: 2527982 - RNA, 19 nt, Homo sapiens
  misc_RNA (1)...(19): siRNA sense strand
gaacaaggugaaaugguga

SEQ ID NO: 2527983 - RNA, 19 nt, Homo sapiens
  misc_RNA (1)...(19): siRNA sense strand
gaauuugcucauaggauau

SEQ ID NO: 2527984 - RNA, 19 nt, Homo sapiens
  misc_RNA (1)...(19): siRNA sense strand
ucagaagagaauaugcaaa

SEQ ID NO: 2527985 - RNA, 19 nt, Homo sapiens
  misc_RNA (1)...(19): siRNA sense strand
gcccuugaauugaaagcaa

SEQ ID NO: 2527986 - RNA, 19 nt, Homo sapiens
  misc_RNA (1)...(19): siRNA sense strand
aggugaaauugaaacagua

SEQ ID NO: 2527987 - RNA, 19 nt, Homo sapiens
  misc_RNA (1)...(19): siRNA sense strand
gugauagagaccagaugua

SEQ ID NO: 2527988 - RNA, 19 nt, Homo sapiens
  misc_RNA (1)...(19): siRNA sense strand
ccucaguaugucucagaaa

SEQ ID NO: 2527989 - RNA, 19 nt, Homo sapiens
  misc_RNA (1)...(19): siRNA sense strand
uagaagaugccuugaacuu

SEQ ID NO: 2527990 - RNA, 19 nt, Homo sapiens
  misc_RNA (1)...(19): siRNA sense strand
cccugaaagcuuugaauuu

SEQ ID NO: 2527991 - RNA, 19 nt, Homo sapiens
  misc_RNA (1)...(19): siRNA sense strand
augcacagcagcuaagaaa

SEQ ID NO: 2527992 - RNA, 19 nt, Homo sapiens
  misc_RNA (1)...(19): siRNA sense strand
uggagaagguggagaaguc

SEQ ID NO: 2527993 - RNA, 19 nt, Homo sapiens
  misc_RNA (1)...(19): siRNA sense strand
cuguaagaaguuaaaggaa

SEQ ID NO: 2527994 - RNA, 19 nt, Homo sapiens
  misc_RNA (1)...(19): siRNA sense strand
uaaugaaggcugugaagga

SEQ ID NO: 2527995 - RNA, 19 nt, Homo sapiens
  misc_RNA (1)...(19): siRNA sense strand
gcaagaauugggaguacau

SEQ ID NO: 2527996 - RNA, 19 nt, Homo sapiens
  misc_RNA (1)...(19): siRNA sense strand
gcuugaagagagaacagaa

SEQ ID NO: 2527997 - RNA, 19 nt, Homo sapiens
  misc_RNA (1)...(19): siRNA sense strand
agaugaaagagaaggaugu

SEQ ID NO: 2527998 - RNA, 19 nt, Homo sapiens
  misc_RNA (1)...(19): siRNA sense strand
uagagaaaggcgagacuga

SEQ ID NO: 2527999 - RNA, 19 nt, Homo sapiens
  misc_RNA (1)...(19): siRNA sense strand
cuuaggaauucuaggaaac

SEQ ID NO: 2528000 - RNA, 19 nt, Homo sapiens
  misc_RNA (1)...(19): siRNA sense strand
gaaguaugcuggagagccu

SEQ ID NO: 2528001 - RNA, 19 nt, Homo sapiens
  misc_RNA (1)...(19): siRNA sense strand
gcacagcagcuaagaaaau

SEQ ID NO: 2528002 - RNA, 19 nt, Homo sapiens
  misc_RNA (1)...(19): siRNA sense strand
ggauaagagaauagaguac

SEQ ID NO: 2528003 - RNA, 19 nt, Homo sapiens
  misc_RNA (1)...(19): siRNA sense strand
caugaaaagcugaagaaau

SEQ ID NO: 2528004 - RNA, 19 nt, Homo sapiens
  misc_RNA (1)...(19): siRNA sense strand
gcucacaaauggugggaug

SEQ ID NO: 2528005 - RNA, 19 nt, Homo sapiens
  misc_RNA (1)...(19): siRNA sense strand
ggacauuaaaacagcacaa

SEQ ID NO: 2528006 - RNA, 19 nt, Homo sapiens
  misc_RNA (1)...(19): siRNA sense strand
uuguagaacaugugauuga

SEQ ID NO: 2528007 - RNA, 19 nt, Homo sapiens
  misc_RNA (1)...(19): siRNA sense strand
gggagaaacagaagagcuc

SEQ ID NO: 2528008 - RNA, 19 nt, Homo sapiens
  misc_RNA (1)...(19): siRNA sense strand
ucgacagcggugagguaaa

SEQ ID NO: 2528009 - RNA, 19 nt, Homo sapiens
  misc_RNA (1)...(19): siRNA sense strand
acaaauggugggaugaaca

SEQ ID NO: 2528010 - RNA, 19 nt, Homo sapiens
  misc_RNA (1)...(19): siRNA sense strand
aguuguagaacaugugauu

SEQ ID NO: 2528011 - RNA, 19 nt, Homo sapiens
  misc_RNA (1)...(19): siRNA sense strand
cggcgguuuaugugaagaa

SEQ ID NO: 2528012 - RNA, 19 nt, Homo sapiens
  misc_RNA (1)...(19): siRNA sense strand
ugucgacagcggugaggua

SEQ ID NO: 2528013 - RNA, 19 nt, Homo sapiens
  misc_RNA (1)...(19): siRNA sense strand
gugggaugaacaaggagua

SEQ ID NO: 2528014 - RNA, 19 nt, Homo sapiens
  misc_RNA (1)...(19): siRNA sense strand
agaacaugugauugaucua

SEQ ID NO: 2528015 - RNA, 19 nt, Homo sapiens
  misc_RNA (1)...(19): siRNA sense strand
gagaaacagaagagcucca

SEQ ID NO: 2528016 - RNA, 19 nt, Homo sapiens
  misc_RNA (1)...(19): siRNA sense strand
cuguggaugaggacauuaa

SEQ ID NO: 2528017 - RNA, 19 nt, Homo sapiens
  misc_RNA (1)...(19): siRNA sense strand
ccuggaagagauuguggaa

SEQ ID NO: 2528018 - RNA, 19 nt, Homo sapiens
  misc_RNA (1)...(19): siRNA sense strand
guggaagagacugcagaaa

SEQ ID NO: 2528019 - RNA, 19 nt, Homo sapiens
  misc_RNA (1)...(19): siRNA sense strand
agugaaaauaccagccuua

SEQ ID NO: 2528020 - RNA, 19 nt, Homo sapiens
  misc_RNA (1)...(19): siRNA sense strand
agagaauagaguacagagu

SEQ ID NO: 2528021 - RNA, 19 nt, Homo sapiens
  misc_RNA (1)...(19): siRNA sense strand
uuuaaagggagaaacagaa

SEQ ID NO: 2528022 - RNA, 19 nt, Homo sapiens
  misc_RNA (1)...(19): siRNA sense strand
gugccauuuauuagggaca

SEQ ID NO: 2528023 - RNA, 19 nt, Homo sapiens
  misc_RNA (1)...(19): siRNA sense strand
gaaccagcucagugggacu

SEQ ID NO: 2528024 - RNA, 19 nt, Homo sapiens
  misc_RNA (1)...(19): siRNA sense strand
cuggauaagagaauagagu

SEQ ID NO: 2528025 - RNA, 19 nt, Homo sapiens
  misc_RNA (1)...(19): siRNA sense strand
gguacucauacaugggaga

SEQ ID NO: 2528026 - RNA, 19 nt, Homo sapiens
  misc_RNA (1)...(19): siRNA sense strand
aagaauugagguuugggaa

SEQ ID NO: 2528027 - RNA, 19 nt, Homo sapiens
  misc_RNA (1)...(19): siRNA sense strand
ucagaggauguauggaaau

SEQ ID NO: 2528028 - RNA, 19 nt, Homo sapiens
  misc_RNA (1)...(19): siRNA sense strand
gcaggagcacagaagucaa

SEQ ID NO: 2528029 - RNA, 19 nt, Homo sapiens
  misc_RNA (1)...(19): siRNA sense strand
uggugaagacaaugagaaa

SEQ ID NO: 2528030 - RNA, 19 nt, Homo sapiens
  misc_RNA (1)...(19): siRNA sense strand
gaaaagaacuugaaggucu

SEQ ID NO: 2528031 - RNA, 19 nt, Homo sapiens
  misc_RNA (1)...(19): siRNA sense strand
cuugaagaacauuuggaaa

SEQ ID NO: 2528032 - RNA, 19 nt, Homo sapiens
  misc_RNA (1)...(19): siRNA sense strand
uaucauagagacagcaaaa

SEQ ID NO: 2528033 - RNA, 19 nt, Homo sapiens
  misc_RNA (1)...(19): siRNA sense strand
agaagauuggugaagacaa

SEQ ID NO: 2528034 - RNA, 19 nt, Homo sapiens
  misc_RNA (1)...(19): siRNA sense strand
ccuacgaacacuuaugcaa

SEQ ID NO: 2528035 - RNA, 19 nt, Homo sapiens
  misc_RNA (1)...(19): siRNA sense strand
aggcaaaaguucaacggau

SEQ ID NO: 2528036 - RNA, 19 nt, Homo sapiens
  misc_RNA (1)...(19): siRNA sense strand
ccacugaaucaaggaacaa

SEQ ID NO: 2528037 - RNA, 19 nt, Homo sapiens
  misc_RNA (1)...(19): siRNA sense strand
gauuacauugauaggguga

SEQ ID NO: 2528038 - RNA, 19 nt, Homo sapiens
  misc_RNA (1)...(19): siRNA sense strand
augguaaacccaagagcuu

SEQ ID NO: 2528039 - RNA, 19 nt, Homo sapiens
  misc_RNA (1)...(19): siRNA sense strand
cccacugaaucaaggaaca

SEQ ID NO: 2528040 - RNA, 19 nt, Homo sapiens
  misc_RNA (1)...(19): siRNA sense strand
aguggcuguuucugagaua

SEQ ID NO: 2528041 - RNA, 19 nt, Homo sapiens
  misc_RNA (1)...(19): siRNA sense strand
agcaaaacuugaagaacau

SEQ ID NO: 2528042 - RNA, 19 nt, Homo sapiens
  misc_RNA (1)...(19): siRNA sense strand
cgaugugaucauugcuuau

SEQ ID NO: 2528043 - RNA, 19 nt, Homo sapiens
  misc_RNA (1)...(19): siRNA sense strand
gcuucaaaucaucaugcaa

SEQ ID NO: 2528044 - RNA, 19 nt, Homo sapiens
  misc_RNA (1)...(19): siRNA sense strand
ccgccaaaggaaagggaga

SEQ ID NO: 2528045 - RNA, 19 nt, Homo sapiens
  misc_RNA (1)...(19): siRNA sense strand
aggaagaaugccaaagaau

SEQ ID NO: 2528046 - RNA, 19 nt, Homo sapiens
  misc_RNA (1)...(19): siRNA sense strand
aggagagggcaaagaagua

SEQ ID NO: 2528047 - RNA, 19 nt, Homo sapiens
  misc_RNA (1)...(19): siRNA sense strand
gagcucuggaacagggaaa

SEQ ID NO: 2528048 - RNA, 19 nt, Homo sapiens
  misc_RNA (1)...(19): siRNA sense strand
caggaaagggucuggcuca

SEQ ID NO: 2528049 - RNA, 19 nt, Homo sapiens
  misc_RNA (1)...(19): siRNA sense strand
ucaauucaggagagggcaa

SEQ ID NO: 2528050 - RNA, 19 nt, Homo sapiens
  misc_RNA (1)...(19): siRNA sense strand
aaagaauugcagagcuuau

SEQ ID NO: 2528051 - RNA, 19 nt, Homo sapiens
  misc_RNA (1)...(19): siRNA sense strand
caguaggacaucaggcuca

SEQ ID NO: 2528052 - RNA, 19 nt, Homo sapiens
  misc_RNA (1)...(19): siRNA sense strand
gggccaacgagugggagaa

SEQ ID NO: 2528053 - RNA, 19 nt, Homo sapiens
  misc_RNA (1)...(19): siRNA sense strand
ugauaaggaagaaugccaa

SEQ ID NO: 2528054 - RNA, 19 nt, Homo sapiens
  misc_RNA (1)...(19): siRNA sense strand
guugaaagcccaucaggga

SEQ ID NO: 2528055 - RNA, 19 nt, Homo sapiens
  misc_RNA (1)...(19): siRNA sense strand
ucagggaacuggagcagga

SEQ ID NO: 2528056 - RNA, 19 nt, Homo sapiens
  misc_RNA (1)...(19): siRNA sense strand
cuguccagccauucagaaa

SEQ ID NO: 2528057 - RNA, 19 nt, Homo sapiens
  misc_RNA (1)...(19): siRNA sense strand
aaacugauguggaaggaac

SEQ ID NO: 2528058 - RNA, 19 nt, Homo sapiens
  misc_RNA (1)...(19): siRNA sense strand
caucuauggaauuugguuu

SEQ ID NO: 2528059 - RNA, 19 nt, Homo sapiens
  misc_RNA (1)...(19): siRNA sense strand
ggccaacgagugggagaaa

SEQ ID NO: 2528060 - RNA, 19 nt, Homo sapiens
  misc_RNA (1)...(19): siRNA sense strand
aaaccuguucugagccaaa

SEQ ID NO: 2528061 - RNA, 19 nt, Homo sapiens
  misc_RNA (1)...(19): siRNA sense strand
ccaucuaugacaauccaaa

SEQ ID NO: 2528062 - RNA, 19 nt, Homo sapiens
  misc_RNA (1)...(19): siRNA sense strand
auucagaaacucaugguca

SEQ ID NO: 2528063 - RNA, 19 nt, Homo sapiens
  misc_RNA (1)...(19): siRNA sense strand
cuacgaagguaacgcggua

SEQ ID NO: 2528064 - RNA, 19 nt, Homo sapiens
  misc_RNA (1)...(19): siRNA sense strand
gucaaaacuacgaagguaa

SEQ ID NO: 2528065 - RNA, 19 nt, Homo sapiens
  misc_RNA (1)...(19): siRNA sense strand
guguuuggaaggagaggau

SEQ ID NO: 2528066 - RNA, 19 nt, Homo sapiens
  misc_RNA (1)...(19): siRNA sense strand
guguuaauggugugcugua

SEQ ID NO: 2528067 - RNA, 19 nt, Homo sapiens
  misc_RNA (1)...(19): siRNA sense strand
gcucuugcuucccgggaca

SEQ ID NO: 2528068 - RNA, 19 nt, Homo sapiens
  misc_RNA (1)...(19): siRNA sense strand
uguuaaaguguuugaguca

SEQ ID NO: 2528069 - RNA, 19 nt, Homo sapiens
  misc_RNA (1)...(19): siRNA sense strand
guaaaggagacuuggacca

SEQ ID NO: 2528070 - RNA, 19 nt, Homo sapiens
  misc_RNA (1)...(19): siRNA sense strand
ccuuagggcauuugggcau

SEQ ID NO: 2528071 - RNA, 19 nt, Homo sapiens
  misc_RNA (1)...(19): siRNA sense strand
uuucagaggaugagcgcau

SEQ ID NO: 2528072 - RNA, 19 nt, Homo sapiens
  misc_RNA (1)...(19): siRNA sense strand
gugacaaagcagaguucuu

SEQ ID NO: 2528073 - RNA, 19 nt, Homo sapiens
  misc_RNA (1)...(19): siRNA sense strand
aggaauugucuuaagugua

SEQ ID NO: 2528074 - RNA, 19 nt, Homo sapiens
  misc_RNA (1)...(19): siRNA sense strand
agauaaacagcuagcaguu

SEQ ID NO: 2528075 - RNA, 19 nt, Homo sapiens
  misc_RNA (1)...(19): siRNA sense strand
aguagaaggcuguuguuca

SEQ ID NO: 2528076 - RNA, 19 nt, Homo sapiens
  misc_RNA (1)...(19): siRNA sense strand
acacauuaggauuggucau

SEQ ID NO: 2528077 - RNA, 19 nt, Homo sapiens
  misc_RNA (1)...(19): siRNA sense strand
aggauuggucauggaaaua

SEQ ID NO: 2528078 - RNA, 19 nt, Homo sapiens
  misc_RNA (1)...(19): siRNA sense strand
gagucaauuaauauggaca

SEQ ID NO: 2528079 - RNA, 19 nt, Homo sapiens
  misc_RNA (1)...(19): siRNA sense strand
cugaaauaugcuggaguau

SEQ ID NO: 2528080 - RNA, 19 nt, Homo sapiens
  misc_RNA (1)...(19): siRNA sense strand
gaggagugcucgugcgucu

SEQ ID NO: 2528081 - RNA, 19 nt, Homo sapiens
  misc_RNA (1)...(19): siRNA sense strand
gaggcaacugggaggucaa

SEQ ID NO: 2528082 - RNA, 19 nt, Homo sapiens
  misc_RNA (1)...(19): siRNA sense strand
acugggaggucaacgggaa

SEQ ID NO: 2528083 - RNA, 19 nt, Homo sapiens
  misc_RNA (1)...(19): siRNA sense strand
augaaaugucagaggaaag

SEQ ID NO: 2528084 - RNA, 19 nt, Homo sapiens
  misc_RNA (1)...(19): siRNA sense strand
cuucaaagccugggaccau

SEQ ID NO: 2528085 - RNA, 19 nt, Homo sapiens
  misc_RNA (1)...(19): siRNA sense strand
gcccagaucaagagccaga

SEQ ID NO: 2528086 - RNA, 19 nt, Homo sapiens
  misc_RNA (1)...(19): siRNA sense strand
cugcaagugggcuggaaca

SEQ ID NO: 2528087 - RNA, 19 nt, Homo sapiens
  misc_RNA (1)...(19): siRNA sense strand
agaucaagagccagaaagu

SEQ ID NO: 2528088 - RNA, 19 nt, Homo sapiens
  misc_RNA (1)...(19): siRNA sense strand
aggucaacgggaagacaau

SEQ ID NO: 2528089 - RNA, 19 nt, Homo sapiens
  misc_RNA (1)...(19): siRNA sense strand
gcaacugcguggagcugca

SEQ ID NO: 2528090 - RNA, 19 nt, Homo sapiens
  misc_RNA (1)...(19): siRNA sense strand
ccgaguuagucuuuggguu

SEQ ID NO: 2528091 - RNA, 19 nt, Homo sapiens
  misc_RNA (1)...(19): siRNA sense strand
ugggagguguugagggugu

SEQ ID NO: 2528092 - RNA, 19 nt, Homo sapiens
  misc_RNA (1)...(19): siRNA sense strand
cgaguuagucuuuggguuc

SEQ ID NO: 2528093 - RNA, 19 nt, Homo sapiens
  misc_RNA (1)...(19): siRNA sense strand
ugaggguguuggaggcaca

SEQ ID NO: 2528094 - RNA, 19 nt, Homo sapiens
  misc_RNA (1)...(19): siRNA sense strand
aggaauugucagugauaaa

SEQ ID NO: 2528095 - RNA, 19 nt, Homo sapiens
  misc_RNA (1)...(19): siRNA sense strand
uugagcagaaagagaguaa

SEQ ID NO: 2528096 - RNA, 19 nt, Homo sapiens
  misc_RNA (1)...(19): siRNA sense strand
acugacuaaagaagagaaa

SEQ ID NO: 2528097 - RNA, 19 nt, Homo sapiens
  misc_RNA (1)...(19): siRNA sense strand
gcuguugagcagaaagaga

SEQ ID NO: 2528098 - RNA, 19 nt, Homo sapiens
  misc_RNA (1)...(19): siRNA sense strand
aguuacacucuuaaaggaa

SEQ ID NO: 2528099 - RNA, 19 nt, Homo sapiens
  misc_RNA (1)...(19): siRNA sense strand
ggcuggaauaugaaaucaa

SEQ ID NO: 2528100 - RNA, 19 nt, Homo sapiens
  misc_RNA (1)...(19): siRNA sense strand
ugacuaaagaagagaaaac

SEQ ID NO: 2528101 - RNA, 19 nt, Homo sapiens
  misc_RNA (1)...(19): siRNA sense strand
gggaagaaguucaaggaca

SEQ ID NO: 2528102 - RNA, 19 nt, Homo sapiens
  misc_RNA (1)...(19): siRNA sense strand
agcaauaaguucaguucaa

SEQ ID NO: 2528103 - RNA, 19 nt, Homo sapiens
  misc_RNA (1)...(19): siRNA sense strand
ggaagaaguucaaggacag

SEQ ID NO: 2528104 - RNA, 19 nt, Homo sapiens
  misc_RNA (1)...(19): siRNA sense strand
agugcaaagugaaguacaa

SEQ ID NO: 2528105 - RNA, 19 nt, Homo sapiens
  misc_RNA (1)...(19): siRNA sense strand
uguuaacgcuccagggaca

SEQ ID NO: 2528106 - RNA, 19 nt, Homo sapiens
  misc_RNA (1)...(19): siRNA sense strand
ccuccuaaaucuacggaca

SEQ ID NO: 2528107 - RNA, 19 nt, Homo sapiens
  misc_RNA (1)...(19): siRNA sense strand
agaccaagagaauggagaa

SEQ ID NO: 2528108 - RNA, 19 nt, Homo sapiens
  misc_RNA (1)...(19): siRNA sense strand
ggaaaauguccuugcucaa

SEQ ID NO: 2528109 - RNA, 19 nt, Homo sapiens
  misc_RNA (1)...(19): siRNA sense strand
auauuuggccacaggauua

SEQ ID NO: 2528110 - RNA, 19 nt, Homo sapiens
  misc_RNA (1)...(19): siRNA sense strand
guuauguacuucuggaaaa

SEQ ID NO: 2528111 - RNA, 19 nt, Homo sapiens
  misc_RNA (1)...(19): siRNA sense strand
agaaguucaaggacagaaa

SEQ ID NO: 2528112 - RNA, 19 nt, Homo sapiens
  misc_RNA (1)...(19): siRNA sense strand
gagugcagaccaagagaau

SEQ ID NO: 2528113 - RNA, 19 nt, Homo sapiens
  misc_RNA (1)...(19): siRNA sense strand
augcaaaauagcaaggaaa

SEQ ID NO: 2528114 - RNA, 19 nt, Homo sapiens
  misc_RNA (1)...(19): siRNA sense strand
gaccaagagaauggagaaa

SEQ ID NO: 2528115 - RNA, 19 nt, Homo sapiens
  misc_RNA (1)...(19): siRNA sense strand
agguggaagugcaaaguga

SEQ ID NO: 2528116 - RNA, 19 nt, Homo sapiens
  misc_RNA (1)...(19): siRNA sense strand
ggaaauuaucaaggaaaca

SEQ ID NO: 2528117 - RNA, 19 nt, Homo sapiens
  misc_RNA (1)...(19): siRNA sense strand
agaaaggcuggaugagaau

SEQ ID NO: 2528118 - RNA, 19 nt, Homo sapiens
  misc_RNA (1)...(19): siRNA sense strand
caucaaugagacccagaaa

SEQ ID NO: 2528119 - RNA, 19 nt, Homo sapiens
  misc_RNA (1)...(19): siRNA sense strand
uggaaauuaucaaggaaac

SEQ ID NO: 2528120 - RNA, 19 nt, Homo sapiens
  misc_RNA (1)...(19): siRNA sense strand
ugcaaguaccgcagauuua

SEQ ID NO: 2528121 - RNA, 19 nt, Homo sapiens
  misc_RNA (1)...(19): siRNA sense strand
ccuuguaaagcgucguaua

SEQ ID NO: 2528122 - RNA, 19 nt, Homo sapiens
  misc_RNA (1)...(19): siRNA sense strand
cugucaacuuugcgaucaa

SEQ ID NO: 2528123 - RNA, 19 nt, Homo sapiens
  misc_RNA (1)...(19): siRNA sense strand
cugccaucacagagggcua

SEQ ID NO: 2528124 - RNA, 19 nt, Homo sapiens
  misc_RNA (1)...(19): siRNA sense strand
ccuaguaagcgccaggaau

SEQ ID NO: 2528125 - RNA, 19 nt, Homo sapiens
  misc_RNA (1)...(19): siRNA sense strand
cccacaugcugcaggucaa

SEQ ID NO: 2528126 - RNA, 19 nt, Homo sapiens
  misc_RNA (1)...(19): siRNA sense strand
gcaaaauagcaaggaaaau

SEQ ID NO: 2528127 - RNA, 19 nt, Homo sapiens
  misc_RNA (1)...(19): siRNA sense strand
augagaaugaucagcuuua

SEQ ID NO: 2528128 - RNA, 19 nt, Homo sapiens
  misc_RNA (1)...(19): siRNA sense strand
aggaaaugcaaaauagcaa

SEQ ID NO: 2528129 - RNA, 19 nt, Homo sapiens
  misc_RNA (1)...(19): siRNA sense strand
gccucaacgggaagcaaua

SEQ ID NO: 2528130 - RNA, 19 nt, Homo sapiens
  misc_RNA (1)...(19): siRNA sense strand
ugcaaaauagcaaggaaaa

SEQ ID NO: 2528131 - RNA, 19 nt, Homo sapiens
  misc_RNA (1)...(19): siRNA sense strand
uguccggagugcagaccaa

SEQ ID NO: 2528132 - RNA, 19 nt, Homo sapiens
  misc_RNA (1)...(19): siRNA sense strand
gcauauaaugagaaugaug

SEQ ID NO: 2528133 - RNA, 19 nt, Homo sapiens
  misc_RNA (1)...(19): siRNA sense strand
uaucaaggaaacaaagaca

SEQ ID NO: 2528134 - RNA, 19 nt, Homo sapiens
  misc_RNA (1)...(19): siRNA sense strand
aagcaaacuuacucagcca

SEQ ID NO: 2528135 - RNA, 19 nt, Homo sapiens
  misc_RNA (1)...(19): siRNA sense strand
auacacagcacuuggaguu

SEQ ID NO: 2528136 - RNA, 19 nt, Homo sapiens
  misc_RNA (1)...(19): siRNA sense strand
cucaaggaacggaaggcua

SEQ ID NO: 2528137 - RNA, 19 nt, Homo sapiens
  misc_RNA (1)...(19): siRNA sense strand
cuaaaaucccauugcaauu

SEQ ID NO: 2528138 - RNA, 19 nt, Homo sapiens
  misc_RNA (1)...(19): siRNA sense strand
cuccaaagcugagggugaa

SEQ ID NO: 2528139 - RNA, 19 nt, Homo sapiens
  misc_RNA (1)...(19): siRNA sense strand
gguggaagugcaaagugaa

SEQ ID NO: 2528140 - RNA, 19 nt, Homo sapiens
  misc_RNA (1)...(19): siRNA sense strand
ggugaaugucccugaguuc

SEQ ID NO: 2528141 - RNA, 19 nt, Homo sapiens
  misc_RNA (1)...(19): siRNA sense strand
gcuaaaaucccauugcaau

SEQ ID NO: 2528142 - RNA, 19 nt, Homo sapiens
  misc_RNA (1)...(19): siRNA sense strand
ucuuaaauacacagcacuu

SEQ ID NO: 2528143 - RNA, 19 nt, Homo sapiens
  misc_RNA (1)...(19): siRNA sense strand
gugcaaagugaaguacaaa

SEQ ID NO: 2528144 - RNA, 19 nt, Homo sapiens
  misc_RNA (1)...(19): siRNA sense strand
ccgggcauauaaugagaau

SEQ ID NO: 2528145 - RNA, 19 nt, Homo sapiens
  misc_RNA (1)...(19): siRNA sense strand
agccaagacucgugguauc

SEQ ID NO: 2528146 - RNA, 19 nt, Homo sapiens
  misc_RNA (1)...(19): siRNA sense strand
auaaaguagccaaaggaua

SEQ ID NO: 2528147 - RNA, 19 nt, Homo sapiens
  misc_RNA (1)...(19): siRNA sense strand
agaaacugccaaagguaaa

SEQ ID NO: 2528148 - RNA, 19 nt, Homo sapiens
  misc_RNA (1)...(19): siRNA sense strand
ggaaagauaaaguagccaa

SEQ ID NO: 2528149 - RNA, 19 nt, Homo sapiens
  misc_RNA (1)...(19): siRNA sense strand
ccaaggaaacccaggugaa

SEQ ID NO: 2528150 - RNA, 19 nt, Homo sapiens
  misc_RNA (1)...(19): siRNA sense strand
agggaaagaaacugccaaa

SEQ ID NO: 2528151 - RNA, 19 nt, Homo sapiens
  misc_RNA (1)...(19): siRNA sense strand
gaguaagugcagaaagaca

SEQ ID NO: 2528152 - RNA, 19 nt, Homo sapiens
  misc_RNA (1)...(19): siRNA sense strand
cgauauuugcagaguguga

SEQ ID NO: 2528153 - RNA, 19 nt, Homo sapiens
  misc_RNA (1)...(19): siRNA sense strand
cauuauucaaagagagaga

SEQ ID NO: 2528154 - RNA, 19 nt, Homo sapiens
  misc_RNA (1)...(19): siRNA sense strand
aggaaacccaggugaacaa

SEQ ID NO: 2528155 - RNA, 19 nt, Homo sapiens
  misc_RNA (1)...(19): siRNA sense strand
gugauaagaaacuggauga

SEQ ID NO: 2528156 - RNA, 19 nt, Homo sapiens
  misc_RNA (1)...(19): siRNA sense strand
gcugaauaauuuaagggau

SEQ ID NO: 2528157 - RNA, 19 nt, Homo sapiens
  misc_RNA (1)...(19): siRNA sense strand
guguaaguuccaugagauu

SEQ ID NO: 2528158 - RNA, 19 nt, Homo sapiens
  misc_RNA (1)...(19): siRNA sense strand
ugggaaaggcggaacaaga

SEQ ID NO: 2528159 - RNA, 19 nt, Homo sapiens
  misc_RNA (1)...(19): siRNA sense strand
caggaaacuccgaagucua

SEQ ID NO: 2528160 - RNA, 19 nt, Homo sapiens
  misc_RNA (1)...(19): siRNA sense strand
ggcauauuuuggagggaaa

SEQ ID NO: 2528161 - RNA, 19 nt, Homo sapiens
  misc_RNA (1)...(19): siRNA sense strand
gauuccaaguuuaggccaa

SEQ ID NO: 2528162 - RNA, 19 nt, Homo sapiens
  misc_RNA (1)...(19): siRNA sense strand
aagagagagagaagaaauu

SEQ ID NO: 2528163 - RNA, 19 nt, Homo sapiens
  misc_RNA (1)...(19): siRNA sense strand
gagagagagaagaaauuau

SEQ ID NO: 2528164 - RNA, 19 nt, Homo sapiens
  misc_RNA (1)...(19): siRNA sense strand
agauauucuugcugacauu

SEQ ID NO: 2528165 - RNA, 19 nt, Homo sapiens
  misc_RNA (1)...(19): siRNA sense strand
uauuugagugcaugggaaa

SEQ ID NO: 2528166 - RNA, 19 nt, Homo sapiens
  misc_RNA (1)...(19): siRNA sense strand
aagaaacugccaaagguaa

SEQ ID NO: 2528167 - RNA, 19 nt, Homo sapiens
  misc_RNA (1)...(19): siRNA sense strand
gcuaaaaggcauuugcauu

SEQ ID NO: 2528168 - RNA, 19 nt, Homo sapiens
  misc_RNA (1)...(19): siRNA sense strand
cauaaauaucagcuagaga

SEQ ID NO: 2528169 - RNA, 19 nt, Homo sapiens
  misc_RNA (1)...(19): siRNA sense strand
ugguuugggcagaggaaca

SEQ ID NO: 2528170 - RNA, 19 nt, Homo sapiens
  misc_RNA (1)...(19): siRNA sense strand
auucaaagagagagagaag

SEQ ID NO: 2528171 - RNA, 19 nt, Homo sapiens
  misc_RNA (1)...(19): siRNA sense strand
cuauuugagugcaugggaa

SEQ ID NO: 2528172 - RNA, 19 nt, Homo sapiens
  misc_RNA (1)...(19): siRNA sense strand
gugaaugaauuguugagca

SEQ ID NO: 2528173 - RNA, 19 nt, Homo sapiens
  misc_RNA (1)...(19): siRNA sense strand
aggugaacaagaagcuuua

SEQ ID NO: 2528174 - RNA, 19 nt, Homo sapiens
  misc_RNA (1)...(19): siRNA sense strand
aauuuaagggauugugcua

SEQ ID NO: 2528175 - RNA, 19 nt, Homo sapiens
  misc_RNA (1)...(19): siRNA sense strand
cugaagaacaugguguaua

SEQ ID NO: 2528176 - RNA, 19 nt, Homo sapiens
  misc_RNA (1)...(19): siRNA sense strand
ccugcuauguguugguuau

SEQ ID NO: 2528177 - RNA, 19 nt, Homo sapiens
  misc_RNA (1)...(19): siRNA sense strand
cuaaaaggcauuugcauuu

SEQ ID NO: 2528178 - RNA, 19 nt, Homo sapiens
  misc_RNA (1)...(19): siRNA sense strand
gcgaauacucugaauccau

SEQ ID NO: 2528179 - RNA, 19 nt, Homo sapiens
  misc_RNA (1)...(19): siRNA sense strand
aaugaauuguugagcacuu

SEQ ID NO: 2528180 - RNA, 19 nt, Homo sapiens
  misc_RNA (1)...(19): siRNA sense strand
cuuaauaaugaguggcagu

SEQ ID NO: 2528181 - RNA, 19 nt, Homo sapiens
  misc_RNA (1)...(19): siRNA sense strand
cuucagaauuucauaagca

SEQ ID NO: 2528182 - RNA, 19 nt, Homo sapiens
  misc_RNA (1)...(19): siRNA sense strand
ccauaaacuugauguaccu

SEQ ID NO: 2528183 - RNA, 19 nt, Homo sapiens
  misc_RNA (1)...(19): siRNA sense strand
caaagagagagagaagaaa

SEQ ID NO: 2528184 - RNA, 19 nt, Homo sapiens
  misc_RNA (1)...(19): siRNA sense strand
auccauaccaugaagcaaa

SEQ ID NO: 2528185 - RNA, 19 nt, Homo sapiens
  misc_RNA (1)...(19): siRNA sense strand
cagcaguauucuuguucuu

SEQ ID NO: 2528186 - RNA, 19 nt, Homo sapiens
  misc_RNA (1)...(19): siRNA sense strand
cuacuagcaaggcaggaaa

SEQ ID NO: 2528187 - RNA, 19 nt, Homo sapiens
  misc_RNA (1)...(19): siRNA sense strand
aggcauuugcauuucauua

SEQ ID NO: 2528188 - RNA, 19 nt, Homo sapiens
  misc_RNA (1)...(19): siRNA sense strand
ggcugaagaacauggugua

SEQ ID NO: 2528189 - RNA, 19 nt, Homo sapiens
  misc_RNA (1)...(19): siRNA sense strand
agaacaugguguauaucau

SEQ ID NO: 2528190 - RNA, 19 nt, Homo sapiens
  misc_RNA (1)...(19): siRNA sense strand
acucaagcaugguguaagu

SEQ ID NO: 2528191 - RNA, 19 nt, Homo sapiens
  misc_RNA (1)...(19): siRNA sense strand
acaggaagcuuuucagaau

SEQ ID NO: 2528192 - RNA, 19 nt, Homo sapiens
  misc_RNA (1)...(19): siRNA sense strand
cauccugggcagaguucua

SEQ ID NO: 2528193 - RNA, 19 nt, Homo sapiens
  misc_RNA (1)...(19): siRNA sense strand
gcuucauacaggagauguu

SEQ ID NO: 2528194 - RNA, 19 nt, Homo sapiens
  misc_RNA (1)...(19): siRNA sense strand
uugcagagugugaaugaau

SEQ ID NO: 2528195 - RNA, 19 nt, Homo sapiens
  misc_RNA (1)...(19): siRNA sense strand
cuuaagagacaugaagaau

SEQ ID NO: 2528196 - RNA, 19 nt, Homo sapiens
  misc_RNA (1)...(19): siRNA sense strand
ggaagaugcuagaagcccu

SEQ ID NO: 2528197 - RNA, 19 nt, Homo sapiens
  misc_RNA (1)...(19): siRNA sense strand
ugaaugaauuguugagcac

SEQ ID NO: 2528198 - RNA, 19 nt, Homo sapiens
  misc_RNA (1)...(19): siRNA sense strand
gcaugggaaaggcggaaca

SEQ ID NO: 2528199 - RNA, 19 nt, Homo sapiens
  misc_RNA (1)...(19): siRNA sense strand
cuuuaauaguugggcugaa

SEQ ID NO: 2528200 - RNA, 19 nt, Homo sapiens
  misc_RNA (1)...(19): siRNA sense strand
uaguugggcugaagaacau

SEQ ID NO: 2528201 - RNA, 19 nt, Homo sapiens
  misc_RNA (1)...(19): siRNA sense strand
guuccauaaacuugaugua

SEQ ID NO: 2528202 - RNA, 19 nt, Homo sapiens
  misc_RNA (1)...(19): siRNA sense strand
ucuaagaugaccuugaauu

SEQ ID NO: 2528203 - RNA, 19 nt, Homo sapiens
  misc_RNA (1)...(19): siRNA sense strand
ggucacugcagaugggagu

SEQ ID NO: 2528204 - RNA, 19 nt, Homo sapiens
  misc_RNA (1)...(19): siRNA sense strand
ggagcuucauacaggagau

SEQ ID NO: 2528205 - RNA, 19 nt, Homo sapiens
  misc_RNA (1)...(19): siRNA sense strand
gauuauggaugaccggcuu

SEQ ID NO: 2528206 - RNA, 19 nt, Homo sapiens
  misc_RNA (1)...(19): siRNA sense strand
auaucaugacccugaaauu

SEQ ID NO: 2528207 - RNA, 19 nt, Homo sapiens
  misc_RNA (1)...(19): siRNA sense strand
cuuuacaaguacaccaaga

SEQ ID NO: 2528208 - RNA, 19 nt, Homo sapiens
  misc_RNA (1)...(19): siRNA sense strand
gggagaagguggaggagga

SEQ ID NO: 2528209 - RNA, 19 nt, Homo sapiens
  misc_RNA (1)...(19): siRNA sense strand
ccaucaagaaggaggaaaa

SEQ ID NO: 2528210 - RNA, 19 nt, Homo sapiens
  misc_RNA (1)...(19): siRNA sense strand
augagaagagcaaggaaua

SEQ ID NO: 2528211 - RNA, 19 nt, Homo sapiens
  misc_RNA (1)...(19): siRNA sense strand
ucugaagcuucgagaggaa

SEQ ID NO: 2528212 - RNA, 19 nt, Homo sapiens
  misc_RNA (1)...(19): siRNA sense strand
gugaagaagcagcaggaga

SEQ ID NO: 2528213 - RNA, 19 nt, Homo sapiens
  misc_RNA (1)...(19): siRNA sense strand
auucaguacaagagggcaa

SEQ ID NO: 2528214 - RNA, 19 nt, Homo sapiens
  misc_RNA (1)...(19): siRNA sense strand
gggcaaggaggaugaggau

SEQ ID NO: 2528215 - RNA, 19 nt, Homo sapiens
  misc_RNA (1)...(19): siRNA sense strand
uggaagcggagaaggcaaa

SEQ ID NO: 2528216 - RNA, 19 nt, Homo sapiens
  misc_RNA (1)...(19): siRNA sense strand
aggaugaggauaagagcuu

SEQ ID NO: 2528217 - RNA, 19 nt, Homo sapiens
  misc_RNA (1)...(19): siRNA sense strand
agaucagagcccaggagaa

SEQ ID NO: 2528218 - RNA, 19 nt, Homo sapiens
  misc_RNA (1)...(19): siRNA sense strand
aagacaugcuggagcugaa

SEQ ID NO: 2528219 - RNA, 19 nt, Homo sapiens
  misc_RNA (1)...(19): siRNA sense strand
cguacaaguccaugcaaca

SEQ ID NO: 2528220 - RNA, 19 nt, Homo sapiens
  misc_RNA (1)...(19): siRNA sense strand
aggagcaagaggugaagaa

SEQ ID NO: 2528221 - RNA, 19 nt, Homo sapiens
  misc_RNA (1)...(19): siRNA sense strand
agucagagcuggaggugcu

SEQ ID NO: 2528222 - RNA, 19 nt, Homo sapiens
  misc_RNA (1)...(19): siRNA sense strand
aggaauaucgggaggccau

SEQ ID NO: 2528223 - RNA, 19 nt, Homo sapiens
  misc_RNA (1)...(19): siRNA sense strand
gcuucgagguggagcccau

SEQ ID NO: 2528224 - RNA, 19 nt, Homo sapiens
  misc_RNA (1)...(19): siRNA sense strand
gggaagacaugcuggagcu

SEQ ID NO: 2528225 - RNA, 19 nt, Homo sapiens
  misc_RNA (1)...(19): siRNA sense strand
aaugagaagagcaaggaau

SEQ ID NO: 2528226 - RNA, 19 nt, Homo sapiens
  misc_RNA (1)...(19): siRNA sense strand
ugggauaaacgaugaggau

SEQ ID NO: 2528227 - RNA, 19 nt, Homo sapiens
  misc_RNA (1)...(19): siRNA sense strand
ccuuaaagcaggagacgcu

SEQ ID NO: 2528228 - RNA, 19 nt, Homo sapiens
  misc_RNA (1)...(19): siRNA sense strand
ccucaauagcaauggccuu

SEQ ID NO: 2528229 - RNA, 19 nt, Homo sapiens
  misc_RNA (1)...(19): siRNA sense strand
cagcagugguaccaggaga

SEQ ID NO: 2528230 - RNA, 19 nt, Homo sapiens
  misc_RNA (1)...(19): siRNA sense strand
agaagaagcggcugaggga

SEQ ID NO: 2528231 - RNA, 19 nt, Homo sapiens
  misc_RNA (1)...(19): siRNA sense strand
uggagauaaaggaguggua

SEQ ID NO: 2528232 - RNA, 19 nt, Homo sapiens
  misc_RNA (1)...(19): siRNA sense strand
caggagaagaagcggcuga

SEQ ID NO: 2528233 - RNA, 19 nt, Homo sapiens
  misc_RNA (1)...(19): siRNA sense strand
agguggaggaggaggagga

SEQ ID NO: 2528234 - RNA, 19 nt, Homo sapiens
  misc_RNA (1)...(19): siRNA sense strand
gcagcagguuugagcagga

SEQ ID NO: 2528235 - RNA, 19 nt, Homo sapiens
  misc_RNA (1)...(19): siRNA sense strand
ggacauagcuacagcaccc

SEQ ID NO: 2528236 - RNA, 19 nt, Homo sapiens
  misc_RNA (1)...(19): siRNA sense strand
ccgccaggagagaaacuaa

SEQ ID NO: 2528237 - RNA, 19 nt, Homo sapiens
  misc_RNA (1)...(19): siRNA sense strand
agcaggagcaagaggugaa

SEQ ID NO: 2528238 - RNA, 19 nt, Homo sapiens
  misc_RNA (1)...(19): siRNA sense strand
gcaucgaaagccuguggaa

SEQ ID NO: 2528239 - RNA, 19 nt, Homo sapiens
  misc_RNA (1)...(19): siRNA sense strand
gggcugaaugggcgaggau

SEQ ID NO: 2528240 - RNA, 19 nt, Homo sapiens
  misc_RNA (1)...(19): siRNA sense strand
gaggauaagagcuucgaca

SEQ ID NO: 2528241 - RNA, 19 nt, Homo sapiens
  misc_RNA (1)...(19): siRNA sense strand
gcuuaucggcucuggcuau

SEQ ID NO: 2528242 - RNA, 19 nt, Homo sapiens
  misc_RNA (1)...(19): siRNA sense strand
cggagaaggcaaagccgga

SEQ ID NO: 2528243 - RNA, 19 nt, Homo sapiens
  misc_RNA (1)...(19): siRNA sense strand
gcuacagcacccaggauga

SEQ ID NO: 2528244 - RNA, 19 nt, Homo sapiens
  misc_RNA (1)...(19): siRNA sense strand
gcacccaggaugagcacuu

SEQ ID NO: 2528245 - RNA, 19 nt, Homo sapiens
  misc_RNA (1)...(19): siRNA sense strand
acucguggguggagcagau

SEQ ID NO: 2528246 - RNA, 19 nt, Homo sapiens
  misc_RNA (1)...(19): siRNA sense strand
gcaucagcuucgaggugga

SEQ ID NO: 2528247 - RNA, 19 nt, Homo sapiens
  misc_RNA (1)...(19): siRNA sense strand
agaagguggaggaggagga

SEQ ID NO: 2528248 - RNA, 19 nt, Homo sapiens
  misc_RNA (1)...(19): siRNA sense strand
auaaaggagugguaccaga

SEQ ID NO: 2528249 - RNA, 19 nt, Homo sapiens
  misc_RNA (1)...(19): siRNA sense strand
augaggaugauguggaaaa

SEQ ID NO: 2528250 - RNA, 19 nt, Homo sapiens
  misc_RNA (1)...(19): siRNA sense strand
acgaagagcaccugcggca

SEQ ID NO: 2528251 - RNA, 19 nt, Homo sapiens
  misc_RNA (1)...(19): siRNA sense strand
gcuuugagaaggagaccca

SEQ ID NO: 2528252 - RNA, 19 nt, Homo sapiens
  misc_RNA (1)...(19): siRNA sense strand
acaccaagaagcugcucua

SEQ ID NO: 2528253 - RNA, 19 nt, Homo sapiens
  misc_RNA (1)...(19): siRNA sense strand
accugaagagggaggagaa

SEQ ID NO: 2528254 - RNA, 19 nt, Homo sapiens
  misc_RNA (1)...(19): siRNA sense strand
ggccaguugaggugcggaa

SEQ ID NO: 2528255 - RNA, 19 nt, Homo sapiens
  misc_RNA (1)...(19): siRNA sense strand
ccucaaucgacacaaggaa

SEQ ID NO: 2528256 - RNA, 19 nt, Homo sapiens
  misc_RNA (1)...(19): siRNA sense strand
gaagaagacgacaguggga

SEQ ID NO: 2528257 - RNA, 19 nt, Homo sapiens
  misc_RNA (1)...(19): siRNA sense strand
cugaacgggaagaagguga

SEQ ID NO: 2528258 - RNA, 19 nt, Homo sapiens
  misc_RNA (1)...(19): siRNA sense strand
acgggaagaaggugauuca

SEQ ID NO: 2528259 - RNA, 19 nt, Homo sapiens
  misc_RNA (1)...(19): siRNA sense strand
ucuaugacaccaagcggaa

SEQ ID NO: 2528260 - RNA, 19 nt, Homo sapiens
  misc_RNA (1)...(19): siRNA sense strand
gaaugagaagagcaaggaa

SEQ ID NO: 2528261 - RNA, 19 nt, Homo sapiens
  misc_RNA (1)...(19): siRNA sense strand
ucaaguaccagaaggggaa

SEQ ID NO: 2528262 - RNA, 19 nt, Homo sapiens
  misc_RNA (1)...(19): siRNA sense strand
cuuacugcgucaacggcua

SEQ ID NO: 2528263 - RNA, 19 nt, Homo sapiens
  misc_RNA (1)...(19): siRNA sense strand
aagaacuacuggaucaaca

SEQ ID NO: 2528264 - RNA, 19 nt, Homo sapiens
  misc_RNA (1)...(19): siRNA sense strand
cgacagugggauaaacgau

SEQ ID NO: 2528265 - RNA, 19 nt, Homo sapiens
  misc_RNA (1)...(19): siRNA sense strand
ggguggaaguccugcgcuu

SEQ ID NO: 2528266 - RNA, 19 nt, Homo sapiens
  misc_RNA (1)...(19): siRNA sense strand
agcugaaagccgaggaaga

SEQ ID NO: 2528267 - RNA, 19 nt, Homo sapiens
  misc_RNA (1)...(19): siRNA sense strand
aagccgaggaagaggauga

SEQ ID NO: 2528268 - RNA, 19 nt, Homo sapiens
  misc_RNA (1)...(19): siRNA sense strand
ucaaggagcaacacggcaa

SEQ ID NO: 2528269 - RNA, 19 nt, Homo sapiens
  misc_RNA (1)...(19): siRNA sense strand
aggaugaggaugaggacgu

SEQ ID NO: 2528270 - RNA, 19 nt, Homo sapiens
  misc_RNA (1)...(19): siRNA sense strand
ccgaggaagaggaugagga

SEQ ID NO: 2528271 - RNA, 19 nt, Homo sapiens
  misc_RNA (1)...(19): siRNA sense strand
agauggagcacguggugga

SEQ ID NO: 2528272 - RNA, 19 nt, Homo sapiens
  misc_RNA (1)...(19): siRNA sense strand
aggaggagcuggagcgcau

SEQ ID NO: 2528273 - RNA, 19 nt, Homo sapiens
  misc_RNA (1)...(19): siRNA sense strand
cggagauggugaaugggua

SEQ ID NO: 2528274 - RNA, 19 nt, Homo sapiens
  misc_RNA (1)...(19): siRNA sense strand
cagaacaucacaagggcaa

SEQ ID NO: 2528275 - RNA, 19 nt, Homo sapiens
  misc_RNA (1)...(19): siRNA sense strand
acacagaaguucaaggcca

SEQ ID NO: 2528276 - RNA, 19 nt, Homo sapiens
  misc_RNA (1)...(19): siRNA sense strand
cacagaaguucaaggccaa

SEQ ID NO: 2528277 - RNA, 19 nt, Homo sapiens
  misc_RNA (1)...(19): siRNA sense strand
acuucuacguggagaugaa

SEQ ID NO: 2528278 - RNA, 19 nt, Homo sapiens
  misc_RNA (1)...(19): siRNA sense strand
ggccagaaccugaggguag

SEQ ID NO: 2528279 - RNA, 19 nt, Homo sapiens
  misc_RNA (1)...(19): siRNA sense strand
acacaagcgccguggucau

SEQ ID NO: 2528280 - RNA, 19 nt, Homo sapiens
  misc_RNA (1)...(19): siRNA sense strand
gggcaaggucaaaggcugu

SEQ ID NO: 2528281 - RNA, 19 nt, Homo sapiens
  misc_RNA (1)...(19): siRNA sense strand
agaacaucuuucagaacau

SEQ ID NO: 2528282 - RNA, 19 nt, Homo sapiens
  misc_RNA (1)...(19): siRNA sense strand
ccaucacugcagaagaaua

SEQ ID NO: 2528283 - RNA, 19 nt, Homo sapiens
  misc_RNA (1)...(19): siRNA sense strand
ccaacuuugagcugggcaa

SEQ ID NO: 2528284 - RNA, 19 nt, Homo sapiens
  misc_RNA (1)...(19): siRNA sense strand
gaaaagacggagaugguga

SEQ ID NO: 2528285 - RNA, 19 nt, Homo sapiens
  misc_RNA (1)...(19): siRNA sense strand
ccguggucauggagauuga

SEQ ID NO: 2528286 - RNA, 19 nt, Homo sapiens
  misc_RNA (1)...(19): siRNA sense strand
agacgugggcagggagaau

SEQ ID NO: 2528287 - RNA, 19 nt, Homo sapiens
  misc_RNA (1)...(19): siRNA sense strand
cgauggaacugucggcgca

SEQ ID NO: 2528288 - RNA, 19 nt, Homo sapiens
  misc_RNA (1)...(19): siRNA sense strand
ggguaugaagcuaaggugu

SEQ ID NO: 2528289 - RNA, 19 nt, Homo sapiens
  misc_RNA (1)...(19): siRNA sense strand
ccgcacacggacagaacau

SEQ ID NO: 2528290 - RNA, 19 nt, Homo sapiens
  misc_RNA (1)...(19): siRNA sense strand
guggagaugaaaugggagu

SEQ ID NO: 2528291 - RNA, 19 nt, Homo sapiens
  misc_RNA (1)...(19): siRNA sense strand
aggacauuguggagagaaa

SEQ ID NO: 2528292 - RNA, 19 nt, Homo sapiens
  misc_RNA (1)...(19): siRNA sense strand
cuacagaaguggagcugga

SEQ ID NO: 2528293 - RNA, 19 nt, Homo sapiens
  misc_RNA (1)...(19): siRNA sense strand
ccucugaacaacagggaga

SEQ ID NO: 2528294 - RNA, 19 nt, Homo sapiens
  misc_RNA (1)...(19): siRNA sense strand
cccaagaagaugaaaggau

SEQ ID NO: 2528295 - RNA, 19 nt, Homo sapiens
  misc_RNA (1)...(19): siRNA sense strand
ugaugaagacagugcuaca

SEQ ID NO: 2528296 - RNA, 19 nt, Homo sapiens
  misc_RNA (1)...(19): siRNA sense strand
gcuacacuuaugacagaaa

SEQ ID NO: 2528297 - RNA, 19 nt, Homo sapiens
  misc_RNA (1)...(19): siRNA sense strand
augugaaagcccaagaaga

SEQ ID NO: 2528298 - RNA, 19 nt, Homo sapiens
  misc_RNA (1)...(19): siRNA sense strand
cguauaugguggugagacc

SEQ ID NO: 2528299 - RNA, 19 nt, Homo sapiens
  misc_RNA (1)...(19): siRNA sense strand
acagaaguggagcuggaua

SEQ ID NO: 2528300 - RNA, 19 nt, Homo sapiens
  misc_RNA (1)...(19): siRNA sense strand
agacagugcuacagagacc

SEQ ID NO: 2528301 - RNA, 19 nt, Homo sapiens
  misc_RNA (1)...(19): siRNA sense strand
accugaaguuuaagaccaa

SEQ ID NO: 2528302 - RNA, 19 nt, Homo sapiens
  misc_RNA (1)...(19): siRNA sense strand
gugacgucuucgaggccua

SEQ ID NO: 2528303 - RNA, 19 nt, Homo sapiens
  misc_RNA (1)...(19): siRNA sense strand
ccgcuggcuucaagugcaa

SEQ ID NO: 2528304 - RNA, 19 nt, Homo sapiens
  misc_RNA (1)...(19): siRNA sense strand
gcuucaagugcaaggucau

SEQ ID NO: 2528305 - RNA, 19 nt, Homo sapiens
  misc_RNA (1)...(19): siRNA sense strand
gguggagggaccauggcua

SEQ ID NO: 2528306 - RNA, 19 nt, Homo sapiens
  misc_RNA (1)...(19): siRNA sense strand
ucguggaggccaugcagaa

SEQ ID NO: 2528307 - RNA, 19 nt, Homo sapiens
  misc_RNA (1)...(19): siRNA sense strand
gaccugaaguuuaagacca

SEQ ID NO: 2528308 - RNA, 19 nt, Homo sapiens
  misc_RNA (1)...(19): siRNA sense strand
gcuuuugagaggagacuua

SEQ ID NO: 2528309 - RNA, 19 nt, Homo sapiens
  misc_RNA (1)...(19): siRNA sense strand
cuggaauacacaagagagu

SEQ ID NO: 2528310 - RNA, 19 nt, Homo sapiens
  misc_RNA (1)...(19): siRNA sense strand
caagagaguaguugcacca

SEQ ID NO: 2528311 - RNA, 19 nt, Homo sapiens
  misc_RNA (1)...(19): siRNA sense strand
uugugaugauacaggaaaa

SEQ ID NO: 2528312 - RNA, 19 nt, Homo sapiens
  misc_RNA (1)...(19): siRNA sense strand
cuucacaucauuauggaau

SEQ ID NO: 2528313 - RNA, 19 nt, Homo sapiens
  misc_RNA (1)...(19): siRNA sense strand
ucuaagaaauguaggacca

SEQ ID NO: 2528314 - RNA, 19 nt, Homo sapiens
  misc_RNA (1)...(19): siRNA sense strand
uugcagaugugguggaaaa

SEQ ID NO: 2528315 - RNA, 19 nt, Homo sapiens
  misc_RNA (1)...(19): siRNA sense strand
agauguaccagcaggaaca

SEQ ID NO: 2528316 - RNA, 19 nt, Homo sapiens
  misc_RNA (1)...(19): siRNA sense strand
cagcaggaacaguggagga

SEQ ID NO: 2528317 - RNA, 19 nt, Homo sapiens
  misc_RNA (1)...(19): siRNA sense strand
aagaaauguaggaccagua

SEQ ID NO: 2528318 - RNA, 19 nt, Homo sapiens
  misc_RNA (1)...(19): siRNA sense strand
aggaugaagcggaagaagu

SEQ ID NO: 2528319 - RNA, 19 nt, Homo sapiens
  misc_RNA (1)...(19): siRNA sense strand
ugcaaauauaucagaccua

SEQ ID NO: 2528320 - RNA, 19 nt, Homo sapiens
  misc_RNA (1)...(19): siRNA sense strand
gcggaagaaguuagccuga

SEQ ID NO: 2528321 - RNA, 19 nt, Homo sapiens
  misc_RNA (1)...(19): siRNA sense strand
gagaaaucgugcucaguua

SEQ ID NO: 2528322 - RNA, 19 nt, Homo sapiens
  misc_RNA (1)...(19): siRNA sense strand
ucacaaaugagaagggaga

SEQ ID NO: 2528323 - RNA, 19 nt, Homo sapiens
  misc_RNA (1)...(19): siRNA sense strand
augaggaagauccgagaaa

SEQ ID NO: 2528324 - RNA, 19 nt, Homo sapiens
  misc_RNA (1)...(19): siRNA sense strand
gcucuauggcuuaggcaca

SEQ ID NO: 2528325 - RNA, 19 nt, Homo sapiens
  misc_RNA (1)...(19): siRNA sense strand
gugcucaguuacaguuaua

SEQ ID NO: 2528326 - RNA, 19 nt, Homo sapiens
  misc_RNA (1)...(19): siRNA sense strand
aaaugagaagggagaguau

SEQ ID NO: 2528327 - RNA, 19 nt, Homo sapiens
  misc_RNA (1)...(19): siRNA sense strand
guuccauagauuaccaaua

SEQ ID NO: 2528328 - RNA, 19 nt, Homo sapiens
  misc_RNA (1)...(19): siRNA sense strand
cugaugaagagcugcaaaa

SEQ ID NO: 2528329 - RNA, 19 nt, Homo sapiens
  misc_RNA (1)...(19): siRNA sense strand
agaggaagggauugacaca

SEQ ID NO: 2528330 - RNA, 19 nt, Homo sapiens
  misc_RNA (1)...(19): siRNA sense strand
aguuggauuugcagaggau

SEQ ID NO: 2528331 - RNA, 19 nt, Homo sapiens
  misc_RNA (1)...(19): siRNA sense strand
gcucaguuacaguuauauu

SEQ ID NO: 2528332 - RNA, 19 nt, Homo sapiens
  misc_RNA (1)...(19): siRNA sense strand
augugaaauaccugaugaa

SEQ ID NO: 2528333 - RNA, 19 nt, Homo sapiens
  misc_RNA (1)...(19): siRNA sense strand
uggacaagauugaggacca

SEQ ID NO: 2528334 - RNA, 19 nt, Homo sapiens
  misc_RNA (1)...(19): siRNA sense strand
uggacguagaaguggacaa

SEQ ID NO: 2528335 - RNA, 19 nt, Homo sapiens
  misc_RNA (1)...(19): siRNA sense strand
ccuucaaguccaacagaga

SEQ ID NO: 2528336 - RNA, 19 nt, Homo sapiens
  misc_RNA (1)...(19): siRNA sense strand
aguggaaggacaaggcuuu

SEQ ID NO: 2528337 - RNA, 19 nt, Homo sapiens
  misc_RNA (1)...(19): siRNA sense strand
cagccaacccagaagaagu

SEQ ID NO: 2528338 - RNA, 19 nt, Homo sapiens
  misc_RNA (1)...(19): siRNA sense strand
aagaaagagaaaccagaaa

SEQ ID NO: 2528339 - RNA, 19 nt, Homo sapiens
  misc_RNA (1)...(19): siRNA sense strand
ggaagaaagagaaaccaga

SEQ ID NO: 2528340 - RNA, 19 nt, Homo sapiens
  misc_RNA (1)...(19): siRNA sense strand
gcagaaucuaagaagaaga

SEQ ID NO: 2528341 - RNA, 19 nt, Homo sapiens
  misc_RNA (1)...(19): siRNA sense strand
cuccaagcccuguggcaaa

SEQ ID NO: 2528342 - RNA, 19 nt, Homo sapiens
  misc_RNA (1)...(19): siRNA sense strand
agaaagagaaaccagaaaa

SEQ ID NO: 2528343 - RNA, 19 nt, Homo sapiens
  misc_RNA (1)...(19): siRNA sense strand
gcaaacugaccaagcccaa

SEQ ID NO: 2528344 - RNA, 19 nt, Homo sapiens
  misc_RNA (1)...(19): siRNA sense strand
aaggcaagaaacaggagaa

SEQ ID NO: 2528345 - RNA, 19 nt, Homo sapiens
  misc_RNA (1)...(19): siRNA sense strand
cugaagcagggaagaaaga

SEQ ID NO: 2528346 - RNA, 19 nt, Homo sapiens
  misc_RNA (1)...(19): siRNA sense strand
ggagaauggcaguggagug

SEQ ID NO: 2528347 - RNA, 19 nt, Homo sapiens
  misc_RNA (1)...(19): siRNA sense strand
agcagggaagaaagagaaa

SEQ ID NO: 2528348 - RNA, 19 nt, Homo sapiens
  misc_RNA (1)...(19): siRNA sense strand
auggaauaccugaaggaaa

SEQ ID NO: 2528349 - RNA, 19 nt, Homo sapiens
  misc_RNA (1)...(19): siRNA sense strand
gguaguaaaaugccggaaa

SEQ ID NO: 2528350 - RNA, 19 nt, Homo sapiens
  misc_RNA (1)...(19): siRNA sense strand
gaagaaugcaaaauggaau

SEQ ID NO: 2528351 - RNA, 19 nt, Homo sapiens
  misc_RNA (1)...(19): siRNA sense strand
agagaaaaggccaaagaga

SEQ ID NO: 2528352 - RNA, 19 nt, Homo sapiens
  misc_RNA (1)...(19): siRNA sense strand
gcaaaauggaauaccugaa

SEQ ID NO: 2528353 - RNA, 19 nt, Homo sapiens
  misc_RNA (1)...(19): siRNA sense strand
ccugaaggaaagggaagaa

SEQ ID NO: 2528354 - RNA, 19 nt, Homo sapiens
  misc_RNA (1)...(19): siRNA sense strand
gcaccgaccuguaccgcaa

SEQ ID NO: 2528355 - RNA, 19 nt, Homo sapiens
  misc_RNA (1)...(19): siRNA sense strand
ccgaaaugaccuggaagaa

SEQ ID NO: 2528356 - RNA, 19 nt, Homo sapiens
  misc_RNA (1)...(19): siRNA sense strand
acgcaaagucccugaugga

SEQ ID NO: 2528357 - RNA, 19 nt, Homo sapiens
  misc_RNA (1)...(19): siRNA sense strand
cccgaaaugaccuggaaga

SEQ ID NO: 2528358 - RNA, 19 nt, Homo sapiens
  misc_RNA (1)...(19): siRNA sense strand
cugagagagaagagggaca

SEQ ID NO: 2528359 - RNA, 19 nt, Homo sapiens
  misc_RNA (1)...(19): siRNA sense strand
ccgcuaaacgagacagaca

SEQ ID NO: 2528360 - RNA, 19 nt, Homo sapiens
  misc_RNA (1)...(19): siRNA sense strand
agaaaaugcugcagcuaca

SEQ ID NO: 2528361 - RNA, 19 nt, Homo sapiens
  misc_RNA (1)...(19): siRNA sense strand
aggacagacacgucagcaa

SEQ ID NO: 2528362 - RNA, 19 nt, Homo sapiens
  misc_RNA (1)...(19): siRNA sense strand
gggaccagcaggacagaca

SEQ ID NO: 2528363 - RNA, 19 nt, Homo sapiens
  misc_RNA (1)...(19): siRNA sense strand
gugccuuaucuuuggguuu

SEQ ID NO: 2528364 - RNA, 19 nt, Homo sapiens
  misc_RNA (1)...(19): siRNA sense strand
ucugaaagagacugugaau

SEQ ID NO: 2528365 - RNA, 19 nt, Homo sapiens
  misc_RNA (1)...(19): siRNA sense strand
cccauguuaagaagagaaa

SEQ ID NO: 2528366 - RNA, 19 nt, Homo sapiens
  misc_RNA (1)...(19): siRNA sense strand
gggcgcaggaaccgcuaaa

SEQ ID NO: 2528367 - RNA, 19 nt, Homo sapiens
  misc_RNA (1)...(19): siRNA sense strand
gcaaagagaucgaagugga

SEQ ID NO: 2528368 - RNA, 19 nt, Homo sapiens
  misc_RNA (1)...(19): siRNA sense strand
uugucagagugaagagaua

SEQ ID NO: 2528369 - RNA, 19 nt, Homo sapiens
  misc_RNA (1)...(19): siRNA sense strand
gaaauaaaguggaucugga

SEQ ID NO: 2528370 - RNA, 19 nt, Homo sapiens
  misc_RNA (1)...(19): siRNA sense strand
auaucaagccaaugagaga

SEQ ID NO: 2528371 - RNA, 19 nt, Homo sapiens
  misc_RNA (1)...(19): siRNA sense strand
uugaagauuucuaccgcaa

SEQ ID NO: 2528372 - RNA, 19 nt, Homo sapiens
  misc_RNA (1)...(19): siRNA sense strand
gagugaagagauaugaaaa

SEQ ID NO: 2528373 - RNA, 19 nt, Homo sapiens
  misc_RNA (1)...(19): siRNA sense strand
aagcaagaucaguguugua

SEQ ID NO: 2528374 - RNA, 19 nt, Homo sapiens
  misc_RNA (1)...(19): siRNA sense strand
gaguggagggguuggcaaa

SEQ ID NO: 2528375 - RNA, 19 nt, Homo sapiens
  misc_RNA (1)...(19): siRNA sense strand
gguagugguguuagggagu

SEQ ID NO: 2528376 - RNA, 19 nt, Homo sapiens
  misc_RNA (1)...(19): siRNA sense strand
ucaaauugucagagugaag

SEQ ID NO: 2528377 - RNA, 19 nt, Homo sapiens
  misc_RNA (1)...(19): siRNA sense strand
ucgucaggcaaaugaacua

SEQ ID NO: 2528378 - RNA, 19 nt, Homo sapiens
  misc_RNA (1)...(19): siRNA sense strand
uggaagugccugugagcuu

SEQ ID NO: 2528379 - RNA, 19 nt, Homo sapiens
  misc_RNA (1)...(19): siRNA sense strand
cgacgugacccuaggcuca

SEQ ID NO: 2528380 - RNA, 19 nt, Homo sapiens
  misc_RNA (1)...(19): siRNA sense strand
acaaggaggaauaugaaaa

SEQ ID NO: 2528381 - RNA, 19 nt, Homo sapiens
  misc_RNA (1)...(19): siRNA sense strand
gcacaguccugcagcgaag

SEQ ID NO: 2528382 - RNA, 19 nt, Homo sapiens
  misc_RNA (1)...(19): siRNA sense strand
gcccugaauccuugggaga

SEQ ID NO: 2528383 - RNA, 19 nt, Homo sapiens
  misc_RNA (1)...(19): siRNA sense strand
cuucgagcccucuggacaa

SEQ ID NO: 2528384 - RNA, 19 nt, Homo sapiens
  misc_RNA (1)...(19): siRNA sense strand
gguucagcuugcagaggga

SEQ ID NO: 2528385 - RNA, 19 nt, Homo sapiens
  misc_RNA (1)...(19): siRNA sense strand
gggcaugauugcuuggcua

SEQ ID NO: 2528386 - RNA, 19 nt, Homo sapiens
  misc_RNA (1)...(19): siRNA sense strand
gaacaaauugauauggaca

SEQ ID NO: 2528387 - RNA, 19 nt, Homo sapiens
  misc_RNA (1)...(19): siRNA sense strand
ucuuuaggguauagcaaau

SEQ ID NO: 2528388 - RNA, 19 nt, Homo sapiens
  misc_RNA (1)...(19): siRNA sense strand
cguuaccaacugagagaau

SEQ ID NO: 2528389 - RNA, 19 nt, Homo sapiens
  misc_RNA (1)...(19): siRNA sense strand
cagcacuggcauuggaaga

SEQ ID NO: 2528390 - RNA, 19 nt, Homo sapiens
  misc_RNA (1)...(19): siRNA sense strand
ccaauuaaccauuaccgaa

SEQ ID NO: 2528391 - RNA, 19 nt, Homo sapiens
  misc_RNA (1)...(19): siRNA sense strand
cugaaauggugaugaagcu

SEQ ID NO: 2528392 - RNA, 19 nt, Homo sapiens
  misc_RNA (1)...(19): siRNA sense strand
ggcugaagucacaaagauu

SEQ ID NO: 2528393 - RNA, 19 nt, Homo sapiens
  misc_RNA (1)...(19): siRNA sense strand
gaguuguagcacuggauuu

SEQ ID NO: 2528394 - RNA, 19 nt, Homo sapiens
  misc_RNA (1)...(19): siRNA sense strand
uugagagguuauggagaaa

SEQ ID NO: 2528395 - RNA, 19 nt, Homo sapiens
  misc_RNA (1)...(19): siRNA sense strand
ugcuggagaaagaggcaaa

SEQ ID NO: 2528396 - RNA, 19 nt, Homo sapiens
  misc_RNA (1)...(19): siRNA sense strand
ggaucaaggauucaggguu

SEQ ID NO: 2528397 - RNA, 19 nt, Homo sapiens
  misc_RNA (1)...(19): siRNA sense strand
uguugcugcuggagaaaga

SEQ ID NO: 2528398 - RNA, 19 nt, Homo sapiens
  misc_RNA (1)...(19): siRNA sense strand
ggaagaaaaggaugccaau

SEQ ID NO: 2528399 - RNA, 19 nt, Homo sapiens
  misc_RNA (1)...(19): siRNA sense strand
agaacaacgcccugcacaa

SEQ ID NO: 2528400 - RNA, 19 nt, Homo sapiens
  misc_RNA (1)...(19): siRNA sense strand
gaggagagccgcaugguca

SEQ ID NO: 2528401 - RNA, 19 nt, Homo sapiens
  misc_RNA (1)...(19): siRNA sense strand
aggaagggcugauggguga

SEQ ID NO: 2528402 - RNA, 19 nt, Homo sapiens
  misc_RNA (1)...(19): siRNA sense strand
ccagaaggcaugaagggua

SEQ ID NO: 2528403 - RNA, 19 nt, Homo sapiens
  misc_RNA (1)...(19): siRNA sense strand
gaaagggacacaagggcua

SEQ ID NO: 2528404 - RNA, 19 nt, Homo sapiens
  misc_RNA (1)...(19): siRNA sense strand
ccaccuggcuugaugggaa

SEQ ID NO: 2528405 - RNA, 19 nt, Homo sapiens
  misc_RNA (1)...(19): siRNA sense strand
ugguuaugauggacacaaa

SEQ ID NO: 2528406 - RNA, 19 nt, Homo sapiens
  misc_RNA (1)...(19): siRNA sense strand
gagcagggauuuaugggau

SEQ ID NO: 2528407 - RNA, 19 nt, Homo sapiens
  misc_RNA (1)...(19): siRNA sense strand
gcagagggaccaaagggaa

SEQ ID NO: 2528408 - RNA, 19 nt, Homo sapiens
  misc_RNA (1)...(19): siRNA sense strand
agccaggaaucgugggaga

SEQ ID NO: 2528409 - RNA, 19 nt, Homo sapiens
  misc_RNA (1)...(19): siRNA sense strand
ccaagggugccaagggcua

SEQ ID NO: 2528410 - RNA, 19 nt, Homo sapiens
  misc_RNA (1)...(19): siRNA sense strand
ugaaaggugauaaggguga

SEQ ID NO: 2528411 - RNA, 19 nt, Homo sapiens
  misc_RNA (1)...(19): siRNA sense strand
cggacugaggccaagauaa

SEQ ID NO: 2528412 - RNA, 19 nt, Homo sapiens
  misc_RNA (1)...(19): siRNA sense strand
ccugcugggaagagaggaa

SEQ ID NO: 2528413 - RNA, 19 nt, Homo sapiens
  misc_RNA (1)...(19): siRNA sense strand
aggugauaagggugaacaa

SEQ ID NO: 2528414 - RNA, 19 nt, Homo sapiens
  misc_RNA (1)...(19): siRNA sense strand
gggaccaaagggaaagcaa

SEQ ID NO: 2528415 - RNA, 19 nt, Homo sapiens
  misc_RNA (1)...(19): siRNA sense strand
ccaucaucaguguggacaa

SEQ ID NO: 2528416 - RNA, 19 nt, Homo sapiens
  misc_RNA (1)...(19): siRNA sense strand
gaucugacaaccaggccua

SEQ ID NO: 2528417 - RNA, 19 nt, Homo sapiens
  misc_RNA (1)...(19): siRNA sense strand
caaagggaaagcaaggcaa

SEQ ID NO: 2528418 - RNA, 19 nt, Homo sapiens
  misc_RNA (1)...(19): siRNA sense strand
agaagaugguggaugguac

SEQ ID NO: 2528419 - RNA, 19 nt, Homo sapiens
  misc_RNA (1)...(19): siRNA sense strand
gcagagaagcccauccaga

SEQ ID NO: 2528420 - RNA, 19 nt, Homo sapiens
  misc_RNA (1)...(19): siRNA sense strand
aagccgggaugaaggguga

SEQ ID NO: 2528421 - RNA, 19 nt, Homo sapiens
  misc_RNA (1)...(19): siRNA sense strand
ucacagaagaucacagcca

SEQ ID NO: 2528422 - RNA, 19 nt, Homo sapiens
  misc_RNA (1)...(19): siRNA sense strand
ccaagggcaugaagggacu

SEQ ID NO: 2528423 - RNA, 19 nt, Homo sapiens
  misc_RNA (1)...(19): siRNA sense strand
cugugggagagcagggauu

SEQ ID NO: 2528424 - RNA, 19 nt, Homo sapiens
  misc_RNA (1)...(19): siRNA sense strand
ccacaaacccucaccagca

SEQ ID NO: 2528425 - RNA, 19 nt, Homo sapiens
  misc_RNA (1)...(19): siRNA sense strand
ccuuggaccuccuggacca

SEQ ID NO: 2528426 - RNA, 19 nt, Homo sapiens
  misc_RNA (1)...(19): siRNA sense strand
ugcuaggccuggagaacuu

SEQ ID NO: 2528427 - RNA, 19 nt, Homo sapiens
  misc_RNA (1)...(19): siRNA sense strand
ugauggacacaaaggcauu

SEQ ID NO: 2528428 - RNA, 19 nt, Homo sapiens
  misc_RNA (1)...(19): siRNA sense strand
uggacaggagggugugcaa

SEQ ID NO: 2528429 - RNA, 19 nt, Homo sapiens
  misc_RNA (1)...(19): siRNA sense strand
cggcuuaccuggagcacag

SEQ ID NO: 2528430 - RNA, 19 nt, Homo sapiens
  misc_RNA (1)...(19): siRNA sense strand
gggcagacccugaagacuc

SEQ ID NO: 2528431 - RNA, 19 nt, Homo sapiens
  misc_RNA (1)...(19): siRNA sense strand
gggcugauccugauggcca

SEQ ID NO: 2528432 - RNA, 19 nt, Homo sapiens
  misc_RNA (1)...(19): siRNA sense strand
gagagaaggccaaagguca

SEQ ID NO: 2528433 - RNA, 19 nt, Homo sapiens
  misc_RNA (1)...(19): siRNA sense strand
ccuagagaagagacagaaa

SEQ ID NO: 2528434 - RNA, 19 nt, Homo sapiens
  misc_RNA (1)...(19): siRNA sense strand
uucuauaacuccugggaau

SEQ ID NO: 2528435 - RNA, 19 nt, Homo sapiens
  misc_RNA (1)...(19): siRNA sense strand
gcaucagagaauugcaaau

SEQ ID NO: 2528436 - RNA, 19 nt, Homo sapiens
  misc_RNA (1)...(19): siRNA sense strand
acagaaaccaaaaggacaa

SEQ ID NO: 2528437 - RNA, 19 nt, Homo sapiens
  misc_RNA (1)...(19): siRNA sense strand
aggccaaaggucaagcaua

SEQ ID NO: 2528438 - RNA, 19 nt, Homo sapiens
  misc_RNA (1)...(19): siRNA sense strand
cuaugaugccaacaagaaa

SEQ ID NO: 2528439 - RNA, 19 nt, Homo sapiens
  misc_RNA (1)...(19): siRNA sense strand
uuguauauuuggagagaag

SEQ ID NO: 2528440 - RNA, 19 nt, Homo sapiens
  misc_RNA (1)...(19): siRNA sense strand
ccaaaagacgugagaagca

SEQ ID NO: 2528441 - RNA, 19 nt, Homo sapiens
  misc_RNA (1)...(19): siRNA sense strand
cuguuauccaccagacaua

SEQ ID NO: 2528442 - RNA, 19 nt, Homo sapiens
  misc_RNA (1)...(19): siRNA sense strand
ugccagugguuguggagau

SEQ ID NO: 2528443 - RNA, 19 nt, Homo sapiens
  misc_RNA (1)...(19): siRNA sense strand
gccaggaagcugugccaau

SEQ ID NO: 2528444 - RNA, 19 nt, Homo sapiens
  misc_RNA (1)...(19): siRNA sense strand
ugguuguggagauggcaaa

SEQ ID NO: 2528445 - RNA, 19 nt, Homo sapiens
  misc_RNA (1)...(19): siRNA sense strand
ggcucugacagcaaaguaa

SEQ ID NO: 2528446 - RNA, 19 nt, Homo sapiens
  misc_RNA (1)...(19): siRNA sense strand
ggugaaaaccccagaccaa

SEQ ID NO: 2528447 - RNA, 19 nt, Homo sapiens
  misc_RNA (1)...(19): siRNA sense strand
gcuaaagaauccauggacu

SEQ ID NO: 2528448 - RNA, 19 nt, Homo sapiens
  misc_RNA (1)...(19): siRNA sense strand
gcacaggcuuugaagacga

SEQ ID NO: 2528449 - RNA, 19 nt, Homo sapiens
  misc_RNA (1)...(19): siRNA sense strand
gagcagagcugaagacgcu

SEQ ID NO: 2528450 - RNA, 19 nt, Homo sapiens
  misc_RNA (1)...(19): siRNA sense strand
gucaagaagcuguuggaga

SEQ ID NO: 2528451 - RNA, 19 nt, Homo sapiens
  misc_RNA (1)...(19): siRNA sense strand
acuuugaggaaauggcuaa

SEQ ID NO: 2528452 - RNA, 19 nt, Homo sapiens
  misc_RNA (1)...(19): siRNA sense strand
cagccugccaugaggaaau

SEQ ID NO: 2528453 - RNA, 19 nt, Homo sapiens
  misc_RNA (1)...(19): siRNA sense strand
ggggugaggaagaggagaa

SEQ ID NO: 2528454 - RNA, 19 nt, Homo sapiens
  misc_RNA (1)...(19): siRNA sense strand
gggugaggaagaggagaaa

SEQ ID NO: 2528455 - RNA, 19 nt, Homo sapiens
  misc_RNA (1)...(19): siRNA sense strand
cugaaaagccacacaaaga

SEQ ID NO: 2528456 - RNA, 19 nt, Homo sapiens
  misc_RNA (1)...(19): siRNA sense strand
acugcauggaagagaagaa

SEQ ID NO: 2528457 - RNA, 19 nt, Homo sapiens
  misc_RNA (1)...(19): siRNA sense strand
ccuacaacgccgugcuuga

SEQ ID NO: 2528458 - RNA, 19 nt, Homo sapiens
  misc_RNA (1)...(19): siRNA sense strand
cgaucugaguugagggguu

SEQ ID NO: 2528459 - RNA, 19 nt, Homo sapiens
  misc_RNA (1)...(19): siRNA sense strand
uggcuguggaagaagcaua

SEQ ID NO: 2528460 - RNA, 19 nt, Homo sapiens
  misc_RNA (1)...(19): siRNA sense strand
aggaaauggcuaaagaauc

SEQ ID NO: 2528461 - RNA, 19 nt, Homo sapiens
  misc_RNA (1)...(19): siRNA sense strand
uuaaaggaccugaccgaga

SEQ ID NO: 2528462 - RNA, 19 nt, Homo sapiens
  misc_RNA (1)...(19): siRNA sense strand
aggaauguggugagcacuu

SEQ ID NO: 2528463 - RNA, 19 nt, Homo sapiens
  misc_RNA (1)...(19): siRNA sense strand
cuaaagaauccauggacuc

SEQ ID NO: 2528464 - RNA, 19 nt, Homo sapiens
  misc_RNA (1)...(19): siRNA sense strand
cuguggaagaagcauaaua

SEQ ID NO: 2528465 - RNA, 19 nt, Homo sapiens
  misc_RNA (1)...(19): siRNA sense strand
uggugagcacuuugaggaa

SEQ ID NO: 2528466 - RNA, 19 nt, Homo sapiens
  misc_RNA (1)...(19): siRNA sense strand
ggagaaaauuuuaaaggac

SEQ ID NO: 2528467 - RNA, 19 nt, Homo sapiens
  misc_RNA (1)...(19): siRNA sense strand
uccaaaaggaagagaaauu

SEQ ID NO: 2528468 - RNA, 19 nt, Homo sapiens
  misc_RNA (1)...(19): siRNA sense strand
ucuacaaugaggagcgcua

SEQ ID NO: 2528469 - RNA, 19 nt, Homo sapiens
  misc_RNA (1)...(19): siRNA sense strand
cuaagaaaguuauuggcca

SEQ ID NO: 2528470 - RNA, 19 nt, Homo sapiens
  misc_RNA (1)...(19): siRNA sense strand
acuguaaagcauggagaaa

SEQ ID NO: 2528471 - RNA, 19 nt, Homo sapiens
  misc_RNA (1)...(19): siRNA sense strand
gaauugauguugaugcuga

SEQ ID NO: 2528472 - RNA, 19 nt, Homo sapiens
  misc_RNA (1)...(19): siRNA sense strand
aggagaugcaggagaaaau

SEQ ID NO: 2528473 - RNA, 19 nt, Homo sapiens
  misc_RNA (1)...(19): siRNA sense strand
auuggaagucagagccaua

SEQ ID NO: 2528474 - RNA, 19 nt, Homo sapiens
  misc_RNA (1)...(19): siRNA sense strand
ugguaaacaucgaguacgu

SEQ ID NO: 2528475 - RNA, 19 nt, Homo sapiens
  misc_RNA (1)...(19): siRNA sense strand
cuuuaaaggagaugcagga

SEQ ID NO: 2528476 - RNA, 19 nt, Homo sapiens
  misc_RNA (1)...(19): siRNA sense strand
gcuagaagccggcaggagu

SEQ ID NO: 2528477 - RNA, 19 nt, Homo sapiens
  misc_RNA (1)...(19): siRNA sense strand
uauccaaaaggaagagaaa

SEQ ID NO: 2528478 - RNA, 19 nt, Homo sapiens
  misc_RNA (1)...(19): siRNA sense strand
cuguaaagcauggagaaaa

SEQ ID NO: 2528479 - RNA, 19 nt, Homo sapiens
  misc_RNA (1)...(19): siRNA sense strand
cagugugaucccagcuuua

SEQ ID NO: 2528480 - RNA, 19 nt, Homo sapiens
  misc_RNA (1)...(19): siRNA sense strand
acuucauacuguaaagcau

SEQ ID NO: 2528481 - RNA, 19 nt, Homo sapiens
  misc_RNA (1)...(19): siRNA sense strand
cugcugaaucugagccaca

SEQ ID NO: 2528482 - RNA, 19 nt, Homo sapiens
  misc_RNA (1)...(19): siRNA sense strand
uagaauaugcauugaccca

SEQ ID NO: 2528483 - RNA, 19 nt, Homo sapiens
  misc_RNA (1)...(19): siRNA sense strand
acguggacccgcagaccaa

SEQ ID NO: 2528484 - RNA, 19 nt, Homo sapiens
  misc_RNA (1)...(19): siRNA sense strand
cgacuguggaggagcgugu

SEQ ID NO: 2528485 - RNA, 19 nt, Homo sapiens
  misc_RNA (1)...(19): siRNA sense strand
gggaaagggucuagccaug

SEQ ID NO: 2528486 - RNA, 19 nt, Homo sapiens
  misc_RNA (1)...(19): siRNA sense strand
ggagauacuuuaagcgggu

SEQ ID NO: 2528487 - RNA, 19 nt, Homo sapiens
  misc_RNA (1)...(19): siRNA sense strand
ggcuaaggcuccggggaaa

SEQ ID NO: 2528488 - RNA, 19 nt, Homo sapiens
  misc_RNA (1)...(19): siRNA sense strand
gguccaggugacaguaaau

SEQ ID NO: 2528489 - RNA, 19 nt, Homo sapiens
  misc_RNA (1)...(19): siRNA sense strand
ccuccaagauguucgggca

SEQ ID NO: 2528490 - RNA, 19 nt, Homo sapiens
  misc_RNA (1)...(19): siRNA sense strand
ccggcaagaagaagcggaa

SEQ ID NO: 2528491 - RNA, 19 nt, Homo sapiens
  misc_RNA (1)...(19): siRNA sense strand
auucagaaaaugugaggaa

SEQ ID NO: 2528492 - RNA, 19 nt, Homo sapiens
  misc_RNA (1)...(19): siRNA sense strand
aguuguaggaaucgaaaga

SEQ ID NO: 2528493 - RNA, 19 nt, Homo sapiens
  misc_RNA (1)...(19): siRNA sense strand
ggcaagaagaagcggaaac

SEQ ID NO: 2528494 - RNA, 19 nt, Homo sapiens
  misc_RNA (1)...(19): siRNA sense strand
cggcaagaagaagcggaaa

SEQ ID NO: 2528495 - RNA, 19 nt, Homo sapiens
  misc_RNA (1)...(19): siRNA sense strand
aagagaagcucaaggccga

SEQ ID NO: 2528496 - RNA, 19 nt, Homo sapiens
  misc_RNA (1)...(19): siRNA sense strand
ccguuuaagagaagcucaa

SEQ ID NO: 2528497 - RNA, 19 nt, Homo sapiens
  misc_RNA (1)...(19): siRNA sense strand
cuauuggucaguaggagaa

SEQ ID NO: 2528498 - RNA, 19 nt, Homo sapiens
  misc_RNA (1)...(19): siRNA sense strand
ccuacaaagaauaagaaca

SEQ ID NO: 2528499 - RNA, 19 nt, Homo sapiens
  misc_RNA (1)...(19): siRNA sense strand
agaugagagcagcgauuaa

SEQ ID NO: 2528500 - RNA, 19 nt, Homo sapiens
  misc_RNA (1)...(19): siRNA sense strand
aguugaaggcacacuguaa

SEQ ID NO: 2528501 - RNA, 19 nt, Homo sapiens
  misc_RNA (1)...(19): siRNA sense strand
gaauguggcuggaaggauc

SEQ ID NO: 2528502 - RNA, 19 nt, Homo sapiens
  misc_RNA (1)...(19): siRNA sense strand
agaaacuggagaaagagaa

SEQ ID NO: 2528503 - RNA, 19 nt, Homo sapiens
  misc_RNA (1)...(19): siRNA sense strand
aggaucaguugaaggcaca

SEQ ID NO: 2528504 - RNA, 19 nt, Homo sapiens
  misc_RNA (1)...(19): siRNA sense strand
ucaaagaguugcugagagc

SEQ ID NO: 2528505 - RNA, 19 nt, Homo sapiens
  misc_RNA (1)...(19): siRNA sense strand
ugaacaaagaugcgcagau

SEQ ID NO: 2528506 - RNA, 19 nt, Homo sapiens
  misc_RNA (1)...(19): siRNA sense strand
ggagaaagagaacgccuca

SEQ ID NO: 2528507 - RNA, 19 nt, Homo sapiens
  misc_RNA (1)...(19): siRNA sense strand
acaagaaggagaagggcaa

SEQ ID NO: 2528508 - RNA, 19 nt, Homo sapiens
  misc_RNA (1)...(19): siRNA sense strand
agaagaaauaugagaccaa

SEQ ID NO: 2528509 - RNA, 19 nt, Homo sapiens
  misc_RNA (1)...(19): siRNA sense strand
aagaagaacaagaaggaga

SEQ ID NO: 2528510 - RNA, 19 nt, Homo sapiens
  misc_RNA (1)...(19): siRNA sense strand
ccauuggacccguggacaa

SEQ ID NO: 2528511 - RNA, 19 nt, Homo sapiens
  misc_RNA (1)...(19): siRNA sense strand
cagaauggcaagaggcuca

SEQ ID NO: 2528512 - RNA, 19 nt, Homo sapiens
  misc_RNA (1)...(19): siRNA sense strand
agaccaaaguccaucggaa

SEQ ID NO: 2528513 - RNA, 19 nt, Homo sapiens
  misc_RNA (1)...(19): siRNA sense strand
cucaagaagaagaagacaa

SEQ ID NO: 2528514 - RNA, 19 nt, Homo sapiens
  misc_RNA (1)...(19): siRNA sense strand
gggagagucaggaggacau

SEQ ID NO: 2528515 - RNA, 19 nt, Homo sapiens
  misc_RNA (1)...(19): siRNA sense strand
gugaaggggaggaggagaa

SEQ ID NO: 2528516 - RNA, 19 nt, Homo sapiens
  misc_RNA (1)...(19): siRNA sense strand
agaacgaagccauaggcaa

SEQ ID NO: 2528517 - RNA, 19 nt, Homo sapiens
  misc_RNA (1)...(19): siRNA sense strand
ggaacauuuucaagaggaa

SEQ ID NO: 2528518 - RNA, 19 nt, Homo sapiens
  misc_RNA (1)...(19): siRNA sense strand
gguccgacaugcuggccaa

SEQ ID NO: 2528519 - RNA, 19 nt, Homo sapiens
  misc_RNA (1)...(19): siRNA sense strand
ccugacaagaagaagaaau

SEQ ID NO: 2528520 - RNA, 19 nt, Homo sapiens
  misc_RNA (1)...(19): siRNA sense strand
gaacgaagccauaggcaag

SEQ ID NO: 2528521 - RNA, 19 nt, Homo sapiens
  misc_RNA (1)...(19): siRNA sense strand
gggaaaaggaggagccgga

SEQ ID NO: 2528522 - RNA, 19 nt, Homo sapiens
  misc_RNA (1)...(19): siRNA sense strand
acaucauuggagagguaaa

SEQ ID NO: 2528523 - RNA, 19 nt, Homo sapiens
  misc_RNA (1)...(19): siRNA sense strand
ugcaagaagaagaagaaca

SEQ ID NO: 2528524 - RNA, 19 nt, Homo sapiens
  misc_RNA (1)...(19): siRNA sense strand
gugaagaagaagacccuga

SEQ ID NO: 2528525 - RNA, 19 nt, Homo sapiens
  misc_RNA (1)...(19): siRNA sense strand
agggcaaaggcaugaagaa

SEQ ID NO: 2528526 - RNA, 19 nt, Homo sapiens
  misc_RNA (1)...(19): siRNA sense strand
ucugcauccuggaggcuaa

SEQ ID NO: 2528527 - RNA, 19 nt, Homo sapiens
  misc_RNA (1)...(19): siRNA sense strand
aagaagaagacaaccguga

SEQ ID NO: 2528528 - RNA, 19 nt, Homo sapiens
  misc_RNA (1)...(19): siRNA sense strand
uggaugcacuccugggcaa

SEQ ID NO: 2528529 - RNA, 19 nt, Homo sapiens
  misc_RNA (1)...(19): siRNA sense strand
aggagaagggcaaaggcau

SEQ ID NO: 2528530 - RNA, 19 nt, Homo sapiens
  misc_RNA (1)...(19): siRNA sense strand
ggagaagggcaaaggcaug

SEQ ID NO: 2528531 - RNA, 19 nt, Homo sapiens
  misc_RNA (1)...(19): siRNA sense strand
aggaggagaaagagccaga

SEQ ID NO: 2528532 - RNA, 19 nt, Homo sapiens
  misc_RNA (1)...(19): siRNA sense strand
acuaugacaagcugggcaa

SEQ ID NO: 2528533 - RNA, 19 nt, Homo sapiens
  misc_RNA (1)...(19): siRNA sense strand
aggagaaagagccagagaa

SEQ ID NO: 2528534 - RNA, 19 nt, Homo sapiens
  misc_RNA (1)...(19): siRNA sense strand
ccauugaggaguggagaga

SEQ ID NO: 2528535 - RNA, 19 nt, Homo sapiens
  misc_RNA (1)...(19): siRNA sense strand
acuaugauuuucaggcuaa

SEQ ID NO: 2528536 - RNA, 19 nt, Homo sapiens
  misc_RNA (1)...(19): siRNA sense strand
aggaggagccggagaagcu

SEQ ID NO: 2528537 - RNA, 19 nt, Homo sapiens
  misc_RNA (1)...(19): siRNA sense strand
aggcucaagaagaagaaga

SEQ ID NO: 2528538 - RNA, 19 nt, Homo sapiens
  misc_RNA (1)...(19): siRNA sense strand
gcaagaucuucgugggcag

SEQ ID NO: 2528539 - RNA, 19 nt, Homo sapiens
  misc_RNA (1)...(19): siRNA sense strand
aggaggacauguuugccaa

SEQ ID NO: 2528540 - RNA, 19 nt, Homo sapiens
  misc_RNA (1)...(19): siRNA sense strand
aggaggagguggaugcacu

SEQ ID NO: 2528541 - RNA, 19 nt, Homo sapiens
  misc_RNA (1)...(19): siRNA sense strand
ggaccgaccugaaggguga

SEQ ID NO: 2528542 - RNA, 19 nt, Homo sapiens
  misc_RNA (1)...(19): siRNA sense strand
ccuggaaguaagagccaaa

SEQ ID NO: 2528543 - RNA, 19 nt, Homo sapiens
  misc_RNA (1)...(19): siRNA sense strand
caaucacagcagaggacaa

SEQ ID NO: 2528544 - RNA, 19 nt, Homo sapiens
  misc_RNA (1)...(19): siRNA sense strand
ggaagaagccagagcgguc

SEQ ID NO: 2528545 - RNA, 19 nt, Homo sapiens
  misc_RNA (1)...(19): siRNA sense strand
ggaacuacagagaggugau

SEQ ID NO: 2528546 - RNA, 19 nt, Homo sapiens
  misc_RNA (1)...(19): siRNA sense strand
gcaauggaguacuaagcga

SEQ ID NO: 2528547 - RNA, 19 nt, Homo sapiens
  misc_RNA (1)...(19): siRNA sense strand
caauggaguacuaagcgaa

SEQ ID NO: 2528548 - RNA, 19 nt, Homo sapiens
  misc_RNA (1)...(19): siRNA sense strand
agacggaggaagggccaaa

SEQ ID NO: 2528549 - RNA, 19 nt, Homo sapiens
  misc_RNA (1)...(19): siRNA sense strand
agaagcggcucaacgggaa

SEQ ID NO: 2528550 - RNA, 19 nt, Homo sapiens
  misc_RNA (1)...(19): siRNA sense strand
ucgacaguguucuggucaa

SEQ ID NO: 2528551 - RNA, 19 nt, Homo sapiens
  misc_RNA (1)...(19): siRNA sense strand
cugagauguuaacagaaau

SEQ ID NO: 2528552 - RNA, 19 nt, Homo sapiens
  misc_RNA (1)...(19): siRNA sense strand
cugcacuagacaaucgaaa

SEQ ID NO: 2528553 - RNA, 19 nt, Homo sapiens
  misc_RNA (1)...(19): siRNA sense strand
aguacgaacacgagcgaga

SEQ ID NO: 2528554 - RNA, 19 nt, Homo sapiens
  misc_RNA (1)...(19): siRNA sense strand
acaaacacgcagauggcaa

SEQ ID NO: 2528555 - RNA, 19 nt, Homo sapiens
  misc_RNA (1)...(19): siRNA sense strand
aaguggagacagagcuuaa

SEQ ID NO: 2528556 - RNA, 19 nt, Homo sapiens
  misc_RNA (1)...(19): siRNA sense strand
gcaagaagauugauggcag

SEQ ID NO: 2528557 - RNA, 19 nt, Homo sapiens
  misc_RNA (1)...(19): siRNA sense strand
gagaggaaaagacgggaaa

SEQ ID NO: 2528558 - RNA, 19 nt, Homo sapiens
  misc_RNA (1)...(19): siRNA sense strand
cgagaggagcgcauggaga

SEQ ID NO: 2528559 - RNA, 19 nt, Homo sapiens
  misc_RNA (1)...(19): siRNA sense strand
aggagcgcauggagaggaa

SEQ ID NO: 2528560 - RNA, 19 nt, Homo sapiens
  misc_RNA (1)...(19): siRNA sense strand
acgcagauggcaagaagau

SEQ ID NO: 2528561 - RNA, 19 nt, Homo sapiens
  misc_RNA (1)...(19): siRNA sense strand
gauugagcggcgacagcaa

SEQ ID NO: 2528562 - RNA, 19 nt, Homo sapiens
  misc_RNA (1)...(19): siRNA sense strand
cuucguggcgagagugaau

SEQ ID NO: 2528563 - RNA, 19 nt, Homo sapiens
  misc_RNA (1)...(19): siRNA sense strand
gagcgcauggagaggaaaa

SEQ ID NO: 2528564 - RNA, 19 nt, Homo sapiens
  misc_RNA (1)...(19): siRNA sense strand
gggagcggagcaaggacaa

SEQ ID NO: 2528565 - RNA, 19 nt, Homo sapiens
  misc_RNA (1)...(19): siRNA sense strand
cccugacgguccagaggaa

SEQ ID NO: 2528566 - RNA, 19 nt, Homo sapiens
  misc_RNA (1)...(19): siRNA sense strand
ggagaggaaaagacgggaa

SEQ ID NO: 2528567 - RNA, 19 nt, Homo sapiens
  misc_RNA (1)...(19): siRNA sense strand
cugacgguccagaggaaaa

SEQ ID NO: 2528568 - RNA, 19 nt, Homo sapiens
  misc_RNA (1)...(19): siRNA sense strand
ggacaagaugagagacaau

SEQ ID NO: 2528569 - RNA, 19 nt, Homo sapiens
  misc_RNA (1)...(19): siRNA sense strand
ccucgaggguggagaccaa

SEQ ID NO: 2528570 - RNA, 19 nt, Homo sapiens
  misc_RNA (1)...(19): siRNA sense strand
aacaaaaggagaugagaaa

SEQ ID NO: 2528571 - RNA, 19 nt, Homo sapiens
  misc_RNA (1)...(19): siRNA sense strand
agaaacaacaugauggaca

SEQ ID NO: 2528572 - RNA, 19 nt, Homo sapiens
  misc_RNA (1)...(19): siRNA sense strand
gacaauaaguacaggucca

SEQ ID NO: 2528573 - RNA, 19 nt, Homo sapiens
  misc_RNA (1)...(19): siRNA sense strand
caagauauauauacgccua

SEQ ID NO: 2528574 - RNA, 19 nt, Homo sapiens
  misc_RNA (1)...(19): siRNA sense strand
acaagaugagagacaauaa

SEQ ID NO: 2528575 - RNA, 19 nt, Homo sapiens
  misc_RNA (1)...(19): siRNA sense strand
aaacaaaaggagaugagaa

SEQ ID NO: 2528576 - RNA, 19 nt, Homo sapiens
  misc_RNA (1)...(19): siRNA sense strand
augcguacaaagacaaaua

SEQ ID NO: 2528577 - RNA, 19 nt, Homo sapiens
  misc_RNA (1)...(19): siRNA sense strand
cgggaugaugauuaugaaa

SEQ ID NO: 2528578 - RNA, 19 nt, Homo sapiens
  misc_RNA (1)...(19): siRNA sense strand
auggacaagaugagagaca

SEQ ID NO: 2528579 - RNA, 19 nt, Homo sapiens
  misc_RNA (1)...(19): siRNA sense strand
acaacaugauggacaagau

SEQ ID NO: 2528580 - RNA, 19 nt, Homo sapiens
  misc_RNA (1)...(19): siRNA sense strand
aagacaaauacgugugcuu

SEQ ID NO: 2528581 - RNA, 19 nt, Homo sapiens
  misc_RNA (1)...(19): siRNA sense strand
agaugagagacaauaagua

SEQ ID NO: 2528582 - RNA, 19 nt, Homo sapiens
  misc_RNA (1)...(19): siRNA sense strand
cuugaugcguacaaagaca

SEQ ID NO: 2528583 - RNA, 19 nt, Homo sapiens
  misc_RNA (1)...(19): siRNA sense strand
ugauggacaagaugagaga

SEQ ID NO: 2528584 - RNA, 19 nt, Homo sapiens
  misc_RNA (1)...(19): siRNA sense strand
guugaauccuuuugugcaa

SEQ ID NO: 2528585 - RNA, 19 nt, Homo sapiens
  misc_RNA (1)...(19): siRNA sense strand
uuggugaggcgauguguaa

SEQ ID NO: 2528586 - RNA, 19 nt, Homo sapiens
  misc_RNA (1)...(19): siRNA sense strand
gugcaauguguuucaauca

SEQ ID NO: 2528587 - RNA, 19 nt, Homo sapiens
  misc_RNA (1)...(19): siRNA sense strand
auguaacacuugaugcgua

SEQ ID NO: 2528588 - RNA, 19 nt, Homo sapiens
  misc_RNA (1)...(19): siRNA sense strand
gauauuuaccuuagcucuu

SEQ ID NO: 2528589 - RNA, 19 nt, Homo sapiens
  misc_RNA (1)...(19): siRNA sense strand
caaaaggagaugagaaaug

SEQ ID NO: 2528590 - RNA, 19 nt, Homo sapiens
  misc_RNA (1)...(19): siRNA sense strand
uguagguauugcugugauu

SEQ ID NO: 2528591 - RNA, 19 nt, Homo sapiens
  misc_RNA (1)...(19): siRNA sense strand
acugaugagccguuccaaa

SEQ ID NO: 2528592 - RNA, 19 nt, Homo sapiens
  misc_RNA (1)...(19): siRNA sense strand
cuaaaagaacucagaacaa

SEQ ID NO: 2528593 - RNA, 19 nt, Homo sapiens
  misc_RNA (1)...(19): siRNA sense strand
gaacaagccagcagagcca

SEQ ID NO: 2528594 - RNA, 19 nt, Homo sapiens
  misc_RNA (1)...(19): siRNA sense strand
ccaugaaagcauuggccau

SEQ ID NO: 2528595 - RNA, 19 nt, Homo sapiens
  misc_RNA (1)...(19): siRNA sense strand
agaaggaagguguuggcaa

SEQ ID NO: 2528596 - RNA, 19 nt, Homo sapiens
  misc_RNA (1)...(19): siRNA sense strand
gcgcaguuguccagggaac

SEQ ID NO: 2528597 - RNA, 19 nt, Homo sapiens
  misc_RNA (1)...(19): siRNA sense strand
ggaaggugaugcagcggca

SEQ ID NO: 2528598 - RNA, 19 nt, Homo sapiens
  misc_RNA (1)...(19): siRNA sense strand
ggaacuauccgaugcagca

SEQ ID NO: 2528599 - RNA, 19 nt, Homo sapiens
  misc_RNA (1)...(19): siRNA sense strand
gaacagggcuggugcgaga

SEQ ID NO: 2528600 - RNA, 19 nt, Homo sapiens
  misc_RNA (1)...(19): siRNA sense strand
aaaccaaagccgaggagga

SEQ ID NO: 2528601 - RNA, 19 nt, Homo sapiens
  misc_RNA (1)...(19): siRNA sense strand
auggugaggacgagggcua

SEQ ID NO: 2528602 - RNA, 19 nt, Homo sapiens
  misc_RNA (1)...(19): siRNA sense strand
ccagagaagagcagcacca

SEQ ID NO: 2528603 - RNA, 19 nt, Homo sapiens
  misc_RNA (1)...(19): siRNA sense strand
ccaguuuggaagagaagau

SEQ ID NO: 2528604 - RNA, 19 nt, Homo sapiens
  misc_RNA (1)...(19): siRNA sense strand
agagaagagcagcaccaaa

SEQ ID NO: 2528605 - RNA, 19 nt, Homo sapiens
  misc_RNA (1)...(19): siRNA sense strand
ucaaaggaagacaaggcaa

SEQ ID NO: 2528606 - RNA, 19 nt, Homo sapiens
  misc_RNA (1)...(19): siRNA sense strand
cggagaagauguucgccga

SEQ ID NO: 2528607 - RNA, 19 nt, Homo sapiens
  misc_RNA (1)...(19): siRNA sense strand
aggaggagcuggaugccga

SEQ ID NO: 2528608 - RNA, 19 nt, Homo sapiens
  misc_RNA (1)...(19): siRNA sense strand
gucuucaaguggugaucaa

SEQ ID NO: 2528609 - RNA, 19 nt, Homo sapiens
  misc_RNA (1)...(19): siRNA sense strand
cugcaaagaagaagguccu

SEQ ID NO: 2528610 - RNA, 19 nt, Homo sapiens
  misc_RNA (1)...(19): siRNA sense strand
uggagaguucaaaggaaga

SEQ ID NO: 2528611 - RNA, 19 nt, Homo sapiens
  misc_RNA (1)...(19): siRNA sense strand
caaaggaagacaaggcaag

SEQ ID NO: 2528612 - RNA, 19 nt, Homo sapiens
  misc_RNA (1)...(19): siRNA sense strand
gaacaggguuuguggagga

SEQ ID NO: 2528613 - RNA, 19 nt, Homo sapiens
  misc_RNA (1)...(19): siRNA sense strand
ccucaacagaacaggguuu

SEQ ID NO: 2528614 - RNA, 19 nt, Homo sapiens
  misc_RNA (1)...(19): siRNA sense strand
gggaacuacuggcuggaga

SEQ ID NO: 2528615 - RNA, 19 nt, Homo sapiens
  misc_RNA (1)...(19): siRNA sense strand
gcauugagacuacagggaa

SEQ ID NO: 2528616 - RNA, 19 nt, Homo sapiens
  misc_RNA (1)...(19): siRNA sense strand
gagacuacagggaagguga

SEQ ID NO: 2528617 - RNA, 19 nt, Homo sapiens
  misc_RNA (1)...(19): siRNA sense strand
agaaggaugcgguggucau

SEQ ID NO: 2528618 - RNA, 19 nt, Homo sapiens
  misc_RNA (1)...(19): siRNA sense strand
cauugagacuacagggaag

SEQ ID NO: 2528619 - RNA, 19 nt, Homo sapiens
  misc_RNA (1)...(19): siRNA sense strand
cguuuauguuuauggaaug

SEQ ID NO: 2528620 - RNA, 19 nt, Homo sapiens
  misc_RNA (1)...(19): siRNA sense strand
gggagguggaggugggaaa

SEQ ID NO: 2528621 - RNA, 19 nt, Homo sapiens
  misc_RNA (1)...(19): siRNA sense strand
ggagcaucacagagagaaa

SEQ ID NO: 2528622 - RNA, 19 nt, Homo sapiens
  misc_RNA (1)...(19): siRNA sense strand
aggaagagaaagagaacau

SEQ ID NO: 2528623 - RNA, 19 nt, Homo sapiens
  misc_RNA (1)...(19): siRNA sense strand
acuagaacaggaagagaaa

SEQ ID NO: 2528624 - RNA, 19 nt, Homo sapiens
  misc_RNA (1)...(19): siRNA sense strand
gcguguaaggagaaaggaa

SEQ ID NO: 2528625 - RNA, 19 nt, Homo sapiens
  misc_RNA (1)...(19): siRNA sense strand
ggaucugaagagugugaaa

SEQ ID NO: 2528626 - RNA, 19 nt, Homo sapiens
  misc_RNA (1)...(19): siRNA sense strand
gaaacaagaccgaguggga

SEQ ID NO: 2528627 - RNA, 19 nt, Homo sapiens
  misc_RNA (1)...(19): siRNA sense strand
augaggaagcugaggaaca

SEQ ID NO: 2528628 - RNA, 19 nt, Homo sapiens
  misc_RNA (1)...(19): siRNA sense strand
ugaggaacaaugagaucaa

SEQ ID NO: 2528629 - RNA, 19 nt, Homo sapiens
  misc_RNA (1)...(19): siRNA sense strand
ccgagugggaagugggcau

SEQ ID NO: 2528630 - RNA, 19 nt, Homo sapiens
  misc_RNA (1)...(19): siRNA sense strand
ccagcaaaucagaagccua

SEQ ID NO: 2528631 - RNA, 19 nt, Homo sapiens
  misc_RNA (1)...(19): siRNA sense strand
gaucuucaccagugggaga

SEQ ID NO: 2528632 - RNA, 19 nt, Homo sapiens
  misc_RNA (1)...(19): siRNA sense strand
gaaaggaagcucaggcugu

SEQ ID NO: 2528633 - RNA, 19 nt, Homo sapiens
  misc_RNA (1)...(19): siRNA sense strand
aucugaagagugugaaaua

SEQ ID NO: 2528634 - RNA, 19 nt, Homo sapiens
  misc_RNA (1)...(19): siRNA sense strand
gggaagugggcaucugcaa

SEQ ID NO: 2528635 - RNA, 19 nt, Homo sapiens
  misc_RNA (1)...(19): siRNA sense strand
gagaaagagaacaugagga

SEQ ID NO: 2528636 - RNA, 19 nt, Homo sapiens
  misc_RNA (1)...(19): siRNA sense strand
acaugaggaagcugaggaa

SEQ ID NO: 2528637 - RNA, 19 nt, Homo sapiens
  misc_RNA (1)...(19): siRNA sense strand
ccugagugcuggaggaccu

SEQ ID NO: 2528638 - RNA, 19 nt, Homo sapiens
  misc_RNA (1)...(19): siRNA sense strand
gaggagcaucacagagaga

SEQ ID NO: 2528639 - RNA, 19 nt, Homo sapiens
  misc_RNA (1)...(19): siRNA sense strand
agaaggagagagugaaacu

SEQ ID NO: 2528640 - RNA, 19 nt, Homo sapiens
  misc_RNA (1)...(19): siRNA sense strand
uacuagaacaggaagagaa

SEQ ID NO: 2528641 - RNA, 19 nt, Homo sapiens
  misc_RNA (1)...(19): siRNA sense strand
gagaacaugaggaagcuga

SEQ ID NO: 2528642 - RNA, 19 nt, Homo sapiens
  misc_RNA (1)...(19): siRNA sense strand
gauuacagccucugggucu

SEQ ID NO: 2528643 - RNA, 19 nt, Homo sapiens
  misc_RNA (1)...(19): siRNA sense strand
ccaaaugaggggacaaaca

SEQ ID NO: 2528644 - RNA, 19 nt, Homo sapiens
  misc_RNA (1)...(19): siRNA sense strand
ggacaaacacagacccucu

SEQ ID NO: 2528645 - RNA, 19 nt, Homo sapiens
  misc_RNA (1)...(19): siRNA sense strand
agguggaggugggaaacaa

SEQ ID NO: 2528646 - RNA, 19 nt, Homo sapiens
  misc_RNA (1)...(19): siRNA sense strand
guucucacuaauagguuua

SEQ ID NO: 2528647 - RNA, 19 nt, Homo sapiens
  misc_RNA (1)...(19): siRNA sense strand
aggaagaggagcagcugca

SEQ ID NO: 2528648 - RNA, 19 nt, Homo sapiens
  misc_RNA (1)...(19): siRNA sense strand
cccaugagaaggagagagu

SEQ ID NO: 2528649 - RNA, 19 nt, Homo sapiens
  misc_RNA (1)...(19): siRNA sense strand
ggagaugauuacagccucu

SEQ ID NO: 2528650 - RNA, 19 nt, Homo sapiens
  misc_RNA (1)...(19): siRNA sense strand
gugucagaauacaugaaaa

SEQ ID NO: 2528651 - RNA, 19 nt, Homo sapiens
  misc_RNA (1)...(19): siRNA sense strand
ugaaacugugccaggaaga

SEQ ID NO: 2528652 - RNA, 19 nt, Homo sapiens
  misc_RNA (1)...(19): siRNA sense strand
agguuguugugucagaaua

SEQ ID NO: 2528653 - RNA, 19 nt, Homo sapiens
  misc_RNA (1)...(19): siRNA sense strand
aaggagaugcuaagaaaau

SEQ ID NO: 2528654 - RNA, 19 nt, Homo sapiens
  misc_RNA (1)...(19): siRNA sense strand
cugaaacgaacgagaaacu

SEQ ID NO: 2528655 - RNA, 19 nt, Homo sapiens
  misc_RNA (1)...(19): siRNA sense strand
uccugaaacgaacgagaaa

SEQ ID NO: 2528656 - RNA, 19 nt, Homo sapiens
  misc_RNA (1)...(19): siRNA sense strand
cacaggugaaagagaagua

SEQ ID NO: 2528657 - RNA, 19 nt, Homo sapiens
  misc_RNA (1)...(19): siRNA sense strand
gggagaaguaggagaucaa

SEQ ID NO: 2528658 - RNA, 19 nt, Homo sapiens
  misc_RNA (1)...(19): siRNA sense strand
cugaaggaauugugggaau

SEQ ID NO: 2528659 - RNA, 19 nt, Homo sapiens
  misc_RNA (1)...(19): siRNA sense strand
ggaguuuggaguugggaaa

SEQ ID NO: 2528660 - RNA, 19 nt, Homo sapiens
  misc_RNA (1)...(19): siRNA sense strand
aguaggagaucaaggaaau

SEQ ID NO: 2528661 - RNA, 19 nt, Homo sapiens
  misc_RNA (1)...(19): siRNA sense strand
agaacaaggcauagauauu

SEQ ID NO: 2528662 - RNA, 19 nt, Homo sapiens
  misc_RNA (1)...(19): siRNA sense strand
aggcacagcaggagagcua

SEQ ID NO: 2528663 - RNA, 19 nt, Homo sapiens
  misc_RNA (1)...(19): siRNA sense strand
aggaagauacucagacaaa

SEQ ID NO: 2528664 - RNA, 19 nt, Homo sapiens
  misc_RNA (1)...(19): siRNA sense strand
ccaccagggaugagaggaa

SEQ ID NO: 2528665 - RNA, 19 nt, Homo sapiens
  misc_RNA (1)...(19): siRNA sense strand
agaaaugaucacugaggaa

SEQ ID NO: 2528666 - RNA, 19 nt, Homo sapiens
  misc_RNA (1)...(19): siRNA sense strand
gggugauaaaggacaaaua

SEQ ID NO: 2528667 - RNA, 19 nt, Homo sapiens
  misc_RNA (1)...(19): siRNA sense strand
cagaaggcuuaaagggaga

SEQ ID NO: 2528668 - RNA, 19 nt, Homo sapiens
  misc_RNA (1)...(19): siRNA sense strand
gcaaagaggucguccagga

SEQ ID NO: 2528669 - RNA, 19 nt, Homo sapiens
  misc_RNA (1)...(19): siRNA sense strand
cccuacagauggagagcua

SEQ ID NO: 2528670 - RNA, 19 nt, Homo sapiens
  misc_RNA (1)...(19): siRNA sense strand
agagaggaucugaagguaa

SEQ ID NO: 2528671 - RNA, 19 nt, Homo sapiens
  misc_RNA (1)...(19): siRNA sense strand
ccuaaaggacaaagaggau

SEQ ID NO: 2528672 - RNA, 19 nt, Homo sapiens
  misc_RNA (1)...(19): siRNA sense strand
uguugaguguggaaagaaa

SEQ ID NO: 2528673 - RNA, 19 nt, Homo sapiens
  misc_RNA (1)...(19): siRNA sense strand
cagaacaaggcguggaaaa

SEQ ID NO: 2528674 - RNA, 19 nt, Homo sapiens
  misc_RNA (1)...(19): siRNA sense strand
aggcuuaaagggagaagua

SEQ ID NO: 2528675 - RNA, 19 nt, Homo sapiens
  misc_RNA (1)...(19): siRNA sense strand
aggagaaguuggaagcaga

SEQ ID NO: 2528676 - RNA, 19 nt, Homo sapiens
  misc_RNA (1)...(19): siRNA sense strand
aaguaggagaucaaggaaa

SEQ ID NO: 2528677 - RNA, 19 nt, Homo sapiens
  misc_RNA (1)...(19): siRNA sense strand
ccuaagggugccagaggaa

SEQ ID NO: 2528678 - RNA, 19 nt, Homo sapiens
  misc_RNA (1)...(19): siRNA sense strand
ucaaaggaacucagggaga

SEQ ID NO: 2528679 - RNA, 19 nt, Homo sapiens
  misc_RNA (1)...(19): siRNA sense strand
aggacuaccuggaaucaaa

SEQ ID NO: 2528680 - RNA, 19 nt, Homo sapiens
  misc_RNA (1)...(19): siRNA sense strand
ccucuuggcacacgagaua

SEQ ID NO: 2528681 - RNA, 19 nt, Homo sapiens
  misc_RNA (1)...(19): siRNA sense strand
ugugggaauuccagggcaa

SEQ ID NO: 2528682 - RNA, 19 nt, Homo sapiens
  misc_RNA (1)...(19): siRNA sense strand
ccuauuggacacagaggaa

SEQ ID NO: 2528683 - RNA, 19 nt, Homo sapiens
  misc_RNA (1)...(19): siRNA sense strand
ccagaauacugaagugacu

SEQ ID NO: 2528684 - RNA, 19 nt, Homo sapiens
  misc_RNA (1)...(19): siRNA sense strand
uggcaguguuggaggaacu

SEQ ID NO: 2528685 - RNA, 19 nt, Homo sapiens
  misc_RNA (1)...(19): siRNA sense strand
cgaaaguauuacauugaca

SEQ ID NO: 2528686 - RNA, 19 nt, Homo sapiens
  misc_RNA (1)...(19): siRNA sense strand
gccaggaagcccaggaauu

SEQ ID NO: 2528687 - RNA, 19 nt, Homo sapiens
  misc_RNA (1)...(19): siRNA sense strand
ggauucaggccaaagaaau

SEQ ID NO: 2528688 - RNA, 19 nt, Homo sapiens
  misc_RNA (1)...(19): siRNA sense strand
ugauggagaaccaggaauu

SEQ ID NO: 2528689 - RNA, 19 nt, Homo sapiens
  misc_RNA (1)...(19): siRNA sense strand
uggagaauaugguguucaa

SEQ ID NO: 2528690 - RNA, 19 nt, Homo sapiens
  misc_RNA (1)...(19): siRNA sense strand
auucugaaaccguguauaa

SEQ ID NO: 2528691 - RNA, 19 nt, Homo sapiens
  misc_RNA (1)...(19): siRNA sense strand
gggauucaggccaaagaaa

SEQ ID NO: 2528692 - RNA, 19 nt, Homo sapiens
  misc_RNA (1)...(19): siRNA sense strand
agccuggagcagagggaua

SEQ ID NO: 2528693 - RNA, 19 nt, Homo sapiens
  misc_RNA (1)...(19): siRNA sense strand
gggauugccuggaaguaca

SEQ ID NO: 2528694 - RNA, 19 nt, Homo sapiens
  misc_RNA (1)...(19): siRNA sense strand
gaggcaaagacguaagaca

SEQ ID NO: 2528695 - RNA, 19 nt, Homo sapiens
  misc_RNA (1)...(19): siRNA sense strand
uggaaguacaggugacaga

SEQ ID NO: 2528696 - RNA, 19 nt, Homo sapiens
  misc_RNA (1)...(19): siRNA sense strand
agggcagccuggagaauau

SEQ ID NO: 2528697 - RNA, 19 nt, Homo sapiens
  misc_RNA (1)...(19): siRNA sense strand
ugggaugacuggaagcauu

SEQ ID NO: 2528698 - RNA, 19 nt, Homo sapiens
  misc_RNA (1)...(19): siRNA sense strand
ccuuggaggcaaagacgua

SEQ ID NO: 2528699 - RNA, 19 nt, Homo sapiens
  misc_RNA (1)...(19): siRNA sense strand
cuaaaggagaaaagggcua

SEQ ID NO: 2528700 - RNA, 19 nt, Homo sapiens
  misc_RNA (1)...(19): siRNA sense strand
aggugaaacugguccucaa

SEQ ID NO: 2528701 - RNA, 19 nt, Homo sapiens
  misc_RNA (1)...(19): siRNA sense strand
gcuaggagaacccggguau

SEQ ID NO: 2528702 - RNA, 19 nt, Homo sapiens
  misc_RNA (1)...(19): siRNA sense strand
aaagaggauuucaagggaa

SEQ ID NO: 2528703 - RNA, 19 nt, Homo sapiens
  misc_RNA (1)...(19): siRNA sense strand
uugggaaaguccagaugaa

SEQ ID NO: 2528704 - RNA, 19 nt, Homo sapiens
  misc_RNA (1)...(19): siRNA sense strand
gggaaaguccagaugaacu

SEQ ID NO: 2528705 - RNA, 19 nt, Homo sapiens
  misc_RNA (1)...(19): siRNA sense strand
ucucacaaaccaugggauu

SEQ ID NO: 2528706 - RNA, 19 nt, Homo sapiens
  misc_RNA (1)...(19): siRNA sense strand
cuccaggaccagaggguuu

SEQ ID NO: 2528707 - RNA, 19 nt, Homo sapiens
  misc_RNA (1)...(19): siRNA sense strand
auacauuuacugaaggcaa

SEQ ID NO: 2528708 - RNA, 19 nt, Homo sapiens
  misc_RNA (1)...(19): siRNA sense strand
acugggaccugaaggagaa

SEQ ID NO: 2528709 - RNA, 19 nt, Homo sapiens
  misc_RNA (1)...(19): siRNA sense strand
ucaaaggugauaaggguga

SEQ ID NO: 2528710 - RNA, 19 nt, Homo sapiens
  misc_RNA (1)...(19): siRNA sense strand
acaaagaggaucaagagga

SEQ ID NO: 2528711 - RNA, 19 nt, Homo sapiens
  misc_RNA (1)...(19): siRNA sense strand
acuggaaacccuggagaaa

SEQ ID NO: 2528712 - RNA, 19 nt, Homo sapiens
  misc_RNA (1)...(19): siRNA sense strand
aaagggugauaaaggacaa

SEQ ID NO: 2528713 - RNA, 19 nt, Homo sapiens
  misc_RNA (1)...(19): siRNA sense strand
uggcaaauccugugggaaa

SEQ ID NO: 2528714 - RNA, 19 nt, Homo sapiens
  misc_RNA (1)...(19): siRNA sense strand
acgugugacuggagagaaa

SEQ ID NO: 2528715 - RNA, 19 nt, Homo sapiens
  misc_RNA (1)...(19): siRNA sense strand
ggaccaaaauacagaagaa

SEQ ID NO: 2528716 - RNA, 19 nt, Homo sapiens
  misc_RNA (1)...(19): siRNA sense strand
aaugaaacguugcgggaau

SEQ ID NO: 2528717 - RNA, 19 nt, Homo sapiens
  misc_RNA (1)...(19): siRNA sense strand
auugaaaggcugaaugaaa

SEQ ID NO: 2528718 - RNA, 19 nt, Homo sapiens
  misc_RNA (1)...(19): siRNA sense strand
cagaaaggucaaagaauca

SEQ ID NO: 2528719 - RNA, 19 nt, Homo sapiens
  misc_RNA (1)...(19): siRNA sense strand
ucacagaagauaagaacau

SEQ ID NO: 2528720 - RNA, 19 nt, Homo sapiens
  misc_RNA (1)...(19): siRNA sense strand
gcugauucauccagaggaa

SEQ ID NO: 2528721 - RNA, 19 nt, Homo sapiens
  misc_RNA (1)...(19): siRNA sense strand
uugcagaaaggaaggauua

SEQ ID NO: 2528722 - RNA, 19 nt, Homo sapiens
  misc_RNA (1)...(19): siRNA sense strand
caauuaaagccgaguacuu

SEQ ID NO: 2528723 - RNA, 19 nt, Homo sapiens
  misc_RNA (1)...(19): siRNA sense strand
cgugaacagcugaaugaaa

SEQ ID NO: 2528724 - RNA, 19 nt, Homo sapiens
  misc_RNA (1)...(19): siRNA sense strand
cauccaaagaucaaagauu

SEQ ID NO: 2528725 - RNA, 19 nt, Homo sapiens
  misc_RNA (1)...(19): siRNA sense strand
agugacaauuggaguggaa

SEQ ID NO: 2528726 - RNA, 19 nt, Homo sapiens
  misc_RNA (1)...(19): siRNA sense strand
gggaauggcagaaaguaca

SEQ ID NO: 2528727 - RNA, 19 nt, Homo sapiens
  misc_RNA (1)...(19): siRNA sense strand
ccaaggaagucaugcgcca

SEQ ID NO: 2528728 - RNA, 19 nt, Homo sapiens
  misc_RNA (1)...(19): siRNA sense strand
ccugcaaauuauucacaaa

SEQ ID NO: 2528729 - RNA, 19 nt, Homo sapiens
  misc_RNA (1)...(19): siRNA sense strand
aguacagaacuuauggaaa

SEQ ID NO: 2528730 - RNA, 19 nt, Homo sapiens
  misc_RNA (1)...(19): siRNA sense strand
aagaaucaauggagacaca

SEQ ID NO: 2528731 - RNA, 19 nt, Homo sapiens
  misc_RNA (1)...(19): siRNA sense strand
augaaguaguugacacauu

SEQ ID NO: 2528732 - RNA, 19 nt, Homo sapiens
  misc_RNA (1)...(19): siRNA sense strand
cagcaggaugugugcaaau

SEQ ID NO: 2528733 - RNA, 19 nt, Homo sapiens
  misc_RNA (1)...(19): siRNA sense strand
cuaagaaagcagaaggaac

SEQ ID NO: 2528734 - RNA, 19 nt, Homo sapiens
  misc_RNA (1)...(19): siRNA sense strand
cugucaagcugcaaacauu

SEQ ID NO: 2528735 - RNA, 19 nt, Homo sapiens
  misc_RNA (1)...(19): siRNA sense strand
ccauuugaugcaauagaaa

SEQ ID NO: 2528736 - RNA, 19 nt, Homo sapiens
  misc_RNA (1)...(19): siRNA sense strand
gcagaaaguacauggcacu

SEQ ID NO: 2528737 - RNA, 19 nt, Homo sapiens
  misc_RNA (1)...(19): siRNA sense strand
caggaaaccagaaagguca

SEQ ID NO: 2528738 - RNA, 19 nt, Homo sapiens
  misc_RNA (1)...(19): siRNA sense strand
gucaaagaaucaauggaga

SEQ ID NO: 2528739 - RNA, 19 nt, Homo sapiens
  misc_RNA (1)...(19): siRNA sense strand
ugaaggaagcaauuggcaa

SEQ ID NO: 2528740 - RNA, 19 nt, Homo sapiens
  misc_RNA (1)...(19): siRNA sense strand
acaacaaggcacuguaaca

SEQ ID NO: 2528741 - RNA, 19 nt, Homo sapiens
  misc_RNA (1)...(19): siRNA sense strand
gagauauuucagagacuuu

SEQ ID NO: 2528742 - RNA, 19 nt, Homo sapiens
  misc_RNA (1)...(19): siRNA sense strand
cagcagugccugggaggaa

SEQ ID NO: 2528743 - RNA, 19 nt, Homo sapiens
  misc_RNA (1)...(19): siRNA sense strand
cauuaugaaggaagcaauu

SEQ ID NO: 2528744 - RNA, 19 nt, Homo sapiens
  misc_RNA (1)...(19): siRNA sense strand
ggcaaauccugugggaaau

SEQ ID NO: 2528745 - RNA, 19 nt, Homo sapiens
  misc_RNA (1)...(19): siRNA sense strand
gugugacuggagagaaaua

SEQ ID NO: 2528746 - RNA, 19 nt, Homo sapiens
  misc_RNA (1)...(19): siRNA sense strand
cuaugaaguaguugacaca

SEQ ID NO: 2528747 - RNA, 19 nt, Homo sapiens
  misc_RNA (1)...(19): siRNA sense strand
ugauauugguuauggcagu

SEQ ID NO: 2528748 - RNA, 19 nt, Homo sapiens
  misc_RNA (1)...(19): siRNA sense strand
ggcaagcagaugcaagaaa

SEQ ID NO: 2528749 - RNA, 19 nt, Homo sapiens
  misc_RNA (1)...(19): siRNA sense strand
gcuacuagaacaaggugau

SEQ ID NO: 2528750 - RNA, 19 nt, Homo sapiens
  misc_RNA (1)...(19): siRNA sense strand
gagacauuccugagagcca

SEQ ID NO: 2528751 - RNA, 19 nt, Homo sapiens
  misc_RNA (1)...(19): siRNA sense strand
ucaauauccuagugaucau

SEQ ID NO: 2528752 - RNA, 19 nt, Homo sapiens
  misc_RNA (1)...(19): siRNA sense strand
cagcaaucaaagcaagcua

SEQ ID NO: 2528753 - RNA, 19 nt, Homo sapiens
  misc_RNA (1)...(19): siRNA sense strand
caaacagauuaccagaaau

SEQ ID NO: 2528754 - RNA, 19 nt, Homo sapiens
  misc_RNA (1)...(19): siRNA sense strand
cugccaauaugguguccua

SEQ ID NO: 2528755 - RNA, 19 nt, Homo sapiens
  misc_RNA (1)...(19): siRNA sense strand
cuuaacacagagugaagua

SEQ ID NO: 2528756 - RNA, 19 nt, Homo sapiens
  misc_RNA (1)...(19): siRNA sense strand
acagauuaccagaaauaca

SEQ ID NO: 2528757 - RNA, 19 nt, Homo sapiens
  misc_RNA (1)...(19): siRNA sense strand
cugcaguuccacaaauuaa

SEQ ID NO: 2528758 - RNA, 19 nt, Homo sapiens
  misc_RNA (1)...(19): siRNA sense strand
cgggaauggcagaaaguac

SEQ ID NO: 2528759 - RNA, 19 nt, Homo sapiens
  misc_RNA (1)...(19): siRNA sense strand
gugucuguccuuagaagaa

SEQ ID NO: 2528760 - RNA, 19 nt, Homo sapiens
  misc_RNA (1)...(19): siRNA sense strand
caggcaagcagaugcaaga

SEQ ID NO: 2528761 - RNA, 19 nt, Homo sapiens
  misc_RNA (1)...(19): siRNA sense strand
aaaggaaggauuaugucaa

SEQ ID NO: 2528762 - RNA, 19 nt, Homo sapiens
  misc_RNA (1)...(19): siRNA sense strand
ugugauucuuaaagcguau

SEQ ID NO: 2528763 - RNA, 19 nt, Homo sapiens
  misc_RNA (1)...(19): siRNA sense strand
aaggauucucucaggacaa

SEQ ID NO: 2528764 - RNA, 19 nt, Homo sapiens
  misc_RNA (1)...(19): siRNA sense strand
caaagaaucaauggagaca

SEQ ID NO: 2528765 - RNA, 19 nt, Homo sapiens
  misc_RNA (1)...(19): siRNA sense strand
gauucaaccaacagaggga

SEQ ID NO: 2528766 - RNA, 19 nt, Homo sapiens
  misc_RNA (1)...(19): siRNA sense strand
agaaaucauaucaugggaa

SEQ ID NO: 2528767 - RNA, 19 nt, Homo sapiens
  misc_RNA (1)...(19): siRNA sense strand
ugggaagauauuucagcaa

SEQ ID NO: 2528768 - RNA, 19 nt, Homo sapiens
  misc_RNA (1)...(19): siRNA sense strand
ggaugaaucuccagcacac

SEQ ID NO: 2528769 - RNA, 19 nt, Homo sapiens
  misc_RNA (1)...(19): siRNA sense strand
ggugguguucaguggcuua

SEQ ID NO: 2528770 - RNA, 19 nt, Homo sapiens
  misc_RNA (1)...(19): siRNA sense strand
acaugaaagagaagaggaa

SEQ ID NO: 2528771 - RNA, 19 nt, Homo sapiens
  misc_RNA (1)...(19): siRNA sense strand
cuggaaagaaagacaacaa

SEQ ID NO: 2528772 - RNA, 19 nt, Homo sapiens
  misc_RNA (1)...(19): siRNA sense strand
guaaagaauuagagcggcu

SEQ ID NO: 2528773 - RNA, 19 nt, Homo sapiens
  misc_RNA (1)...(19): siRNA sense strand
ggaaagaggagauggaggu

SEQ ID NO: 2528774 - RNA, 19 nt, Homo sapiens
  misc_RNA (1)...(19): siRNA sense strand
ucgaaauaacugcuggaaa

SEQ ID NO: 2528775 - RNA, 19 nt, Homo sapiens
  misc_RNA (1)...(19): siRNA sense strand
aguaugaccucacgggcaa

SEQ ID NO: 2528776 - RNA, 19 nt, Homo sapiens
  misc_RNA (1)...(19): siRNA sense strand
acauaguggacaugaaaga

SEQ ID NO: 2528777 - RNA, 19 nt, Homo sapiens
  misc_RNA (1)...(19): siRNA sense strand
cagcaaaaguauaccguga

SEQ ID NO: 2528778 - RNA, 19 nt, Homo sapiens
  misc_RNA (1)...(19): siRNA sense strand
agaagaggaaagaggagau

SEQ ID NO: 2528779 - RNA, 19 nt, Homo sapiens
  misc_RNA (1)...(19): siRNA sense strand
ccucacgggcaaugaagaa

SEQ ID NO: 2528780 - RNA, 19 nt, Homo sapiens
  misc_RNA (1)...(19): siRNA sense strand
agaaaagaguguggaggaa

SEQ ID NO: 2528781 - RNA, 19 nt, Homo sapiens
  misc_RNA (1)...(19): siRNA sense strand
cuaugaaguacuuggaguu

SEQ ID NO: 2528782 - RNA, 19 nt, Homo sapiens
  misc_RNA (1)...(19): siRNA sense strand
augaaagagaagaggaaag

SEQ ID NO: 2528783 - RNA, 19 nt, Homo sapiens
  misc_RNA (1)...(19): siRNA sense strand
ucgacauaguggacaugaa

SEQ ID NO: 2528784 - RNA, 19 nt, Homo sapiens
  misc_RNA (1)...(19): siRNA sense strand
gagaagaggaaagaggaga

SEQ ID NO: 2528785 - RNA, 19 nt, Homo sapiens
  misc_RNA (1)...(19): siRNA sense strand
agaggaaagaggagaugga

SEQ ID NO: 2528786 - RNA, 19 nt, Homo sapiens
  misc_RNA (1)...(19): siRNA sense strand
aguacuuggaguuacgaaa

SEQ ID NO: 2528787 - RNA, 19 nt, Homo sapiens
  misc_RNA (1)...(19): siRNA sense strand
gggcaaugaagaacaagca

SEQ ID NO: 2528788 - RNA, 19 nt, Homo sapiens
  misc_RNA (1)...(19): siRNA sense strand
caugaaagagaagaggaaa

SEQ ID NO: 2528789 - RNA, 19 nt, Homo sapiens
  misc_RNA (1)...(19): siRNA sense strand
aaauggaagagcugguuau

SEQ ID NO: 2528790 - RNA, 19 nt, Homo sapiens
  misc_RNA (1)...(19): siRNA sense strand
agguugugaagcugauaua

SEQ ID NO: 2528791 - RNA, 19 nt, Homo sapiens
  misc_RNA (1)...(19): siRNA sense strand
ccauaauuguauugauccu

SEQ ID NO: 2528792 - RNA, 19 nt, Homo sapiens
  misc_RNA (1)...(19): siRNA sense strand
gggaagaagaggaaagcca

SEQ ID NO: 2528793 - RNA, 19 nt, Homo sapiens
  misc_RNA (1)...(19): siRNA sense strand
ccauaacagaggaggccua

SEQ ID NO: 2528794 - RNA, 19 nt, Homo sapiens
  misc_RNA (1)...(19): siRNA sense strand
ggauaauggaggaguucuu

SEQ ID NO: 2528795 - RNA, 19 nt, Homo sapiens
  misc_RNA (1)...(19): siRNA sense strand
gaaugguaccagagcacaa

SEQ ID NO: 2528796 - RNA, 19 nt, Homo sapiens
  misc_RNA (1)...(19): siRNA sense strand
gcuaauucuccaagcaaau

SEQ ID NO: 2528797 - RNA, 19 nt, Homo sapiens
  misc_RNA (1)...(19): siRNA sense strand
cuccauugccagugauaua

SEQ ID NO: 2528798 - RNA, 19 nt, Homo sapiens
  misc_RNA (1)...(19): siRNA sense strand
aacuagaagaugugaacaa

SEQ ID NO: 2528799 - RNA, 19 nt, Homo sapiens
  misc_RNA (1)...(19): siRNA sense strand
ucuccaacucagaaggaaa

SEQ ID NO: 2528800 - RNA, 19 nt, Homo sapiens
  misc_RNA (1)...(19): siRNA sense strand
ggaacguggcauggagaua

SEQ ID NO: 2528801 - RNA, 19 nt, Homo sapiens
  misc_RNA (1)...(19): siRNA sense strand
cuuuagaggaagaugguga

SEQ ID NO: 2528802 - RNA, 19 nt, Homo sapiens
  misc_RNA (1)...(19): siRNA sense strand
gccugaagccugugucaua

SEQ ID NO: 2528803 - RNA, 19 nt, Homo sapiens
  misc_RNA (1)...(19): siRNA sense strand
ccucagucuuagagaacca

SEQ ID NO: 2528804 - RNA, 19 nt, Homo sapiens
  misc_RNA (1)...(19): siRNA sense strand
guugaaacuaagaaaguga

SEQ ID NO: 2528805 - RNA, 19 nt, Homo sapiens
  misc_RNA (1)...(19): siRNA sense strand
ggacaaucgugaaugguac

SEQ ID NO: 2528806 - RNA, 19 nt, Homo sapiens
  misc_RNA (1)...(19): siRNA sense strand
aaaucaagugucagaguuu

SEQ ID NO: 2528807 - RNA, 19 nt, Homo sapiens
  misc_RNA (1)...(19): siRNA sense strand
gcagggucaaacugagaaa

SEQ ID NO: 2528808 - RNA, 19 nt, Homo sapiens
  misc_RNA (1)...(19): siRNA sense strand
gugucagaguuuauaucaa

SEQ ID NO: 2528809 - RNA, 19 nt, Homo sapiens
  misc_RNA (1)...(19): siRNA sense strand
aagaagauguccuugccaa

SEQ ID NO: 2528810 - RNA, 19 nt, Homo sapiens
  misc_RNA (1)...(19): siRNA sense strand
aggaagauggugagucaga

SEQ ID NO: 2528811 - RNA, 19 nt, Homo sapiens
  misc_RNA (1)...(19): siRNA sense strand
agaucgagcaccuagcaaa

SEQ ID NO: 2528812 - RNA, 19 nt, Homo sapiens
  misc_RNA (1)...(19): siRNA sense strand
acaugaaucuacuggcuga

SEQ ID NO: 2528813 - RNA, 19 nt, Homo sapiens
  misc_RNA (1)...(19): siRNA sense strand
uggacacuuuggaggacaa

SEQ ID NO: 2528814 - RNA, 19 nt, Homo sapiens
  misc_RNA (1)...(19): siRNA sense strand
gggcuaauucuccaagcaa

SEQ ID NO: 2528815 - RNA, 19 nt, Homo sapiens
  misc_RNA (1)...(19): siRNA sense strand
ggaaaaggacaguggcagu

SEQ ID NO: 2528816 - RNA, 19 nt, Homo sapiens
  misc_RNA (1)...(19): siRNA sense strand
augaacagguugaagagga

SEQ ID NO: 2528817 - RNA, 19 nt, Homo sapiens
  misc_RNA (1)...(19): siRNA sense strand
ccaacaaguuuaaaaggau

SEQ ID NO: 2528818 - RNA, 19 nt, Homo sapiens
  misc_RNA (1)...(19): siRNA sense strand
agggucaaacugagaaauu

SEQ ID NO: 2528819 - RNA, 19 nt, Homo sapiens
  misc_RNA (1)...(19): siRNA sense strand
cuuuaaauugcuucaggaa

SEQ ID NO: 2528820 - RNA, 19 nt, Homo sapiens
  misc_RNA (1)...(19): siRNA sense strand
ggugagucagacacggaaa

SEQ ID NO: 2528821 - RNA, 19 nt, Homo sapiens
  misc_RNA (1)...(19): siRNA sense strand
cuagaagaugugaacaaau

SEQ ID NO: 2528822 - RNA, 19 nt, Homo sapiens
  misc_RNA (1)...(19): siRNA sense strand
gaucgagcaccuagcaaaa

SEQ ID NO: 2528823 - RNA, 19 nt, Homo sapiens
  misc_RNA (1)...(19): siRNA sense strand
cuggaaaucaagugucaga

SEQ ID NO: 2528824 - RNA, 19 nt, Homo sapiens
  misc_RNA (1)...(19): siRNA sense strand
gcaacaugaaguggaaauu

SEQ ID NO: 2528825 - RNA, 19 nt, Homo sapiens
  misc_RNA (1)...(19): siRNA sense strand
ccgauaggauucagguucu

SEQ ID NO: 2528826 - RNA, 19 nt, Homo sapiens
  misc_RNA (1)...(19): siRNA sense strand
caguggacggaccggauaa

SEQ ID NO: 2528827 - RNA, 19 nt, Homo sapiens
  misc_RNA (1)...(19): siRNA sense strand
gaagaagacacuagcugca

SEQ ID NO: 2528828 - RNA, 19 nt, Homo sapiens
  misc_RNA (1)...(19): siRNA sense strand
agcaacaugaaguggaaau

SEQ ID NO: 2528829 - RNA, 19 nt, Homo sapiens
  misc_RNA (1)...(19): siRNA sense strand
cuggcugauuugaagacua

SEQ ID NO: 2528830 - RNA, 19 nt, Homo sapiens
  misc_RNA (1)...(19): siRNA sense strand
aggcauuccuggauauguu

SEQ ID NO: 2528831 - RNA, 19 nt, Homo sapiens
  misc_RNA (1)...(19): siRNA sense strand
ccagugauauacacggaga

SEQ ID NO: 2528832 - RNA, 19 nt, Homo sapiens
  misc_RNA (1)...(19): siRNA sense strand
cggcagggucaaacugaga

SEQ ID NO: 2528833 - RNA, 19 nt, Homo sapiens
  misc_RNA (1)...(19): siRNA sense strand
caguggcagucaaguggaa

SEQ ID NO: 2528834 - RNA, 19 nt, Homo sapiens
  misc_RNA (1)...(19): siRNA sense strand
gugagauggccuccaacaa

SEQ ID NO: 2528835 - RNA, 19 nt, Homo sapiens
  misc_RNA (1)...(19): siRNA sense strand
ugguugaaacuaagaaagu

SEQ ID NO: 2528836 - RNA, 19 nt, Homo sapiens
  misc_RNA (1)...(19): siRNA sense strand
ccaaggagaccgagagagg

SEQ ID NO: 2528837 - RNA, 19 nt, Homo sapiens
  misc_RNA (1)...(19): siRNA sense strand
aaggagaccgagagaggga

SEQ ID NO: 2528838 - RNA, 19 nt, Homo sapiens
  misc_RNA (1)...(19): siRNA sense strand
aggacaaucgugaauggua

SEQ ID NO: 2528839 - RNA, 19 nt, Homo sapiens
  misc_RNA (1)...(19): siRNA sense strand
agguugaagaggaggcagu

SEQ ID NO: 2528840 - RNA, 19 nt, Homo sapiens
  misc_RNA (1)...(19): siRNA sense strand
aggauaaagaugagagaaa

SEQ ID NO: 2528841 - RNA, 19 nt, Homo sapiens
  misc_RNA (1)...(19): siRNA sense strand
gcuaacagcaauaaagaua

SEQ ID NO: 2528842 - RNA, 19 nt, Homo sapiens
  misc_RNA (1)...(19): siRNA sense strand
gaugagagaaagugguuua

SEQ ID NO: 2528843 - RNA, 19 nt, Homo sapiens
  misc_RNA (1)...(19): siRNA sense strand
gcaaagagagcucgacuua

SEQ ID NO: 2528844 - RNA, 19 nt, Homo sapiens
  misc_RNA (1)...(19): siRNA sense strand
caccagacguagagaagaa

SEQ ID NO: 2528845 - RNA, 19 nt, Homo sapiens
  misc_RNA (1)...(19): siRNA sense strand
uuggauagcuuuagucaaa

SEQ ID NO: 2528846 - RNA, 19 nt, Homo sapiens
  misc_RNA (1)...(19): siRNA sense strand
cugccuacaucuagugaaa

SEQ ID NO: 2528847 - RNA, 19 nt, Homo sapiens
  misc_RNA (1)...(19): siRNA sense strand
gcaacucguuucaggcaaa

SEQ ID NO: 2528848 - RNA, 19 nt, Homo sapiens
  misc_RNA (1)...(19): siRNA sense strand
aaggaagacuacaaugaaa

SEQ ID NO: 2528849 - RNA, 19 nt, Homo sapiens
  misc_RNA (1)...(19): siRNA sense strand
acguagagaagaaggaaga

SEQ ID NO: 2528850 - RNA, 19 nt, Homo sapiens
  misc_RNA (1)...(19): siRNA sense strand
gauaaagaugagagaaagu

SEQ ID NO: 2528851 - RNA, 19 nt, Homo sapiens
  misc_RNA (1)...(19): siRNA sense strand
gagaaagugguuuaaagua

SEQ ID NO: 2528852 - RNA, 19 nt, Homo sapiens
  misc_RNA (1)...(19): siRNA sense strand
agaaagugguuuaaaguac

SEQ ID NO: 2528853 - RNA, 19 nt, Homo sapiens
  misc_RNA (1)...(19): siRNA sense strand
gguuuaaaguaccuucaaa

SEQ ID NO: 2528854 - RNA, 19 nt, Homo sapiens
  misc_RNA (1)...(19): siRNA sense strand
gaacaaaacagggaguaaa

SEQ ID NO: 2528855 - RNA, 19 nt, Homo sapiens
  misc_RNA (1)...(19): siRNA sense strand
cauuaucaaacaagaggaa

SEQ ID NO: 2528856 - RNA, 19 nt, Homo sapiens
  misc_RNA (1)...(19): siRNA sense strand
ccagagagcacauuaucaa

SEQ ID NO: 2528857 - RNA, 19 nt, Homo sapiens
  misc_RNA (1)...(19): siRNA sense strand
gccuacaucuagugaaaca

SEQ ID NO: 2528858 - RNA, 19 nt, Homo sapiens
  misc_RNA (1)...(19): siRNA sense strand
gggaguaaaccucgaacca

SEQ ID NO: 2528859 - RNA, 19 nt, Homo sapiens
  misc_RNA (1)...(19): siRNA sense strand
gaggaaacuucaacuugua

SEQ ID NO: 2528860 - RNA, 19 nt, Homo sapiens
  misc_RNA (1)...(19): siRNA sense strand
gaaccagcgcuaacagcaa

SEQ ID NO: 2528861 - RNA, 19 nt, Homo sapiens
  misc_RNA (1)...(19): siRNA sense strand
gagagaaagugguuuaaag

SEQ ID NO: 2528862 - RNA, 19 nt, Homo sapiens
  misc_RNA (1)...(19): siRNA sense strand
agaacaaaacagggaguaa

SEQ ID NO: 2528863 - RNA, 19 nt, Homo sapiens
  misc_RNA (1)...(19): siRNA sense strand
cagcugcagccaagaacaa

SEQ ID NO: 2528864 - RNA, 19 nt, Homo sapiens
  misc_RNA (1)...(19): siRNA sense strand
uagugaaacauuuggacuu

SEQ ID NO: 2528865 - RNA, 19 nt, Homo sapiens
  misc_RNA (1)...(19): siRNA sense strand
ggauaaagaugagagaaag

SEQ ID NO: 2528866 - RNA, 19 nt, Homo sapiens
  misc_RNA (1)...(19): siRNA sense strand
auguagagaacguuccaaa

SEQ ID NO: 2528867 - RNA, 19 nt, Homo sapiens
  misc_RNA (1)...(19): siRNA sense strand
cagcaauaaagauaaggau

SEQ ID NO: 2528868 - RNA, 19 nt, Homo sapiens
  misc_RNA (1)...(19): siRNA sense strand
gcgcuaacagcaauaaaga

SEQ ID NO: 2528869 - RNA, 19 nt, Homo sapiens
  misc_RNA (1)...(19): siRNA sense strand
ggaaacuucaacuuguaua

SEQ ID NO: 2528870 - RNA, 19 nt, Homo sapiens
  misc_RNA (1)...(19): siRNA sense strand
ggaagacuacaaugaaaca

SEQ ID NO: 2528871 - RNA, 19 nt, Homo sapiens
  misc_RNA (1)...(19): siRNA sense strand
ggaggaaacuucaacuugu

SEQ ID NO: 2528872 - RNA, 19 nt, Homo sapiens
  misc_RNA (1)...(19): siRNA sense strand
guagagaacguuccaaaga

SEQ ID NO: 2528873 - RNA, 19 nt, Homo sapiens
  misc_RNA (1)...(19): siRNA sense strand
aggauaaagaugagagaaa

SEQ ID NO: 2528874 - RNA, 19 nt, Homo sapiens
  misc_RNA (1)...(19): siRNA sense strand
gcuaacagcaauaaagaua

SEQ ID NO: 2528875 - RNA, 19 nt, Homo sapiens
  misc_RNA (1)...(19): siRNA sense strand
gaugagagaaagugguuua

SEQ ID NO: 2528876 - RNA, 19 nt, Homo sapiens
  misc_RNA (1)...(19): siRNA sense strand
gcaaagagagcucgacuua

SEQ ID NO: 2528877 - RNA, 19 nt, Homo sapiens
  misc_RNA (1)...(19): siRNA sense strand
caccagacguagagaagaa

SEQ ID NO: 2528878 - RNA, 19 nt, Homo sapiens
  misc_RNA (1)...(19): siRNA sense strand
uuggauagcuuuagucaaa

SEQ ID NO: 2528879 - RNA, 19 nt, Homo sapiens
  misc_RNA (1)...(19): siRNA sense strand
cugccuacaucuagugaaa

SEQ ID NO: 2528880 - RNA, 19 nt, Homo sapiens
  misc_RNA (1)...(19): siRNA sense strand
gcaacucguuucaggcaaa

SEQ ID NO: 2528881 - RNA, 19 nt, Homo sapiens
  misc_RNA (1)...(19): siRNA sense strand
aaggaagacuacaaugaaa

SEQ ID NO: 2528882 - RNA, 19 nt, Homo sapiens
  misc_RNA (1)...(19): siRNA sense strand
acguagagaagaaggaaga

SEQ ID NO: 2528883 - RNA, 19 nt, Homo sapiens
  misc_RNA (1)...(19): siRNA sense strand
gauaaagaugagagaaagu

SEQ ID NO: 2528884 - RNA, 19 nt, Homo sapiens
  misc_RNA (1)...(19): siRNA sense strand
gagaaagugguuuaaagua

SEQ ID NO: 2528885 - RNA, 19 nt, Homo sapiens
  misc_RNA (1)...(19): siRNA sense strand
agaaagugguuuaaaguac

SEQ ID NO: 2528886 - RNA, 19 nt, Homo sapiens
  misc_RNA (1)...(19): siRNA sense strand
gguuuaaaguaccuucaaa

SEQ ID NO: 2528887 - RNA, 19 nt, Homo sapiens
  misc_RNA (1)...(19): siRNA sense strand
gaacaaaacagggaguaaa

SEQ ID NO: 2528888 - RNA, 19 nt, Homo sapiens
  misc_RNA (1)...(19): siRNA sense strand
cauuaucaaacaagaggaa

SEQ ID NO: 2528889 - RNA, 19 nt, Homo sapiens
  misc_RNA (1)...(19): siRNA sense strand
ccagagagcacauuaucaa

SEQ ID NO: 2528890 - RNA, 19 nt, Homo sapiens
  misc_RNA (1)...(19): siRNA sense strand
gccuacaucuagugaaaca

SEQ ID NO: 2528891 - RNA, 19 nt, Homo sapiens
  misc_RNA (1)...(19): siRNA sense strand
gggaguaaaccucgaacca

SEQ ID NO: 2528892 - RNA, 19 nt, Homo sapiens
  misc_RNA (1)...(19): siRNA sense strand
gaggaaacuucaacuugua

SEQ ID NO: 2528893 - RNA, 19 nt, Homo sapiens
  misc_RNA (1)...(19): siRNA sense strand
gaaccagcgcuaacagcaa

SEQ ID NO: 2528894 - RNA, 19 nt, Homo sapiens
  misc_RNA (1)...(19): siRNA sense strand
gagagaaagugguuuaaag

SEQ ID NO: 2528895 - RNA, 19 nt, Homo sapiens
  misc_RNA (1)...(19): siRNA sense strand
agaacaaaacagggaguaa

SEQ ID NO: 2528896 - RNA, 19 nt, Homo sapiens
  misc_RNA (1)...(19): siRNA sense strand
cagcugcagccaagaacaa

SEQ ID NO: 2528897 - RNA, 19 nt, Homo sapiens
  misc_RNA (1)...(19): siRNA sense strand
uagugaaacauuuggacuu

SEQ ID NO: 2528898 - RNA, 19 nt, Homo sapiens
  misc_RNA (1)...(19): siRNA sense strand
ggauaaagaugagagaaag

SEQ ID NO: 2528899 - RNA, 19 nt, Homo sapiens
  misc_RNA (1)...(19): siRNA sense strand
auguagagaacguuccaaa

SEQ ID NO: 2528900 - RNA, 19 nt, Homo sapiens
  misc_RNA (1)...(19): siRNA sense strand
cagcaauaaagauaaggau

SEQ ID NO: 2528901 - RNA, 19 nt, Homo sapiens
  misc_RNA (1)...(19): siRNA sense strand
gcgcuaacagcaauaaaga

SEQ ID NO: 2528902 - RNA, 19 nt, Homo sapiens
  misc_RNA (1)...(19): siRNA sense strand
ggaaacuucaacuuguaua

SEQ ID NO: 2528903 - RNA, 19 nt, Homo sapiens
  misc_RNA (1)...(19): siRNA sense strand
ggaagacuacaaugaaaca

SEQ ID NO: 2528904 - RNA, 19 nt, Homo sapiens
  misc_RNA (1)...(19): siRNA sense strand
ggaggaaacuucaacuugu

SEQ ID NO: 2528905 - RNA, 19 nt, Homo sapiens
  misc_RNA (1)...(19): siRNA sense strand
guagagaacguuccaaaga

SEQ ID NO: 2528906 - RNA, 19 nt, Homo sapiens
  misc_RNA (1)...(19): siRNA sense strand
aggauaaagaugagagaaa

SEQ ID NO: 2528907 - RNA, 19 nt, Homo sapiens
  misc_RNA (1)...(19): siRNA sense strand
gcuaacagcaauaaagaua

SEQ ID NO: 2528908 - RNA, 19 nt, Homo sapiens
  misc_RNA (1)...(19): siRNA sense strand
gaugagagaaagugguuua

SEQ ID NO: 2528909 - RNA, 19 nt, Homo sapiens
  misc_RNA (1)...(19): siRNA sense strand
gcaaagagagcucgacuua

SEQ ID NO: 2528910 - RNA, 19 nt, Homo sapiens
  misc_RNA (1)...(19): siRNA sense strand
caccagacguagagaagaa

SEQ ID NO: 2528911 - RNA, 19 nt, Homo sapiens
  misc_RNA (1)...(19): siRNA sense strand
uuggauagcuuuagucaaa

SEQ ID NO: 2528912 - RNA, 19 nt, Homo sapiens
  misc_RNA (1)...(19): siRNA sense strand
cugccuacaucuagugaaa

SEQ ID NO: 2528913 - RNA, 19 nt, Homo sapiens
  misc_RNA (1)...(19): siRNA sense strand
gcaacucguuucaggcaaa

SEQ ID NO: 2528914 - RNA, 19 nt, Homo sapiens
  misc_RNA (1)...(19): siRNA sense strand
aaggaagacuacaaugaaa

SEQ ID NO: 2528915 - RNA, 19 nt, Homo sapiens
  misc_RNA (1)...(19): siRNA sense strand
acguagagaagaaggaaga

SEQ ID NO: 2528916 - RNA, 19 nt, Homo sapiens
  misc_RNA (1)...(19): siRNA sense strand
gauaaagaugagagaaagu

SEQ ID NO: 2528917 - RNA, 19 nt, Homo sapiens
  misc_RNA (1)...(19): siRNA sense strand
gagaaagugguuuaaagua

SEQ ID NO: 2528918 - RNA, 19 nt, Homo sapiens
  misc_RNA (1)...(19): siRNA sense strand
agaaagugguuuaaaguac

SEQ ID NO: 2528919 - RNA, 19 nt, Homo sapiens
  misc_RNA (1)...(19): siRNA sense strand
gguuuaaaguaccuucaaa

SEQ ID NO: 2528920 - RNA, 19 nt, Homo sapiens
  misc_RNA (1)...(19): siRNA sense strand
gaacaaaacagggaguaaa

SEQ ID NO: 2528921 - RNA, 19 nt, Homo sapiens
  misc_RNA (1)...(19): siRNA sense strand
cauuaucaaacaagaggaa

SEQ ID NO: 2528922 - RNA, 19 nt, Homo sapiens
  misc_RNA (1)...(19): siRNA sense strand
ccagagagcacauuaucaa

SEQ ID NO: 2528923 - RNA, 19 nt, Homo sapiens
  misc_RNA (1)...(19): siRNA sense strand
gccuacaucuagugaaaca

SEQ ID NO: 2528924 - RNA, 19 nt, Homo sapiens
  misc_RNA (1)...(19): siRNA sense strand
gggaguaaaccucgaacca

SEQ ID NO: 2528925 - RNA, 19 nt, Homo sapiens
  misc_RNA (1)...(19): siRNA sense strand
gaggaaacuucaacuugua

SEQ ID NO: 2528926 - RNA, 19 nt, Homo sapiens
  misc_RNA (1)...(19): siRNA sense strand
gaaccagcgcuaacagcaa

SEQ ID NO: 2528927 - RNA, 19 nt, Homo sapiens
  misc_RNA (1)...(19): siRNA sense strand
gagagaaagugguuuaaag

SEQ ID NO: 2528928 - RNA, 19 nt, Homo sapiens
  misc_RNA (1)...(19): siRNA sense strand
agaacaaaacagggaguaa

SEQ ID NO: 2528929 - RNA, 19 nt, Homo sapiens
  misc_RNA (1)...(19): siRNA sense strand
cagcugcagccaagaacaa

SEQ ID NO: 2528930 - RNA, 19 nt, Homo sapiens
  misc_RNA (1)...(19): siRNA sense strand
uagugaaacauuuggacuu

SEQ ID NO: 2528931 - RNA, 19 nt, Homo sapiens
  misc_RNA (1)...(19): siRNA sense strand
ggauaaagaugagagaaag

SEQ ID NO: 2528932 - RNA, 19 nt, Homo sapiens
  misc_RNA (1)...(19): siRNA sense strand
auguagagaacguuccaaa

SEQ ID NO: 2528933 - RNA, 19 nt, Homo sapiens
  misc_RNA (1)...(19): siRNA sense strand
cagcaauaaagauaaggau

SEQ ID NO: 2528934 - RNA, 19 nt, Homo sapiens
  misc_RNA (1)...(19): siRNA sense strand
gcgcuaacagcaauaaaga

SEQ ID NO: 2528935 - RNA, 19 nt, Homo sapiens
  misc_RNA (1)...(19): siRNA sense strand
ggaaacuucaacuuguaua

SEQ ID NO: 2528936 - RNA, 19 nt, Homo sapiens
  misc_RNA (1)...(19): siRNA sense strand
ggaagacuacaaugaaaca

SEQ ID NO: 2528937 - RNA, 19 nt, Homo sapiens
  misc_RNA (1)...(19): siRNA sense strand
ggaggaaacuucaacuugu

SEQ ID NO: 2528938 - RNA, 19 nt, Homo sapiens
  misc_RNA (1)...(19): siRNA sense strand
guagagaacguuccaaaga

SEQ ID NO: 2528939 - RNA, 19 nt, Homo sapiens
  misc_RNA (1)...(19): siRNA sense strand
aggauaaagaugagagaaa

SEQ ID NO: 2528940 - RNA, 19 nt, Homo sapiens
  misc_RNA (1)...(19): siRNA sense strand
gcuaacagcaauaaagaua

SEQ ID NO: 2528941 - RNA, 19 nt, Homo sapiens
  misc_RNA (1)...(19): siRNA sense strand
gaugagagaaagugguuua

SEQ ID NO: 2528942 - RNA, 19 nt, Homo sapiens
  misc_RNA (1)...(19): siRNA sense strand
gcaaagagagcucgacuua

SEQ ID NO: 2528943 - RNA, 19 nt, Homo sapiens
  misc_RNA (1)...(19): siRNA sense strand
caccagacguagagaagaa

SEQ ID NO: 2528944 - RNA, 19 nt, Homo sapiens
  misc_RNA (1)...(19): siRNA sense strand
uuggauagcuuuagucaaa

SEQ ID NO: 2528945 - RNA, 19 nt, Homo sapiens
  misc_RNA (1)...(19): siRNA sense strand
cugccuacaucuagugaaa

SEQ ID NO: 2528946 - RNA, 19 nt, Homo sapiens
  misc_RNA (1)...(19): siRNA sense strand
gcaacucguuucaggcaaa

SEQ ID NO: 2528947 - RNA, 19 nt, Homo sapiens
  misc_RNA (1)...(19): siRNA sense strand
aaggaagacuacaaugaaa

SEQ ID NO: 2528948 - RNA, 19 nt, Homo sapiens
  misc_RNA (1)...(19): siRNA sense strand
acguagagaagaaggaaga

SEQ ID NO: 2528949 - RNA, 19 nt, Homo sapiens
  misc_RNA (1)...(19): siRNA sense strand
gauaaagaugagagaaagu

SEQ ID NO: 2528950 - RNA, 19 nt, Homo sapiens
  misc_RNA (1)...(19): siRNA sense strand
gagaaagugguuuaaagua

SEQ ID NO: 2528951 - RNA, 19 nt, Homo sapiens
  misc_RNA (1)...(19): siRNA sense strand
agaaagugguuuaaaguac

SEQ ID NO: 2528952 - RNA, 19 nt, Homo sapiens
  misc_RNA (1)...(19): siRNA sense strand
gguuuaaaguaccuucaaa

SEQ ID NO: 2528953 - RNA, 19 nt, Homo sapiens
  misc_RNA (1)...(19): siRNA sense strand
gaacaaaacagggaguaaa

SEQ ID NO: 2528954 - RNA, 19 nt, Homo sapiens
  misc_RNA (1)...(19): siRNA sense strand
cauuaucaaacaagaggaa

SEQ ID NO: 2528955 - RNA, 19 nt, Homo sapiens
  misc_RNA (1)...(19): siRNA sense strand
ccagagagcacauuaucaa

SEQ ID NO: 2528956 - RNA, 19 nt, Homo sapiens
  misc_RNA (1)...(19): siRNA sense strand
gccuacaucuagugaaaca

SEQ ID NO: 2528957 - RNA, 19 nt, Homo sapiens
  misc_RNA (1)...(19): siRNA sense strand
gggaguaaaccucgaacca

SEQ ID NO: 2528958 - RNA, 19 nt, Homo sapiens
  misc_RNA (1)...(19): siRNA sense strand
gaggaaacuucaacuugua

SEQ ID NO: 2528959 - RNA, 19 nt, Homo sapiens
  misc_RNA (1)...(19): siRNA sense strand
gaaccagcgcuaacagcaa

SEQ ID NO: 2528960 - RNA, 19 nt, Homo sapiens
  misc_RNA (1)...(19): siRNA sense strand
gagagaaagugguuuaaag

SEQ ID NO: 2528961 - RNA, 19 nt, Homo sapiens
  misc_RNA (1)...(19): siRNA sense strand
agaacaaaacagggaguaa

SEQ ID NO: 2528962 - RNA, 19 nt, Homo sapiens
  misc_RNA (1)...(19): siRNA sense strand
cagcugcagccaagaacaa

SEQ ID NO: 2528963 - RNA, 19 nt, Homo sapiens
  misc_RNA (1)...(19): siRNA sense strand
uagugaaacauuuggacuu

SEQ ID NO: 2528964 - RNA, 19 nt, Homo sapiens
  misc_RNA (1)...(19): siRNA sense strand
ggauaaagaugagagaaag

SEQ ID NO: 2528965 - RNA, 19 nt, Homo sapiens
  misc_RNA (1)...(19): siRNA sense strand
auguagagaacguuccaaa

SEQ ID NO: 2528966 - RNA, 19 nt, Homo sapiens
  misc_RNA (1)...(19): siRNA sense strand
cagcaauaaagauaaggau

SEQ ID NO: 2528967 - RNA, 19 nt, Homo sapiens
  misc_RNA (1)...(19): siRNA sense strand
gcgcuaacagcaauaaaga

SEQ ID NO: 2528968 - RNA, 19 nt, Homo sapiens
  misc_RNA (1)...(19): siRNA sense strand
ggaaacuucaacuuguaua

SEQ ID NO: 2528969 - RNA, 19 nt, Homo sapiens
  misc_RNA (1)...(19): siRNA sense strand
ggaagacuacaaugaaaca

SEQ ID NO: 2528970 - RNA, 19 nt, Homo sapiens
  misc_RNA (1)...(19): siRNA sense strand
ggaggaaacuucaacuugu

SEQ ID NO: 2528971 - RNA, 19 nt, Homo sapiens
  misc_RNA (1)...(19): siRNA sense strand
guagagaacguuccaaaga

SEQ ID NO: 2528972 - RNA, 19 nt, Homo sapiens
  misc_RNA (1)...(19): siRNA sense strand
aagaaggucaagaagaaaa

SEQ ID NO: 2528973 - RNA, 19 nt, Homo sapiens
  misc_RNA (1)...(19): siRNA sense strand
ccuccaagcccucggaacu

SEQ ID NO: 2528974 - RNA, 19 nt, Homo sapiens
  misc_RNA (1)...(19): siRNA sense strand
cuguaauggcuuucggauu

SEQ ID NO: 2528975 - RNA, 19 nt, Homo sapiens
  misc_RNA (1)...(19): siRNA sense strand
aguuauaugaggcggaaaa

SEQ ID NO: 2528976 - RNA, 19 nt, Homo sapiens
  misc_RNA (1)...(19): siRNA sense strand
acaugcaauacaagagaau

SEQ ID NO: 2528977 - RNA, 19 nt, Homo sapiens
  misc_RNA (1)...(19): siRNA sense strand
cuuauuucgugcugugaau

SEQ ID NO: 2528978 - RNA, 19 nt, Homo sapiens
  misc_RNA (1)...(19): siRNA sense strand
ugguuaucuacaugcaaua

SEQ ID NO: 2528979 - RNA, 19 nt, Homo sapiens
  misc_RNA (1)...(19): siRNA sense strand
aagccaauacagaaggaaa

SEQ ID NO: 2528980 - RNA, 19 nt, Homo sapiens
  misc_RNA (1)...(19): siRNA sense strand
ggauauacuuugggagcca

SEQ ID NO: 2528981 - RNA, 19 nt, Homo sapiens
  misc_RNA (1)...(19): siRNA sense strand
gcugugagguuuaagccaa

SEQ ID NO: 2528982 - RNA, 19 nt, Homo sapiens
  misc_RNA (1)...(19): siRNA sense strand
agccaauacagaaggaaau

SEQ ID NO: 2528983 - RNA, 19 nt, Homo sapiens
  misc_RNA (1)...(19): siRNA sense strand
gagaagaagccaccgccaa

SEQ ID NO: 2528984 - RNA, 19 nt, Homo sapiens
  misc_RNA (1)...(19): siRNA sense strand
agaacagcugugagguuua

SEQ ID NO: 2528985 - RNA, 19 nt, Homo sapiens
  misc_RNA (1)...(19): siRNA sense strand
cugugagguuuaagccaau

SEQ ID NO: 2528986 - RNA, 19 nt, Homo sapiens
  misc_RNA (1)...(19): siRNA sense strand
cgauuuaagaacuacccaa

SEQ ID NO: 2528987 - RNA, 19 nt, Homo sapiens
  misc_RNA (1)...(19): siRNA sense strand
agguaaacaagaagcagaa

SEQ ID NO: 2528988 - RNA, 19 nt, Homo sapiens
  misc_RNA (1)...(19): siRNA sense strand
auguaagaaaggagccaaa

SEQ ID NO: 2528989 - RNA, 19 nt, Homo sapiens
  misc_RNA (1)...(19): siRNA sense strand
aacaagaagcagaaaggaa

SEQ ID NO: 2528990 - RNA, 19 nt, Homo sapiens
  misc_RNA (1)...(19): siRNA sense strand
cugaaaggcaugggcauaa

SEQ ID NO: 2528991 - RNA, 19 nt, Homo sapiens
  misc_RNA (1)...(19): siRNA sense strand
ugcagcaccuggagggaaa

SEQ ID NO: 2528992 - RNA, 19 nt, Homo sapiens
  misc_RNA (1)...(19): siRNA sense strand
cauaagaaugacagaacca

SEQ ID NO: 2528993 - RNA, 19 nt, Homo sapiens
  misc_RNA (1)...(19): siRNA sense strand
aagaaaggagccaaagaau

SEQ ID NO: 2528994 - RNA, 19 nt, Homo sapiens
  misc_RNA (1)...(19): siRNA sense strand
ggacacagaaggagaaccu

SEQ ID NO: 2528995 - RNA, 19 nt, Homo sapiens
  misc_RNA (1)...(19): siRNA sense strand
acugaaaggcaugggcaua

SEQ ID NO: 2528996 - RNA, 19 nt, Homo sapiens
  misc_RNA (1)...(19): siRNA sense strand
gaauacacauuuagccuca

SEQ ID NO: 2528997 - RNA, 19 nt, Homo sapiens
  misc_RNA (1)...(19): siRNA sense strand
gggagaaguuauagcacug

SEQ ID NO: 2528998 - RNA, 19 nt, Homo sapiens
  misc_RNA (1)...(19): siRNA sense strand
uagagaggccagaagagaa

SEQ ID NO: 2528999 - RNA, 19 nt, Homo sapiens
  misc_RNA (1)...(19): siRNA sense strand
ugaucagggagaaguuaua

SEQ ID NO: 2529000 - RNA, 19 nt, Homo sapiens
  misc_RNA (1)...(19): siRNA sense strand
cuucaagauguguuacuua

SEQ ID NO: 2529001 - RNA, 19 nt, Homo sapiens
  misc_RNA (1)...(19): siRNA sense strand
gggcauaagaaugacagaa

SEQ ID NO: 2529002 - RNA, 19 nt, Homo sapiens
  misc_RNA (1)...(19): siRNA sense strand
uguuaaagcaccugucaca

SEQ ID NO: 2529003 - RNA, 19 nt, Homo sapiens
  misc_RNA (1)...(19): siRNA sense strand
cuauaacacuggccgaaaa

SEQ ID NO: 2529004 - RNA, 19 nt, Homo sapiens
  misc_RNA (1)...(19): siRNA sense strand
augaauaaggagauuguga

SEQ ID NO: 2529005 - RNA, 19 nt, Homo sapiens
  misc_RNA (1)...(19): siRNA sense strand
gaauaaggagauugugacu

SEQ ID NO: 2529006 - RNA, 19 nt, Homo sapiens
  misc_RNA (1)...(19): siRNA sense strand
agauuggaggagaaggaau

SEQ ID NO: 2529007 - RNA, 19 nt, Homo sapiens
  misc_RNA (1)...(19): siRNA sense strand
guaaaaugcaaaagcacau

SEQ ID NO: 2529008 - RNA, 19 nt, Homo sapiens
  misc_RNA (1)...(19): siRNA sense strand
uggaggacacagaaggaga

SEQ ID NO: 2529009 - RNA, 19 nt, Homo sapiens
  misc_RNA (1)...(19): siRNA sense strand
uauuggacccagaaagaau

SEQ ID NO: 2529010 - RNA, 19 nt, Homo sapiens
  misc_RNA (1)...(19): siRNA sense strand
aggaauugugucagcauca

SEQ ID NO: 2529011 - RNA, 19 nt, Homo sapiens
  misc_RNA (1)...(19): siRNA sense strand
guggauuaccugaacugaa

SEQ ID NO: 2529012 - RNA, 19 nt, Homo sapiens
  misc_RNA (1)...(19): siRNA sense strand
gcaugaucagggagaaguu

SEQ ID NO: 2529013 - RNA, 19 nt, Homo sapiens
  misc_RNA (1)...(19): siRNA sense strand
cgguuaaacuugauauggu

SEQ ID NO: 2529014 - RNA, 19 nt, Homo sapiens
  misc_RNA (1)...(19): siRNA sense strand
ccagaagagaagacauguu

SEQ ID NO: 2529015 - RNA, 19 nt, Homo sapiens
  misc_RNA (1)...(19): siRNA sense strand
ccucaguacaacaugugaa

SEQ ID NO: 2529016 - RNA, 19 nt, Homo sapiens
  misc_RNA (1)...(19): siRNA sense strand
acauguugcgucuggcuaa

SEQ ID NO: 2529017 - RNA, 19 nt, Homo sapiens
  misc_RNA (1)...(19): siRNA sense strand
acaagaagcagaaaggaag

SEQ ID NO: 2529018 - RNA, 19 nt, Homo sapiens
  misc_RNA (1)...(19): siRNA sense strand
uuauaaugcgugugagaaa

SEQ ID NO: 2529019 - RNA, 19 nt, Homo sapiens
  misc_RNA (1)...(19): siRNA sense strand
cgugaaaagaagacagaaa

SEQ ID NO: 2529020 - RNA, 19 nt, Homo sapiens
  misc_RNA (1)...(19): siRNA sense strand
cuucaaaggaacagauaca

SEQ ID NO: 2529021 - RNA, 19 nt, Homo sapiens
  misc_RNA (1)...(19): siRNA sense strand
agguaaaguaguaaccaaa

SEQ ID NO: 2529022 - RNA, 19 nt, Homo sapiens
  misc_RNA (1)...(19): siRNA sense strand
ccaaauuaaggaaggugaa

SEQ ID NO: 2529023 - RNA, 19 nt, Homo sapiens
  misc_RNA (1)...(19): siRNA sense strand
acuuagauggucuggaaua

SEQ ID NO: 2529024 - RNA, 19 nt, Homo sapiens
  misc_RNA (1)...(19): siRNA sense strand
agaagaaaauauuggccaa

SEQ ID NO: 2529025 - RNA, 19 nt, Homo sapiens
  misc_RNA (1)...(19): siRNA sense strand
uguuaaagguuuuggagau

SEQ ID NO: 2529026 - RNA, 19 nt, Homo sapiens
  misc_RNA (1)...(19): siRNA sense strand
gugaaaagaagacagaaaa

SEQ ID NO: 2529027 - RNA, 19 nt, Homo sapiens
  misc_RNA (1)...(19): siRNA sense strand
cuagagagcagaagaaaau

SEQ ID NO: 2529028 - RNA, 19 nt, Homo sapiens
  misc_RNA (1)...(19): siRNA sense strand
gguuaacuucaaaggaaca

SEQ ID NO: 2529029 - RNA, 19 nt, Homo sapiens
  misc_RNA (1)...(19): siRNA sense strand
cagcgauagcuaugacauu

SEQ ID NO: 2529030 - RNA, 19 nt, Homo sapiens
  misc_RNA (1)...(19): siRNA sense strand
aggugaaauaugaggaaac

SEQ ID NO: 2529031 - RNA, 19 nt, Homo sapiens
  misc_RNA (1)...(19): siRNA sense strand
ugagaaguaugaugggcau

SEQ ID NO: 2529032 - RNA, 19 nt, Homo sapiens
  misc_RNA (1)...(19): siRNA sense strand
auuuauaaugcgugugaga

SEQ ID NO: 2529033 - RNA, 19 nt, Homo sapiens
  misc_RNA (1)...(19): siRNA sense strand
agauacaguagcaggacuu

SEQ ID NO: 2529034 - RNA, 19 nt, Homo sapiens
  misc_RNA (1)...(19): siRNA sense strand
ucuagagagcagaagaaaa

SEQ ID NO: 2529035 - RNA, 19 nt, Homo sapiens
  misc_RNA (1)...(19): siRNA sense strand
aaguaguaaccaaagagaa

SEQ ID NO: 2529036 - RNA, 19 nt, Homo sapiens
  misc_RNA (1)...(19): siRNA sense strand
guuaaagguuuuggagauu

SEQ ID NO: 2529037 - RNA, 19 nt, Homo sapiens
  misc_RNA (1)...(19): siRNA sense strand
aagccaaagaugucuacaa

SEQ ID NO: 2529038 - RNA, 19 nt, Homo sapiens
  misc_RNA (1)...(19): siRNA sense strand
aggaacagauacaguagca

SEQ ID NO: 2529039 - RNA, 19 nt, Homo sapiens
  misc_RNA (1)...(19): siRNA sense strand
agaaaauccaggaagccaa

SEQ ID NO: 2529040 - RNA, 19 nt, Homo sapiens
  misc_RNA (1)...(19): siRNA sense strand
uuauaaugcgugugagaaa

SEQ ID NO: 2529041 - RNA, 19 nt, Homo sapiens
  misc_RNA (1)...(19): siRNA sense strand
cgugaaaagaagacagaaa

SEQ ID NO: 2529042 - RNA, 19 nt, Homo sapiens
  misc_RNA (1)...(19): siRNA sense strand
cuucaaaggaacagauaca

SEQ ID NO: 2529043 - RNA, 19 nt, Homo sapiens
  misc_RNA (1)...(19): siRNA sense strand
agguaaaguaguaaccaaa

SEQ ID NO: 2529044 - RNA, 19 nt, Homo sapiens
  misc_RNA (1)...(19): siRNA sense strand
ccaaauuaaggaaggugaa

SEQ ID NO: 2529045 - RNA, 19 nt, Homo sapiens
  misc_RNA (1)...(19): siRNA sense strand
acuuagauggucuggaaua

SEQ ID NO: 2529046 - RNA, 19 nt, Homo sapiens
  misc_RNA (1)...(19): siRNA sense strand
agaagaaaauauuggccaa

SEQ ID NO: 2529047 - RNA, 19 nt, Homo sapiens
  misc_RNA (1)...(19): siRNA sense strand
uguuaaagguuuuggagau

SEQ ID NO: 2529048 - RNA, 19 nt, Homo sapiens
  misc_RNA (1)...(19): siRNA sense strand
gugaaaagaagacagaaaa

SEQ ID NO: 2529049 - RNA, 19 nt, Homo sapiens
  misc_RNA (1)...(19): siRNA sense strand
cuagagagcagaagaaaau

SEQ ID NO: 2529050 - RNA, 19 nt, Homo sapiens
  misc_RNA (1)...(19): siRNA sense strand
gguuaacuucaaaggaaca

SEQ ID NO: 2529051 - RNA, 19 nt, Homo sapiens
  misc_RNA (1)...(19): siRNA sense strand
cagcgauagcuaugacauu

SEQ ID NO: 2529052 - RNA, 19 nt, Homo sapiens
  misc_RNA (1)...(19): siRNA sense strand
aggugaaauaugaggaaac

SEQ ID NO: 2529053 - RNA, 19 nt, Homo sapiens
  misc_RNA (1)...(19): siRNA sense strand
ugagaaguaugaugggcau

SEQ ID NO: 2529054 - RNA, 19 nt, Homo sapiens
  misc_RNA (1)...(19): siRNA sense strand
auuuauaaugcgugugaga

SEQ ID NO: 2529055 - RNA, 19 nt, Homo sapiens
  misc_RNA (1)...(19): siRNA sense strand
agauacaguagcaggacuu

SEQ ID NO: 2529056 - RNA, 19 nt, Homo sapiens
  misc_RNA (1)...(19): siRNA sense strand
ucuagagagcagaagaaaa

SEQ ID NO: 2529057 - RNA, 19 nt, Homo sapiens
  misc_RNA (1)...(19): siRNA sense strand
aaguaguaaccaaagagaa

SEQ ID NO: 2529058 - RNA, 19 nt, Homo sapiens
  misc_RNA (1)...(19): siRNA sense strand
guuaaagguuuuggagauu

SEQ ID NO: 2529059 - RNA, 19 nt, Homo sapiens
  misc_RNA (1)...(19): siRNA sense strand
aagccaaagaugucuacaa

SEQ ID NO: 2529060 - RNA, 19 nt, Homo sapiens
  misc_RNA (1)...(19): siRNA sense strand
aggaacagauacaguagca

SEQ ID NO: 2529061 - RNA, 19 nt, Homo sapiens
  misc_RNA (1)...(19): siRNA sense strand
agaaaauccaggaagccaa

SEQ ID NO: 2529062 - RNA, 19 nt, Homo sapiens
  misc_RNA (1)...(19): siRNA sense strand
aaucagugcaagaggcuca

SEQ ID NO: 2529063 - RNA, 19 nt, Homo sapiens
  misc_RNA (1)...(19): siRNA sense strand
ggaugcagauggauggacu

SEQ ID NO: 2529064 - RNA, 19 nt, Homo sapiens
  misc_RNA (1)...(19): siRNA sense strand
agguugaaagcuugcaaau

SEQ ID NO: 2529065 - RNA, 19 nt, Homo sapiens
  misc_RNA (1)...(19): siRNA sense strand
caagagacagcgagcgcaa

SEQ ID NO: 2529066 - RNA, 19 nt, Homo sapiens
  misc_RNA (1)...(19): siRNA sense strand
cacuaaggacauugggcaa

SEQ ID NO: 2529067 - RNA, 19 nt, Homo sapiens
  misc_RNA (1)...(19): siRNA sense strand
gaagaagaacacaugguga

SEQ ID NO: 2529068 - RNA, 19 nt, Homo sapiens
  misc_RNA (1)...(19): siRNA sense strand
gaagagaggcggaaacgga

SEQ ID NO: 2529069 - RNA, 19 nt, Homo sapiens
  misc_RNA (1)...(19): siRNA sense strand
agccaaaacacgagaccaa

SEQ ID NO: 2529070 - RNA, 19 nt, Homo sapiens
  misc_RNA (1)...(19): siRNA sense strand
ccaaaacacgagaccaaaa

SEQ ID NO: 2529071 - RNA, 19 nt, Homo sapiens
  misc_RNA (1)...(19): siRNA sense strand
gcacuaaggacauugggca

SEQ ID NO: 2529072 - RNA, 19 nt, Homo sapiens
  misc_RNA (1)...(19): siRNA sense strand
gaggaacggaguaggacca

SEQ ID NO: 2529073 - RNA, 19 nt, Homo sapiens
  misc_RNA (1)...(19): siRNA sense strand
cggaguaggaccaagggca

SEQ ID NO: 2529074 - RNA, 19 nt, Homo sapiens
  misc_RNA (1)...(19): siRNA sense strand
gcggaaacggagaagccuu

SEQ ID NO: 2529075 - RNA, 19 nt, Homo sapiens
  misc_RNA (1)...(19): siRNA sense strand
agcccaagccucuggaaga

SEQ ID NO: 2529076 - RNA, 19 nt, Homo sapiens
  misc_RNA (1)...(19): siRNA sense strand
gcaagcuagaagaagaaca

SEQ ID NO: 2529077 - RNA, 19 nt, Homo sapiens
  misc_RNA (1)...(19): siRNA sense strand
gagcaauggucguggcuuc

SEQ ID NO: 2529078 - RNA, 19 nt, Homo sapiens
  misc_RNA (1)...(19): siRNA sense strand
guguaugagacgugggugu

SEQ ID NO: 2529079 - RNA, 19 nt, Homo sapiens
  misc_RNA (1)...(19): siRNA sense strand
ggcccuagaugguggcaca

SEQ ID NO: 2529080 - RNA, 19 nt, Homo sapiens
  misc_RNA (1)...(19): siRNA sense strand
gcacagaugaggaggacug

SEQ ID NO: 2529081 - RNA, 19 nt, Homo sapiens
  misc_RNA (1)...(19): siRNA sense strand
aggaagaguuucagugccu

SEQ ID NO: 2529082 - RNA, 19 nt, Homo sapiens
  misc_RNA (1)...(19): siRNA sense strand
aggcagaggaugagccacu

SEQ ID NO: 2529083 - RNA, 19 nt, Homo sapiens
  misc_RNA (1)...(19): siRNA sense strand
gguugaugccuguggcgau

SEQ ID NO: 2529084 - RNA, 19 nt, Homo sapiens
  misc_RNA (1)...(19): siRNA sense strand
auaacucagugcugggcaa

SEQ ID NO: 2529085 - RNA, 19 nt, Homo sapiens
  misc_RNA (1)...(19): siRNA sense strand
agaugaggacgaugugcua

SEQ ID NO: 2529086 - RNA, 19 nt, Homo sapiens
  misc_RNA (1)...(19): siRNA sense strand
uggcgauggcucugaugaa

SEQ ID NO: 2529087 - RNA, 19 nt, Homo sapiens
  misc_RNA (1)...(19): siRNA sense strand
agaucuuacgccaggauau

SEQ ID NO: 2529088 - RNA, 19 nt, Homo sapiens
  misc_RNA (1)...(19): siRNA sense strand
ugagagacgcugucggcau

SEQ ID NO: 2529089 - RNA, 19 nt, Homo sapiens
  misc_RNA (1)...(19): siRNA sense strand
ccugcaagcucuaugccau

SEQ ID NO: 2529090 - RNA, 19 nt, Homo sapiens
  misc_RNA (1)...(19): siRNA sense strand
ugaaagaacugcacgguga

SEQ ID NO: 2529091 - RNA, 19 nt, Homo sapiens
  misc_RNA (1)...(19): siRNA sense strand
aacaaagccaagagagaaa

SEQ ID NO: 2529092 - RNA, 19 nt, Homo sapiens
  misc_RNA (1)...(19): siRNA sense strand
guuuaagagucgggaagau

SEQ ID NO: 2529093 - RNA, 19 nt, Homo sapiens
  misc_RNA (1)...(19): siRNA sense strand
cuggagaacaucugcaaca

SEQ ID NO: 2529094 - RNA, 19 nt, Homo sapiens
  misc_RNA (1)...(19): siRNA sense strand
aaacugcagccgaggaaaa

SEQ ID NO: 2529095 - RNA, 19 nt, Homo sapiens
  misc_RNA (1)...(19): siRNA sense strand
cguggcgauucuugagcaa

SEQ ID NO: 2529096 - RNA, 19 nt, Homo sapiens
  misc_RNA (1)...(19): siRNA sense strand
aguaugucaucuauggaau

SEQ ID NO: 2529097 - RNA, 19 nt, Homo sapiens
  misc_RNA (1)...(19): siRNA sense strand
ggccgaugcaucaguggaa

SEQ ID NO: 2529098 - RNA, 19 nt, Homo sapiens
  misc_RNA (1)...(19): siRNA sense strand
ccuuugagcuagaugagaa

SEQ ID NO: 2529099 - RNA, 19 nt, Homo sapiens
  misc_RNA (1)...(19): siRNA sense strand
ccgcauauguguuggagca

SEQ ID NO: 2529100 - RNA, 19 nt, Homo sapiens
  misc_RNA (1)...(19): siRNA sense strand
ccaagaagaugggugggaa

SEQ ID NO: 2529101 - RNA, 19 nt, Homo sapiens
  misc_RNA (1)...(19): siRNA sense strand
ggagaagccaggugggaag

SEQ ID NO: 2529102 - RNA, 19 nt, Homo sapiens
  misc_RNA (1)...(19): siRNA sense strand
cuuugagcuagaugagaaa

SEQ ID NO: 2529103 - RNA, 19 nt, Homo sapiens
  misc_RNA (1)...(19): siRNA sense strand
uuuaagaagaccaagaaga

SEQ ID NO: 2529104 - RNA, 19 nt, Homo sapiens
  misc_RNA (1)...(19): siRNA sense strand
gaggaggaaaucaaggaau

SEQ ID NO: 2529105 - RNA, 19 nt, Homo sapiens
  misc_RNA (1)...(19): siRNA sense strand
uggaguauuuuaaggcaua

SEQ ID NO: 2529106 - RNA, 19 nt, Homo sapiens
  misc_RNA (1)...(19): siRNA sense strand
auucaaauugguuggguga

SEQ ID NO: 2529107 - RNA, 19 nt, Homo sapiens
  misc_RNA (1)...(19): siRNA sense strand
agcaggagcuggaggagga

SEQ ID NO: 2529108 - RNA, 19 nt, Homo sapiens
  misc_RNA (1)...(19): siRNA sense strand
gcccugacuuugaugggaa

SEQ ID NO: 2529109 - RNA, 19 nt, Homo sapiens
  misc_RNA (1)...(19): siRNA sense strand
aggagcuggaggaggaaau

SEQ ID NO: 2529110 - RNA, 19 nt, Homo sapiens
  misc_RNA (1)...(19): siRNA sense strand
ggaccacauccgagaucuu

SEQ ID NO: 2529111 - RNA, 19 nt, Homo sapiens
  misc_RNA (1)...(19): siRNA sense strand
gugaauucaaagagcaguu

SEQ ID NO: 2529112 - RNA, 19 nt, Homo sapiens
  misc_RNA (1)...(19): siRNA sense strand
gcagaugaugccauggaga

SEQ ID NO: 2529113 - RNA, 19 nt, Homo sapiens
  misc_RNA (1)...(19): siRNA sense strand
ggauaagcguuuacaggug

SEQ ID NO: 2529114 - RNA, 19 nt, Homo sapiens
  misc_RNA (1)...(19): siRNA sense strand
caagaagaugggugggaag

SEQ ID NO: 2529115 - RNA, 19 nt, Homo sapiens
  misc_RNA (1)...(19): siRNA sense strand
ggugaaggaacaucaacau

SEQ ID NO: 2529116 - RNA, 19 nt, Homo sapiens
  misc_RNA (1)...(19): siRNA sense strand
aagcacaaugguagcaaga

SEQ ID NO: 2529117 - RNA, 19 nt, Homo sapiens
  misc_RNA (1)...(19): siRNA sense strand
agaacauucaagaagauga

SEQ ID NO: 2529118 - RNA, 19 nt, Homo sapiens
  misc_RNA (1)...(19): siRNA sense strand
cagugaaaguccaaggcaa

SEQ ID NO: 2529119 - RNA, 19 nt, Homo sapiens
  misc_RNA (1)...(19): siRNA sense strand
agugaaaguccaaggcaau

SEQ ID NO: 2529120 - RNA, 19 nt, Homo sapiens
  misc_RNA (1)...(19): siRNA sense strand
uuauaugagugcaggguga

SEQ ID NO: 2529121 - RNA, 19 nt, Homo sapiens
  misc_RNA (1)...(19): siRNA sense strand
aggugaagcucuugcccga

SEQ ID NO: 2529122 - RNA, 19 nt, Homo sapiens
  misc_RNA (1)...(19): siRNA sense strand
aucugaaagucaaugcaaa

SEQ ID NO: 2529123 - RNA, 19 nt, Homo sapiens
  misc_RNA (1)...(19): siRNA sense strand
acagagacccggacagcga

SEQ ID NO: 2529124 - RNA, 19 nt, Homo sapiens
  misc_RNA (1)...(19): siRNA sense strand
cccucaagugguagccaaa

SEQ ID NO: 2529125 - RNA, 19 nt, Homo sapiens
  misc_RNA (1)...(19): siRNA sense strand
gggcaaugcaggcaggaga

SEQ ID NO: 2529126 - RNA, 19 nt, Homo sapiens
  misc_RNA (1)...(19): siRNA sense strand
ggauaguggaagugggaag

SEQ ID NO: 2529127 - RNA, 19 nt, Homo sapiens
  misc_RNA (1)...(19): siRNA sense strand
aggaugagcuggucaggga

SEQ ID NO: 2529128 - RNA, 19 nt, Homo sapiens
  misc_RNA (1)...(19): siRNA sense strand
cuguggacccugagaaguu

SEQ ID NO: 2529129 - RNA, 19 nt, Homo sapiens
  misc_RNA (1)...(19): siRNA sense strand
aggccuggauaguggaagu

SEQ ID NO: 2529130 - RNA, 19 nt, Homo sapiens
  misc_RNA (1)...(19): siRNA sense strand
cgcagauacuggagcaacu

SEQ ID NO: 2529131 - RNA, 19 nt, Homo sapiens
  misc_RNA (1)...(19): siRNA sense strand
ggaggaaggacccaggcau

SEQ ID NO: 2529132 - RNA, 19 nt, Homo sapiens
  misc_RNA (1)...(19): siRNA sense strand
gcaacuacguggaccugga

SEQ ID NO: 2529133 - RNA, 19 nt, Homo sapiens
  misc_RNA (1)...(19): siRNA sense strand
gugaaggagaugagagaaa

SEQ ID NO: 2529134 - RNA, 19 nt, Homo sapiens
  misc_RNA (1)...(19): siRNA sense strand
ggaucaacgauguggaaga

SEQ ID NO: 2529135 - RNA, 19 nt, Homo sapiens
  misc_RNA (1)...(19): siRNA sense strand
ggugagaaaaugagcauaa

SEQ ID NO: 2529136 - RNA, 19 nt, Homo sapiens
  misc_RNA (1)...(19): siRNA sense strand
ccgugaaggagaugagaga

SEQ ID NO: 2529137 - RNA, 19 nt, Homo sapiens
  misc_RNA (1)...(19): siRNA sense strand
aggagaugagagaaagaua

SEQ ID NO: 2529138 - RNA, 19 nt, Homo sapiens
  misc_RNA (1)...(19): siRNA sense strand
ccaugaagcugauacgaca

SEQ ID NO: 2529139 - RNA, 19 nt, Homo sapiens
  misc_RNA (1)...(19): siRNA sense strand
cgccaaaaucgucgagaua

SEQ ID NO: 2529140 - RNA, 19 nt, Homo sapiens
  misc_RNA (1)...(19): siRNA sense strand
gugacaucaugaagagaca

SEQ ID NO: 2529141 - RNA, 19 nt, Homo sapiens
  misc_RNA (1)...(19): siRNA sense strand
ccuacuaucaagaagcuaa

SEQ ID NO: 2529142 - RNA, 19 nt, Homo sapiens
  misc_RNA (1)...(19): siRNA sense strand
gaaggagaugagagaaaga

SEQ ID NO: 2529143 - RNA, 19 nt, Homo sapiens
  misc_RNA (1)...(19): siRNA sense strand
gggcaaaugucgaagugcu

SEQ ID NO: 2529144 - RNA, 19 nt, Homo sapiens
  misc_RNA (1)...(19): siRNA sense strand
uggaugaggagcugaaaga

SEQ ID NO: 2529145 - RNA, 19 nt, Homo sapiens
  misc_RNA (1)...(19): siRNA sense strand
augucgaagugcuggaauu

SEQ ID NO: 2529146 - RNA, 19 nt, Homo sapiens
  misc_RNA (1)...(19): siRNA sense strand
gcaucaucucagaaggcaa

SEQ ID NO: 2529147 - RNA, 19 nt, Homo sapiens
  misc_RNA (1)...(19): siRNA sense strand
uggaauggguguugcucuu

SEQ ID NO: 2529148 - RNA, 19 nt, Homo sapiens
  misc_RNA (1)...(19): siRNA sense strand
aaacauggucccucagcaa

SEQ ID NO: 2529149 - RNA, 19 nt, Homo sapiens
  misc_RNA (1)...(19): siRNA sense strand
aguaaaaggaggagaccga

SEQ ID NO: 2529150 - RNA, 19 nt, Homo sapiens
  misc_RNA (1)...(19): siRNA sense strand
aggagaugccucugaguca

SEQ ID NO: 2529151 - RNA, 19 nt, Homo sapiens
  misc_RNA (1)...(19): siRNA sense strand
aguucaaagaucauggaau

SEQ ID NO: 2529152 - RNA, 19 nt, Homo sapiens
  misc_RNA (1)...(19): siRNA sense strand
accuaugagcagaggaaaa

SEQ ID NO: 2529153 - RNA, 19 nt, Homo sapiens
  misc_RNA (1)...(19): siRNA sense strand
guccagaauugcaggucuu

SEQ ID NO: 2529154 - RNA, 19 nt, Homo sapiens
  misc_RNA (1)...(19): siRNA sense strand
gggacauggaugaacugaa

SEQ ID NO: 2529155 - RNA, 19 nt, Homo sapiens
  misc_RNA (1)...(19): siRNA sense strand
ccuccgagcagcuggauga

SEQ ID NO: 2529156 - RNA, 19 nt, Homo sapiens
  misc_RNA (1)...(19): siRNA sense strand
ccgagcagcuggaugacau

SEQ ID NO: 2529157 - RNA, 19 nt, Homo sapiens
  misc_RNA (1)...(19): siRNA sense strand
ccccauugcugcagaaauu

SEQ ID NO: 2529158 - RNA, 19 nt, Homo sapiens
  misc_RNA (1)...(19): siRNA sense strand
cuacuaucaagaagcuaaa

SEQ ID NO: 2529159 - RNA, 19 nt, Homo sapiens
  misc_RNA (1)...(19): siRNA sense strand
guggauaacuccucgcuca

SEQ ID NO: 2529160 - RNA, 19 nt, Homo sapiens
  misc_RNA (1)...(19): siRNA sense strand
ugaagagacagcccagaaa

SEQ ID NO: 2529161 - RNA, 19 nt, Homo sapiens
  misc_RNA (1)...(19): siRNA sense strand
augagcaggcugagaguga

SEQ ID NO: 2529162 - RNA, 19 nt, Homo sapiens
  misc_RNA (1)...(19): siRNA sense strand
gagcaggcugagagugaca

SEQ ID NO: 2529163 - RNA, 19 nt, Homo sapiens
  misc_RNA (1)...(19): siRNA sense strand
ccauccaaucacagcuaaa

SEQ ID NO: 2529164 - RNA, 19 nt, Homo sapiens
  misc_RNA (1)...(19): siRNA sense strand
acaugauucuucuggauga

SEQ ID NO: 2529165 - RNA, 19 nt, Homo sapiens
  misc_RNA (1)...(19): siRNA sense strand
ggguuggacgugauaagua

SEQ ID NO: 2529166 - RNA, 19 nt, Homo sapiens
  misc_RNA (1)...(19): siRNA sense strand
acauggaugaacugaagaa

SEQ ID NO: 2529167 - RNA, 19 nt, Homo sapiens
  misc_RNA (1)...(19): siRNA sense strand
cgaaauggugagaaaauga

SEQ ID NO: 2529168 - RNA, 19 nt, Homo sapiens
  misc_RNA (1)...(19): siRNA sense strand
cgguaucaucguagccaau

SEQ ID NO: 2529169 - RNA, 19 nt, Homo sapiens
  misc_RNA (1)...(19): siRNA sense strand
acaugugguuugacaauca

SEQ ID NO: 2529170 - RNA, 19 nt, Homo sapiens
  misc_RNA (1)...(19): siRNA sense strand
acgauguggaagacagcua

SEQ ID NO: 2529171 - RNA, 19 nt, Homo sapiens
  misc_RNA (1)...(19): siRNA sense strand
gugaaugagcggcugauca

SEQ ID NO: 2529172 - RNA, 19 nt, Homo sapiens
  misc_RNA (1)...(19): siRNA sense strand
cugagauccuggcgcgaga

SEQ ID NO: 2529173 - RNA, 19 nt, Homo sapiens
  misc_RNA (1)...(19): siRNA sense strand
agaggaaaaucguggaguu

SEQ ID NO: 2529174 - RNA, 19 nt, Homo sapiens
  misc_RNA (1)...(19): siRNA sense strand
ugucgaagugcuggaauua

SEQ ID NO: 2529175 - RNA, 19 nt, Homo sapiens
  misc_RNA (1)...(19): siRNA sense strand
gugcuggaauuaaggucau

SEQ ID NO: 2529176 - RNA, 19 nt, Homo sapiens
  misc_RNA (1)...(19): siRNA sense strand
uggaugacauuuugaagua

SEQ ID NO: 2529177 - RNA, 19 nt, Homo sapiens
  misc_RNA (1)...(19): siRNA sense strand
gggaugaagaacaagaucu

SEQ ID NO: 2529178 - RNA, 19 nt, Homo sapiens
  misc_RNA (1)...(19): siRNA sense strand
cgacagagaaucagagugg

SEQ ID NO: 2529179 - RNA, 19 nt, Homo sapiens
  misc_RNA (1)...(19): siRNA sense strand
aguacacggcagugaucua

SEQ ID NO: 2529180 - RNA, 19 nt, Homo sapiens
  misc_RNA (1)...(19): siRNA sense strand
aagacagggacauggauga

SEQ ID NO: 2529181 - RNA, 19 nt, Homo sapiens
  misc_RNA (1)...(19): siRNA sense strand
ugggaugaccgcuggauca

SEQ ID NO: 2529182 - RNA, 19 nt, Homo sapiens
  misc_RNA (1)...(19): siRNA sense strand
ugugacuggaguagaggaa

SEQ ID NO: 2529183 - RNA, 19 nt, Homo sapiens
  misc_RNA (1)...(19): siRNA sense strand
gccuaugggcagauuggaa

SEQ ID NO: 2529184 - RNA, 19 nt, Homo sapiens
  misc_RNA (1)...(19): siRNA sense strand
acaccuggcuugaggcugu

SEQ ID NO: 2529185 - RNA, 19 nt, Homo sapiens
  misc_RNA (1)...(19): siRNA sense strand
gagaaagauacgccaaaau

SEQ ID NO: 2529186 - RNA, 19 nt, Homo sapiens
  misc_RNA (1)...(19): siRNA sense strand
cagccuucuucgucaguau

SEQ ID NO: 2529187 - RNA, 19 nt, Homo sapiens
  misc_RNA (1)...(19): siRNA sense strand
aaucauaacugguugcuuc

SEQ ID NO: 2529188 - RNA, 19 nt, Homo sapiens
  misc_RNA (1)...(19): siRNA sense strand
cguaaauauggaacagacu

SEQ ID NO: 2529189 - RNA, 19 nt, Homo sapiens
  misc_RNA (1)...(19): siRNA sense strand
gcaaauggcugcaaggugg

SEQ ID NO: 2529190 - RNA, 19 nt, Homo sapiens
  misc_RNA (1)...(19): siRNA sense strand
ugagagaaagauacgccaa

SEQ ID NO: 2529191 - RNA, 19 nt, Homo sapiens
  misc_RNA (1)...(19): siRNA sense strand
cuguaagaccaggaggaau

SEQ ID NO: 2529192 - RNA, 19 nt, Homo sapiens
  misc_RNA (1)...(19): siRNA sense strand
aggagaugacacagggaua

SEQ ID NO: 2529193 - RNA, 19 nt, Homo sapiens
  misc_RNA (1)...(19): siRNA sense strand
ggucagaagacaaaagcaa

SEQ ID NO: 2529194 - RNA, 19 nt, Homo sapiens
  misc_RNA (1)...(19): siRNA sense strand
ugauagucuuccagugcaa

SEQ ID NO: 2529195 - RNA, 19 nt, Homo sapiens
  misc_RNA (1)...(19): siRNA sense strand
ccuccaagcaauaucacaa

SEQ ID NO: 2529196 - RNA, 19 nt, Homo sapiens
  misc_RNA (1)...(19): siRNA sense strand
cuuaaaagaucaagaccga

SEQ ID NO: 2529197 - RNA, 19 nt, Homo sapiens
  misc_RNA (1)...(19): siRNA sense strand
cuaucgacgcugugccuaa

SEQ ID NO: 2529198 - RNA, 19 nt, Homo sapiens
  misc_RNA (1)...(19): siRNA sense strand
caaucugaggagaaggaau

SEQ ID NO: 2529199 - RNA, 19 nt, Homo sapiens
  misc_RNA (1)...(19): siRNA sense strand
ggcgauggucagaagacaa

SEQ ID NO: 2529200 - RNA, 19 nt, Homo sapiens
  misc_RNA (1)...(19): siRNA sense strand
ccagcaaauaauagaucau

SEQ ID NO: 2529201 - RNA, 19 nt, Homo sapiens
  misc_RNA (1)...(19): siRNA sense strand
ccucuauauacuuagcuua

SEQ ID NO: 2529202 - RNA, 19 nt, Homo sapiens
  misc_RNA (1)...(19): siRNA sense strand
uaguaaaaggggaaccaaa

SEQ ID NO: 2529203 - RNA, 19 nt, Homo sapiens
  misc_RNA (1)...(19): siRNA sense strand
ccguguagcugcaccggau

SEQ ID NO: 2529204 - RNA, 19 nt, Homo sapiens
  misc_RNA (1)...(19): siRNA sense strand
aauaaacacaacagagcca

SEQ ID NO: 2529205 - RNA, 19 nt, Homo sapiens
  misc_RNA (1)...(19): siRNA sense strand
ccgaggaagaaaauggaaa

SEQ ID NO: 2529206 - RNA, 19 nt, Homo sapiens
  misc_RNA (1)...(19): siRNA sense strand
gguuccaggcccagaucaa

SEQ ID NO: 2529207 - RNA, 19 nt, Homo sapiens
  misc_RNA (1)...(19): siRNA sense strand
caguaugguuccaggccca

SEQ ID NO: 2529208 - RNA, 19 nt, Homo sapiens
  misc_RNA (1)...(19): siRNA sense strand
cgaggaagaaaauggaaau

SEQ ID NO: 2529209 - RNA, 19 nt, Homo sapiens
  misc_RNA (1)...(19): siRNA sense strand
uaacggugcuucugggcau

SEQ ID NO: 2529210 - RNA, 19 nt, Homo sapiens
  misc_RNA (1)...(19): siRNA sense strand
caacaagguuucugcccaa

SEQ ID NO: 2529211 - RNA, 19 nt, Homo sapiens
  misc_RNA (1)...(19): siRNA sense strand
cuucagaaauagagcaacu

SEQ ID NO: 2529212 - RNA, 19 nt, Homo sapiens
  misc_RNA (1)...(19): siRNA sense strand
cggaaaauagccaggacua

SEQ ID NO: 2529213 - RNA, 19 nt, Homo sapiens
  misc_RNA (1)...(19): siRNA sense strand
aaagaaagguauugaggcu

SEQ ID NO: 2529214 - RNA, 19 nt, Homo sapiens
  misc_RNA (1)...(19): siRNA sense strand
ccauagaaagucagagugu

SEQ ID NO: 2529215 - RNA, 19 nt, Homo sapiens
  misc_RNA (1)...(19): siRNA sense strand
gcgaaugggcagcgcacau

SEQ ID NO: 2529216 - RNA, 19 nt, Homo sapiens
  misc_RNA (1)...(19): siRNA sense strand
caacugaagaaaagaagaa

SEQ ID NO: 2529217 - RNA, 19 nt, Homo sapiens
  misc_RNA (1)...(19): siRNA sense strand
gcccaagagcagagaaucu

SEQ ID NO: 2529218 - RNA, 19 nt, Homo sapiens
  misc_RNA (1)...(19): siRNA sense strand
agaaugaucaagagcugaa

SEQ ID NO: 2529219 - RNA, 19 nt, Homo sapiens
  misc_RNA (1)...(19): siRNA sense strand
cagugguggacuucagaaa

SEQ ID NO: 2529220 - RNA, 19 nt, Homo sapiens
  misc_RNA (1)...(19): siRNA sense strand
guacaaugaagcugagaac

SEQ ID NO: 2529221 - RNA, 19 nt, Homo sapiens
  misc_RNA (1)...(19): siRNA sense strand
gcagaaugaucaagagcug

SEQ ID NO: 2529222 - RNA, 19 nt, Homo sapiens
  misc_RNA (1)...(19): siRNA sense strand
gaaccuaaagagaagggau

SEQ ID NO: 2529223 - RNA, 19 nt, Homo sapiens
  misc_RNA (1)...(19): siRNA sense strand
auaagaggguggaugacau

SEQ ID NO: 2529224 - RNA, 19 nt, Homo sapiens
  misc_RNA (1)...(19): siRNA sense strand
ccaauaaagaugccguaca

SEQ ID NO: 2529225 - RNA, 19 nt, Homo sapiens
  misc_RNA (1)...(19): siRNA sense strand
acuugaaccaacugaagaa

SEQ ID NO: 2529226 - RNA, 19 nt, Homo sapiens
  misc_RNA (1)...(19): siRNA sense strand
ccauaacaaagaaccuaaa

SEQ ID NO: 2529227 - RNA, 19 nt, Homo sapiens
  misc_RNA (1)...(19): siRNA sense strand
ucagaagaauguuucggaa

SEQ ID NO: 2529228 - RNA, 19 nt, Homo sapiens
  misc_RNA (1)...(19): siRNA sense strand
agaaagguauugaggcucu

SEQ ID NO: 2529229 - RNA, 19 nt, Homo sapiens
  misc_RNA (1)...(19): siRNA sense strand
ccacaagccuacagccacu

SEQ ID NO: 2529230 - RNA, 19 nt, Homo sapiens
  misc_RNA (1)...(19): siRNA sense strand
gcaaaguggccaggagcuu

SEQ ID NO: 2529231 - RNA, 19 nt, Homo sapiens
  misc_RNA (1)...(19): siRNA sense strand
accugaucacugagggaaa

SEQ ID NO: 2529232 - RNA, 19 nt, Homo sapiens
  misc_RNA (1)...(19): siRNA sense strand
ugucaacaccauagaaagu

SEQ ID NO: 2529233 - RNA, 19 nt, Homo sapiens
  misc_RNA (1)...(19): siRNA sense strand
ccaauuacacaguggugga

SEQ ID NO: 2529234 - RNA, 19 nt, Homo sapiens
  misc_RNA (1)...(19): siRNA sense strand
gcugcauccacaugacaaa

SEQ ID NO: 2529235 - RNA, 19 nt, Homo sapiens
  misc_RNA (1)...(19): siRNA sense strand
cuaugaaggccuagacauc

SEQ ID NO: 2529236 - RNA, 19 nt, Homo sapiens
  misc_RNA (1)...(19): siRNA sense strand
ggaagaagguggugguccc

SEQ ID NO: 2529237 - RNA, 19 nt, Homo sapiens
  misc_RNA (1)...(19): siRNA sense strand
uuggaggaacuaagagauu

SEQ ID NO: 2529238 - RNA, 19 nt, Homo sapiens
  misc_RNA (1)...(19): siRNA sense strand
cugaagaaaagaagaagau

SEQ ID NO: 2529239 - RNA, 19 nt, Homo sapiens
  misc_RNA (1)...(19): siRNA sense strand
aacaaagaaccuaaagaga

SEQ ID NO: 2529240 - RNA, 19 nt, Homo sapiens
  misc_RNA (1)...(19): siRNA sense strand
ggaggaacuaagagauuuu

SEQ ID NO: 2529241 - RNA, 19 nt, Homo sapiens
  misc_RNA (1)...(19): siRNA sense strand
cguacaaugaagcugagaa

SEQ ID NO: 2529242 - RNA, 19 nt, Homo sapiens
  misc_RNA (1)...(19): siRNA sense strand
ggaaaaugcacacuggaga

SEQ ID NO: 2529243 - RNA, 19 nt, Homo sapiens
  misc_RNA (1)...(19): siRNA sense strand
ugagaaagugauugaccga

SEQ ID NO: 2529244 - RNA, 19 nt, Homo sapiens
  misc_RNA (1)...(19): siRNA sense strand
cucugaaacaaguaacuaa

SEQ ID NO: 2529245 - RNA, 19 nt, Homo sapiens
  misc_RNA (1)...(19): siRNA sense strand
gacuucagaaauagagcaa

SEQ ID NO: 2529246 - RNA, 19 nt, Homo sapiens
  misc_RNA (1)...(19): siRNA sense strand
ugcucugauugaagauaua

SEQ ID NO: 2529247 - RNA, 19 nt, Homo sapiens
  misc_RNA (1)...(19): siRNA sense strand
ggaaucucucauagugaau

SEQ ID NO: 2529248 - RNA, 19 nt, Homo sapiens
  misc_RNA (1)...(19): siRNA sense strand
cugcugggcucuuggagga

SEQ ID NO: 2529249 - RNA, 19 nt, Homo sapiens
  misc_RNA (1)...(19): siRNA sense strand
agguauugaggcucugaaa

SEQ ID NO: 2529250 - RNA, 19 nt, Homo sapiens
  misc_RNA (1)...(19): siRNA sense strand
guguaaggacugcgggaaa

SEQ ID NO: 2529251 - RNA, 19 nt, Homo sapiens
  misc_RNA (1)...(19): siRNA sense strand
auguaaggacugugggaaa

SEQ ID NO: 2529252 - RNA, 19 nt, Homo sapiens
  misc_RNA (1)...(19): siRNA sense strand
cggagaagaaacauggaaa

SEQ ID NO: 2529253 - RNA, 19 nt, Homo sapiens
  misc_RNA (1)...(19): siRNA sense strand
ggucauguuucuagggacu

SEQ ID NO: 2529254 - RNA, 19 nt, Homo sapiens
  misc_RNA (1)...(19): siRNA sense strand
auguaaagaaugcggaaaa

SEQ ID NO: 2529255 - RNA, 19 nt, Homo sapiens
  misc_RNA (1)...(19): siRNA sense strand
auggaagccgugugggaaa

SEQ ID NO: 2529256 - RNA, 19 nt, Homo sapiens
  misc_RNA (1)...(19): siRNA sense strand
gaauguaaagaaugcggaa

SEQ ID NO: 2529257 - RNA, 19 nt, Homo sapiens
  misc_RNA (1)...(19): siRNA sense strand
agaucuugguucagagcau

SEQ ID NO: 2529258 - RNA, 19 nt, Homo sapiens
  misc_RNA (1)...(19): siRNA sense strand
gggaagucacaacggagaa

SEQ ID NO: 2529259 - RNA, 19 nt, Homo sapiens
  misc_RNA (1)...(19): siRNA sense strand
ccuuacuggucgcgugcaa

SEQ ID NO: 2529260 - RNA, 19 nt, Homo sapiens
  misc_RNA (1)...(19): siRNA sense strand
ggggagaagcccugugaau

SEQ ID NO: 2529261 - RNA, 19 nt, Homo sapiens
  misc_RNA (1)...(19): siRNA sense strand
ggagaagcccugugaauug

SEQ ID NO: 2529262 - RNA, 19 nt, Homo sapiens
  misc_RNA (1)...(19): siRNA sense strand
gggagaagcccugugaauu

SEQ ID NO: 2529263 - RNA, 19 nt, Homo sapiens
  misc_RNA (1)...(19): siRNA sense strand
agagaugugaugcuggaaa

SEQ ID NO: 2529264 - RNA, 19 nt, Homo sapiens
  misc_RNA (1)...(19): siRNA sense strand
gcaucaaaugagacacaga

SEQ ID NO: 2529265 - RNA, 19 nt, Homo sapiens
  misc_RNA (1)...(19): siRNA sense strand
aaugagacacagacggcaa

SEQ ID NO: 2529266 - RNA, 19 nt, Homo sapiens
  misc_RNA (1)...(19): siRNA sense strand
aguagaauggcgacuuaaa

SEQ ID NO: 2529267 - RNA, 19 nt, Homo sapiens
  misc_RNA (1)...(19): siRNA sense strand
guucacaauuggagagcag

SEQ ID NO: 2529268 - RNA, 19 nt, Homo sapiens
  misc_RNA (1)...(19): siRNA sense strand
gggacagaucucuugacua

SEQ ID NO: 2529269 - RNA, 19 nt, Homo sapiens
  misc_RNA (1)...(19): siRNA sense strand
acuuaaaaccaaagggcca

SEQ ID NO: 2529270 - RNA, 19 nt, Homo sapiens
  misc_RNA (1)...(19): siRNA sense strand
gggaaugugggaaggccuu

SEQ ID NO: 2529271 - RNA, 19 nt, Homo sapiens
  misc_RNA (1)...(19): siRNA sense strand
auuggaagaauguggaaaa

SEQ ID NO: 2529272 - RNA, 19 nt, Homo sapiens
  misc_RNA (1)...(19): siRNA sense strand
ccuuaauaaucauguucga

SEQ ID NO: 2529273 - RNA, 19 nt, Homo sapiens
  misc_RNA (1)...(19): siRNA sense strand
uguaagaauucaugcugca

SEQ ID NO: 2529274 - RNA, 19 nt, Homo sapiens
  misc_RNA (1)...(19): siRNA sense strand
cgggaagucacaacggaga

SEQ ID NO: 2529275 - RNA, 19 nt, Homo sapiens
  misc_RNA (1)...(19): siRNA sense strand
guguugggucaguguggaa

SEQ ID NO: 2529276 - RNA, 19 nt, Homo sapiens
  misc_RNA (1)...(19): siRNA sense strand
aagucacaacggagaagaa

SEQ ID NO: 2529277 - RNA, 19 nt, Homo sapiens
  misc_RNA (1)...(19): siRNA sense strand
cccugugaauguaaagaau

SEQ ID NO: 2529278 - RNA, 19 nt, Homo sapiens
  misc_RNA (1)...(19): siRNA sense strand
acugaaugagcauggaaaa

SEQ ID NO: 2529279 - RNA, 19 nt, Homo sapiens
  misc_RNA (1)...(19): siRNA sense strand
ggaaauuacguaagagaga

SEQ ID NO: 2529280 - RNA, 19 nt, Homo sapiens
  misc_RNA (1)...(19): siRNA sense strand
augcaauggaugugggaaa

SEQ ID NO: 2529281 - RNA, 19 nt, Homo sapiens
  misc_RNA (1)...(19): siRNA sense strand
auguaaugaaugugggaaa

SEQ ID NO: 2529282 - RNA, 19 nt, Homo sapiens
  misc_RNA (1)...(19): siRNA sense strand
aguuggagcuagaggaaga

SEQ ID NO: 2529283 - RNA, 19 nt, Homo sapiens
  misc_RNA (1)...(19): siRNA sense strand
aagaaaaccacaagagaua

SEQ ID NO: 2529284 - RNA, 19 nt, Homo sapiens
  misc_RNA (1)...(19): siRNA sense strand
acgugaugcuggagaacua

SEQ ID NO: 2529285 - RNA, 19 nt, Homo sapiens
  misc_RNA (1)...(19): siRNA sense strand
acuucauaccggagagaaa

SEQ ID NO: 2529286 - RNA, 19 nt, Homo sapiens
  misc_RNA (1)...(19): siRNA sense strand
uauucauacugcagagaaa

SEQ ID NO: 2529287 - RNA, 19 nt, Homo sapiens
  misc_RNA (1)...(19): siRNA sense strand
aggaagaaugggugauaga

SEQ ID NO: 2529288 - RNA, 19 nt, Homo sapiens
  misc_RNA (1)...(19): siRNA sense strand
agaaaugaaugauggcuca

SEQ ID NO: 2529289 - RNA, 19 nt, Homo sapiens
  misc_RNA (1)...(19): siRNA sense strand
agaugauaauggagagacu

SEQ ID NO: 2529290 - RNA, 19 nt, Homo sapiens
  misc_RNA (1)...(19): siRNA sense strand
aauccauacucgggagaaa

SEQ ID NO: 2529291 - RNA, 19 nt, Homo sapiens
  misc_RNA (1)...(19): siRNA sense strand
auucugacacacagggaaa

SEQ ID NO: 2529292 - RNA, 19 nt, Homo sapiens
  misc_RNA (1)...(19): siRNA sense strand
aggaggaagaaaugaauga

SEQ ID NO: 2529293 - RNA, 19 nt, Homo sapiens
  misc_RNA (1)...(19): siRNA sense strand
cuggagaacuacaggaauc

SEQ ID NO: 2529294 - RNA, 19 nt, Homo sapiens
  misc_RNA (1)...(19): siRNA sense strand
aacucauacaggagagaaa

SEQ ID NO: 2529295 - RNA, 19 nt, Homo sapiens
  misc_RNA (1)...(19): siRNA sense strand
ugaaagaacucauacagga

SEQ ID NO: 2529296 - RNA, 19 nt, Homo sapiens
  misc_RNA (1)...(19): siRNA sense strand
acucaaaccuuaugcagca

SEQ ID NO: 2529297 - RNA, 19 nt, Homo sapiens
  misc_RNA (1)...(19): siRNA sense strand
agggaaauuacguaagaga

SEQ ID NO: 2529298 - RNA, 19 nt, Homo sapiens
  misc_RNA (1)...(19): siRNA sense strand
gugugaugaauguggaaaa

SEQ ID NO: 2529299 - RNA, 19 nt, Homo sapiens
  misc_RNA (1)...(19): siRNA sense strand
ccuuaaucaacacaggaaa

SEQ ID NO: 2529300 - RNA, 19 nt, Homo sapiens
  misc_RNA (1)...(19): siRNA sense strand
uuuguaagccagagguaau

SEQ ID NO: 2529301 - RNA, 19 nt, Homo sapiens
  misc_RNA (1)...(19): siRNA sense strand
agaaugggugauagaaaga

SEQ ID NO: 2529302 - RNA, 19 nt, Homo sapiens
  misc_RNA (1)...(19): siRNA sense strand
uggagagacucgcaggaga

SEQ ID NO: 2529303 - RNA, 19 nt, Homo sapiens
  misc_RNA (1)...(19): siRNA sense strand
cuuaaucaacacaggaaaa

SEQ ID NO: 2529304 - RNA, 19 nt, Homo sapiens
  misc_RNA (1)...(19): siRNA sense strand
auauagugaguguggaaaa

SEQ ID NO: 2529305 - RNA, 19 nt, Homo sapiens
  misc_RNA (1)...(19): siRNA sense strand
aggauguggccguggacuu

SEQ ID NO: 2529306 - RNA, 19 nt, Homo sapiens
  misc_RNA (1)...(19): siRNA sense strand
gggaaacagcaucaaacau

SEQ ID NO: 2529307 - RNA, 19 nt, Homo sapiens
  misc_RNA (1)...(19): siRNA sense strand
cuaggaggacucugggauu

SEQ ID NO: 2529308 - RNA, 19 nt, Homo sapiens
  misc_RNA (1)...(19): siRNA sense strand
uaucagggaaauuacguaa

SEQ ID NO: 2529309 - RNA, 19 nt, Homo sapiens
  misc_RNA (1)...(19): siRNA sense strand
caugagaugauaauggaga

SEQ ID NO: 2529310 - RNA, 19 nt, Homo sapiens
  misc_RNA (1)...(19): siRNA sense strand
acacagggaaacagcauca

SEQ ID NO: 2529311 - RNA, 19 nt, Homo sapiens
  misc_RNA (1)...(19): siRNA sense strand
aaaucaaacccaugagaug

SEQ ID NO: 2529312 - RNA, 19 nt, Homo sapiens
  misc_RNA (1)...(19): siRNA sense strand
caagaaaaccacaagagau

SEQ ID NO: 2529313 - RNA, 19 nt, Homo sapiens
  misc_RNA (1)...(19): siRNA sense strand
acaagagauauuuaggaca

SEQ ID NO: 2529314 - RNA, 19 nt, Homo sapiens
  misc_RNA (1)...(19): siRNA sense strand
gagcaaacuguucgccaca

SEQ ID NO: 2529315 - RNA, 19 nt, Homo sapiens
  misc_RNA (1)...(19): siRNA sense strand
ggacaucauuucagaauuu

SEQ ID NO: 2529316 - RNA, 19 nt, Homo sapiens
  misc_RNA (1)...(19): siRNA sense strand
acgacgacgaggaggaaua

SEQ ID NO: 2529317 - RNA, 19 nt, Homo sapiens
  misc_RNA (1)...(19): siRNA sense strand
acgacgaggcggaggacaa

SEQ ID NO: 2529318 - RNA, 19 nt, Homo sapiens
  misc_RNA (1)...(19): siRNA sense strand
ggacauggguuucagcaau

SEQ ID NO: 2529319 - RNA, 19 nt, Homo sapiens
  misc_RNA (1)...(19): siRNA sense strand
gaagaaaaguccccaguua

SEQ ID NO: 2529320 - RNA, 19 nt, Homo sapiens
  misc_RNA (1)...(19): siRNA sense strand
gaggaguuaucuuguguua

SEQ ID NO: 2529321 - RNA, 19 nt, Homo sapiens
  misc_RNA (1)...(19): siRNA sense strand
acgaugaugaggaggacaa

SEQ ID NO: 2529322 - RNA, 19 nt, Homo sapiens
  misc_RNA (1)...(19): siRNA sense strand
aagauuaagcagagacaca

SEQ ID NO: 2529323 - RNA, 19 nt, Homo sapiens
  misc_RNA (1)...(19): siRNA sense strand
aggacaaugaugaggauga

SEQ ID NO: 2529324 - RNA, 19 nt, Homo sapiens
  misc_RNA (1)...(19): siRNA sense strand
aggacaaugaugaggauga

SEQ ID NO: 2529325 - RNA, 19 nt, Homo sapiens
  misc_RNA (1)...(19): siRNA sense strand
gggcaagucuggaugagga

SEQ ID NO: 2529326 - RNA, 19 nt, Homo sapiens
  misc_RNA (1)...(19): siRNA sense strand
cagagaaggacgacagcuu

SEQ ID NO: 2529327 - RNA, 19 nt, Homo sapiens
  misc_RNA (1)...(19): siRNA sense strand
ggaguuaucuuguguuaga

SEQ ID NO: 2529328 - RNA, 19 nt, Homo sapiens
  misc_RNA (1)...(19): siRNA sense strand
gaaccagagugcaggagga

SEQ ID NO: 2529329 - RNA, 19 nt, Homo sapiens
  misc_RNA (1)...(19): siRNA sense strand
cuauuaugcaaaugaggaa

SEQ ID NO: 2529330 - RNA, 19 nt, Homo sapiens
  misc_RNA (1)...(19): siRNA sense strand
gggcagacacagaucccua

SEQ ID NO: 2529331 - RNA, 19 nt, Homo sapiens
  misc_RNA (1)...(19): siRNA sense strand
ccuuggagcuagagagggu

SEQ ID NO: 2529332 - RNA, 19 nt, Homo sapiens
  misc_RNA (1)...(19): siRNA sense strand
ugggcuuggagaagggaaa

SEQ ID NO: 2529333 - RNA, 19 nt, Homo sapiens
  misc_RNA (1)...(19): siRNA sense strand
ggagaacagagaaggacga

SEQ ID NO: 2529334 - RNA, 19 nt, Homo sapiens
  misc_RNA (1)...(19): siRNA sense strand
augacaaugaugaggauga

SEQ ID NO: 2529335 - RNA, 19 nt, Homo sapiens
  misc_RNA (1)...(19): siRNA sense strand
gaaacugccuauuaugcaa

SEQ ID NO: 2529336 - RNA, 19 nt, Homo sapiens
  misc_RNA (1)...(19): siRNA sense strand
ccaagauuaagcagagaca

SEQ ID NO: 2529337 - RNA, 19 nt, Homo sapiens
  misc_RNA (1)...(19): siRNA sense strand
cgguacagcaagucaccaa

SEQ ID NO: 2529338 - RNA, 19 nt, Homo sapiens
  misc_RNA (1)...(19): siRNA sense strand
acccauugcucaaggacau

SEQ ID NO: 2529339 - RNA, 19 nt, Homo sapiens
  misc_RNA (1)...(19): siRNA sense strand
ccagagugcaggaggaauc

SEQ ID NO: 2529340 - RNA, 19 nt, Homo sapiens
  misc_RNA (1)...(19): siRNA sense strand
cagcaggacauuaacgaca

SEQ ID NO: 2529341 - RNA, 19 nt, Homo sapiens
  misc_RNA (1)...(19): siRNA sense strand
augaugaggaugaggacga

SEQ ID NO: 2529342 - RNA, 19 nt, Homo sapiens
  misc_RNA (1)...(19): siRNA sense strand
cagcaaugcccauauuaau

SEQ ID NO: 2529343 - RNA, 19 nt, Homo sapiens
  misc_RNA (1)...(19): siRNA sense strand
ccaauaacuaugugcagga

SEQ ID NO: 2529344 - RNA, 19 nt, Homo sapiens
  misc_RNA (1)...(19): siRNA sense strand
uuguaaagagugaguacuu

SEQ ID NO: 2529345 - RNA, 19 nt, Homo sapiens
  misc_RNA (1)...(19): siRNA sense strand
gcauacuucaggaugggaa

SEQ ID NO: 2529346 - RNA, 19 nt, Homo sapiens
  misc_RNA (1)...(19): siRNA sense strand
gaacagagaaggacgacag

SEQ ID NO: 2529347 - RNA, 19 nt, Homo sapiens
  misc_RNA (1)...(19): siRNA sense strand
augaugaggaugacgauga

SEQ ID NO: 2529348 - RNA, 19 nt, Homo sapiens
  misc_RNA (1)...(19): siRNA sense strand
aggaugaggacgacgacga

SEQ ID NO: 2529349 - RNA, 19 nt, Homo sapiens
  misc_RNA (1)...(19): siRNA sense strand
caaugaugaggaugacaau

SEQ ID NO: 2529350 - RNA, 19 nt, Homo sapiens
  misc_RNA (1)...(19): siRNA sense strand
aggacgacgacgaggagga

SEQ ID NO: 2529351 - RNA, 19 nt, Homo sapiens
  misc_RNA (1)...(19): siRNA sense strand
caggaugggaauuaagcau

SEQ ID NO: 2529352 - RNA, 19 nt, Homo sapiens
  misc_RNA (1)...(19): siRNA sense strand
agacaauagugaaggcaaa

SEQ ID NO: 2529353 - RNA, 19 nt, Homo sapiens
  misc_RNA (1)...(19): siRNA sense strand
gggagaaagcccacagaaa

SEQ ID NO: 2529354 - RNA, 19 nt, Homo sapiens
  misc_RNA (1)...(19): siRNA sense strand
ggaaauggagagagaguau

SEQ ID NO: 2529355 - RNA, 19 nt, Homo sapiens
  misc_RNA (1)...(19): siRNA sense strand
acgaaagaguuaugagaau

SEQ ID NO: 2529356 - RNA, 19 nt, Homo sapiens
  misc_RNA (1)...(19): siRNA sense strand
gcaagaugucagagagcaa

SEQ ID NO: 2529357 - RNA, 19 nt, Homo sapiens
  misc_RNA (1)...(19): siRNA sense strand
gggcaaaggaaaagaaauu

SEQ ID NO: 2529358 - RNA, 19 nt, Homo sapiens
  misc_RNA (1)...(19): siRNA sense strand
ucaaacaagcaaugagaaa

SEQ ID NO: 2529359 - RNA, 19 nt, Homo sapiens
  misc_RNA (1)...(19): siRNA sense strand
cgauaguauugguaacaaa

SEQ ID NO: 2529360 - RNA, 19 nt, Homo sapiens
  misc_RNA (1)...(19): siRNA sense strand
gcgaaaagcacaugcauaa

SEQ ID NO: 2529361 - RNA, 19 nt, Homo sapiens
  misc_RNA (1)...(19): siRNA sense strand
ccaccggagacgagggaaa

SEQ ID NO: 2529362 - RNA, 19 nt, Homo sapiens
  misc_RNA (1)...(19): siRNA sense strand
gcuagaagacuuagauaau

SEQ ID NO: 2529363 - RNA, 19 nt, Homo sapiens
  misc_RNA (1)...(19): siRNA sense strand
agaccaacaccgagauaaa

SEQ ID NO: 2529364 - RNA, 19 nt, Homo sapiens
  misc_RNA (1)...(19): siRNA sense strand
aggcuaauguggaaguaaa

SEQ ID NO: 2529365 - RNA, 19 nt, Homo sapiens
  misc_RNA (1)...(19): siRNA sense strand
cccaaaagaugaugaaaua

SEQ ID NO: 2529366 - RNA, 19 nt, Homo sapiens
  misc_RNA (1)...(19): siRNA sense strand
cggacaagcaccugaacaa

SEQ ID NO: 2529367 - RNA, 19 nt, Homo sapiens
  misc_RNA (1)...(19): siRNA sense strand
ccaggaaauggcagagaaa

SEQ ID NO: 2529368 - RNA, 19 nt, Homo sapiens
  misc_RNA (1)...(19): siRNA sense strand
gagcaaagaccaagagaac

SEQ ID NO: 2529369 - RNA, 19 nt, Homo sapiens
  misc_RNA (1)...(19): siRNA sense strand
gugugaaguuugugauuau

SEQ ID NO: 2529370 - RNA, 19 nt, Homo sapiens
  misc_RNA (1)...(19): siRNA sense strand
cauccaaaguagaaaguga

SEQ ID NO: 2529371 - RNA, 19 nt, Homo sapiens
  misc_RNA (1)...(19): siRNA sense strand
aaaucaaagaggaggaauu

SEQ ID NO: 2529372 - RNA, 19 nt, Homo sapiens
  misc_RNA (1)...(19): siRNA sense strand
aagaacagauccaggaaau

SEQ ID NO: 2529373 - RNA, 19 nt, Homo sapiens
  misc_RNA (1)...(19): siRNA sense strand
cugaggauguagagaauuu

SEQ ID NO: 2529374 - RNA, 19 nt, Homo sapiens
  misc_RNA (1)...(19): siRNA sense strand
cuuuggaagugaaggcuaa

SEQ ID NO: 2529375 - RNA, 19 nt, Homo sapiens
  misc_RNA (1)...(19): siRNA sense strand
ugaaacaagagcaaaguaa

SEQ ID NO: 2529376 - RNA, 19 nt, Homo sapiens
  misc_RNA (1)...(19): siRNA sense strand
caaagaaggcaaagacaca

SEQ ID NO: 2529377 - RNA, 19 nt, Homo sapiens
  misc_RNA (1)...(19): siRNA sense strand
cuaaagaacccuuggaagu

SEQ ID NO: 2529378 - RNA, 19 nt, Homo sapiens
  misc_RNA (1)...(19): siRNA sense strand
gagcaaaguaacauaguga

SEQ ID NO: 2529379 - RNA, 19 nt, Homo sapiens
  misc_RNA (1)...(19): siRNA sense strand
caaacuagaauguggaaca

SEQ ID NO: 2529380 - RNA, 19 nt, Homo sapiens
  misc_RNA (1)...(19): siRNA sense strand
agaaacaaaggaagacaaa

SEQ ID NO: 2529381 - RNA, 19 nt, Homo sapiens
  misc_RNA (1)...(19): siRNA sense strand
gagcgagaucagcgaguua

SEQ ID NO: 2529382 - RNA, 19 nt, Homo sapiens
  misc_RNA (1)...(19): siRNA sense strand
cagaggaaaugcugccaaa

SEQ ID NO: 2529383 - RNA, 19 nt, Homo sapiens
  misc_RNA (1)...(19): siRNA sense strand
agaaagcacgaaagaguua

SEQ ID NO: 2529384 - RNA, 19 nt, Homo sapiens
  misc_RNA (1)...(19): siRNA sense strand
gagaugaggaugaagaaga

SEQ ID NO: 2529385 - RNA, 19 nt, Homo sapiens
  misc_RNA (1)...(19): siRNA sense strand
auucauaugaccagcgaaa

SEQ ID NO: 2529386 - RNA, 19 nt, Homo sapiens
  misc_RNA (1)...(19): siRNA sense strand
uuaaggaacgacagagaaa

SEQ ID NO: 2529387 - RNA, 19 nt, Homo sapiens
  misc_RNA (1)...(19): siRNA sense strand
aaggaacgacagagaaaua

SEQ ID NO: 2529388 - RNA, 19 nt, Homo sapiens
  misc_RNA (1)...(19): siRNA sense strand
guccaaacccaaacagaaa

SEQ ID NO: 2529389 - RNA, 19 nt, Homo sapiens
  misc_RNA (1)...(19): siRNA sense strand
gggcagagagcgaaacuau

SEQ ID NO: 2529390 - RNA, 19 nt, Homo sapiens
  misc_RNA (1)...(19): siRNA sense strand
acacaaacgcuuacccaaa

SEQ ID NO: 2529391 - RNA, 19 nt, Homo sapiens
  misc_RNA (1)...(19): siRNA sense strand
ggaaacacugaaauggaaa

SEQ ID NO: 2529392 - RNA, 19 nt, Homo sapiens
  misc_RNA (1)...(19): siRNA sense strand
cccaaauaccucagcauua

SEQ ID NO: 2529393 - RNA, 19 nt, Homo sapiens
  misc_RNA (1)...(19): siRNA sense strand
aaggaaagcaggcagguua

SEQ ID NO: 2529394 - RNA, 19 nt, Homo sapiens
  misc_RNA (1)...(19): siRNA sense strand
agaccgagcaacagaacaa

SEQ ID NO: 2529395 - RNA, 19 nt, Homo sapiens
  misc_RNA (1)...(19): siRNA sense strand
ccaaugaacuugaugacga

SEQ ID NO: 2529396 - RNA, 19 nt, Homo sapiens
  misc_RNA (1)...(19): siRNA sense strand
cgaggaaguauuaggugaa

SEQ ID NO: 2529397 - RNA, 19 nt, Homo sapiens
  misc_RNA (1)...(19): siRNA sense strand
gcaaagacacaaagaagca

SEQ ID NO: 2529398 - RNA, 19 nt, Homo sapiens
  misc_RNA (1)...(19): siRNA sense strand
ggaacgacagagaaauaaa

SEQ ID NO: 2529399 - RNA, 19 nt, Homo sapiens
  misc_RNA (1)...(19): siRNA sense strand
agagaaaguugcagggaug

SEQ ID NO: 2529400 - RNA, 19 nt, Homo sapiens
  misc_RNA (1)...(19): siRNA sense strand
ccgacacaagagagagaaa

SEQ ID NO: 2529401 - RNA, 19 nt, Homo sapiens
  misc_RNA (1)...(19): siRNA sense strand
caguaaagacagugccaca

SEQ ID NO: 2529402 - RNA, 19 nt, Homo sapiens
  misc_RNA (1)...(19): siRNA sense strand
cagcagaacaugaagcaga

SEQ ID NO: 2529403 - RNA, 19 nt, Homo sapiens
  misc_RNA (1)...(19): siRNA sense strand
gcauacagccaaagcucaa

SEQ ID NO: 2529404 - RNA, 19 nt, Homo sapiens
  misc_RNA (1)...(19): siRNA sense strand
aggaaauggcagagaaauc

SEQ ID NO: 2529405 - RNA, 19 nt, Homo sapiens
  misc_RNA (1)...(19): siRNA sense strand
gcaaagucggccuuagaaa

SEQ ID NO: 2529406 - RNA, 19 nt, Homo sapiens
  misc_RNA (1)...(19): siRNA sense strand
caaucaaggcggaacggaa

SEQ ID NO: 2529407 - RNA, 19 nt, Homo sapiens
  misc_RNA (1)...(19): siRNA sense strand
aaguaaagaaugaggagca

SEQ ID NO: 2529408 - RNA, 19 nt, Homo sapiens
  misc_RNA (1)...(19): siRNA sense strand
gcaguaaggaugugaaaau

SEQ ID NO: 2529409 - RNA, 19 nt, Homo sapiens
  misc_RNA (1)...(19): siRNA sense strand
agaaaccaguucaggcaaa

SEQ ID NO: 2529410 - RNA, 19 nt, Homo sapiens
  misc_RNA (1)...(19): siRNA sense strand
agcaggaaauggagagaga

SEQ ID NO: 2529411 - RNA, 19 nt, Homo sapiens
  misc_RNA (1)...(19): siRNA sense strand
auugaggacuccaaagaaa

SEQ ID NO: 2529412 - RNA, 19 nt, Homo sapiens
  misc_RNA (1)...(19): siRNA sense strand
ugugaaaggccaaaagaaa

SEQ ID NO: 2529413 - RNA, 19 nt, Homo sapiens
  misc_RNA (1)...(19): siRNA sense strand
cagaaacaaaggaagacaa

SEQ ID NO: 2529414 - RNA, 19 nt, Homo sapiens
  misc_RNA (1)...(19): siRNA sense strand
caagaaaccaacagcaaca

SEQ ID NO: 2529415 - RNA, 19 nt, Homo sapiens
  misc_RNA (1)...(19): siRNA sense strand
ggagagaagcugaggcgga

SEQ ID NO: 2529416 - RNA, 19 nt, Homo sapiens
  misc_RNA (1)...(19): siRNA sense strand
gaugagggcaagugggaca

SEQ ID NO: 2529417 - RNA, 19 nt, Homo sapiens
  misc_RNA (1)...(19): siRNA sense strand
gagagaagcugaggcggaa

SEQ ID NO: 2529418 - RNA, 19 nt, Homo sapiens
  misc_RNA (1)...(19): siRNA sense strand
gugcagacaaagagagcca

SEQ ID NO: 2529419 - RNA, 19 nt, Homo sapiens
  misc_RNA (1)...(19): siRNA sense strand
aggacauggcugagaacau

SEQ ID NO: 2529420 - RNA, 19 nt, Homo sapiens
  misc_RNA (1)...(19): siRNA sense strand
cagcacagcagaauggcua

SEQ ID NO: 2529421 - RNA, 19 nt, Homo sapiens
  misc_RNA (1)...(19): siRNA sense strand
agagccagcuggaggccua

SEQ ID NO: 2529422 - RNA, 19 nt, Homo sapiens
  misc_RNA (1)...(19): siRNA sense strand
cauugucaggcaagggaua

SEQ ID NO: 2529423 - RNA, 19 nt, Homo sapiens
  misc_RNA (1)...(19): siRNA sense strand
uaggcaaauuggcggugaa

SEQ ID NO: 2529424 - RNA, 19 nt, Homo sapiens
  misc_RNA (1)...(19): siRNA sense strand
aggcaagggauacagaaca

SEQ ID NO: 2529425 - RNA, 19 nt, Homo sapiens
  misc_RNA (1)...(19): siRNA sense strand
aagcaucauugucaggcaa

SEQ ID NO: 2529426 - RNA, 19 nt, Homo sapiens
  misc_RNA (1)...(19): siRNA sense strand
ugcagcaggaugagggcaa

SEQ ID NO: 2529427 - RNA, 19 nt, Homo sapiens
  misc_RNA (1)...(19): siRNA sense strand
gaagagaagccgaaaggca

SEQ ID NO: 2529428 - RNA, 19 nt, Homo sapiens
  misc_RNA (1)...(19): siRNA sense strand
gcuccgaagagaagccgaa

SEQ ID NO: 2529429 - RNA, 19 nt, Homo sapiens
  misc_RNA (1)...(19): siRNA sense strand
gaagagaagccgaaaggca

SEQ ID NO: 2529430 - RNA, 19 nt, Homo sapiens
  misc_RNA (1)...(19): siRNA sense strand
gcuccgaagagaagccgaa

SEQ ID NO: 2529431 - RNA, 19 nt, Homo sapiens
  misc_RNA (1)...(19): siRNA sense strand
gggugauggaugugguaaa

SEQ ID NO: 2529432 - RNA, 19 nt, Homo sapiens
  misc_RNA (1)...(19): siRNA sense strand
cagcagaaggaguuagcau

SEQ ID NO: 2529433 - RNA, 19 nt, Homo sapiens
  misc_RNA (1)...(19): siRNA sense strand
acuuuggaguuguaguaaa

SEQ ID NO: 2529434 - RNA, 19 nt, Homo sapiens
  misc_RNA (1)...(19): siRNA sense strand
cuggcaucuuguuggaaua

SEQ ID NO: 2529435 - RNA, 19 nt, Homo sapiens
  misc_RNA (1)...(19): siRNA sense strand
uggcaguugagaagacuua

SEQ ID NO: 2529436 - RNA, 19 nt, Homo sapiens
  misc_RNA (1)...(19): siRNA sense strand
ugucuauacucgagugacu

SEQ ID NO: 2529437 - RNA, 19 nt, Homo sapiens
  misc_RNA (1)...(19): siRNA sense strand
ugguucauuuccagugaua

SEQ ID NO: 2529438 - RNA, 19 nt, Homo sapiens
  misc_RNA (1)...(19): siRNA sense strand
gccuaaugccaaugguuca

SEQ ID NO: 2529439 - RNA, 19 nt, Homo sapiens
  misc_RNA (1)...(19): siRNA sense strand
uggauuuaugucaggagaa

SEQ ID NO: 2529440 - RNA, 19 nt, Homo sapiens
  misc_RNA (1)...(19): siRNA sense strand
augucaaaucugaggucau

SEQ ID NO: 2529441 - RNA, 19 nt, Homo sapiens
  misc_RNA (1)...(19): siRNA sense strand
aggcuaaauuacaucagau

SEQ ID NO: 2529442 - RNA, 19 nt, Homo sapiens
  misc_RNA (1)...(19): siRNA sense strand
ccauauaugacacggaaag

SEQ ID NO: 2529443 - RNA, 19 nt, Homo sapiens
  misc_RNA (1)...(19): siRNA sense strand
cagaagaauaugcggguca

SEQ ID NO: 2529444 - RNA, 19 nt, Homo sapiens
  misc_RNA (1)...(19): siRNA sense strand
gagcagaaguuuugagcca

SEQ ID NO: 2529445 - RNA, 19 nt, Homo sapiens
  misc_RNA (1)...(19): siRNA sense strand
agguuacaccagaagaaua

SEQ ID NO: 2529446 - RNA, 19 nt, Homo sapiens
  misc_RNA (1)...(19): siRNA sense strand
cuaaugaacgggcaggcaa

SEQ ID NO: 2529447 - RNA, 19 nt, Homo sapiens
  misc_RNA (1)...(19): siRNA sense strand
uuggguuguuagagagauu

SEQ ID NO: 2529448 - RNA, 19 nt, Homo sapiens
  misc_RNA (1)...(19): siRNA sense strand
agagauucuucaugcucaa

SEQ ID NO: 2529449 - RNA, 19 nt, Homo sapiens
  misc_RNA (1)...(19): siRNA sense strand
agaaacuguaugagcugaa

SEQ ID NO: 2529450 - RNA, 19 nt, Homo sapiens
  misc_RNA (1)...(19): siRNA sense strand
aauuuguggaagacgauaa

SEQ ID NO: 2529451 - RNA, 19 nt, Homo sapiens
  misc_RNA (1)...(19): siRNA sense strand
ucuuaagguuacaccagaa

SEQ ID NO: 2529452 - RNA, 19 nt, Homo sapiens
  misc_RNA (1)...(19): siRNA sense strand
uggcagcauucuagaaaau

SEQ ID NO: 2529453 - RNA, 19 nt, Homo sapiens
  misc_RNA (1)...(19): siRNA sense strand
cuucaugcucaaacauuaa

SEQ ID NO: 2529454 - RNA, 19 nt, Homo sapiens
  misc_RNA (1)...(19): siRNA sense strand
cuaagaaacuguaugagcu

SEQ ID NO: 2529455 - RNA, 19 nt, Homo sapiens
  misc_RNA (1)...(19): siRNA sense strand
ggcagugguuucuggccua

SEQ ID NO: 2529456 - RNA, 19 nt, Homo sapiens
  misc_RNA (1)...(19): siRNA sense strand
ggcucugaauugaagaaaa

SEQ ID NO: 2529457 - RNA, 19 nt, Homo sapiens
  misc_RNA (1)...(19): siRNA sense strand
aggcaagcagugucaauau

SEQ ID NO: 2529458 - RNA, 19 nt, Homo sapiens
  misc_RNA (1)...(19): siRNA sense strand
cagaagaauaugcggguca

SEQ ID NO: 2529459 - RNA, 19 nt, Homo sapiens
  misc_RNA (1)...(19): siRNA sense strand
gagcagaaguuuugagcca

SEQ ID NO: 2529460 - RNA, 19 nt, Homo sapiens
  misc_RNA (1)...(19): siRNA sense strand
agguuacaccagaagaaua

SEQ ID NO: 2529461 - RNA, 19 nt, Homo sapiens
  misc_RNA (1)...(19): siRNA sense strand
cuaaugaacgggcaggcaa

SEQ ID NO: 2529462 - RNA, 19 nt, Homo sapiens
  misc_RNA (1)...(19): siRNA sense strand
uuggguuguuagagagauu

SEQ ID NO: 2529463 - RNA, 19 nt, Homo sapiens
  misc_RNA (1)...(19): siRNA sense strand
agagauucuucaugcucaa

SEQ ID NO: 2529464 - RNA, 19 nt, Homo sapiens
  misc_RNA (1)...(19): siRNA sense strand
agaaacuguaugagcugaa

SEQ ID NO: 2529465 - RNA, 19 nt, Homo sapiens
  misc_RNA (1)...(19): siRNA sense strand
aauuuguggaagacgauaa

SEQ ID NO: 2529466 - RNA, 19 nt, Homo sapiens
  misc_RNA (1)...(19): siRNA sense strand
ucuuaagguuacaccagaa

SEQ ID NO: 2529467 - RNA, 19 nt, Homo sapiens
  misc_RNA (1)...(19): siRNA sense strand
uggcagcauucuagaaaau

SEQ ID NO: 2529468 - RNA, 19 nt, Homo sapiens
  misc_RNA (1)...(19): siRNA sense strand
cuucaugcucaaacauuaa

SEQ ID NO: 2529469 - RNA, 19 nt, Homo sapiens
  misc_RNA (1)...(19): siRNA sense strand
cuaagaaacuguaugagcu

SEQ ID NO: 2529470 - RNA, 19 nt, Homo sapiens
  misc_RNA (1)...(19): siRNA sense strand
ggcagugguuucuggccua

SEQ ID NO: 2529471 - RNA, 19 nt, Homo sapiens
  misc_RNA (1)...(19): siRNA sense strand
ggcucugaauugaagaaaa

SEQ ID NO: 2529472 - RNA, 19 nt, Homo sapiens
  misc_RNA (1)...(19): siRNA sense strand
aggcaagcagugucaauau

SEQ ID NO: 2529473 - RNA, 19 nt, Homo sapiens
  misc_RNA (1)...(19): siRNA sense strand
gggaaaaccuuuagccgaa

SEQ ID NO: 2529474 - RNA, 19 nt, Homo sapiens
  misc_RNA (1)...(19): siRNA sense strand
acauauccucugugggaaa

SEQ ID NO: 2529475 - RNA, 19 nt, Homo sapiens
  misc_RNA (1)...(19): siRNA sense strand
gggaaaagcuucaaccaga

SEQ ID NO: 2529476 - RNA, 19 nt, Homo sapiens
  misc_RNA (1)...(19): siRNA sense strand
auucagaggaaguagaaau

SEQ ID NO: 2529477 - RNA, 19 nt, Homo sapiens
  misc_RNA (1)...(19): siRNA sense strand
gugugcagugugugggaaa

SEQ ID NO: 2529478 - RNA, 19 nt, Homo sapiens
  misc_RNA (1)...(19): siRNA sense strand
gggaugauucagaggaagu

SEQ ID NO: 2529479 - RNA, 19 nt, Homo sapiens
  misc_RNA (1)...(19): siRNA sense strand
gugugggcaaugugggaaa

SEQ ID NO: 2529480 - RNA, 19 nt, Homo sapiens
  misc_RNA (1)...(19): siRNA sense strand
cagagaaaguccagaggag

SEQ ID NO: 2529481 - RNA, 19 nt, Homo sapiens
  misc_RNA (1)...(19): siRNA sense strand
gugcagacagggaugaaaa

SEQ ID NO: 2529482 - RNA, 19 nt, Homo sapiens
  misc_RNA (1)...(19): siRNA sense strand
gggaagggcuuuagugagc

SEQ ID NO: 2529483 - RNA, 19 nt, Homo sapiens
  misc_RNA (1)...(19): siRNA sense strand
augggaugauucagaggaa

SEQ ID NO: 2529484 - RNA, 19 nt, Homo sapiens
  misc_RNA (1)...(19): siRNA sense strand
gugcauugucuguggaaag

SEQ ID NO: 2529485 - RNA, 19 nt, Homo sapiens
  misc_RNA (1)...(19): siRNA sense strand
gccaacaucaagaaggcaa

SEQ ID NO: 2529486 - RNA, 19 nt, Homo sapiens
  misc_RNA (1)...(19): siRNA sense strand
guagaaauaaacaaggcuu

SEQ ID NO: 2529487 - RNA, 19 nt, Homo sapiens
  misc_RNA (1)...(19): siRNA sense strand
ccaacaucaagaaggcaau

SEQ ID NO: 2529488 - RNA, 19 nt, Homo sapiens
  misc_RNA (1)...(19): siRNA sense strand
aagaaggcaauguagaaau

SEQ ID NO: 2529489 - RNA, 19 nt, Homo sapiens
  misc_RNA (1)...(19): siRNA sense strand
agccagaucuacagggcca

SEQ ID NO: 2529490 - RNA, 19 nt, Homo sapiens
  misc_RNA (1)...(19): siRNA sense strand
aggaagugauauugaggcu

SEQ ID NO: 2529491 - RNA, 19 nt, Homo sapiens
  misc_RNA (1)...(19): siRNA sense strand
cggaaggacucugggagca

SEQ ID NO: 2529492 - RNA, 19 nt, Homo sapiens
  misc_RNA (1)...(19): siRNA sense strand
gugggaaaaucuucaacaa

SEQ ID NO: 2529493 - RNA, 19 nt, Homo sapiens
  misc_RNA (1)...(19): siRNA sense strand
cagaaaacccagaggagaa

SEQ ID NO: 2529494 - RNA, 19 nt, Homo sapiens
  misc_RNA (1)...(19): siRNA sense strand
gcacagagaccuuugacga

SEQ ID NO: 2529495 - RNA, 19 nt, Homo sapiens
  misc_RNA (1)...(19): siRNA sense strand
gcagcuuagaggaggucaa

SEQ ID NO: 2529496 - RNA, 19 nt, Homo sapiens
  misc_RNA (1)...(19): siRNA sense strand
gauaauuugcugaagcuga

SEQ ID NO: 2529497 - RNA, 19 nt, Homo sapiens
  misc_RNA (1)...(19): siRNA sense strand
ccucaaaguggcagguucu

SEQ ID NO: 2529498 - RNA, 19 nt, Homo sapiens
  misc_RNA (1)...(19): siRNA sense strand
ccgaguacaucuagcucca

SEQ ID NO: 2529499 - RNA, 19 nt, Homo sapiens
  misc_RNA (1)...(19): siRNA sense strand
uggcaaccccugaagaaaa

SEQ ID NO: 2529500 - RNA, 19 nt, Homo sapiens
  misc_RNA (1)...(19): siRNA sense strand
aaguaaagcaggaagcauc

SEQ ID NO: 2529501 - RNA, 19 nt, Homo sapiens
  misc_RNA (1)...(19): siRNA sense strand
cuuagaggaggucaagaaa

SEQ ID NO: 2529502 - RNA, 19 nt, Homo sapiens
  misc_RNA (1)...(19): siRNA sense strand
ccguugaugaagagaugau

SEQ ID NO: 2529503 - RNA, 19 nt, Homo sapiens
  misc_RNA (1)...(19): siRNA sense strand
aggaggucaagaaagaaua

SEQ ID NO: 2529504 - RNA, 19 nt, Homo sapiens
  misc_RNA (1)...(19): siRNA sense strand
gcaaacagaucaucgccaa

SEQ ID NO: 2529505 - RNA, 19 nt, Homo sapiens
  misc_RNA (1)...(19): siRNA sense strand
cagcaugggaugaggagga

SEQ ID NO: 2529506 - RNA, 19 nt, Homo sapiens
  misc_RNA (1)...(19): siRNA sense strand
agacaugaggcuucgggaa

SEQ ID NO: 2529507 - RNA, 19 nt, Homo sapiens
  misc_RNA (1)...(19): siRNA sense strand
ggacuaaggaucaccgcuu

SEQ ID NO: 2529508 - RNA, 19 nt, Homo sapiens
  misc_RNA (1)...(19): siRNA sense strand
gaaauuugcuggaaugcca

SEQ ID NO: 2529509 - RNA, 19 nt, Homo sapiens
  misc_RNA (1)...(19): siRNA sense strand
guacauggguuguguggag

SEQ ID NO: 2529510 - RNA, 19 nt, Homo sapiens
  misc_RNA (1)...(19): siRNA sense strand
ucagcuaccacauggacaa

SEQ ID NO: 2529511 - RNA, 19 nt, Homo sapiens
  misc_RNA (1)...(19): siRNA sense strand
gcaaacagaucaucgccaa

SEQ ID NO: 2529512 - RNA, 19 nt, Homo sapiens
  misc_RNA (1)...(19): siRNA sense strand
cagcaugggaugaggagga

SEQ ID NO: 2529513 - RNA, 19 nt, Homo sapiens
  misc_RNA (1)...(19): siRNA sense strand
agacaugaggcuucgggaa

SEQ ID NO: 2529514 - RNA, 19 nt, Homo sapiens
  misc_RNA (1)...(19): siRNA sense strand
ggacuaaggaucaccgcuu

SEQ ID NO: 2529515 - RNA, 19 nt, Homo sapiens
  misc_RNA (1)...(19): siRNA sense strand
gaaauuugcuggaaugcca

SEQ ID NO: 2529516 - RNA, 19 nt, Homo sapiens
  misc_RNA (1)...(19): siRNA sense strand
gcgacaaggaggagaaagc

SEQ ID NO: 2529517 - RNA, 19 nt, Homo sapiens
  misc_RNA (1)...(19): siRNA sense strand
guacauggguuguguggag

SEQ ID NO: 2529518 - RNA, 19 nt, Homo sapiens
  misc_RNA (1)...(19): siRNA sense strand
ucagcuaccacauggacaa

SEQ ID NO: 2529519 - RNA, 19 nt, Homo sapiens
  misc_RNA (1)...(19): siRNA sense strand
gcugauugugagaaggaaa

SEQ ID NO: 2529520 - RNA, 19 nt, Homo sapiens
  misc_RNA (1)...(19): siRNA sense strand
agaaauggugagagaacuu

SEQ ID NO: 2529521 - RNA, 19 nt, Homo sapiens
  misc_RNA (1)...(19): siRNA sense strand
acguggaggaggaggaaca

SEQ ID NO: 2529522 - RNA, 19 nt, Homo sapiens
  misc_RNA (1)...(19): siRNA sense strand
ggaacguggaggaggagga

SEQ ID NO: 2529523 - RNA, 19 nt, Homo sapiens
  misc_RNA (1)...(19): siRNA sense strand
uguggaacguggaggagga

SEQ ID NO: 2529524 - RNA, 19 nt, Homo sapiens
  misc_RNA (1)...(19): siRNA sense strand
gcaaggagcaugaugguac

SEQ ID NO: 2529525 - RNA, 19 nt, Homo sapiens
  misc_RNA (1)...(19): siRNA sense strand
ggauguggaacguggagga

SEQ ID NO: 2529526 - RNA, 19 nt, Homo sapiens
  misc_RNA (1)...(19): siRNA sense strand
cugauugugagaaggaaau

SEQ ID NO: 2529527 - RNA, 19 nt, Homo sapiens
  misc_RNA (1)...(19): siRNA sense strand
uuagaaauggugagagaac

SEQ ID NO: 2529528 - RNA, 19 nt, Homo sapiens
  misc_RNA (1)...(19): siRNA sense strand
ggcagaaaucuaagggaaa

SEQ ID NO: 2529529 - RNA, 19 nt, Homo sapiens
  misc_RNA (1)...(19): siRNA sense strand
uggcagaaaucuaagggaa

SEQ ID NO: 2529530 - RNA, 19 nt, Homo sapiens
  misc_RNA (1)...(19): siRNA sense strand
gggcaaaaguucaguuaau

SEQ ID NO: 2529531 - RNA, 19 nt, Homo sapiens
  misc_RNA (1)...(19): siRNA sense strand
agaucaaggaaaugguaaa

SEQ ID NO: 2529532 - RNA, 19 nt, Homo sapiens
  misc_RNA (1)...(19): siRNA sense strand
guucugaaagauaggguua

SEQ ID NO: 2529533 - RNA, 19 nt, Homo sapiens
  misc_RNA (1)...(19): siRNA sense strand
caauaauggcuuucagcaa

SEQ ID NO: 2529534 - RNA, 19 nt, Homo sapiens
  misc_RNA (1)...(19): siRNA sense strand
aaggaaacaacuagaagaa

SEQ ID NO: 2529535 - RNA, 19 nt, Homo sapiens
  misc_RNA (1)...(19): siRNA sense strand
caccaaaacuucugggcaa

SEQ ID NO: 2529536 - RNA, 19 nt, Homo sapiens
  misc_RNA (1)...(19): siRNA sense strand
agcagaggaucgaaggaaa

SEQ ID NO: 2529537 - RNA, 19 nt, Homo sapiens
  misc_RNA (1)...(19): siRNA sense strand
aaagcaaaguuguuggcaa

SEQ ID NO: 2529538 - RNA, 19 nt, Homo sapiens
  misc_RNA (1)...(19): siRNA sense strand
gguuaauaggagucaauau

SEQ ID NO: 2529539 - RNA, 19 nt, Homo sapiens
  misc_RNA (1)...(19): siRNA sense strand
gaacagagagugaagcaca

SEQ ID NO: 2529540 - RNA, 19 nt, Homo sapiens
  misc_RNA (1)...(19): siRNA sense strand
uaguauaacaucaguggaa

SEQ ID NO: 2529541 - RNA, 19 nt, Homo sapiens
  misc_RNA (1)...(19): siRNA sense strand
guauaacaucaguggaaga

SEQ ID NO: 2529542 - RNA, 19 nt, Homo sapiens
  misc_RNA (1)...(19): siRNA sense strand
uagaaguggaagaaacaaa

SEQ ID NO: 2529543 - RNA, 19 nt, Homo sapiens
  misc_RNA (1)...(19): siRNA sense strand
caauacaagaguugcggaa

SEQ ID NO: 2529544 - RNA, 19 nt, Homo sapiens
  misc_RNA (1)...(19): siRNA sense strand
aguuaacagaucaaggaaa

SEQ ID NO: 2529545 - RNA, 19 nt, Homo sapiens
  misc_RNA (1)...(19): siRNA sense strand
cuuugauguuauugggcua

SEQ ID NO: 2529546 - RNA, 19 nt, Homo sapiens
  misc_RNA (1)...(19): siRNA sense strand
cggaagugcaagacaugaa

SEQ ID NO: 2529547 - RNA, 19 nt, Homo sapiens
  misc_RNA (1)...(19): siRNA sense strand
guuagaaguggaagaaaca

SEQ ID NO: 2529548 - RNA, 19 nt, Homo sapiens
  misc_RNA (1)...(19): siRNA sense strand
ccaguuugcuucaggguga

SEQ ID NO: 2529549 - RNA, 19 nt, Homo sapiens
  misc_RNA (1)...(19): siRNA sense strand
uguuagaaguggaagaaac

SEQ ID NO: 2529550 - RNA, 19 nt, Homo sapiens
  misc_RNA (1)...(19): siRNA sense strand
ggagaaacacaaagcagga

SEQ ID NO: 2529551 - RNA, 19 nt, Homo sapiens
  misc_RNA (1)...(19): siRNA sense strand
gugaauauaacaacagaca

SEQ ID NO: 2529552 - RNA, 19 nt, Homo sapiens
  misc_RNA (1)...(19): siRNA sense strand
ggaagaaaagaaagcacaa

SEQ ID NO: 2529553 - RNA, 19 nt, Homo sapiens
  misc_RNA (1)...(19): siRNA sense strand
aagcaaaguuguuggcaag

SEQ ID NO: 2529554 - RNA, 19 nt, Homo sapiens
  misc_RNA (1)...(19): siRNA sense strand
ggaaaacugaagagccaaa

SEQ ID NO: 2529555 - RNA, 19 nt, Homo sapiens
  misc_RNA (1)...(19): siRNA sense strand
agucaauaugaaagaccaa

SEQ ID NO: 2529556 - RNA, 19 nt, Homo sapiens
  misc_RNA (1)...(19): siRNA sense strand
guuacugaacagagaguga

SEQ ID NO: 2529557 - RNA, 19 nt, Homo sapiens
  misc_RNA (1)...(19): siRNA sense strand
caucauguguacugcaaaa

SEQ ID NO: 2529558 - RNA, 19 nt, Homo sapiens
  misc_RNA (1)...(19): siRNA sense strand
ggaucgaaggaaacaacua

SEQ ID NO: 2529559 - RNA, 19 nt, Homo sapiens
  misc_RNA (1)...(19): siRNA sense strand
aagaagaggaagaaaagaa

SEQ ID NO: 2529560 - RNA, 19 nt, Homo sapiens
  misc_RNA (1)...(19): siRNA sense strand
agggaaaacugaagagcca

SEQ ID NO: 2529561 - RNA, 19 nt, Homo sapiens
  misc_RNA (1)...(19): siRNA sense strand
ccgaauagccaaggcagaa

SEQ ID NO: 2529562 - RNA, 19 nt, Homo sapiens
  misc_RNA (1)...(19): siRNA sense strand
gucacuuaauauagagcaa

SEQ ID NO: 2529563 - RNA, 19 nt, Homo sapiens
  misc_RNA (1)...(19): siRNA sense strand
gaucagaaguccagccaag

SEQ ID NO: 2529564 - RNA, 19 nt, Homo sapiens
  misc_RNA (1)...(19): siRNA sense strand
acuacaaagcagcaguuaa

SEQ ID NO: 2529565 - RNA, 19 nt, Homo sapiens
  misc_RNA (1)...(19): siRNA sense strand
ugaaagaccaaaugaaacu

SEQ ID NO: 2529566 - RNA, 19 nt, Homo sapiens
  misc_RNA (1)...(19): siRNA sense strand
agaaacaaacaaagagaac

SEQ ID NO: 2529567 - RNA, 19 nt, Homo sapiens
  misc_RNA (1)...(19): siRNA sense strand
agaauaauugccagaauca

SEQ ID NO: 2529568 - RNA, 19 nt, Homo sapiens
  misc_RNA (1)...(19): siRNA sense strand
gcauaagaccaaauggaac

SEQ ID NO: 2529569 - RNA, 19 nt, Homo sapiens
  misc_RNA (1)...(19): siRNA sense strand
ccaaggcagaacagcauaa

SEQ ID NO: 2529570 - RNA, 19 nt, Homo sapiens
  misc_RNA (1)...(19): siRNA sense strand
auacaagaguugcggaaag

SEQ ID NO: 2529571 - RNA, 19 nt, Homo sapiens
  misc_RNA (1)...(19): siRNA sense strand
acaucaagcaagaucagaa

SEQ ID NO: 2529572 - RNA, 19 nt, Homo sapiens
  misc_RNA (1)...(19): siRNA sense strand
cuacaaagcagcaguuaac

SEQ ID NO: 2529573 - RNA, 19 nt, Homo sapiens
  misc_RNA (1)...(19): siRNA sense strand
ggcuauaugaagaggccau

SEQ ID NO: 2529574 - RNA, 19 nt, Homo sapiens
  misc_RNA (1)...(19): siRNA sense strand
gcugaaacuaguauaacau

SEQ ID NO: 2529575 - RNA, 19 nt, Homo sapiens
  misc_RNA (1)...(19): siRNA sense strand
caguggaagagcuggccaa

SEQ ID NO: 2529576 - RNA, 19 nt, Homo sapiens
  misc_RNA (1)...(19): siRNA sense strand
cagaucaaggaaaugguaa

SEQ ID NO: 2529577 - RNA, 19 nt, Homo sapiens
  misc_RNA (1)...(19): siRNA sense strand
agaagaggaagaaaagaaa

SEQ ID NO: 2529578 - RNA, 19 nt, Homo sapiens
  misc_RNA (1)...(19): siRNA sense strand
acucuaagccuucuagcaa

SEQ ID NO: 2529579 - RNA, 19 nt, Homo sapiens
  misc_RNA (1)...(19): siRNA sense strand
auccaaacaucaagcaaga

SEQ ID NO: 2529580 - RNA, 19 nt, Homo sapiens
  misc_RNA (1)...(19): siRNA sense strand
acuagaagaauggcagaaa

SEQ ID NO: 2529581 - RNA, 19 nt, Homo sapiens
  misc_RNA (1)...(19): siRNA sense strand
cagaaccacagaagggauu

SEQ ID NO: 2529582 - RNA, 19 nt, Homo sapiens
  misc_RNA (1)...(19): siRNA sense strand
gcauaauuauccugguauc

SEQ ID NO: 2529583 - RNA, 19 nt, Homo sapiens
  misc_RNA (1)...(19): siRNA sense strand
acaaagagaacuugcucga

SEQ ID NO: 2529584 - RNA, 19 nt, Homo sapiens
  misc_RNA (1)...(19): siRNA sense strand
aaccaguagucaagaacau

SEQ ID NO: 2529585 - RNA, 19 nt, Homo sapiens
  misc_RNA (1)...(19): siRNA sense strand
gaaacuaagauacggucau

SEQ ID NO: 2529586 - RNA, 19 nt, Homo sapiens
  misc_RNA (1)...(19): siRNA sense strand
aggaguaccuugcagccaa

SEQ ID NO: 2529587 - RNA, 19 nt, Homo sapiens
  misc_RNA (1)...(19): siRNA sense strand
gggcgaaagccaaggccaa

SEQ ID NO: 2529588 - RNA, 19 nt, Homo sapiens
  misc_RNA (1)...(19): siRNA sense strand
gggaaggacaagaggcgaa

SEQ ID NO: 2529589 - RNA, 19 nt, Homo sapiens
  misc_RNA (1)...(19): siRNA sense strand
aggaggaccaggagggcaa

SEQ ID NO: 2529590 - RNA, 19 nt, Homo sapiens
  misc_RNA (1)...(19): siRNA sense strand
aagagaagcaggagcccaa

SEQ ID NO: 2529591 - RNA, 19 nt, Homo sapiens
  misc_RNA (1)...(19): siRNA sense strand
agagaaguguggagacgga

SEQ ID NO: 2529592 - RNA, 19 nt, Homo sapiens
  misc_RNA (1)...(19): siRNA sense strand
guucccaagcccaggagaa

SEQ ID NO: 2529593 - RNA, 19 nt, Homo sapiens
  misc_RNA (1)...(19): siRNA sense strand
aggcgaagcuccaagccca

SEQ ID NO: 2529594 - RNA, 19 nt, Homo sapiens
  misc_RNA (1)...(19): siRNA sense strand
ggacaggccgugaaggaag

SEQ ID NO: 2529595 - RNA, 19 nt, Homo sapiens
  misc_RNA (1)...(19): siRNA sense strand
uggaagaaguucaagcuga

SEQ ID NO: 2529596 - RNA, 19 nt, Homo sapiens
  misc_RNA (1)...(19): siRNA sense strand
gaaugauagcacagaaaau

SEQ ID NO: 2529597 - RNA, 19 nt, Homo sapiens
  misc_RNA (1)...(19): siRNA sense strand
gaggaagaaugauagcaca

SEQ ID NO: 2529598 - RNA, 19 nt, Homo sapiens
  misc_RNA (1)...(19): siRNA sense strand
gggucaagaggaacuggaa

SEQ ID NO: 2529599 - RNA, 19 nt, Homo sapiens
  misc_RNA (1)...(19): siRNA sense strand
cauuaacauucuuagcaga

SEQ ID NO: 2529600 - RNA, 19 nt, Homo sapiens
  misc_RNA (1)...(19): siRNA sense strand
agaauuucaacgaaccaaa

SEQ ID NO: 2529601 - RNA, 19 nt, Homo sapiens
  misc_RNA (1)...(19): siRNA sense strand
gggugaucgcucucaacua

SEQ ID NO: 2529602 - RNA, 19 nt, Homo sapiens
  misc_RNA (1)...(19): siRNA sense strand
aguaauuggaggaagaaug

SEQ ID NO: 2529603 - RNA, 19 nt, Homo sapiens
  misc_RNA (1)...(19): siRNA sense strand
ccagagaagucuuggugga

SEQ ID NO: 2529604 - RNA, 19 nt, Homo sapiens
  misc_RNA (1)...(19): siRNA sense strand
cugaugacucacaagguaa

SEQ ID NO: 2529605 - RNA, 19 nt, Homo sapiens
  misc_RNA (1)...(19): siRNA sense strand
caggaauucccguggacuu

SEQ ID NO: 2529606 - RNA, 19 nt, Homo sapiens
  misc_RNA (1)...(19): siRNA sense strand
uguacaaagcauacgccaa

SEQ ID NO: 2529607 - RNA, 19 nt, Homo sapiens
  misc_RNA (1)...(19): siRNA sense strand
cuuuggauaccuuggaaau

SEQ ID NO: 2529608 - RNA, 19 nt, Homo sapiens
  misc_RNA (1)...(19): siRNA sense strand
uggaggaauuugagaagcu

SEQ ID NO: 2529609 - RNA, 19 nt, Homo sapiens
  misc_RNA (1)...(19): siRNA sense strand
uugagaagcugauggucca

SEQ ID NO: 2529610 - RNA, 19 nt, Homo sapiens
  misc_RNA (1)...(19): siRNA sense strand
cugccuuccuggagacuga

SEQ ID NO: 2529611 - RNA, 19 nt, Homo sapiens
  misc_RNA (1)...(19): siRNA sense strand
ggaaauggccggaaaccuc

SEQ ID NO: 2529612 - RNA, 19 nt, Homo sapiens
  misc_RNA (1)...(19): siRNA sense strand
cugacagcguccagagacu

SEQ ID NO: 2529613 - RNA, 19 nt, Homo sapiens
  misc_RNA (1)...(19): siRNA sense strand
aagucuugguggaaacgua

SEQ ID NO: 2529614 - RNA, 19 nt, Homo sapiens
  misc_RNA (1)...(19): siRNA sense strand
ccucaaaggcucagcgagu

SEQ ID NO: 2529615 - RNA, 19 nt, Homo sapiens
  misc_RNA (1)...(19): siRNA sense strand
caggaaaggauuuggguug

SEQ ID NO: 2529616 - RNA, 19 nt, Homo sapiens
  misc_RNA (1)...(19): siRNA sense strand
cagcaaggugggucggaga

SEQ ID NO: 2529617 - RNA, 19 nt, Homo sapiens
  misc_RNA (1)...(19): siRNA sense strand
ggucggagagauagggaag

SEQ ID NO: 2529618 - RNA, 19 nt, Homo sapiens
  misc_RNA (1)...(19): siRNA sense strand
gagguagagaaguaggaaa

SEQ ID NO: 2529619 - RNA, 19 nt, Homo sapiens
  misc_RNA (1)...(19): siRNA sense strand
ccugagacacagagguaga

SEQ ID NO: 2529620 - RNA, 19 nt, Homo sapiens
  misc_RNA (1)...(19): siRNA sense strand
agguagagaaguaggaaag

SEQ ID NO: 2529621 - RNA, 19 nt, Homo sapiens
  misc_RNA (1)...(19): siRNA sense strand
gggaugaagguuuggugga

SEQ ID NO: 2529622 - RNA, 19 nt, Homo sapiens
  misc_RNA (1)...(19): siRNA sense strand
aagguuugguggaggggaa

SEQ ID NO: 2529623 - RNA, 19 nt, Homo sapiens
  misc_RNA (1)...(19): siRNA sense strand
ccgaaugcauuaugggaga

SEQ ID NO: 2529624 - RNA, 19 nt, Homo sapiens
  misc_RNA (1)...(19): siRNA sense strand
agucagaggaaguggacau

SEQ ID NO: 2529625 - RNA, 19 nt, Homo sapiens
  misc_RNA (1)...(19): siRNA sense strand
ccaaacacgaugugggaag

SEQ ID NO: 2529626 - RNA, 19 nt, Homo sapiens
  misc_RNA (1)...(19): siRNA sense strand
caugagagguggagcggug

SEQ ID NO: 2529627 - RNA, 19 nt, Homo sapiens
  misc_RNA (1)...(19): siRNA sense strand
gugugaugcuuuaaacaaa

SEQ ID NO: 2529628 - RNA, 19 nt, Homo sapiens
  misc_RNA (1)...(19): siRNA sense strand
gccaugaacucuugggaca

SEQ ID NO: 2529629 - RNA, 19 nt, Homo sapiens
  misc_RNA (1)...(19): siRNA sense strand
ucggaagaucucugaguua

SEQ ID NO: 2529630 - RNA, 19 nt, Homo sapiens
  misc_RNA (1)...(19): siRNA sense strand
uggauguggccauggguua

SEQ ID NO: 2529631 - RNA, 19 nt, Homo sapiens
  misc_RNA (1)...(19): siRNA sense strand
caccagaaguauugaaaau

SEQ ID NO: 2529632 - RNA, 19 nt, Homo sapiens
  misc_RNA (1)...(19): siRNA sense strand
cgacaaaggcaacaaggga

SEQ ID NO: 2529633 - RNA, 19 nt, Homo sapiens
  misc_RNA (1)...(19): siRNA sense strand
aggaaaucucggcgaagaa

SEQ ID NO: 2529634 - RNA, 19 nt, Homo sapiens
  misc_RNA (1)...(19): siRNA sense strand
ggacagaggaagaagagcu

SEQ ID NO: 2529635 - RNA, 19 nt, Homo sapiens
  misc_RNA (1)...(19): siRNA sense strand
cagaggaagaagagcuaga

SEQ ID NO: 2529636 - RNA, 19 nt, Homo sapiens
  misc_RNA (1)...(19): siRNA sense strand
uugaagaagccaaagaaaa

SEQ ID NO: 2529637 - RNA, 19 nt, Homo sapiens
  misc_RNA (1)...(19): siRNA sense strand
acauuuggacagaggaaga

SEQ ID NO: 2529638 - RNA, 19 nt, Homo sapiens
  misc_RNA (1)...(19): siRNA sense strand
acccaggauuuaaggacaa

SEQ ID NO: 2529639 - RNA, 19 nt, Homo sapiens
  misc_RNA (1)...(19): siRNA sense strand
gacaaaggcaacaagggaa

SEQ ID NO: 2529640 - RNA, 19 nt, Homo sapiens
  misc_RNA (1)...(19): siRNA sense strand
guucugagcuugaugcuga

SEQ ID NO: 2529641 - RNA, 19 nt, Homo sapiens
  misc_RNA (1)...(19): siRNA sense strand
caguauacuucaaucccua

SEQ ID NO: 2529642 - RNA, 19 nt, Homo sapiens
  misc_RNA (1)...(19): siRNA sense strand
ccgaagagcaucagcuacu

SEQ ID NO: 2529643 - RNA, 19 nt, Homo sapiens
  misc_RNA (1)...(19): siRNA sense strand
ucauauugaauccaggaaa

SEQ ID NO: 2529644 - RNA, 19 nt, Homo sapiens
  misc_RNA (1)...(19): siRNA sense strand
agaaauaggucuggcgucu

SEQ ID NO: 2529645 - RNA, 19 nt, Homo sapiens
  misc_RNA (1)...(19): siRNA sense strand
aaagaaaagaugagggacu

SEQ ID NO: 2529646 - RNA, 19 nt, Homo sapiens
  misc_RNA (1)...(19): siRNA sense strand
uggccauggguuauaaaua

SEQ ID NO: 2529647 - RNA, 19 nt, Homo sapiens
  misc_RNA (1)...(19): siRNA sense strand
agaugagggacuuugcaaa

SEQ ID NO: 2529648 - RNA, 19 nt, Homo sapiens
  misc_RNA (1)...(19): siRNA sense strand
cgugaagcugcuaccgaaa

SEQ ID NO: 2529649 - RNA, 19 nt, Homo sapiens
  misc_RNA (1)...(19): siRNA sense strand
ucgacagagaagaaaguau

SEQ ID NO: 2529650 - RNA, 19 nt, Homo sapiens
  misc_RNA (1)...(19): siRNA sense strand
ccaaagaaaagaugaggga

SEQ ID NO: 2529651 - RNA, 19 nt, Homo sapiens
  misc_RNA (1)...(19): siRNA sense strand
gggaagcagcaaacgugaa

SEQ ID NO: 2529652 - RNA, 19 nt, Homo sapiens
  misc_RNA (1)...(19): siRNA sense strand
uggaguauacugaagaaga

SEQ ID NO: 2529653 - RNA, 19 nt, Homo sapiens
  misc_RNA (1)...(19): siRNA sense strand
gaguauacugaagaagaaa

SEQ ID NO: 2529654 - RNA, 19 nt, Homo sapiens
  misc_RNA (1)...(19): siRNA sense strand
guggcuacagagaggacaa

SEQ ID NO: 2529655 - RNA, 19 nt, Homo sapiens
  misc_RNA (1)...(19): siRNA sense strand
cagcagugcccgaagagca

SEQ ID NO: 2529656 - RNA, 19 nt, Homo sapiens
  misc_RNA (1)...(19): siRNA sense strand
gaagaaugaaguuggugga

SEQ ID NO: 2529657 - RNA, 19 nt, Homo sapiens
  misc_RNA (1)...(19): siRNA sense strand
aggaagaagagcuagagga

SEQ ID NO: 2529658 - RNA, 19 nt, Homo sapiens
  misc_RNA (1)...(19): siRNA sense strand
gucuaucgacagagaagaa

SEQ ID NO: 2529659 - RNA, 19 nt, Homo sapiens
  misc_RNA (1)...(19): siRNA sense strand
cccaaagacaacuugcuua

SEQ ID NO: 2529660 - RNA, 19 nt, Homo sapiens
  misc_RNA (1)...(19): siRNA sense strand
acgugaagcugcuaccgaa

SEQ ID NO: 2529661 - RNA, 19 nt, Homo sapiens
  misc_RNA (1)...(19): siRNA sense strand
ccagagaacauuuggacag

SEQ ID NO: 2529662 - RNA, 19 nt, Homo sapiens
  misc_RNA (1)...(19): siRNA sense strand
gugugaucuugcugggauu

SEQ ID NO: 2529663 - RNA, 19 nt, Homo sapiens
  misc_RNA (1)...(19): siRNA sense strand
agaacaagcgaauggcuga

SEQ ID NO: 2529664 - RNA, 19 nt, Homo sapiens
  misc_RNA (1)...(19): siRNA sense strand
ggacuagagaagaggggaa

SEQ ID NO: 2529665 - RNA, 19 nt, Homo sapiens
  misc_RNA (1)...(19): siRNA sense strand
ccaagaacgcaguggucau

SEQ ID NO: 2529666 - RNA, 19 nt, Homo sapiens
  misc_RNA (1)...(19): siRNA sense strand
aggucauccuagagaagau

SEQ ID NO: 2529667 - RNA, 19 nt, Homo sapiens
  misc_RNA (1)...(19): siRNA sense strand
agaagauagaagacuggaa

SEQ ID NO: 2529668 - RNA, 19 nt, Homo sapiens
  misc_RNA (1)...(19): siRNA sense strand
aguagugacaagaggacca

SEQ ID NO: 2529669 - RNA, 19 nt, Homo sapiens
  misc_RNA (1)...(19): siRNA sense strand
acuggaaugugguggaacu

SEQ ID NO: 2529670 - RNA, 19 nt, Homo sapiens
  misc_RNA (1)...(19): siRNA sense strand
acugcaacauuaaggacuu

SEQ ID NO: 2529671 - RNA, 19 nt, Homo sapiens
  misc_RNA (1)...(19): siRNA sense strand
augacgaagaagagaacaa

SEQ ID NO: 2529672 - RNA, 19 nt, Homo sapiens
  misc_RNA (1)...(19): siRNA sense strand
caagacacuuagagggacu

SEQ ID NO: 2529673 - RNA, 19 nt, Homo sapiens
  misc_RNA (1)...(19): siRNA sense strand
agcuaggccaccaggauaa

SEQ ID NO: 2529674 - RNA, 19 nt, Homo sapiens
  misc_RNA (1)...(19): siRNA sense strand
uuccagaacuccauggcua

SEQ ID NO: 2529675 - RNA, 19 nt, Homo sapiens
  misc_RNA (1)...(19): siRNA sense strand
gaagaagagaacaaccgaa

SEQ ID NO: 2529676 - RNA, 19 nt, Homo sapiens
  misc_RNA (1)...(19): siRNA sense strand
ccaaacuggggaagcaaua

SEQ ID NO: 2529677 - RNA, 19 nt, Homo sapiens
  misc_RNA (1)...(19): siRNA sense strand
cugaagccauccagagcau

SEQ ID NO: 2529678 - RNA, 19 nt, Homo sapiens
  misc_RNA (1)...(19): siRNA sense strand
uggguguugcugagacaaa

SEQ ID NO: 2529679 - RNA, 19 nt, Homo sapiens
  misc_RNA (1)...(19): siRNA sense strand
agacaaagcuccuucacac

SEQ ID NO: 2529680 - RNA, 19 nt, Homo sapiens
  misc_RNA (1)...(19): siRNA sense strand
uggcaaacacauugauaaa

SEQ ID NO: 2529681 - RNA, 19 nt, Homo sapiens
  misc_RNA (1)...(19): siRNA sense strand
ggucauuauuaaagguaga

SEQ ID NO: 2529682 - RNA, 19 nt, Homo sapiens
  misc_RNA (1)...(19): siRNA sense strand
agagaaaggaggcuggaaa

SEQ ID NO: 2529683 - RNA, 19 nt, Homo sapiens
  misc_RNA (1)...(19): siRNA sense strand
cggaaaggaguguuugaaa

SEQ ID NO: 2529684 - RNA, 19 nt, Homo sapiens
  misc_RNA (1)...(19): siRNA sense strand
guguaacauuggugucaaa

SEQ ID NO: 2529685 - RNA, 19 nt, Homo sapiens
  misc_RNA (1)...(19): siRNA sense strand
ggcaaagaaccgaaaguau

SEQ ID NO: 2529686 - RNA, 19 nt, Homo sapiens
  misc_RNA (1)...(19): siRNA sense strand
cugcuaaagauguggugaa

SEQ ID NO: 2529687 - RNA, 19 nt, Homo sapiens
  misc_RNA (1)...(19): siRNA sense strand
gaguaugaagagaggguca

SEQ ID NO: 2529688 - RNA, 19 nt, Homo sapiens
  misc_RNA (1)...(19): siRNA sense strand
ucugagaccaagugauaaa

SEQ ID NO: 2529689 - RNA, 19 nt, Homo sapiens
  misc_RNA (1)...(19): siRNA sense strand
ccucauaaagccagaagau

SEQ ID NO: 2529690 - RNA, 19 nt, Homo sapiens
  misc_RNA (1)...(19): siRNA sense strand
ccaugaacuacaaaugaaa

SEQ ID NO: 2529691 - RNA, 19 nt, Homo sapiens
  misc_RNA (1)...(19): siRNA sense strand
aggcaaggauagacagcga

SEQ ID NO: 2529692 - RNA, 19 nt, Homo sapiens
  misc_RNA (1)...(19): siRNA sense strand
cauugaaucaggaguggaa

SEQ ID NO: 2529693 - RNA, 19 nt, Homo sapiens
  misc_RNA (1)...(19): siRNA sense strand
ccaaaagagcagaugauuu

SEQ ID NO: 2529694 - RNA, 19 nt, Homo sapiens
  misc_RNA (1)...(19): siRNA sense strand
uggaguagaaagaguauuu

SEQ ID NO: 2529695 - RNA, 19 nt, Homo sapiens
  misc_RNA (1)...(19): siRNA sense strand
ugauaaacccacagccuau

SEQ ID NO: 2529696 - RNA, 19 nt, Homo sapiens
  misc_RNA (1)...(19): siRNA sense strand
ggaauauggaguuggugau

SEQ ID NO: 2529697 - RNA, 19 nt, Homo sapiens
  misc_RNA (1)...(19): siRNA sense strand
caagacaggaaauggaaaa

SEQ ID NO: 2529698 - RNA, 19 nt, Homo sapiens
  misc_RNA (1)...(19): siRNA sense strand
aggaaaaucucacgaucaa

SEQ ID NO: 2529699 - RNA, 19 nt, Homo sapiens
  misc_RNA (1)...(19): siRNA sense strand
cagaacuaauuauggugaa

SEQ ID NO: 2529700 - RNA, 19 nt, Homo sapiens
  misc_RNA (1)...(19): siRNA sense strand
aaggaguguuugaaagaga

SEQ ID NO: 2529701 - RNA, 19 nt, Homo sapiens
  misc_RNA (1)...(19): siRNA sense strand
agaccaagugauaaaguuu

SEQ ID NO: 2529702 - RNA, 19 nt, Homo sapiens
  misc_RNA (1)...(19): siRNA sense strand
agaugggaugauagauaaa

SEQ ID NO: 2529703 - RNA, 19 nt, Homo sapiens
  misc_RNA (1)...(19): siRNA sense strand
acuacugugauguggauaa

SEQ ID NO: 2529704 - RNA, 19 nt, Homo sapiens
  misc_RNA (1)...(19): siRNA sense strand
ccaagacaggaaauggaaa

SEQ ID NO: 2529705 - RNA, 19 nt, Homo sapiens
  misc_RNA (1)...(19): siRNA sense strand
caauacgacauuugggaca

SEQ ID NO: 2529706 - RNA, 19 nt, Homo sapiens
  misc_RNA (1)...(19): siRNA sense strand
aagaaggaaaugaaggaca

SEQ ID NO: 2529707 - RNA, 19 nt, Homo sapiens
  misc_RNA (1)...(19): siRNA sense strand
aacaacaugaacagagaaa

SEQ ID NO: 2529708 - RNA, 19 nt, Homo sapiens
  misc_RNA (1)...(19): siRNA sense strand
aggaauauggaguugguga

SEQ ID NO: 2529709 - RNA, 19 nt, Homo sapiens
  misc_RNA (1)...(19): siRNA sense strand
cuucaagaccagaucaaaa

SEQ ID NO: 2529710 - RNA, 19 nt, Homo sapiens
  misc_RNA (1)...(19): siRNA sense strand
ugucaaacugucugaugaa

SEQ ID NO: 2529711 - RNA, 19 nt, Homo sapiens
  misc_RNA (1)...(19): siRNA sense strand
augacaagcuccuggacca

SEQ ID NO: 2529712 - RNA, 19 nt, Homo sapiens
  misc_RNA (1)...(19): siRNA sense strand
guguaguguguauggagua

SEQ ID NO: 2529713 - RNA, 19 nt, Homo sapiens
  misc_RNA (1)...(19): siRNA sense strand
acaagaagggagaugggau

SEQ ID NO: 2529714 - RNA, 19 nt, Homo sapiens
  misc_RNA (1)...(19): siRNA sense strand
aagagauugcagagauauu

SEQ ID NO: 2529715 - RNA, 19 nt, Homo sapiens
  misc_RNA (1)...(19): siRNA sense strand
cuggcaaacacauugauaa

SEQ ID NO: 2529716 - RNA, 19 nt, Homo sapiens
  misc_RNA (1)...(19): siRNA sense strand
cuuaaagaguaugaagaga

SEQ ID NO: 2529717 - RNA, 19 nt, Homo sapiens
  misc_RNA (1)...(19): siRNA sense strand
ggugaagaagguagugcau

SEQ ID NO: 2529718 - RNA, 19 nt, Homo sapiens
  misc_RNA (1)...(19): siRNA sense strand
ucaacauaaacuuggaaga

SEQ ID NO: 2529719 - RNA, 19 nt, Homo sapiens
  misc_RNA (1)...(19): siRNA sense strand
gagaaaggaggcuggaaac

SEQ ID NO: 2529720 - RNA, 19 nt, Homo sapiens
  misc_RNA (1)...(19): siRNA sense strand
acuaugacaagaagggaga

SEQ ID NO: 2529721 - RNA, 19 nt, Homo sapiens
  misc_RNA (1)...(19): siRNA sense strand
aacccaacacagagauuaa

SEQ ID NO: 2529722 - RNA, 19 nt, Homo sapiens
  misc_RNA (1)...(19): siRNA sense strand
caucagugacagaacuaau

SEQ ID NO: 2529723 - RNA, 19 nt, Homo sapiens
  misc_RNA (1)...(19): siRNA sense strand
gcaucacagaggagaaguu

SEQ ID NO: 2529724 - RNA, 19 nt, Homo sapiens
  misc_RNA (1)...(19): siRNA sense strand
aagaauacucugcuaaaga

SEQ ID NO: 2529725 - RNA, 19 nt, Homo sapiens
  misc_RNA (1)...(19): siRNA sense strand
ccuucaggcacuaugacaa

SEQ ID NO: 2529726 - RNA, 19 nt, Homo sapiens
  misc_RNA (1)...(19): siRNA sense strand
gcaggaagcuugugaccag

SEQ ID NO: 2529727 - RNA, 19 nt, Homo sapiens
  misc_RNA (1)...(19): siRNA sense strand
aaguauaacccaucaaguu

SEQ ID NO: 2529728 - RNA, 19 nt, Homo sapiens
  misc_RNA (1)...(19): siRNA sense strand
ggaugauagauaaagacga

SEQ ID NO: 2529729 - RNA, 19 nt, Homo sapiens
  misc_RNA (1)...(19): siRNA sense strand
agaaaagacucuccggaca

SEQ ID NO: 2529730 - RNA, 19 nt, Homo sapiens
  misc_RNA (1)...(19): siRNA sense strand
gagcaaugccgccuggaga

SEQ ID NO: 2529731 - RNA, 19 nt, Homo sapiens
  misc_RNA (1)...(19): siRNA sense strand
aggacauugaugagcgcua

SEQ ID NO: 2529732 - RNA, 19 nt, Homo sapiens
  misc_RNA (1)...(19): siRNA sense strand
cagccaacucagacaguga

SEQ ID NO: 2529733 - RNA, 19 nt, Homo sapiens
  misc_RNA (1)...(19): siRNA sense strand
ccggaagccuccaagcaga

SEQ ID NO: 2529734 - RNA, 19 nt, Homo sapiens
  misc_RNA (1)...(19): siRNA sense strand
cgaccgaacugaaggaagg

SEQ ID NO: 2529735 - RNA, 19 nt, Homo sapiens
  misc_RNA (1)...(19): siRNA sense strand
uucccaagcuugaaggaca

SEQ ID NO: 2529736 - RNA, 19 nt, Homo sapiens
  misc_RNA (1)...(19): siRNA sense strand
ugugagaaguguagggagc

SEQ ID NO: 2529737 - RNA, 19 nt, Homo sapiens
  misc_RNA (1)...(19): siRNA sense strand
aggugaagauggauggaau

SEQ ID NO: 2529738 - RNA, 19 nt, Homo sapiens
  misc_RNA (1)...(19): siRNA sense strand
gguggaaagagcagcaaaa

SEQ ID NO: 2529739 - RNA, 19 nt, Homo sapiens
  misc_RNA (1)...(19): siRNA sense strand
guuacugauggaagagcaa

SEQ ID NO: 2529740 - RNA, 19 nt, Homo sapiens
  misc_RNA (1)...(19): siRNA sense strand
ggguggaaagagcagcaaa

SEQ ID NO: 2529741 - RNA, 19 nt, Homo sapiens
  misc_RNA (1)...(19): siRNA sense strand
ucuagauugugaaggugaa

SEQ ID NO: 2529742 - RNA, 19 nt, Homo sapiens
  misc_RNA (1)...(19): siRNA sense strand
acuaaaagauugaaggaug

SEQ ID NO: 2529743 - RNA, 19 nt, Homo sapiens
  misc_RNA (1)...(19): siRNA sense strand
guugaauguuacaggcguu

SEQ ID NO: 2529744 - RNA, 19 nt, Homo sapiens
  misc_RNA (1)...(19): siRNA sense strand
uugugaaggugaagaugga

SEQ ID NO: 2529745 - RNA, 19 nt, Homo sapiens
  misc_RNA (1)...(19): siRNA sense strand
caugaggcagagaggaaca

SEQ ID NO: 2529746 - RNA, 19 nt, Homo sapiens
  misc_RNA (1)...(19): siRNA sense strand
augaaggagcucagggaua

SEQ ID NO: 2529747 - RNA, 19 nt, Homo sapiens
  misc_RNA (1)...(19): siRNA sense strand
ccauagagucagugaucau

SEQ ID NO: 2529748 - RNA, 19 nt, Homo sapiens
  misc_RNA (1)...(19): siRNA sense strand
augaaaugaaagaggaaga

SEQ ID NO: 2529749 - RNA, 19 nt, Homo sapiens
  misc_RNA (1)...(19): siRNA sense strand
cuaugaaaugaaagaggaa

SEQ ID NO: 2529750 - RNA, 19 nt, Homo sapiens
  misc_RNA (1)...(19): siRNA sense strand
aagaugaagaugaggagau

SEQ ID NO: 2529751 - RNA, 19 nt, Homo sapiens
  misc_RNA (1)...(19): siRNA sense strand
agaugauggcauuggaaaa

SEQ ID NO: 2529752 - RNA, 19 nt, Homo sapiens
  misc_RNA (1)...(19): siRNA sense strand
cuguaugauuggaauguca

SEQ ID NO: 2529753 - RNA, 19 nt, Homo sapiens
  misc_RNA (1)...(19): siRNA sense strand
gaaaagaaaacuuggccau

SEQ ID NO: 2529754 - RNA, 19 nt, Homo sapiens
  misc_RNA (1)...(19): siRNA sense strand
cagcaucugaagaggauca

SEQ ID NO: 2529755 - RNA, 19 nt, Homo sapiens
  misc_RNA (1)...(19): siRNA sense strand
cagaagaugaagaugagga

SEQ ID NO: 2529756 - RNA, 19 nt, Homo sapiens
  misc_RNA (1)...(19): siRNA sense strand
ccccaaaagaagacggcua

SEQ ID NO: 2529757 - RNA, 19 nt, Homo sapiens
  misc_RNA (1)...(19): siRNA sense strand
aaugaaagaggaagagcca

SEQ ID NO: 2529758 - RNA, 19 nt, Homo sapiens
  misc_RNA (1)...(19): siRNA sense strand
uggccauccuagagaaaau

SEQ ID NO: 2529759 - RNA, 19 nt, Homo sapiens
  misc_RNA (1)...(19): siRNA sense strand
agaaagaaggagccgacuu

SEQ ID NO: 2529760 - RNA, 19 nt, Homo sapiens
  misc_RNA (1)...(19): siRNA sense strand
auguggagaugcuggauca

SEQ ID NO: 2529761 - RNA, 19 nt, Homo sapiens
  misc_RNA (1)...(19): siRNA sense strand
gcucagggauauauaccga

SEQ ID NO: 2529762 - RNA, 19 nt, Homo sapiens
  misc_RNA (1)...(19): siRNA sense strand
aggacagcgcuuugcacaa

SEQ ID NO: 2529763 - RNA, 19 nt, Homo sapiens
  misc_RNA (1)...(19): siRNA sense strand
acuaugaaaugaaagagga

SEQ ID NO: 2529764 - RNA, 19 nt, Homo sapiens
  misc_RNA (1)...(19): siRNA sense strand
ucucaauacagucugacaa

SEQ ID NO: 2529765 - RNA, 19 nt, Homo sapiens
  misc_RNA (1)...(19): siRNA sense strand
ucuuguagauugaggaaaa

SEQ ID NO: 2529766 - RNA, 19 nt, Homo sapiens
  misc_RNA (1)...(19): siRNA sense strand
ccuaaaucaucuuuggcaa

SEQ ID NO: 2529767 - RNA, 19 nt, Homo sapiens
  misc_RNA (1)...(19): siRNA sense strand
gaagaaggaaagagaggga

SEQ ID NO: 2529768 - RNA, 19 nt, Homo sapiens
  misc_RNA (1)...(19): siRNA sense strand
ggauaggaguagaagccca

SEQ ID NO: 2529769 - RNA, 19 nt, Homo sapiens
  misc_RNA (1)...(19): siRNA sense strand
ucguaguugaggagacaaa

SEQ ID NO: 2529770 - RNA, 19 nt, Homo sapiens
  misc_RNA (1)...(19): siRNA sense strand
ucgagaagaaggaaagaga

SEQ ID NO: 2529771 - RNA, 19 nt, Homo sapiens
  misc_RNA (1)...(19): siRNA sense strand
ucacgacauagaagggaua

SEQ ID NO: 2529772 - RNA, 19 nt, Homo sapiens
  misc_RNA (1)...(19): siRNA sense strand
guacugaggugauucgaga

SEQ ID NO: 2529773 - RNA, 19 nt, Homo sapiens
  misc_RNA (1)...(19): siRNA sense strand
ggaaaaugggcuauaccaa

SEQ ID NO: 2529774 - RNA, 19 nt, Homo sapiens
  misc_RNA (1)...(19): siRNA sense strand
agaagggauaggaguagaa

SEQ ID NO: 2529775 - RNA, 19 nt, Homo sapiens
  misc_RNA (1)...(19): siRNA sense strand
aacugugagucgagaagaa

SEQ ID NO: 2529776 - RNA, 19 nt, Homo sapiens
  misc_RNA (1)...(19): siRNA sense strand
ccuauagagccaagaaugu

SEQ ID NO: 2529777 - RNA, 19 nt, Homo sapiens
  misc_RNA (1)...(19): siRNA sense strand
ugggaaagacagugauugu

SEQ ID NO: 2529778 - RNA, 19 nt, Homo sapiens
  misc_RNA (1)...(19): siRNA sense strand
aguugaggagacaaagaaa

SEQ ID NO: 2529779 - RNA, 19 nt, Homo sapiens
  misc_RNA (1)...(19): siRNA sense strand
acgguuuguuugugaucua

SEQ ID NO: 2529780 - RNA, 19 nt, Homo sapiens
  misc_RNA (1)...(19): siRNA sense strand
ugauucgagaugugauaaa

SEQ ID NO: 2529781 - RNA, 19 nt, Homo sapiens
  misc_RNA (1)...(19): siRNA sense strand
ggaugaugccgaaaagaau

SEQ ID NO: 2529782 - RNA, 19 nt, Homo sapiens
  misc_RNA (1)...(19): siRNA sense strand
uggcaaagcacauggcauc

SEQ ID NO: 2529783 - RNA, 19 nt, Homo sapiens
  misc_RNA (1)...(19): siRNA sense strand
uaccaaagaagaagaggau

SEQ ID NO: 2529784 - RNA, 19 nt, Homo sapiens
  misc_RNA (1)...(19): siRNA sense strand
cgccaguccuauagagcca

SEQ ID NO: 2529785 - RNA, 19 nt, Homo sapiens
  misc_RNA (1)...(19): siRNA sense strand
gaaagagagggauggggaa

SEQ ID NO: 2529786 - RNA, 19 nt, Homo sapiens
  misc_RNA (1)...(19): siRNA sense strand
acauggaagaacucagcaa

SEQ ID NO: 2529787 - RNA, 19 nt, Homo sapiens
  misc_RNA (1)...(19): siRNA sense strand
gguggaagcuauuuggaug

SEQ ID NO: 2529788 - RNA, 19 nt, Homo sapiens
  misc_RNA (1)...(19): siRNA sense strand
gagaagaaggaaagagagg

SEQ ID NO: 2529789 - RNA, 19 nt, Homo sapiens
  misc_RNA (1)...(19): siRNA sense strand
agaaggaaagagagggaug

SEQ ID NO: 2529790 - RNA, 19 nt, Homo sapiens
  misc_RNA (1)...(19): siRNA sense strand
ggaaagagagggaugggga

SEQ ID NO: 2529791 - RNA, 19 nt, Homo sapiens
  misc_RNA (1)...(19): siRNA sense strand
ccgaaaagaaugaagaaag

SEQ ID NO: 2529792 - RNA, 19 nt, Homo sapiens
  misc_RNA (1)...(19): siRNA sense strand
ccuucgauuacuuugaaua

SEQ ID NO: 2529793 - RNA, 19 nt, Homo sapiens
  misc_RNA (1)...(19): siRNA sense strand
guugaggagacaaagaaaa

SEQ ID NO: 2529794 - RNA, 19 nt, Homo sapiens
  misc_RNA (1)...(19): siRNA sense strand
gggcugggaccuagauagu

SEQ ID NO: 2529795 - RNA, 19 nt, Homo sapiens
  misc_RNA (1)...(19): siRNA sense strand
cagaggaaugugagggcau

SEQ ID NO: 2529796 - RNA, 19 nt, Homo sapiens
  misc_RNA (1)...(19): siRNA sense strand
ccuucagacccauggagaa

SEQ ID NO: 2529797 - RNA, 19 nt, Homo sapiens
  misc_RNA (1)...(19): siRNA sense strand
ggagaaagaagugugggaa

SEQ ID NO: 2529798 - RNA, 19 nt, Homo sapiens
  misc_RNA (1)...(19): siRNA sense strand
ggaacauccuucagaccca

SEQ ID NO: 2529799 - RNA, 19 nt, Homo sapiens
  misc_RNA (1)...(19): siRNA sense strand
cuucagacccauggagaau

SEQ ID NO: 2529800 - RNA, 19 nt, Homo sapiens
  misc_RNA (1)...(19): siRNA sense strand
uggagaaagaaguguggga

SEQ ID NO: 2529801 - RNA, 19 nt, Homo sapiens
  misc_RNA (1)...(19): siRNA sense strand
gggaaauaacagacgcauc

SEQ ID NO: 2529802 - RNA, 19 nt, Homo sapiens
  misc_RNA (1)...(19): siRNA sense strand
aacucauggauguggauaa

SEQ ID NO: 2529803 - RNA, 19 nt, Homo sapiens
  misc_RNA (1)...(19): siRNA sense strand
ccaaaaggccucacagcau

SEQ ID NO: 2529804 - RNA, 19 nt, Homo sapiens
  misc_RNA (1)...(19): siRNA sense strand
cagaggaaugugagggcau

SEQ ID NO: 2529805 - RNA, 19 nt, Homo sapiens
  misc_RNA (1)...(19): siRNA sense strand
ccuucagacccauggagaa

SEQ ID NO: 2529806 - RNA, 19 nt, Homo sapiens
  misc_RNA (1)...(19): siRNA sense strand
ggagaaagaagugugggaa

SEQ ID NO: 2529807 - RNA, 19 nt, Homo sapiens
  misc_RNA (1)...(19): siRNA sense strand
ggaacauccuucagaccca

SEQ ID NO: 2529808 - RNA, 19 nt, Homo sapiens
  misc_RNA (1)...(19): siRNA sense strand
cuucagacccauggagaau

SEQ ID NO: 2529809 - RNA, 19 nt, Homo sapiens
  misc_RNA (1)...(19): siRNA sense strand
uggagaaagaaguguggga

SEQ ID NO: 2529810 - RNA, 19 nt, Homo sapiens
  misc_RNA (1)...(19): siRNA sense strand
gggaaauaacagacgcauc

SEQ ID NO: 2529811 - RNA, 19 nt, Homo sapiens
  misc_RNA (1)...(19): siRNA sense strand
aacucauggauguggauaa

SEQ ID NO: 2529812 - RNA, 19 nt, Homo sapiens
  misc_RNA (1)...(19): siRNA sense strand
ccaaaaggccucacagcau

SEQ ID NO: 2529813 - RNA, 19 nt, Homo sapiens
  misc_RNA (1)...(19): siRNA sense strand
cagaggaaugugagggcau

SEQ ID NO: 2529814 - RNA, 19 nt, Homo sapiens
  misc_RNA (1)...(19): siRNA sense strand
ccuucagacccauggagaa

SEQ ID NO: 2529815 - RNA, 19 nt, Homo sapiens
  misc_RNA (1)...(19): siRNA sense strand
ggagaaagaagugugggaa

SEQ ID NO: 2529816 - RNA, 19 nt, Homo sapiens
  misc_RNA (1)...(19): siRNA sense strand
ggaacauccuucagaccca

SEQ ID NO: 2529817 - RNA, 19 nt, Homo sapiens
  misc_RNA (1)...(19): siRNA sense strand
cuucagacccauggagaau

SEQ ID NO: 2529818 - RNA, 19 nt, Homo sapiens
  misc_RNA (1)...(19): siRNA sense strand
uggagaaagaaguguggga

SEQ ID NO: 2529819 - RNA, 19 nt, Homo sapiens
  misc_RNA (1)...(19): siRNA sense strand
gggaaauaacagacgcauc

SEQ ID NO: 2529820 - RNA, 19 nt, Homo sapiens
  misc_RNA (1)...(19): siRNA sense strand
aacucauggauguggauaa

SEQ ID NO: 2529821 - RNA, 19 nt, Homo sapiens
  misc_RNA (1)...(19): siRNA sense strand
ccaaaaggccucacagcau

SEQ ID NO: 2529822 - RNA, 19 nt, Homo sapiens
  misc_RNA (1)...(19): siRNA sense strand
cuacaaagacaaauggaga

SEQ ID NO: 2529823 - RNA, 19 nt, Homo sapiens
  misc_RNA (1)...(19): siRNA sense strand
gaucaaagauaauggcauc

SEQ ID NO: 2529824 - RNA, 19 nt, Homo sapiens
  misc_RNA (1)...(19): siRNA sense strand
aggauauuguggagaaaau

SEQ ID NO: 2529825 - RNA, 19 nt, Homo sapiens
  misc_RNA (1)...(19): siRNA sense strand
cccugaaaggcaagacaua

SEQ ID NO: 2529826 - RNA, 19 nt, Homo sapiens
  misc_RNA (1)...(19): siRNA sense strand
uagaggaagcacagcgcaa

SEQ ID NO: 2529827 - RNA, 19 nt, Homo sapiens
  misc_RNA (1)...(19): siRNA sense strand
gcacaggagcccuugguca

SEQ ID NO: 2529828 - RNA, 19 nt, Homo sapiens
  misc_RNA (1)...(19): siRNA sense strand
agcaugaagaucaaagaua

SEQ ID NO: 2529829 - RNA, 19 nt, Homo sapiens
  misc_RNA (1)...(19): siRNA sense strand
guuucuuagugguguaaca

SEQ ID NO: 2529830 - RNA, 19 nt, Homo sapiens
  misc_RNA (1)...(19): siRNA sense strand
caauguagacacaggagca

SEQ ID NO: 2529831 - RNA, 19 nt, Homo sapiens
  misc_RNA (1)...(19): siRNA sense strand
ccaagacccugcuggccaa

SEQ ID NO: 2529832 - RNA, 19 nt, Homo sapiens
  misc_RNA (1)...(19): siRNA sense strand
uggaacugcaagaagacua

SEQ ID NO: 2529833 - RNA, 19 nt, Homo sapiens
  misc_RNA (1)...(19): siRNA sense strand
ccuucaaccacgagcacau

SEQ ID NO: 2529834 - RNA, 19 nt, Homo sapiens
  misc_RNA (1)...(19): siRNA sense strand
uacaaagacaaauggagaa

SEQ ID NO: 2529835 - RNA, 19 nt, Homo sapiens
  misc_RNA (1)...(19): siRNA sense strand
agaucaaagauaauggcau

SEQ ID NO: 2529836 - RNA, 19 nt, Homo sapiens
  misc_RNA (1)...(19): siRNA sense strand
ccuacaacuugaaggccca

SEQ ID NO: 2529837 - RNA, 19 nt, Homo sapiens
  misc_RNA (1)...(19): siRNA sense strand
uaucaacaauaucgcggaa

SEQ ID NO: 2529838 - RNA, 19 nt, Homo sapiens
  misc_RNA (1)...(19): siRNA sense strand
gagauuaagcaggggaaau

SEQ ID NO: 2529839 - RNA, 19 nt, Homo sapiens
  misc_RNA (1)...(19): siRNA sense strand
aaggaauggaacugcaaga

SEQ ID NO: 2529840 - RNA, 19 nt, Homo sapiens
  misc_RNA (1)...(19): siRNA sense strand
gaggaagcacagcgcaaaa

SEQ ID NO: 2529841 - RNA, 19 nt, Homo sapiens
  misc_RNA (1)...(19): siRNA sense strand
ggaggaaggagaagcgaga

SEQ ID NO: 2529842 - RNA, 19 nt, Homo sapiens
  misc_RNA (1)...(19): siRNA sense strand
cccauucacuggagggcaa

SEQ ID NO: 2529843 - RNA, 19 nt, Homo sapiens
  misc_RNA (1)...(19): siRNA sense strand
cacuggagggcaagacaaa

SEQ ID NO: 2529844 - RNA, 19 nt, Homo sapiens
  misc_RNA (1)...(19): siRNA sense strand
gcuggcaaauuccgggcaa

SEQ ID NO: 2529845 - RNA, 19 nt, Homo sapiens
  misc_RNA (1)...(19): siRNA sense strand
uggcauuggagcagagcaa

SEQ ID NO: 2529846 - RNA, 19 nt, Homo sapiens
  misc_RNA (1)...(19): siRNA sense strand
gcaaaugggauccggguga

SEQ ID NO: 2529847 - RNA, 19 nt, Homo sapiens
  misc_RNA (1)...(19): siRNA sense strand
ugaaauuagagaagggcau

SEQ ID NO: 2529848 - RNA, 19 nt, Homo sapiens
  misc_RNA (1)...(19): siRNA sense strand
ccgauaaaggacagauuga

SEQ ID NO: 2529849 - RNA, 19 nt, Homo sapiens
  misc_RNA (1)...(19): siRNA sense strand
gcauuggagcagagcaaga

SEQ ID NO: 2529850 - RNA, 19 nt, Homo sapiens
  misc_RNA (1)...(19): siRNA sense strand
ggaauguggacgagagucu

SEQ ID NO: 2529851 - RNA, 19 nt, Homo sapiens
  misc_RNA (1)...(19): siRNA sense strand
agaaaguggccgagcuuca

SEQ ID NO: 2529852 - RNA, 19 nt, Homo sapiens
  misc_RNA (1)...(19): siRNA sense strand
gggcauacgagcugggucu

SEQ ID NO: 2529853 - RNA, 19 nt, Homo sapiens
  misc_RNA (1)...(19): siRNA sense strand
agucaagugcuguaaggaa

SEQ ID NO: 2529854 - RNA, 19 nt, Homo sapiens
  misc_RNA (1)...(19): siRNA sense strand
aggagaugagugugggcua

SEQ ID NO: 2529855 - RNA, 19 nt, Homo sapiens
  misc_RNA (1)...(19): siRNA sense strand
ggagccagguggauggaga

SEQ ID NO: 2529856 - RNA, 19 nt, Homo sapiens
  misc_RNA (1)...(19): siRNA sense strand
cagaaaacguuugggaauu

SEQ ID NO: 2529857 - RNA, 19 nt, Homo sapiens
  misc_RNA (1)...(19): siRNA sense strand
ucagaaaacguuugggaau

SEQ ID NO: 2529858 - RNA, 19 nt, Homo sapiens
  misc_RNA (1)...(19): siRNA sense strand
gcugaauguuauagguauc

SEQ ID NO: 2529859 - RNA, 19 nt, Homo sapiens
  misc_RNA (1)...(19): siRNA sense strand
ggcaagaaccagcuggaga

SEQ ID NO: 2529860 - RNA, 19 nt, Homo sapiens
  misc_RNA (1)...(19): siRNA sense strand
cggaaaguaccuugccgaa

SEQ ID NO: 2529861 - RNA, 19 nt, Homo sapiens
  misc_RNA (1)...(19): siRNA sense strand
gggaagagcaaguggugac

SEQ ID NO: 2529862 - RNA, 19 nt, Homo sapiens
  misc_RNA (1)...(19): siRNA sense strand
ggggagaguaugagauuga

SEQ ID NO: 2529863 - RNA, 19 nt, Homo sapiens
  misc_RNA (1)...(19): siRNA sense strand
ccagaagcgccgaaaggau

SEQ ID NO: 2529864 - RNA, 19 nt, Homo sapiens
  misc_RNA (1)...(19): siRNA sense strand
ggucaucuguggaggugga

SEQ ID NO: 2529865 - RNA, 19 nt, Homo sapiens
  misc_RNA (1)...(19): siRNA sense strand
gagugugggcuaugcaaau

SEQ ID NO: 2529866 - RNA, 19 nt, Homo sapiens
  misc_RNA (1)...(19): siRNA sense strand
uguggaugcugauggaaga

SEQ ID NO: 2529867 - RNA, 19 nt, Homo sapiens
  misc_RNA (1)...(19): siRNA sense strand
gagccagguggauggagaa

SEQ ID NO: 2529868 - RNA, 19 nt, Homo sapiens
  misc_RNA (1)...(19): siRNA sense strand
gcucaaucuuucuggccca

SEQ ID NO: 2529869 - RNA, 19 nt, Homo sapiens
  misc_RNA (1)...(19): siRNA sense strand
ggguggaggguaugaaaau

SEQ ID NO: 2529870 - RNA, 19 nt, Homo sapiens
  misc_RNA (1)...(19): siRNA sense strand
ggauccgggugaugagcau

SEQ ID NO: 2529871 - RNA, 19 nt, Homo sapiens
  misc_RNA (1)...(19): siRNA sense strand
gugaugagcaugacgcaca

SEQ ID NO: 2529872 - RNA, 19 nt, Homo sapiens
  misc_RNA (1)...(19): siRNA sense strand
cugaggaggaugccagaau

SEQ ID NO: 2529873 - RNA, 19 nt, Homo sapiens
  misc_RNA (1)...(19): siRNA sense strand
caacuauuguggaugcuga

SEQ ID NO: 2529874 - RNA, 19 nt, Homo sapiens
  misc_RNA (1)...(19): siRNA sense strand
guuggaagacaaagagcca

SEQ ID NO: 2529875 - RNA, 19 nt, Homo sapiens
  misc_RNA (1)...(19): siRNA sense strand
gggcuaugcaaaugggauc

SEQ ID NO: 2529876 - RNA, 19 nt, Homo sapiens
  misc_RNA (1)...(19): siRNA sense strand
agcagaauggaguguauaa

SEQ ID NO: 2529877 - RNA, 19 nt, Homo sapiens
  misc_RNA (1)...(19): siRNA sense strand
agaucaugaaguuggugaa

SEQ ID NO: 2529878 - RNA, 19 nt, Homo sapiens
  misc_RNA (1)...(19): siRNA sense strand
cuauaagccagauugguuu

SEQ ID NO: 2529879 - RNA, 19 nt, Homo sapiens
  misc_RNA (1)...(19): siRNA sense strand
uuaagaaacacaugccgaa

SEQ ID NO: 2529880 - RNA, 19 nt, Homo sapiens
  misc_RNA (1)...(19): siRNA sense strand
uggcagacuacucaaacaa

SEQ ID NO: 2529881 - RNA, 19 nt, Homo sapiens
  misc_RNA (1)...(19): siRNA sense strand
aauccggaaugcuggguau

SEQ ID NO: 2529882 - RNA, 19 nt, Homo sapiens
  misc_RNA (1)...(19): siRNA sense strand
agauugaaugccaguauuu

SEQ ID NO: 2529883 - RNA, 19 nt, Homo sapiens
  misc_RNA (1)...(19): siRNA sense strand
ugaaaaugacugcagcaua

SEQ ID NO: 2529884 - RNA, 19 nt, Homo sapiens
  misc_RNA (1)...(19): siRNA sense strand
caauuuucacugagggcaa

SEQ ID NO: 2529885 - RNA, 19 nt, Homo sapiens
  misc_RNA (1)...(19): siRNA sense strand
ucguggagucugaagucaa

SEQ ID NO: 2529886 - RNA, 19 nt, Homo sapiens
  misc_RNA (1)...(19): siRNA sense strand
aagucaugccuuugaugua

SEQ ID NO: 2529887 - RNA, 19 nt, Homo sapiens
  misc_RNA (1)...(19): siRNA sense strand
guuugaggaacuuggaaca

SEQ ID NO: 2529888 - RNA, 19 nt, Homo sapiens
  misc_RNA (1)...(19): siRNA sense strand
acaacaagcuggugagcag

SEQ ID NO: 2529889 - RNA, 19 nt, Homo sapiens
  misc_RNA (1)...(19): siRNA sense strand
cucuaauaccuauggaaau

SEQ ID NO: 2529890 - RNA, 19 nt, Homo sapiens
  misc_RNA (1)...(19): siRNA sense strand
uggaaaucuuuauggaucu

SEQ ID NO: 2529891 - RNA, 19 nt, Homo sapiens
  misc_RNA (1)...(19): siRNA sense strand
aauaaacagaggaugucaa

SEQ ID NO: 2529892 - RNA, 19 nt, Homo sapiens
  misc_RNA (1)...(19): siRNA sense strand
gcuuaaaauuucucacaca

SEQ ID NO: 2529893 - RNA, 19 nt, Homo sapiens
  misc_RNA (1)...(19): siRNA sense strand
auguagagaaugugggaaa

SEQ ID NO: 2529894 - RNA, 19 nt, Homo sapiens
  misc_RNA (1)...(19): siRNA sense strand
auguaaugaaugugggaaa

SEQ ID NO: 2529895 - RNA, 19 nt, Homo sapiens
  misc_RNA (1)...(19): siRNA sense strand
acgugaugcuggagaacua

SEQ ID NO: 2529896 - RNA, 19 nt, Homo sapiens
  misc_RNA (1)...(19): siRNA sense strand
gauucacacaggagagaaa

SEQ ID NO: 2529897 - RNA, 19 nt, Homo sapiens
  misc_RNA (1)...(19): siRNA sense strand
cugaagaagaauuggauca

SEQ ID NO: 2529898 - RNA, 19 nt, Homo sapiens
  misc_RNA (1)...(19): siRNA sense strand
agaauucauacuagggaaa

SEQ ID NO: 2529899 - RNA, 19 nt, Homo sapiens
  misc_RNA (1)...(19): siRNA sense strand
gagaauucauacuagggaa

SEQ ID NO: 2529900 - RNA, 19 nt, Homo sapiens
  misc_RNA (1)...(19): siRNA sense strand
augcaaugaauguggaaaa

SEQ ID NO: 2529901 - RNA, 19 nt, Homo sapiens
  misc_RNA (1)...(19): siRNA sense strand
aauucacacuggcgagaaa

SEQ ID NO: 2529902 - RNA, 19 nt, Homo sapiens
  misc_RNA (1)...(19): siRNA sense strand
cccuaugaauguaaggaau

SEQ ID NO: 2529903 - RNA, 19 nt, Homo sapiens
  misc_RNA (1)...(19): siRNA sense strand
gaguguagugaguguggaa

SEQ ID NO: 2529904 - RNA, 19 nt, Homo sapiens
  misc_RNA (1)...(19): siRNA sense strand
gagaauucauacuggggaa

SEQ ID NO: 2529905 - RNA, 19 nt, Homo sapiens
  misc_RNA (1)...(19): siRNA sense strand
guguagugaguguggaaaa

SEQ ID NO: 2529906 - RNA, 19 nt, Homo sapiens
  misc_RNA (1)...(19): siRNA sense strand
gccuuuaaucagaguacaa

SEQ ID NO: 2529907 - RNA, 19 nt, Homo sapiens
  misc_RNA (1)...(19): siRNA sense strand
ggaaagauucaguagcagu

SEQ ID NO: 2529908 - RNA, 19 nt, Homo sapiens
  misc_RNA (1)...(19): siRNA sense strand
ccaaucagcacuagcccaa

SEQ ID NO: 2529909 - RNA, 19 nt, Homo sapiens
  misc_RNA (1)...(19): siRNA sense strand
cagagauuccugaagaaga

SEQ ID NO: 2529910 - RNA, 19 nt, Homo sapiens
  misc_RNA (1)...(19): siRNA sense strand
acaucauauuggagagaag

SEQ ID NO: 2529911 - RNA, 19 nt, Homo sapiens
  misc_RNA (1)...(19): siRNA sense strand
aauaaaugugggaaagcuu

SEQ ID NO: 2529912 - RNA, 19 nt, Homo sapiens
  misc_RNA (1)...(19): siRNA sense strand
ucaauggacaauaaaggaa

SEQ ID NO: 2529913 - RNA, 19 nt, Homo sapiens
  misc_RNA (1)...(19): siRNA sense strand
gugaucaaagucagggauu

SEQ ID NO: 2529914 - RNA, 19 nt, Homo sapiens
  misc_RNA (1)...(19): siRNA sense strand
ggauuucaaccuagcaaaa

SEQ ID NO: 2529915 - RNA, 19 nt, Homo sapiens
  misc_RNA (1)...(19): siRNA sense strand
ggagagaagccuuuugaau

SEQ ID NO: 2529916 - RNA, 19 nt, Homo sapiens
  misc_RNA (1)...(19): siRNA sense strand
aauucauacuggagagaag

SEQ ID NO: 2529917 - RNA, 19 nt, Homo sapiens
  misc_RNA (1)...(19): siRNA sense strand
gggauuucaaccuagcaaa

SEQ ID NO: 2529918 - RNA, 19 nt, Homo sapiens
  misc_RNA (1)...(19): siRNA sense strand
gggaaguguggaugccaga

SEQ ID NO: 2529919 - RNA, 19 nt, Homo sapiens
  misc_RNA (1)...(19): siRNA sense strand
ugaagaagaauuggaucaa

SEQ ID NO: 2529920 - RNA, 19 nt, Homo sapiens
  misc_RNA (1)...(19): siRNA sense strand
uuacccaacauaagagaau

SEQ ID NO: 2529921 - RNA, 19 nt, Homo sapiens
  misc_RNA (1)...(19): siRNA sense strand
ucauucagcaucagagaca

SEQ ID NO: 2529922 - RNA, 19 nt, Homo sapiens
  misc_RNA (1)...(19): siRNA sense strand
uggagagaaaccuuauaaa

SEQ ID NO: 2529923 - RNA, 19 nt, Homo sapiens
  misc_RNA (1)...(19): siRNA sense strand
uagcccaacaucagagaau

SEQ ID NO: 2529924 - RNA, 19 nt, Homo sapiens
  misc_RNA (1)...(19): siRNA sense strand
gcuuuuaaccagacugcaa

SEQ ID NO: 2529925 - RNA, 19 nt, Homo sapiens
  misc_RNA (1)...(19): siRNA sense strand
cuaaggaagauaagagaaa

SEQ ID NO: 2529926 - RNA, 19 nt, Homo sapiens
  misc_RNA (1)...(19): siRNA sense strand
gaguuaagccacaggaaau

SEQ ID NO: 2529927 - RNA, 19 nt, Homo sapiens
  misc_RNA (1)...(19): siRNA sense strand
acauaaaguaacaggagua

SEQ ID NO: 2529928 - RNA, 19 nt, Homo sapiens
  misc_RNA (1)...(19): siRNA sense strand
agaucaaacugaagagcau

SEQ ID NO: 2529929 - RNA, 19 nt, Homo sapiens
  misc_RNA (1)...(19): siRNA sense strand
cagcaagaacuaaggaaga

SEQ ID NO: 2529930 - RNA, 19 nt, Homo sapiens
  misc_RNA (1)...(19): siRNA sense strand
ggucauggucagauggaau

SEQ ID NO: 2529931 - RNA, 19 nt, Homo sapiens
  misc_RNA (1)...(19): siRNA sense strand
aguaacaggaguagaguau

SEQ ID NO: 2529932 - RNA, 19 nt, Homo sapiens
  misc_RNA (1)...(19): siRNA sense strand
gguuauaucaccaagacaa

SEQ ID NO: 2529933 - RNA, 19 nt, Homo sapiens
  misc_RNA (1)...(19): siRNA sense strand
caaguauugaagagggaua

SEQ ID NO: 2529934 - RNA, 19 nt, Homo sapiens
  misc_RNA (1)...(19): siRNA sense strand
aguaugaagcucagaauau

SEQ ID NO: 2529935 - RNA, 19 nt, Homo sapiens
  misc_RNA (1)...(19): siRNA sense strand
gggccaggaaauuguaaua

SEQ ID NO: 2529936 - RNA, 19 nt, Homo sapiens
  misc_RNA (1)...(19): siRNA sense strand
agauaagauacucaggaaa

SEQ ID NO: 2529937 - RNA, 19 nt, Homo sapiens
  misc_RNA (1)...(19): siRNA sense strand
acuugaugauggugaaauu

SEQ ID NO: 2529938 - RNA, 19 nt, Homo sapiens
  misc_RNA (1)...(19): siRNA sense strand
ggaaccagacaaugaacaa

SEQ ID NO: 2529939 - RNA, 19 nt, Homo sapiens
  misc_RNA (1)...(19): siRNA sense strand
cagugagagccaugcaaua

SEQ ID NO: 2529940 - RNA, 19 nt, Homo sapiens
  misc_RNA (1)...(19): siRNA sense strand
caauacauguugaggagca

SEQ ID NO: 2529941 - RNA, 19 nt, Homo sapiens
  misc_RNA (1)...(19): siRNA sense strand
guaaacuaacucaggaaau

SEQ ID NO: 2529942 - RNA, 19 nt, Homo sapiens
  misc_RNA (1)...(19): siRNA sense strand
ucacaagaucaaacacaaa

SEQ ID NO: 2529943 - RNA, 19 nt, Homo sapiens
  misc_RNA (1)...(19): siRNA sense strand
gcuuaagacuggaauggga

SEQ ID NO: 2529944 - RNA, 19 nt, Homo sapiens
  misc_RNA (1)...(19): siRNA sense strand
ccaaacuggacuugaucaa

SEQ ID NO: 2529945 - RNA, 19 nt, Homo sapiens
  misc_RNA (1)...(19): siRNA sense strand
cagacuuacuacaggcaau

SEQ ID NO: 2529946 - RNA, 19 nt, Homo sapiens
  misc_RNA (1)...(19): siRNA sense strand
gcaagaacuaaggaagaua

SEQ ID NO: 2529947 - RNA, 19 nt, Homo sapiens
  misc_RNA (1)...(19): siRNA sense strand
ugcaagaaucaguggaaga

SEQ ID NO: 2529948 - RNA, 19 nt, Homo sapiens
  misc_RNA (1)...(19): siRNA sense strand
guauccagucagaagaaua

SEQ ID NO: 2529949 - RNA, 19 nt, Homo sapiens
  misc_RNA (1)...(19): siRNA sense strand
agggauacgcagacaguuu

SEQ ID NO: 2529950 - RNA, 19 nt, Homo sapiens
  misc_RNA (1)...(19): siRNA sense strand
gacuaucaccggaggcaua

SEQ ID NO: 2529951 - RNA, 19 nt, Homo sapiens
  misc_RNA (1)...(19): siRNA sense strand
aggcauaauccuaaaacaa

SEQ ID NO: 2529952 - RNA, 19 nt, Homo sapiens
  misc_RNA (1)...(19): siRNA sense strand
ccuaaaaggauucccgaaa

SEQ ID NO: 2529953 - RNA, 19 nt, Homo sapiens
  misc_RNA (1)...(19): siRNA sense strand
agucagaagaauagaugga

SEQ ID NO: 2529954 - RNA, 19 nt, Homo sapiens
  misc_RNA (1)...(19): siRNA sense strand
ggauaaguguucagcucca

SEQ ID NO: 2529955 - RNA, 19 nt, Homo sapiens
  misc_RNA (1)...(19): siRNA sense strand
ggaaugggaaacacagcaa

SEQ ID NO: 2529956 - RNA, 19 nt, Homo sapiens
  misc_RNA (1)...(19): siRNA sense strand
caucagagccagagagcug

SEQ ID NO: 2529957 - RNA, 19 nt, Homo sapiens
  misc_RNA (1)...(19): siRNA sense strand
agagcaugaaucuggaaua

SEQ ID NO: 2529958 - RNA, 19 nt, Homo sapiens
  misc_RNA (1)...(19): siRNA sense strand
gagaauuuaagaagacaga

SEQ ID NO: 2529959 - RNA, 19 nt, Homo sapiens
  misc_RNA (1)...(19): siRNA sense strand
agaagaacuuacacguauu

SEQ ID NO: 2529960 - RNA, 19 nt, Homo sapiens
  misc_RNA (1)...(19): siRNA sense strand
auucaacagaagagaguga

SEQ ID NO: 2529961 - RNA, 19 nt, Homo sapiens
  misc_RNA (1)...(19): siRNA sense strand
guggaagauucucuagcaa

SEQ ID NO: 2529962 - RNA, 19 nt, Homo sapiens
  misc_RNA (1)...(19): siRNA sense strand
gacuaaaggcggugacagu

SEQ ID NO: 2529963 - RNA, 19 nt, Homo sapiens
  misc_RNA (1)...(19): siRNA sense strand
uaugaugagaggagucaaa

SEQ ID NO: 2529964 - RNA, 19 nt, Homo sapiens
  misc_RNA (1)...(19): siRNA sense strand
cugcauuaaccuucagaau

SEQ ID NO: 2529965 - RNA, 19 nt, Homo sapiens
  misc_RNA (1)...(19): siRNA sense strand
auaccaugcucaaagacua

SEQ ID NO: 2529966 - RNA, 19 nt, Homo sapiens
  misc_RNA (1)...(19): siRNA sense strand
ugugugaacuucuggaaaa

SEQ ID NO: 2529967 - RNA, 19 nt, Homo sapiens
  misc_RNA (1)...(19): siRNA sense strand
aaaucaggaagcagcaaua

SEQ ID NO: 2529968 - RNA, 19 nt, Homo sapiens
  misc_RNA (1)...(19): siRNA sense strand
cuaaaaucuucguagagaa

SEQ ID NO: 2529969 - RNA, 19 nt, Homo sapiens
  misc_RNA (1)...(19): siRNA sense strand
cugcauucuucuuaccaaa

SEQ ID NO: 2529970 - RNA, 19 nt, Homo sapiens
  misc_RNA (1)...(19): siRNA sense strand
guuuggcauuucuggauaa

SEQ ID NO: 2529971 - RNA, 19 nt, Homo sapiens
  misc_RNA (1)...(19): siRNA sense strand
cuaaucgacaggagaagua

SEQ ID NO: 2529972 - RNA, 19 nt, Homo sapiens
  misc_RNA (1)...(19): siRNA sense strand
cccgaaagacucaguauau

SEQ ID NO: 2529973 - RNA, 19 nt, Homo sapiens
  misc_RNA (1)...(19): siRNA sense strand
gguugauaccauucuuaaa

SEQ ID NO: 2529974 - RNA, 19 nt, Homo sapiens
  misc_RNA (1)...(19): siRNA sense strand
aacacaaacuguaccuaaa

SEQ ID NO: 2529975 - RNA, 19 nt, Homo sapiens
  misc_RNA (1)...(19): siRNA sense strand
ugggagacauagauacauu

SEQ ID NO: 2529976 - RNA, 19 nt, Homo sapiens
  misc_RNA (1)...(19): siRNA sense strand
uggugaaauugaugagauc

SEQ ID NO: 2529977 - RNA, 19 nt, Homo sapiens
  misc_RNA (1)...(19): siRNA sense strand
ugaaucuggaauagaacaa

SEQ ID NO: 2529978 - RNA, 19 nt, Homo sapiens
  misc_RNA (1)...(19): siRNA sense strand
ggaagagguuauaucacca

SEQ ID NO: 2529979 - RNA, 19 nt, Homo sapiens
  misc_RNA (1)...(19): siRNA sense strand
acucuuaaacacacuguaa

SEQ ID NO: 2529980 - RNA, 19 nt, Homo sapiens
  misc_RNA (1)...(19): siRNA sense strand
aggagaaguaugaagcuca

SEQ ID NO: 2529981 - RNA, 19 nt, Homo sapiens
  misc_RNA (1)...(19): siRNA sense strand
cuguacugcagauaagaua

SEQ ID NO: 2529982 - RNA, 19 nt, Homo sapiens
  misc_RNA (1)...(19): siRNA sense strand
acagcagaauggagagaaa

SEQ ID NO: 2529983 - RNA, 19 nt, Homo sapiens
  misc_RNA (1)...(19): siRNA sense strand
cagaauuaagugauggaaa

SEQ ID NO: 2529984 - RNA, 19 nt, Homo sapiens
  misc_RNA (1)...(19): siRNA sense strand
caauaguaccuuuggagaa

SEQ ID NO: 2529985 - RNA, 19 nt, Homo sapiens
  misc_RNA (1)...(19): siRNA sense strand
auaccaaggaagagaagaa

SEQ ID NO: 2529986 - RNA, 19 nt, Homo sapiens
  misc_RNA (1)...(19): siRNA sense strand
gcuuuguggugguggagaa

SEQ ID NO: 2529987 - RNA, 19 nt, Homo sapiens
  misc_RNA (1)...(19): siRNA sense strand
ugggaaaaccaaugagaaa

SEQ ID NO: 2529988 - RNA, 19 nt, Homo sapiens
  misc_RNA (1)...(19): siRNA sense strand
uggaauacacugcuggaaa

SEQ ID NO: 2529989 - RNA, 19 nt, Homo sapiens
  misc_RNA (1)...(19): siRNA sense strand
caaacaaaaugcagagaca

SEQ ID NO: 2529990 - RNA, 19 nt, Homo sapiens
  misc_RNA (1)...(19): siRNA sense strand
gccagaaagccgaguagaa

SEQ ID NO: 2529991 - RNA, 19 nt, Homo sapiens
  misc_RNA (1)...(19): siRNA sense strand
aagaaggaacggaaacaaa

SEQ ID NO: 2529992 - RNA, 19 nt, Homo sapiens
  misc_RNA (1)...(19): siRNA sense strand
cugggaaggaagauaauaa

SEQ ID NO: 2529993 - RNA, 19 nt, Homo sapiens
  misc_RNA (1)...(19): siRNA sense strand
agauaagaccugggugaaa

SEQ ID NO: 2529994 - RNA, 19 nt, Homo sapiens
  misc_RNA (1)...(19): siRNA sense strand
cuugaaacccauugaaaga

SEQ ID NO: 2529995 - RNA, 19 nt, Homo sapiens
  misc_RNA (1)...(19): siRNA sense strand
gugagaagcaagauauaau

SEQ ID NO: 2529996 - RNA, 19 nt, Homo sapiens
  misc_RNA (1)...(19): siRNA sense strand
gaggcaaagcgcaggaaga

SEQ ID NO: 2529997 - RNA, 19 nt, Homo sapiens
  misc_RNA (1)...(19): siRNA sense strand
guuaaagagaauucaggua

SEQ ID NO: 2529998 - RNA, 19 nt, Homo sapiens
  misc_RNA (1)...(19): siRNA sense strand
agagaagaaggaacggaaa

SEQ ID NO: 2529999 - RNA, 19 nt, Homo sapiens
  misc_RNA (1)...(19): siRNA sense strand
ggaaaaccaaugagaaaau

SEQ ID NO: 2530000 - RNA, 19 nt, Homo sapiens
  misc_RNA (1)...(19): siRNA sense strand
auaaauugguggaacugaa

SEQ ID NO: 2530001 - RNA, 19 nt, Homo sapiens
  misc_RNA (1)...(19): siRNA sense strand
cagccaugguccagcagua

SEQ ID NO: 2530002 - RNA, 19 nt, Homo sapiens
  misc_RNA (1)...(19): siRNA sense strand
uugcuguggaagaggaaua

SEQ ID NO: 2530003 - RNA, 19 nt, Homo sapiens
  misc_RNA (1)...(19): siRNA sense strand
aguaaucaguuaaaggaga

SEQ ID NO: 2530004 - RNA, 19 nt, Homo sapiens
  misc_RNA (1)...(19): siRNA sense strand
gcguacagaacuaaagaga

SEQ ID NO: 2530005 - RNA, 19 nt, Homo sapiens
  misc_RNA (1)...(19): siRNA sense strand
ccaaggaagagaagaagga

SEQ ID NO: 2530006 - RNA, 19 nt, Homo sapiens
  misc_RNA (1)...(19): siRNA sense strand
gauacuucaccgauggaaa

SEQ ID NO: 2530007 - RNA, 19 nt, Homo sapiens
  misc_RNA (1)...(19): siRNA sense strand
acgauuugguuuauggcua

SEQ ID NO: 2530008 - RNA, 19 nt, Homo sapiens
  misc_RNA (1)...(19): siRNA sense strand
cccagaggaacgaaagaaa

SEQ ID NO: 2530009 - RNA, 19 nt, Homo sapiens
  misc_RNA (1)...(19): siRNA sense strand
acgaaagaaagcugaguca

SEQ ID NO: 2530010 - RNA, 19 nt, Homo sapiens
  misc_RNA (1)...(19): siRNA sense strand
guuuauggcuagaugcuga

SEQ ID NO: 2530011 - RNA, 19 nt, Homo sapiens
  misc_RNA (1)...(19): siRNA sense strand
cagaauggagagaaaauua

SEQ ID NO: 2530012 - RNA, 19 nt, Homo sapiens
  misc_RNA (1)...(19): siRNA sense strand
aagagaagaaggaacggaa

SEQ ID NO: 2530013 - RNA, 19 nt, Homo sapiens
  misc_RNA (1)...(19): siRNA sense strand
agaaggaagaacugaacau

SEQ ID NO: 2530014 - RNA, 19 nt, Homo sapiens
  misc_RNA (1)...(19): siRNA sense strand
cgaaaggccuugaaaccca

SEQ ID NO: 2530015 - RNA, 19 nt, Homo sapiens
  misc_RNA (1)...(19): siRNA sense strand
agccagguguggugaaauu

SEQ ID NO: 2530016 - RNA, 19 nt, Homo sapiens
  misc_RNA (1)...(19): siRNA sense strand
acuaugaagacgaggacga

SEQ ID NO: 2530017 - RNA, 19 nt, Homo sapiens
  misc_RNA (1)...(19): siRNA sense strand
cuuuaaguggaguggagaa

SEQ ID NO: 2530018 - RNA, 19 nt, Homo sapiens
  misc_RNA (1)...(19): siRNA sense strand
aagcugagucacaaauaaa

SEQ ID NO: 2530019 - RNA, 19 nt, Homo sapiens
  misc_RNA (1)...(19): siRNA sense strand
cagaaagccgaguagaaaa

SEQ ID NO: 2530020 - RNA, 19 nt, Homo sapiens
  misc_RNA (1)...(19): siRNA sense strand
gggaaaaccaaugagaaaa

SEQ ID NO: 2530021 - RNA, 19 nt, Homo sapiens
  misc_RNA (1)...(19): siRNA sense strand
gggaauagacauuacccuu

SEQ ID NO: 2530022 - RNA, 19 nt, Homo sapiens
  misc_RNA (1)...(19): siRNA sense strand
caauaaagagccagauaag

SEQ ID NO: 2530023 - RNA, 19 nt, Homo sapiens
  misc_RNA (1)...(19): siRNA sense strand
gagccagacaagugcaaca

SEQ ID NO: 2530024 - RNA, 19 nt, Homo sapiens
  misc_RNA (1)...(19): siRNA sense strand
auaucaacccauucaguaa

SEQ ID NO: 2530025 - RNA, 19 nt, Homo sapiens
  misc_RNA (1)...(19): siRNA sense strand
cugugagaagcaagauaua

SEQ ID NO: 2530026 - RNA, 19 nt, Homo sapiens
  misc_RNA (1)...(19): siRNA sense strand
augaagacgaggacgaaga

SEQ ID NO: 2530027 - RNA, 19 nt, Homo sapiens
  misc_RNA (1)...(19): siRNA sense strand
ucacuguugaagaggcaaa

SEQ ID NO: 2530028 - RNA, 19 nt, Homo sapiens
  misc_RNA (1)...(19): siRNA sense strand
aggaacggaaacaaaguua

SEQ ID NO: 2530029 - RNA, 19 nt, Homo sapiens
  misc_RNA (1)...(19): siRNA sense strand
uggagaaggaagaacugaa

SEQ ID NO: 2530030 - RNA, 19 nt, Homo sapiens
  misc_RNA (1)...(19): siRNA sense strand
auacugggaaggaagauaa

SEQ ID NO: 2530031 - RNA, 19 nt, Homo sapiens
  misc_RNA (1)...(19): siRNA sense strand
aaaagaugccaaagagcaa

SEQ ID NO: 2530032 - RNA, 19 nt, Homo sapiens
  misc_RNA (1)...(19): siRNA sense strand
cgacacuucugcugcauuu

SEQ ID NO: 2530033 - RNA, 19 nt, Homo sapiens
  misc_RNA (1)...(19): siRNA sense strand
cuauuauggcacaggcgaa

SEQ ID NO: 2530034 - RNA, 19 nt, Homo sapiens
  misc_RNA (1)...(19): siRNA sense strand
aauugguggaacugaauaa

SEQ ID NO: 2530035 - RNA, 19 nt, Homo sapiens
  misc_RNA (1)...(19): siRNA sense strand
gagaagaaggaacggaaac

SEQ ID NO: 2530036 - RNA, 19 nt, Homo sapiens
  misc_RNA (1)...(19): siRNA sense strand
uuaaaggagaucaggcgua

SEQ ID NO: 2530037 - RNA, 19 nt, Homo sapiens
  misc_RNA (1)...(19): siRNA sense strand
gcauuugaaucuacagcca

SEQ ID NO: 2530038 - RNA, 19 nt, Homo sapiens
  misc_RNA (1)...(19): siRNA sense strand
acuccauagcacugaaauu

SEQ ID NO: 2530039 - RNA, 19 nt, Homo sapiens
  misc_RNA (1)...(19): siRNA sense strand
aagaaagcugagucacaaa

SEQ ID NO: 2530040 - RNA, 19 nt, Homo sapiens
  misc_RNA (1)...(19): siRNA sense strand
cuacagaagcaaaugugau

SEQ ID NO: 2530041 - RNA, 19 nt, Homo sapiens
  misc_RNA (1)...(19): siRNA sense strand
cucccgaugucuauggaaa

SEQ ID NO: 2530042 - RNA, 19 nt, Homo sapiens
  misc_RNA (1)...(19): siRNA sense strand
uuuaaguggaguggagaaa

SEQ ID NO: 2530043 - RNA, 19 nt, Homo sapiens
  misc_RNA (1)...(19): siRNA sense strand
ugugcaucaaagugggaaa

SEQ ID NO: 2530044 - RNA, 19 nt, Homo sapiens
  misc_RNA (1)...(19): siRNA sense strand
cggagaaagcagccagagu

SEQ ID NO: 2530045 - RNA, 19 nt, Homo sapiens
  misc_RNA (1)...(19): siRNA sense strand
ccuucaagccccugagcaa

SEQ ID NO: 2530046 - RNA, 19 nt, Homo sapiens
  misc_RNA (1)...(19): siRNA sense strand
gcauggagauggagcggau

SEQ ID NO: 2530047 - RNA, 19 nt, Homo sapiens
  misc_RNA (1)...(19): siRNA sense strand
cagcacagguggugggacu

SEQ ID NO: 2530048 - RNA, 19 nt, Homo sapiens
  misc_RNA (1)...(19): siRNA sense strand
ccaaagagcagcuggagca

SEQ ID NO: 2530049 - RNA, 19 nt, Homo sapiens
  misc_RNA (1)...(19): siRNA sense strand
gcugugugcuggagcggaa

SEQ ID NO: 2530050 - RNA, 19 nt, Homo sapiens
  misc_RNA (1)...(19): siRNA sense strand
agggugaggcggagcgauu

SEQ ID NO: 2530051 - RNA, 19 nt, Homo sapiens
  misc_RNA (1)...(19): siRNA sense strand
gaucagagcucaaugccca

SEQ ID NO: 2530052 - RNA, 19 nt, Homo sapiens
  misc_RNA (1)...(19): siRNA sense strand
agggcaaggugaagaggga

SEQ ID NO: 2530053 - RNA, 19 nt, Homo sapiens
  misc_RNA (1)...(19): siRNA sense strand
caacacggcugcagaggca

SEQ ID NO: 2530054 - RNA, 19 nt, Homo sapiens
  misc_RNA (1)...(19): siRNA sense strand
gcggagagacugagcccuu

SEQ ID NO: 2530055 - RNA, 19 nt, Homo sapiens
  misc_RNA (1)...(19): siRNA sense strand
aggaguacuacgaagagaa

SEQ ID NO: 2530056 - RNA, 19 nt, Homo sapiens
  misc_RNA (1)...(19): siRNA sense strand
gggccagggaucagcaaca

SEQ ID NO: 2530057 - RNA, 19 nt, Homo sapiens
  misc_RNA (1)...(19): siRNA sense strand
acagugaggaggacgacaa

SEQ ID NO: 2530058 - RNA, 19 nt, Homo sapiens
  misc_RNA (1)...(19): siRNA sense strand
cgaagagaaacggcggaaa

SEQ ID NO: 2530059 - RNA, 19 nt, Homo sapiens
  misc_RNA (1)...(19): siRNA sense strand
gagaagcggucgaugggca

SEQ ID NO: 2530060 - RNA, 19 nt, Homo sapiens
  misc_RNA (1)...(19): siRNA sense strand
cagcagaaccucauggugu

SEQ ID NO: 2530061 - RNA, 19 nt, Homo sapiens
  misc_RNA (1)...(19): siRNA sense strand
ccucacagauggugcccuu

SEQ ID NO: 2530062 - RNA, 19 nt, Homo sapiens
  misc_RNA (1)...(19): siRNA sense strand
cagaagaugcugaugccuu

SEQ ID NO: 2530063 - RNA, 19 nt, Homo sapiens
  misc_RNA (1)...(19): siRNA sense strand
aggaggaguacuacgaaga

SEQ ID NO: 2530064 - RNA, 19 nt, Homo sapiens
  misc_RNA (1)...(19): siRNA sense strand
gcaacauggaacaggguac

SEQ ID NO: 2530065 - RNA, 19 nt, Homo sapiens
  misc_RNA (1)...(19): siRNA sense strand
cggacagugaggaggacga

SEQ ID NO: 2530066 - RNA, 19 nt, Homo sapiens
  misc_RNA (1)...(19): siRNA sense strand
agaaauaugaggaacccuu

SEQ ID NO: 2530067 - RNA, 19 nt, Homo sapiens
  misc_RNA (1)...(19): siRNA sense strand
gggcauggaguuuggugga

SEQ ID NO: 2530068 - RNA, 19 nt, Homo sapiens
  misc_RNA (1)...(19): siRNA sense strand
ucagcucgcucaagggcaa

SEQ ID NO: 2530069 - RNA, 19 nt, Homo sapiens
  misc_RNA (1)...(19): siRNA sense strand
caaccagauacaacgggua

SEQ ID NO: 2530070 - RNA, 19 nt, Homo sapiens
  misc_RNA (1)...(19): siRNA sense strand
agaacaugauggcggagca

SEQ ID NO: 2530071 - RNA, 19 nt, Homo sapiens
  misc_RNA (1)...(19): siRNA sense strand
cgcucaagggcaaggugaa

SEQ ID NO: 2530072 - RNA, 19 nt, Homo sapiens
  misc_RNA (1)...(19): siRNA sense strand
cuccagacgcugcgagaca

SEQ ID NO: 2530073 - RNA, 19 nt, Homo sapiens
  misc_RNA (1)...(19): siRNA sense strand
gcagauggcugguggugag

SEQ ID NO: 2530074 - RNA, 19 nt, Homo sapiens
  misc_RNA (1)...(19): siRNA sense strand
aagccaaugcacccagaaa

SEQ ID NO: 2530075 - RNA, 19 nt, Homo sapiens
  misc_RNA (1)...(19): siRNA sense strand
gcuugaaguuucugggaag

SEQ ID NO: 2530076 - RNA, 19 nt, Homo sapiens
  misc_RNA (1)...(19): siRNA sense strand
cagcaaaacuguugggcuc

SEQ ID NO: 2530077 - RNA, 19 nt, Homo sapiens
  misc_RNA (1)...(19): siRNA sense strand
ugaugaugcguuuggaaaa

SEQ ID NO: 2530078 - RNA, 19 nt, Homo sapiens
  misc_RNA (1)...(19): siRNA sense strand
uugaugaugcguuuggaaa

SEQ ID NO: 2530079 - RNA, 19 nt, Homo sapiens
  misc_RNA (1)...(19): siRNA sense strand
cagaaagugggaagaugau

SEQ ID NO: 2530080 - RNA, 19 nt, Homo sapiens
  misc_RNA (1)...(19): siRNA sense strand
gaaacgacuuccugggcaa

SEQ ID NO: 2530081 - RNA, 19 nt, Homo sapiens
  misc_RNA (1)...(19): siRNA sense strand
cgggagaccucgaucguga

SEQ ID NO: 2530082 - RNA, 19 nt, Homo sapiens
  misc_RNA (1)...(19): siRNA sense strand
gcaucgugaagguggacaa

SEQ ID NO: 2530083 - RNA, 19 nt, Homo sapiens
  misc_RNA (1)...(19): siRNA sense strand
agaaguacguggagcugga

SEQ ID NO: 2530084 - RNA, 19 nt, Homo sapiens
  misc_RNA (1)...(19): siRNA sense strand
uggaaugagacguuugaau

SEQ ID NO: 2530085 - RNA, 19 nt, Homo sapiens
  misc_RNA (1)...(19): siRNA sense strand
gagcuuaaccaguggcugu

SEQ ID NO: 2530086 - RNA, 19 nt, Homo sapiens
  misc_RNA (1)...(19): siRNA sense strand
caguccagaacgugggcaa

SEQ ID NO: 2530087 - RNA, 19 nt, Homo sapiens
  misc_RNA (1)...(19): siRNA sense strand
agguguuugaggagaagaa

SEQ ID NO: 2530088 - RNA, 19 nt, Homo sapiens
  misc_RNA (1)...(19): siRNA sense strand
cguuugaauuugagcugca

SEQ ID NO: 2530089 - RNA, 19 nt, Homo sapiens
  misc_RNA (1)...(19): siRNA sense strand
aggagaaggacgagcugga

SEQ ID NO: 2530090 - RNA, 19 nt, Homo sapiens
  misc_RNA (1)...(19): siRNA sense strand
gcgaagaugcccagcucca

SEQ ID NO: 2530091 - RNA, 19 nt, Homo sapiens
  misc_RNA (1)...(19): siRNA sense strand
cugcggaaggugagcauca

SEQ ID NO: 2530092 - RNA, 19 nt, Homo sapiens
  misc_RNA (1)...(19): siRNA sense strand
uggccaaggcaguccagaa

SEQ ID NO: 2530093 - RNA, 19 nt, Homo sapiens
  misc_RNA (1)...(19): siRNA sense strand
agugcaagugugugaauga

SEQ ID NO: 2530094 - RNA, 19 nt, Homo sapiens
  misc_RNA (1)...(19): siRNA sense strand
agaagaaguacguggagcu

SEQ ID NO: 2530095 - RNA, 19 nt, Homo sapiens
  misc_RNA (1)...(19): siRNA sense strand
acaucgaggagaaggacga

SEQ ID NO: 2530096 - RNA, 19 nt, Homo sapiens
  misc_RNA (1)...(19): siRNA sense strand
gcggaaaagguugaggaaa

SEQ ID NO: 2530097 - RNA, 19 nt, Homo sapiens
  misc_RNA (1)...(19): siRNA sense strand
uggcacaaacucaggaaau

SEQ ID NO: 2530098 - RNA, 19 nt, Homo sapiens
  misc_RNA (1)...(19): siRNA sense strand
aggaaaagacauagaugau

SEQ ID NO: 2530099 - RNA, 19 nt, Homo sapiens
  misc_RNA (1)...(19): siRNA sense strand
aagaagacuaacagcugaa

SEQ ID NO: 2530100 - RNA, 19 nt, Homo sapiens
  misc_RNA (1)...(19): siRNA sense strand
ggaugaugugucaagaaga

SEQ ID NO: 2530101 - RNA, 19 nt, Homo sapiens
  misc_RNA (1)...(19): siRNA sense strand
cguaaagcgacucaaccaa

SEQ ID NO: 2530102 - RNA, 19 nt, Homo sapiens
  misc_RNA (1)...(19): siRNA sense strand
caagaagacuaacagcuga

SEQ ID NO: 2530103 - RNA, 19 nt, Homo sapiens
  misc_RNA (1)...(19): siRNA sense strand
uaacaugaucguaaagcga

SEQ ID NO: 2530104 - RNA, 19 nt, Homo sapiens
  misc_RNA (1)...(19): siRNA sense strand
cgaccggagcacugacaau

SEQ ID NO: 2530105 - RNA, 19 nt, Homo sapiens
  misc_RNA (1)...(19): siRNA sense strand
agguuuaucaugagaagga

SEQ ID NO: 2530106 - RNA, 19 nt, Homo sapiens
  misc_RNA (1)...(19): siRNA sense strand
aggaaugaguggaagaaaa

SEQ ID NO: 2530107 - RNA, 19 nt, Homo sapiens
  misc_RNA (1)...(19): siRNA sense strand
gcaucaaggaagaggcuca

SEQ ID NO: 2530108 - RNA, 19 nt, Homo sapiens
  misc_RNA (1)...(19): siRNA sense strand
cagugucgcugcugggcaa

SEQ ID NO: 2530109 - RNA, 19 nt, Homo sapiens
  misc_RNA (1)...(19): siRNA sense strand
caggaaugaguggaagaaa

SEQ ID NO: 2530110 - RNA, 19 nt, Homo sapiens
  misc_RNA (1)...(19): siRNA sense strand
gugaugacccugagcggca

SEQ ID NO: 2530111 - RNA, 19 nt, Homo sapiens
  misc_RNA (1)...(19): siRNA sense strand
ucuccgacgucaagggcga

SEQ ID NO: 2530112 - RNA, 19 nt, Homo sapiens
  misc_RNA (1)...(19): siRNA sense strand
gcuacguggagcugaagaa

SEQ ID NO: 2530113 - RNA, 19 nt, Homo sapiens
  misc_RNA (1)...(19): siRNA sense strand
gcuccgaugugcagcccaa

SEQ ID NO: 2530114 - RNA, 19 nt, Homo sapiens
  misc_RNA (1)...(19): siRNA sense strand
ucuaagugguaaagccuga

SEQ ID NO: 2530115 - RNA, 19 nt, Homo sapiens
  misc_RNA (1)...(19): siRNA sense strand
cagggacuucauugagaaa

SEQ ID NO: 2530116 - RNA, 19 nt, Homo sapiens
  misc_RNA (1)...(19): siRNA sense strand
ccgcuacgcauuuggccaa

SEQ ID NO: 2530117 - RNA, 19 nt, Homo sapiens
  misc_RNA (1)...(19): siRNA sense strand
auacauugaaccaagcaaa

SEQ ID NO: 2530118 - RNA, 19 nt, Homo sapiens
  misc_RNA (1)...(19): siRNA sense strand
uuguuaaugacaugggcaa

SEQ ID NO: 2530119 - RNA, 19 nt, Homo sapiens
  misc_RNA (1)...(19): siRNA sense strand
uggaggaaggcgugggaaa

SEQ ID NO: 2530120 - RNA, 19 nt, Homo sapiens
  misc_RNA (1)...(19): siRNA sense strand
caggacgccaucagggaaa

SEQ ID NO: 2530121 - RNA, 19 nt, Homo sapiens
  misc_RNA (1)...(19): siRNA sense strand
augcagagcuggaggaagg

SEQ ID NO: 2530122 - RNA, 19 nt, Homo sapiens
  misc_RNA (1)...(19): siRNA sense strand
gcuuugucugggagaagaa

SEQ ID NO: 2530123 - RNA, 19 nt, Homo sapiens
  misc_RNA (1)...(19): siRNA sense strand
acucagagguggaaacggu

SEQ ID NO: 2530124 - RNA, 19 nt, Homo sapiens
  misc_RNA (1)...(19): siRNA sense strand
ccauuugugaagaggguuu

SEQ ID NO: 2530125 - RNA, 19 nt, Homo sapiens
  misc_RNA (1)...(19): siRNA sense strand
uugggaaagcauauggaaa

SEQ ID NO: 2530126 - RNA, 19 nt, Homo sapiens
  misc_RNA (1)...(19): siRNA sense strand
ugacagagaugauggaccu

SEQ ID NO: 2530127 - RNA, 19 nt, Homo sapiens
  misc_RNA (1)...(19): siRNA sense strand
aaauauacauugagcaccu

SEQ ID NO: 2530128 - RNA, 19 nt, Homo sapiens
  misc_RNA (1)...(19): siRNA sense strand
acaaauauacauugagcac

SEQ ID NO: 2530129 - RNA, 19 nt, Homo sapiens
  misc_RNA (1)...(19): siRNA sense strand
gggagucaugggugcacua

SEQ ID NO: 2530130 - RNA, 19 nt, Homo sapiens
  misc_RNA (1)...(19): siRNA sense strand
aggaagaaagggagaaaca

SEQ ID NO: 2530131 - RNA, 19 nt, Homo sapiens
  misc_RNA (1)...(19): siRNA sense strand
gugggaaagauguggaauu

SEQ ID NO: 2530132 - RNA, 19 nt, Homo sapiens
  misc_RNA (1)...(19): siRNA sense strand
ggguuaaugaagcagaaua

SEQ ID NO: 2530133 - RNA, 19 nt, Homo sapiens
  misc_RNA (1)...(19): siRNA sense strand
ugaagagauacgagaauau

SEQ ID NO: 2530134 - RNA, 19 nt, Homo sapiens
  misc_RNA (1)...(19): siRNA sense strand
acuuauaaccaaauggcaa

SEQ ID NO: 2530135 - RNA, 19 nt, Homo sapiens
  misc_RNA (1)...(19): siRNA sense strand
cugaagagccuuugggagu

SEQ ID NO: 2530136 - RNA, 19 nt, Homo sapiens
  misc_RNA (1)...(19): siRNA sense strand
cuuauaaccaaauggcaaa

SEQ ID NO: 2530137 - RNA, 19 nt, Homo sapiens
  misc_RNA (1)...(19): siRNA sense strand
ggguaggaagaaagggaga

SEQ ID NO: 2530138 - RNA, 19 nt, Homo sapiens
  misc_RNA (1)...(19): siRNA sense strand
gcugaagagauacgagaau

SEQ ID NO: 2530139 - RNA, 19 nt, Homo sapiens
  misc_RNA (1)...(19): siRNA sense strand
guaggaagaaagggagaaa

SEQ ID NO: 2530140 - RNA, 19 nt, Homo sapiens
  misc_RNA (1)...(19): siRNA sense strand
agggagaaacagacaggaa

SEQ ID NO: 2530141 - RNA, 19 nt, Homo sapiens
  misc_RNA (1)...(19): siRNA sense strand
cuaucaagcauaaagacaa

SEQ ID NO: 2530142 - RNA, 19 nt, Homo sapiens
  misc_RNA (1)...(19): siRNA sense strand
ucgucuucuucgugggaaa

SEQ ID NO: 2530143 - RNA, 19 nt, Homo sapiens
  misc_RNA (1)...(19): siRNA sense strand
gcacaagagaacagcaacu

SEQ ID NO: 2530144 - RNA, 19 nt, Homo sapiens
  misc_RNA (1)...(19): siRNA sense strand
uguccaaacuugagcggga

SEQ ID NO: 2530145 - RNA, 19 nt, Homo sapiens
  misc_RNA (1)...(19): siRNA sense strand
cuuugggaguucugguaaa

SEQ ID NO: 2530146 - RNA, 19 nt, Homo sapiens
  misc_RNA (1)...(19): siRNA sense strand
ccacacaggugcagccuca

SEQ ID NO: 2530147 - RNA, 19 nt, Homo sapiens
  misc_RNA (1)...(19): siRNA sense strand
cugaucuccuccagggaaa

SEQ ID NO: 2530148 - RNA, 19 nt, Homo sapiens
  misc_RNA (1)...(19): siRNA sense strand
aggucaauucauagaagaa

SEQ ID NO: 2530149 - RNA, 19 nt, Homo sapiens
  misc_RNA (1)...(19): siRNA sense strand
gcagacuagaugagacaau

SEQ ID NO: 2530150 - RNA, 19 nt, Homo sapiens
  misc_RNA (1)...(19): siRNA sense strand
gaggaggagcugagagaac

SEQ ID NO: 2530151 - RNA, 19 nt, Homo sapiens
  misc_RNA (1)...(19): siRNA sense strand
aggcacaagagaacagcaa

SEQ ID NO: 2530152 - RNA, 19 nt, Homo sapiens
  misc_RNA (1)...(19): siRNA sense strand
uguuagaguuugacagaac

SEQ ID NO: 2530153 - RNA, 19 nt, Homo sapiens
  misc_RNA (1)...(19): siRNA sense strand
uggccaaggcacaagagaa

SEQ ID NO: 2530154 - RNA, 19 nt, Homo sapiens
  misc_RNA (1)...(19): siRNA sense strand
gcuaucaagcauaaagaca

SEQ ID NO: 2530155 - RNA, 19 nt, Homo sapiens
  misc_RNA (1)...(19): siRNA sense strand
gcacccagcaguugcggaa

SEQ ID NO: 2530156 - RNA, 19 nt, Homo sapiens
  misc_RNA (1)...(19): siRNA sense strand
uagcagacuagaugagaca

SEQ ID NO: 2530157 - RNA, 19 nt, Homo sapiens
  misc_RNA (1)...(19): siRNA sense strand
acacgacugcagagguuaa

SEQ ID NO: 2530158 - RNA, 19 nt, Homo sapiens
  misc_RNA (1)...(19): siRNA sense strand
ggccaaggcacaagagaac

SEQ ID NO: 2530159 - RNA, 19 nt, Homo sapiens
  misc_RNA (1)...(19): siRNA sense strand
acucaugaggaacaagaua

SEQ ID NO: 2530160 - RNA, 19 nt, Homo sapiens
  misc_RNA (1)...(19): siRNA sense strand
gguaggaagaaagggagaa

SEQ ID NO: 2530161 - RNA, 19 nt, Homo sapiens
  misc_RNA (1)...(19): siRNA sense strand
ucucagaacuccaggcuac

SEQ ID NO: 2530162 - RNA, 19 nt, Homo sapiens
  misc_RNA (1)...(19): siRNA sense strand
agaaagggagaaacagaca

SEQ ID NO: 2530163 - RNA, 19 nt, Homo sapiens
  misc_RNA (1)...(19): siRNA sense strand
agaagcaauuuaaggagca

SEQ ID NO: 2530164 - RNA, 19 nt, Homo sapiens
  misc_RNA (1)...(19): siRNA sense strand
ucaugaggaacaagauauu

SEQ ID NO: 2530165 - RNA, 19 nt, Homo sapiens
  misc_RNA (1)...(19): siRNA sense strand
gaucaagaauuucaggaag

SEQ ID NO: 2530166 - RNA, 19 nt, Homo sapiens
  misc_RNA (1)...(19): siRNA sense strand
cagcaguugcggaagacuu

SEQ ID NO: 2530167 - RNA, 19 nt, Homo sapiens
  misc_RNA (1)...(19): siRNA sense strand
ccaauggaaccuugaacca

SEQ ID NO: 2530168 - RNA, 19 nt, Homo sapiens
  misc_RNA (1)...(19): siRNA sense strand
gugcagccucacagaagaa

SEQ ID NO: 2530169 - RNA, 19 nt, Homo sapiens
  misc_RNA (1)...(19): siRNA sense strand
ggccagaagcacaagcuca

SEQ ID NO: 2530170 - RNA, 19 nt, Homo sapiens
  misc_RNA (1)...(19): siRNA sense strand
aagaauuucaggaaggcuu

SEQ ID NO: 2530171 - RNA, 19 nt, Homo sapiens
  misc_RNA (1)...(19): siRNA sense strand
ggaggagcugagagaacuu

SEQ ID NO: 2530172 - RNA, 19 nt, Homo sapiens
  misc_RNA (1)...(19): siRNA sense strand
acagcaacuccguaaagaa

SEQ ID NO: 2530173 - RNA, 19 nt, Homo sapiens
  misc_RNA (1)...(19): siRNA sense strand
ggagaauucuggaaaggug

SEQ ID NO: 2530174 - RNA, 19 nt, Homo sapiens
  misc_RNA (1)...(19): siRNA sense strand
ucaaagaacugcagggcca

SEQ ID NO: 2530175 - RNA, 19 nt, Homo sapiens
  misc_RNA (1)...(19): siRNA sense strand
gugacugauaagagagaau

SEQ ID NO: 2530176 - RNA, 19 nt, Homo sapiens
  misc_RNA (1)...(19): siRNA sense strand
aggaaaagaccuagaggau

SEQ ID NO: 2530177 - RNA, 19 nt, Homo sapiens
  misc_RNA (1)...(19): siRNA sense strand
gaguguuugcagugguuaa

SEQ ID NO: 2530178 - RNA, 19 nt, Homo sapiens
  misc_RNA (1)...(19): siRNA sense strand
aaaugggagcagacaguaa

SEQ ID NO: 2530179 - RNA, 19 nt, Homo sapiens
  misc_RNA (1)...(19): siRNA sense strand
ggauaaaacagaugccaga

SEQ ID NO: 2530180 - RNA, 19 nt, Homo sapiens
  misc_RNA (1)...(19): siRNA sense strand
ugauaagagagaauggaga

SEQ ID NO: 2530181 - RNA, 19 nt, Homo sapiens
  misc_RNA (1)...(19): siRNA sense strand
cagugaagcuguuagagga

SEQ ID NO: 2530182 - RNA, 19 nt, Homo sapiens
  misc_RNA (1)...(19): siRNA sense strand
ggguuguggcauagaagau

SEQ ID NO: 2530183 - RNA, 19 nt, Homo sapiens
  misc_RNA (1)...(19): siRNA sense strand
cuugcaacuucuuguuaaa

SEQ ID NO: 2530184 - RNA, 19 nt, Homo sapiens
  misc_RNA (1)...(19): siRNA sense strand
uggaagauggaguaaucaa

SEQ ID NO: 2530185 - RNA, 19 nt, Homo sapiens
  misc_RNA (1)...(19): siRNA sense strand
acgagagguuggacagcau

SEQ ID NO: 2530186 - RNA, 19 nt, Homo sapiens
  misc_RNA (1)...(19): siRNA sense strand
guaugaaggaaaagaccua

SEQ ID NO: 2530187 - RNA, 19 nt, Homo sapiens
  misc_RNA (1)...(19): siRNA sense strand
aagacaugguguugaggga

SEQ ID NO: 2530188 - RNA, 19 nt, Homo sapiens
  misc_RNA (1)...(19): siRNA sense strand
gugauguggcaaagagguu

SEQ ID NO: 2530189 - RNA, 19 nt, Homo sapiens
  misc_RNA (1)...(19): siRNA sense strand
uguuagaggagcuacagaa

SEQ ID NO: 2530190 - RNA, 19 nt, Homo sapiens
  misc_RNA (1)...(19): siRNA sense strand
guaugaacgacuacguaga

SEQ ID NO: 2530191 - RNA, 19 nt, Homo sapiens
  misc_RNA (1)...(19): siRNA sense strand
ggcugaguaugaaggaaaa

SEQ ID NO: 2530192 - RNA, 19 nt, Homo sapiens
  misc_RNA (1)...(19): siRNA sense strand
gagcaaaucugacagccca

SEQ ID NO: 2530193 - RNA, 19 nt, Homo sapiens
  misc_RNA (1)...(19): siRNA sense strand
uggauuuggcccagagguu

SEQ ID NO: 2530194 - RNA, 19 nt, Homo sapiens
  misc_RNA (1)...(19): siRNA sense strand
gacccagugauguggcaaa

SEQ ID NO: 2530195 - RNA, 19 nt, Homo sapiens
  misc_RNA (1)...(19): siRNA sense strand
ugucugagugacuuggaua

SEQ ID NO: 2530196 - RNA, 19 nt, Homo sapiens
  misc_RNA (1)...(19): siRNA sense strand
ugaacgacuacguagagaa

SEQ ID NO: 2530197 - RNA, 19 nt, Homo sapiens
  misc_RNA (1)...(19): siRNA sense strand
cuuauaaugaauggagcaa

SEQ ID NO: 2530198 - RNA, 19 nt, Homo sapiens
  misc_RNA (1)...(19): siRNA sense strand
gauuuaugucugagugacu

SEQ ID NO: 2530199 - RNA, 19 nt, Homo sapiens
  misc_RNA (1)...(19): siRNA sense strand
gcuaugaaccucugggcau

SEQ ID NO: 2530200 - RNA, 19 nt, Homo sapiens
  misc_RNA (1)...(19): siRNA sense strand
gggacgaagacaaacccua

SEQ ID NO: 2530201 - RNA, 19 nt, Homo sapiens
  misc_RNA (1)...(19): siRNA sense strand
gcuuuguacagguggcaca

SEQ ID NO: 2530202 - RNA, 19 nt, Homo sapiens
  misc_RNA (1)...(19): siRNA sense strand
cagugaagaaggacccauu

SEQ ID NO: 2530203 - RNA, 19 nt, Homo sapiens
  misc_RNA (1)...(19): siRNA sense strand
ccaaauucucauuagguca

SEQ ID NO: 2530204 - RNA, 19 nt, Homo sapiens
  misc_RNA (1)...(19): siRNA sense strand
acuuugaguuuauggcaca

SEQ ID NO: 2530205 - RNA, 19 nt, Homo sapiens
  misc_RNA (1)...(19): siRNA sense strand
gcaagaaaccucaagcaca

SEQ ID NO: 2530206 - RNA, 19 nt, Homo sapiens
  misc_RNA (1)...(19): siRNA sense strand
aagauguuacagagggaua

SEQ ID NO: 2530207 - RNA, 19 nt, Homo sapiens
  misc_RNA (1)...(19): siRNA sense strand
cuguaaagggccagaucau

SEQ ID NO: 2530208 - RNA, 19 nt, Homo sapiens
  misc_RNA (1)...(19): siRNA sense strand
ccucaagcacagagcugaa

SEQ ID NO: 2530209 - RNA, 19 nt, Homo sapiens
  misc_RNA (1)...(19): siRNA sense strand
gugcagugguguugggaag

SEQ ID NO: 2530210 - RNA, 19 nt, Homo sapiens
  misc_RNA (1)...(19): siRNA sense strand
acaacaagcagaaagccaa

SEQ ID NO: 2530211 - RNA, 19 nt, Homo sapiens
  misc_RNA (1)...(19): siRNA sense strand
ccacuauguugacaggcua

SEQ ID NO: 2530212 - RNA, 19 nt, Homo sapiens
  misc_RNA (1)...(19): siRNA sense strand
ugaagauguuacagaggga

SEQ ID NO: 2530213 - RNA, 19 nt, Homo sapiens
  misc_RNA (1)...(19): siRNA sense strand
ugguaaauguuuugguuga

SEQ ID NO: 2530214 - RNA, 19 nt, Homo sapiens
  misc_RNA (1)...(19): siRNA sense strand
uuacagagggauaagccua

SEQ ID NO: 2530215 - RNA, 19 nt, Homo sapiens
  misc_RNA (1)...(19): siRNA sense strand
caagaaaccucaagcacag

SEQ ID NO: 2530216 - RNA, 19 nt, Homo sapiens
  misc_RNA (1)...(19): siRNA sense strand
gggccagaucaucaaacaa

SEQ ID NO: 2530217 - RNA, 19 nt, Homo sapiens
  misc_RNA (1)...(19): siRNA sense strand
uuggaaacaacaagcagaa

SEQ ID NO: 2530218 - RNA, 19 nt, Homo sapiens
  misc_RNA (1)...(19): siRNA sense strand
aguucuacaaggugucaua

SEQ ID NO: 2530219 - RNA, 19 nt, Homo sapiens
  misc_RNA (1)...(19): siRNA sense strand
cugaaugugcagugguguu

SEQ ID NO: 2530220 - RNA, 19 nt, Homo sapiens
  misc_RNA (1)...(19): siRNA sense strand
ggaaguaacagcuagcagu

SEQ ID NO: 2530221 - RNA, 19 nt, Homo sapiens
  misc_RNA (1)...(19): siRNA sense strand
cuguaauuggaaacaacaa

SEQ ID NO: 2530222 - RNA, 19 nt, Homo sapiens
  misc_RNA (1)...(19): siRNA sense strand
auguugagcuacagagaau

SEQ ID NO: 2530223 - RNA, 19 nt, Homo sapiens
  misc_RNA (1)...(19): siRNA sense strand
gcaagaaaccucaagcaca

SEQ ID NO: 2530224 - RNA, 19 nt, Homo sapiens
  misc_RNA (1)...(19): siRNA sense strand
ggagagaguugaaggagcu

SEQ ID NO: 2530225 - RNA, 19 nt, Homo sapiens
  misc_RNA (1)...(19): siRNA sense strand
aagauguuacagagggaua

SEQ ID NO: 2530226 - RNA, 19 nt, Homo sapiens
  misc_RNA (1)...(19): siRNA sense strand
cuguaaagggccagaucau

SEQ ID NO: 2530227 - RNA, 19 nt, Homo sapiens
  misc_RNA (1)...(19): siRNA sense strand
aguugaaggagcugagaca

SEQ ID NO: 2530228 - RNA, 19 nt, Homo sapiens
  misc_RNA (1)...(19): siRNA sense strand
ccucaagcacagagcugaa

SEQ ID NO: 2530229 - RNA, 19 nt, Homo sapiens
  misc_RNA (1)...(19): siRNA sense strand
gugcagugguguugggaag

SEQ ID NO: 2530230 - RNA, 19 nt, Homo sapiens
  misc_RNA (1)...(19): siRNA sense strand
cgaaugugcaguaaggaga

SEQ ID NO: 2530231 - RNA, 19 nt, Homo sapiens
  misc_RNA (1)...(19): siRNA sense strand
acaacaagcagaaagccaa

SEQ ID NO: 2530232 - RNA, 19 nt, Homo sapiens
  misc_RNA (1)...(19): siRNA sense strand
ccacuauguugacaggcua

SEQ ID NO: 2530233 - RNA, 19 nt, Homo sapiens
  misc_RNA (1)...(19): siRNA sense strand
ugaagauguuacagaggga

SEQ ID NO: 2530234 - RNA, 19 nt, Homo sapiens
  misc_RNA (1)...(19): siRNA sense strand
ugguaaauguuuugguuga

SEQ ID NO: 2530235 - RNA, 19 nt, Homo sapiens
  misc_RNA (1)...(19): siRNA sense strand
gauuacuagaggagagagu

SEQ ID NO: 2530236 - RNA, 19 nt, Homo sapiens
  misc_RNA (1)...(19): siRNA sense strand
uuacagagggauaagccua

SEQ ID NO: 2530237 - RNA, 19 nt, Homo sapiens
  misc_RNA (1)...(19): siRNA sense strand
caagaaaccucaagcacag

SEQ ID NO: 2530238 - RNA, 19 nt, Homo sapiens
  misc_RNA (1)...(19): siRNA sense strand
agagauuacuagaggagag

SEQ ID NO: 2530239 - RNA, 19 nt, Homo sapiens
  misc_RNA (1)...(19): siRNA sense strand
gggccagaucaucaaacaa

SEQ ID NO: 2530240 - RNA, 19 nt, Homo sapiens
  misc_RNA (1)...(19): siRNA sense strand
uuggaaacaacaagcagaa

SEQ ID NO: 2530241 - RNA, 19 nt, Homo sapiens
  misc_RNA (1)...(19): siRNA sense strand
aguucuacaaggugucaua

SEQ ID NO: 2530242 - RNA, 19 nt, Homo sapiens
  misc_RNA (1)...(19): siRNA sense strand
cugaaugugcagugguguu

SEQ ID NO: 2530243 - RNA, 19 nt, Homo sapiens
  misc_RNA (1)...(19): siRNA sense strand
ggaaguaacagcuagcagu

SEQ ID NO: 2530244 - RNA, 19 nt, Homo sapiens
  misc_RNA (1)...(19): siRNA sense strand
cuguaauuggaaacaacaa

SEQ ID NO: 2530245 - RNA, 19 nt, Homo sapiens
  misc_RNA (1)...(19): siRNA sense strand
ucuuggagcaaaugaugaa

SEQ ID NO: 2530246 - RNA, 19 nt, Homo sapiens
  misc_RNA (1)...(19): siRNA sense strand
cacaaaugguguuagguga

SEQ ID NO: 2530247 - RNA, 19 nt, Homo sapiens
  misc_RNA (1)...(19): siRNA sense strand
gaccaaaguccuugaccca

SEQ ID NO: 2530248 - RNA, 19 nt, Homo sapiens
  misc_RNA (1)...(19): siRNA sense strand
acgagaaagugcagaacag

SEQ ID NO: 2530249 - RNA, 19 nt, Homo sapiens
  misc_RNA (1)...(19): siRNA sense strand
gccacgagaaagugcagaa

SEQ ID NO: 2530250 - RNA, 19 nt, Homo sapiens
  misc_RNA (1)...(19): siRNA sense strand
ccgagaagucagagugaaa

SEQ ID NO: 2530251 - RNA, 19 nt, Homo sapiens
  misc_RNA (1)...(19): siRNA sense strand
gggcaguaagagagaagaa

SEQ ID NO: 2530252 - RNA, 19 nt, Homo sapiens
  misc_RNA (1)...(19): siRNA sense strand
ccgaaaauuugguggauga

SEQ ID NO: 2530253 - RNA, 19 nt, Homo sapiens
  misc_RNA (1)...(19): siRNA sense strand
cggauauauggaaggaauu

SEQ ID NO: 2530254 - RNA, 19 nt, Homo sapiens
  misc_RNA (1)...(19): siRNA sense strand
gcaguaagagagaagaaaa

SEQ ID NO: 2530255 - RNA, 19 nt, Homo sapiens
  misc_RNA (1)...(19): siRNA sense strand
caguaagagagaagaaaau

SEQ ID NO: 2530256 - RNA, 19 nt, Homo sapiens
  misc_RNA (1)...(19): siRNA sense strand
gugugaaaguagaugucau

SEQ ID NO: 2530257 - RNA, 19 nt, Homo sapiens
  misc_RNA (1)...(19): siRNA sense strand
gcaccaagaaaguacgaca

SEQ ID NO: 2530258 - RNA, 19 nt, Homo sapiens
  misc_RNA (1)...(19): siRNA sense strand
gauucagccuggaagaaaa

SEQ ID NO: 2530259 - RNA, 19 nt, Homo sapiens
  misc_RNA (1)...(19): siRNA sense strand
aggaagauggugugaaagu

SEQ ID NO: 2530260 - RNA, 19 nt, Homo sapiens
  misc_RNA (1)...(19): siRNA sense strand
uuacgagagacgaccgaaa

SEQ ID NO: 2530261 - RNA, 19 nt, Homo sapiens
  misc_RNA (1)...(19): siRNA sense strand
cuuccuaguauuugaccaa

SEQ ID NO: 2530262 - RNA, 19 nt, Homo sapiens
  misc_RNA (1)...(19): siRNA sense strand
cgacauugcuguugugcag

SEQ ID NO: 2530263 - RNA, 19 nt, Homo sapiens
  misc_RNA (1)...(19): siRNA sense strand
agaagaaaauccaaagcau

SEQ ID NO: 2530264 - RNA, 19 nt, Homo sapiens
  misc_RNA (1)...(19): siRNA sense strand
aacaaagggcaguaagaga

SEQ ID NO: 2530265 - RNA, 19 nt, Homo sapiens
  misc_RNA (1)...(19): siRNA sense strand
aaccacagguguauggcaa

SEQ ID NO: 2530266 - RNA, 19 nt, Homo sapiens
  misc_RNA (1)...(19): siRNA sense strand
guuaauuguccaagcaagu

SEQ ID NO: 2530267 - RNA, 19 nt, Homo sapiens
  misc_RNA (1)...(19): siRNA sense strand
caucacaggauuuggagca

SEQ ID NO: 2530268 - RNA, 19 nt, Homo sapiens
  misc_RNA (1)...(19): siRNA sense strand
cggacaaagcaacacauau

SEQ ID NO: 2530269 - RNA, 19 nt, Homo sapiens
  misc_RNA (1)...(19): siRNA sense strand
ugugaaaguagaugucauu

SEQ ID NO: 2530270 - RNA, 19 nt, Homo sapiens
  misc_RNA (1)...(19): siRNA sense strand
auuuaagagccuugccaau

SEQ ID NO: 2530271 - RNA, 19 nt, Homo sapiens
  misc_RNA (1)...(19): siRNA sense strand
gagaagucagagugaaaau

SEQ ID NO: 2530272 - RNA, 19 nt, Homo sapiens
  misc_RNA (1)...(19): siRNA sense strand
agucacaagggaucugaaa

SEQ ID NO: 2530273 - RNA, 19 nt, Homo sapiens
  misc_RNA (1)...(19): siRNA sense strand
ggcaguaagagagaagaaa

SEQ ID NO: 2530274 - RNA, 19 nt, Homo sapiens
  misc_RNA (1)...(19): siRNA sense strand
ucaauaacaauuucggaca

SEQ ID NO: 2530275 - RNA, 19 nt, Homo sapiens
  misc_RNA (1)...(19): siRNA sense strand
auaaggaauuuaagagccu

SEQ ID NO: 2530276 - RNA, 19 nt, Homo sapiens
  misc_RNA (1)...(19): siRNA sense strand
ggauauaagcggagaggug

SEQ ID NO: 2530277 - RNA, 19 nt, Homo sapiens
  misc_RNA (1)...(19): siRNA sense strand
augacaaacgagauguaaa

SEQ ID NO: 2530278 - RNA, 19 nt, Homo sapiens
  misc_RNA (1)...(19): siRNA sense strand
agauuuaagagguccaaga

SEQ ID NO: 2530279 - RNA, 19 nt, Homo sapiens
  misc_RNA (1)...(19): siRNA sense strand
auuuaagagguccaagaaa

SEQ ID NO: 2530280 - RNA, 19 nt, Homo sapiens
  misc_RNA (1)...(19): siRNA sense strand
aagacauacuggagagaaa

SEQ ID NO: 2530281 - RNA, 19 nt, Homo sapiens
  misc_RNA (1)...(19): siRNA sense strand
augcaaagaauguggcaaa

SEQ ID NO: 2530282 - RNA, 19 nt, Homo sapiens
  misc_RNA (1)...(19): siRNA sense strand
uauucauacuggagagaaa

SEQ ID NO: 2530283 - RNA, 19 nt, Homo sapiens
  misc_RNA (1)...(19): siRNA sense strand
uauucauacuggagagaaa

SEQ ID NO: 2530284 - RNA, 19 nt, Homo sapiens
  misc_RNA (1)...(19): siRNA sense strand
auguaaagaauguggcaaa

SEQ ID NO: 2530285 - RNA, 19 nt, Homo sapiens
  misc_RNA (1)...(19): siRNA sense strand
auguaaagaauguggcaaa

SEQ ID NO: 2530286 - RNA, 19 nt, Homo sapiens
  misc_RNA (1)...(19): siRNA sense strand
auguaaagaauguggcaaa

SEQ ID NO: 2530287 - RNA, 19 nt, Homo sapiens
  misc_RNA (1)...(19): siRNA sense strand
gugcgaagaauguggcaaa

SEQ ID NO: 2530288 - RNA, 19 nt, Homo sapiens
  misc_RNA (1)...(19): siRNA sense strand
aauucauacuggcgagaaa

SEQ ID NO: 2530289 - RNA, 19 nt, Homo sapiens
  misc_RNA (1)...(19): siRNA sense strand
ccugaaugaacauaagaaa

SEQ ID NO: 2530290 - RNA, 19 nt, Homo sapiens
  misc_RNA (1)...(19): siRNA sense strand
augugauguuggagaacua

SEQ ID NO: 2530291 - RNA, 19 nt, Homo sapiens
  misc_RNA (1)...(19): siRNA sense strand
augugaagaauguggcaaa

SEQ ID NO: 2530292 - RNA, 19 nt, Homo sapiens
  misc_RNA (1)...(19): siRNA sense strand
augugaagaauguggcaaa

SEQ ID NO: 2530293 - RNA, 19 nt, Homo sapiens
  misc_RNA (1)...(19): siRNA sense strand
augugaagaauguggcaaa

SEQ ID NO: 2530294 - RNA, 19 nt, Homo sapiens
  misc_RNA (1)...(19): siRNA sense strand
augugaagaauguggcaaa

SEQ ID NO: 2530295 - RNA, 19 nt, Homo sapiens
  misc_RNA (1)...(19): siRNA sense strand
augugaagaauguggcaaa

SEQ ID NO: 2530296 - RNA, 19 nt, Homo sapiens
  misc_RNA (1)...(19): siRNA sense strand
augugaagaauguggcaaa

SEQ ID NO: 2530297 - RNA, 19 nt, Homo sapiens
  misc_RNA (1)...(19): siRNA sense strand
augugaagaauguggcaaa

SEQ ID NO: 2530298 - RNA, 19 nt, Homo sapiens
  misc_RNA (1)...(19): siRNA sense strand
augugaagaauguggcaaa

SEQ ID NO: 2530299 - RNA, 19 nt, Homo sapiens
  misc_RNA (1)...(19): siRNA sense strand
augugaagaauguggcaaa

SEQ ID NO: 2530300 - RNA, 19 nt, Homo sapiens
  misc_RNA (1)...(19): siRNA sense strand
acugaaaagauacgagaaa

SEQ ID NO: 2530301 - RNA, 19 nt, Homo sapiens
  misc_RNA (1)...(19): siRNA sense strand
ucaacuacccagagcaaaa

SEQ ID NO: 2530302 - RNA, 19 nt, Homo sapiens
  misc_RNA (1)...(19): siRNA sense strand
cccuuuaaauguacagaau

SEQ ID NO: 2530303 - RNA, 19 nt, Homo sapiens
  misc_RNA (1)...(19): siRNA sense strand
ccugaaugaacauaagaau

SEQ ID NO: 2530304 - RNA, 19 nt, Homo sapiens
  misc_RNA (1)...(19): siRNA sense strand
ccugaaugaacauaagaau

SEQ ID NO: 2530305 - RNA, 19 nt, Homo sapiens
  misc_RNA (1)...(19): siRNA sense strand
acaugagacagcagccaaa

SEQ ID NO: 2530306 - RNA, 19 nt, Homo sapiens
  misc_RNA (1)...(19): siRNA sense strand
cugaaugaacacaagaaaa

SEQ ID NO: 2530307 - RNA, 19 nt, Homo sapiens
  misc_RNA (1)...(19): siRNA sense strand
aaauauucauacuggcgaa

SEQ ID NO: 2530308 - RNA, 19 nt, Homo sapiens
  misc_RNA (1)...(19): siRNA sense strand
ugucaacuacccagagcaa

SEQ ID NO: 2530309 - RNA, 19 nt, Homo sapiens
  misc_RNA (1)...(19): siRNA sense strand
cccuacaaaugcaaagaau

SEQ ID NO: 2530310 - RNA, 19 nt, Homo sapiens
  misc_RNA (1)...(19): siRNA sense strand
ccugcaauuugaagauaca

SEQ ID NO: 2530311 - RNA, 19 nt, Homo sapiens
  misc_RNA (1)...(19): siRNA sense strand
ugcagaaaggaguuaauaa

SEQ ID NO: 2530312 - RNA, 19 nt, Homo sapiens
  misc_RNA (1)...(19): siRNA sense strand
acugaaugaacacaagaaa

SEQ ID NO: 2530313 - RNA, 19 nt, Homo sapiens
  misc_RNA (1)...(19): siRNA sense strand
caacacugaaugaacacaa

SEQ ID NO: 2530314 - RNA, 19 nt, Homo sapiens
  misc_RNA (1)...(19): siRNA sense strand
gccuuuagaugguccacaa

SEQ ID NO: 2530315 - RNA, 19 nt, Homo sapiens
  misc_RNA (1)...(19): siRNA sense strand
aggaguuaauaauggaguu

SEQ ID NO: 2530316 - RNA, 19 nt, Homo sapiens
  misc_RNA (1)...(19): siRNA sense strand
ggaguuaauaauggaguuu

SEQ ID NO: 2530317 - RNA, 19 nt, Homo sapiens
  misc_RNA (1)...(19): siRNA sense strand
agauaagacauacuggaga

SEQ ID NO: 2530318 - RNA, 19 nt, Homo sapiens
  misc_RNA (1)...(19): siRNA sense strand
gguccacagcccugaauga

SEQ ID NO: 2530319 - RNA, 19 nt, Homo sapiens
  misc_RNA (1)...(19): siRNA sense strand
gagaagaacuggaagacac

SEQ ID NO: 2530320 - RNA, 19 nt, Homo sapiens
  misc_RNA (1)...(19): siRNA sense strand
guggagaagaacuggaaga

SEQ ID NO: 2530321 - RNA, 19 nt, Homo sapiens
  misc_RNA (1)...(19): siRNA sense strand
agacauucccagaggacga

SEQ ID NO: 2530322 - RNA, 19 nt, Homo sapiens
  misc_RNA (1)...(19): siRNA sense strand
ugugaaggaacaagcuaaa

SEQ ID NO: 2530323 - RNA, 19 nt, Homo sapiens
  misc_RNA (1)...(19): siRNA sense strand
cugugaaggaacaagcuaa

SEQ ID NO: 2530324 - RNA, 19 nt, Homo sapiens
  misc_RNA (1)...(19): siRNA sense strand
aagaacuggaagacacaaa

SEQ ID NO: 2530325 - RNA, 19 nt, Homo sapiens
  misc_RNA (1)...(19): siRNA sense strand
uggagagaaauuuggauga

SEQ ID NO: 2530326 - RNA, 19 nt, Homo sapiens
  misc_RNA (1)...(19): siRNA sense strand
guggaguggaagaggagga

SEQ ID NO: 2530327 - RNA, 19 nt, Homo sapiens
  misc_RNA (1)...(19): siRNA sense strand
agaagaacuggaagacaca

SEQ ID NO: 2530328 - RNA, 19 nt, Homo sapiens
  misc_RNA (1)...(19): siRNA sense strand
gggacuucugugagacauu

SEQ ID NO: 2530329 - RNA, 19 nt, Homo sapiens
  misc_RNA (1)...(19): siRNA sense strand
ggagacggcagcaaggaga

SEQ ID NO: 2530330 - RNA, 19 nt, Homo sapiens
  misc_RNA (1)...(19): siRNA sense strand
guucagucguuuggggaaa

SEQ ID NO: 2530331 - RNA, 19 nt, Homo sapiens
  misc_RNA (1)...(19): siRNA sense strand
cagaguguggaguggaaga

SEQ ID NO: 2530332 - RNA, 19 nt, Homo sapiens
  misc_RNA (1)...(19): siRNA sense strand
aggcagacuguguggugau

SEQ ID NO: 2530333 - RNA, 19 nt, Homo sapiens
  misc_RNA (1)...(19): siRNA sense strand
ccuaaauguaccugggaau

SEQ ID NO: 2530334 - RNA, 19 nt, Homo sapiens
  misc_RNA (1)...(19): siRNA sense strand
ggauuggaguggcgggaga

SEQ ID NO: 2530335 - RNA, 19 nt, Homo sapiens
  misc_RNA (1)...(19): siRNA sense strand
ucauagacuacaaggagaa

SEQ ID NO: 2530336 - RNA, 19 nt, Homo sapiens
  misc_RNA (1)...(19): siRNA sense strand
ggcucaaggugaaggacau

SEQ ID NO: 2530337 - RNA, 19 nt, Homo sapiens
  misc_RNA (1)...(19): siRNA sense strand
cauccaagcucgugaggcu

SEQ ID NO: 2530338 - RNA, 19 nt, Homo sapiens
  misc_RNA (1)...(19): siRNA sense strand
ccaagaacucugaggcgga

SEQ ID NO: 2530339 - RNA, 19 nt, Homo sapiens
  misc_RNA (1)...(19): siRNA sense strand
aggacaaccccaaguguua

SEQ ID NO: 2530340 - RNA, 19 nt, Homo sapiens
  misc_RNA (1)...(19): siRNA sense strand
caauaucagaucagagagu

SEQ ID NO: 2530341 - RNA, 19 nt, Homo sapiens
  misc_RNA (1)...(19): siRNA sense strand
ccaagggccagaagcggaa

SEQ ID NO: 2530342 - RNA, 19 nt, Homo sapiens
  misc_RNA (1)...(19): siRNA sense strand
aucauaagaaggagcacua

SEQ ID NO: 2530343 - RNA, 19 nt, Homo sapiens
  misc_RNA (1)...(19): siRNA sense strand
acucugaggcggauggcau

SEQ ID NO: 2530344 - RNA, 19 nt, Homo sapiens
  misc_RNA (1)...(19): siRNA sense strand
cucaagucacaaagcaaua

SEQ ID NO: 2530345 - RNA, 19 nt, Homo sapiens
  misc_RNA (1)...(19): siRNA sense strand
auuaagaucccuucggaca

SEQ ID NO: 2530346 - RNA, 19 nt, Homo sapiens
  misc_RNA (1)...(19): siRNA sense strand
ugaagaagaccaagggcau

SEQ ID NO: 2530347 - RNA, 19 nt, Homo sapiens
  misc_RNA (1)...(19): siRNA sense strand
caacaugggcacagggauc

SEQ ID NO: 2530348 - RNA, 19 nt, Homo sapiens
  misc_RNA (1)...(19): siRNA sense strand
cguucuacucagagggcau

SEQ ID NO: 2530349 - RNA, 19 nt, Homo sapiens
  misc_RNA (1)...(19): siRNA sense strand
uggaaaacaagaugaagaa

SEQ ID NO: 2530350 - RNA, 19 nt, Homo sapiens
  misc_RNA (1)...(19): siRNA sense strand
ugacaugccuccuggccau

SEQ ID NO: 2530351 - RNA, 19 nt, Homo sapiens
  misc_RNA (1)...(19): siRNA sense strand
aguacauuacccaggaaau

SEQ ID NO: 2530352 - RNA, 19 nt, Homo sapiens
  misc_RNA (1)...(19): siRNA sense strand
cuggaaaacaagaugaaga

SEQ ID NO: 2530353 - RNA, 19 nt, Homo sapiens
  misc_RNA (1)...(19): siRNA sense strand
agguaguggaagcuguuaa

SEQ ID NO: 2530354 - RNA, 19 nt, Homo sapiens
  misc_RNA (1)...(19): siRNA sense strand
cuucagagucggcaggcuu
